United States Patent Application Publication US 2021/0199660 A1 - sequence listing, part 41

SEQ ID NO: 583531 - DNA, 120 bp, Artificial Sequence
  ENSG00000172292_43 (sequence is synthesized)
gttcgctttaaagagcttttcaaagagagctttatagacacccacaattgtccccaatctcttcatgatgttgcattaatagttgtttttgtccctttcttggaaatgttaatgccaaag

SEQ ID NO: 583532 - DNA, 120 bp, Artificial Sequence
  ENSG00000172292_44 (sequence is synthesized)
ttgcctgaacattgggcggttttcttaatttgaagtataaaaattataaagagtaattccaaaggtattaaaagattgtttaacagtatgtgtggtgatgtcattatctccagagaggct

SEQ ID NO: 583533 - DNA, 120 bp, Artificial Sequence
  ENSG00000172292_45 (sequence is synthesized)
tcaagaaatcctttggaaataaaaagttaaatgtttacatttcatgtggtatttcaggtcttcaggttctgattagcttacttttttcctttgtctttggctgatttctgctttgtagat

SEQ ID NO: 583534 - DNA, 120 bp, Artificial Sequence
  ENSG00000172292_46 (sequence is synthesized)
aaataataatagccctgagatgtttctaacatttaaataagaaaaaaatcaaatcgaagtcagcctgctggaaaagtgatcacatggcagttgcagtaacttgtatggaaagagaaaatg

SEQ ID NO: 583535 - DNA, 120 bp, Artificial Sequence
  ENSG00000172292_47 (sequence is synthesized)
caatgagcccagttactgcacttgccactaccatgctgtccatggaaggaataatcagcagttcagttgtcacaagccgcccttgaagaaaacgcagcaaaatattttaaaatgaagata

SEQ ID NO: 583536 - DNA, 120 bp, Artificial Sequence
  ENSG00000172292_48 (sequence is synthesized)
ttgcagtccccagagccagtgaaggtttcttttggtaaaatgaaattgtgccattgtcaaagtaccccgtagtgatgagcactgactggttcactggccacattttagttcttcataata

SEQ ID NO: 583537 - DNA, 120 bp, Artificial Sequence
  ENSG00000172292_49 (sequence is synthesized)
ataggccacaaaagggctctgtggtttgcctccatgtgcactggcccctccccacccctagggggcactcagtagctgctgagaaggcctgtccacgaggctgttggaacccctccaata

SEQ ID NO: 583538 - DNA, 120 bp, Artificial Sequence
  ENSG00000172292_50 (sequence is synthesized)
aatacttagaggtagtgtatctgatgcttgttttcgtggagaaaattgtattggagaacttaaaacatcacgaatatttttaataggatccgcagacacccaaaggagaagcttggtctt

SEQ ID NO: 583539 - DNA, 120 bp, Artificial Sequence
  ENSG00000172292_51 (sequence is synthesized)
ttccaggtatttccaacttgagttcaacccaaagcctttgaaaggaatgcattaccacatgaccacatgctgagaccccatggggtctaacacgggacctaagaaagtctctgcagccag

SEQ ID NO: 583540 - DNA, 120 bp, Artificial Sequence
  ENSG00000172292_52 (sequence is synthesized)
atagtacatggtgtctccacaaaactaggcattctggagattgcccagaaagggatgtgaggggaccgttaagatctgtcttgcttatctcatgcactcacattccttcagcctcctgga

SEQ ID NO: 583541 - DNA, 120 bp, Artificial Sequence
  ENSG00000172292_53 (sequence is synthesized)
gttcctgataaaaggaagccagggtgtggacattttttagctattgatttcccaatagcttgtggatcagttgtacacccacacttccttctctgcctaattccgtttttctggaaaaag

SEQ ID NO: 583542 - DNA, 120 bp, Artificial Sequence
  ENSG00000172292_54 (sequence is synthesized)
tagtatgcccatgtatgtgtgtttttcttaacacaggtccatgaaagtttggcttcctggtttgatgtctgttgcgtggcctggaaaccagggagcagcaactattgagatggtttctgt

SEQ ID NO: 583543 - DNA, 120 bp, Artificial Sequence
  ENSG00000172292_55 (sequence is synthesized)
gttcagtgaaaaattctatttcattgagacaattttttctttatccacagtaattttttgacactgtcatcatgaaactacccttaggaaaataagattacctgcaaaaaaaaaaaagaa

SEQ ID NO: 583544 - DNA, 120 bp, Artificial Sequence
  ENSG00000172292_56 (sequence is synthesized)
atgagttatggaataggaacagttatgtgatgattctgaaactttaacttagagcttcattactttaagaatggaaaacaacctctgagtttgatttcccaaagtttcataaagccccta

SEQ ID NO: 583545 - DNA, 120 bp, Artificial Sequence
  ENSG00000172292_57 (sequence is synthesized)
agctcatgattttcatcaactctttgcccacatagtcatttacctccacagccgtttgttgtcatagaaggggtggtggtgtttggatttgatttttttcaacttgcagtgagaaatagg

SEQ ID NO: 583546 - DNA, 120 bp, Artificial Sequence
  ENSG00000172292_58 (sequence is synthesized)
ataggtgacaaaaccttacttgttttcttaagacaattcagtgcttgagcatctctgtcagaaatggaatgaaatactgttagccaattagaattattttatgtattgttattgtgtttt

SEQ ID NO: 583547 - DNA, 120 bp, Artificial Sequence
  ENSG00000172292_59 (sequence is synthesized)
gctgatttttatatgaaaatataattattcattcttgatctctggaagcaatcattattatgaggatcattttactttggaaacactttcataataaagataagtattaagagtgcagtg

SEQ ID NO: 583548 - DNA, 120 bp, Artificial Sequence
  ENSG00000172296_0 (sequence is synthesized)
agtccccagaaggagccagcatggacaatctcctttacagtttcggaagcaggtttgttgccatggagttcacattttgacgggagttgagaagtataaaggtaaccatttgttttagtt

SEQ ID NO: 583549 - DNA, 120 bp, Artificial Sequence
  ENSG00000172296_1 (sequence is synthesized)
tcaacgatctgacaaaaagataggctgttgctcttcttctggaaaagcctgattggtaagattcctttaagggctcagccccaaagagctttatcccatcccctcgcagactgaaaacta

SEQ ID NO: 583550 - DNA, 120 bp, Artificial Sequence
  ENSG00000172296_2 (sequence is synthesized)
aagcctgcagagacctctgaaggaaaacctgtcccgggctctgtcacttcacacccatggctaaccctggaggtggtgctgtttgcaacgggaaacttcacaatcacaagaaacagagca

SEQ ID NO: 583551 - DNA, 120 bp, Artificial Sequence
  ENSG00000172296_3 (sequence is synthesized)
atggctcacaaagcagaaactgcacaaagaatggaatagtgaaggaagcccagcaaaatgggaagccacatttttatgataagctcattgttgaatcgtttgaggaagcaccccttcatg

SEQ ID NO: 583552 - DNA, 120 bp, Artificial Sequence
  ENSG00000172296_4 (sequence is synthesized)
ttatggttttcacttacatgggatatggaattggaaccctgtttggctatctcagagactttttaagaaactggggaatagaaaaatgcaacgcagctgtggaaagaaaagaacaaaaag

SEQ ID NO: 583553 - DNA, 120 bp, Artificial Sequence
  ENSG00000172296_5 (sequence is synthesized)
attttgtgccactgtatcaagactttgaaaatttttatacaagaaacctttacatgcgaatcagagacaactggaaccggcccatctgcagtgccccagggcctctgtttgatttgatgg

SEQ ID NO: 583554 - DNA, 120 bp, Artificial Sequence
  ENSG00000172296_6 (sequence is synthesized)
agagggtatcagacgactataactggacgtttaggtttactggaagagtcatcaaagatgtcatcaacatgggctcctataacttccttggtcttgcagccaagtatgatgagtctatga

SEQ ID NO: 583555 - DNA, 120 bp, Artificial Sequence
  ENSG00000172296_7 (sequence is synthesized)
ggacaataaaggatgttttagaggtgtatggcacaggcgtggccagcaccaggcatgaaatgggcaccttggataagcacaaggagttggaggaccttgtggctaagttcctgaatgtgg

SEQ ID NO: 583556 - DNA, 120 bp, Artificial Sequence
  ENSG00000172296_8 (sequence is synthesized)
aagcagctatggtctttgggatgggattcgcaactaactcaatgaatatcccagcattagttggaaagggatgcctcattttaagtgatgagttaaaccacacatcgcttgtgcttgggg

SEQ ID NO: 583557 - DNA, 120 bp, Artificial Sequence
  ENSG00000172296_9 (sequence is synthesized)
cccgactctcaggtgcaaccataagaatcttcaaacacaacaacacacaaagcctagagaagctcctgagagatgctgtcatctatggccagcctcgaacccgcagagcttggaaaaaga

SEQ ID NO: 583558 - DNA, 120 bp, Artificial Sequence
  ENSG00000172296_10 (sequence is synthesized)
ttctcatcctggtggagggtgtctacagcatggaaggttccatcgtgcatctgccccagatcatagctctaaagaagaaatacaaggcttacctctacatagatgaagctcacagtattg

SEQ ID NO: 583559 - DNA, 120 bp, Artificial Sequence
  ENSG00000172296_11 (sequence is synthesized)
gggccgtgggcccaaccggccggggtgtcacggagttctttggactagaccctcatgaagttgatgtgctcatgggcacattcaccaaaagttttggagcttcaggaggttacatagctg

SEQ ID NO: 583560 - DNA, 120 bp, Artificial Sequence
  ENSG00000172296_12 (sequence is synthesized)
gaaggaaggacctcgtggattatttacgggttcactcgcatagtgctgtttatgcttcatccatgagcccaccgatagcagagcaaatcatcagatcactaaaacttatcatgggactgg

SEQ ID NO: 583561 - DNA, 120 bp, Artificial Sequence
  ENSG00000172296_13 (sequence is synthesized)
atgggaccactcaagggctgcagagagtacagcaacttgcgaaaaacacaagatacttcagacaaagactgcaggaaatgggattcattatctatggcaatgagaatgcttctgttgttc

SEQ ID NO: 583562 - DNA, 120 bp, Artificial Sequence
  ENSG00000172296_14 (sequence is synthesized)
ctctgcttctttatatgcctggtaaagtagcggcttttgcaaggcatatgctagagaaaaaaattggagtggtggtcgtgggatttccagccactcccctcgcagaagctcgggctcggt

SEQ ID NO: 583563 - DNA, 120 bp, Artificial Sequence
  ENSG00000172296_15 (sequence is synthesized)
tttgtgtttcagcggcacatacccgggagatgttagacacggttttagaagctcttgatgaaatgggtgatctcttgcaactgaaatattcccggcacaagaagtcagcacgtcctgagc

SEQ ID NO: 583564 - DNA, 120 bp, Artificial Sequence
  ENSG00000172296_16 (sequence is synthesized)
tctatgatgagacgagctttgaactcgaagattaagtttcctggtcctgaatgacacataaagactttgcgagaaagacctccctccttgcctcacaaggaatataaatggatttctccc

SEQ ID NO: 583565 - DNA, 120 bp, Artificial Sequence
  ENSG00000172296_17 (sequence is synthesized)
ccttcctcaggacaattttggttcccagaccagcttgattgaactgagggagacgttgttgtttttaatgtctccagcttggactgcagagacaaaaacatgattccagatttaagtctc

SEQ ID NO: 583566 - DNA, 120 bp, Artificial Sequence
  ENSG00000172296_18 (sequence is synthesized)
tcttcttccaagtattctactagaaatacacacacacacacacacacacttctgagaatatttttaatggcaataagcctgtgttttagctgctactgtgcagaccctttcagggattcc

SEQ ID NO: 583567 - DNA, 120 bp, Artificial Sequence
  ENSG00000172296_19 (sequence is synthesized)
aaccaaatgcaaatgagagaatttaaaatttttattcagtaagttcactatgtgtttacttattccatctgcagatgtaagtgagtgtggtggacagtagccaccttccttgttccactc

SEQ ID NO: 583568 - DNA, 120 bp, Artificial Sequence
  ENSG00000172296_20 (sequence is synthesized)
ataaaagcatcagctagatctcatctgtatcatgggaagttccaggcaggagggtaaagaaatgttgtttctaccatttgtcacatttggacgtttttcacagacaagtgtcaaaagaca

SEQ ID NO: 583569 - DNA, 120 bp, Artificial Sequence
  ENSG00000172296_21 (sequence is synthesized)
tagttaatgtttcgagggggaaagcagaactgatcaactgcgactagagacgtctttgaaggaaattttccttttcctcttgctggtctcctacagttttacagctgagcttttgaggtt

SEQ ID NO: 583570 - DNA, 120 bp, Artificial Sequence
  ENSG00000172296_22 (sequence is synthesized)
tggaaaattcaagatgtttgtttcataagaaaaggggcagaaagcaagcacaagacacttttaggtctagactaaaatggtagttacaacaatttgaaccttgttggtgcagtgcacggt

SEQ ID NO: 583571 - DNA, 120 bp, Artificial Sequence
  ENSG00000172296_23 (sequence is synthesized)
gaatgcttaccctgcacagcctctattaccttaaggaattagttgtcattttcctattgaattttgagtaaatggtgaaattcagtgtcctttagaatcgactcccaagactatatttga

SEQ ID NO: 583572 - DNA, 120 bp, Artificial Sequence
  ENSG00000172296_24 (sequence is synthesized)
agaatgcattgattcaagaaggacatttaaaagcaaattctgactttttcaagaccaacacacttgtttaggcctattaaattgtactatcacttgttacatgccctctgaattgggaga

SEQ ID NO: 583573 - DNA, 120 bp, Artificial Sequence
  ENSG00000172296_25 (sequence is synthesized)
aacatgaacacaaacctctatggaaaagtagcctcttgttaatctgatctagtttgtatggaaaaagcccatggagaaccttatctttaacaagctcccagagggtgcccagatttggaa

SEQ ID NO: 583574 - DNA, 120 bp, Artificial Sequence
  ENSG00000172296_26 (sequence is synthesized)
attctagagagcagtggtgaccttttagcaaagcttctgtaacagttcgaatgagttgcagaacattccactccatcaaatgacactgtaaacaaatcacttcaagagaggcttggtttt

SEQ ID NO: 583575 - DNA, 120 bp, Artificial Sequence
  ENSG00000172296_27 (sequence is synthesized)
gtgtggcacagatggacccaagctttcatgctgtgcactgagatagaaactccacccgcagcgcctgcgatggatggagcagtgtgccctgatgctcaaagcgtattaaaggaaaaaaag

SEQ ID NO: 583576 - DNA, 120 bp, Artificial Sequence
  ENSG00000172296_28 (sequence is synthesized)
tgatcagcatggaaagtttttatggggaaattataactccaagtgggtgcattggtttaaaaatggatcacaatgatagagttcttcatgaatgtttacaagttgtaaggaataccgtta

SEQ ID NO: 583577 - DNA, 120 bp, Artificial Sequence
  ENSG00000172296_29 (sequence is synthesized)
gtgaaagaggaaaagaagtgggttctgaaaatgcagtttcccatccaatgattttgataacaaaattccaacttttctcaatgaaactgatgcagtattatttgtgcaaataaaatgtgt

SEQ ID NO: 583578 - DNA, 120 bp, Artificial Sequence
  ENSG00000172296_30 (sequence is synthesized)
cataaatatgcaaagaaagggagacatactgttcttatcttgaatatgtgcatttaaatgaattgtccaaaatgcataaatgccttgcgttctataaaggaaacaggaggtcaaaaagac

SEQ ID NO: 583579 - DNA, 120 bp, Artificial Sequence
  ENSG00000172296_31 (sequence is synthesized)
agcgagatatctagtccttccacaaggtatggaaagcaataaacatcttcctttctttctggatctgtctgtgatgtttacacacaccttcacatctacacttcaagttttaagccccta

SEQ ID NO: 583580 - DNA, 120 bp, Artificial Sequence
  ENSG00000172296_32 (sequence is synthesized)
gacatgtgtcttcatgagcaggaatgtccactattattactttcatggaggatattgggtctaattcattgtgggaaactacttacctacccagcatggaaggcagggaggaagttagtc

SEQ ID NO: 583581 - DNA, 120 bp, Artificial Sequence
  ENSG00000172296_33 (sequence is synthesized)
tcttttcatcaagattcaagagtacaggggcaatttattacactgcaatgtacaaaacaaaaggacctgtttctgttagagagtccatgttgaatatacaggtatgagaacaactgttga

SEQ ID NO: 583582 - DNA, 120 bp, Artificial Sequence
  ENSG00000172296_34 (sequence is synthesized)
tatacaggtataatccaagtagaatgcttccacagtgcattagaaggtgcccaagctccacagggccaataatattagagtatatgtcatatagaataaggttaattaggagggtgattg

SEQ ID NO: 583583 - DNA, 120 bp, Artificial Sequence
  ENSG00000172296_35 (sequence is synthesized)
tgaataatgagatttttaatttttttaagaaaaagctctcaaatgctaggctaataagttcatgattttaattcatgattttaattcatgattaaaattatttgattattgagtcttgat

SEQ ID NO: 583584 - DNA, 120 bp, Artificial Sequence
  ENSG00000172296_36 (sequence is synthesized)
aattatatcatcaaccattaccctctacatcaccgccccgaccttagctctaattatatcagagccaaaaatgtgtctttggttagatctgttggaaaagagaattttctataatgttat

SEQ ID NO: 583585 - DNA, 120 bp, Artificial Sequence
  ENSG00000172296_37 (sequence is synthesized)
gcgcactcagcccttctgttcacatttacacacatgcacacacacatacacatatgcatttttcctttacggagtaagcaactatgaaaatctggttggttgagaaataaatggaagatg

SEQ ID NO: 583586 - DNA, 120 bp, Artificial Sequence
  ENSG00000172296_38 (sequence is synthesized)
ttcttgaaaatgacctcaggaaagcagaagataaaggttccagatgatatttgtaaggaggctatctctgtataataaggaaatggcatagacttattcctaatctcattatgaaacgat

SEQ ID NO: 583587 - DNA, 120 bp, Artificial Sequence
  ENSG00000172296_39 (sequence is synthesized)
ggtgtcatggacgtttaaccatattgcctttcagcatgctttgattttacagagacgacaggctttggaatttactaggaagctggctaaaatccatacccctaggccctacaccagacc

SEQ ID NO: 583588 - DNA, 120 bp, Artificial Sequence
  ENSG00000172296_40 (sequence is synthesized)
tttactgaaacataatagttgtagtgcccaggaatctacatttttaaccagccttcctgcgtgattctaatctatgccaaaatttaagaacattattcaaactctaatttgataaaccaa

SEQ ID NO: 583589 - DNA, 120 bp, Artificial Sequence
  ENSG00000172296_41 (sequence is synthesized)
ttgactctaatagcaggaaccttgttctgattctcttgttcataattaagtgtatatatactggtaaaattaatttattccacagtcaaccttctcttctcattgggacattttgttccc

SEQ ID NO: 583590 - DNA, 120 bp, Artificial Sequence
  ENSG00000172296_42 (sequence is synthesized)
attttccaagtaacttctctttctacaaaaattgatccaatattgaagaaccatctgcgattcatttgggtaaaattatgccttcttcagttttctgtatcattccctataagatgccca

SEQ ID NO: 583591 - DNA, 65 bp, Artificial Sequence
  ENSG00000172296_43 (sequence is synthesized)
ccttcttcagttttctgtatcattccctataagatgcccatttgctttgaatgtggtacttgttg

SEQ ID NO: 583592 - DNA, 90 bp, Artificial Sequence
  ENSG00000172296_44 (sequence is synthesized)
agtttacaggcatgtgccaccaagcatggctaattttctatttttagtagagacaaggtttttccctgttggtcaggctggtctcgaact

SEQ ID NO: 583593 - DNA, 120 bp, Artificial Sequence
  ENSG00000172296_45 (sequence is synthesized)
gttttcttttcctgctctttaaaaaacaaccttcaacctctgattatttattccaacaacagctcttcagtagggtaaaagtcttaacagttcttcaaacgaacaatattcttttgtatt

SEQ ID NO: 583594 - DNA, 120 bp, Artificial Sequence
  ENSG00000172296_46 (sequence is synthesized)
tttcttcagagatagcaaatgttataaatggcctactctgatttaaaaacctaagttccgatgatgatgaaacattaactcttaaatatacattttgatttatagcaataataacaattg

SEQ ID NO: 583595 - DNA, 120 bp, Artificial Sequence
  ENSG00000172296_47 (sequence is synthesized)
taacaacagcaattaagaacagcatctggtgaattcttggcaatgtttcctggtctcaaaacagtaagaacaatttgaagtctgttctttagaatgccctactcagctgcataatgttta

SEQ ID NO: 583596 - DNA, 120 bp, Artificial Sequence
  ENSG00000172296_48 (sequence is synthesized)
gaaaattaaagagtctgtattttaaatatttttaggtaattattgcgggacattgtcttatggtgtcctgatgtacgtggggtgtgcatgtgtgtgtgtgtgtgtgtgcatgtgtctttg

SEQ ID NO: 583597 - DNA, 120 bp, Artificial Sequence
  ENSG00000172296_49 (sequence is synthesized)
tgtgtgtgagaaggacagagagaaatgtatgtttcactgaaacatttgaaacgaccaatttcactttattgtgcctgtaaaatgttagttttaaaataaataaaaataatatgaaaataa

SEQ ID NO: 583598 - DNA, 120 bp, Artificial Sequence
  ENSG00000172296_50 (sequence is synthesized)
cgatagcagagcaaatcatcagatcactaaaacttatcatgggactggatgggaccactcaagccaccgagcctcaacccatccattgcagcagatctcaaaagagtgagctattccgct

SEQ ID NO: 583599 - DNA, 120 bp, Artificial Sequence
  ENSG00000172296_51 (sequence is synthesized)
ctgcagcctgtcccccgcctgtcctctgcctccttgctccatggatcctgctccctctaaagccactcctgtaagcacactcccctgcttctctgccagattaaacttgatctctctgca

SEQ ID NO: 583600 - DNA, 120 bp, Artificial Sequence
  ENSG00000172296_52 (sequence is synthesized)
acacggtgatttgctgtgtcatgaagatataacttcaaatgcattctgcaaccttatctttttcttccacaagactacatataagtcactacattttaaaataaaaccttttaagggtaa

SEQ ID NO: 583601 - DNA, 120 bp, Artificial Sequence
  ENSG00000172296_53 (sequence is synthesized)
gcgcacctccctggatctttgtcaatgcctactcctctctaaagtgttctcagaagtggtgatgcaggtgcagatcctagaaagcatgaggtgctcaggaactattcagggcaaatttca

SEQ ID NO: 583602 - DNA, 120 bp, Artificial Sequence
  ENSG00000172296_54 (sequence is synthesized)
ttcatctccacctcctaaaccccattacccatgggcttatggacctgtttttacaaacatctcatgggcaactactatttgccacataccaaactaaggcttttcccataccttgtaata

SEQ ID NO: 583603 - DNA, 120 bp, Artificial Sequence
  ENSG00000172296_55 (sequence is synthesized)
tttaatttttgtaacaaccccatgatatagatattaaactataattttgaagataaaaacatcaaaatataaaagcaagtgctcctgggtgggactgtactttggtcttctagttgtaag

SEQ ID NO: 583604 - DNA, 120 bp, Artificial Sequence
  ENSG00000172296_56 (sequence is synthesized)
ttgggtattatttatgctctatcctgaaaaggaaagtgcatttgagtgaactgggacttttttatttcatctaaatctgatttctcacctttgacactattaatattttgaaccaatttt

SEQ ID NO: 583605 - DNA, 120 bp, Artificial Sequence
  ENSG00000172296_57 (sequence is synthesized)
tttgggcattgtaagaattttaacagcatctgaaaaatatagcattaaaccactaaagctaaggaccctgatgaagtcactgcaccctccactacctctactggaacaggcactggtatc

SEQ ID NO: 583606 - DNA, 70 bp, Artificial Sequence
  ENSG00000172296_58 (sequence is synthesized)
atacatcaagggaacaccccgagggacaaaagaatctgaacaacagtcttcagccctagactttcccaaa

SEQ ID NO: 583607 - DNA, 90 bp, Artificial Sequence
  ENSG00000172296_59 (sequence is synthesized)
ggggagagtaatacatcaagggaacaccccgagggacaaaagaatctgaacaacagtcttcagccctagactttttggtaatatgacaaa

SEQ ID NO: 583608 - DNA, 120 bp, Artificial Sequence
  ENSG00000172296_60 (sequence is synthesized)
tttacctgaaaaagaattcaggaggttattaagctaatcagggagaggccagagaaaggcaaagcccaatgcaagaaaatccaaaaaatgttacaagaagtgaagagagaaatattcaag

SEQ ID NO: 583609 - DNA, 120 bp, Artificial Sequence
  ENSG00000172296_61 (sequence is synthesized)
cccaatgcaagaaaatccaaaaaatgttacaagaagtgaagagagaaatattcaaggaaatagatggcttaaagtaaaaacaatcaaaaattcaagaaactttggacacacttttagaaa

SEQ ID NO: 583610 - DNA, 120 bp, Artificial Sequence
  ENSG00000172296_62 (sequence is synthesized)
ctcagcaatagaattgaactagtagaagaaaaaaattcagagcttaaagacaaggtcttcgaattaacccaattcaacaaagacaaagaaaaaataataagaaaatatgaacaaagcctc

SEQ ID NO: 583611 - DNA, 120 bp, Artificial Sequence
  ENSG00000172296_63 (sequence is synthesized)
tagacatccaaatacaagaagcacaaagatcacccaggaaattcatcaccaaaagatcttcacctaggtacactgtcatcaggttatccaaaggaaaccattttaagagctgtgagacag

SEQ ID NO: 583612 - DNA, 79 bp, Artificial Sequence
  ENSG00000172296_64 (sequence is synthesized)
taggtacactgtcatcaggttatccaaaggaaaccattttaagagctgtgagacagaagcaccaggtaacttacaaagg

SEQ ID NO: 583613 - DNA, 120 bp, Artificial Sequence
  ENSG00000172296_65 (sequence is synthesized)
aaacaattatcagccaagaattttgtatacagcgaaactaagcatcatatttgaaggaaagatacagtcatcttcagacaaacaaatgccgagataattcacaccaagccaccactacaa

SEQ ID NO: 583614 - DNA, 120 bp, Artificial Sequence
  ENSG00000172296_66 (sequence is synthesized)
cactacaagaactgataaaaggagctctaaatattgaaacaaatcctggaaaacagagcttctttaaagcataaatcacgtgggacctattaaaaaacacacacacacaagttaaaaagc

SEQ ID NO: 583615 - DNA, 120 bp, Artificial Sequence
  ENSG00000172296_67 (sequence is synthesized)
ggtgaattcacctcatcctggcagaatgccctctgtgtgggaggggtcttgcaagctgactcagtgccacaggggccaccctggtcatggaaaatgggcaggcactcttccctgttggag

SEQ ID NO: 583616 - DNA, 80 bp, Artificial Sequence
  ENSG00000172301_0 (sequence is synthesized)
ccgcagggcatggaccttcaggccgccggggcccaggcgcagggggccgcggagccgtctcggggcccgccgctgcctag

SEQ ID NO: 583617 - DNA, 120 bp, Artificial Sequence
  ENSG00000172301_1 (sequence is synthesized)
cggggggcgccccccagcccggaggctggctttgctacagctgaccactccagtcaggagagagagactgagaaggctatggatcgactagcccgtggaacacagagcattcctaatgac

SEQ ID NO: 583618 - DNA, 120 bp, Artificial Sequence
  ENSG00000172301_2 (sequence is synthesized)
agtcctgcccggggtgagggcacccattctgaagaggaaggctttgccatggatgaggaggactctgatggagaactgaatacctgggagctgtcagaagggacaaactgtccacccaag

SEQ ID NO: 583619 - DNA, 120 bp, Artificial Sequence
  ENSG00000172301_3 (sequence is synthesized)
actgggactcggagttgaaagcagatcaagggaatccatatgatgctgacgacatccaggagagcatttctcaagagcttaaaccttgggtgtgctgtgccccacaaggagacatgatct

SEQ ID NO: 583620 - DNA, 120 bp, Artificial Sequence
  ENSG00000172301_4 (sequence is synthesized)
atgaccccagctggcaccatccgcctccactgataccctattattccaagatggtctttgaaacaggacagtttgacgatgctgaagattgagtgtggagctttctgccttgtaggtggg

SEQ ID NO: 583621 - DNA, 120 bp, Artificial Sequence
  ENSG00000172301_5 (sequence is synthesized)
cgggcctccacgtcaagatctcttttcctgtcttggaggtgaaaagtcatatctgagaaaatgtttgcagtgacccctagtctggggtacacagaccagtgttccttattgacagtgttc

SEQ ID NO: 583622 - DNA, 120 bp, Artificial Sequence
  ENSG00000172301_6 (sequence is synthesized)
aataaggccccgtcattctcgccagtctgttgttgttcttaatgggctcctccttgaaatgtgtgtgtgtttgtgtcaagaggagttgtgttctttgtaaataaaggttaaaaagagaaa

SEQ ID NO: 583623 - DNA, 80 bp, Artificial Sequence
  ENSG00000172301_7 (sequence is synthesized)
gccgcggggccggggaagcgcctctggccggcctcgggccgccccgcgacacggagcgctgtttgggctcgcgctcgagc

SEQ ID NO: 583624 - DNA, 120 bp, Artificial Sequence
  ENSG00000172301_8 (sequence is synthesized)
gtttgggctcgcgctcgagctgaaaacggccaggccgcggggccgcggggctgcggggcggggaaagccgagggcgtgggtgggcgctctgggtcagcagagacggctgtccgcccgctg

SEQ ID NO: 583625 - DNA, 120 bp, Artificial Sequence
  ENSG00000172301_9 (sequence is synthesized)
aggctatggatcgactagccagtcctctctgctgcttagtggccttctctgcccagttgaacagtaacctcctttggaagccttgcttggagcttccttaagggaagtcctgaacttttc

SEQ ID NO: 583626 - DNA, 120 bp, Artificial Sequence
  ENSG00000172301_10 (sequence is synthesized)
cgcggggccgcggggctgcggggcggggaaagccgagggcgtgggtgggcgctctgggtcagcagagacggctgtccgcccgctgggcgccgctgcggatttggctggctttgctacagc

SEQ ID NO: 583627 - DNA, 120 bp, Artificial Sequence
  ENSG00000172301_11 (sequence is synthesized)
ggggcccaggcgcagggggccgcggagccgtctcggggcccgccgctgcctagcgcgcggggggcgccccccagcccggagcccgtggaacacagagcattcctaatgacagtcctgccc

SEQ ID NO: 583628 - DNA, 120 bp, Artificial Sequence
  ENSG00000172315_0 (sequence is synthesized)
gatcggttggagctgttgcgccgagcagtcatggcggcggccagagctactacgccggccgatggcgaggagcccgccccggaggctgaggctctggccgcagcccgggagcggagcagc

SEQ ID NO: 583629 - DNA, 120 bp, Artificial Sequence
  ENSG00000172315_1 (sequence is synthesized)
cgcttcttgagcggcctggagctggtgaagcagggtgccgaggcgcgcgtgttccgtggccgcttccagggccgcgcggcggtgatcaagcaccgcttccccaagggctaccggcacccg

SEQ ID NO: 583630 - DNA, 120 bp, Artificial Sequence
  ENSG00000172315_2 (sequence is synthesized)
gcgctggaggcgcggcttggcagacggcggacggtgcaggaggcccgggcgctcctccgctgtcgccgcgctggaatatctgccccagttgtcttttttgtggactatgcttccaactgc

SEQ ID NO: 583631 - DNA, 120 bp, Artificial Sequence
  ENSG00000172315_3 (sequence is synthesized)
ttatatatggaagaaattgaaggctcagtgactgttcgagattatattcagtccactatggagactgaaaaaactccccagggtctctccaacttagccaagacaattgggcaggttttg

SEQ ID NO: 583632 - DNA, 120 bp, Artificial Sequence
  ENSG00000172315_4 (sequence is synthesized)
gctcgaatgcacgatgaagacctcattcatggtgatctcaccacctccaacatgctcctgaaaccccccctggaacagctgaacattgtgctcatagactttgggctgagtttcatttca

SEQ ID NO: 583633 - DNA, 120 bp, Artificial Sequence
  ENSG00000172315_5 (sequence is synthesized)
gcacttccagaggataagggagtagacctctatgtcctggagaaggccttcctcagtacccatcccaacactgaaactgtgtttgaagcctttctgaagagctactccacctcctccaaa

SEQ ID NO: 583634 - DNA, 120 bp, Artificial Sequence
  ENSG00000172315_6 (sequence is synthesized)
aaggccaggccagtgctaaaaaaattagatgaagtgcgcctgagaggaagaaagaggtccatggttgggtagaagaatgtgtatgacaaccacacacagtgaagctcttttttcaaagta

SEQ ID NO: 583635 - DNA, 120 bp, Artificial Sequence
  ENSG00000172315_7 (sequence is synthesized)
aatttgaagaaatgctacaagtatgagatgagatctaagtaaaggtgttaagatatttttaagtggtatgtgatcgtgtcattatcatctgcacttcactcaagagcttactatgtgtct

SEQ ID NO: 583636 - DNA, 120 bp, Artificial Sequence
  ENSG00000172315_8 (sequence is synthesized)
aagtcatgttctaggcagaattgggtatttaaagtaaattgaggacaggcttctcccagattgtgacatgtatatctcagatacatgggtgtggcattgaaccacataatgagaacatta

SEQ ID NO: 583637 - DNA, 120 bp, Artificial Sequence
  ENSG00000172315_9 (sequence is synthesized)
ttctctttttagtccttgtgagacaaggatgaagtctcagttgctgatactcgctgagcttactggccctctaacccagtgtttttttttgttgttgttgtgtacatgttatatttattt

SEQ ID NO: 583638 - DNA, 120 bp, Artificial Sequence
  ENSG00000172315_10 (sequence is synthesized)
tgaaaccagtttaatgggatacaaccagcattttaaaaaatgaaatagaatacagcatggaaaatatcagtgtattgttttatgaaactttcacgtgtatatatagaccaaggatatgtg

SEQ ID NO: 583639 - DNA, 120 bp, Artificial Sequence
  ENSG00000172315_11 (sequence is synthesized)
ctgagttttgatgtcaaatatatttctctttcagggtcatgatcaaaaaatgaaaagtctgcttaactccaatttctcttttaaaaaagcagacttacagctttcaggcaactgaaattc

SEQ ID NO: 583640 - DNA, 120 bp, Artificial Sequence
  ENSG00000172315_12 (sequence is synthesized)
atgttaacatgtttttatttttattgctttgtatttttgtggttaccttctaagacaagtgattgatctaaagttccttttaagtttataccgctaaacaaactgagttgatttctatca

SEQ ID NO: 583641 - DNA, 120 bp, Artificial Sequence
  ENSG00000172315_13 (sequence is synthesized)
aagtctggtttaaggcacaggtaaactgagtgtggatgcaaaagtaccaggagctagcttttaaccttgcccagcctcagtttcttttcttagaagaagctatgtttgggtgggaaggga

SEQ ID NO: 583642 - DNA, 120 bp, Artificial Sequence
  ENSG00000172315_14 (sequence is synthesized)
agagagggataagaaaatacctttcttccttgtaaactccaatcaacaaacatattttgagtgccttttgtgttccttggcaccctgttgggtattgggtacttggcaccctgttgggta

SEQ ID NO: 583643 - DNA, 120 bp, Artificial Sequence
  ENSG00000172315_15 (sequence is synthesized)
ttgggtacaatggtgagccagacagacacagcgcctgtccttttgtaagaatatttatttttataaaaaagtataaagtatacagtgggatgttttgatatacattatgaaatgattgct

SEQ ID NO: 583644 - DNA, 120 bp, Artificial Sequence
  ENSG00000172315_16 (sequence is synthesized)
acagctgagctaattaacacccatcacctcacatagttactgtcttgtttcttaatatggacatttgcagctatgaatttccctctgcacactgttgtcatcacacactctcagttttgg

SEQ ID NO: 583645 - DNA, 120 bp, Artificial Sequence
  ENSG00000172315_17 (sequence is synthesized)
tattttgtgtttttgttttcattcatctcaaagtattttctaatttcccttgtgatttcttctttgaccccttgattgtttagaaatctgttaatttccacacatttgtaaatgttccaa

SEQ ID NO: 583646 - DNA, 120 bp, Artificial Sequence
  ENSG00000172315_18 (sequence is synthesized)
tttttcttttgttattgccagcttcattccattgtgttcagagatgatacagtcagtgcctgttcttatgaagcaaacattctataatagtaggaccagtaccctgtctgtttcattcac

SEQ ID NO: 583647 - DNA, 120 bp, Artificial Sequence
  ENSG00000172315_19 (sequence is synthesized)
cacagtcagcatgccccaagtgcccagcatggggcggatggccaggaatgagtgaaaacttcccttcctgggtagttgtgactagtagagaggaaaaataatataattgcctgcttactg

SEQ ID NO: 583648 - DNA, 120 bp, Artificial Sequence
  ENSG00000172315_20 (sequence is synthesized)
catgccaggcattgggctgggaatttttatattggatctaaaataactcttaagttaggcattatccccattttatagatggagaaactggccccaaaaggtgggaacttgtccaagacg

SEQ ID NO: 583649 - DNA, 120 bp, Artificial Sequence
  ENSG00000172315_21 (sequence is synthesized)
tcacaggtagcaagaggtacttttacctggctccaaatctgtgttctttccactgacaaatgagatatgggatatggtgcatctttacagtactataataagtattggcgtataacatta

SEQ ID NO: 583650 - DNA, 120 bp, Artificial Sequence
  ENSG00000172315_22 (sequence is synthesized)
ttttcaaggaactccaagggccacaggagctgacaggtttttcaattaatattcccaacatgaatgagatgcctcattcctcagtttcctcacgtgtactataaggctagtacctgcttt

SEQ ID NO: 583651 - DNA, 120 bp, Artificial Sequence
  ENSG00000172315_23 (sequence is synthesized)
tcagtttcctcacgtgtactataaggctagtacctgctttgttggggtatggttggctcgtgtgcattaagtcaacaaatccctagttgatagggtttggctgtgtccccatccaaatct

SEQ ID NO: 583652 - DNA, 120 bp, Artificial Sequence
  ENSG00000172315_24 (sequence is synthesized)
attgttcccgtaatccccacgtgacatgggagggacccagtgggaggtaatttaatcctcggggcggctacctccgtgctgttctcgtgatagcgagtgagttctcacgagatctgatgg

SEQ ID NO: 583653 - DNA, 120 bp, Artificial Sequence
  ENSG00000172315_25 (sequence is synthesized)
cttcctgctgccacgtggagaagggtgtgtttgtttccccatctgccatgattataagttttctgaggcatccccagccatgctgaactgtgagttattaaacttttcctttataaatta

SEQ ID NO: 583654 - DNA, 120 bp, Artificial Sequence
  ENSG00000172318_0 (sequence is synthesized)
tattagtaatatgctgcctttggaagatgaaaacaaactagtgccaaggaggcgtattcttcaatatttggaatagacgtgttctcaagacaatggcttcaaaggtctcctgtttgtatg

SEQ ID NO: 583655 - DNA, 120 bp, Artificial Sequence
  ENSG00000172318_1 (sequence is synthesized)
ttttgacagttgtgtgctgggccagcgctctctggtacttgagtataactcgccctacttcttcttacactggctccaaaccattcagccacctaacagttgccaggaaaaacttcacct

SEQ ID NO: 583656 - DNA, 120 bp, Artificial Sequence
  ENSG00000172318_2 (sequence is synthesized)
ttggcaacataagaactcgacctatcaacccacattcttttgaatttcttatcaacgagcccaataaatgtgagaaaaacattccttttcttgttatcctcatcagcaccactcacaagg

SEQ ID NO: 583657 - DNA, 120 bp, Artificial Sequence
  ENSG00000172318_3 (sequence is synthesized)
aatttgatgcccgtcaggcaatcagagagacgtggggggatgagaacaactttaaggggatcaagatagccaccctgttcctcctgggcaagaatgctgatcctgttctcaatcagatgg

SEQ ID NO: 583658 - DNA, 120 bp, Artificial Sequence
  ENSG00000172318_4 (sequence is synthesized)
tggagcaagagagccaaatcttccatgatatcatcgtggaggactttattgactcctaccataaccttaccctcaaaacattaatggggatgagatgggtggccactttttgttcaaaag

SEQ ID NO: 583659 - DNA, 120 bp, Artificial Sequence
  ENSG00000172318_5 (sequence is synthesized)
ccaagtatgtcatgaaaacagacagcgacatttttgtaaacatggacaatcttatttataaattactgaaaccctccaccaagccacgaagaaggtattttactggctatgtcattaatg

SEQ ID NO: 583660 - DNA, 120 bp, Artificial Sequence
  ENSG00000172318_6 (sequence is synthesized)
gaggaccgattcgggatgtccgcagtaagtggtatatgcccagggatttgtacccagacagtaactacccacctttctgttcggggactggctacatcttttcagccgatgtagctgaac

SEQ ID NO: 583661 - DNA, 120 bp, Artificial Sequence
  ENSG00000172318_7 (sequence is synthesized)
tcatttacaagacctcactccacacaaggctgcttcaccttgaagacgtatatgtgggactgtgtcttcgaaagctgggcatacatcctttccagaacagtggcttcaatcactggaaaa

SEQ ID NO: 583662 - DNA, 120 bp, Artificial Sequence
  ENSG00000172318_8 (sequence is synthesized)
tggcctacagtttgtgtaggtatcgccgagttatcactgtgcatcagatctctccagaagaaatgcacagaatctggaatgacatgtcaagcaagaaacatctcagatgttaggattttt

SEQ ID NO: 583663 - DNA, 120 bp, Artificial Sequence
  ENSG00000172318_9 (sequence is synthesized)
accaatgtaaatatgtttcttttctttttttaagaaatgggacctaaggtgttggtattttccaggtgtcgggggaaatgaactggtgaaggggttttgtaaagtttttgcttcctgcta

SEQ ID NO: 583664 - DNA, 120 bp, Artificial Sequence
  ENSG00000172318_10 (sequence is synthesized)
taagttcttttcttggattaccaatttatgaatgttagactctggtcatagaaacaataaatgagttagaagggccagatttcattctcagtcccagagcattgctatttatctcaaaaa

SEQ ID NO: 583665 - DNA, 120 bp, Artificial Sequence
  ENSG00000172318_11 (sequence is synthesized)
gtgacttccaaacaactcttaggattgacgtaccgtgcatctgagataaaaatttggttctgggaaactgaaactcacagtaatgtgtcatatcatccctgcaaaaattaatacacaaat

SEQ ID NO: 583666 - DNA, 120 bp, Artificial Sequence
  ENSG00000172318_12 (sequence is synthesized)
agaaaccattttcaaaagcaattcagaaaggatgcacagtcaggaagacacactggatgtgattattaatatcgtgtgtgttgttacattatatttttacatatattcccatgtaatgtg

SEQ ID NO: 583667 - DNA, 120 bp, Artificial Sequence
  ENSG00000172318_13 (sequence is synthesized)
tacagtctttgcagttccaccaagaaatgaacttggtacctgcagagtggctgcagttaaatagatgggagtttaaatttgagaatcaaacattctatgtgtttggaagacaactctgct

SEQ ID NO: 583668 - DNA, 120 bp, Artificial Sequence
  ENSG00000172318_14 (sequence is synthesized)
gtttggaagacaactctgcttgctcatccaaggattaaatctggtcagcaggtggaatgtgtataaaatgctacttaacaaagtaaacaaaagattttttttttctttttttttctttct

SEQ ID NO: 583669 - DNA, 120 bp, Artificial Sequence
  ENSG00000172318_15 (sequence is synthesized)
aacaaacattaaatggtgcctccaaggaaactttgccaaatataatctcacctgcttccttccagacagtgtcgctaagtgcatttcacagtttttggatctggcaggcatatgtctcta

SEQ ID NO: 583670 - DNA, 120 bp, Artificial Sequence
  ENSG00000172318_16 (sequence is synthesized)
tgtagaaaataagttggttggaggccagagaacaataaatcacattgagaaaatacaaatttaagtatgcattataattaacataagcttagcaatagtataagatgcccccacacacag

SEQ ID NO: 583671 - DNA, 120 bp, Artificial Sequence
  ENSG00000172318_17 (sequence is synthesized)
acatttgcaaagcacatgagaaaatctttaagggtgtcaatattattgaaagacttggccctacttgctaacatctgaaaacaccagagcatgttcagcagcaatgctgttatgaggtat

SEQ ID NO: 583672 - DNA, 120 bp, Artificial Sequence
  ENSG00000172318_18 (sequence is synthesized)
tctgggggctctgtgattgaggaaggatggggaaggccaggttcgggtcccgttgatgccaccatacttattgggccatatgagtaggcatcgtaatcttgtgcttcaatgtgttcattt

SEQ ID NO: 583673 - DNA, 120 bp, Artificial Sequence
  ENSG00000172318_19 (sequence is synthesized)
ataaaaatggctgtaaaaaacacctacctcacaggtgctgtgagagcaaattgcatttgctaagtattttgagatccttagcttaaaaggtgctacgtaatgcaatgtatcatgtattat

SEQ ID NO: 583674 - DNA, 120 bp, Artificial Sequence
  ENSG00000172318_20 (sequence is synthesized)
gctaaatgctaaaataattgcataattacaatgatggtcatcagtagcagtaatatcatcttaatataaaatctgctgaaataaagatcagctgtgaactatcactgcacctaattctac

SEQ ID NO: 583675 - DNA, 120 bp, Artificial Sequence
  ENSG00000172318_21 (sequence is synthesized)
ctctgagatttcttctggtttcaatgaataagtgactaggtcagtgtgttgccttgatatcccaaggtgctgaaagtagaggcagctgcctttctttgggaaggaacctctggttggggt

SEQ ID NO: 583676 - DNA, 120 bp, Artificial Sequence
  ENSG00000172318_22 (sequence is synthesized)
atattacagtaaatgaagcatatactttgcaaaatgcatcacgacaacttagatctcaggaaccactgaatctgaattctctctaagaaatttgagcgcaggtaaagctagttcacctct

SEQ ID NO: 583677 - DNA, 120 bp, Artificial Sequence
  ENSG00000172318_23 (sequence is synthesized)
ttcagaagcagcagaataggcagtcagcaaacctgcacattgcacatcttctaccatttattagaaaacacctgtttgttctcaaagaaagccccacagctgaaagagtgtacctttttt

SEQ ID NO: 583678 - DNA, 78 bp, Artificial Sequence
  ENSG00000172318_24 (sequence is synthesized)
atttacttattttttaacctgacccctggagccccccgtaggagttgatagcaaacagatagacacaatgaataagtg

SEQ ID NO: 583679 - DNA, 120 bp, Artificial Sequence
  ENSG00000172318_25 (sequence is synthesized)
taggagttgatagcaaacagatagacacaatgaataagtggaagtcatggcttgtttctgcaaaacacgatctctcatcccccacccgaaaggacctgatatgagacaagacttcccatc

SEQ ID NO: 583680 - DNA, 120 bp, Artificial Sequence
  ENSG00000172318_26 (sequence is synthesized)
ccttaacacatcttcatcttatggtcagcaggactgctggttttgattagacaatagcaattaggtaacctggggagagatggatcagcacaaggtgaaccaccctccaacctgcagcct

SEQ ID NO: 583681 - DNA, 120 bp, Artificial Sequence
  ENSG00000172318_27 (sequence is synthesized)
caactgctgtgagttccaatcactgggaaagtctcacgacttcttacttggtttaccttcgagttgtgcagctgaatcaagcctctgtctcatactattgccttgcatctaccccatgct

SEQ ID NO: 583682 - DNA, 120 bp, Artificial Sequence
  ENSG00000172318_28 (sequence is synthesized)
cagtcaaaccacctctggtgtcaagaaattacacattataaacatcatatatgtacacctatgaatcgttttatatgtgtgtgcatacattatgatacagccctgatctttaaaaggagc

SEQ ID NO: 583683 - DNA, 120 bp, Artificial Sequence
  ENSG00000172318_29 (sequence is synthesized)
aaaaatcagagaatcgtatgtcttaaagaactatttccttacttttttatgctaggtaatgcccatgtgacaaacatgtaaatattcatcaaagaccacatgtatatattttaaaggcat

SEQ ID NO: 583684 - DNA, 120 bp, Artificial Sequence
  ENSG00000172318_30 (sequence is synthesized)
tttttcttctccccaactgtatgtatagctagaatctgcttgctgtgtaaccttttcttctgcatggagcttttggtgaagcaaggccatttgtccagtgtttcatagccttaagcatgt

SEQ ID NO: 583685 - DNA, 120 bp, Artificial Sequence
  ENSG00000172318_31 (sequence is synthesized)
ttgcccttcgttttttgaatgttcaaaaaatgtttaagtgatcaagaaaaagctctaactttcgacttttgttaattttatgacatgacactggccaaaatattgtttcaattactgttg

SEQ ID NO: 583686 - DNA, 120 bp, Artificial Sequence
  ENSG00000172318_32 (sequence is synthesized)
agccattcttatcatttccctgacataaaatatgcaatgttttagacagtattctaccaagagtctctcagacaatttttacaaaaactctttttttccattatgcactggataataaca

SEQ ID NO: 583687 - DNA, 120 bp, Artificial Sequence
  ENSG00000172318_33 (sequence is synthesized)
gtatcagtgtctatgttcttaaagttcctttttttaatttactttttggaaaaacgtttctctttggtggctagtttcggtggcttggtgtcttcttatattggaacaagtgtccatttc

SEQ ID NO: 583688 - DNA, 120 bp, Artificial Sequence
  ENSG00000172318_34 (sequence is synthesized)
aatatgtaatattgtatttttaaataaccagaatcaacaaagcgaagatcacttttaatttggattcaattcagaagaataaaacccctttgcgtgacacgatatggggaaaataaacta

SEQ ID NO: 583689 - DNA, 120 bp, Artificial Sequence
  ENSG00000172318_35 (sequence is synthesized)
tttacagaggagccaaggaagaagtttttcgatcaaatctcttctatcaaaagacaatggaatatttacctaaagcatctgggattcattttttacctttcctaatatgtgggtttagtg

SEQ ID NO: 583690 - DNA, 120 bp, Artificial Sequence
  ENSG00000172318_36 (sequence is synthesized)
ggagaattgattatgtcatttcttctgtaaaggtgaaaatcgtttttataaacaacaaagtaacttgtgaatgaaagaagtaatttactagaacaacgcttgttgatgataattgacatt

SEQ ID NO: 583691 - DNA, 120 bp, Artificial Sequence
  ENSG00000172318_37 (sequence is synthesized)
taggtataacgtcatatatgaatgattgtatttatgtatttatttgtcaaaattgtacatactgtttcgccaaaagtaattgtctgtaaaagtgcactctccaggtttgtagtactattt

SEQ ID NO: 583692 - DNA, 120 bp, Artificial Sequence
  ENSG00000172318_38 (sequence is synthesized)
agggttacatgggttgccaatcaagctgctaatcagaatactatttttttgtatcaatgttataaaactaaaaatgacagacactgaagatatcattacactttcttcaccttcctcttg

SEQ ID NO: 583693 - DNA, 120 bp, Artificial Sequence
  ENSG00000172318_39 (sequence is synthesized)
aaatgtaaactgttgactgaaagcgcaatgcttatgtacaggcccatctgtcatgaggaagattatggttccataaagctgatttttttaaaccattgggacaaataaacagaaggagaa

SEQ ID NO: 583694 - DNA, 120 bp, Artificial Sequence
  ENSG00000172320_0 (sequence is synthesized)
cttgtccttgtggtccacgggaagcatgtccataaccaaagcctggaacagctcatcagtgaccatgttcatcctcctgggattcacagaccatccagaactccaggccctcctctttgt

SEQ ID NO: 583695 - DNA, 120 bp, Artificial Sequence
  ENSG00000172320_1 (sequence is synthesized)
gaccttcctgggcatctatcttaccaccctggcctggaacctggccctcatttttctgatcagaggtgacacccatctgcacacacccatgtacttcttcctaagcaacttatctttcat

SEQ ID NO: 583696 - DNA, 120 bp, Artificial Sequence
  ENSG00000172320_2 (sequence is synthesized)
tgacatctgctactcttctgctgtggctcccaatatgctcactgacttcttctgggagcagaagaccatatcatttgtgggctgtgctgctcagttttttttctttgtcggcatgggtct

SEQ ID NO: 583697 - DNA, 120 bp, Artificial Sequence
  ENSG00000172320_3 (sequence is synthesized)
gtctgagtgcctcctcctgactgctatggcatacgaccgatatgcagccatctccagcccccttctctaccccactatcatgacccagggcctctgtacacgcatggtggttggggcata

SEQ ID NO: 583698 - DNA, 120 bp, Artificial Sequence
  ENSG00000172320_4 (sequence is synthesized)
gacctcccaccagtcctggctctgtcttgctctgacaccttcctcagtcaagtggtgaatttcctcgtggtggtcactgtcggaggaacatcgttcctccaactccttatctcctatggt

SEQ ID NO: 583699 - DNA, 120 bp, Artificial Sequence
  ENSG00000172320_5 (sequence is synthesized)
tacatagtgtctgcggtcctgaagatcccttcagcagagggccgatggaaagcctgcaacacgtgtgcctcgcatctgatggtggtgactctgctgtttgggacagcccttttcgtgtac

SEQ ID NO: 583700 - DNA, 120 bp, Artificial Sequence
  ENSG00000172320_6 (sequence is synthesized)
ttgcgacccagctccagctacttgctaggcagggacaaggtggtgtctgttttctattcattggtgatccccatgctgaaccctctcatttacagtttgaggaacaaagagatcaaggat

SEQ ID NO: 583701 - DNA, 120 bp, Artificial Sequence
  ENSG00000172320_7 (sequence is synthesized)
gccctgtggaaggtgttggaaaggaagaaagtgttttcttaggtcatgcgtagaaacttatttatccaaactgctggagaattaaacaatccaagccttcacctccacctctgcctcagg

SEQ ID NO: 583702 - DNA, 120 bp, Artificial Sequence
  ENSG00000172320_8 (sequence is synthesized)
atgaaacatctccaaggacagaagaaaaaaacctctccccaatttacccccaaccccagctttgaacattttctcaaaatgaccctaaatgcagatattagctgatgccagaagagcttc

SEQ ID NO: 583703 - DNA, 120 bp, Artificial Sequence
  ENSG00000172320_9 (sequence is synthesized)
ttaaagattacaacctccatcctttctttatatatctttttcttcctttactctgccccaaagcacaccttctatgcaccaagaggatattttgatccttgatgaaaaaaccagccgcaa

SEQ ID NO: 583704 - DNA, 120 bp, Artificial Sequence
  ENSG00000172320_10 (sequence is synthesized)
gctctctccaaactcattagcactttggtaattggaagcagccactgaaacccaattaaactccttccaaagcagaacaactcaaaacaggtatcagctaaagggcagacagagcaggag

SEQ ID NO: 583705 - DNA, 120 bp, Artificial Sequence
  ENSG00000172320_11 (sequence is synthesized)
ggtgctctcatttgtggagactcttccctccagattcctctcacccttcctcatggtcacttgtctactgactgtgccatagatagccaaaaagggaaggaatttcttcagaaaaaaaaa

SEQ ID NO: 583706 - DNA, 120 bp, Artificial Sequence
  ENSG00000172320_12 (sequence is synthesized)
aaaaaaaaaaagaacctccccaggataacctattttcacaataatcacaataactagcctttattgggcccttagtatgtaccaggcacaaaagttatttaattaaatactcattgcagt

SEQ ID NO: 583707 - DNA, 120 bp, Artificial Sequence
  ENSG00000172320_13 (sequence is synthesized)
actaaaatacacaatgaactatctgtatgttacaaaataaggaaacagtgtgtcagcaaggaaaattaacttgctcagggtcaccaaggaagaggcagaactctcattcacaccaaggtc

SEQ ID NO: 583708 - DNA, 120 bp, Artificial Sequence
  ENSG00000172320_14 (sequence is synthesized)
ttcctgactccagagcccacgttctgcccaaacgctgcactccacattcaacaaaaaaatagcccaaaagtagtacgagtatataactcttgttactggcatatggcagaatctgaaaag

SEQ ID NO: 583709 - DNA, 120 bp, Artificial Sequence
  ENSG00000172320_15 (sequence is synthesized)
atacactatgtgtagttaaggtaaattagaaaaacaagatgcctacctcatcaaatgccctctctaggatctccctgttgaattccaattatggctactgagtaatttgctaagcaaatg

SEQ ID NO: 583710 - DNA, 120 bp, Artificial Sequence
  ENSG00000172320_16 (sequence is synthesized)
ctgaaggacattccccttggctgccatttctctctttctcagctatgtaagggctgggaaatttgagtccaatggtgtcataccaatactcttcttttctcagtctcagtcccctaaact

SEQ ID NO: 583711 - DNA, 120 bp, Artificial Sequence
  ENSG00000172320_17 (sequence is synthesized)
gcctatcagtcagtacctccttgatttttctttaatatttcactaaatgttgtattttttttcttttaatttaatttaattttattttattttaagttccgggatacatatgcaggatgt

SEQ ID NO: 583712 - DNA, 120 bp, Artificial Sequence
  ENSG00000172320_18 (sequence is synthesized)
gcaggtttgttacataggtaaacatatgtcatggtgatttgctgcacctatccacccatcacctaggtattaagccccacatccgttagctatttatcccgatgctctccctcctccctg

SEQ ID NO: 583713 - DNA, 88 bp, Artificial Sequence
  ENSG00000172320_19 (sequence is synthesized)
aatgtgcatgtttagctcttacttacaagtgagaacattggatatttggttatctgttcttgggttagtttgctgaggataatggctt

SEQ ID NO: 583714 - DNA, 80 bp, Artificial Sequence
  ENSG00000172320_20 (sequence is synthesized)
gcaaagaacactaattccttctattttctttatccagtctctcattgatgggaatttgggttgattccatgtctttgcta

SEQ ID NO: 583715 - DNA, 82 bp, Artificial Sequence
  ENSG00000172320_21 (sequence is synthesized)
taatagaattatttatattcctttggatatatacccagtaataagattgctgggtcaaatgatatttccatttctaggtctt

SEQ ID NO: 583716 - DNA, 85 bp, Artificial Sequence
  ENSG00000172320_22 (sequence is synthesized)
gactttttaataattgccattctgactagcatgagatggtatctcattgtgattttttatttgcatttctctaataattcataca

SEQ ID NO: 583717 - DNA, 120 bp, Artificial Sequence
  ENSG00000172320_23 (sequence is synthesized)
cccattctgtaggttgtctgttcattctaatgatagcttcttttgcagaatctctttagtttaattagatcccatttgccaatgtttgcttttgttgcaattgcttttgacgttttcatc

SEQ ID NO: 583718 - DNA, 120 bp, Artificial Sequence
  ENSG00000172320_24 (sequence is synthesized)
ttagatcccatttgccaatgtttgcttttgttgcaattgcttttgacgttttcatcatgaaatctttgccagtgcctatgtcctaaatggcattgcctagattttcttctaggattttta

SEQ ID NO: 583719 - DNA, 71 bp, Artificial Sequence
  ENSG00000172320_25 (sequence is synthesized)
ctaggatttttatagtttggggttaaggaactggtccattttcaattttctgtatatggctagccagtttt

SEQ ID NO: 583720 - DNA, 120 bp, Artificial Sequence
  ENSG00000172320_26 (sequence is synthesized)
ccccattgcttgtctttatcaggtttgtcaaagattcaatggttgtagatgtgcagtcttatttctgagatctctattgtgttctattggtctacgtgtctgtttttgtacaagtaccat

SEQ ID NO: 583721 - DNA, 120 bp, Artificial Sequence
  ENSG00000172320_27 (sequence is synthesized)
ggtctacgtgtctgtttttgtacaagtaccatgttgttttggttaccatagacttgtagtatagtttgaagtcagggagtgtaatgcctccggctttgttctttttgcttaggattgtct

SEQ ID NO: 583722 - DNA, 120 bp, Artificial Sequence
  ENSG00000172320_28 (sequence is synthesized)
cattcctttaccagttcaggacctgcctccatttcacagtttggtgtcctttttgatcaccacaccctgaattccccttgctatcttctatctgaacccattgctcctataaaattcctg

SEQ ID NO: 583723 - DNA, 120 bp, Artificial Sequence
  ENSG00000172320_29 (sequence is synthesized)
tttctcctcttgaataaattaaaccttgcagcccacattgggtgtaatttatttgccatcatctcagggaagtatatcccaggttcccacctccagataattaccctttcatttcaggca

SEQ ID NO: 583724 - DNA, 120 bp, Artificial Sequence
  ENSG00000172320_30 (sequence is synthesized)
ctcacagtggaattgtcccacacaactatttctgctggtaaatctctctctctggctacttgtaacgcattcacttttccattgatgtaggtcaattggataagtagatatttgatttga

SEQ ID NO: 583725 - DNA, 120 bp, Artificial Sequence
  ENSG00000172320_31 (sequence is synthesized)
ttgttcatataacagaattaattatttcctccatatctggaagaacataaacaatgcataggaaagcagagatcccttctcaggtttcctgggttcttcatcctctaaattcattcccat

SEQ ID NO: 583726 - DNA, 120 bp, Artificial Sequence
  ENSG00000172320_32 (sequence is synthesized)
ttcaagttctattctgaacatttcatacatgttaagccattgaatccctattgacacagccattgagtggaagctgactcagcatggctcctgagactaaactcataaacactttgtgac

SEQ ID NO: 583727 - DNA, 120 bp, Artificial Sequence
  ENSG00000172320_33 (sequence is synthesized)
atttcccccaagtgggcccctgattaggttgaagtggggaggttttatagtggcagccaaatataccacccagggaaaatactagagaaactcaacatatgcctcccatttctgtctact

SEQ ID NO: 583728 - DNA, 120 bp, Artificial Sequence
  ENSG00000172320_34 (sequence is synthesized)
ggaagtatcccatgcctccatttttctattgcacatcttccaaaatgtaggcccagaagcagaggccacagctatgcctagaactacagaacaactgccactggggtcaggctagtgtat

SEQ ID NO: 583729 - DNA, 120 bp, Artificial Sequence
  ENSG00000172320_35 (sequence is synthesized)
gaaactgcaacaattaggccagtaaaattttaggaatgaaaagttgacactatatctgtatattaagggatacttgctttacagaaatatcagcaaatgaatcaaaaatttacaggcatt

SEQ ID NO: 583730 - DNA, 120 bp, Artificial Sequence
  ENSG00000172320_36 (sequence is synthesized)
ttaccattacaagggaaattcaagaaagaatatgagaaggagagattgtctgatcctcacccctatttggttgcagttacatcattagcttcttcaggcattattgggtagtagagaaca

SEQ ID NO: 583731 - DNA, 120 bp, Artificial Sequence
  ENSG00000172320_37 (sequence is synthesized)
gcaggaagcagggagacaaaaatcaaaatatcagtttaataatgttaaatcgacagataatgttctgttggaggacatggctttgatctggtcctgtggctgccccacagtgtacaccag

SEQ ID NO: 583732 - DNA, 120 bp, Artificial Sequence
  ENSG00000172320_38 (sequence is synthesized)
aattagacaggctaacccaggagaagcaggcttgccctgttgcactaattgcgtagatgagagaaaatcagactacatgctccctgcagggagacagatcccaaagaaagagaaggaaga

SEQ ID NO: 583733 - DNA, 120 bp, Artificial Sequence
  ENSG00000172320_39 (sequence is synthesized)
tgcagggagacagatcccaaagaaagagaaggaagatcagaaggccaagttctcctgcctaatttttttcccagattcaccactcctttaaatcaggggtgtccaatcttttggcttccc

SEQ ID NO: 583734 - DNA, 120 bp, Artificial Sequence
  ENSG00000172320_40 (sequence is synthesized)
aaaaaacacactaatgatagctgatgagctttaaaaaaatcacaaaaaaactcttaatgtgttaaggaagtttacaaatttgtattggtccacattcaaagccgtcctgggccgcatgaa

SEQ ID NO: 583735 - DNA, 120 bp, Artificial Sequence
  ENSG00000172320_41 (sequence is synthesized)
gcccacgggctgtgggttgtgcaagcttgctttacatcactcctaccttcctagaaaggactgagtgaaggaggaggcacaaaacctgcatgccatttcagcgtaagtccctctccagga

SEQ ID NO: 583736 - DNA, 120 bp, Artificial Sequence
  ENSG00000172320_42 (sequence is synthesized)
aaacaggaggaaaagggaaggaactccccatacacatactaagatctttaaggttacttcactctgatcctctaagaagtcctaaactgaagttccatccacgactatgaggggccacta

SEQ ID NO: 583737 - DNA, 120 bp, Artificial Sequence
  ENSG00000172320_43 (sequence is synthesized)
gaccaggagcctcatctagtggaatccaatttgtcagtatctccaggtctcagtcaaggcctctttatgatgacgttggtctcatccaatgcttggatcttacaggattattatgagccc

SEQ ID NO: 583738 - DNA, 120 bp, Artificial Sequence
  ENSG00000172320_44 (sequence is synthesized)
aaaaaaagaaaattgatttttagaaatctcttagaaaaaatttaaaacattatataaataccagggattcctgttattatcaaatgccacttcccccaaggaagcattcccagactccct

SEQ ID NO: 583739 - DNA, 120 bp, Artificial Sequence
  ENSG00000172320_45 (sequence is synthesized)
ggacctcactaaatccctgggccaatctcgccccattcttgccctttggtgtgaatcatcacagttgtaagttcatgcttgagggtggggtcacatctgtctcttcacaaatatattctc

SEQ ID NO: 583740 - DNA, 120 bp, Artificial Sequence
  ENSG00000172320_46 (sequence is synthesized)
agcatctagaactgcctgatatacaaaacgcaataaatatgcatttttggtcaattattataattgatctgttggaaaaaaatcaattatgtgacccaaattgtgaccattgtcacatga

SEQ ID NO: 583741 - DNA, 120 bp, Artificial Sequence
  ENSG00000172320_47 (sequence is synthesized)
aattgactcttgaactataatattgttgatgaaatttctgtaatcgttatcatacaaggactttgcatcaaatttgatgttgatataatttagagaaggagcctttggagattcctcaga

SEQ ID NO: 583742 - DNA, 120 bp, Artificial Sequence
  ENSG00000172320_48 (sequence is synthesized)
cttccctgtacacagtttcatcacctccttattagatgtgctatcataatgggtgtgtgtgtgtgtgtgtgaaaaggagagaaaaaacatgcacacgtgttgcttagtaactttttaata

SEQ ID NO: 583743 - DNA, 120 bp, Artificial Sequence
  ENSG00000172320_49 (sequence is synthesized)
actcccattgcatctgcaactgccaacttctccactgaaaatatatttcctacaaatatccaatattactccctatgctaatcattatagtagacttcttattcagcatcagttaggaac

SEQ ID NO: 583744 - DNA, 120 bp, Artificial Sequence
  ENSG00000172320_50 (sequence is synthesized)
agtgtaaactgttcatgtgtttgggtgaagaagggcagagcagtgatgatggggaagttgtcaggctcactttaccaatgcaaaggtaggtgagggcgtcctgaaaattttgcacaccta

SEQ ID NO: 583745 - DNA, 120 bp, Artificial Sequence
  ENSG00000172320_51 (sequence is synthesized)
caaacttatgatttcaatagtgtctctgaaaggcaaaatgtccatttgcaattctggaagtatatgtcatcttgaactagaagcttcaggctgattaagatctcctacttctaacctaaa

SEQ ID NO: 583746 - DNA, 120 bp, Artificial Sequence
  ENSG00000172320_52 (sequence is synthesized)
atactgggcttcctaagacacattcaaataaggtaatttttcaaaaattaaaactcattccataaacattactaagcccctaccatgtgtaaaaaaataataactagcatgatctctttc

SEQ ID NO: 583747 - DNA, 120 bp, Artificial Sequence
  ENSG00000172320_53 (sequence is synthesized)
ttaaaaggtgattaaaagttagatggcagcaaaaagacaactatataatgatattaggattatgataatattaataccctacatttgtataatgctttgaagtttgcagtattctctcat

SEQ ID NO: 583748 - DNA, 120 bp, Artificial Sequence
  ENSG00000172320_54 (sequence is synthesized)
atgcattaagccatttaattgacttatacagcaacataagtgaataggggatgtaagatgaggctgaaaatggcgtaaaggaaaacaaatacttgttggggaactactgcacatcaggag

SEQ ID NO: 583749 - DNA, 120 bp, Artificial Sequence
  ENSG00000172320_55 (sequence is synthesized)
ttgcaaatggacacccctttgttcattcatcttcaaaaagaattattgaataactgctatgttccaggtaggagctggggatacaatagtgacaaaagaaatccttgccttcagggagtt

SEQ ID NO: 583750 - DNA, 120 bp, Artificial Sequence
  ENSG00000172320_56 (sequence is synthesized)
tacattgggaggaaaaggcagacacacatagacccataaaggcaaggagtaaaaagtgctagattatcacaagcaagcctcactatgcaaagtaaggtgtatgttccccatttcatggaa

SEQ ID NO: 583751 - DNA, 120 bp, Artificial Sequence
  ENSG00000172320_57 (sequence is synthesized)
taaggtcctggggttcataaaggttaacttgctccgggtcacaagaggcacagtttaaaatactggaacctgacttcgaaggctgtgctcttttgaacaagctaattctatgttcaatca

SEQ ID NO: 583752 - DNA, 120 bp, Artificial Sequence
  ENSG00000172320_58 (sequence is synthesized)
tgcaaccctgaggttacaaaatagaaaggctatcgtttgatcctgacctcacattgagcctgatagtccagaaccttctaaggtgattgaccagaagagtaggtggaataatgttaatct

SEQ ID NO: 583753 - DNA, 120 bp, Artificial Sequence
  ENSG00000172320_59 (sequence is synthesized)
gaaagagaagtcaacagtaagtagatttgacctcagttcccagagacctgagttggctgattccaggttctcctctgggtgcctccagccaatgcctcatggagccataacacaccaaaa

SEQ ID NO: 583754 - DNA, 120 bp, Artificial Sequence
  ENSG00000172320_60 (sequence is synthesized)
gaaaaattagagctgtctttcccacacacccttttccataataagtcagcttcttagaacaattttaaaaacaaaaaacagaaaaatacaagatacataatatcagagctcaaattaatg

SEQ ID NO: 583755 - DNA, 120 bp, Artificial Sequence
  ENSG00000172320_61 (sequence is synthesized)
gagaactttttacttcaaattgtaaataggtataatactttttctgattttcataatcagaagccatttaaaatcatttttttaattagacacaacagaacgtctttttaaaataaaaat

SEQ ID NO: 583756 - DNA, 120 bp, Artificial Sequence
  ENSG00000172320_62 (sequence is synthesized)
gccaaaatccaattaccaacagataatggctactactgttgtgatatattaatacatcttttcagacttctagccatgtagatatttttcccaaaaataacatcatgtgacatattcagt

SEQ ID NO: 583757 - DNA, 120 bp, Artificial Sequence
  ENSG00000172320_63 (sequence is synthesized)
gttttaatctgtcactaaaaagaaatctttccatgtttaaaagtacaattctacgttatcactttgaatgtctgcaaatacttaattgtactattgtgccatatttattgaacaaatttt

SEQ ID NO: 583758 - DNA, 120 bp, Artificial Sequence
  ENSG00000172320_64 (sequence is synthesized)
ctatatcagacgctaacttaaattctaatttctactatttgaaacagcaatgtgatgagctttgtttatatttaggacattaaacatttggtttattaactctttagcataaattcctaa

SEQ ID NO: 583759 - DNA, 120 bp, Artificial Sequence
  ENSG00000172320_65 (sequence is synthesized)
agtagaaattttgagtcacggggtttgtacatattacattttgacacatatttccagaatgaccccagaaatgctgcctatgtgtgcactcctattaatcatatgaaagtgtcactttcc

SEQ ID NO: 583760 - DNA, 120 bp, Artificial Sequence
  ENSG00000172320_66 (sequence is synthesized)
ccacatctatgccaacagtggacttttcaacattggttaatcttctagatgagaaatgatacctcattgtaatttaatttgtatttccttttttctttctttctttcccttttttaatag

SEQ ID NO: 583761 - DNA, 76 bp, Artificial Sequence
  ENSG00000172320_67 (sequence is synthesized)
agacaggaagatcctccctccttggcctcctaatatatttatctgatcaatagttgattgactgtcttttcacatg

SEQ ID NO: 583762 - DNA, 120 bp, Artificial Sequence
  ENSG00000172322_0 (sequence is synthesized)
ggctcatttgcagacatatgggtgattggtacagtaggtttataaacagaagtttaaacttgtaagcttaagcttccgtttataaacagaagtttaaaattataggtcctgtttaacatt

SEQ ID NO: 583763 - DNA, 120 bp, Artificial Sequence
  ENSG00000172322_1 (sequence is synthesized)
cagctctgttaactcactcatctttttgtgtttttacactttgtcaagatttctttacatattcatcaatgtctgaagaagttacttatgcagatcttcaattccagaactccagtgaga

SEQ ID NO: 583764 - DNA, 120 bp, Artificial Sequence
  ENSG00000172322_2 (sequence is synthesized)
tggaaaaaatcccagaaattggcaaatttggggaaaaagcacctccagctccctctcatgtatggcgtccagcagccttgtttctgactcttctgtgccttctgttgctcattggattgg

SEQ ID NO: 583765 - DNA, 120 bp, Artificial Sequence
  ENSG00000172322_3 (sequence is synthesized)
gagtcttggcaagcatgtttcacgtaactttgaagatagaaatgaaaaaaatgaacaaactacaaaacatcagtgaagagctccagagaaatatttctctacaactgatgagtaacatga

SEQ ID NO: 583766 - DNA, 120 bp, Artificial Sequence
  ENSG00000172322_4 (sequence is synthesized)
atatctccaacaagatcaggaacctctccaccacactgcaaacaatagccaccaaattatgtcgtgagctatatagcaaagaacaagagcacaaatgtaagccttgtccaaggagatgga

SEQ ID NO: 583767 - DNA, 120 bp, Artificial Sequence
  ENSG00000172322_5 (sequence is synthesized)
tttggcataaggacagctgttatttcctaagtgatgatgtccaaacatggcaggagagtaaaatggcctgtgctgctcagaatgccagcctgttgaagataaacaacaaaaatgcattgg

SEQ ID NO: 583768 - DNA, 120 bp, Artificial Sequence
  ENSG00000172322_6 (sequence is synthesized)
aagaaacgcacctgacttaaataacatgtattgtggatatataaatagactatatgttcaatattatcactgcacttataaaaaaagaatgatatgtgagaagatggccaatccagtgca

SEQ ID NO: 583769 - DNA, 120 bp, Artificial Sequence
  ENSG00000172322_7 (sequence is synthesized)
gcttggttctacatattttagggaggcatgaggcatcaatcaaatacatttaaggagtgtagggggtgggggttctaggctataggtaaatttaaatattttctggttgacaattagttg

SEQ ID NO: 583770 - DNA, 120 bp, Artificial Sequence
  ENSG00000172322_8 (sequence is synthesized)
agtttgtctgaagacctgggattttatcatgcagatgaaacatccaggtagcaagcttcagagagaatagactgtgaatgttaatgccagagaggtataatgaagcatgtcccacctccc

SEQ ID NO: 583771 - DNA, 120 bp, Artificial Sequence
  ENSG00000172322_9 (sequence is synthesized)
actttccatcatggcctgaaccctggaggaagaggaagtccattcagatagttgtggggggccttcgaattttcattttcatttacgttcttccccttctggccaagatttgccagaggc

SEQ ID NO: 583772 - DNA, 120 bp, Artificial Sequence
  ENSG00000172322_10 (sequence is synthesized)
aacatcaaaaaccagcaaattttaattttgtcccacagcgttgctagggtggcatggctccccatctcgggtccatcctatacttccatgggactccctatggctgaaggccttatgagt

SEQ ID NO: 583773 - DNA, 120 bp, Artificial Sequence
  ENSG00000172322_11 (sequence is synthesized)
caaaggacttatagccaattgattgttctaggccaggtaagaatggatatggacatgcatttattacctcttaaaattattattttaagtaaaagccaataaacaaaaacgaaaaggcaa

SEQ ID NO: 583774 - DNA, 120 bp, Artificial Sequence
  ENSG00000172322_12 (sequence is synthesized)
atttagcaacaaaagtttattccttcagtggaagatttataataatgataggtgataggcccacaaggaggacttacaatgtggaacttagtctctttccctcactcctgtagagtaatt

SEQ ID NO: 583775 - DNA, 120 bp, Artificial Sequence
  ENSG00000172322_13 (sequence is synthesized)
ctcgtggtatgagagtggataatataatcaactcctctgcctgcaggtaagtgacccagctgctgcttctataacccatagtagtgacttggactgagagaagagggaatctcaagaata

SEQ ID NO: 583776 - DNA, 120 bp, Artificial Sequence
  ENSG00000172322_14 (sequence is synthesized)
agagtttccagtactccctcctattctaagtgtccagtgacttacatattttctgagataaccgagccatcctcccacttccagacctcattcgacttctggcgagataatccgacccaa

SEQ ID NO: 583777 - DNA, 120 bp, Artificial Sequence
  ENSG00000172322_15 (sequence is synthesized)
cgaattaaatgagtcctggctttgatgtactcctattgtaaacataaataaacacaatggtcagaatccctccacagctcttggtatgatagacaaagcttcatgataagacgttggaca

SEQ ID NO: 583778 - DNA, 120 bp, Artificial Sequence
  ENSG00000172322_16 (sequence is synthesized)
aaaaatgttggattacatgtctatattagtattaatggattacatttgatgtttgaaattgtaccaatttgacttgtctgagaacttaaaaaaaacttataggacacaggtaaaattgta

SEQ ID NO: 583779 - DNA, 120 bp, Artificial Sequence
  ENSG00000172322_17 (sequence is synthesized)
cacaaaatagctgatattctaatcttcttttgtgtttataacatgtatttagatcttcaaccagttgaggattatactcccaaatagaataccaaatatgattcaaaggaataaatgtaa

SEQ ID NO: 583780 - DNA, 120 bp, Artificial Sequence
  ENSG00000172322_18 (sequence is synthesized)
acagagaaaggaaatacaaagaaatacattgttgatgagctgtatattccttagagttaaagccctacctgctttggttttattgctcagcttgcctataaaatcttacatatggaagta

SEQ ID NO: 583781 - DNA, 120 bp, Artificial Sequence
  ENSG00000172322_19 (sequence is synthesized)
tctgcctgaaaatatcaaacgaagaaagaaaccagagtctcaacctgctggacactattggaagtccatcatttaacacgtttttagtatatacttttagcaggagacagctctgagtca

SEQ ID NO: 583782 - DNA, 120 bp, Artificial Sequence
  ENSG00000172322_20 (sequence is synthesized)
actgtgttgaggtgccaccacagcgagtttaggcactcagatccctgcatactcatcacattgggccataatggcaaatagaattttttgttttgttttgtttgtttgctttttctttca

SEQ ID NO: 583783 - DNA, 120 bp, Artificial Sequence
  ENSG00000172322_21 (sequence is synthesized)
catagaaatagtaagtgtaggagtgtgggtcagaaagaaaaggtggccctacctctgatggttggcaatgataggatacaatgggagataagctatctacaaatggagtggagaaggata

SEQ ID NO: 583784 - DNA, 120 bp, Artificial Sequence
  ENSG00000172322_22 (sequence is synthesized)
tatatttcaaaggcctaatttgtagtgaaagactagagacaaaggtaatgtgtgtgtcaggagagagtacagatggaatcttgttttgcaaacgtagaatatgtatgtgtttgtaattat

SEQ ID NO: 583785 - DNA, 120 bp, Artificial Sequence
  ENSG00000172322_23 (sequence is synthesized)
tgcaaatggaatggtaatctataatggaatggaaaacattgtagatattttcagttatcaaaaagaaaactgaaaaagtatataataattgtatgtatgatatatatatgtgtgtgtgtg

SEQ ID NO: 583786 - DNA, 120 bp, Artificial Sequence
  ENSG00000172322_24 (sequence is synthesized)
tgtatatatatcttcactttataactctgtgttgttttggggtttgtttctgaaagggggttgtaataaatgacatctgtactatgtcaccacaaataaatctcattcttaaacatttaa

SEQ ID NO: 583787 - DNA, 120 bp, Artificial Sequence
  ENSG00000172324_0 (sequence is synthesized)
taatgaactcccacagcccatttatttggaagacttgttaacaaaggagcggagattccagaagcatggtttactatttacatgaggccaaagcataagaaattgatggaacgagaaacc

SEQ ID NO: 583788 - DNA, 120 bp, Artificial Sequence
  ENSG00000172324_1 (sequence is synthesized)
agccatggagcagtgggaaatgcagatgatctggtttgcaaaagatgttatggcaacaaagcaatcaatatttcttctcttgtagcacaagattgcaggacccttctgcccaatgcaatc

SEQ ID NO: 583789 - DNA, 120 bp, Artificial Sequence
  ENSG00000172324_2 (sequence is synthesized)
cagaaatacccactcttacaataacaaacaaaatctagctgaccacaggattcttaaagaagaaagtaaagactttatgcaggaagcaggcctatggctgtaggaaggaacaacacaatt

SEQ ID NO: 583790 - DNA, 120 bp, Artificial Sequence
  ENSG00000172324_3 (sequence is synthesized)
gtgacaaaattcattctcctgggactttcagaccatcctcaaatgaagattttccttttcatgttatttctggggctctacctcctgacgttggcctggaacttaagcctcattgccctc

SEQ ID NO: 583791 - DNA, 120 bp, Artificial Sequence
  ENSG00000172324_4 (sequence is synthesized)
attaagatggactctcacctgcacatgcccatgtacttcttcctcagtaacctgtccttcctggacatctgctatgtgtcctccaccgcccctaagatgctgtctgacatcatcacagag

SEQ ID NO: 583792 - DNA, 120 bp, Artificial Sequence
  ENSG00000172324_5 (sequence is synthesized)
cagaaaaccatttcctttgttggctgtgccactcagtactttgtcttctgtgggatggggctgactgaatgctttctcctggcagctatggcctatgaccggtatgctgcaatctgcaac

SEQ ID NO: 583793 - DNA, 120 bp, Artificial Sequence
  ENSG00000172324_6 (sequence is synthesized)
cccttgctttacacagtcctcatatcccatacactttgtttaaagatggtggttggcgcctatgtgggtggattccttagttctttcattgaaacatactctgtctatcagcatgatttc

SEQ ID NO: 583794 - DNA, 120 bp, Artificial Sequence
  ENSG00000172324_7 (sequence is synthesized)
tgtgggccctatatgatcaaccactttttctgtgacctccctccagtcctggctctgtcctgctctgataccttcaccagcgaggtggtgaccttcatagtcagtgttgtcgttggaata

SEQ ID NO: 583795 - DNA, 120 bp, Artificial Sequence
  ENSG00000172324_8 (sequence is synthesized)
gtgtctgtgctagtggtcctcatctcttatggttacattgttgctgctgttgtgaagatcagctcagctacaggtaggacaaaggccttcagcacttgtgcctctcacctgactgctgtg

SEQ ID NO: 583796 - DNA, 120 bp, Artificial Sequence
  ENSG00000172324_9 (sequence is synthesized)
accctcttctatggttctggattcttcatgtacatgcgacccagttccagctactccctaaacagggacaaggtggtgtccatattctatgccttggtgatccccgtggtgaatcccatc

SEQ ID NO: 583797 - DNA, 120 bp, Artificial Sequence
  ENSG00000172324_10 (sequence is synthesized)
atctacagttttaggaataaggagattaaaaatgccatgaggaaagccatggaaagggaccccgggatttctcacggtggaccattcatttttatgaccttgggctaatgtttacaatga

SEQ ID NO: 583798 - DNA, 120 bp, Artificial Sequence
  ENSG00000172324_11 (sequence is synthesized)
agctgtgagctaggtgaattgtgcagacatttacataattttaaactagttgatctatagaatgaattgtgggaatcaggcttttttccctcctgcttaagatttcactaatagtttgcc

SEQ ID NO: 583799 - DNA, 120 bp, Artificial Sequence
  ENSG00000172324_12 (sequence is synthesized)
tgttggctattagaaaacattttggccattgttgcttgtaaaatgaatagcattgtatagtttgagattttaaatgctctgcctagcagaaaacttcatcatgacaaaaaacatcctgga

SEQ ID NO: 583800 - DNA, 120 bp, Artificial Sequence
  ENSG00000172324_13 (sequence is synthesized)
atgttaaaacagagtttgtatgtataggaggaaagtcatcgaaaaaatgttagtccagcatttagtgtggtgatatttaaggtacaacatggtataatgacctgaagaggatgatgtttt

SEQ ID NO: 583801 - DNA, 120 bp, Artificial Sequence
  ENSG00000172324_14 (sequence is synthesized)
ttctaaacacagttgcctttccctcttctgagattctcaaatggtttccttagagctcatgaaaaccacagggcagataccttcccatgtttcagaatcatggccataggagcccctgtg

SEQ ID NO: 583802 - DNA, 120 bp, Artificial Sequence
  ENSG00000172324_15 (sequence is synthesized)
actgatgggagagttttcatactctttagaggcattaaggcaataattctgatttgggccttgatagaatttggatatttgtccccattcacatctcatgtttaattgcaatctccagtg

SEQ ID NO: 583803 - DNA, 120 bp, Artificial Sequence
  ENSG00000172324_16 (sequence is synthesized)
ctggaggtggggcctggtgggaggtgtttgaatctatgggggtggatctctcatgggttggtgttgtattcatgatagtgagttcttgtgagatctggtcatttaaaagtgtgtagcact

SEQ ID NO: 583804 - DNA, 120 bp, Artificial Sequence
  ENSG00000172324_17 (sequence is synthesized)
gtgtgtagcactcccaccaatcccctgccactttctctctcctctcactctgcctctctctcttgctcctgcttttgtcatgtgatgtacctgctccccctttgccttctgccatgattg

SEQ ID NO: 583805 - DNA, 120 bp, Artificial Sequence
  ENSG00000172324_18 (sequence is synthesized)
ggcctccctagaagctaagctgatgccagcaccatgcttcctgtaaagcctgaagaactgtgagccaattaaatctctttatgaattacctagcctaaggaatatttttatagcagtgca

SEQ ID NO: 583806 - DNA, 120 bp, Artificial Sequence
  ENSG00000172324_19 (sequence is synthesized)
agaacagtaggccttaatgactgaacaaaaaacctctcggccaattcaatcaactacaaaaagaggccactaaaacaatttgaataaaaccaaggaattattgcttaagcccaaagtgac

SEQ ID NO: 583807 - DNA, 120 bp, Artificial Sequence
  ENSG00000172324_20 (sequence is synthesized)
agctttctaactgacaattaaagtttcttaggaatctaaagagaagcatacgctcatttgggatgaaaagttctctatttttaccagggctgtgattaattctggaagagaacttagcca

SEQ ID NO: 583808 - DNA, 120 bp, Artificial Sequence
  ENSG00000172324_21 (sequence is synthesized)
aagaattgaagaaaatgatttttctcctctacattttcttagaacttgttatgtatccttgaactggcattaaagaactagaataaattcattcagctgtggcctttcttgggtaggcta

SEQ ID NO: 583809 - DNA, 120 bp, Artificial Sequence
  ENSG00000172324_22 (sequence is synthesized)
taaataagtgagtaaataatatctgcctgtgtgtctttaggcaagttgcttggactctaggtgcctcagatcctaaccataaaatggaaattataatagtaattttatcctaggactatt

SEQ ID NO: 583810 - DNA, 120 bp, Artificial Sequence
  ENSG00000172324_23 (sequence is synthesized)
gtgaagaattaaatgagtcagtacatgtaaatacttagaatactgcattgtgaatagaaaatgtcccagaggtgctattactattattattattatataatgcttaatcattatccaaat

SEQ ID NO: 583811 - DNA, 120 bp, Artificial Sequence
  ENSG00000172324_24 (sequence is synthesized)
agaagaaatagaagagatttccttagtttggtaggaaatgtaatttttgcaatggctttattgcattagaaagaggatatggagggacttttgcaaagagggttaagaatattcactttt

SEQ ID NO: 583812 - DNA, 120 bp, Artificial Sequence
  ENSG00000172324_25 (sequence is synthesized)
aagtcattggatctgagattattaatttcatctctgccattttgtaggtacatagcctgatccaagttatttagaaactctgttttcctcatctgtagctacctgaggactaagctctga

SEQ ID NO: 583813 - DNA, 120 bp, Artificial Sequence
  ENSG00000172324_26 (sequence is synthesized)
ggttttatttaacaccatatacagtgacttactttacaatctgactgtagcataacaaggaagaaaatcaaaatgttttacacaaaaatatatttccttgacataccttgaaattgcctt

SEQ ID NO: 583814 - DNA, 85 bp, Artificial Sequence
  ENSG00000172324_27 (sequence is synthesized)
aatccacattctatagagaatcccctctccactttgttttccttccttccttccctgatctagtctgataagaaacaatttacaa

SEQ ID NO: 583815 - DNA, 120 bp, Artificial Sequence
  ENSG00000172324_28 (sequence is synthesized)
aatcaactaagagccaggcacccttttaagtctgataagaaacaatttacaacctgctctctctgaagtctgctgtctgagagcttcttctgcacaataaaacttggtctccacaatcct

SEQ ID NO: 583816 - DNA, 120 bp, Artificial Sequence
  ENSG00000172324_29 (sequence is synthesized)
cccaggtcttcagacgaactcaaccaattgtctgccagaaaatgtttaaatttacccatagcctggaagtctccaatttgagttgtcccgcctttctgaacgaaaccaatgtatttctta

SEQ ID NO: 583817 - DNA, 120 bp, Artificial Sequence
  ENSG00000172324_30 (sequence is synthesized)
aatgtatttgattgatgtatcatgcttccctaaaatatataaaaccaagctgtaccccgaccaccttgggcgaatattctcaggaccttctgacggctgtgttgcgggccatggttactc

SEQ ID NO: 583818 - DNA, 120 bp, Artificial Sequence
  ENSG00000172324_31 (sequence is synthesized)
tttacagagtttgactctttttgtcaacataccccataaaattgatacaacaattaagtgagaatatgcataaagagggcttagcccagtgcctggcatatggtaatacttagtacaggt

SEQ ID NO: 583819 - DNA, 120 bp, Artificial Sequence
  ENSG00000172324_32 (sequence is synthesized)
gtgcctggcatatggtaatacttagtacaggttagcttacattattagtcaatatttttactcagttttatataagtcaaggaaaatccgggtaatgtgttaaaaagagaccaaagaaat

SEQ ID NO: 583820 - DNA, 120 bp, Artificial Sequence
  ENSG00000172324_33 (sequence is synthesized)
aagtttagggtatccactccaattgagacatatcagtctcagccaacaggtgcacccatattactatctctatgatttctcttgcatatcagaagcagttcttagggaactagagcgggc

SEQ ID NO: 583821 - DNA, 120 bp, Artificial Sequence
  ENSG00000172324_34 (sequence is synthesized)
tcaggttcacagctgtggccattttgccaactctatcagctacctggatgcctctcccccttttccttatagctattttttttcctccaccattcttgacctgtactctaactcaccaag

SEQ ID NO: 583822 - DNA, 120 bp, Artificial Sequence
  ENSG00000172324_35 (sequence is synthesized)
ctcctatccttcagtttatcaattttcaaaatggtagtcattgaagcgacacaattaactaatgaaaatgtctcatgctttggatttacatggagctattatcaatctttaccatctcta

SEQ ID NO: 583823 - DNA, 120 bp, Artificial Sequence
  ENSG00000172324_36 (sequence is synthesized)
aacttttttgatgaacagagattctgaataaaaagtcttcataaaaatttttcttgttcaatcacatatatatctacgagtaatggtaaatttctcattgcactgagaagatataaggta

SEQ ID NO: 583824 - DNA, 120 bp, Artificial Sequence
  ENSG00000172324_37 (sequence is synthesized)
tttttgcagtttgcccaactaccaagaagaatgtaagtcttattaatagaattaatatgcattaattgtaatacataagatggagattggttgtaagacttgaatgtttgggggtataca

SEQ ID NO: 583825 - DNA, 120 bp, Artificial Sequence
  ENSG00000172324_38 (sequence is synthesized)
gtaagccacatgttaaatatttcctaaacaagtgtatttattatggggcatataatcagacacacattaaacagaatattttgggcccttaaggaatcaggcattttatagccatttgaa

SEQ ID NO: 583826 - DNA, 120 bp, Artificial Sequence
  ENSG00000172324_39 (sequence is synthesized)
ggaggaggaggtgaaactctttcctgggagggctagctagctggagatagaattcactttagtaaaattaccatcatctagggtgtggcactcatgtttgcaacttccaaaaatcttttc

SEQ ID NO: 583827 - DNA, 120 bp, Artificial Sequence
  ENSG00000172324_40 (sequence is synthesized)
cagatggactgaagttaaccaagctcagaatagctatctgcataagccagaatgacagatttaattttcagtgaagaacaaagctgccaagcttgaacttacgccagtggcacaattatc

SEQ ID NO: 583828 - DNA, 120 bp, Artificial Sequence
  ENSG00000172324_41 (sequence is synthesized)
catctgtcaggaagccatatagaaagacaaattacaatgaaaagtctatttggagagaaagggatcacagcaaagctgataaagtggatcagttcctgatacacccagctagagggtcca

SEQ ID NO: 583829 - DNA, 120 bp, Artificial Sequence
  ENSG00000172324_42 (sequence is synthesized)
gatcggctgaggccctgggcaagggcactaccaatttttctccccaagcattccttttcctttcttccaagatgactgtcctcccttctaatcaatatttatagattgatgaacttacag

SEQ ID NO: 583830 - DNA, 120 bp, Artificial Sequence
  ENSG00000172324_43 (sequence is synthesized)
cttttcctacttttggtctaagaaatatatatttttttctctaaaatgcttctgtgacacaatttacacacagagagtgcgtagtgaaaccacgggctgattttatggtttaagtgttag

SEQ ID NO: 583831 - DNA, 120 bp, Artificial Sequence
  ENSG00000172324_44 (sequence is synthesized)
agttttgtagacaccttgttgttgtcctatgcaccatcaacattcacttactttttttctttgtaggtacatgtaattatgcacactcatgaattaatgagtgatgcattaaaggagctc

SEQ ID NO: 583832 - DNA, 120 bp, Artificial Sequence
  ENSG00000172324_45 (sequence is synthesized)
tgatgagatgcttaacatttttctaaagatgaatagtcttatgtttctagtcttaaaccttcacaaacctagagcttgcctactctgtgatcatccacagaaatgaggaatcatttgtat

SEQ ID NO: 583833 - DNA, 120 bp, Artificial Sequence
  ENSG00000172324_46 (sequence is synthesized)
ttcacttgcttgtgtctagataatgaatctggatctccctgacataaaagcaagcaggggcaacctgactatcttgcatgtaaggtgatacgccatgtatgccagcacgttcttccatca

SEQ ID NO: 583834 - DNA, 120 bp, Artificial Sequence
  ENSG00000172324_47 (sequence is synthesized)
gcttgatccgtgactacctccctgatttcctggtgacttgtcctcatgtctataacattttcaaaccccctggggatgataagccaggtgtttatattgacctttgctgcctttattcta

SEQ ID NO: 583835 - DNA, 120 bp, Artificial Sequence
  ENSG00000172324_48 (sequence is synthesized)
ccctctctcttcttgtgtttctctctccccttatgctggttaagacctcctatatgtaatactgcttgtgggcctggccagggataagagttcactcttttgtacaggcaaataaatagc

SEQ ID NO: 583836 - DNA, 120 bp, Artificial Sequence
  ENSG00000172324_49 (sequence is synthesized)
cacaccggtctcttgcattcatggcttggaacttttacaaactagatatagcagcatctctcttcagaattgccagaccaaatggctggcagtatctagttgaagagactaaccgcacac

SEQ ID NO: 583837 - DNA, 120 bp, Artificial Sequence
  ENSG00000172324_50 (sequence is synthesized)
tttgggtgggaccacattctataaataaaccggcagctgggacccggggagacctcatagaaaaacagagaattcatcttgtgttcaaagccacgttcttctgagatggaactatgatgt

SEQ ID NO: 583838 - DNA, 120 bp, Artificial Sequence
  ENSG00000172324_51 (sequence is synthesized)
caaactagacttaaatgtcagcatgcatagaaaaattggcatgcataaagtatcactttgatattgtatggtatattcttgtttgttctaataaaacatctttcttatgcaaaaagaggc

SEQ ID NO: 583839 - DNA, 120 bp, Artificial Sequence
  ENSG00000172324_52 (sequence is synthesized)
caaaagtctaaaaaagccatagggaacccaaatccaaagggacacttcaaactcatctgattcaaccctctcctttcccatttgggaaaatgagaatctggagaaatgacttttccaaag

SEQ ID NO: 583840 - DNA, 120 bp, Artificial Sequence
  ENSG00000172324_53 (sequence is synthesized)
tcctcagcaagttatgaatggagctgaagacaaaactcaggcttctgactcccaatcagtttctactttattattagatggattctcttttggtcaacaagcatagagcatatggattat

SEQ ID NO: 583841 - DNA, 120 bp, Artificial Sequence
  ENSG00000172324_54 (sequence is synthesized)
cagtaagtccagctcattccctcctacctcatccattcagcagcaaatcacaactatgcatttacagcctattctaccttttatttgtaaaatggggcgagaaacgctgccacttcttga

SEQ ID NO: 583842 - DNA, 120 bp, Artificial Sequence
  ENSG00000172324_55 (sequence is synthesized)
gtctattaggagaattaaatgggtttataaaaatcaagtctttcaaacagtacctcgcacacaataagtactaaataagtgtttgattatattattatattatgatcgttatatgattat

SEQ ID NO: 583843 - DNA, 120 bp, Artificial Sequence
  ENSG00000172324_56 (sequence is synthesized)
tgtttgtgattaattatatattatgtgttttgttcttataatagtaacacaccaaatatagtaagtcataggccaaacccttctggtaaactctgaggataagtggtggaaaaaaatcta

SEQ ID NO: 583844 - DNA, 120 bp, Artificial Sequence
  ENSG00000172324_57 (sequence is synthesized)
tttattcagcaaaatatttagtgggcacctatgtcccaggccctgttctttgtacttatgataaaactgtctttgcaaaattataactgaggaaattatgacagtcaaagaaatcatatc

SEQ ID NO: 583845 - DNA, 120 bp, Artificial Sequence
  ENSG00000172324_58 (sequence is synthesized)
aaattatgacagtcaaagaaatcatatctacctgactccatcttgcttctaatctttaagctgtctttgtccattcttgggcataagctgaagtaactttgggaaggaattcagttcatg

SEQ ID NO: 583846 - DNA, 120 bp, Artificial Sequence
  ENSG00000172324_59 (sequence is synthesized)
gctctttcctgaagagaccccccttttgcctagggaccagtctgtctttgcaggactaacaaattagctgcaagattagaaattactgtttaggggtcatgcagcctctgactccaagag

SEQ ID NO: 583847 - DNA, 80 bp, Artificial Sequence
  ENSG00000172324_60 (sequence is synthesized)
aattactgtttaggggtcatgcagcctctgactccaagagtataaaccttcccaaattggccccggggataacatcacta

SEQ ID NO: 583848 - DNA, 120 bp, Artificial Sequence
  ENSG00000172324_61 (sequence is synthesized)
cagaagacagcaagaaaaactcacttcgacccatttgattccatctccagcctaaccaatcagcattccccacttcccaagcccctactcgccaaattatctttaaaaactctgatccct

SEQ ID NO: 583849 - DNA, 120 bp, Artificial Sequence
  ENSG00000172324_62 (sequence is synthesized)
ctactcgccaaattatctttaaaaactctgatccctgatgctcagggagactaatttgagtaataataaaactccagtcctcctgcacaaccagctctgcctgaattactctttctccat

SEQ ID NO: 583850 - DNA, 120 bp, Artificial Sequence
  ENSG00000172324_63 (sequence is synthesized)
tgcaattcccctgtcttgataaatgagctctgtctaggcagtgggcaaggtgaacccattgggtggttacaaggatagatcaggaaacagaatgggcaaaactccctgcctgtctttgag

SEQ ID NO: 583851 - DNA, 120 bp, Artificial Sequence
  ENSG00000172324_64 (sequence is synthesized)
taacttacattctggtagggaagatttcaccaagataagagataccaaattcctcttacttcctttttgataggattaaatagattgatgttttagtgaagatcaatctaggctcgtctt

SEQ ID NO: 583852 - DNA, 120 bp, Artificial Sequence
  ENSG00000172324_65 (sequence is synthesized)
ggttttgactgcttgaccagtgatttgaggggagattagaaatttgtaaaaaacacaaagctaggagcagtttttaatatgataagtgacacagaaccacagttaccattgggtgcaaac

SEQ ID NO: 583853 - DNA, 120 bp, Artificial Sequence
  ENSG00000172324_66 (sequence is synthesized)
atgcatgggcaaacaaattccatacaaataataaaatacagcaaccttaatttcaccactgagtctttctcagggcatttctgcctctttatacgcatttgtatttcctaatttttaaaa

SEQ ID NO: 583854 - DNA, 120 bp, Artificial Sequence
  ENSG00000172324_67 (sequence is synthesized)
agacagggtctcactctgtcatccaggcttgagtgcagtggcacagtcatggtcatggctcactgcagcctagacctcctgggctcaagtgatccccctcacctcagccttccaagtagc

SEQ ID NO: 583855 - DNA, 120 bp, Artificial Sequence
  ENSG00000172324_68 (sequence is synthesized)
tggaactacaggcatgtgccaccacaccctgctaagttttgtattattattattgttattattttttgagacggagtctcgctcggtcaccaggttggagtgcagtggcatgcgatctca

SEQ ID NO: 583856 - DNA, 120 bp, Artificial Sequence
  ENSG00000172324_69 (sequence is synthesized)
ttagtagagacagggttttgccatattttccaggctgttctcaaattcttgagctcaagcaattgggctgcctccacctcccaaagtgctgggagtgagccactgttcctggcctgtttc

SEQ ID NO: 583857 - DNA, 120 bp, Artificial Sequence
  ENSG00000172324_70 (sequence is synthesized)
cctgtttcctcattttgatcttacatcagtgccagtctgtctttcttaactgccagatatgtatgggcttacctcttgtcttcatagtcatcgtctgttctggcctgatgacatcaaagt

SEQ ID NO: 583858 - DNA, 120 bp, Artificial Sequence
  ENSG00000172324_71 (sequence is synthesized)
tgtcccttgcttatcactgtctttaaatattgaatgaaccctcttctccctgctgcttttcttgcccaggaaatattgattgctgtttgttcttgaccacaatggctcagcccatctcag

SEQ ID NO: 583859 - DNA, 120 bp, Artificial Sequence
  ENSG00000172324_72 (sequence is synthesized)
tcagcttaggtacggctcccctttcccctttatggaaacctgttcatatcccttctttcctataattgtgctgaccgtgctagtccaaatttttgtcattctatgaattttgtgcaatga

SEQ ID NO: 583860 - DNA, 120 bp, Artificial Sequence
  ENSG00000172324_73 (sequence is synthesized)
cttttcttaagagcattatataattagaataaatgttctggtcttaagcatgctaagtgtgtgtgtgcatatatatgcacaaacatacacatatatacaattatccctgcacacacacat

SEQ ID NO: 583861 - DNA, 120 bp, Artificial Sequence
  ENSG00000172324_74 (sequence is synthesized)
ataacatatatatatatacaaatatacatatacacacaaatatgtatacacacacacacacacaaatttttttcccacttagttttactacctagaagaatagattgttagaccattgcc

SEQ ID NO: 583862 - DNA, 120 bp, Artificial Sequence
  ENSG00000172324_75 (sequence is synthesized)
tggatttcctccaccaaaatggaatatgtcaaaaattgtagcccactaaattcagttcccttcttttgagttctcatactaaagatctataatgcttaaaaatgcctaactttattatac

SEQ ID NO: 583863 - DNA, 120 bp, Artificial Sequence
  ENSG00000172331_0 (sequence is synthesized)
gatgagtcctaggaggcgctggctctttggcggctcggaggagcggctgctgctgctgctgctgctgctggtggcccctttgcagatgtattgctgtccttgaatattagcccatttgaa

SEQ ID NO: 583864 - DNA, 120 bp, Artificial Sequence
  ENSG00000172331_1 (sequence is synthesized)
aacgcctgggaagttcagccatcagtatgtccaagtacaaacttattatgttaagacatggagagggtgcttggaataaggagaaccgtttttgtagctgggtggatcagaaactcaaca

SEQ ID NO: 583865 - DNA, 120 bp, Artificial Sequence
  ENSG00000172331_2 (sequence is synthesized)
gcgaaggaatggaggaagctcggaactgtgggaagcaactcaaagcgttaaactttgagtttgatcttgtattcacatctgtccttaatcggtccattcacacagcctggctgatcctgg

SEQ ID NO: 583866 - DNA, 120 bp, Artificial Sequence
  ENSG00000172331_3 (sequence is synthesized)
aagagctaggccaggaatgggtgcctgtggaaagctcctggcgtctaaatgagcgtcactatggggccttgatcggtctcaacagggagcagatggctttgaatcatggtgaagaacaag

SEQ ID NO: 583867 - DNA, 120 bp, Artificial Sequence
  ENSG00000172331_4 (sequence is synthesized)
tgaggctctggagaagaagctacaatgtaaccccgcctcccattgaggagtctcatccttactaccaagaaatctacaacgaccggaggtataaagtatgcgatgtgcccttggatcaac

SEQ ID NO: 583868 - DNA, 120 bp, Artificial Sequence
  ENSG00000172331_5 (sequence is synthesized)
tgccacggtcggaaagcttaaaggatgttctggagagactccttccctattggaatgaaaggattgctcccgaagtattacgtggcaaaaccattctgatatctgctcatggaaatagca

SEQ ID NO: 583869 - DNA, 120 bp, Artificial Sequence
  ENSG00000172331_6 (sequence is synthesized)
gtagggcactcctaaaacacctggaaggtatctcagatgaagacatcatcaacattactcttcctactggagtccccattcttctggaattggatgaaaacctgcgtgctgttgggcctc

SEQ ID NO: 583870 - DNA, 120 bp, Artificial Sequence
  ENSG00000172331_7 (sequence is synthesized)
agcagccattaagaaagtagaagatcaaggaaaagtgaaacaagctaaaaaatagtctttctcaactgttggctaagaagaaatgcaaaagaagtggcataggagtgtgttatgggtgct

SEQ ID NO: 583871 - DNA, 120 bp, Artificial Sequence
  ENSG00000172331_8 (sequence is synthesized)
gaactctctctctttttccccgattttccagagctaggctgtggagtagagtttgtataggtaactaggtaacttattgtggcccagataaggctttaggatgcctcagtgcttatgtca

SEQ ID NO: 583872 - DNA, 120 bp, Artificial Sequence
  ENSG00000172331_9 (sequence is synthesized)
tagccttatgagttagctttcttgctagccccctagtcggtcaccaaactagtaactagtggggcttaatgaaggtcataagtttctgagatgggagagcaacaagtagagatgaagtta

SEQ ID NO: 583873 - DNA, 120 bp, Artificial Sequence
  ENSG00000172331_10 (sequence is synthesized)
aaggtatttatcattcaagaaatcattattgagtcaccattgacaggcactattctaatcagtagttcactttaatatttaataagattttctgggataacagtaagggatattagataa

SEQ ID NO: 583874 - DNA, 120 bp, Artificial Sequence
  ENSG00000172331_11 (sequence is synthesized)
tataccgtatgtatttattactagtcttttcctctaggaaaagggatactttgataattaaggccagaggcccattagttgagaaagtcacagatatatttctccaagaaagccaacaac

SEQ ID NO: 583875 - DNA, 120 bp, Artificial Sequence
  ENSG00000172331_12 (sequence is synthesized)
caccaccacaatgacagaaatgacaacaaggccctttaacttgtcttctagtttagagacatccttcatttgacatttagtagaattcctctttggccacaagaataagcagcaaataaa

SEQ ID NO: 583876 - DNA, 120 bp, Artificial Sequence
  ENSG00000172331_13 (sequence is synthesized)
caactatggctgttgaggttctcattttggtttgttttaattttttgaactttgggtacctgtaattagtttaaaaataaagttcctgataataaagtgactgaaaatggcatccccaaa

SEQ ID NO: 583877 - DNA, 120 bp, Artificial Sequence
  ENSG00000172331_14 (sequence is synthesized)
gagcgtcgatgccggcggcagtgatgagtcctaggaggcgctggctctttggcggctcggaggagcggctgctgctgctgctgctgctgctggtggcccctttgcagaaaagttctaaga

SEQ ID NO: 583878 - DNA, 120 bp, Artificial Sequence
  ENSG00000172331_15 (sequence is synthesized)
acagtgctgttggctcagtgagatgaggttatcggaaaactttctgtttacacaagagttgcctccttcaaagaagcatgcatggtccttgcaggtcactgtgcccatcactctgcatag

SEQ ID NO: 583879 - DNA, 120 bp, Artificial Sequence
  ENSG00000172331_16 (sequence is synthesized)
tccagctgcactctgcttcacacagctgcctgcccattgcaggcatttgagtttgcaatccatgccttaaactttaaatcacactggctacagcgttgtgtgtttcttggtaaacactgg

SEQ ID NO: 583880 - DNA, 120 bp, Artificial Sequence
  ENSG00000172331_17 (sequence is synthesized)
ctggttcaggggctagaaaagagcgtcgatgccggcggcagtgatgagtcctaggaggcgctggctctttggcggctcggaggagcggctgctgctgctgctgctgctgctggtggcccc

SEQ ID NO: 583881 - DNA, 120 bp, Artificial Sequence
  ENSG00000172331_18 (sequence is synthesized)
tttgcagaatgagcctcgcaggcagtcaccgttctgtcaactgagaggaggagcccgctttggtagtgctgtccttatggcaagaatatatagaagttggagggaagataaactctcttc

SEQ ID NO: 583882 - DNA, 120 bp, Artificial Sequence
  ENSG00000172331_19 (sequence is synthesized)
acaaggagagagagaggcgggctgagcagccatgtcagcagattctccgaggatggagtgggcccagcagatcttcaggccagcagcttaaatgtaaggagttcagcatagcttgagagt

SEQ ID NO: 583883 - DNA, 120 bp, Artificial Sequence
  ENSG00000172331_20 (sequence is synthesized)
tgctggtctccctttactagattctccccctgctaagacgtagctggtgtgtgtaggatatctggagggctggggaggaggaggtggggcctctttatcagtgtggttcctctcactcct

SEQ ID NO: 583884 - DNA, 120 bp, Artificial Sequence
  ENSG00000172336_0 (sequence is synthesized)
actccgcagcccgttcaggaccccggcgcgggcagggcgcccacgagctggctggctgcttgcacccacatccttctttctctgggacctggggtcgcggttacttgggctggccggcga

SEQ ID NO: 583885 - DNA, 120 bp, Artificial Sequence
  ENSG00000172336_1 (sequence is synthesized)
acccttgagtggcctggcggggagcgggcctcgcgcgcctggagggccctgtggaacgaagagaggcacacagcatggcagaaaaccgagagccccgcggtgctgtggaggctgaactgg

SEQ ID NO: 583886 - DNA, 120 bp, Artificial Sequence
  ENSG00000172336_2 (sequence is synthesized)
atccagtggaatacacccttaggaaaaggcttcccagccgcctgccccggagacccaatgacatttatgtcaacatgaagacggactttaaggcccagctggcccgctgccagaagctgc

SEQ ID NO: 583887 - DNA, 120 bp, Artificial Sequence
  ENSG00000172336_3 (sequence is synthesized)
ggcccggggtcagaacgcgtgctctgagatctacattcacggcttgggcctggccatcaaccgcgccatcaacatcgcgctgcagctgcaggcgggcagcttcgggtccttgcaggtggc

SEQ ID NO: 583888 - DNA, 120 bp, Artificial Sequence
  ENSG00000172336_4 (sequence is synthesized)
tgccaatacctccaccgtggagcttgttgatgagctggagccagagaccgacacacgggagccactgactcggatccgcaacaactcagccatccacatccgagtcttcagggtcacacc

SEQ ID NO: 583889 - DNA, 120 bp, Artificial Sequence
  ENSG00000172336_5 (sequence is synthesized)
caagtaattgaaaagacactcctccacttatcccctccgtgatatggctcttcgcatgctgagtactggacctcggaccagagccatgtaagaaaaggcctgttccctggaagcccaaag

SEQ ID NO: 583890 - DNA, 120 bp, Artificial Sequence
  ENSG00000172336_6 (sequence is synthesized)
gactctgcattgagggtgggggtaattgtctcttggtgggcccagttagtgggccttcctgagtgtgtgtatgcggtctgtaactattgccatataaataaaaaatcctgttgcactagt

SEQ ID NO: 583891 - DNA, 120 bp, Artificial Sequence
  ENSG00000172339_0 (sequence is synthesized)
aactttgacagcggctggtccccggaagttggacgcatgcgccgtttctctgcatggtgtgcgttctcgttctagctgcggccgcaggagctgtggcggttttcctaatcctgcgaatat

SEQ ID NO: 583892 - DNA, 120 bp, Artificial Sequence
  ENSG00000172339_1 (sequence is synthesized)
gggtagtgcttcgttccatggacgttacgccccgggagtctctcagtatcttggtagtggctgggtccggtgggcataccactgagatcctgaggctgcttgggagcttgtccaatgcct

SEQ ID NO: 583893 - DNA, 120 bp, Artificial Sequence
  ENSG00000172339_2 (sequence is synthesized)
actcacctagacattatgtcattgctgacactgatgaaatgagtgccaataaaataaattcttttgaactagatcgagctgatagagaccctagtaacatgtataccaaatactacattc

SEQ ID NO: 583894 - DNA, 120 bp, Artificial Sequence
  ENSG00000172339_3 (sequence is synthesized)
accgaattccaagaagccgggaggttcagcagtcctggccctccaccgttttcaccaccttgcactccatgtggctctcctttcccctaattcacagggtgaagccagatttggtgttgt

SEQ ID NO: 583895 - DNA, 120 bp, Artificial Sequence
  ENSG00000172339_4 (sequence is synthesized)
gtaacggaccaggaacatgtgttcctatctgtgtatctgcccttctccttgggatactaggaataaagaaagtgatcattgtctacgttgaaagcatctgccgtgtagaaacgttatcca

SEQ ID NO: 583896 - DNA, 120 bp, Artificial Sequence
  ENSG00000172339_5 (sequence is synthesized)
tgtccggaaagattctgtttcatctctcagattacttcattgttcagtggccggctctgaaagaaaagtatcccaaatcggtgtaccttgggcgaattgtttgacaaatggcaactgact

SEQ ID NO: 583897 - DNA, 120 bp, Artificial Sequence
  ENSG00000172339_6 (sequence is synthesized)
tctttagaattttgcagttaacagtagtatgtactcaaattggggggaaaaaaaccctacatgtttcttgtaaaggcgtctgacagtcctgagaattattgatggtaaggaataaaaaat

SEQ ID NO: 583898 - DNA, 120 bp, Artificial Sequence
  ENSG00000172339_7 (sequence is synthesized)
gtacagatgactcagtgaagaaactgaggcttctcttatgaaacaaacattgataaacgtaactactaaatgtttatgcctctgtaaaccaaatttcttttctagataaaaatatgtatt

SEQ ID NO: 583899 - DNA, 120 bp, Artificial Sequence
  ENSG00000172339_8 (sequence is synthesized)
actacctgcaaattttcttctggctgttttagtagtattttttttacagaactaaatatagagtttgtatgattagtaatatttcctgtcctacagcttttttttttttttttttttttt

SEQ ID NO: 583900 - DNA, 120 bp, Artificial Sequence
  ENSG00000172339_9 (sequence is synthesized)
gtaaagtattctgcattgtaaaagaagagagaaaaaaagtatttctgagttttggttcagatacaaaaggctttatttcctgtatggaaacagtgatgtccccagtgaatcctttcagca

SEQ ID NO: 583901 - DNA, 120 bp, Artificial Sequence
  ENSG00000172339_10 (sequence is synthesized)
taaaggaagcagttatattaaattggcttcatgacaatttgcactccacaagcctccagaaccttgagcataaaccagtatcattttttgtacttcagtcttgctttttgagtagttggc

SEQ ID NO: 583902 - DNA, 87 bp, Artificial Sequence
  ENSG00000172339_11 (sequence is synthesized)
tcattttttgtacttcagtcttgctttttgagtagttggccttaatacagagtatcttttaaaatctcttgtttaggccggcatgac

SEQ ID NO: 583903 - DNA, 79 bp, Artificial Sequence
  ENSG00000172339_12 (sequence is synthesized)
cactccatccagcctgggcaaaactcaatgatgtagggactgttattattcccattttacagatgacttgtccaagatc

SEQ ID NO: 583904 - DNA, 120 bp, Artificial Sequence
  ENSG00000172339_13 (sequence is synthesized)
ctgttattattcccattttacagatgacttgtccaagatcacatgagtagtaagtagcaaagccagaattcaagttcaggtaaacctgacttcttagtggggccagtttcacgggtgtgt

SEQ ID NO: 583905 - DNA, 120 bp, Artificial Sequence
  ENSG00000172339_14 (sequence is synthesized)
ggcctgtgcagtcacacagagttctgcactgaagagggcctccacttggtttaatgttctgctgtgactctcttgaacttctgaatatttttttaaacaatgaacttatattttagaccc

SEQ ID NO: 583906 - DNA, 120 bp, Artificial Sequence
  ENSG00000172339_15 (sequence is synthesized)
tctgaattctttcgctggtcctgcttgagactgtgtttctagtggtgccatgtctactggaatagaagtacaatagttagtgcagtgcctggcccaggagctcctcaaaaacaggaattc

SEQ ID NO: 583907 - DNA, 80 bp, Artificial Sequence
  ENSG00000172339_16 (sequence is synthesized)
tgcagtgcctggcccaggagctcctcaaaaacaggaattccatttccttccctctaacctctgcttctttaacaaagcag

SEQ ID NO: 583908 - DNA, 120 bp, Artificial Sequence
  ENSG00000172339_17 (sequence is synthesized)
ttaaatcttttgctttataagtatgatataaatctaataaatagtgattagtgaagtgattgaatttttgtgaaaagagacatgattatccacgatcatgtaagattaaaatcctgaggc

SEQ ID NO: 583909 - DNA, 120 bp, Artificial Sequence
  ENSG00000172339_18 (sequence is synthesized)
aaaaaagcaaaaaaaacaaaaaaactgtcttctctgaatcatgtaacaggcgcatctgtcagccggacatcttcctaggtttttggctggagaaatgtgtagccgaaggtgtctcagaat

SEQ ID NO: 583910 - DNA, 120 bp, Artificial Sequence
  ENSG00000172339_19 (sequence is synthesized)
ggctggagaaatgtgtagccgaaggtgtctcagaatggtgagaacactttgctgtctggatttagtgggcctggggcagccaaatgatagttcattgtgctttgattttaatcctcaaat

SEQ ID NO: 583911 - DNA, 120 bp, Artificial Sequence
  ENSG00000172339_20 (sequence is synthesized)
ctcagtcactggttgcttccctggagtatcagagcgtattagtatcatacaaccaggggctgaggtgaaataagccttgactgttctagaaagaaagtgattttttcagggacaacagca

SEQ ID NO: 583912 - DNA, 120 bp, Artificial Sequence
  ENSG00000172339_21 (sequence is synthesized)
tctgcattttattgctgtttaaggctttctctgctctgtactttgttccctgagtggcactaggtaaatgaatggtaagggaaagtgaactgcgtttagtgaatgcctctctgtgctgtg

SEQ ID NO: 583913 - DNA, 120 bp, Artificial Sequence
  ENSG00000172339_22 (sequence is synthesized)
gggcagcttccctgggcccccacaggtaatcctgctgcagaggcttctgtcaggtcagagcttaacaaagatcagaccagagagaattgtagaaaagatgctataattttttccagaaac

SEQ ID NO: 583914 - DNA, 120 bp, Artificial Sequence
  ENSG00000172339_23 (sequence is synthesized)
atatgtcccagatgttttgcagagccttaacttaagacagtggttagcctggaatgtcagagaaagaatgtgtatgtgttatatcaccaaaagtttagaaatgttatatctttcataggt

SEQ ID NO: 583915 - DNA, 120 bp, Artificial Sequence
  ENSG00000172339_24 (sequence is synthesized)
tcaggctgctgtgtactcattcagagccaggctgagacatgtgttattgcatcttcctgatcattcagattactctggtaaacaagtgcatgctctgctgtgtgttactgttatggctaa

SEQ ID NO: 583916 - DNA, 120 bp, Artificial Sequence
  ENSG00000172339_25 (sequence is synthesized)
tttgagtcctcaaggtcccattagcagagggggctggtggcacaatttccctgctgtgcatttctgtgacattcagaaagatagtgcgccagtcccaactcaaactgaagaagatgagta

SEQ ID NO: 583917 - DNA, 120 bp, Artificial Sequence
  ENSG00000172339_26 (sequence is synthesized)
gctagcttgtcccttccagtttctcttagaacactctgaatgcaacttttactgtaggagactgttcatgaaaaaattaattgaatcagtcttcaaatgagaggcagggaaaccacacat

SEQ ID NO: 583918 - DNA, 120 bp, Artificial Sequence
  ENSG00000172339_27 (sequence is synthesized)
cctgcccacacctacttccctggaagatttctatctacagtccagctatcctaaaaggtctcagtagcttgccaggtcagaatgtctaactgtttcaaaaaggatgcccaaaaatcatga

SEQ ID NO: 583919 - DNA, 120 bp, Artificial Sequence
  ENSG00000172339_28 (sequence is synthesized)
caggaaactttagcctggaacgaagagtgctatgaaaccgtgtcaacaagaggagtggtgacaattgtgagttgaatagcaagatgtccttgctaggaaggagatgacccaagcttcccc

SEQ ID NO: 583920 - DNA, 120 bp, Artificial Sequence
  ENSG00000172339_29 (sequence is synthesized)
ttataaaagcaacttggaacacatcattctacctttcaaagatacatggtaagttaaaattgagaaacgtacccctttactatacagttccttgggttgaatgagtgctttttttttttt

SEQ ID NO: 583921 - DNA, 120 bp, Artificial Sequence
  ENSG00000172339_30 (sequence is synthesized)
ctgaaaagccccatcccccaaaaggcatttgatagcaatgtattaagcaccttttaccaacaataagaacatcattgtaagtgttaaagaaaattgtccttctccctacaggtcagcgtt

SEQ ID NO: 583922 - DNA, 120 bp, Artificial Sequence
  ENSG00000172339_31 (sequence is synthesized)
tgagcctcacggggtttcttcccatgacttcagccctggcgcacaatgagcagacacccaaatcttgtccgccttcaacattcttttgttagggcccatccctctagcactctaaaaaca

SEQ ID NO: 583923 - DNA, 120 bp, Artificial Sequence
  ENSG00000172339_32 (sequence is synthesized)
aatcatctacaactgtgttcctgctgcccactcattttaaacatgaatttgacatagctcctccttttcgcactggagtagttaactaatgctagcccactagcttctatcatgtccctc

SEQ ID NO: 583924 - DNA, 120 bp, Artificial Sequence
  ENSG00000172339_33 (sequence is synthesized)
aagcaacaaactttgggatcatttttgctttttcactctttctttacccaattataattggttgccttttttgtttcattatccccagaattttctcgtcttcctcttctctccttgaaa

SEQ ID NO: 583925 - DNA, 120 bp, Artificial Sequence
  ENSG00000172339_34 (sequence is synthesized)
ttacttttactgttcctctcctttgtcatcacctattgattctgcctttgacttagttcatatctaccctttccttttcagtcccatagttacaacctaagccagctcttcaacaaaaat

SEQ ID NO: 583926 - DNA, 120 bp, Artificial Sequence
  ENSG00000172339_35 (sequence is synthesized)
ttcttgcttgatgagcaagttttattgaggaactgaggaaacacctgtggaaggaacaaatgaatgattttgttaattacttatgtttgtcttcagagacttcccctcatgctagttctg

SEQ ID NO: 583927 - DNA, 72 bp, Artificial Sequence
  ENSG00000172339_36 (sequence is synthesized)
tttttttttcgagactactggctcactgtaacctctgcctcctggcttcaagcgattcttgtgcctcagcct

SEQ ID NO: 583928 - DNA, 88 bp, Artificial Sequence
  ENSG00000172339_37 (sequence is synthesized)
acgtccggcccttgttccactttttataatatttacaccacagagaggttaagtaatttattaaagattatagaactagaaagtgaca

SEQ ID NO: 583929 - DNA, 120 bp, Artificial Sequence
  ENSG00000172339_38 (sequence is synthesized)
ttaagtaatttattaaagattatagaactagaaagtgacaaagctcagatttgaaccaaggcattctagctccagccaggcttaccttaatagctacgttaggtgttttttttttttttt

SEQ ID NO: 583930 - DNA, 120 bp, Artificial Sequence
  ENSG00000172339_39 (sequence is synthesized)
aaagaaaaaagaaaaaatgtcctcaaaaggaaataaatggggtaacagggtactatgacggagtagaaggtagttggtgttctagatagggaaatcaggaaaggcctttctaagaaagtg

SEQ ID NO: 583931 - DNA, 120 bp, Artificial Sequence
  ENSG00000172339_40 (sequence is synthesized)
gtattttacctgagttccaaaggataatgccttaaatatttgtcctccttctacttcactcccaacttagattttgccccacccacaaagtctttgtcttcatttagcttgagcaaattc

SEQ ID NO: 583932 - DNA, 120 bp, Artificial Sequence
  ENSG00000172339_41 (sequence is synthesized)
tctaaataactctgtgacatagccacccataccaaaggttagtgctgagttatataccatcgaattgcagtccttgttcttagaaacacctgtggaaggaataatgaatgctattgctga

SEQ ID NO: 583933 - DNA, 120 bp, Artificial Sequence
  ENSG00000172339_42 (sequence is synthesized)
ttatttatgtttgtcttcagggactgtacctcattctagttttgtatccttgttccacttttgatagtatttacaccacagctctgtacaaaacataggcactaattaaatacataaatt

SEQ ID NO: 583934 - DNA, 120 bp, Artificial Sequence
  ENSG00000172339_43 (sequence is synthesized)
gcgagactccacctcaaaaaaaaaaaaagaaaaaaattatagcttcagacttgtctaggctcacttcagttatattttatctagaccagtgcttcacaaacgttttgatctcaggacctc

SEQ ID NO: 583935 - DNA, 120 bp, Artificial Sequence
  ENSG00000172339_44 (sequence is synthesized)
gttatattttatctagaccagtgcttcacaaacgttttgatctcaggacctcattatactaaaaaattattgaaaactggctgggcacagtgtttcacacttgtaatcccagcactttgg

SEQ ID NO: 583936 - DNA, 120 bp, Artificial Sequence
  ENSG00000172339_45 (sequence is synthesized)
aatgagcttttgtttgtgtgagctatatttgtcaatatttaccattgtagaaactagacaaaaattttaaacgcaagaatataaaaggacatattccactggctgtcagaacaatatcat

SEQ ID NO: 583937 - DNA, 120 bp, Artificial Sequence
  ENSG00000172339_46 (sequence is synthesized)
cacacatcttgtagcatctggaaaactataccatcataagaatgacaaggaaaaggcaaataacatcttaatattactatgaaaatagttttgacctcataaacccctaaaaacgtcttg

SEQ ID NO: 583938 - DNA, 120 bp, Artificial Sequence
  ENSG00000172339_47 (sequence is synthesized)
aagactccccaggaccttggaccacattttaagaactgctgctttacataatgtcacatcagcgaattcatctcttctttttttaaaataagaggcagggtttcactatgttgtccagac

SEQ ID NO: 583939 - DNA, 120 bp, Artificial Sequence
  ENSG00000172339_48 (sequence is synthesized)
tggtctcaaactcctggtctcaaggaatcctcctatcttggccttccaaagtgctggaatcacaggcatgcggcactgcgcccggcctatctcctctttagtcagtcagtgatctgtgta

SEQ ID NO: 583940 - DNA, 120 bp, Artificial Sequence
  ENSG00000172339_49 (sequence is synthesized)
ttagttttatcgctgtgtaaaaaattgccacacatatattggcttaaaacaatacattatctctgtaggttagaaatccaggcaaagaaggttttctgctcaagatctcaaaaggctgaa

SEQ ID NO: 583941 - DNA, 120 bp, Artificial Sequence
  ENSG00000172339_50 (sequence is synthesized)
atcaagatgatggccaaggctgagttctgatctgcaactctgaatccttttcagataccttcagatggttgttggcagaattcagttccttgcagttgtaggatttgtggtggcctgctt

SEQ ID NO: 583942 - DNA, 120 bp, Artificial Sequence
  ENSG00000172339_51 (sequence is synthesized)
cctatcttttaaggactcacatgactgagtcagtgtaatctcccttttgattaattcaaggtcaactgattaggatcataattacgtcccttttgccatgttaatgtaacataatcagag

SEQ ID NO: 583943 - DNA, 120 bp, Artificial Sequence
  ENSG00000172339_52 (sequence is synthesized)
gaatgacatgtcatgatattcacagatcccacccatactaacggatagtagattatccagggcatgtaaatcagggggtggaatattaggggacatcttttttttttttctttaagacgg

SEQ ID NO: 583944 - DNA, 120 bp, Artificial Sequence
  ENSG00000172339_53 (sequence is synthesized)
ccaggctggagtgctgtggtgcaatctcaactcactgcaacctctacctccctggttcaagcgattctcgtgcctcagccgcctgactagctgggatttcaggagtgcaccaccagcccg

SEQ ID NO: 583945 - DNA, 120 bp, Artificial Sequence
  ENSG00000172339_54 (sequence is synthesized)
ctggaattacaggcgtcagccaccatgcccgttctgggggccatctgagacttctgccaaccacaatcagctagatgttttttgttttgttttgaaaaaataataataataacctttcac

SEQ ID NO: 583946 - DNA, 120 bp, Artificial Sequence
  ENSG00000172339_55 (sequence is synthesized)
ttgggccaccaaactcctaccttagtatccaagttctctaatttttttttaatatgggaaatccacatctcccaaactctatcccttttctggcaagttacttgacctttctgtaaaata

SEQ ID NO: 583947 - DNA, 120 bp, Artificial Sequence
  ENSG00000172339_56 (sequence is synthesized)
agcataatgtacctgcgttagagttgtagggagcactaaacattcagatgatgtatgtacagtgtttagcacagagcctgctaaatagtaagccctcaagccctcagtcacatttgtctc

SEQ ID NO: 583948 - DNA, 73 bp, Artificial Sequence
  ENSG00000172339_57 (sequence is synthesized)
ctaaatagtaagccctcaagccctcagtcacatttgtctccatcagtggtagctcccctggtgtgttaaggag

SEQ ID NO: 583949 - DNA, 120 bp, Artificial Sequence
  ENSG00000172339_58 (sequence is synthesized)
ccggccaggaggctctttttaaactaagggcagcaaccccctagggtggctatagtccaagaaaacccagaaaatacatgctgccaaggatttggagaaattggagccctcctacattgc

SEQ ID NO: 583950 - DNA, 120 bp, Artificial Sequence
  ENSG00000172339_59 (sequence is synthesized)
tggtaggaatgtagaatggtgcagcagctgtggaaaacagttcagcagtttcacaaaaatcaaacatagggttatcatatgacccagaaattctacccataggtgtataccctggagaat

SEQ ID NO: 583951 - DNA, 120 bp, Artificial Sequence
  ENSG00000172339_60 (sequence is synthesized)
taaaaacatgtatttacacaaaaacttatatgttcgcagcagcgttattcataataacccgaaagtagaaacaacccaaatgctctactaatgaacagataaacaaaatgtggtatatcc

SEQ ID NO: 583952 - DNA, 120 bp, Artificial Sequence
  ENSG00000172339_61 (sequence is synthesized)
atatagtggaatattactcgatcacacaaaggaatgaagtactaatacatgctacagtgtggatgaaccttgtaaacagtaggctaagttacagaagccagccacaaaagacaacaaatg

SEQ ID NO: 583953 - DNA, 120 bp, Artificial Sequence
  ENSG00000172339_62 (sequence is synthesized)
catgattctattcatatgaaatgtccagagtaggcaagtccatagacagaaagtagcttagtggtttccaggggcagtgagaaggggaaatggagggcaactcctaatgggtatgaggct

SEQ ID NO: 583954 - DNA, 120 bp, Artificial Sequence
  ENSG00000172339_63 (sequence is synthesized)
tcttttggaggtgatgaaaatgttctggaattcgacagtggtgatggttgtacatctctgtgaatatactaaaagccactgaattgtatactgggtgaattttatggtatctgtagacat

SEQ ID NO: 583955 - DNA, 120 bp, Artificial Sequence
  ENSG00000172339_64 (sequence is synthesized)
tccaattgacagtcacatcttagtatagactttgagtcatctcactggaggcactagacatgcaagaggagaagtctccagattattccagccctgccatttgagtcactccaggctttc

SEQ ID NO: 583956 - DNA, 120 bp, Artificial Sequence
  ENSG00000172339_65 (sequence is synthesized)
tggtcttcccagctgaggctcagacaccttggaagagagaaaagctctcccttctgtgccctgtgatttgctgatccacagagttcataggcatgattaaatggtagtagttttccacca

SEQ ID NO: 583957 - DNA, 120 bp, Artificial Sequence
  ENSG00000172339_66 (sequence is synthesized)
cgaagttttggaataatttgtcacaaagcaataggtaattagaaaaataacctttcagaaggagacagtttctccaaagcttgggtactttcgcttaatattaaaagaggaagaaatttt

SEQ ID NO: 583958 - DNA, 120 bp, Artificial Sequence
  ENSG00000172339_67 (sequence is synthesized)
ttgcctgccaggcaaaaggcagaagatgtatttctacaccatggataggaaaatgattttttttcctcctttctccttggcctgcatgcagcagtgaaaaagaaaccaatggattctttt

SEQ ID NO: 583959 - DNA, 120 bp, Artificial Sequence
  ENSG00000172339_68 (sequence is synthesized)
aaatctttaaccatatgcagatgaataagcacatggttggacttgattcctaatctcttttcctttcctgtataactgagatttttttccactctaataaacttgagcatttaaacagaa

SEQ ID NO: 583960 - DNA, 120 bp, Artificial Sequence
  ENSG00000172339_69 (sequence is synthesized)
tttgaattcctgggctcaagcagtcctgcctcagcctcccaagtaactggaactacaggacttttcagtcgtgtggcattcactaaataataaaggtattgtatgtttcagtgtgtggta

SEQ ID NO: 583961 - DNA, 120 bp, Artificial Sequence
  ENSG00000172339_70 (sequence is synthesized)
tcctttcccctaattcacagggtgaagccagatttggtccacagagcagtcagagaagagcaacacatgcctgtccgatgagtgctgactgagcaccaggaactgtgctagaagttagaa

SEQ ID NO: 583962 - DNA, 120 bp, Artificial Sequence
  ENSG00000172340_0 (sequence is synthesized)
ctgccccgtgccgagtttcctgtttaagatggcgtcccccgtagcagcgcaggccgggaagcttctgcgagccctagcgctgcggccccgcttcctggcggccgggtcccaggcagttca

SEQ ID NO: 583963 - DNA, 120 bp, Artificial Sequence
  ENSG00000172340_1 (sequence is synthesized)
attaacctccagaagatggctgaacctgcaggaataccagagcaagaaactgatgtctgacaacggagtgagagttcaaagattctttgtagcagacactgcaaatgaagctctcgaggc

SEQ ID NO: 583964 - DNA, 120 bp, Artificial Sequence
  ENSG00000172340_2 (sequence is synthesized)
tgctaagagactaaatgcaaaagaaattgttttaaaagcccagatcttagctggaggaagaggaaaaggtgtcttcaatagtggtttgaaaggaggtgttcatttaacaaaagaccctaa

SEQ ID NO: 583965 - DNA, 120 bp, Artificial Sequence
  ENSG00000172340_3 (sequence is synthesized)
tgttgtgggacagctggctaaacagatgattgggtacaatctagcgacaaaacaaactccaaaagaaggtgtgaaagttaacaaggtgatggttgctgaagccttggatatttccagaga

SEQ ID NO: 583966 - DNA, 120 bp, Artificial Sequence
  ENSG00000172340_4 (sequence is synthesized)
aacctacctggcaattctgatggaccggtcctgcaatggccccgtgctggtgggcagcccccaggggggcgtcgacattgaagaggtggctgcttcaaacccggagctcatttttaagga

SEQ ID NO: 583967 - DNA, 120 bp, Artificial Sequence
  ENSG00000172340_5 (sequence is synthesized)
gcaaattgacatttttgaaggaataaaggacagccaagctcagcggatggccgaaaatctaggcttcgttgggcctttgaaaagccaggctgcagatcaaattacgaagctgtataatct

SEQ ID NO: 583968 - DNA, 120 bp, Artificial Sequence
  ENSG00000172340_6 (sequence is synthesized)
cttcctgaaaattgatgctactcaggtggaagtgaatccctttggtgaaactccagaaggacaagttgtctgttttgatgccaagataaactttgatgacaacgcagaattccgacaaaa

SEQ ID NO: 583969 - DNA, 120 bp, Artificial Sequence
  ENSG00000172340_7 (sequence is synthesized)
agacatatttgctatggacgacaaatcagagaatgagcccattgaaaatgaagctgccaaatatgatctaaaatacataggactagatgggaacattgcctgctttgtgaatggtgctgg

SEQ ID NO: 583970 - DNA, 120 bp, Artificial Sequence
  ENSG00000172340_8 (sequence is synthesized)
gctcgccatggctacttgtgatatcattttccttaatggtgggaagccagccaacttcttggatcttggaggtggtgtaaaggaagctcaagtatatcaagcattcaaattgctcacagc

SEQ ID NO: 583971 - DNA, 120 bp, Artificial Sequence
  ENSG00000172340_9 (sequence is synthesized)
gatcaccaaagcctgccgggagctagaactcaaggtgcccctggtggtccggcttgaaggaaccaacgtccaagaggcccagaagatactcaacaacagcggactccccattacttcagc

SEQ ID NO: 583972 - DNA, 120 bp, Artificial Sequence
  ENSG00000172340_10 (sequence is synthesized)
cattgacctggaggatgcagccaagaaggctgtggccagtgtggccaagaagtgatgtctttgtcctgatccaatggagaaagaaagccatttttccgtaaaaagggatggttcatcatt

SEQ ID NO: 583973 - DNA, 120 bp, Artificial Sequence
  ENSG00000172340_11 (sequence is synthesized)
gtgaaagaaatggttatctcattggggaagaaaaggggagggggaaggcaagaatcactgaaaaatcttaaatctgtgttttctggaataagatatctagacagcctaaatctgattttg

SEQ ID NO: 583974 - DNA, 120 bp, Artificial Sequence
  ENSG00000172340_12 (sequence is synthesized)
gtctttataaaaataatatcttgtgttctcatacttttctgtcactgtaagcctgcccagtaggcagtgttttgcagactttggggagtggtctatgtggccaaatattgtgtgtataga

SEQ ID NO: 583975 - DNA, 120 bp, Artificial Sequence
  ENSG00000172340_13 (sequence is synthesized)
cagaatttgaaatcaagtcctgcttcatttacaagaattttggtgggcatctaatcctacataatgaaaaagaaaaacagaccatttaaaaactcagacaagattatatttaatatatta

SEQ ID NO: 583976 - DNA, 120 bp, Artificial Sequence
  ENSG00000172340_14 (sequence is synthesized)
attactaaaaaggcataagattacactgaacatattagctactaaaaaggcactgctaagacattcaagcaaatagctattacacactactgcagattttacaggtttctaattctaaca

SEQ ID NO: 583977 - DNA, 120 bp, Artificial Sequence
  ENSG00000172340_15 (sequence is synthesized)
tatgtttgaaaaatccgtgagtattccaaaatatatttaataatggaatatctgcattaatataccatccatgtgtttttaccatttgccttaatattgaatatactgtttacctcacac

SEQ ID NO: 583978 - DNA, 120 bp, Artificial Sequence
  ENSG00000172340_16 (sequence is synthesized)
taaaaagaaaaccagaagccttatttgtgattttgggagtggaagcttccatttttgtgtcaaaaatgaatcctgattcttatggaaatctctgttattaagatatttcaagatgagaca

SEQ ID NO: 583979 - DNA, 120 bp, Artificial Sequence
  ENSG00000172340_17 (sequence is synthesized)
acactgaagatcaaattgtgtttagtatcactatcttctctcctcgtttctctcttactcctcatcctcccagaatctaccagtttatggtagaaagatgggaaccttatttgaatgtgt

SEQ ID NO: 583980 - DNA, 120 bp, Artificial Sequence
  ENSG00000172340_18 (sequence is synthesized)
tttttttttccatgatgtccaattttgttgtgggaaaggatttggataaaatttttgtttaaattttggtagatttttatctatacaaatttaaataaaattatgttttgtaagctgtaa

SEQ ID NO: 583981 - DNA, 120 bp, Artificial Sequence
  ENSG00000172340_19 (sequence is synthesized)
aagcctgccgggagctagaactcaaggtgcccctggtggtccggcttgaaggtacttttatggaaaaaaaaggaagttatatgcacataaaacaagaaacaggaaattcaaatgagaata

SEQ ID NO: 583982 - DNA, 120 bp, Artificial Sequence
  ENSG00000172340_20 (sequence is synthesized)
taactggtatccaagagaacgtcgcccaccaaaatctgagtaagtgtgccatcagcatttttttatgttaaagatttactttgctaagatacttgctgagattacttttccaaattaatg

SEQ ID NO: 583983 - DNA, 120 bp, Artificial Sequence
  ENSG00000172340_21 (sequence is synthesized)
aatatcatcacaaaattatttttttacatttgggttcagctgcatgctaatggaaatggaaaatggaagggcatggcttatagctgttcattcaccaaaaatattttagaattgtgtcca

SEQ ID NO: 583984 - DNA, 120 bp, Artificial Sequence
  ENSG00000172340_22 (sequence is synthesized)
tggaaataggaccaatatggagctggaactcctgactcatcttgggagtctctgattatagagagactgccagagggagtggaacgaacatggactttacagtaagaccgccttaattta

SEQ ID NO: 583985 - DNA, 120 bp, Artificial Sequence
  ENSG00000172340_23 (sequence is synthesized)
aatcttgacaccattgcctactgctgtgtgatgtttaagctcattgagtttatttaccagggaaagttataatacataattttagcacctaggaaaattaacactcaataaaccttaatc

SEQ ID NO: 583986 - DNA, 120 bp, Artificial Sequence
  ENSG00000172340_24 (sequence is synthesized)
ctccatacagttttgcttattctaccaaggagtaaattatagaatataagtaaagtgaagaatttaggaagaagagaatagacagaataaggacagattggagtctaattagacccattt

SEQ ID NO: 583987 - DNA, 120 bp, Artificial Sequence
  ENSG00000172345_0 (sequence is synthesized)
ataacacccgcgaccccgcagctaagcgcagctcccgacgcaatggacccggcgctggcagcccagatgagcgaggctgtggccgagaagatgctccagtaccggcgggacacagcaggc

SEQ ID NO: 583988 - DNA, 120 bp, Artificial Sequence
  ENSG00000172345_1 (sequence is synthesized)
tggaagatttgccgggaaggcaatggagtttcagtttcctggaggccatctgtggagtttccagggaacctgtaccgaggagaaggcattgtatatgggacactagaggaggtgtgggac

SEQ ID NO: 583989 - DNA, 120 bp, Artificial Sequence
  ENSG00000172345_2 (sequence is synthesized)
tgtgtgaagccagctgttggaggcctacgagtgaagtgggatgagaatgtgaccggttttgaaattatccaaagcatcactgacaccctgtgtgtaagcagaacctccactccctccgct

SEQ ID NO: 583990 - DNA, 120 bp, Artificial Sequence
  ENSG00000172345_3 (sequence is synthesized)
gccatgaagctcatttctcccagagattttgtggacttggtgctagtcaagagatatgaggatgggaccatcagttccaacgccacccatgtggagcatccgttatgtcccccgaagcca

SEQ ID NO: 583991 - DNA, 120 bp, Artificial Sequence
  ENSG00000172345_4 (sequence is synthesized)
ggttttgtgagaggatttaaccatccttgtggttgcttctgtgaacctcttccaggggaacccaccaagaccaacctggtcacattcttccataccgacctcagcggttacctcccacag

SEQ ID NO: 583992 - DNA, 120 bp, Artificial Sequence
  ENSG00000172345_5 (sequence is synthesized)
aacgtggtggactccttcttcccccgcagcatgacccggttttatgccaaccttcagaaagcagtgaagcaattccatgagtaatgctatcgttacttcttggcaaagaactcccgtgac

SEQ ID NO: 583993 - DNA, 120 bp, Artificial Sequence
  ENSG00000172345_6 (sequence is synthesized)
tcatcgaggagctccagctgttgggacaccaaggagcctgggagcacgcagaggcctgtgttcactctttggaacaagctgatggactgcgcatctctgagaatgccaaccagaggcggc

SEQ ID NO: 583994 - DNA, 120 bp, Artificial Sequence
  ENSG00000172345_7 (sequence is synthesized)
agcccacccttcctgcctcctgccccactcagggttggcgtgtgatgagccattcatgtgttccaaactccatctgcctgttacccaaacacgcctctcctggcagggtagacccaggcc

SEQ ID NO: 583995 - DNA, 120 bp, Artificial Sequence
  ENSG00000172345_8 (sequence is synthesized)
tctaaccatctgacagagactcggcctggacaccatgcgatgcactctggcaccaaggctttatgtgcccatcactctcagagaccacgtttccctgactgtcatagagaatcatcatcg

SEQ ID NO: 583996 - DNA, 120 bp, Artificial Sequence
  ENSG00000172345_9 (sequence is synthesized)
ccactgaaaaccaggccctgttgccttttaagcatgtaccgctccctcagtcctgtgctgcagccccccaaatatatttttctgatatagaccttgtatatggctttaatgccgcaaaat

SEQ ID NO: 583997 - DNA, 120 bp, Artificial Sequence
  ENSG00000172345_10 (sequence is synthesized)
atttatttttccttaaaaaaggtgtcaacttggaaataatggtttaaaaacaggataagcattaaggaaaaacactttcaatgtgtcttccatttgatgaatttgtttttctctctttat

SEQ ID NO: 583998 - DNA, 120 bp, Artificial Sequence
  ENSG00000172345_11 (sequence is synthesized)
ccccgcaaggtggagtttcatgtcctcggtgaaaccagacagtgtgaatctgttccagcccaaatctgcagcattagggatgagttctcagaagtgattctgaactgagcacgcactcat

SEQ ID NO: 583999 - DNA, 120 bp, Artificial Sequence
  ENSG00000172345_12 (sequence is synthesized)
gtctgcatggggaactctggggagaagagccttccttttctttcccttgggcatttgcctttccttgtcgtcttactgaggcggaggcaggaggtctctgtcttccaggccctggccagg

SEQ ID NO: 584000 - DNA, 120 bp, Artificial Sequence
  ENSG00000172345_13 (sequence is synthesized)
ccatcctgccatcaggaaagatggaagagtaggcctccgtctagcagccctggctggaaatcccccctctagatcctgctgcaagactgtacaaactcacaggggccatgtccacccagg

SEQ ID NO: 584001 - DNA, 120 bp, Artificial Sequence
  ENSG00000172345_14 (sequence is synthesized)
cacatcatcagaaccagggagcacagccttgccacctagaaggggcctcagcagccgtgcaactttctttccctatctccaatccagagagggatcctctaacattctctagcaacctca

SEQ ID NO: 584002 - DNA, 120 bp, Artificial Sequence
  ENSG00000172345_15 (sequence is synthesized)
tctgcacccccaccaccttccttgtaagaaagaccacgtgtgactaaaatcccttcacgctgcatttacccaggttactattgtgcgcgcaaaatgttttcacagtgttctcagcctttg

SEQ ID NO: 584003 - DNA, 120 bp, Artificial Sequence
  ENSG00000172345_16 (sequence is synthesized)
ctcctccaaacagaaaacgtttcccctgcgttactgttacttccctatttttgagtcctggggtgactgtctcttaaatgtgccaagatgtgagcaagctttaaaacatgacagctcagt

SEQ ID NO: 584004 - DNA, 120 bp, Artificial Sequence
  ENSG00000172345_17 (sequence is synthesized)
gttaaggagacagaaagcttcctctttctctgttctattgcaactacaaattctacagtcatgcctaagatcctttagctaacacccttttcaagaaatcatcagactcttggattgact

SEQ ID NO: 584005 - DNA, 120 bp, Artificial Sequence
  ENSG00000172345_18 (sequence is synthesized)
tagaattcattcattcattaagtgcttaccgagtccccgctctgtggcaagcactgttctatatcaacttctcatgagttcagccaattctaggtgcaccagccaaggaaacttcatgcc

SEQ ID NO: 584006 - DNA, 120 bp, Artificial Sequence
  ENSG00000172345_19 (sequence is synthesized)
tgccctctctgagctccatactctgaggtggtggtcttatcaagatgggatcgccttgtacatccctgtgtagccaagtggaaggccagccaaccaagaatgcatctcactgggcctatg

SEQ ID NO: 584007 - DNA, 120 bp, Artificial Sequence
  ENSG00000172345_20 (sequence is synthesized)
tccagtccaagctctgccacttgggccaagtgtgctcttgaacagtcacttaatatatctgctttgatttgtcttttaaagaaaatatggaggcaggaataccagtgtcagtgtagcctg

SEQ ID NO: 584008 - DNA, 120 bp, Artificial Sequence
  ENSG00000172345_21 (sequence is synthesized)
cttcttgagtgttggcacaagtgagataatgtatgaatcagtaaaatgctgggcaaagcaaagaagtagggctgcctgggagtggattcctttttatggtgagttaagacgacttcacaa

SEQ ID NO: 584009 - DNA, 120 bp, Artificial Sequence
  ENSG00000172345_22 (sequence is synthesized)
ttgttagctgtgatgcctgcagtgtttgaggatggcattgccttcatcctgtgtcagctctgaagaagttggcagagcaaagctaagcctcaagtgtaaatcccagcatcatggaacgca

SEQ ID NO: 584010 - DNA, 120 bp, Artificial Sequence
  ENSG00000172345_23 (sequence is synthesized)
aatggatgagcttttgttttaggatcttcttgctgattcctacccagaggacttccccagcctagagaccagaaacctgggcaatagttatatcttcagtggccctaggagttgttgtgt

SEQ ID NO: 584011 - DNA, 120 bp, Artificial Sequence
  ENSG00000172345_24 (sequence is synthesized)
ctccttggggaggagagaaccttctaaaacaggccagagacaggaggtactgggagggccatgggctcacctgcatctatgcccagataacctgggacagataacctctgtcccaatcac

SEQ ID NO: 584012 - DNA, 120 bp, Artificial Sequence
  ENSG00000172345_25 (sequence is synthesized)
ttgctttgcctggtctctcaaggagtctcttggtaccccaggcccacggccagctccatgctcatccctgtccccaccttccagtcttgatgaaaacccaccttctctttcatcccttgg

SEQ ID NO: 584013 - DNA, 120 bp, Artificial Sequence
  ENSG00000172345_26 (sequence is synthesized)
ctgcttgataagacttaaaacaattccctgattttagggaaggccactgcgtgcacagatggtgagtttgtgcaggcaaggaatgtgccctccacatcacgtggcctccttgcccagcct

SEQ ID NO: 584014 - DNA, 120 bp, Artificial Sequence
  ENSG00000172345_27 (sequence is synthesized)
gggtcatgggaagggagtgttgaattgaatcacgtctttcgttggtagattatgttcatcttcaatgtttctattaagtctaaaaagtggatacaaatggtgcctccaagttcttgtcta

SEQ ID NO: 584015 - DNA, 120 bp, Artificial Sequence
  ENSG00000172345_28 (sequence is synthesized)
attgcttgtctactgcttgacaaaatccagaatggaataggccaaacaagttaaccagcaggacagaaactgctctaagcccattattccttgagatgaatagaacagtgagctgaacgc

SEQ ID NO: 584016 - DNA, 120 bp, Artificial Sequence
  ENSG00000172345_29 (sequence is synthesized)
ctgctctaatgaagccactaaaggggtttacaggaaggttaggagcccagatgggttttgagtccactgctgggaaacagattcttcacttcctgtggaccctggagaagccatcagatt

SEQ ID NO: 584017 - DNA, 120 bp, Artificial Sequence
  ENSG00000172345_30 (sequence is synthesized)
acattaacatggctccactgatgatggcctgagaattactattgtttgtgtttcatctgtgtccttgccaggtcttcccccacatccttacttcacaggatcaggggctgagaggagacc

SEQ ID NO: 584018 - DNA, 120 bp, Artificial Sequence
  ENSG00000172345_31 (sequence is synthesized)
aatactctggcccaggcctggtcaagggatgctggttgttgctgatgcaaagtcacattgcctggtcctgagcttggcaatcaggcatccagagatggccaaaccaaatatccctttggc

SEQ ID NO: 584019 - DNA, 120 bp, Artificial Sequence
  ENSG00000172345_32 (sequence is synthesized)
caggcactcaggcattccctgtaatgttgtgcacttaaagcatcttgggctgatagtctccaccgaatcacagaagaaaactcaatctgccgcatcactcaccagctggataagccattt

SEQ ID NO: 584020 - DNA, 120 bp, Artificial Sequence
  ENSG00000172345_33 (sequence is synthesized)
actgtacacagtgtgtgccctcttatcaatacattggcacagaaccatacaccgtagaagctgctgtgatcactaaaggcaatgcccgtttagccctgagcacagtgcttggcatgtggt

SEQ ID NO: 584021 - DNA, 120 bp, Artificial Sequence
  ENSG00000172345_34 (sequence is synthesized)
aggtaagtagtagcaattttatttgataccctcatatacacgctggttccttctgtcggcacacctgtccacgctttgagcttggtgcttcacctgtactcctctgtttactggctccac

SEQ ID NO: 584022 - DNA, 120 bp, Artificial Sequence
  ENSG00000172345_35 (sequence is synthesized)
cacccttccctaggattacttctccaatccaaccaaaaacaattttgcaaatgtttcatgtgacaaactgtatttttcataaatgaccccagcaatatttcctctccccttaaacccagg

SEQ ID NO: 584023 - DNA, 120 bp, Artificial Sequence
  ENSG00000172345_36 (sequence is synthesized)
caggtttgtgtcagctctaactgatggagtatggtggaggtgatgccatgcaacttccaaggcaaaggtataaacaagatgcagcttctacatggctcttgcgatcctgggatgctcatc

SEQ ID NO: 584024 - DNA, 120 bp, Artificial Sequence
  ENSG00000172345_37 (sequence is synthesized)
ctgggaatccagacaccatgttgtgaggaggcccaggccacaaggagaggccacctataagcattcaggccagcagccccaggtgagttcccagccaacatcaacggccagatgtatgag

SEQ ID NO: 584025 - DNA, 120 bp, Artificial Sequence
  ENSG00000172345_38 (sequence is synthesized)
tgaatgatctcacgtggtcccagcctttgcatgactttgcatgacgccagctgatgccaagtgggacagagatgagctgcccattccaatctctgcccacattgcagattcatgagaaaa

SEQ ID NO: 584026 - DNA, 120 bp, Artificial Sequence
  ENSG00000172345_39 (sequence is synthesized)
ataaatgtcactgtttgggggtgaatcatgacacagttacagtacttgaaacattttgcgaagccaggcatgaatgtcatatgaaattctaataaatccattttatttgtggcaccacaa

SEQ ID NO: 584027 - DNA, 120 bp, Artificial Sequence
  ENSG00000172345_40 (sequence is synthesized)
tggaagatttgccgggaaggcgtgagtgaggagctgggcgggaaggggtcgcggagacggcttcgtggagcccgggtccccagaagcccccaagcgcctcctctccccgttgttttctgc

SEQ ID NO: 584028 - DNA, 120 bp, Artificial Sequence
  ENSG00000172345_41 (sequence is synthesized)
tccccaatcccctggacccgattgagagggattccaatggggattgttttcttctttaaaaaaaagattgggcctgttatgctcacaatgacttcaggtggtaagtatctgttcctttca

SEQ ID NO: 584029 - DNA, 120 bp, Artificial Sequence
  ENSG00000172345_42 (sequence is synthesized)
ctcagtgacttgcccaaggtcacctggctgttgaatgctgtttaggactggatgtttctgtgacagtggtaaaagtaaataaattgcatttaaggggtaagcaggtgtttaaaaacaaaa

SEQ ID NO: 584030 - DNA, 120 bp, Artificial Sequence
  ENSG00000172345_43 (sequence is synthesized)
caaaatgaaagaatgtggtcgcagctaaggaggtttttacatgttgtttaaatccagtaaagtctgatccagcatctgatgcatactaaggttttcttctgtgttcattacagcatgaac

SEQ ID NO: 584031 - DNA, 120 bp, Artificial Sequence
  ENSG00000172345_44 (sequence is synthesized)
ccctctctttgtcgttgccagagggtagcatgggagtagttttgcttgacccttctgacttttcattacagcatgaacccctctctttgtcgttgccagagggtaacatgggagtagttt

SEQ ID NO: 584032 - DNA, 120 bp, Artificial Sequence
  ENSG00000172345_45 (sequence is synthesized)
tgcttgacccttctgacttttcattacagcatgaacccctctctttgtcgttgccagagggtagcatgggagtagttttgcttgacccttctgacttttcattacagcatgaacccctct

SEQ ID NO: 584033 - DNA, 120 bp, Artificial Sequence
  ENSG00000172345_46 (sequence is synthesized)
ctttgtcgttgccagagggtagcatgggagtagttttgcttgacccttctgacttttcattaagtagccctgggttgctcaaggaaacagaatgcctggtggcttttaagataattttaa

SEQ ID NO: 584034 - DNA, 120 bp, Artificial Sequence
  ENSG00000172345_47 (sequence is synthesized)
aaaccacccacggctcttggagtcagccagttaagatctttttcttcatcacattctgctgtggggacagctttgcccaagactagtcccagcttttccacgtatgggttgcacagcctt

SEQ ID NO: 584035 - DNA, 120 bp, Artificial Sequence
  ENSG00000172345_48 (sequence is synthesized)
ggagagtcgtatctcttgaggcctcttacccctcttctgtagaacaggggattaagccaggtgaccagagcccttctagctctaaaattctgtggttctgtgccttttgacagaatggag

SEQ ID NO: 584036 - DNA, 120 bp, Artificial Sequence
  ENSG00000172345_49 (sequence is synthesized)
tttcagtttcctggaggccatctgtggagtttccagggaacctgtaagtgcatgcctcgttcaaagattaccagaggtgccgcacccttcctggtatctttatgggcctgcctcctaaaa

SEQ ID NO: 584037 - DNA, 120 bp, Artificial Sequence
  ENSG00000172345_50 (sequence is synthesized)
aaagccttactgtttttaatgaaatcatttccagcaaactgtattcttgtgaaagcttactgtccatttctgcaggcctgaagggaggcggggctagtgactttcagccccttctctgca

SEQ ID NO: 584038 - DNA, 120 bp, Artificial Sequence
  ENSG00000172345_51 (sequence is synthesized)
agtctgtcctaaagagtagtgacagacatggcatggtccaccttctagtccttagatacaatctcaagataacaagtttgattgatgcgttggggtcaaattccttttcgtgctccaggt

SEQ ID NO: 584039 - DNA, 82 bp, Artificial Sequence
  ENSG00000172346_0 (sequence is synthesized)
cagacccatcccctgcctgccagctccacgagccagagagagacagagcgcggacgccgcaggaggcagtgcctggacccca

SEQ ID NO: 584040 - DNA, 120 bp, Artificial Sequence
  ENSG00000172346_1 (sequence is synthesized)
acagagcgcggacgccgcaggaggcagtgcctggaccccagctgcccaggagagacggagcccgtggctggtgaggccgcagagcagggccaggccgggccctgcccgcaaggacgacca

SEQ ID NO: 584041 - DNA, 120 bp, Artificial Sequence
  ENSG00000172346_2 (sequence is synthesized)
aacccctcaccggcccctgggccccagagcccaccaggctctcctgctggccccaccatgacttcagagtcgacgtcacccccagttgtgcccccgctccactcccccaagtccccagtc

SEQ ID NO: 584042 - DNA, 120 bp, Artificial Sequence
  ENSG00000172346_3 (sequence is synthesized)
tggcccaccttccccttccacagggagggcagcagggtctgggagcggggtggtgtcccacctcgggacctacccagccctctgcccaccaagcggaccaggacctattcagcgacagcc

SEQ ID NO: 584043 - DNA, 120 bp, Artificial Sequence
  ENSG00000172346_4 (sequence is synthesized)
cgggcctcagctggccccgtgttcaagggcgtctgtaagcagttctcacgctcacagggccatggcttcatcacccccgagaacgggtccgaggacatcttcgtacatgtgtctgacatc

SEQ ID NO: 584044 - DNA, 120 bp, Artificial Sequence
  ENSG00000172346_5 (sequence is synthesized)
gagggggagtacgtgccagtggagggcgacgaggtgacctacaagatgtgccctatccctcccaagaaccagaagttccaggccgtggaggtggtgctcactcagctggccccccacact

SEQ ID NO: 584045 - DNA, 120 bp, Artificial Sequence
  ENSG00000172346_6 (sequence is synthesized)
ccccacgagacgtggtctggccaggtcgtgggctcctaggctgagtggttcacaggccagctggccgggggttggggagccacacagggtgaacgggcagcagccggctccatgccccac

SEQ ID NO: 584046 - DNA, 120 bp, Artificial Sequence
  ENSG00000172346_7 (sequence is synthesized)
tgccctggctgatgagtccttcggtggcctcagtgtgcacgtctgtctgtccgtctgtgcttgtggctatgagcgtgtgcctccacccaccccacgacccgtgactactgtgcaagctgg

SEQ ID NO: 584047 - DNA, 120 bp, Artificial Sequence
  ENSG00000172346_8 (sequence is synthesized)
ccaggaggtaggtggagggcaaggccaccagacctggcttcgcgctgtccactgcctctctcctcccctccctgccgcagacacgcaggacccgctcgccctcctgcttacccgtcccca

SEQ ID NO: 584048 - DNA, 120 bp, Artificial Sequence
  ENSG00000172346_9 (sequence is synthesized)
cggtgactgagctgcgagagcctgcgctgggctcactccctggcctccgcccctgagctgtcccgtgtcagtccctggcccggagccaggctctctgtgctacttacatctccctccctt

SEQ ID NO: 584049 - DNA, 120 bp, Artificial Sequence
  ENSG00000172346_10 (sequence is synthesized)
ccccgccacagcctggacccttccctcagaagcctggccgatgggtgcttttggggagcctctcagcctctggcaggggaggaggactgacacggaggcacacaggcctctcactgccga

SEQ ID NO: 584050 - DNA, 120 bp, Artificial Sequence
  ENSG00000172346_11 (sequence is synthesized)
ggccagccttccttcctgctctgctctctcagtgccatggagaggcaggaagaggggcctgagggcggaaggggtttggggctcccatttcgccggccagtccctcctcctcagcctggc

SEQ ID NO: 584051 - DNA, 120 bp, Artificial Sequence
  ENSG00000172346_12 (sequence is synthesized)
agtggcgctgggctccttcccctgggctgtactgagccgagcccaggggtttgcagagggtgggggtccatctctccagcttggctgcagacctcctttaccctgactcacaagccccac

SEQ ID NO: 584052 - DNA, 120 bp, Artificial Sequence
  ENSG00000172346_13 (sequence is synthesized)
tgatgctctgggccatgcccggctgacggctgctgtggatgccgcgagggacggacacacgtccggggcacccacgaggagggcccccagcctgggagactggccctgcggcctccacgt

SEQ ID NO: 584053 - DNA, 120 bp, Artificial Sequence
  ENSG00000172346_14 (sequence is synthesized)
caaactctcttcccaaagccctaacagaccagtggccgaggtgtggctcttattgcatccatccctgaagatgtgtggctgttgctgtcacctggagtccttttggggccaagatgtgtg

SEQ ID NO: 584054 - DNA, 120 bp, Artificial Sequence
  ENSG00000172346_15 (sequence is synthesized)
tgcacccggggtcgtggccattcactcccaggcaggggtgagggtggcctggcccaggaggccaggaaggagggccctgtctgcctccacctctgggtgcaccccctgcctaccaccctc

SEQ ID NO: 584055 - DNA, 120 bp, Artificial Sequence
  ENSG00000172346_16 (sequence is synthesized)
ccttctagagagcacatcgcctgaccggggagaagtggggccgtggttcgagggagggctggccaggggtgggacccttatgagactcagtctgtgagtaaaactgggggctcaaatgcc

SEQ ID NO: 584056 - DNA, 120 bp, Artificial Sequence
  ENSG00000172346_17 (sequence is synthesized)
caggatgaggggatcagtgactgtctaggaggatcccttgccttgtaggtgccccaagaccgcagggtagaaatcagccgggatgcctgcatcccacccccggccccagggcccaccaca

SEQ ID NO: 584057 - DNA, 120 bp, Artificial Sequence
  ENSG00000172346_18 (sequence is synthesized)
taaaatctgggagcccagagctgctgaggtgtggtcagctcccctaaaatgggcacggcccagcctgtcccatgaggaataaaggcccctggcccccttgagagagggcttgttggtgag

SEQ ID NO: 584058 - DNA, 120 bp, Artificial Sequence
  ENSG00000172346_19 (sequence is synthesized)
ggctgactcctgggggcccccaaggctcccctcctgtggggaggccaccttttaaggcaccactagcagtcaggatatggtggcatcagccctggggcctcctgggtggcaggggggcag

SEQ ID NO: 584059 - DNA, 120 bp, Artificial Sequence
  ENSG00000172346_20 (sequence is synthesized)
cagctctcctccccactcacaggccctgcagtgctcatttggaattcctcccaagacccctggccacccagaccccccattcttcctaacactggcaataaaccctcaactgtgacccac

SEQ ID NO: 584060 - DNA, 120 bp, Artificial Sequence
  ENSG00000172346_21 (sequence is synthesized)
gacaccacgctgtggccaacagtccgggggtcggcaaagatctcaaagtcgttcccaccctgcacacagaggatgggcagaggagggatatttaggtggagtccctctccacattggctg

SEQ ID NO: 584061 - DNA, 120 bp, Artificial Sequence
  ENSG00000172346_22 (sequence is synthesized)
ctacggacctgcccctcctcctgccccttcagaactgccaggaagcccaccttctcaccccttgtcagacctgccctgacttgctgtgtgatgtagaacaagtgcccagcctcttggggc

SEQ ID NO: 584062 - DNA, 120 bp, Artificial Sequence
  ENSG00000172346_23 (sequence is synthesized)
cccagctttccaatctgtgtaacggggctggtgagcaatggttgttctccaggagccccctaagaggtctgttgtgttgccccatgttctggccttgacctcaggtgatttgcattggag

SEQ ID NO: 584063 - DNA, 120 bp, Artificial Sequence
  ENSG00000172348_0 (sequence is synthesized)
ctctgctgtgctgcctcagacgcggagggctgcgtgcagtgggagcgggctccaggagcccgagcctccagccgtccccagagcaaggcagcaccgaggcctggccacagcaatatccat

SEQ ID NO: 584064 - DNA, 120 bp, Artificial Sequence
  ENSG00000172348_1 (sequence is synthesized)
ctggaagctcttcccttcactcccaactctgaggttgcctaactctttattaaaaattcagaagggggaatgccagcccctagcatggactgtgatgtttccactctggttgcctgtgtg

SEQ ID NO: 584065 - DNA, 120 bp, Artificial Sequence
  ENSG00000172348_2 (sequence is synthesized)
gtggatgtcgaggtctttaccaatcaggaggttaaggaaaaatttgagggactgtttcggacttatgatgactgtgtgacgttccagctatttaagagtttcagacgtgtccgtataaac

SEQ ID NO: 584066 - DNA, 120 bp, Artificial Sequence
  ENSG00000172348_3 (sequence is synthesized)
ttcagcaatcctaaatctgcagcccgagctaggatagagcttcatgaaacccaattcagagggaaaaaattaaagctctactttgcacaggttcagactccagagacagatggagacaaa

SEQ ID NO: 584067 - DNA, 120 bp, Artificial Sequence
  ENSG00000172348_4 (sequence is synthesized)
ctgcacttggctccaccccagcctgccaaacagtttctcatctcgcccccttcctccccacctgttggctggcagcccatcaacgatgccacgccagtcctcaactatgacctcctctat

SEQ ID NO: 584068 - DNA, 120 bp, Artificial Sequence
  ENSG00000172348_5 (sequence is synthesized)
gctgtggccaaactaggaccaggagagaagtatgagctccatgcagggactgagtccaccccaagtgtcgtcgtgcacgtgtgcgacagtgacatagaggaagaagaggacccaaagact

SEQ ID NO: 584069 - DNA, 120 bp, Artificial Sequence
  ENSG00000172348_6 (sequence is synthesized)
tccccaaagccaaaaatcatccaaactcggcgtcctggcctgccaccctccgtgtccaactgagctgcctgctccttctcgataatagccgtctcctctttatcatgctttttccccctg

SEQ ID NO: 584070 - DNA, 120 bp, Artificial Sequence
  ENSG00000172348_7 (sequence is synthesized)
ttgtttgtcaaaaaaaattgcctttaaattcctgggtgtttggttgtttgagattccttccttgttatcaagcctctcggacaaaagggctaggaaaaggtgatatgtctcctgatcata

SEQ ID NO: 584071 - DNA, 120 bp, Artificial Sequence
  ENSG00000172348_8 (sequence is synthesized)
tcatacccattaagtataacccattatttagaaggttctagggaaaaaagtagtattttcttattaaacaatcagcacagcctatatctttgttctctcatgttgatccaagccagagac

SEQ ID NO: 584072 - DNA, 120 bp, Artificial Sequence
  ENSG00000172348_9 (sequence is synthesized)
atcagtaacaaatagcacctgtgttgtttgtgagctgtttcagtcccagtcctgatgtgtgtgcgttgttctctcctggccacttaaataggaccatatgtaaacttgactttgactgca

SEQ ID NO: 584073 - DNA, 120 bp, Artificial Sequence
  ENSG00000172348_10 (sequence is synthesized)
tgagatatccctatctggtctcactcagtcctctgcatcccaacattcccaggacatgcatgatcaccagcatttattttcattatttgaggatatcttataactcacagattgtcagca

SEQ ID NO: 584074 - DNA, 120 bp, Artificial Sequence
  ENSG00000172348_11 (sequence is synthesized)
tccagccatgtcctatctagattaggaaaatgatcagaatattccagctcaacaagtctgggtatattcactattgtgagtcaatacaccatagctctgttgaaattcctggaggcaaaa

SEQ ID NO: 584075 - DNA, 120 bp, Artificial Sequence
  ENSG00000172348_12 (sequence is synthesized)
ttgaccttggccccaaagatattcctcaatagatttcaaacaccactcccctgtagaactctcccagcctcgttggggaggcttgtccagggtgatagagactgatttcagacaaaccta

SEQ ID NO: 584076 - DNA, 120 bp, Artificial Sequence
  ENSG00000172348_13 (sequence is synthesized)
agctgtgcttttaaaaaatctggatgttttttatttagtgattgttcgacaattagctgcttcaaaacataatgtgcattgcttatgaatgccttcatatactaatacagatactctgat

SEQ ID NO: 584077 - DNA, 120 bp, Artificial Sequence
  ENSG00000172348_14 (sequence is synthesized)
aatattacactctaataaggataatgctgaattttgaaaggacacaaaacatctaatgccaatatatacatgattagccaacatctttgctatcaagaccacttgtttttaaataaagat

SEQ ID NO: 584078 - DNA, 120 bp, Artificial Sequence
  ENSG00000172348_15 (sequence is synthesized)
gcaagtgtcagttgtagattattgggatgaagctaaatccccagaatgcagcagcagctgagcatgttaaaatggggaaggatgatagctacatgtatgccggtcctactcacgcgacac

SEQ ID NO: 584079 - DNA, 120 bp, Artificial Sequence
  ENSG00000172348_16 (sequence is synthesized)
ccgtgtgctcaaaaaagttatttgtttttgttacgtgtgatttttctatttctctagcccaaagtgcattacagaagatacacctatagaaccattaccttctgctatgtgtgccaggcc

SEQ ID NO: 584080 - DNA, 120 bp, Artificial Sequence
  ENSG00000172348_17 (sequence is synthesized)
tcatctactcctgtacattaatgaattactttagatgcaaacgcagattacaatggagtggggaagtactttcattacccaagcctcagaaaaacacacaagaacaataacacagcaaac

SEQ ID NO: 584081 - DNA, 120 bp, Artificial Sequence
  ENSG00000172348_18 (sequence is synthesized)
agattgagggattgttgtggtttttgactaaggtgtatgttagtttcatcagaaacttaaaacatagactgatcactcagaaattaaagtccgttttactgtgaatatagcaatatagta

SEQ ID NO: 584082 - DNA, 120 bp, Artificial Sequence
  ENSG00000172348_19 (sequence is synthesized)
ctggacacagtactggtgaaactgaggagagcattgcttgtaaaatcctgagtttccataaggaaaatgaaaactccttttaaaaataaaatctgaggagtgtacaataagcatatgctt

SEQ ID NO: 584083 - DNA, 120 bp, Artificial Sequence
  ENSG00000172348_20 (sequence is synthesized)
tgactttcctttgctgtggaggtttttggtttttcattgatgataaacgactacagacttagtagtggagaaatggtgtcctctagtggaagaaatagtaggctccgctattcagatgca

SEQ ID NO: 584084 - DNA, 120 bp, Artificial Sequence
  ENSG00000172348_21 (sequence is synthesized)
gagcactgcagcatccagcctttcaaagctgactcttctcaatcatctgtgggtcatttgacttgattttttaagctaccctgaatttccagaatgcaggttctaaagaaatctagatga

SEQ ID NO: 584085 - DNA, 120 bp, Artificial Sequence
  ENSG00000172348_22 (sequence is synthesized)
gagaaagtatttgaaaatgatttttaaatgttttttaaaagacacatctgacatttttaacaacttagtaaaagttgaaatgaccattctgtgtagtcataaaagaaacacaatgaagtg

SEQ ID NO: 584086 - DNA, 120 bp, Artificial Sequence
  ENSG00000172348_23 (sequence is synthesized)
tatggcctctggagttagtcttagtaaaacttattgctctgtgtcaatgttaacctgtctcagatcaagtaattctttcactaggttgggtttggggaggggggaaaagaggggcttttc

SEQ ID NO: 584087 - DNA, 120 bp, Artificial Sequence
  ENSG00000172348_24 (sequence is synthesized)
ctaggagaacgataagaaatggaaagactccttgaagtgttgcaagggaacctcctagcactgtgaaagtcagaatcgcctcagcatttccatgacgcacattatgcaaatctctttagc

SEQ ID NO: 584088 - DNA, 120 bp, Artificial Sequence
  ENSG00000172348_25 (sequence is synthesized)
actattttaagtttgaaaactttaacaatgaaggggaaggggaagatttccaccaactgaatcatttgtgcacgtgtatagctcaaagagcttagacttcaaatatatctggtgaatgac

SEQ ID NO: 584089 - DNA, 120 bp, Artificial Sequence
  ENSG00000172348_26 (sequence is synthesized)
ccagagggcgccagcgcccaccaagcgcagaagcccgggaggaccatccaggggctccccgacatttcctcagttagccagagtcggggggctcagacatctggaatgaggggagaatca

SEQ ID NO: 584090 - DNA, 120 bp, Artificial Sequence
  ENSG00000172348_27 (sequence is synthesized)
tacttcatcggaatgaggagcccagggcagcagggacacgtccctgaagatggaggacttttcttactgtgctgcatagacagggactgggctgtcactcgttgttttgcagaagaagcc

SEQ ID NO: 584091 - DNA, 120 bp, Artificial Sequence
  ENSG00000172348_28 (sequence is synthesized)
tttcaagcaatcactgacttcaatgacctccccaactcgttgtttgcgtgcaatgttcaccagtcagtgtttgaaggagaagagagcaaggaaaaatttgagggactgtttcggacttat

SEQ ID NO: 584092 - DNA, 80 bp, Artificial Sequence
  ENSG00000172348_29 (sequence is synthesized)
caaaggcccgcgggcaccgcgccgcccccacgcgctcgcaccggcgggcaggtgagcaggcagcgccgcgcgctagcagc

SEQ ID NO: 584093 - DNA, 120 bp, Artificial Sequence
  ENSG00000172349_0 (sequence is synthesized)
atggagtcgcacagccgcgctggaaagagcagaaaatctgcaaaatttcggtccatctccaggtccctgatgctctgtaatgctaagaccagtgatgatggctctagccctgatgagaaa

SEQ ID NO: 584094 - DNA, 120 bp, Artificial Sequence
  ENSG00000172349_1 (sequence is synthesized)
tatcctgatccctttgagatttccttggcccagggcaaggagggaattttccactcatctgtgcagctggcagacacatcggaggctgggcccagcagtgttcctgatctagcactggcc

SEQ ID NO: 584095 - DNA, 120 bp, Artificial Sequence
  ENSG00000172349_2 (sequence is synthesized)
tcggaggctgctcaactccaagcagctgggaatgatcgaggcaagacctgtaggaggatattcttcatgaaggaatcttccacagcttcctctcgagaaaagcctggaaaactagaagca

SEQ ID NO: 584096 - DNA, 120 bp, Artificial Sequence
  ENSG00000172349_3 (sequence is synthesized)
caaagtagtaacttcctgtttcctaaagcctgccaccaaagggcacgcagcaactcaaccagtgttaatccctattgcacaagagaaattgattttccaatgaccaagaaatctgcagcg

SEQ ID NO: 584097 - DNA, 120 bp, Artificial Sequence
  ENSG00000172349_4 (sequence is synthesized)
cccacggacaggcagccttactctctctgcagtaacaggaagtccctctctcaacaattggactgtccagcaggaaaggctgcgggaacttcgagaccaacacggtccctgagcacagct

SEQ ID NO: 584098 - DNA, 120 bp, Artificial Sequence
  ENSG00000172349_5 (sequence is synthesized)
cagctcgtgcagccatctgggggcctccaggcttcagtcatctccaacatcgtgctgatgaagggccaggctaagggtctgggcttcagcatcgttgggggaaaagacagcatttatggc

SEQ ID NO: 584099 - DNA, 120 bp, Artificial Sequence
  ENSG00000172349_6 (sequence is synthesized)
cccattgggatttacgtcaaaaccatttttgcagggggagcagcagcagccgatggaaggctacaggaaggtgatgaaattctggagctcaatggtgaatcaatggctggactaacacat

SEQ ID NO: 584100 - DNA, 120 bp, Artificial Sequence
  ENSG00000172349_7 (sequence is synthesized)
caggatgctttgcagaagttcaagcaagccaaaaaggggctcctcaccctcaccgtgagaacccgcctgacggcgcctccttccctgtgcagccacctgtctcccccactgtgccgctcc

SEQ ID NO: 584101 - DNA, 120 bp, Artificial Sequence
  ENSG00000172349_8 (sequence is synthesized)
ctgagctccagcacttgtatcaccaaggacagcagctccttcgccttggaaagcccctcggctcccatcagcaccgccaagcccaattacagaatcatggtggaggtttctctgcagaaa

SEQ ID NO: 584102 - DNA, 120 bp, Artificial Sequence
  ENSG00000172349_9 (sequence is synthesized)
gaggccggcgtgggcctgggcatcggcctgtgcagcgttccctacttccaatgcatctctggcattttcgtccacacgctgtcaccaggatccgtggcgcacctggacggacgtctccgg

SEQ ID NO: 584103 - DNA, 120 bp, Artificial Sequence
  ENSG00000172349_10 (sequence is synthesized)
tgtggggacgagattgtggaaatcagtgattcccctgtgcactgcctgacgctcaatgaagtctacacgatcctgagtcactgtgatcccggtccagtccccatcattgttagccgacat

SEQ ID NO: 584104 - DNA, 120 bp, Artificial Sequence
  ENSG00000172349_11 (sequence is synthesized)
ccagacccacaggtctctgaacagcaactcaaagaagctgtggcccaggctgtggaaaacaccaagtttggaaaggagaggcatcagtggagtctggaaggtgtcaaaaggctggaaagc

SEQ ID NO: 584105 - DNA, 120 bp, Artificial Sequence
  ENSG00000172349_12 (sequence is synthesized)
agttggcacgggcggcccaccttggagaaggaacgagagaagaactcagcacccccgcatcgcagggctcagaaggtcatgatccgctccagcagtgacagcagctacatgtctgggtcc

SEQ ID NO: 584106 - DNA, 120 bp, Artificial Sequence
  ENSG00000172349_13 (sequence is synthesized)
ccagggggaagtcctgggagtggcagtgctgagaagccgtcctctgacgtggacatcagcacacacagccccagcttgcctctggcacgggagccagtggtgctttctatagcatcctcc

SEQ ID NO: 584107 - DNA, 120 bp, Artificial Sequence
  ENSG00000172349_14 (sequence is synthesized)
aggctgccccaggagagcccacccctcccagagagccgggacagccacccgccgctgagactgaagaaatcctttgagattttggtgagaaagcctatgtcctccaagcccaagcctcca

SEQ ID NO: 584108 - DNA, 120 bp, Artificial Sequence
  ENSG00000172349_15 (sequence is synthesized)
cccagaaaatactttaaaagtgacagtgaccctcagaagagtctggaagagagagagaactcctcatgctcttctgggcacaccccacccacctgtggccaggaagcgagagagctgctg

SEQ ID NO: 584109 - DNA, 120 bp, Artificial Sequence
  ENSG00000172349_16 (sequence is synthesized)
cctagtgcctctgccggctgcccaggacctggtatcggcccacagaccaagtcctccacagagggcgagccagggtggagaagagccagcccagtgacccaaacatccccgataaaacac

SEQ ID NO: 584110 - DNA, 120 bp, Artificial Sequence
  ENSG00000172349_17 (sequence is synthesized)
ccactgcttaagaggcaggctcggatggactatagctttgataccacagccgaagacccttgggttaggatttctgactgcatcaaaaacttatttagccccatcatgagtgagaaccat

SEQ ID NO: 584111 - DNA, 120 bp, Artificial Sequence
  ENSG00000172349_18 (sequence is synthesized)
ggccacatgcctctacagcccaatgccagcctgaatgaagaagaagggacacagggccacccagatgggaccccaccaaagctggacaccgccaatggcactcccaaagtttacaagtca

SEQ ID NO: 584112 - DNA, 120 bp, Artificial Sequence
  ENSG00000172349_19 (sequence is synthesized)
gcagacagcagcactgtgaagaaaggtcctcctgtggctcccaagccagcctggtttcgccaaagcttgaaaggtttgaggaatcgtgcttcagacccaagagggctccctgatcctgcc

SEQ ID NO: 584113 - DNA, 120 bp, Artificial Sequence
  ENSG00000172349_20 (sequence is synthesized)
ttgtccacccagccagcacctgcttccagggagcacctaggatcacacatccgggcctcctcctcctcctcctccatcaggcagagaatcagctcctttgaaacctttggctcctctcaa

SEQ ID NO: 584114 - DNA, 120 bp, Artificial Sequence
  ENSG00000172349_21 (sequence is synthesized)
ctgcctgacaaaggagcccagagactgagcctccagccctcctctggggaggcagcaaaacctcttgggaagcatgaggaaggacggttttctggactcttggggcgaggggctgcaccc

SEQ ID NO: 584115 - DNA, 120 bp, Artificial Sequence
  ENSG00000172349_22 (sequence is synthesized)
actcttgtgccccagcagcctgagcaagtactgtcctcggggtcccctgcagcctccgaggccagagacccaggtgtgtctgagtcccctcccccagggcggcagcccaatcagaaaact

SEQ ID NO: 584116 - DNA, 120 bp, Artificial Sequence
  ENSG00000172349_23 (sequence is synthesized)
ctcccccctggcccggacccgctcctaaggctgctgtcaacacaggctgaggaatctcaaggcccagtgctcaagatgcctagccagcgagcacggagcttccccctgaccaggtcccag

SEQ ID NO: 584117 - DNA, 120 bp, Artificial Sequence
  ENSG00000172349_24 (sequence is synthesized)
tcctgtgagacgaagctacttgacgaaaagaccagcaaactctattctatcagcagccaagtgtcatcggctgtcatgaaatccttgctgtgccttccatcttctatctcctgtgcccag

SEQ ID NO: 584118 - DNA, 120 bp, Artificial Sequence
  ENSG00000172349_25 (sequence is synthesized)
actccctgcatccccaaggaaggggcatctccaacatcatcatccaacgaagactcagctgcaaatggttctgctgaaacatctgccttggacacagggttctcgctcaacctttcagag

SEQ ID NO: 584119 - DNA, 120 bp, Artificial Sequence
  ENSG00000172349_26 (sequence is synthesized)
ctgagagaatatacagagggtctcacggaagccaaggaagacgatgatggggaccacagttcccttcagtctggtcagtccgttatctccctgctgagctcagaagaattaaaaaaactc

SEQ ID NO: 584120 - DNA, 120 bp, Artificial Sequence
  ENSG00000172349_27 (sequence is synthesized)
atcgaggaggtgaaggttctggatgaagcaacattaaagcaattagacggcatccatgtcaccatcttacacaaggaggaaggtgctggtcttgggttcagcttggcaggaggagcagat

SEQ ID NO: 584121 - DNA, 120 bp, Artificial Sequence
  ENSG00000172349_28 (sequence is synthesized)
ctagaaaacaaggtgattacggttcacagagtgtttccaaatgggctggcctcccaggaagggactattcagaagggcaatgaggttctttccatcaacggcaagtctctcaaggggacc

SEQ ID NO: 584122 - DNA, 120 bp, Artificial Sequence
  ENSG00000172349_29 (sequence is synthesized)
acgcaccatgatgccttggccatcctccgccaagctcgagagcccaggcaagctgtgattgtcacaaggaagctgactccagaggccatgcccgacctcaactcctccactgactctgca

SEQ ID NO: 584123 - DNA, 120 bp, Artificial Sequence
  ENSG00000172349_30 (sequence is synthesized)
gcctcagcctctgcagccagtgatgtttctgtagaatctacagcagaggccacagtctgcacggtgacactggagaagatgtcggcagggctgggcttcagcctggaaggagggaagggc

SEQ ID NO: 584124 - DNA, 120 bp, Artificial Sequence
  ENSG00000172349_31 (sequence is synthesized)
tccctacacggagacaagcctctcaccattaacaggattttcaaaggagcagcctcagaacaaagtgagacagtccagcctggagatgaaatcttacagctgggtggcactgccatgcag

SEQ ID NO: 584125 - DNA, 120 bp, Artificial Sequence
  ENSG00000172349_32 (sequence is synthesized)
ggcctcacacggtttgaagcctggaacatcatcaaggcactgcctgatggacctgtcacgattgtcatcaggagaaaaagcctccagtccaaggaaaccacagctgctggagactcctag

SEQ ID NO: 584126 - DNA, 120 bp, Artificial Sequence
  ENSG00000172349_33 (sequence is synthesized)
acatttgtcctgagtcacctgtccagagcaggtggtgaatattgtgtcctactcacggcatctcaactatcggagcctgggatctgactcaaaggccggcctccgtctgagaactgagcg

SEQ ID NO: 584127 - DNA, 120 bp, Artificial Sequence
  ENSG00000172349_34 (sequence is synthesized)
tccatttctcaatccttgccggctctgacccaggcctgggccacaggctgtccgggaataagtggtgctgcaatccctgctgggcagatggagagaggagcaagggagatggcagccccg

SEQ ID NO: 584128 - DNA, 120 bp, Artificial Sequence
  ENSG00000172349_35 (sequence is synthesized)
ggggactgtgcatagggagggactcatgaagtggcagctaagccctgtccagtggccacccgtcagccaagggccagagaccaggaaaggaagaaaggcagcttcacttcctctttgagg

SEQ ID NO: 584129 - DNA, 120 bp, Artificial Sequence
  ENSG00000172349_36 (sequence is synthesized)
ccccacccagatgggggaaagcacaggtgggcttcccagtggctgctgcccaggcccagaccttctaggacgccacccagcaaaaggttgttcctaaaataagggcagagtcacacgggg

SEQ ID NO: 584130 - DNA, 120 bp, Artificial Sequence
  ENSG00000172349_37 (sequence is synthesized)
gcagctgatacaaattgcagactgtgtaaaaagagagcttaatgataatattgtggtgccacaaataaaatggatttattagaatttcatatgacattcatgcctggcttcgcaaaatgt

SEQ ID NO: 584131 - DNA, 120 bp, Artificial Sequence
  ENSG00000172349_38 (sequence is synthesized)
ttcaagtactgtaactgtgtcatgattcacccccaaacagtgacatttatttttctcatgaatctgcaatgtgggcagagattggaatgggcagctcatctctgtcccacttggcatcag

SEQ ID NO: 584132 - DNA, 120 bp, Artificial Sequence
  ENSG00000172349_39 (sequence is synthesized)
tcatgcaaaggctgggaccacgtgagatcattcactcatacatctggccgttgatgttggctgggaactcacctggggctgctggcctgaatgcttataggtggcctctccttgtggcct

SEQ ID NO: 584133 - DNA, 120 bp, Artificial Sequence
  ENSG00000172349_40 (sequence is synthesized)
gggcctcctcacaacatggtgtctggattcccaggatgagcatcccaggatcgcaagagccatgtagaagctgcatcttgtttatacctttgccttggaagttgcatggcatcacctcca

SEQ ID NO: 584134 - DNA, 120 bp, Artificial Sequence
  ENSG00000172349_41 (sequence is synthesized)
ccatactccatcagttagagctgacacaaacctgcctgggtttaaggggagaggaaatattgctggggtcatttatgaaaaatacagtttgtcacatgaaacatttgcaaaattgttttt

SEQ ID NO: 584135 - DNA, 120 bp, Artificial Sequence
  ENSG00000172349_42 (sequence is synthesized)
ggttggattggagaagtaatcctagggaagggtggtggagccagtaaacagaggagtacaggtgaagcaccaagctcaaagcgtggacaggtgtgccgacagaaggaaccagcgtgtata

SEQ ID NO: 584136 - DNA, 120 bp, Artificial Sequence
  ENSG00000172349_43 (sequence is synthesized)
tgagggtatcaaataaaattgctactacttacctaccacatgccaagcactgtgctcagggctaaacgggcattgcctttagtgatcacagcagcttctacggtgtatggttctgtgcca

SEQ ID NO: 584137 - DNA, 120 bp, Artificial Sequence
  ENSG00000172349_44 (sequence is synthesized)
atgtattgataagagggcacacactgtgtacagtaaatggcttatccagctggtgagtgatgcggcagattgagttttcttctgtgattcggtggagactatcagcccaagatgctttaa

SEQ ID NO: 584138 - DNA, 120 bp, Artificial Sequence
  ENSG00000172349_45 (sequence is synthesized)
gtgcacaacattacagggaatgcctgagtgcctggccaaagggatatttggtttggccatctctggatgcctgattgccaagctcaggaccaggcaatgtgactttgcatcagcaacaac

SEQ ID NO: 584139 - DNA, 120 bp, Artificial Sequence
  ENSG00000172349_46 (sequence is synthesized)
cagcatcccttgaccaggcctgggccagagtattggtctcctctcagcccctgatcctgtgaagtaaggatgtgggggaagacctggcaaggacacagatgaaacacaaacaatagtaat

SEQ ID NO: 584140 - DNA, 120 bp, Artificial Sequence
  ENSG00000172349_47 (sequence is synthesized)
tctcaggccatcatcagtggagccatgttaatgtaatctgatggcttctccagggtccacaggaagtgaagaatctgtttcccagcagtggactcaaaacccatctgggctcctaacctt

SEQ ID NO: 584141 - DNA, 120 bp, Artificial Sequence
  ENSG00000172349_48 (sequence is synthesized)
cctgtaaacccctttagtggcttcattagagcaggcgttcagctcactgttctattcatctcaaggaataatgggcttagagcagtttctgtcctgctggttaacttgtttggcctattc

SEQ ID NO: 584142 - DNA, 120 bp, Artificial Sequence
  ENSG00000172349_49 (sequence is synthesized)
cattctggattttgtcaagcagtagacaagcaattagacaagaacttggaggcaccatttgtatccactttttagacttaatagaaacattgaagatgaacataatctaccaacgaaaga

SEQ ID NO: 584143 - DNA, 120 bp, Artificial Sequence
  ENSG00000172349_50 (sequence is synthesized)
cgtgattcaattcaacactcccttcccatgacccaggctgggcaaggaggccacgtgatgtggagggcacattccttgcctgcacaaactcaccatctgtgcacgcagtggccttcccta

SEQ ID NO: 584144 - DNA, 120 bp, Artificial Sequence
  ENSG00000172349_51 (sequence is synthesized)
aaatcagggaattgttttaagtcttatcaagcagccaagggatgaaagagaaggtgggttttcatcaagactggaaggtggggacagggatgagcatggagctggccgtgggcctggggt

SEQ ID NO: 584145 - DNA, 120 bp, Artificial Sequence
  ENSG00000172349_52 (sequence is synthesized)
accaagagactccttgagagaccaggcaaagcaagtgattgggacagaggttatctgtcccaggttatctgggcatagatgcaggtgagcccatggccctcccagtacctcctgtctctg

SEQ ID NO: 584146 - DNA, 120 bp, Artificial Sequence
  ENSG00000172349_53 (sequence is synthesized)
gcctgttttagaaggttctctcctccccaaggagacacaacaactcctagggccactgaagatataactattgcccaggtttctggtctctaggctggggaagtcctctgggtaggaatc

SEQ ID NO: 584147 - DNA, 120 bp, Artificial Sequence
  ENSG00000172349_54 (sequence is synthesized)
agcaagaagatcctaaaacaaaagctcatccatttgcgttccatgatgctgggatttacacttgaggcttagctttgctctgccaacttcttcagagctgacacaggatgaaggcaatgc

SEQ ID NO: 584148 - DNA, 120 bp, Artificial Sequence
  ENSG00000172349_55 (sequence is synthesized)
catcctcaaacactgcaggcatcacagctaacaattgtgaagtcgtcttaactcaccataaaaaggaatccactcccaggcagccctacttctttgctttgcccagcattttactgattc

SEQ ID NO: 584149 - DNA, 120 bp, Artificial Sequence
  ENSG00000172349_56 (sequence is synthesized)
atacattatctcacttgtgccaacactcaagaagcaggctacactgacactggtattcctgcctccatattttctttaaaagacaaatcaaagcagatatattaagtgactgttcaagag

SEQ ID NO: 584150 - DNA, 120 bp, Artificial Sequence
  ENSG00000172349_57 (sequence is synthesized)
cacacttggcccaagtggcagagcttggactggatgcatgttttccagctcctcatccagggctctgaccagtttaacctgatgcagtcacgtggaggagcagtgcaggcacagtatgtc

SEQ ID NO: 584151 - DNA, 120 bp, Artificial Sequence
  ENSG00000172349_58 (sequence is synthesized)
ccataggcccagtgagatgcattcttggttggctggccttccacttggctacacagggatgtacaaggcgatcccatcttgataagaccaccacctcagagtatggagctcagagagggc

SEQ ID NO: 584152 - DNA, 120 bp, Artificial Sequence
  ENSG00000172349_59 (sequence is synthesized)
aggcatgaagtttccttggctggtgcacctagaattggctgaactcatgagaagttgatatagaacagtgcttgccacagagcggggactcggtaagcacttaatgaatgaatgaattct

SEQ ID NO: 584153 - DNA, 120 bp, Artificial Sequence
  ENSG00000172349_60 (sequence is synthesized)
aagtcaatccaagagtctgatgatttcttgaaaagggtgttagctaaaggatcttaggcatgactgtagaatttgtagttgcaatagaacagagaaagaggaagctttctgtctccttaa

SEQ ID NO: 584154 - DNA, 120 bp, Artificial Sequence
  ENSG00000172349_61 (sequence is synthesized)
cactgagctgtcatgttttaaagcttgctcacatcttggcacatttaagagacagtcaccccaggactcaaaaatagggaagtaacagtaacgcaggggaaacgttttctgtttggagga

SEQ ID NO: 584155 - DNA, 120 bp, Artificial Sequence
  ENSG00000172349_62 (sequence is synthesized)
gcaaaggctgagaacactgtgaaaacattttgcgcgcacaatagtaacctgggtaaatgcagcgtgaagggattttagtcacacgtggtctttcttacaaggaaggtggtgggggtgcag

SEQ ID NO: 584156 - DNA, 120 bp, Artificial Sequence
  ENSG00000172349_63 (sequence is synthesized)
atgaggttgctagagaatgttagaggatccctctctggattggagatagggaaagaaagttgcacggctgctgaggccccttctaggtggcaaggctgtgctccctggttctgatgatgt

SEQ ID NO: 584157 - DNA, 120 bp, Artificial Sequence
  ENSG00000172349_64 (sequence is synthesized)
gcctgggtggacatggcccctgtgagtttgtacagtcttgcagcaggatctagaggggggatttccagccagggctgctagacggaggcctactcttccatctttcctgatggcaggatg

SEQ ID NO: 584158 - DNA, 120 bp, Artificial Sequence
  ENSG00000172349_65 (sequence is synthesized)
gcctggccagggcctggaagacagagacctcctgcctccgcctcagtaagacgacaaggaaaggcaaatgcccaagggaaagaaaaggaaggctcttctccccagagttccccatgcaga

SEQ ID NO: 584159 - DNA, 120 bp, Artificial Sequence
  ENSG00000172349_66 (sequence is synthesized)
catgagtgcgtgctcagttcagaatcacttctgagaactcatccctaatgctgcagatttgggctggaacagattcacactgtctggtttcaccgaggacatgaaactccaccttgcggg

SEQ ID NO: 584160 - DNA, 120 bp, Artificial Sequence
  ENSG00000172349_67 (sequence is synthesized)
gataaagagagaaaaacaaattcatcaaatggaagacacattgaaagtgtttttccttaatgcttatcctgtttttaaaccattatttccaagttgacaccttttttaaggaaaaataaa

SEQ ID NO: 584161 - DNA, 120 bp, Artificial Sequence
  ENSG00000172349_68 (sequence is synthesized)
tattttgcggcattaaagccatatacaaggtctatatcagaaaaatatatttggggggctgcagcacaggactgagggagcggtacatgcttaaaaggcaacagggcctggttttcagtg

SEQ ID NO: 584162 - DNA, 120 bp, Artificial Sequence
  ENSG00000172349_69 (sequence is synthesized)
gcgatgatgattctctatgacagtcagggaaacgtggtctctgagagtgatgggcacataaagccttggtgccagagtgcatcgcatggtgtccaggccgagtctctgtcagatggttag

SEQ ID NO: 584163 - DNA, 120 bp, Artificial Sequence
  ENSG00000172349_70 (sequence is synthesized)
aggcctgggtctaccctgccaggagaggcgtgtttgggtaacaggcagatggagtttggaacacatgaatggctcatcacacgccaaccctgagtggggcaggaggcaggaagggtgggc

SEQ ID NO: 584164 - DNA, 120 bp, Artificial Sequence
  ENSG00000172349_71 (sequence is synthesized)
tgccgcctctggttggcattctcagagatgcgcagtccatcagcttgttccaaagagtgaacacaggcctctgcgtgctcccaggctccttggtgtcccaacagctggagctcctcgatg

SEQ ID NO: 584165 - DNA, 120 bp, Artificial Sequence
  ENSG00000172349_72 (sequence is synthesized)
agtcacgggagttctttgccaagaagtaacgatagcattactcatggaattgcttcactgctttctgaaggttggcataaaaccgggtcatgctgcgggggaagaaggagtccaccacgt

SEQ ID NO: 584166 - DNA, 120 bp, Artificial Sequence
  ENSG00000172349_73 (sequence is synthesized)
tctgtgggaggtaaccgctgaggtcggtatggaagaatgtgaccaggttggtcttggtgggttccctgtgaaggcaacagcagagctgtgttatgatctgcagcagaggtgctggggacg

SEQ ID NO: 584167 - DNA, 120 bp, Artificial Sequence
  ENSG00000172349_74 (sequence is synthesized)
agcgccaggcaggtgagcagagcccagcccagtggaaatggccatgatacagtgatcgcgtctcatcccttgctgtgccctccacccaggagtcctctctggacctgctgattttcagga

SEQ ID NO: 584168 - DNA, 120 bp, Artificial Sequence
  ENSG00000172349_75 (sequence is synthesized)
tggaaacccatcctgtcggggatgcattccacagcctctcccggcctccagggaggaagaagtccctactcccagcccaaaaacccagtaccctgctgcccgattcactcagcaaatgct

SEQ ID NO: 584169 - DNA, 120 bp, Artificial Sequence
  ENSG00000172349_76 (sequence is synthesized)
ttcagagaactcactttgtgccaggccctgagaggaacgaagagatgctgcccttcactatttagggtctgcaacctcctgggggctcctgggaccctttcaaggggtctacaaagttaa

SEQ ID NO: 584170 - DNA, 120 bp, Artificial Sequence
  ENSG00000172349_77 (sequence is synthesized)
cactatttttataacaacacgaacatgtgattcgccttctctcacatgcatacagtggggttttccggaggttacatgatatgtgatattgcaacagactacacgcacaagcaggtatga

SEQ ID NO: 584171 - DNA, 120 bp, Artificial Sequence
  ENSG00000172349_78 (sequence is synthesized)
gtttctgttaagcctggcatgaaagagatgggcaaaaatataaaaacaatgccactcttttcacagtattttttgttttaaaaaaatagttttttaaaataaaaatgttatctatgttaa

SEQ ID NO: 584172 - DNA, 120 bp, Artificial Sequence
  ENSG00000172349_79 (sequence is synthesized)
catttgcttctcaaggagggcaggagttggaagcgaccgttgtgaaacgttaaagattttctggcagagggaaagggattttttttttctccctccctgccgaggaaaaaacagttctaa

SEQ ID NO: 584173 - DNA, 120 bp, Artificial Sequence
  ENSG00000172349_80 (sequence is synthesized)
cgaggagttactttgtagttttaactcatattcaaatactcccagccgagaagctgccatcgatcctcccatggacccctgatcctggtttggaggaacttttcacagctctctctccct

SEQ ID NO: 584174 - DNA, 120 bp, Artificial Sequence
  ENSG00000172349_81 (sequence is synthesized)
cacacctagacagtagaggaaccgggactagaacacaagcctttttgactctaggactcatactcttaactattactccaaagtgataataaactgtctctgaacagcaactcaaagaag

SEQ ID NO: 584175 - DNA, 120 bp, Artificial Sequence
  ENSG00000172349_82 (sequence is synthesized)
caggcagtgtcctggggttcactacctgtggcagggaggggagcaggcagggtagacagagggaggacggagctgaggtgcacacccaacagcttcagccaagccctggagctctgcagc

SEQ ID NO: 584176 - DNA, 120 bp, Artificial Sequence
  ENSG00000172349_83 (sequence is synthesized)
caaagtccccattagagttgtcctatgttggccaacatagctgggcctctgtaaccctatctccagcagtccctggagatgggctgccccattggacaaggcagctgtctgcagctgtgg

SEQ ID NO: 584177 - DNA, 120 bp, Artificial Sequence
  ENSG00000172349_84 (sequence is synthesized)
cagcccctggagggacccacagctgaaagtagtctgccagcagcactccccacagctgggacaccaagcccttcctcgatgggtgatctgggtggcatatctccatatacatcagtcata

SEQ ID NO: 584178 - DNA, 120 bp, Artificial Sequence
  ENSG00000172349_85 (sequence is synthesized)
ggctcagaaagcttgaatgattttcccaacccaaagtcatacagctcgccagggaccaacaccaagactgccatactccagatccacagtgacttcagataagaagcagatggccgatgt

SEQ ID NO: 584179 - DNA, 120 bp, Artificial Sequence
  ENSG00000172349_86 (sequence is synthesized)
aaatgagctcaggctcatgggtcctgcaccctctaggtgctgccccaggcctccgtaggcttttggcactagaatgatccaggctaggatgagaggataaggaggttctcgttttccata

SEQ ID NO: 584180 - DNA, 120 bp, Artificial Sequence
  ENSG00000172349_87 (sequence is synthesized)
ttctgggcactttctgggctatgttgtttcccacaactccatgtcctcttcataggcatgctggtccttttagggctcaattctgctttttctactttttctcctttgctcagacatccc

SEQ ID NO: 584181 - DNA, 120 bp, Artificial Sequence
  ENSG00000172349_88 (sequence is synthesized)
ctcaatcccccctctgttttgatgggtcttcaaaaatacctaagtcctgggcttggttcgggttggcagggccaggactctagagtggggcagtgaggcactggcctgtggggcagaatt

SEQ ID NO: 584182 - DNA, 120 bp, Artificial Sequence
  ENSG00000172349_89 (sequence is synthesized)
caggggctaattctgaagtctcccatgaagaggatgcaatattggatgtgttgatgaaaagacaaaacacatttgtgctgttctaagttgtaaagctgcattgactgcagttggtatcac

SEQ ID NO: 584183 - DNA, 71 bp, Artificial Sequence
  ENSG00000172349_90 (sequence is synthesized)
aatccgctcgggtccccttccacaagaagctttgttcttttgctctttgggtccacactgcctttatgagc

SEQ ID NO: 584184 - DNA, 120 bp, Artificial Sequence
  ENSG00000172349_91 (sequence is synthesized)
gctggcctctgtgccagcagctccaatctaggacacaattatctttaatctttgttggcctaaaaatcctctagcattgactaaccggttcaatcctcctccagcaagtatgtggactgg

SEQ ID NO: 584185 - DNA, 120 bp, Artificial Sequence
  ENSG00000172349_92 (sequence is synthesized)
agtgcctctgccggctgcccaggacctggtatcggcccacagaccaagtcctccacagagggcgagccagggtggagaagagccagcccagcttggaaactagaatttaggaagaaaagt

SEQ ID NO: 584186 - DNA, 120 bp, Artificial Sequence
  ENSG00000172349_93 (sequence is synthesized)
acagcagggagaagccctagtgcctctgccggctgcccaggacctggtatcggcccacagaccaagtcctccacagagggcgagccagggtggagaagagccagcccagcccaatgccag

SEQ ID NO: 584187 - DNA, 120 bp, Artificial Sequence
  ENSG00000172350_0 (sequence is synthesized)
aagggatggggagtgggacgcagccggaggcctgaagcctcctcctctccgccttcccctggtccgccctgcactcaccctgctaccccgacctcctagagcgggcagcctctgccggct

SEQ ID NO: 584188 - DNA, 120 bp, Artificial Sequence
  ENSG00000172350_1 (sequence is synthesized)
gcctcttctcccccgccccctattccttcagtccccaggggctgctggcctgcggggtcggcggcgtgatggcggagaaggcgctggaggccgtgggctgtggactagggccgggggctg

SEQ ID NO: 584189 - DNA, 120 bp, Artificial Sequence
  ENSG00000172350_2 (sequence is synthesized)
tggccatggccgtgacgctggaggacggggcggaaccccctgtgctgaccacgcacctgaagaaggtggagaaccacatcactgaagcccagcgcttctcccacctacccaagcgctcag

SEQ ID NO: 584190 - DNA, 120 bp, Artificial Sequence
  ENSG00000172350_3 (sequence is synthesized)
ccgtggacatcgagttcgtggagctgtcctattccgtgcgggaggggccctgctggcgcaaaaggggttataagacccttctcaagtgcctctcaggtaaattctgccgccgggagctga

SEQ ID NO: 584191 - DNA, 120 bp, Artificial Sequence
  ENSG00000172350_4 (sequence is synthesized)
ttggcatcatgggcccctcaggggctggcaagtctacattcatgaacatcttggcaggatacagggagtctggaatgaaggggcagatcctggttaatggaaggccacgggagctgagga

SEQ ID NO: 584192 - DNA, 120 bp, Artificial Sequence
  ENSG00000172350_5 (sequence is synthesized)
ccttccgcaagatgtcctgctacatcatgcaagatgacatgctgctgccgcacctcacggtgttggaagccatgatggtctctgctaacctgaagctgagtgagaagcaggaggtgaaga

SEQ ID NO: 584193 - DNA, 120 bp, Artificial Sequence
  ENSG00000172350_6 (sequence is synthesized)
aggagctggtgacagagatcctgacggcactgggcctgatgtcgtgctcccacacgaggacagccctgctctctggcgggcagaggaagcgtctggccatcgccctggagctggtcaaca

SEQ ID NO: 584194 - DNA, 120 bp, Artificial Sequence
  ENSG00000172350_7 (sequence is synthesized)
acccgcctgtcatgttctttgatgagcccaccagtggtctggatagcgcctcttgtttccaagtggtgtccctcatgaagtccctggcacaggggggccgtaccatcatctgcaccatcc

SEQ ID NO: 584195 - DNA, 120 bp, Artificial Sequence
  ENSG00000172350_8 (sequence is synthesized)
accagcccagtgccaagctctttgagatgtttgacaagctctacatcctgagccagggtcagtgcatcttcaaaggcgtggtcaccaacctgatcccctatctaaagggactcggcttgc

SEQ ID NO: 584196 - DNA, 120 bp, Artificial Sequence
  ENSG00000172350_9 (sequence is synthesized)
attgccccacctaccacaacccggctgacttcatcatcgaggtggcctctggcgagtatggagacctgaaccccatgttgttcagggctgtgcagaatgggctgtgcgctatggctgaga

SEQ ID NO: 584197 - DNA, 120 bp, Artificial Sequence
  ENSG00000172350_10 (sequence is synthesized)
gtggatcccattgaaagccacacctttgccaccagcaccctcacacagttctgcatcctcttcaagaggaccttcctgtccatcctcagggacacggtcctgacccacctacggttcatg

SEQ ID NO: 584198 - DNA, 120 bp, Artificial Sequence
  ENSG00000172350_11 (sequence is synthesized)
tcccacgtggttattggcgtgctcatcggcctcctctacctgcatattggcgacgatgccagcaaggtcttcaacaacaccggctgcctcttcttctccatgctgttcctcatgttcgcc

SEQ ID NO: 584199 - DNA, 120 bp, Artificial Sequence
  ENSG00000172350_12 (sequence is synthesized)
gccctcatgccaactgtgctcaccttccccttagagatggcggtcttcatgagggagcacctcaactactggtacagcctcaaagcgtattacctggccaagaccatggctgacgtgccc

SEQ ID NO: 584200 - DNA, 120 bp, Artificial Sequence
  ENSG00000172350_13 (sequence is synthesized)
tttcaggtggtgtgtccggtggtctactgcagcattgtgtactggatgacgggccagcccgctgagaccagccgcttcctgctcttctcagccctggccaccgccaccgccttggtggcc

SEQ ID NO: 584201 - DNA, 120 bp, Artificial Sequence
  ENSG00000172350_14 (sequence is synthesized)
caatctttggggctgctgatcggagctgcttccaactccctacaggtggccacttttgtgggcccagttaccgccatccctgtcctcttgttctccggcttctttgtcagcttcaagacc

SEQ ID NO: 584202 - DNA, 120 bp, Artificial Sequence
  ENSG00000172350_15 (sequence is synthesized)
atccccacttacctgcaatggagctcctatctctcctatgtcaggtatggctttgagggtgtgatcctgacgatctatggcatggagcgaggagacctgacatgtttagaggaacgctgc

SEQ ID NO: 584203 - DNA, 120 bp, Artificial Sequence
  ENSG00000172350_16 (sequence is synthesized)
ccgttccgggagccacagagcatcctccgagcgctggatgtggaggatgccaagctctacatggacttcctggtcttgggcatcttcttcctagccctgcggctgctggcctaccttgtg

SEQ ID NO: 584204 - DNA, 120 bp, Artificial Sequence
  ENSG00000172350_17 (sequence is synthesized)
ctgcgttaccgggtcaagtcagagagatagaggcttgccccagcctgtaccccagcccctgcagcaggaagcccccagtcccagccctttgggactgttttaaccttatagacttgggca

SEQ ID NO: 584205 - DNA, 120 bp, Artificial Sequence
  ENSG00000172350_18 (sequence is synthesized)
ctggttcctggcggggctatcctctcctcccttggctcctccacaggctggctgtcggactgcgctcccagcctgggctctgggagtgggggctccagccctccccactatgcccaggag

SEQ ID NO: 584206 - DNA, 120 bp, Artificial Sequence
  ENSG00000172350_19 (sequence is synthesized)
tcttcccaagttgatgcggtttgtagcttcctccctactctctccaacacctgcatgcaaagactactgggaggctgctgcctccttcctgcccatggcaccctcctctgctgtctgcct

SEQ ID NO: 584207 - DNA, 120 bp, Artificial Sequence
  ENSG00000172350_20 (sequence is synthesized)
gcagtcgccccgcgggctcggaggacacagcgtccgggaccaggctctgggaagcgggtgtgcacagcccagcagagtcagggcgcgaccccaaccgcctctcaccatccttgccgtctc

SEQ ID NO: 584208 - DNA, 80 bp, Artificial Sequence
  ENSG00000172350_21 (sequence is synthesized)
ctcaccatccttgccgtctcctccgagccgagggccggccctcctgcctcgcctgccccgccccggccccgccccggccc

SEQ ID NO: 584209 - DNA, 120 bp, Artificial Sequence
  ENSG00000172350_22 (sequence is synthesized)
gctctccgtccccggtccgtggcagcgctgagcatcccggccccgcaccggcccgggggcgcgtcaaggtcggcggcgtgatggcggagaaggcgctggaggccgtgggctgtggactag

SEQ ID NO: 584210 - DNA, 120 bp, Artificial Sequence
  ENSG00000172350_23 (sequence is synthesized)
tagggccccacttacaactgaccaaagtggccccctctgggggtccccaccacacaagtgtttgtaaactgggctgctataaggttggagttccagggctgggccctggtggagtccact

SEQ ID NO: 584211 - DNA, 120 bp, Artificial Sequence
  ENSG00000172350_24 (sequence is synthesized)
ggaagtcccattatggatgttgaaatggacagggaaggactctggaagtctcttcctcctcctcctcttctctccacccctagaccctggctgacttggacaatctgccaggacagaagc

SEQ ID NO: 584212 - DNA, 120 bp, Artificial Sequence
  ENSG00000172350_25 (sequence is synthesized)
tgggttttctgtctaggtcaccactcccaatcctggggattggagaggcctggggctgtgggatgccccatccccctccccatcacctttggtgggggcagggcctggtggcacctgtgc

SEQ ID NO: 584213 - DNA, 120 bp, Artificial Sequence
  ENSG00000172350_26 (sequence is synthesized)
aataatgtctgtgtttctctcccacctgccactggaactggagaatgcactttattctgggcggggggtgagtgggggaagacccaaccctcctttctcgctgcccctaacgcatgcacg

SEQ ID NO: 584214 - DNA, 120 bp, Artificial Sequence
  ENSG00000172350_27 (sequence is synthesized)
gtctcgtgatgctccctccctctccggagtgacaggcacatacatgagaacaggccatctcagccctacacacttgccatcccctacagcacagaggaagagtgatggtggcatgctggt

SEQ ID NO: 584215 - DNA, 120 bp, Artificial Sequence
  ENSG00000172350_28 (sequence is synthesized)
ggtggcgggtgctggtgggaggacagtgccaacctcctcctggggatcccatgttggagactctaaggataaggctggtgctgcccagggtgtctacaggaactgcaggtgtctaccccc

SEQ ID NO: 584216 - DNA, 120 bp, Artificial Sequence
  ENSG00000172350_29 (sequence is synthesized)
aagtcttccctcctcccaagccaggggtggcacagggcactagatccctggagttcaggaaccaacacaagcacaaccacgggcataagttggccttggccactgccacccacggccctc

SEQ ID NO: 584217 - DNA, 120 bp, Artificial Sequence
  ENSG00000172350_30 (sequence is synthesized)
cttttgtgctccatgctggcatcttcactcccctaccccttccccagccactgctgctcattcaaacttctgtccatgtccctccactgttcctatcagcaggtggcccctgggcatcag

SEQ ID NO: 584218 - DNA, 120 bp, Artificial Sequence
  ENSG00000172350_31 (sequence is synthesized)
aacagcctgccctgggcaccaggtggcagacacactcagagcatgtctggctttcctggtgggtccaggctcattctgcttctgatttcccctcccccagggctcattttcccccttttt

SEQ ID NO: 584219 - DNA, 120 bp, Artificial Sequence
  ENSG00000172350_32 (sequence is synthesized)
cctgtacacatccctgtctacctcctctcaccctgccacagattcttcctatcacacagggatgccagttgtatttgtgggatttcacccattattaataaaacctatatttatacagta

SEQ ID NO: 584220 - DNA, 120 bp, Artificial Sequence
  ENSG00000172350_33 (sequence is synthesized)
tttgcgttctcacagcacattttttgtacttctgttataaccctaattttatttttcttcatagattttttttgtttttctgtcttacttagactatgaccttcttgaatataaaaactg

SEQ ID NO: 584221 - DNA, 120 bp, Artificial Sequence
  ENSG00000172350_34 (sequence is synthesized)
tgtcttcctcaatttttatccagtgtttggtacagagcttggtatatagtagatatcaataagcatttatcaagtagaattaatagtaaaatgtcactttttaatgcattctatgtgcca

SEQ ID NO: 584222 - DNA, 120 bp, Artificial Sequence
  ENSG00000172350_35 (sequence is synthesized)
agcactgtgtcatgtgttttacatatattatctcattgaatctttacaacaaccctatgagataggtactatcatcctcattttacagatgagggacctggagctcagagaggttaagca

SEQ ID NO: 584223 - DNA, 120 bp, Artificial Sequence
  ENSG00000172350_36 (sequence is synthesized)
acttgcccgaggtcacacagctggtaagtgtggagccagaatttgaacccagatccacctgactccaaaccgtgctctaaatgcatatgctgccttccaatgaatgaatgaaaggtgaga

SEQ ID NO: 584224 - DNA, 120 bp, Artificial Sequence
  ENSG00000172350_37 (sequence is synthesized)
ttttactgggccatgtaggggctagagaaacaagcctggtaggcagagagagcgcaaagaagaaggctttttctgaattagggaaaagctctgagaactcacgctcgtggaacagacact

SEQ ID NO: 584225 - DNA, 120 bp, Artificial Sequence
  ENSG00000172350_38 (sequence is synthesized)
tactgaacatctactacaggccagacagtctgctgagattaccaagatgagtgagaactgcccccaaggagctcactgactaagaggctgggagagctggtcaagtgacaggcacatcaa

SEQ ID NO: 584226 - DNA, 120 bp, Artificial Sequence
  ENSG00000172350_39 (sequence is synthesized)
gtaacaaacatgctggcataggagaggtgctatggaaacacaggggataggcagccagctcgggctgtagtagtgggagttttcctggagggggcgagacagtggccactgtgattacag

SEQ ID NO: 584227 - DNA, 120 bp, Artificial Sequence
  ENSG00000172350_40 (sequence is synthesized)
aagaggaccagggtcttctacagctttgatcccctctccacgcccatccatgagatgtgtggattttcccacgcctttcagaagaggattgttgcctctggtactttgatattagtggtg

SEQ ID NO: 584228 - DNA, 120 bp, Artificial Sequence
  ENSG00000172350_41 (sequence is synthesized)
gtcgtttctagggggacgggatgagagggatgggttcctgccggggctataagggttgttcctccatcctaacccaatcacactgagtaggggctacctatttcactgatagccatggct

SEQ ID NO: 584229 - DNA, 120 bp, Artificial Sequence
  ENSG00000172350_42 (sequence is synthesized)
gctcctaagaattttgggggtacctctgttcactgcagcctgactaaaaattcctccccacctcactgcaggttataagacccttctcaagtgcctctcaggtaaattctgccgccggga

SEQ ID NO: 584230 - DNA, 120 bp, Artificial Sequence
  ENSG00000172350_43 (sequence is synthesized)
ctgaccttttgggctgtaggatcccagcagctgaaatgggaatggggaccctccctcacagccctgcaatgtgcctgtggggtctctgtgcctgtgagggcagctccgagttcctactcc

SEQ ID NO: 584231 - DNA, 120 bp, Artificial Sequence
  ENSG00000172350_44 (sequence is synthesized)
ctttctaaagacaagtctgcagtgctcactcccctgcttaaaacatgcagtgtttcctttctgacttgtcctcgaaataaagtcaggtgacttacaagggcctggtctgaacctacttct

SEQ ID NO: 584232 - DNA, 120 bp, Artificial Sequence
  ENSG00000172350_45 (sequence is synthesized)
ccagcctcaagtcatgtactttatgctctaataatactgagttgcttgtaattccctggtcaagccacatgtttcatgcctctaagctttgcccatgctgtgtcttctgctggaatgccc

SEQ ID NO: 584233 - DNA, 120 bp, Artificial Sequence
  ENSG00000172350_46 (sequence is synthesized)
ttcaccactgtgcctgccctctccccttcacctgcttagctcttactcctgggctcgctcaggaaccttctctgactaccctccaacacctgctacagctgagctgaatccgccccctct

SEQ ID NO: 584234 - DNA, 120 bp, Artificial Sequence
  ENSG00000172350_47 (sequence is synthesized)
ttcacccagtgttgctacagcactttccacattacccaaaatcatctgtgtgcttgtctctctctccttccagaccagagtctatgtcttatttatgcatcattgtaatcccagtgcctg

SEQ ID NO: 584235 - DNA, 120 bp, Artificial Sequence
  ENSG00000172350_48 (sequence is synthesized)
gcatacaacaggtcctcaatatatgcttatgaaactgaacagtgctcttggcttctgggtatccctccaagtgcctgaaccgtaaaggatacagatgcggccagagtgccctcttcctgc

SEQ ID NO: 584236 - DNA, 120 bp, Artificial Sequence
  ENSG00000172350_49 (sequence is synthesized)
cagcttcatccccttcacagcagctgccccgccccagacactcccttcttttggcctcacccacctcacgtggccccctggtggcctctctctggacagtggtctggatagcgcctcttg

SEQ ID NO: 584237 - DNA, 120 bp, Artificial Sequence; identical to SEQ ID NO: 583460
  ENSG00000172352_0 (sequence is synthesized)

SEQ ID NO: 584238 - DNA, 120 bp, Artificial Sequence; identical to SEQ ID NO: 583461
  ENSG00000172352_1 (sequence is synthesized)

SEQ ID NO: 584239 - DNA, 120 bp, Artificial Sequence; identical to SEQ ID NO: 583462
  ENSG00000172352_2 (sequence is synthesized)

SEQ ID NO: 584240 - DNA, 120 bp, Artificial Sequence; identical to SEQ ID NO: 583463
  ENSG00000172352_3 (sequence is synthesized)

SEQ ID NO: 584241 - DNA, 120 bp, Artificial Sequence; identical to SEQ ID NO: 583464
  ENSG00000172352_4 (sequence is synthesized)

SEQ ID NO: 584242 - DNA, 120 bp, Artificial Sequence; identical to SEQ ID NO: 583465
  ENSG00000172352_5 (sequence is synthesized)

SEQ ID NO: 584243 - DNA, 120 bp, Artificial Sequence; identical to SEQ ID NO: 583466
  ENSG00000172352_6 (sequence is synthesized)

SEQ ID NO: 584244 - DNA, 120 bp, Artificial Sequence; identical to SEQ ID NO: 583467
  ENSG00000172352_7 (sequence is synthesized)

SEQ ID NO: 584245 - DNA, 120 bp, Artificial Sequence; identical to SEQ ID NO: 583468
  ENSG00000172352_8 (sequence is synthesized)

SEQ ID NO: 584246 - DNA, 120 bp, Artificial Sequence; identical to SEQ ID NO: 583469
  ENSG00000172352_9 (sequence is synthesized)

SEQ ID NO: 584247 - DNA, 120 bp, Artificial Sequence; identical to SEQ ID NO: 583470
  ENSG00000172352_10 (sequence is synthesized)

SEQ ID NO: 584248 - DNA, 120 bp, Artificial Sequence; identical to SEQ ID NO: 583471
  ENSG00000172352_11 (sequence is synthesized)

SEQ ID NO: 584249 - DNA, 120 bp, Artificial Sequence; identical to SEQ ID NO: 282206
  ENSG00000172352_12 (sequence is synthesized)

SEQ ID NO: 584250 - DNA, 120 bp, Artificial Sequence; identical to SEQ ID NO: 583473
  ENSG00000172352_13 (sequence is synthesized)

SEQ ID NO: 584251 - DNA, 120 bp, Artificial Sequence; identical to SEQ ID NO: 583474
  ENSG00000172352_14 (sequence is synthesized)

SEQ ID NO: 584252 - DNA, 120 bp, Artificial Sequence; identical to SEQ ID NO: 583475
  ENSG00000172352_15 (sequence is synthesized)

SEQ ID NO: 584253 - DNA, 120 bp, Artificial Sequence; identical to SEQ ID NO: 583476
  ENSG00000172352_16 (sequence is synthesized)

SEQ ID NO: 584254 - DNA, 120 bp, Artificial Sequence; identical to SEQ ID NO: 583477
  ENSG00000172352_17 (sequence is synthesized)

SEQ ID NO: 584255 - DNA, 120 bp, Artificial Sequence; identical to SEQ ID NO: 583478
  ENSG00000172352_18 (sequence is synthesized)

SEQ ID NO: 584256 - DNA, 120 bp, Artificial Sequence; identical to SEQ ID NO: 583479
  ENSG00000172352_19 (sequence is synthesized)

SEQ ID NO: 584257 - DNA, 120 bp, Artificial Sequence; identical to SEQ ID NO: 583480
  ENSG00000172352_20 (sequence is synthesized)

SEQ ID NO: 584258 - DNA, 80 bp, Artificial Sequence
  ENSG00000172354_0 (sequence is synthesized)
actggcgggcgggatccctccgctctggggaggcagcgctggcggcggggctggggccactgaggaaatccatccgcgcc

SEQ ID NO: 584259 - DNA, 80 bp, Artificial Sequence
  ENSG00000172354_1 (sequence is synthesized)
cggaggaagacagcgccgcccgcgcaccgccagcgacctccgccgcagagtcccaccgccacaggcctcgggccagcggc

SEQ ID NO: 584260 - DNA, 120 bp, Artificial Sequence
  ENSG00000172354_2 (sequence is synthesized)
ccgcccccaaccctgccccacgggcccggcgccatgagtgagctggagcaactgagacaggaggccgagcagctccggaaccagatccgggatgcccgaaaagcatgtggggactcaaca

SEQ ID NO: 584261 - DNA, 120 bp, Artificial Sequence
  ENSG00000172354_3 (sequence is synthesized)
ctgacccagatcacagctgggctggacccagtggggagaatccagatgaggacccggaggaccctccgtgggcacctggcaaagatctatgccatgcactgggggaccgactcaaggctg

SEQ ID NO: 584262 - DNA, 120 bp, Artificial Sequence
  ENSG00000172354_4 (sequence is synthesized)
ctggtcagcgcctcccaggatgggaagctcatcatctgggacagctacaccaccaacaaggtccacgccatcccgctgcgctcctcctgggtaatgacctgtgcctacgcgccctcaggg

SEQ ID NO: 584263 - DNA, 120 bp, Artificial Sequence
  ENSG00000172354_5 (sequence is synthesized)
aactttgtggcctgtggggggttggacaacatctgctccatctacagcctcaagacccgcgagggcaacgtcagggtcagccgggagctgcctggccacactgggtacctgtcgtgttgc

SEQ ID NO: 584264 - DNA, 120 bp, Artificial Sequence
  ENSG00000172354_6 (sequence is synthesized)
tggggatgtgatgtccctgtccctggcccccgatggccgcacgtttgtgtcaggcgcctgtgatgcctctatcaagctgtgggacgtgcgggattccatgtgccgacagaccttcatcgg

SEQ ID NO: 584265 - DNA, 120 bp, Artificial Sequence
  ENSG00000172354_7 (sequence is synthesized)
ccatgaatccgacatcaatgcagtggctttcttccccaacggctacgccttcaccaccggctctgacgacgccacgtgccgcctcttcgacctgcgggccgatcaggagctcctcatgta

SEQ ID NO: 584266 - DNA, 120 bp, Artificial Sequence
  ENSG00000172354_8 (sequence is synthesized)
ctcccatgacaacatcatctgtggcatcacctctgttgccttctcgcgcagcggacggctgctgctcgctggctacgacgacttcaactgcaacatctgggatgccatgaagggcgaccg

SEQ ID NO: 584267 - DNA, 120 bp, Artificial Sequence
  ENSG00000172354_9 (sequence is synthesized)
tgcaggagtcctcgctggccacgacaaccgcgtgagctgcctcggggtcaccgacgatggcatggctgtggccacgggctcctgggactccttcctcaagatctggaactaatggcccca

SEQ ID NO: 584268 - DNA, 120 bp, Artificial Sequence
  ENSG00000172354_10 (sequence is synthesized)
cactgggcccaggccaggaggggccctgcccatgcccacactacaggccagggctgcggggctggcgcaatcccagcccccttccccgggccacggggccttgggtccctgccctcccac

SEQ ID NO: 584269 - DNA, 120 bp, Artificial Sequence
  ENSG00000172354_11 (sequence is synthesized)
ccacccaggtttggttcctcccggggcccccactgtggagataagaaggggatggaatgggggaagaggaggagcaggaggccctcatccttctgctgccctggggttggggcctcaccc

SEQ ID NO: 584270 - DNA, 120 bp, Artificial Sequence
  ENSG00000172354_12 (sequence is synthesized)
ctctggagggccggaggcaggaggtggaaaccccaggggctggcttttttaaaactggttttattttaatttttattatattttcagtttttccataaaggagccaattccaactctgta

SEQ ID NO: 584271 - DNA, 80 bp, Artificial Sequence
  ENSG00000172354_13 (sequence is synthesized)
ctcgagagcggctcccacgggctttctgcgggcgcggcggggcgggcggtccctgcgctggagggagcagcggctcgggg

SEQ ID NO: 584272 - DNA, 120 bp, Artificial Sequence
  ENSG00000172354_14 (sequence is synthesized)
tggggttggggggtgcactgccctccgtgtggagacctggctgaccagctccttccccagggtacctgtcgtgttgccgcttcctggatgacaaccaaatcatcaccagctctggggata

SEQ ID NO: 584273 - DNA, 120 bp, Artificial Sequence
  ENSG00000172354_15 (sequence is synthesized)
ctttctagcaggccgtgggagcagcctcagatctggcggagtaagcaggccaccaaaatacccagcgtacgtctggaaaaacggtgactcccagacatgtccgccagacctggacaggca

SEQ ID NO: 584274 - DNA, 120 bp, Artificial Sequence
  ENSG00000172354_16 (sequence is synthesized)
ggaccatgctggtgagaacttgtgggctgcagctggagactgtctctcaggtggctcacgcctgtaatcccagcacgtggggaggccagggcaggatcacttgagctcaggagtttgaga

SEQ ID NO: 584275 - DNA, 120 bp, Artificial Sequence
  ENSG00000172354_17 (sequence is synthesized)
ccagcctgggcaacatagtgagaccctggctctactaaaaattgaaaaatgagctgggtgtggtggtgctcaccttgtagtcccagctatgcgggggaggctgaggtgggaggatcactt

SEQ ID NO: 584276 - DNA, 120 bp, Artificial Sequence
  ENSG00000172354_18 (sequence is synthesized)
ctgtgatggtgccactgcactccagcctgcacaacagagagagaccctaccttctcccacccaaagggaagggggtgtgtcttgttttcacgccacccttctgctctccctacaccgttc

SEQ ID NO: 584277 - DNA, 120 bp, Artificial Sequence
  ENSG00000172354_19 (sequence is synthesized)
accatcgaagctgggggtgtgtgtggagggtgtgcgccttgtggggtgaatttcaagaggcaccgccccttttaaaattaggtgcttggagggcggtgcctgtgcgggctggggcagaag

SEQ ID NO: 584278 - DNA, 120 bp, Artificial Sequence
  ENSG00000172361_0 (sequence is synthesized)
agacttctgcgtcgcggaagcgggtcccgcaggtcgccacggttgggggaaacgcggcggacgccgcccccgtcccgaaggggactcgaaaatgtacagccagcggtttggcaccgtaca

SEQ ID NO: 584279 - DNA, 120 bp, Artificial Sequence
  ENSG00000172361_1 (sequence is synthesized)
gcgggaggttaagggccccacccccaaagtggtgatcgtgagatccaagcctcctaaaggccaaggagctgagcaccatctagaaagaatccgacgcagccatcagaagcataatgctat

SEQ ID NO: 584280 - DNA, 120 bp, Artificial Sequence
  ENSG00000172361_2 (sequence is synthesized)
tttggcttccattaagtcaagtgagcgggatcgcttgaaagctgagtgggaccagcacaatgactgcaagattttggacagccttgtgcgagcaagaatcaaggatgctgtgcaagggtt

SEQ ID NO: 584281 - DNA, 120 bp, Artificial Sequence
  ENSG00000172361_3 (sequence is synthesized)
tatcattaacattgaagaaagacgaaataagctacgtgagcttttagcattagaagaaaatgagtattttacagaaatgcaattgaagaaagaaaccattgaggagaaaaaagataggat

SEQ ID NO: 584282 - DNA, 120 bp, Artificial Sequence
  ENSG00000172361_4 (sequence is synthesized)
gagagagaaaactaaattactaaaagagaagaatgaaaaagagaggcaggattttgtggctgaaaagctagaccagcaattcagggaacgctgtgaggagctccgtgttgaattgttatc

SEQ ID NO: 584283 - DNA, 120 bp, Artificial Sequence
  ENSG00000172361_5 (sequence is synthesized)
tatccatcagaagaaggtgtgtgaggagcggaaagcacagattgcatttaatgaggagctgagcaggcaaaagctggtggaagagcagatgttctccaaactctgggaggaagaccgatt

SEQ ID NO: 584284 - DNA, 120 bp, Artificial Sequence
  ENSG00000172361_6 (sequence is synthesized)
agccaaggaaaagcgagaagcccaagaggcgaggagacagaaagagctgatggagaacacacgcctggggctgaatgcccagatcaccagcatcaaggcacaaaggcaggcgacacagct

SEQ ID NO: 584285 - DNA, 120 bp, Artificial Sequence
  ENSG00000172361_7 (sequence is synthesized)
tgtggaaagtaacaacgcacagattaaacatgagaatgaacaggatatgctaaagaaacagaaggcaaagcaggaaactaggaccattttgcaaaaagccctacaagagaggatagaaca

SEQ ID NO: 584286 - DNA, 120 bp, Artificial Sequence
  ENSG00000172361_8 (sequence is synthesized)
tattcagcaggaatacagagacgaacaggacttgaacatgaagctcgtgcaaagggcccttcaagacttacaggaagaggcagataaaaagaaacaaaaaagagaagatatgataagaga

SEQ ID NO: 584287 - DNA, 120 bp, Artificial Sequence
  ENSG00000172361_9 (sequence is synthesized)
acagaagatataccataaatatttggcacagagacgtgaggaagaaaaagctcaggagaaagaatttgacagaatattagaggaagacaaggcaaagaagttggctgagaaggacaagga

SEQ ID NO: 584288 - DNA, 120 bp, Artificial Sequence
  ENSG00000172361_10 (sequence is synthesized)
gctgagacttgaaaaggaggcaaggagacagcttgtggatgaggtcatgtgtacaagaaaacttcaagttcaagaaaagttgcaacgagaagctaaagaacaggaagaacgtgctatgga

SEQ ID NO: 584289 - DNA, 120 bp, Artificial Sequence
  ENSG00000172361_11 (sequence is synthesized)
acagaaacacataaatgaaagtcttaaagaacttaactgtgaagagaaggagaattttgcaagacgccaacgtttagcccaggagtacaggaagcaacttcagatgcaaatcgcctacca

SEQ ID NO: 584290 - DNA, 120 bp, Artificial Sequence
  ENSG00000172361_12 (sequence is synthesized)
gcagcagtcccaagaagcagagaaggaagagaaacgccgagagtttgaagcaggtgtagcagcaaacaagatgtgtttggacaaggtccaggaggtcctgtccacccatcaagtgctgcc

SEQ ID NO: 584291 - DNA, 120 bp, Artificial Sequence
  ENSG00000172361_13 (sequence is synthesized)
tcaaaacattcatcccatgcgcaaggcatgccccagtaagcttccaccgtagttccgtgagcatcaatatatcttttcttggtcttttaatatttttaactacagtatgcttgtatgctt

SEQ ID NO: 584292 - DNA, 120 bp, Artificial Sequence
  ENSG00000172361_14 (sequence is synthesized)
cttttaactcctggataaacttttcttttttccctgagtttgtgtaattaattgaacataattttcttcctttgaataaacctgtgcctattttggagttcacagacttacaaatccaaa

SEQ ID NO: 584293 - DNA, 120 bp, Artificial Sequence
  ENSG00000172362_0 (sequence is synthesized)
cagggcagctacataattcccaatggagaacaacacagaggtgactgaattcatccttgtggggttaactgatgacccagaactgcagatcccactcttcatagtcttccttttcatcta

SEQ ID NO: 584294 - DNA, 120 bp, Artificial Sequence
  ENSG00000172362_1 (sequence is synthesized)
cctcatcactctggttgggaacctggggatgattgaattgattctactggactcctgtctccacacccccatgtacttcttcctcagtaacctctccctggtggactttggttattcctc

SEQ ID NO: 584295 - DNA, 120 bp, Artificial Sequence
  ENSG00000172362_2 (sequence is synthesized)
agctgtcactcccaaggtgatggtggggtttctcacaggagacaaattcatattatataatgcttgtgccacacaattcttcttctttgtagcctttatcactgcagaaagtttcctcct

SEQ ID NO: 584296 - DNA, 120 bp, Artificial Sequence
  ENSG00000172362_3 (sequence is synthesized)
ggcatcaatggcctatgaccgctatgcagcattgtgtaaacccctgcattacaccaccaccatgacaacaaatgtatgtgcttgcctggccataggctcctacatctgtggtttcctgaa

SEQ ID NO: 584297 - DNA, 120 bp, Artificial Sequence
  ENSG00000172362_4 (sequence is synthesized)
ctctcatgttcagacaactacatcagtgagatggttattttttttgtggtgggattcaatgacctcttttctatcctggtaatcttgatctcctacttatttatatttatcaccatcatg

SEQ ID NO: 584298 - DNA, 120 bp, Artificial Sequence
  ENSG00000172362_5 (sequence is synthesized)
aagatgcgctcacctgaaggacgccagaaggccttttctacttgtgcttcccaccttactgcagtttccatcttttatgggacaggaatctttatgtacttacgacctaactccagccat

SEQ ID NO: 584299 - DNA, 120 bp, Artificial Sequence
  ENSG00000172362_6 (sequence is synthesized)
ttcatgggcacagacaaaatggcatctgtgttctatgccatagtcattcccatgttgaatccactggtctacagcctgaggaacaaagaggttaagagtgcctttaaaaagactgtaggg

SEQ ID NO: 584300 - DNA, 120 bp, Artificial Sequence
  ENSG00000172362_7 (sequence is synthesized)
aaggcaaaggcctctataggattcatattttaattataaagaattcacaataagataattttttccacctcatattaatctttgtctaccaagcccaatatttgggcttcctcatggaca

SEQ ID NO: 584301 - DNA, 120 bp, Artificial Sequence
  ENSG00000172362_8 (sequence is synthesized)
tttaatcacctgatttccagttatgtgagataaagtgttttgtagacctcatagagtatgtgtcgcctgagagctccatgaccatacaattacctcctggttcccacttttcaactgatc

SEQ ID NO: 584302 - DNA, 120 bp, Artificial Sequence
  ENSG00000172362_9 (sequence is synthesized)
aagtacctatatgattccatttggcttcatattagagggagcagccccagaaccagagtcactttgaccatttatttattcgtctgattgtcaatagtcatctagtagtaactatggcct

SEQ ID NO: 584303 - DNA, 120 bp, Artificial Sequence
  ENSG00000172362_10 (sequence is synthesized)
tctccaaaactgatacatagcaaagagcctacaacaatgtttaggaaaaaaaccagtaattattatattaattgaggttatgattatcacctcttaccaagtataagaaattgtaggttt

SEQ ID NO: 584304 - DNA, 120 bp, Artificial Sequence
  ENSG00000172362_11 (sequence is synthesized)
cctattcttttcttaccatagcagcagttttcaggctggatgttgttagggctatcttttaatattttcttttttatagattcagctattgatattcaaatgggttaagagacttatcta

SEQ ID NO: 584305 - DNA, 120 bp, Artificial Sequence
  ENSG00000172362_12 (sequence is synthesized)
caaagaaggggcagtaaatacaggagtagagctcttgctagctgattccaaagccaatagcatttttctttcaatttccccctgcctctaaagaactttaagccttttggccaaacgcta

SEQ ID NO: 584306 - DNA, 120 bp, Artificial Sequence
  ENSG00000172365_0 (sequence is synthesized)
ttgctttatttctcattgctacaggtcatcttaagtttctcagataatactgatggagaattgtacggaagtgacaaagttcattcttctaggactaaccagtgtcccagaactacagat

SEQ ID NO: 584307 - DNA, 120 bp, Artificial Sequence
  ENSG00000172365_1 (sequence is synthesized)
ccccctctttatcttgttcaccttcatctacctcctcactctgtgtgggaacctggggatgatgttgctgatcctgatggactcttgtctccacacccccatgtactttttcctcagtaa

SEQ ID NO: 584308 - DNA, 120 bp, Artificial Sequence
  ENSG00000172365_2 (sequence is synthesized)
cctgtctctggtggactttggatactcctcagctgtcactcccaaggtcatggctgggttccttagaggagacaaggtcatctcctacaatgcatgtgctgttcagatgttcttctttgt

SEQ ID NO: 584309 - DNA, 120 bp, Artificial Sequence
  ENSG00000172365_3 (sequence is synthesized)
agccttggccacggtggaaaattacttgttggcctcaatggcctatgaccgctatgcagcagtgtgcaaacccctacactacaccaccaccatgacggccagtgtaggtgcctgtctggc

SEQ ID NO: 584310 - DNA, 120 bp, Artificial Sequence
  ENSG00000172365_4 (sequence is synthesized)
atcactttttctgtgatgttccagcagtcatggctctgtcttgctctgataaacacactagtgaggtgattctggtttttatgtcaagctttaatatcttttttgttcttctagttatct

SEQ ID NO: 584311 - DNA, 120 bp, Artificial Sequence
  ENSG00000172365_5 (sequence is synthesized)
ttatctcctacttgttcatattcatcaccatcttgaagatgcattcagctaagggacaccaaaaagcattgtccacctgtgcctctcacttcactgcagtctccgtcttctatgggacag

SEQ ID NO: 584312 - DNA, 120 bp, Artificial Sequence
  ENSG00000172365_6 (sequence is synthesized)
taatcttcatctacttgcagcccagctccagccactccatggacacagacaaaatggcatctgtgttctatgctatgatcatccccatgctgaaccctgtggtctacagcctgaggaaca

SEQ ID NO: 584313 - DNA, 120 bp, Artificial Sequence
  ENSG00000172365_7 (sequence is synthesized)
gagaagtccagaatgcattcaagaaagtgttgagaaggcaaaaatttctataagtttggaattttaacattgttgtatacacaaaaatgttgtttccctcatctcagactttcctcatgc

SEQ ID NO: 584314 - DNA, 120 bp, Artificial Sequence
  ENSG00000172365_8 (sequence is synthesized)
gtcttgtcctgcaaggtggattcccaattccattgtccacagctgaagcccatgctattcttgcctctccattctggccatgtggattcctcctccaatcaaggacttgcaatttgaaga

SEQ ID NO: 584315 - DNA, 120 bp, Artificial Sequence
  ENSG00000172365_9 (sequence is synthesized)
gaggtgatattcttacctctttagaagtcaattttttaataaaaataaaatattatcagaaatgtaatacctgaatgaggaaggctaaatggaaatgttagaatttttggaacttgctgg

SEQ ID NO: 584316 - DNA, 120 bp, Artificial Sequence
  ENSG00000172365_10 (sequence is synthesized)
tcaaaacttactaatgacattcggtttactcacttgttccccttgcattttttctaccacattccagtgcaaacatacttgttaaacagggacaccaacaagcccacaaaaaagtacatg

SEQ ID NO: 584317 - DNA, 120 bp, Artificial Sequence
  ENSG00000172365_11 (sequence is synthesized)
tttatgcctcttgtgggcacataggcattagaaggagaaatttactcagaagtaaatggagtgtggctagtttttatataaaggatgtaagtaattaatttagtattatagtataaattt

SEQ ID NO: 584318 - DNA, 120 bp, Artificial Sequence
  ENSG00000172365_12 (sequence is synthesized)
atttttgaatagactttaagaacagttttatgttcacagcaaaatggagaggtaagtacagagatttcccatataccttctgcccccacatacatataccctccctcattgtcaatatcc

SEQ ID NO: 584319 - DNA, 120 bp, Artificial Sequence
  ENSG00000172365_13 (sequence is synthesized)
tccaacagagtgctacattttttacaattgatgaacctacattgacacatcattatcatctcaagaccataatttacattaggattcactcttgctgttgtcccttctatggatttgaat

SEQ ID NO: 584320 - DNA, 120 bp, Artificial Sequence
  ENSG00000172365_14 (sequence is synthesized)
aaatgtataatgacatctatttatcattatagtatcatattgagtagtttcactgctctaaagctcttctatgctctacttactcattcttccttcttccctaacccctgacaactactg

SEQ ID NO: 584321 - DNA, 120 bp, Artificial Sequence
  ENSG00000172365_15 (sequence is synthesized)
atctttttctgtctccacagttttgctttctccagaatgtcatatagttaaaatcatatggtatgtaacctttccatattggcttatttcacatagtaatatgcatctgttttctccata

SEQ ID NO: 584322 - DNA, 120 bp, Artificial Sequence
  ENSG00000172365_16 (sequence is synthesized)
acttttcgtggcttgatagctcatttcattttagcactgaatattgtctattgtcaagtggtatcacactttattcatgtacctactgaaggatattttggttgcttccctagtgttggc

SEQ ID NO: 584323 - DNA, 80 bp, Artificial Sequence
  ENSG00000172366_0 (sequence is synthesized)
gccgcgtgtccggggtcagcccgagcccgtgcgggccctttaagggccgggggcgtgtagcgggcccgccccctccccgc

SEQ ID NO: 584324 - DNA, 120 bp, Artificial Sequence
  ENSG00000172366_1 (sequence is synthesized)
ccggatctggccgggggccggcggcggtgtgggagcggcgcgtcatgtacaccatcaccaaggggcccagcaagctggtcgcgcagcgccgcacaggtcccacgcagcagcaggtggagg

SEQ ID NO: 584325 - DNA, 120 bp, Artificial Sequence
  ENSG00000172366_2 (sequence is synthesized)
gctcggcgagctcctgaaatgccggcagcccgcgccgccgacctcgcagcccccgcgggcgcagccctttgcgcagccgccgggaccctggcccctgtcgagtccagggccaaggcttgt

SEQ ID NO: 584326 - DNA, 120 bp, Artificial Sequence
  ENSG00000172366_3 (sequence is synthesized)
gaatgtccgctttgtgtccgaagcctggcagcaggtgcaacagcagctggatggtggcccagccggtgagggcgggccaaggcctgtgcagtacgtggagaggacccccaatccccggct

SEQ ID NO: 584327 - DNA, 120 bp, Artificial Sequence
  ENSG00000172366_4 (sequence is synthesized)
gcagaactttgtgcccattgacctagacgagtggtgggcgcagcagttcctggcgagaatcaccagctgttcctagtggctgctgggagggggcgctgctacacggccgacctgtcgcca

SEQ ID NO: 584328 - DNA, 120 bp, Artificial Sequence
  ENSG00000172366_5 (sequence is synthesized)
ggagagaagcatggcgccctgcccacccactgcgcctggctgggtgccggccacacctgaagtgccagcatttggacttttgcacctttttttcccttggcccggctgtcccaaccaagc

SEQ ID NO: 584329 - DNA, 120 bp, Artificial Sequence
  ENSG00000172366_6 (sequence is synthesized)
tgccatggccaagggccgaacccgtctgacctcagccctgctcactgtgcccagggaccagcgaccagcccctggggctggcagggaggagctccaggctaataaagtggagaaactgtc

SEQ ID NO: 584330 - DNA, 120 bp, Artificial Sequence
  ENSG00000172366_7 (sequence is synthesized)
agtctcgattcgggcctgagccgtggaagccgttggccttcgcacaggaaagaggagcccgagatcagtctctctgcgcctccctgcttccccccttgaatggagctgcgttcaggagct

SEQ ID NO: 584331 - DNA, 120 bp, Artificial Sequence
  ENSG00000172366_8 (sequence is synthesized)
gcctacagtgcccagcgcatggcaggtttagtgttgcctgacttcagatatggcctattgttggggctggatgtttgggcctcgtggcttgaccaccaatggctgaagcaaacgctagct

SEQ ID NO: 584332 - DNA, 120 bp, Artificial Sequence
  ENSG00000172366_9 (sequence is synthesized)
agctctgggccagcccagcttgtccttgccgcctgcagtgggccccaaaggtggggggccgccttcgggagcctgtgtgagctcgggttatgcccttccccacatggggcttccctcccc

SEQ ID NO: 584333 - DNA, 120 bp, Artificial Sequence
  ENSG00000172366_10 (sequence is synthesized)
agcaccgccctcactctaactcagctggtccttgctgccaggtcttccacaggagcatatgccctcaggctgtgcacaggccccccagcaccccgtcctgcctccctggcctgtgtgagt

SEQ ID NO: 584334 - DNA, 120 bp, Artificial Sequence
  ENSG00000172366_11 (sequence is synthesized)
gattgcgctgaaggccactgggagaagccagggcaggacgcaggctgcacagatgacggggatcacactggccttccttgaaggacacgatgcccgatgctggtggggggagggcagagc

SEQ ID NO: 584335 - DNA, 120 bp, Artificial Sequence
  ENSG00000172366_12 (sequence is synthesized)
gcgctggggcacctgagcccaggaaggcaacaggccggccgggaccgcgagtgcctggcggagcaggcgcagcccaggactcccggctcccacctccggctgtagtccagggccaaggct

SEQ ID NO: 584336 - DNA, 88 bp, Artificial Sequence
  ENSG00000172366_13 (sequence is synthesized)
cccgccaccatgagagtttcaccacgtatgctaggctgatcttgaactcctgacctcaggcgacccacccgcctcggcctcccaaagt

SEQ ID NO: 584337 - DNA, 86 bp, Artificial Sequence
  ENSG00000172366_14 (sequence is synthesized)
atacacctttgacaagttcttcctcctggtgggagatggataggggaggcagtaagataaactgaggcgatataagtaataagatg

SEQ ID NO: 584338 - DNA, 120 bp, Artificial Sequence
  ENSG00000172366_15 (sequence is synthesized)
aggcagtaagataaactgaggcgatataagtaataagatgaaacggggccatgtgatcacccgaccccagggcagatggagggtgtggggaccgccacaggaagggacaatggaatgaac

SEQ ID NO: 584339 - DNA, 120 bp, Artificial Sequence
  ENSG00000172366_16 (sequence is synthesized)
cccacagggcgagaaggggcagcctgcaagagacgggggtggggaggcccagtgagggcaggctgaggggctggcttgggggctgtactgggtcagggccatggactctgttgttggatt

SEQ ID NO: 584340 - DNA, 120 bp, Artificial Sequence
  ENSG00000172366_17 (sequence is synthesized)
tgctatgatatcctggtgctgcccccacccagcatgtaatatgctcaggtggattctctcccaagcccagcttcatgggctgaaaaagggatgggctgtggaggggagaggagaggatgc

SEQ ID NO: 584341 - DNA, 120 bp, Artificial Sequence
  ENSG00000172366_18 (sequence is synthesized)
actccacagccttcacctccctgggctgaagtttgcccggagcagtgtccctggaagtgggagaggttggcggtgatccataggtgctcgccgggccggtgccctttcccccagagagca

SEQ ID NO: 584342 - DNA, 120 bp, Artificial Sequence
  ENSG00000172366_19 (sequence is synthesized)
gcagccttacgtaaccagagcccctggggcggtgcctgcctcctggggcccatctctgcccgagagccgccacctccgcccttcgattcacagcccctggcaatgttcttgtcttcttag

SEQ ID NO: 584343 - DNA, 120 bp, Artificial Sequence
  ENSG00000172366_20 (sequence is synthesized)
tcttggagtttctggctttccgaggtgggagtgggttgcaggcaagggggctttccaagtggacaaactttattccctgtggtttgtgcagaaactcaggcagcgggcaggcctgggagg

SEQ ID NO: 584344 - DNA, 120 bp, Artificial Sequence
  ENSG00000172366_21 (sequence is synthesized)
tgcccctgcccctgtcccatctccacctgcacgttttaagatcctctgtggccaccagaccctgccagccctggggccggcaggaccctgcgcccctcaagacactcctctttattttag

SEQ ID NO: 584345 - DNA, 120 bp, Artificial Sequence
  ENSG00000172366_22 (sequence is synthesized)
gagaatgtccgctttgtgtccgaaggtagcgagcggggccagagggtgcggcataggctgctgggtcgcaaaaccatggacccgggatggccccacttcaagctgacccacagccgctgc

SEQ ID NO: 584346 - DNA, 120 bp, Artificial Sequence
  ENSG00000172366_23 (sequence is synthesized)
atggctgtgcttttccttggcactctgcccttgtgtcctgtgaccagccctgtgtggggctggagtccagggtgaccatcaggccctgggtgggcgatggggtgcctgggacctggctca

SEQ ID NO: 584347 - DNA, 120 bp, Artificial Sequence
  ENSG00000172366_24 (sequence is synthesized)
gctggcgactgcataggaggacccagctggcgggaccgcgaggtccagggccaaggcttgtgttcaatcgtgtgaatggccggcgggccccctccacgtccccatccttcgaggggaccc

SEQ ID NO: 584348 - DNA, 120 bp, Artificial Sequence
  ENSG00000172366_25 (sequence is synthesized)
gcgggagccatctcctttggcatcgccccttgtctcgggccggtggggagtgggcgagggttatagtcactctcccgactcagggactgcccatcccggcacccagtcctcatcccatgg

SEQ ID NO: 584349 - DNA, 120 bp, Artificial Sequence
  ENSG00000172366_26 (sequence is synthesized)
gacgtgggggcagccagggagagggcaaaggcccccgttcccgtccaggtccatccgtccatggagggaaacatcgtggagatggaggtgcttctgtggggcgagaatgtggcctagaac

SEQ ID NO: 584350 - DNA, 120 bp, Artificial Sequence
  ENSG00000172366_27 (sequence is synthesized)
tacacccagagtgggggggttggggcagagagacatggtcatggactgggtcgtggctcaggtcagaatctgggctgctgatgggatgcaggtggcagcatgggcacctgcaagaccctc

SEQ ID NO: 584351 - DNA, 120 bp, Artificial Sequence
  ENSG00000172366_28 (sequence is synthesized)
ggggaggggtactgagtggggcccgaccaaaggtttgggacactctaagactgaggcccccaccctacagtcactcacttccctcaggacacagggctgcaggtgtgagctgagctgccg

SEQ ID NO: 584352 - DNA, 120 bp, Artificial Sequence
  ENSG00000172366_29 (sequence is synthesized)
atggcttggggactgcaagagaggcctgggccaccggctgctgtgggtggctgctctctctggttcaggaagtgcctaggctggccaagtctggggaaagtgggctggcccggggctgct

SEQ ID NO: 584353 - DNA, 120 bp, Artificial Sequence
  ENSG00000172366_30 (sequence is synthesized)
cggctgcagagtgagccccccaaccctgtccccccaggagagaccccccagcccctctgatcctgacccaggccctgccaggttcccaccccaggggatgagggaggggactcttgtgca

SEQ ID NO: 584354 - DNA, 120 bp, Artificial Sequence
  ENSG00000172366_31 (sequence is synthesized)
gaaaccccttcttcccagcgcctgccgcactcggagtccgggtgagcggcttgtggttagctccaggggagacttgccggctggcctgggaggcagcatcactgcccagccttctctgcc

SEQ ID NO: 584355 - DNA, 120 bp, Artificial Sequence
  ENSG00000172366_32 (sequence is synthesized)
ccggccagttcctgggtcgcaggggcctccagcgtccgaggtcggtgcttcgggcgaccttgggttgctgctggaaccctgacgtgcagcaggcccaggccacggttcgcggagagcgtc

SEQ ID NO: 584356 - DNA, 120 bp, Artificial Sequence
  ENSG00000172366_33 (sequence is synthesized)
gggcgctggtcctcaagatctcccggctctgcccttgcagagctcagtgggggagacgtgcgtgcgcttccctcgggcagggccgctgccctcctccgcccttcaccccagacaccctgg

SEQ ID NO: 584357 - DNA, 120 bp, Artificial Sequence
  ENSG00000172366_34 (sequence is synthesized)
ggcagtggggcctccccccatccggttgcttctgcttttcctaacccagttaggaaactccgagaccacaggagcctcagtccggccactgtggcctccccgtgaccatgacccagaggt

SEQ ID NO: 584358 - DNA, 120 bp, Artificial Sequence
  ENSG00000172366_35 (sequence is synthesized)
tggacagccccgcagggctggacgtttgactttggctcagttcctccaccgttcccttcatttatcctgtgcctctcccaggcctgtggattttgctgtggccccaagccggcccgaagg

SEQ ID NO: 584359 - DNA, 120 bp, Artificial Sequence
  ENSG00000172366_36 (sequence is synthesized)
ctcctggaggtggtagggtcatggcctgaggcggtgctggggaggagagctcgggccaggagttcagggcagctacaggtgggggggtgccgagccaccctcagcctgccccctgcctac

SEQ ID NO: 584360 - DNA, 120 bp, Artificial Sequence
  ENSG00000172366_37 (sequence is synthesized)
agttgctgcccgcggagacaagagactgtgacgcgggaagtcctccgggcgtgcgccgccgctggcgccgggctcagcgcaagggagctggcgactgcataggaggacccagctggcggg

SEQ ID NO: 584361 - DNA, 120 bp, Artificial Sequence
  ENSG00000172367_0 (sequence is synthesized)
actgggttgctgatccagctatggagaaagccgcagatctgcaggacacagcctcgttaactctgaagtttaagtttaacccaaagctgggcattgataatcctgtcctctccctggccg

SEQ ID NO: 584362 - DNA, 120 bp, Artificial Sequence
  ENSG00000172367_1 (sequence is synthesized)
aagaccacgacccctatgatccctggagcctggagcggcctcgcttctgtttactgagcaaagaggagggcaagagttttggcttccacctgcagcaggagctgggcagggctgggcatg

SEQ ID NO: 584363 - DNA, 120 bp, Artificial Sequence
  ENSG00000172367_2 (sequence is synthesized)
tggtgtgcagggtggacccaggcacctctgcccagcgccagggtcttcaggaaggagacaggatcctggcggtgaacaatgatgttgtggaacacgaagactatgcggtggtggtacgcc

SEQ ID NO: 584364 - DNA, 120 bp, Artificial Sequence
  ENSG00000172367_3 (sequence is synthesized)
gcatccgggccagcagccctcgggtgttgctgacagtattggcacggcatgcacatgacgtggcccgagctcagctgggagaagatgcccacctctgtcccaccctaggcccaggggtcc

SEQ ID NO: 584365 - DNA, 120 bp, Artificial Sequence
  ENSG00000172367_4 (sequence is synthesized)
ggccccggctgtgccacatagtgaaagatgagggtggttttggcttcagtgtcacccatggcaatcagggtcctttctggttggtgctaagtactggaggagcagctgagcgggcagggg

SEQ ID NO: 584366 - DNA, 120 bp, Artificial Sequence
  ENSG00000172367_5 (sequence is synthesized)
tgccccccggggcccggctgctggaagtgaatggggtcagtgtggagaagttcactcacaaccaactcaccaggaagctttggcagagtggacagcaggtgaccttgctggtggcagggc

SEQ ID NO: 584367 - DNA, 120 bp, Artificial Sequence
  ENSG00000172367_6 (sequence is synthesized)
cagaggtggaagaacagtgtcgccagctgggattgcccctggctgcacccctggcagagggctgggcactgcccaccaagccccgctgcctgcacctggagaaagggccccagggttttg

SEQ ID NO: 584368 - DNA, 120 bp, Artificial Sequence
  ENSG00000172367_7 (sequence is synthesized)
ggttcctgctccgggaggaaaagggccttgacggtcgccctggacagttcctgtgggaggtggacccgggactgccagccaagaaggctgggatgcaggctggggaccggctggtggctg

SEQ ID NO: 584369 - DNA, 120 bp, Artificial Sequence
  ENSG00000172367_8 (sequence is synthesized)
tggctggggagagcgtggaggggctgggccatgaggagacagtgtccaggatccaggggcagggctcctgtgtctccctcactgtcgtcgaccctgaggcggaccgcttcttcagcatgg

SEQ ID NO: 584370 - DNA, 120 bp, Artificial Sequence
  ENSG00000172367_9 (sequence is synthesized)
ttgaagacacaagcgtgccttctgtccctcttggctcccgacagtgcttcctgtaccctgggcctggtggcagctatggcttccgactcagttgtgtggccagtgggcctcgtctcttca

SEQ ID NO: 584371 - DNA, 120 bp, Artificial Sequence
  ENSG00000172367_10 (sequence is synthesized)
tctcccaggtgactccaggaggctcagctgcccgggctgggctgcaagtgggagacgtgattctggaagtgaacgggtatcctgttgggggacagaatgacctggagaggcttcagcagc

SEQ ID NO: 584372 - DNA, 120 bp, Artificial Sequence
  ENSG00000172367_11 (sequence is synthesized)
tgcctgaggctgagccacccctctgcctgaagctggcagccaggtctctgcggggcttggaagcctggattccccctggggctgcagaggactgggctctggcctcggatctactgtaga

SEQ ID NO: 584373 - DNA, 120 bp, Artificial Sequence
  ENSG00000172367_12 (sequence is synthesized)
gcacccctgcttggtacagacatactcaggggctaccgtgtcttcactctccagcctgaggtggtgaaggcaggatgctctctctaagccagaccagagggactcagacaccaccgatca

SEQ ID NO: 584374 - DNA, 120 bp, Artificial Sequence
  ENSG00000172367_13 (sequence is synthesized)
caggctggcccaggtgctccctcccttcctgcaggcccacctgccagcagagggtgtggttggaggcctcagacaggtccctgaaggagtctgaggctccagaggatgtcatatgggagt

SEQ ID NO: 584375 - DNA, 120 bp, Artificial Sequence
  ENSG00000172367_14 (sequence is synthesized)
tttagagagctgtgtcccaaggatgaaggtgtggctgtgggtctggctaggattgaagccatctggaccttttctagatatgactccaggacccttgagtgtaatgcaaaaatttggaga

SEQ ID NO: 584376 - DNA, 120 bp, Artificial Sequence
  ENSG00000172367_15 (sequence is synthesized)
ccagctatgcctgccctctgtgggtgccttagcattgcgggagggtggtgcttggtcaccgttgcatttgttatagaaatggccattcgccataaatctgactgcctgtgtttgtgttgg

SEQ ID NO: 584377 - DNA, 120 bp, Artificial Sequence
  ENSG00000172367_16 (sequence is synthesized)
tgggggtaaggggcagtggtgtgaagggaccaaaagggcctcaggctcaaggggtgggatgcggctcctgcaggagagaggttgagacctggtcaaatttatttcctatcaatcactgaa

SEQ ID NO: 584378 - DNA, 120 bp, Artificial Sequence
  ENSG00000172367_17 (sequence is synthesized)
tctcagggataatgggtcaacccagaactgagatgtctgtatgacagccactcctaaaaataaacaacaacaaaaacaaaaaaagaagaaaactaaataaaaataaaaataaaaataaga

SEQ ID NO: 584379 - DNA, 120 bp, Artificial Sequence
  ENSG00000172367_18 (sequence is synthesized)
actgggttgctgatccagctatggagaaagccgcaggtaggaggccaggagaaatcctctgcaggggactttgggacaggcagggggccgacttggaggctgaagctttgggaccagggc

SEQ ID NO: 584380 - DNA, 120 bp, Artificial Sequence
  ENSG00000172367_19 (sequence is synthesized)
acacttgattttggggcttggagccctgaggcaggtaaacaagtcaggagaaaagtaatgagttgatatgtctgtcttcctggtccacaccctgtactgatatgctcagatttatgtgcc

SEQ ID NO: 584381 - DNA, 120 bp, Artificial Sequence
  ENSG00000172367_20 (sequence is synthesized)
aaggacttggggggagagaaagggaggggaccgcacaatagtcctgtgtgtatggcagtgagaagagaagacccctttggagcagaaaggagggggcatgccctgagtttgggggtttcc

SEQ ID NO: 584382 - DNA, 120 bp, Artificial Sequence
  ENSG00000172367_21 (sequence is synthesized)
ctgagtccttttagtttatgccaatggaagaggcacatctggggagaagaatgtgactctcctcctctcacccacttctttgcccagtagatctgcaggacacagcctcgttaactctga

SEQ ID NO: 584383 - DNA, 120 bp, Artificial Sequence
  ENSG00000172367_22 (sequence is synthesized)
cggctccacacggcctccgatctccttggtaaccactcactcggtctccctctgataacagccttggttgggagtagagataggaggggccgggtgttttctcctgtcccagtccctctg

SEQ ID NO: 584384 - DNA, 120 bp, Artificial Sequence
  ENSG00000172367_23 (sequence is synthesized)
cccacgaaccccaccacccaacacccaaccaggcagaaactgcccagcaccctatcaggacacagggtctgccaggcacacggcgaacctgtacttgggctgtgccctctcctccccctt

SEQ ID NO: 584385 - DNA, 120 bp, Artificial Sequence
  ENSG00000172367_24 (sequence is synthesized)
gagtgggagccctgggggcggtgggggaaggtgggccttggggtgggcacacaagcgtatatacacctttcagtgcaccgaagaggtgtccctgtctgagctctggccctgggccgcctc

SEQ ID NO: 584386 - DNA, 120 bp, Artificial Sequence
  ENSG00000172367_25 (sequence is synthesized)
ttcccgttcactctggggtcagtcccctggtgtgtacacagtggcctaggatagctggagaggagcagtgaggatgtctatgccccaggacagttcctgtgggaggtggacccgggactg

SEQ ID NO: 584387 - DNA, 120 bp, Artificial Sequence
  ENSG00000172367_26 (sequence is synthesized)
gggccccacctcgggaagacgcctccttccccatgcgcctaacctccttatctggtctcctacctttatcaccatcctccccctctacagtttgtgccaggctccacttagtgcctggga

SEQ ID NO: 584388 - DNA, 120 bp, Artificial Sequence
  ENSG00000172367_27 (sequence is synthesized)
cagggctgaggtccgaaagatttgctctccctgccaccttccaggttcgcctgtccccactcctcttcttggagaacacagaggctcccgcctcgccccggggcagcagctcagcctcac

SEQ ID NO: 584389 - DNA, 120 bp, Artificial Sequence
  ENSG00000172367_28 (sequence is synthesized)
atccagctatggagaaagccgcagatctgcaggacacagcctcgttaactctgtaagtgccacgagggttggggcaaggggaggaaataattggaggcagcgaagcgcttcactgccatt

SEQ ID NO: 584390 - DNA, 120 bp, Artificial Sequence
  ENSG00000172367_29 (sequence is synthesized)
agcacctaaaggagatcctgggacccaagtccagctgccagcttgtacctgcttcccctgcctccttgcaggaagtttaagtttaacccaaagctgggcattgataatcctgtcctctcc

SEQ ID NO: 584391 - DNA, 120 bp, Artificial Sequence
  ENSG00000172375_0 (sequence is synthesized)
gagccggtgccggcccgcgagccccagcgtctctgcagaccagtcccctccagggtccggcggggcccgcgcggtgggaggagtcgggcactggccggcgactaacgggtccgactgctg

SEQ ID NO: 584392 - DNA, 120 bp, Artificial Sequence
  ENSG00000172375_1 (sequence is synthesized)
accaagctaggagagacccggaccacggagacagagaccccggcatcgcgacccccgaggacctcctctcctcgccctgtggcacccactagtcctgggcactcagccgcggagagcccc

SEQ ID NO: 584393 - DNA, 80 bp, Artificial Sequence
  ENSG00000172375_2 (sequence is synthesized)
cgcccgggccatgctcccccggggcagcgggtgagccccagccgggaccgggatcggagcccgcgcggagcatggatccg

SEQ ID NO: 584394 - DNA, 120 bp, Artificial Sequence
  ENSG00000172375_3 (sequence is synthesized)
tggatccgggctgggggcagcgggacgtgggctgggcggccttgctgatcctcttcgccgcctcgctgctcacggtgttcgcctggctgctgcaatatgcccggggcttgtggctggcgc

SEQ ID NO: 584395 - DNA, 120 bp, Artificial Sequence
  ENSG00000172375_4 (sequence is synthesized)
ttagccggggaacccgcgggttccctgcgggagctgggcgtgtggcgctcgctgctgcggctgcgggcgactcgggctggcgccgccgaggagccaggagtccggggcctcctggcgtca

SEQ ID NO: 584396 - DNA, 120 bp, Artificial Sequence
  ENSG00000172375_5 (sequence is synthesized)
aggagccaggagtccggggcctcctggcgtcactcttcgccttcaagtctttccgggagaactggcagcgggcttgggtgcgagcgctgaacgagcaggcctgcagaaacgggagctcca

SEQ ID NO: 584397 - DNA, 120 bp, Artificial Sequence
  ENSG00000172375_6 (sequence is synthesized)
tccaaatcgcctttgaggaggtgccccaactcccacccagagccagcatcagtcatgtgacctgcgtagaccaatctgagcataccatggtgctgcgttgccagctctctgctgaggagg

SEQ ID NO: 584398 - DNA, 120 bp, Artificial Sequence
  ENSG00000172375_7 (sequence is synthesized)
tgcggttcccagtctctgtgacccagcagtcccccgctgccgtctccatggagacctaccacgtcactctgacactgccaccaacacagttggaagtcaacctggaggaaatccctggtg

SEQ ID NO: 584399 - DNA, 120 bp, Artificial Sequence
  ENSG00000172375_8 (sequence is synthesized)
aggggctgctcatatcctgggccttcactgatcgcccagatctcagcctaacggtgcttcccaagcttcaggccagggagagaggtgaagaacaagtggagctctccacaattgaggaac

SEQ ID NO: 584400 - DNA, 120 bp, Artificial Sequence
  ENSG00000172375_9 (sequence is synthesized)
tgatcaaggatgccatagtcagcacccagccagccatgatggtcaacctcagggcttgctctgccccaggaggcctggtacccagtgagaagccacccatgatgccccaggctcagccag

SEQ ID NO: 584401 - DNA, 120 bp, Artificial Sequence
  ENSG00000172375_10 (sequence is synthesized)
ccatccccagacctaaccggttattcctacggcagcttcgggcatctcacttgggaaatgagctggaaggcaccgaggaactgtgctgtgtagctgaactcgacaaccccatgcagcaga

SEQ ID NO: 584402 - DNA, 120 bp, Artificial Sequence
  ENSG00000172375_11 (sequence is synthesized)
agtggaccaagcccgcgagggctggatccgaggtggagtggacagaagacctggcactggatctgggcccccagagccgggagctgaccctcaaagtgctgaggagcagcagctgtggag

SEQ ID NO: 584403 - DNA, 120 bp, Artificial Sequence
  ENSG00000172375_12 (sequence is synthesized)
acaccgaactcctaggccaggccacactgcctgtgggctccccctccagaccactgtctcgaagacagttgtgcccactcaccccagggccagggaaagccctgggaccagcagccacca

SEQ ID NO: 584404 - DNA, 120 bp, Artificial Sequence
  ENSG00000172375_13 (sequence is synthesized)
tggcagtggagcttcactatgaggagggctctccccggaacctgggtactcccacctcctccactccacgccccagcatcacacctaccaagaagattgagcttgaccggaccatcatgc

SEQ ID NO: 584405 - DNA, 120 bp, Artificial Sequence
  ENSG00000172375_14 (sequence is synthesized)
ccgatggcaccattgtcaccacagtcaccactgtccagtcccggccccgtatagacggcaaattagactccccctcccgctccccgtccaaggtggaggtgaccgagaagacgacaactg

SEQ ID NO: 584406 - DNA, 120 bp, Artificial Sequence
  ENSG00000172375_15 (sequence is synthesized)
tgctgagtgagagcagtggccccagcaatacctcccatagcagcagcccaggggacagccacctttccaacggcttggaccctgtagcagagacagcgattcgccagctgacagagccca

SEQ ID NO: 584407 - DNA, 120 bp, Artificial Sequence
  ENSG00000172375_16 (sequence is synthesized)
gtgggcgggtggccaagaagacacccaccaagcgcagcactctcatcatctctggtgtttccaaggtgcccattgctcaggacgagttggcgctatccctgggctatgcggcatccctgg

SEQ ID NO: 584408 - DNA, 120 bp, Artificial Sequence
  ENSG00000172375_17 (sequence is synthesized)
aagcctcagtgcaggatgatgcagggaccagcggaggcccctcttcacctccctcagacccaccagccatgtctccaggaccgctagatgccctctctagtcccacaagtgtccaggaag

SEQ ID NO: 584409 - DNA, 120 bp, Artificial Sequence
  ENSG00000172375_18 (sequence is synthesized)
cagacgagacaacccgttcggatatttctgagaggccatctgtggatgatattgagtcggaaacggggtccactggtgccctggagacccgcagcctcaaggatcacaaagtgagtttcc

SEQ ID NO: 584410 - DNA, 120 bp, Artificial Sequence
  ENSG00000172375_19 (sequence is synthesized)
ggccacgcccagtgtccgaaagaaggccggcagcttttctcgccgccttatcaagcgcttttccttcaaatccaaacccaaggccaatggtaaccccagcccccagctctgaggacccag

SEQ ID NO: 584411 - DNA, 120 bp, Artificial Sequence
  ENSG00000172375_20 (sequence is synthesized)
ctctgaaagggcacgagttctctcagcccattccccacctccccttccataccccttcctggatctccagtgcctgggccaggaaagccctctgggttccgggaagccccgtccaccctg

SEQ ID NO: 584412 - DNA, 120 bp, Artificial Sequence
  ENSG00000172375_21 (sequence is synthesized)
ggccatggggccggttggaaggatacttggaacgggaagcacatgagaggtgggcacccggtgccgaggacatggacgagggactggtggctgggagggagaggagggccctgtccggca

SEQ ID NO: 584413 - DNA, 120 bp, Artificial Sequence
  ENSG00000172375_22 (sequence is synthesized)
tgtgtgggtattccccagaagcatttgcctcctgctgagcctggtccctgagcggagtcccagggtgctcagctcttcagctgacccttcttcccttatttattctcttttctatttata

SEQ ID NO: 584414 - DNA, 120 bp, Artificial Sequence
  ENSG00000172375_23 (sequence is synthesized)
tgtgtggcttaggaccctccgtgaacagatgatagagggcatctctcccaggtgacccttcttttctgtcccaggagggtgggtaattccctttgggatggggctcccacacctccctca

SEQ ID NO: 584415 - DNA, 120 bp, Artificial Sequence
  ENSG00000172375_24 (sequence is synthesized)
ggtccccactcagaccagcaccagtgtctgcctctgagaatgttggcagctcacagagagcagggccggcccgggatggggggcaggtactccccaccttcctgcctcccctcctgctcc

SEQ ID NO: 584416 - DNA, 120 bp, Artificial Sequence
  ENSG00000172375_25 (sequence is synthesized)
tcatccctccctccccctttattaccgttttttgtacttgatgccttctctgtgagcagtggctctgtgggaaggagggagccgggagcctggtgggaagccttccccagagagatggct

SEQ ID NO: 584417 - DNA, 120 bp, Artificial Sequence
  ENSG00000172375_26 (sequence is synthesized)
ttaggggctttatttaaagactgtgatgatggagccacgcaaggctgcacctctgtgtgttgggagacgatgatgatgtccattgctgtgtgatggcttggaatttaatttattaaagtc

SEQ ID NO: 584418 - DNA, 120 bp, Artificial Sequence
  ENSG00000172375_27 (sequence is synthesized)
aaattggagtttataaactggacaactggttatcctttgaaaggcagtaggcagccaggctgtgacatggatggtgtgggaggatgagacaggggcccggataatgaggttgggtagatg

SEQ ID NO: 584419 - DNA, 120 bp, Artificial Sequence
  ENSG00000172375_28 (sequence is synthesized)
acacacattgtggatctgctaagaagttcctgcagggaagaaggggtgtgcagagaaaggatggaagagacaggaggctctggagtatgaaattgtagcaaaaaactcaatcaactagta

SEQ ID NO: 584420 - DNA, 120 bp, Artificial Sequence
  ENSG00000172375_29 (sequence is synthesized)
caggttagtcttcattcccctttctggaacaggctgctccttctaggatgtaatggagatcaaagcttggaccctgtaactagactgcctgcctgggtttgagtcccagctcttctaatt

SEQ ID NO: 584421 - DNA, 120 bp, Artificial Sequence
  ENSG00000172375_30 (sequence is synthesized)
acttgtgtgaccttgggcaagttatgtaacctctaagtgcctcagttttctcatctgtaaaatgggaacttcaatcatcatggctatcatttggttgtggatgagaagtaaatgaagtgc

SEQ ID NO: 584422 - DNA, 120 bp, Artificial Sequence
  ENSG00000172375_31 (sequence is synthesized)
tgagtgttaactgttgcctcagaagaaactgggagggggaagtcttagaagtgtttcaacataataaaagctctctcattctgaaatgtgggcaaatttcagggattgatagatcctagc

SEQ ID NO: 584423 - DNA, 120 bp, Artificial Sequence
  ENSG00000172375_32 (sequence is synthesized)
aaactgtgtccctggttcccgtgcttgagatcttatacaggacttgaaccaggtaagctgctacaggatattgggcagaatgcaggaccaggaagcaagaaaactgagtctgccacagac

SEQ ID NO: 584424 - DNA, 120 bp, Artificial Sequence
  ENSG00000172375_33 (sequence is synthesized)
aaaccaagtgatcttgagcaggcaacttctcctttggggacctcagtttcctcatatctaaaataagggtgacctggataaacattcaggtcacttccagccttgacattctatgactac

SEQ ID NO: 584425 - DNA, 120 bp, Artificial Sequence
  ENSG00000172375_34 (sequence is synthesized)
ctatatctcagggtgtttagggcacatgcctttgggtagatagcatgtggaaattgttactattccccatgctcctgtccacactactcaccaaatatgagatatccgggaagaatggag

SEQ ID NO: 584426 - DNA, 120 bp, Artificial Sequence
  ENSG00000172375_35 (sequence is synthesized)
ggtatagattttttttttcaattagataatttagttttatatatttggggggacaagtgcaggtttcttacatgcatatattgcatgcatagaggtgaagtctgggctttttttagtgtg

SEQ ID NO: 584427 - DNA, 120 bp, Artificial Sequence
  ENSG00000172375_36 (sequence is synthesized)
cgcatcgcccaaatagtgaacatcatacccaataggtagtttttcaaccctcaccctcctcccaccttctcacctttcatagtctccgatgtcttttattccactctatatgtccatgta

SEQ ID NO: 584428 - DNA, 120 bp, Artificial Sequence
  ENSG00000172375_37 (sequence is synthesized)
tacccattatttagctcccacttataaatgagaatatgccatatttgactttgtttctgagttatttcaccgaggataatggcctccagttccacccatgttgctggaaaacacatgatt

SEQ ID NO: 584429 - DNA, 89 bp, Artificial Sequence
  ENSG00000172375_38 (sequence is synthesized)
ctgtgtgtgtgtgtgttgggcgatgataatgatgtccattgctgtgtgacagcttggaatttaatttattaaagtcaagttggagttta

SEQ ID NO: 584430 - DNA, 120 bp, Artificial Sequence
  ENSG00000172375_39 (sequence is synthesized)
gctctgcgtctccttaccctgggcctagcttcccccaggaaatgggaagctagaagtcgctgagtctgggggtgttgggagaagggggcggtgatttccacaggggtcacctccttctta

SEQ ID NO: 584431 - DNA, 120 bp, Artificial Sequence
  ENSG00000172375_40 (sequence is synthesized)
agaacaaacctacacgagcaaggaggttaatggggctgtttctgggtccaagctccaagaggaaggagggtgatgatggtggggggaattcaaattcggtgttctactctcaacctctcc

SEQ ID NO: 584432 - DNA, 120 bp, Artificial Sequence
  ENSG00000172375_41 (sequence is synthesized)
ttcaaccccggaacctcctccgctcgctgctagccctcccgccctcctccagcgagggagcgccaggctgtcctggccccgcccggcgcgggtgcggctcctttaagggcgggtgggggc

SEQ ID NO: 584433 - DNA, 120 bp, Artificial Sequence
  ENSG00000172375_42 (sequence is synthesized)
agctccgtccgcctccataggtcaagcttaaagggcccgtacctctcccttaatctgggatgcctccggctccaggaagatggctattgaaaggcagggggtggggaggagggacgaggg

SEQ ID NO: 584434 - DNA, 120 bp, Artificial Sequence
  ENSG00000172375_43 (sequence is synthesized)
cctttccagcacagtccttgcaggaatcagctctgttttcagtagcctttggcgtgagctcctattgtatgccaggccctggcgtgggtcttagggatacagacttgaccaagatacagc

SEQ ID NO: 584435 - DNA, 120 bp, Artificial Sequence
  ENSG00000172375_44 (sequence is synthesized)
ccccacccctgggtcaatgacaagcttgaggcagagacaggtgtacataaagaagatggtaaaaccgctccagttgaggtttatgtaatgtgccgtcagagtgcctaggtgggggggaga

SEQ ID NO: 584436 - DNA, 120 bp, Artificial Sequence
  ENSG00000172375_45 (sequence is synthesized)
ttaattcccatgagggaataaggatcagagtaggcttcatggaggagatgacatttaaaccacactttagagcaagagtaggatttcatcagagtgtgaaagtattctcggcagagggaa

SEQ ID NO: 584437 - DNA, 120 bp, Artificial Sequence
  ENSG00000172375_46 (sequence is synthesized)
gagctggagcaaatgaaagagggtggcttgcaactgagagactggcaagacaggaagagcaggaccagggaggatttgaatgcatagctgagaagcatggtttccactcaggccctgtcc

SEQ ID NO: 584438 - DNA, 120 bp, Artificial Sequence
  ENSG00000172375_47 (sequence is synthesized)
ctttctcttgggacgagagagaatttggaggccaggagaatctgattggagcatttatgccgttttatttatgtacacagctctctgcctctggcctgtgatccactcaagtgtgggttc

SEQ ID NO: 584439 - DNA, 120 bp, Artificial Sequence
  ENSG00000172375_48 (sequence is synthesized)
tcaaagtgctgaggagcagcagctgtggagacagtaagtgaggggtgggaggggcacccctgggtgggtacagagtggggtctggccatgggcccagctcacagtgccatccctttcccc

SEQ ID NO: 584440 - DNA, 120 bp, Artificial Sequence
  ENSG00000172375_49 (sequence is synthesized)
ccaaggcaggacagtgaaagaggagagagccttaattccaactccccctgttttcagacattccattccagtcctaccacatcttcctcccaatctttgtctcttccaaactttccctta

SEQ ID NO: 584441 - DNA, 120 bp, Artificial Sequence
  ENSG00000172375_50 (sequence is synthesized)
cctcctgccatttccccagcaattcctctcactctgccacccttctggatcctcctgcccctcctcatacaggactgttgcactcctaccttccagcttcccctctggcttttcacaggt

SEQ ID NO: 584442 - DNA, 120 bp, Artificial Sequence
  ENSG00000172375_51 (sequence is synthesized)
gtccttagccccagctgactataattgtccatcctgctaccctcagccctccagcaccccctggggtcctccaacaaacccagaggcctctgtggcatttctaccccactcagtgggccc

SEQ ID NO: 584443 - DNA, 120 bp, Artificial Sequence
  ENSG00000172375_52 (sequence is synthesized)
ggaggtgcggttcccagtctctgtgacccagcagtcccccgctgccgtctccatggagacctaccacgtcactctgacactgccaccaacacaggtagaaggggatgtgggaaactgagt

SEQ ID NO: 584444 - DNA, 120 bp, Artificial Sequence
  ENSG00000172375_53 (sequence is synthesized)
tgggcaggggcggttccattggctcagcttcttccatttgtttcctctctgggatggaattcaggaagggagagtcctcgaattaggagtccttgggtaaatggggcaagtcagcccagt

SEQ ID NO: 584445 - DNA, 120 bp, Artificial Sequence
  ENSG00000172375_54 (sequence is synthesized)
atagcatctccccacaccttcagcaggccccatggcactttcctacactcccattagctcctggggtgtcttttagtccccacggcatcttcctaatcacccttgtgattaatcaccctt

SEQ ID NO: 584446 - DNA, 120 bp, Artificial Sequence
  ENSG00000172375_55 (sequence is synthesized)
taatcattcttgccctctgagtcacccaaagtctgcatctcaacaaagacagtaggggtgggggccactctgaagcaactcccagctcactgaccctcccccacccaccagactccccct

SEQ ID NO: 584447 - DNA, 120 bp, Artificial Sequence
  ENSG00000172375_56 (sequence is synthesized)
cccgctccccgtccaaggtggaggtgaccgagaagacgacaactgtgctgagtgagagcagtggccccagcaatacctcccatagcagcagccgtgagtggggaatggggtgcatgagtg

SEQ ID NO: 584448 - DNA, 120 bp, Artificial Sequence
  ENSG00000172375_57 (sequence is synthesized)
tgggttggccctggtgccccagcatcaaaaagtactctgggtgggataggaggagttccaatccaagaaagagccagggagaagtcaggttattcattctctgcacccctagcaggggac

SEQ ID NO: 584449 - DNA, 120 bp, Artificial Sequence
  ENSG00000172375_58 (sequence is synthesized)
aaaggtagggggacgttggcagggtgcccctcatctcttcttttatacacatatcatgacctgggggacctcgagccagtgtgccttctccttcctcccctaagagatagccggattccc

SEQ ID NO: 584450 - DNA, 120 bp, Artificial Sequence
  ENSG00000172375_59 (sequence is synthesized)
agcctagttcagccaagctagcctagagggggatcttggtgccttggttcctggcctagatctgacatgcttgtgataggaagggatgccaaattatttccctttacctccattgttctt

SEQ ID NO: 584451 - DNA, 120 bp, Artificial Sequence
  ENSG00000172375_60 (sequence is synthesized)
tcttcctgagtctaagtgccatttttcctgccctttaaaaaaaaattataaaaatttattcctaggcagggtgtggtggctcacaccggcactttgggaggccaaggcgggtggcttacc

SEQ ID NO: 584452 - DNA, 79 bp, Artificial Sequence
  ENSG00000172375_61 (sequence is synthesized)
gcgagaccccatctctactaaaaatacaataaattggctgggcgtaagggaggattccttgagcctgggaggttgaggt

SEQ ID NO: 584453 - DNA, 73 bp, Artificial Sequence
  ENSG00000172375_62 (sequence is synthesized)
taatctcagctactcagggggctgaggagggaggattccttgagcctgggaggttgaggttcaaggaggttga

SEQ ID NO: 584454 - DNA, 63 bp, Artificial Sequence
  ENSG00000172375_63 (sequence is synthesized)
cagagtgagaccctgtctcaaaaaaaattttttttttccatggctgggcacggtggttattca

SEQ ID NO: 584455 - DNA, 79 bp, Artificial Sequence
  ENSG00000172375_64 (sequence is synthesized)
tccctttcaatctgcaccctctccccaatgagtataagaaatcctacccttggattatccatctggcagcaagacaggc

SEQ ID NO: 584456 - DNA, 120 bp, Artificial Sequence
  ENSG00000172375_65 (sequence is synthesized)
aatcctacccttggattatccatctggcagcaagacaggcagtgaccagtggtggtagttcttctaactttaaaagatgagaggctcaccctaaaacatcttcattcctctaccagtgag

SEQ ID NO: 584457 - DNA, 120 bp, Artificial Sequence
  ENSG00000172375_66 (sequence is synthesized)
actatcaaccatggatctatctatctattttttaagcctgcatcacttcttgagataatgaggtttctacctccaaagcctgctgggtgagcaccttgctcattatactggttctgaatt

SEQ ID NO: 584458 - DNA, 120 bp, Artificial Sequence
  ENSG00000172375_67 (sequence is synthesized)
tacctctttgaagtttctagatgcaccacttcctgctcacagcctggaattcggttaacaagtcagtgtcaacctacctttcccttcatgatttatagacttttgggagtaccttctggt

SEQ ID NO: 584459 - DNA, 120 bp, Artificial Sequence
  ENSG00000172375_68 (sequence is synthesized)
agcttttgtcttcccataggaaagaggcccaatcccagtttgtcctcacaaagcggccagctccgtgatatctcttttgcgggcagagttaagattgtacacagatccccacaagtacca

SEQ ID NO: 584460 - DNA, 120 bp, Artificial Sequence
  ENSG00000172375_69 (sequence is synthesized)
cgatttttgcctcaggaaggataaagcacatgtttgtttctgctttcgttttcttttttctttttttcacgaagccttatggagaagtatgtttctgctttctttcctgaggaagcctgg

SEQ ID NO: 584461 - DNA, 120 bp, Artificial Sequence
  ENSG00000172375_70 (sequence is synthesized)
cttctgggccacgggactgatcctgtccacatcctctttccctccattctccatcgtgtctctgcccccgtctcaccccaccccgtgcccctctctgcctcagcttcccctcttcccctg

SEQ ID NO: 584462 - DNA, 120 bp, Artificial Sequence
  ENSG00000172375_71 (sequence is synthesized)
aaaaacagacacacagcctgggcttgggaatctccagaacaaacctacacgagcaaggaggcgtccgacctgtggaaatctaacaagcataggggaaagcaaaggcagcatcttaggtaa

SEQ ID NO: 584463 - DNA, 120 bp, Artificial Sequence
  ENSG00000172375_72 (sequence is synthesized)
gggatggggagaaagccctaatgggtcggtcactcctgcccattaaaacccgtccctcctgccaggtgcccattgctcaggacgagttggcgctatccctgggctatgcggcatccctgg

SEQ ID NO: 584464 - DNA, 120 bp, Artificial Sequence
  ENSG00000172377_0 (sequence is synthesized)
atggccaagaataatctcaccagagtaaccgaattcattctcatgggctttatggaccaccccaaattggagattcccctctttctggtgtttctgagtttctacctagtcacccttctt

SEQ ID NO: 584465 - DNA, 120 bp, Artificial Sequence
  ENSG00000172377_1 (sequence is synthesized)
gggaatgtggggatgattatgttaatccaagtagatgtcaaactctacaccccaatgtacttcttcctgagccacctctccctgctggatgcctgttacacctcagtcatcacccctcag

SEQ ID NO: 584466 - DNA, 120 bp, Artificial Sequence
  ENSG00000172377_2 (sequence is synthesized)
atcctagccacattggccacaggcaaaacggtcatctcctacggccactgtgctgcccagttctttttattcaccatctgtgcaggcacagagtgctttctgctggcagtgatggcctat

SEQ ID NO: 584467 - DNA, 120 bp, Artificial Sequence
  ENSG00000172377_3 (sequence is synthesized)
gccatcctgcgtaccacttgcaccttcaccctctccttctgtaaggacaatcaaataaacttcttcttctgtgacctcccacccctgctgaagcttgcctgcagtgacacagcaaacatc

SEQ ID NO: 584468 - DNA, 120 bp, Artificial Sequence
  ENSG00000172377_4 (sequence is synthesized)
gagattgtcatcatcttctttggcaattttgtgattttggccaatgcctccgtcatcctgatttcctatctgctcatcatcaagaccattttgaaagtgaagtcttcaggtggcagggcc

SEQ ID NO: 584469 - DNA, 120 bp, Artificial Sequence
  ENSG00000172377_5 (sequence is synthesized)
aagactttctccacatgtgcctctcacatcactgctgtggcccttttctttggagcccttatcttcatgtatctgcaaagtggctcaggcaaatctctggaggaagacaaagtcgtgtct

SEQ ID NO: 584470 - DNA, 120 bp, Artificial Sequence
  ENSG00000172377_6 (sequence is synthesized)
gtcttctatacagtggtcatccccatgctgaaccctctgatctacagcttaagaaacaaagatgtaaaagacgccttcagaaaggtcgctaggagactccaggtgtccctgagcatgtag

SEQ ID NO: 584471 - DNA, 120 bp, Artificial Sequence
  ENSG00000172377_7 (sequence is synthesized)
ctatttgagcaatcttagctgctttctacaaaatgcttaaacaaccttagcttagcttgactacaaggccaagataaatccaactgaattattccaccaggtaattaagacttaattatt

SEQ ID NO: 584472 - DNA, 120 bp, Artificial Sequence
  ENSG00000172377_8 (sequence is synthesized)
accttggctctgaagtaaggtccacacaaactagagaaggtgtaactgggcagagaatcttgcctttgtcatcagaagttgtcatctgataggaccatgaccagactgggatttcagctc

SEQ ID NO: 584473 - DNA, 120 bp, Artificial Sequence
  ENSG00000172377_9 (sequence is synthesized)
ttatgtgaaatatacaattgaaaggaaataaaagcctttaaagtgcttagcatctacctgacttggagcaagagctcagcaaatgttaacaacaatatttcaagacactgatttcagtaa

SEQ ID NO: 584474 - DNA, 120 bp, Artificial Sequence
  ENSG00000172377_10 (sequence is synthesized)
ggtgagaaacattaactttgttgagctccttcaccctccccaagggactcaatctttggaggaaaatgaagaagagtatggagaacatcccaagttaaaaccaacagtccacattgtctc

SEQ ID NO: 584475 - DNA, 120 bp, Artificial Sequence
  ENSG00000172377_11 (sequence is synthesized)
aattcttgttttagtccactttcttcccatatgaatatatcctaataggcaccattactatatgcaacctatacccacaaacagagaagacagaagataggtaccaccaggcacacagga

SEQ ID NO: 584476 - DNA, 120 bp, Artificial Sequence
  ENSG00000172377_12 (sequence is synthesized)
tccactttcaatccattccttagcactgggcagtctcttaatattctctaatgtcacaacttatagaatctcagatcccaggagtcttgagtttatttcattccaacccaatactctctc

SEQ ID NO: 584477 - DNA, 120 bp, Artificial Sequence
  ENSG00000172377_13 (sequence is synthesized)
aactcatgcctgggcttgccatcctttccctcttgtttttgctcccatcaatcccacttttatctctgtgtcaaagattatatctggggacctctgcgaattgcacaaattggccttttt

SEQ ID NO: 584478 - DNA, 120 bp, Artificial Sequence
  ENSG00000172377_14 (sequence is synthesized)
ttcttttaatatgaaggactgatcacctcactaagcagggagtattgtataaggaaaaactcagtctccaactggccaagggaaggaagtttgagaaatgaacttctctcttcagaagag

SEQ ID NO: 584479 - DNA, 120 bp, Artificial Sequence
  ENSG00000172377_15 (sequence is synthesized)
acttgtgtcacccgcttagagtgtcttccttcttgctcaggccagaacaatagaacttgaaattttccttatcacttggtaccttactggttttgttgttcctttttttaatgttacttt

SEQ ID NO: 584480 - DNA, 120 bp, Artificial Sequence
  ENSG00000172377_16 (sequence is synthesized)
ggtatcttcaagatgaaatgaaccatcctacctttgggaatgtctcctcaagctctctcatttctgaaggccatggtacattgcttctcctcctcaccctattgcgtgtctcaggaacag

SEQ ID NO: 584481 - DNA, 120 bp, Artificial Sequence
  ENSG00000172377_17 (sequence is synthesized)
ttctctcctaccaagcaacccatttccaggaagagcaaatcagagagcaccaacagataaatagaaagacaactgaaccccatattaccttctctaatgaagatctggtgagaggggaag

SEQ ID NO: 584482 - DNA, 120 bp, Artificial Sequence
  ENSG00000172377_18 (sequence is synthesized)
taatcatgactcctgtaccagactgtaaaacccttgagaacagaatgttttcttcactattgagtccaaagccttttgaaagaatttgtatggtacatgcttgttcctatttgagccttc

SEQ ID NO: 584483 - DNA, 120 bp, Artificial Sequence
  ENSG00000172377_19 (sequence is synthesized)
tggcaactctatggcaaatgggaaaaacatagtttaatgtaaaattcccattttgcaattaaggaagtacttcctcatgagtcaaagagtactcggagtatacagcagtagacaagggat

SEQ ID NO: 584484 - DNA, 120 bp, Artificial Sequence
  ENSG00000172377_20 (sequence is synthesized)
ggagtcaggcttgaatcagaatcctgattccaccactgatttattatgagactttgggtaaatgatttaattttgcagacctaaaacaagtataacaattcccaattcaagaggatattg

SEQ ID NO: 584485 - DNA, 120 bp, Artificial Sequence
  ENSG00000172377_21 (sequence is synthesized)
taaaaattaaataaaatgatgaataagaaatagccaagcactaatcagatgttcaatatagattgctctcttatcttctcttccctttccctcactttctgatgtcaaccctggaccctt

SEQ ID NO: 584486 - DNA, 120 bp, Artificial Sequence
  ENSG00000172377_22 (sequence is synthesized)
gctagaatttaatggccactgacaaaagcaaaatagatcaccaaccaatgatgataaaagtcaatgaaagcaatgaactgaggaagatgtataactcaatcctttgcaccaaggaataaa

SEQ ID NO: 584487 - DNA, 120 bp, Artificial Sequence
  ENSG00000172377_23 (sequence is synthesized)
acaaacgagtacttacctggaaaggtggagtgcatgtatctatatcccacatagtcaagaataataaaaggatgtatttgtaagtgaatatgttattttatgaatatatgaactcctcta

SEQ ID NO: 584488 - DNA, 120 bp, Artificial Sequence
  ENSG00000172377_24 (sequence is synthesized)
cccagctttgattttatgaaaagttgatcctcattgcctctccatatggaaacaacaattttattaaaataattcaccaaatatcttgtagttgactgattcagaaataagcacctgacc

SEQ ID NO: 584489 - DNA, 80 bp, Artificial Sequence
  ENSG00000172379_0 (sequence is synthesized)
tccccggggctgagcgccgggctccgcgccgcccctcccgcgcccctgccaagcgggcgcctatcctctccgagcaagat

SEQ ID NO: 584490 - DNA, 120 bp, Artificial Sequence
  ENSG00000172379_1 (sequence is synthesized)
cctctccgagcaagatggcaaccccggcggcggtcaaccctccggaaatggcttcagacatacctggatctgtgacgttgcccgttgcccccatggcggccaccggacaggtgaggatgg

SEQ ID NO: 584491 - DNA, 120 bp, Artificial Sequence
  ENSG00000172379_2 (sequence is synthesized)
cgggggccatgcctgcccgtggaggaaagcggcgttccggaatggacttcgatgatgaagatggtgaaggccccagtaaattttcaagagagaatcatagtgaaatcgaaaggcgcagac

SEQ ID NO: 584492 - DNA, 120 bp, Artificial Sequence
  ENSG00000172379_3 (sequence is synthesized)
ggaacaagatgactcagtacatcacggagctctccgacatggtccccacatgcagcgcactggctcggaagccagacaagctcaccatcctccgcatggccgtctcgcacatgaagtcca

SEQ ID NO: 584493 - DNA, 120 bp, Artificial Sequence
  ENSG00000172379_4 (sequence is synthesized)
tgaggggtacagggaacaagtccaccgatggcgcgtacaagccttccttcctcacagagcaggaactgaagcatctcatccttgaagcagctgatggatttctgtttgtggtggctgctg

SEQ ID NO: 584494 - DNA, 120 bp, Artificial Sequence
  ENSG00000172379_5 (sequence is synthesized)
agacagggcgagtgatttatgtgtctgactccgtcacccctgttctgaaccagccccagtcagagtggtttgggagcacactgtatgaacaggtgcatcctgatgacgtggagaagctga

SEQ ID NO: 584495 - DNA, 120 bp, Artificial Sequence
  ENSG00000172379_6 (sequence is synthesized)
gagagcaactgtgcacctcagaaaactcaatgacaggccggatcttggacctgaagactgggacggtcaagaaagaagggcagcagtcatccatgaggatgtgcatgggctcgcggcggt

SEQ ID NO: 584496 - DNA, 120 bp, Artificial Sequence
  ENSG00000172379_7 (sequence is synthesized)
ctttcatctgcaggatgaggtgtggaaatgctcctttggaccaccttcctctaaacagaataaccaccatgaggaaaaggttcaggaatggccttggccctgtgaaagaaggagaagccc

SEQ ID NO: 584497 - DNA, 120 bp, Artificial Sequence
  ENSG00000172379_8 (sequence is synthesized)
aatatgctgtggtccactgtacaggatacatcaaggcctggccaccagcaggaatgaccatacctgaagaagacgctgatgtgggacaaggcagtaaatattgcctcgtggcaattggga

SEQ ID NO: 584498 - DNA, 120 bp, Artificial Sequence
  ENSG00000172379_9 (sequence is synthesized)
gactccaggtgaccagctctcctgtatgcatggacatgaatgggatgtcggtgcccacagagttcttatcccggcataactccgatggaatcatcacatttgtggatccaagatgtatca

SEQ ID NO: 584499 - DNA, 120 bp, Artificial Sequence
  ENSG00000172379_10 (sequence is synthesized)
gtgtgattggctaccaaccccaggatcttctgggaaaggacattttggaattctgccaccctgaggatcaaagccatctgcgtgagagcttccagcaggtggttaagctgaaaggccaag

SEQ ID NO: 584500 - DNA, 120 bp, Artificial Sequence
  ENSG00000172379_11 (sequence is synthesized)
tcctgtcggtcatgtatcgatttcgcaccaagaaccgggagtggatgttgatccgcaccagcagcttcacattccagaatccctattctgatgagattgagtacatcatctgcaccaaca

SEQ ID NO: 584501 - DNA, 120 bp, Artificial Sequence
  ENSG00000172379_12 (sequence is synthesized)
ccaacgtcaagcaacttcagcaacagcaggcagaattggaagtgcaccagagagatggattgtcatcgtatgacttatcccaggtccccgtccccaacctaccagccggtgttcatgagg

SEQ ID NO: 584502 - DNA, 120 bp, Artificial Sequence
  ENSG00000172379_13 (sequence is synthesized)
ccgggaagtccgtggaaaaggcggatgcaatcttctcccaggaaagagatcctcggtttgctgaaatgtttgcaggaattagtgcatcggagaagaagatgatgagctcagcctctgcag

SEQ ID NO: 584503 - DNA, 120 bp, Artificial Sequence
  ENSG00000172379_14 (sequence is synthesized)
caggaacccagcagatctactcccaaggaagcccatttccctctggacactccgggaaggccttcagctcttcagtggttcatgtgcctggagtgaatgatattcagtcctcttcttcca

SEQ ID NO: 584504 - DNA, 120 bp, Artificial Sequence
  ENSG00000172379_15 (sequence is synthesized)
cgggccagaacatgtcccaaatctcccggcagctaaaccagagtcaggtggcatggacagggagtcgtccgccctttccgggacagcaaatcccatctcagtccagcaagactcagtcat

SEQ ID NO: 584505 - DNA, 120 bp, Artificial Sequence
  ENSG00000172379_16 (sequence is synthesized)
ctccctttgggattggaacgagccacacctacccggcagacccctcttcctacagccccctctccagcccagctacctcctcgccaagtgggaatgcctactccagtcttgccaacagga

SEQ ID NO: 584506 - DNA, 120 bp, Artificial Sequence
  ENSG00000172379_17 (sequence is synthesized)
ctccagggttcgctgaaagtggacaaagtagcgggcagttccaagggcggccctcggaagtctggtcgcagtggcaaagccagcaccatggccagcagagcggtgagcagcactcccacc

SEQ ID NO: 584507 - DNA, 120 bp, Artificial Sequence
  ENSG00000172379_18 (sequence is synthesized)
agcagcccggtcagactgaagtgttccaggacatgctgcccatgccaggagatccaacccaggggactggcaactataacatcgaagactttgccgacctgggcatgtttccaccgtttt

SEQ ID NO: 584508 - DNA, 120 bp, Artificial Sequence
  ENSG00000172379_19 (sequence is synthesized)
ctgagtagctgcggccagagtgaggctcctgctgtacagtgccacccatactgtgatgtcgatgcccatgtgaatgaggcccaccctcgccctgcttgccctgccgcaggccccccacca

SEQ ID NO: 584509 - DNA, 120 bp, Artificial Sequence
  ENSG00000172379_20 (sequence is synthesized)
gaagccatctcccccgctgtgtgtccccaggcgcatcattgctccactctcccctgcagccgcggctgctcggccactgaccaggggccctggcagacattaggggatcagttgtattta

SEQ ID NO: 584510 - DNA, 120 bp, Artificial Sequence
  ENSG00000172379_21 (sequence is synthesized)
ttgtattttatctgtgtgtgctcaggaggtgagcctagtgggtccttaagtttggttgtgaataatctcttgatagacaatttatacccatgaaagttcagccaatgcccagagtgacca

SEQ ID NO: 584511 - DNA, 120 bp, Artificial Sequence
  ENSG00000172379_22 (sequence is synthesized)
agcagcaccagcaggcctgcccaggatgctgaaagcagatttcttcttgatttcacttctgatggatgcatggggctctgggggaatgctgggaaaatgggcaagcagagtgcacagccc

SEQ ID NO: 584512 - DNA, 120 bp, Artificial Sequence
  ENSG00000172379_23 (sequence is synthesized)
tcgttctgccagctggagccaagaagcacagagacacagaggcgcctgcccctcagctccgctggtctgtctgtgcatccactgtgccgtgggacatatgtaatttgtgcagtgtgacat

SEQ ID NO: 584513 - DNA, 120 bp, Artificial Sequence
  ENSG00000172379_24 (sequence is synthesized)
ggacttgctgtcctaatggatgtgttgtgccttgtgtctgtcatgtgtggccagcgtgattgtatagaatccagagtatgtagagagccaaaatgtgtggccctgtccccaagctcagca

SEQ ID NO: 584514 - DNA, 120 bp, Artificial Sequence
  ENSG00000172379_25 (sequence is synthesized)
ccaccggccatgaccagaggttgctcggcccagggtctgggagctgggctaacaggctgacacttcggcagggtcaccaggaggcacagctaggggcatgctcacatgggtaggtcagtt

SEQ ID NO: 584515 - DNA, 120 bp, Artificial Sequence
  ENSG00000172379_26 (sequence is synthesized)
ctttggtccaagcctctggtgcagattcaagctcctcctcttagaggaagcagctccttcctcccacaggagccccaagggagcactcaccctcctcccaattggatctgaatagctgtg

SEQ ID NO: 584516 - DNA, 120 bp, Artificial Sequence
  ENSG00000172379_27 (sequence is synthesized)
gagaggaggaccttgtgcctgcccagagcctgcaggacagcacgccttgaggtcagaggcctggcccttctttacagatgtagatagcagggtaggacgcccaggccttctcacatgggc

SEQ ID NO: 584517 - DNA, 120 bp, Artificial Sequence
  ENSG00000172379_28 (sequence is synthesized)
accatgaaacactttcttccaggccacctgagccttcgttcttcagcccgactggaggaacagcagctctgggaggcacagagtgcaggtctcaggggcagaagacatgggttccagttc

SEQ ID NO: 584518 - DNA, 120 bp, Artificial Sequence
  ENSG00000172379_29 (sequence is synthesized)
tggttctgccacacacccaccggccttgaatttctctggtggtctcaagacaagaacaagagctgactctagaatcttctgcctggctgacctctgagcccatgatccctggcttgctgt

SEQ ID NO: 584519 - DNA, 120 bp, Artificial Sequence
  ENSG00000172379_30 (sequence is synthesized)
gcttctcttggatttgaggagagtttatgaatccatccccctgttttcagggacctctgccttctcccacaccccttacactagtgaggactccttcggcctcttgtgtttccttccttt

SEQ ID NO: 584520 - DNA, 120 bp, Artificial Sequence
  ENSG00000172379_31 (sequence is synthesized)
tgtgaccattacgccccctccctgtttcttatcaccagcccatcagcccactgactcccatatggtagaaaaggtaccgtggctgctgcagggcacatggagggacctaccctctgggaa

SEQ ID NO: 584521 - DNA, 120 bp, Artificial Sequence
  ENSG00000172379_32 (sequence is synthesized)
agcccttgtgtccctcccagagtccttcaggtaggccctcgcagatgctgcttgctcagaaacaacccgtgcatccctgcccatggattctgcaggacctagaagagtggcattggttct

SEQ ID NO: 584522 - DNA, 120 bp, Artificial Sequence
  ENSG00000172379_33 (sequence is synthesized)
aggaacctgagagtggagtgaggccagcatgcaggaaggagtttggagagagtgtttgctgtgatccattgaaagctccacattaaaccccagccctgtctggccagggagatccatgtg

SEQ ID NO: 584523 - DNA, 120 bp, Artificial Sequence
  ENSG00000172379_34 (sequence is synthesized)
ctcaatgttgctgggggacctacaaaagtcaaacattgctcagtaaaatgcctttggctggtcgccagctgtgcatgactgcagttcctagactctaacttaaccccaactttgcagttt

SEQ ID NO: 584524 - DNA, 120 bp, Artificial Sequence
  ENSG00000172379_35 (sequence is synthesized)
ctagagctttttgtctgtaatggtgattgggtctccactgtagatgcatgcagtgttcactccaacctcagaggctttcttgcttctggggaaatggcaggtggttgaaaccctgcacat

SEQ ID NO: 584525 - DNA, 120 bp, Artificial Sequence
  ENSG00000172379_36 (sequence is synthesized)
cctcccagggccagccccagaatgggcctttctctgcctgccctgcccttggggccacctctgcctccagcaggcttgagcttgccccaggccttgggcataattatttccccccaaaaa

SEQ ID NO: 584526 - DNA, 120 bp, Artificial Sequence
  ENSG00000172379_37 (sequence is synthesized)
aggcacaaaaataggttttggatcaaagaagtgtttctcagtgaaatgaaaacagtctttttatagcctttagcttgtgagtttggaagtttggggggtcttatgtttgttttgcctctt

SEQ ID NO: 584527 - DNA, 120 bp, Artificial Sequence
  ENSG00000172379_38 (sequence is synthesized)
ctgtttcttggaggagagttgaggcttttcttaggtgcatacacagacccaggtgaacacgctgactgtgaacctgccctgtatccggagctgtgctgggcactgaggggatgcaacaaa

SEQ ID NO: 584528 - DNA, 120 bp, Artificial Sequence
  ENSG00000172379_39 (sequence is synthesized)
attaggagaggatccttgctcccaacgtctacttctcctacctcaacaggggtccagggtgcagtgaactcagttcttggcccttgggtgaggattcatggatgaatgaaagctagacct

SEQ ID NO: 584529 - DNA, 120 bp, Artificial Sequence
  ENSG00000172379_40 (sequence is synthesized)
gatggggaggcattatgactaaataggcccagcctccttcccttccagctctgtcctaggagcataggcgggaaatctgagtagagtctgactgcagtttttgcttatgatttgtaaaag

SEQ ID NO: 584530 - DNA, 120 bp, Artificial Sequence
  ENSG00000172379_41 (sequence is synthesized)
ccgtcatggggtcaataagaaaataggggtgatggagggggagaagcccaggactgggagaatcgcacatgccccaggggttttcaccaaggattttcaagacaaactggagtaagaatt

SEQ ID NO: 584531 - DNA, 120 bp, Artificial Sequence
  ENSG00000172379_42 (sequence is synthesized)
aaagccccagaggatttaattatcctggtttgcaaaagagcctcccatgccagtaccgcccagccttggaggccggaatgctcatggcccctgtggtctgcttgtccttcagcccatgcc

SEQ ID NO: 584532 - DNA, 120 bp, Artificial Sequence
  ENSG00000172379_43 (sequence is synthesized)
cagcagatacctctctgactggagacgggctcaaagctggattagaaaggggagaggcacttgtgactttgtttgactctgtgactcacttcctcgctcacaccttgtttgaactactgg

SEQ ID NO: 584533 - DNA, 120 bp, Artificial Sequence
  ENSG00000172379_44 (sequence is synthesized)
actttcaactggctttccttaggtcaggcaagcagacagctccccactgaagaggtctgtacagtgacaacccgggccggcagcaaggacacagatgcagccacagtaaggctccatcag

SEQ ID NO: 584534 - DNA, 120 bp, Artificial Sequence
  ENSG00000172379_45 (sequence is synthesized)
gactgggtcagtgatggcaacaggatggccaaggatggctctagaacactctgtccatgcgtcactccccccagttttatttttagctttggcttcagggagtgacagccatcacaaata

SEQ ID NO: 584535 - DNA, 120 bp, Artificial Sequence
  ENSG00000172379_46 (sequence is synthesized)
gccacattctgctctactctccaacataccagattctacactgttgttatttcatgagacgtgaatgttgcagagagtggggggattctggttgttaaggaacttacactggggagcttt

SEQ ID NO: 584536 - DNA, 120 bp, Artificial Sequence
  ENSG00000172379_47 (sequence is synthesized)
actcttccgtgtcaacaatgtgactacatgttctccagattagccacacatgcaaacatcagtgtccttctagctttagccgagaaagaaaccagtcccagggaatgaatggtggtctcc

SEQ ID NO: 584537 - DNA, 120 bp, Artificial Sequence
  ENSG00000172379_48 (sequence is synthesized)
ccactcccggcagcactttaggcagcccataagctatgcgagaatgtgaacgctcaccttgctccgtcacggttctgacctaccacataaacaggaagaagccagtgaccggaacagctc

SEQ ID NO: 584538 - DNA, 120 bp, Artificial Sequence
  ENSG00000172379_49 (sequence is synthesized)
taggaataacaagtcagaatagaagtgtcctttatattaccagaaaatatgggcttggcctaagtcgctgtctcctaacctgccggggtcattccccaccaaacaccccatactaaggag

SEQ ID NO: 584539 - DNA, 120 bp, Artificial Sequence
  ENSG00000172379_50 (sequence is synthesized)
ccatgagccacctggacattcaccttttctttgaccatctggagtctggggcaacttaaggaggcaccacacagtggtgcaggcacatttccaagcgtaggtgtccctggcttttgtggc

SEQ ID NO: 584540 - DNA, 120 bp, Artificial Sequence
  ENSG00000172379_51 (sequence is synthesized)
caaagctagtgttatggtcaacaacaggccagggtctgtggggcactgaccttgaaagtggcaaaatggaggtttcacaggctgtgcgggagcaggacggcttgcttcatctaacaatct

SEQ ID NO: 584541 - DNA, 120 bp, Artificial Sequence
  ENSG00000172379_52 (sequence is synthesized)
cagtttcctttaaaaaaagaaagaaaggaaaagatttcataagcaggtgtcagtggacagtttaagtacttaaccatttctctttcttcttatggatgtgaactgtgctgtggataaatc

SEQ ID NO: 584542 - DNA, 120 bp, Artificial Sequence
  ENSG00000172379_53 (sequence is synthesized)
atttgtatttcttgaatgttctctatgactaacagttattaagtcggttgtgtatatgtgtaactaatgtaactgccttttaaaatttcattacaataaaaatgactttgctctgaacaa

SEQ ID NO: 584543 - DNA, 120 bp, Artificial Sequence
  ENSG00000172379_54 (sequence is synthesized)
tgacattttctcagcagaatacaaatgcagctacatttcctcccagaggtttctgacatttcttctacacggataacagattctcctaagaaggtgttggtcacaaggaagaaagatctt

SEQ ID NO: 584544 - DNA, 120 bp, Artificial Sequence
  ENSG00000172379_55 (sequence is synthesized)
ttcctctggcgtgccctccttgcggctccatcattcaggccttgtcatctctcacctggactgctgtgaccttcattcattcccaggagaagtccagaaatggcttcagacatacctgga

SEQ ID NO: 584545 - DNA, 86 bp, Artificial Sequence
  ENSG00000172379_56 (sequence is synthesized)
aagctgagagagcaactgtgcacctcagaaaactcaatgacaggtcagtggagctccctttatgaggctgtttgactctagaaaac

SEQ ID NO: 584546 - DNA, 120 bp, Artificial Sequence
  ENSG00000172379_57 (sequence is synthesized)
tgggcattgcaagaccggaagaggaggcttgcccagtaatgtcactgaatgactggattttccatgcatgatgccaggactccactccatttctgtgaactcgactgtaccatagtgaag

SEQ ID NO: 584547 - DNA, 120 bp, Artificial Sequence
  ENSG00000172379_58 (sequence is synthesized)
ttcagacatctgtctttcaaaagctaccctgatgattccagtgtggaccaactactgctccccaatgcgacccctgccaacaaaccccacgcataaataaaataaaataaaataatacaa

SEQ ID NO: 584548 - DNA, 120 bp, Artificial Sequence
  ENSG00000172379_59 (sequence is synthesized)
gtattttcgattgcttaaataaaatcgtggacacttttcttctttcccattcaccttgggcatattgttgatgacacaggtatttcccatttcaggaatgaccatacctgaagaagacgc

SEQ ID NO: 584549 - DNA, 120 bp, Artificial Sequence
  ENSG00000172380_0 (sequence is synthesized)
agcgaggcggagccggcgcccggaggagcaagaggaggaggaggaggagaggtcggagccgtctccaggagcccttagagaccgagtcccggcggcgacggcggggcagcgcaccggcag

SEQ ID NO: 584550 - DNA, 120 bp, Artificial Sequence
  ENSG00000172380_1 (sequence is synthesized)
gcggattcattccacttaaaacctgaaaacattggaccacacaaagtcttactgatttcaggtaaaaacaataattgaagatgtccagcaaaacagcaagcaccaacaatatagcccagg

SEQ ID NO: 584551 - DNA, 120 bp, Artificial Sequence
  ENSG00000172380_2 (sequence is synthesized)
caaggagaactgtgcagcagttaagattagaagcctccattgaaagaataaaggtttcgaaggcatcagcggacctcatgtcctactgtgaggaacatgccaggagtgaccctttgctga

SEQ ID NO: 584552 - DNA, 120 bp, Artificial Sequence
  ENSG00000172380_3 (sequence is synthesized)
taggaataccaacttcagaaaaccctttcaaggataaaaaaacttgcatcatcttatagtggaatagagaaacagctcctcgcctcttcccaacaacgcaaattatgagcagctccttga

SEQ ID NO: 584553 - DNA, 120 bp, Artificial Sequence
  ENSG00000172380_4 (sequence is synthesized)
agagatttaccttcagcttatttggtaaccactgctaataactaaaatgttctcagcttggaataatggactctgaagtctctattttccaagttgtcctttctcttaaaatacccttta

SEQ ID NO: 584554 - DNA, 120 bp, Artificial Sequence
  ENSG00000172380_5 (sequence is synthesized)
ctgatttaatacagaataacaatcttattttccacttggtaactatggctttatgttgggttactgtttaaggaaagttgatctgggcctttttaaaaacataattatatactttagaaa

SEQ ID NO: 584555 - DNA, 120 bp, Artificial Sequence
  ENSG00000172380_6 (sequence is synthesized)
tacaagggattccgatatgtcaggacctaaatggcctaagcacctgtcaaattaaaattccaaaattcattgaaatcctaaagccttgatattatattctttataaggcgtgtgccagcc

SEQ ID NO: 584556 - DNA, 120 bp, Artificial Sequence
  ENSG00000172380_7 (sequence is synthesized)
tgtatagtatataagagagaggggtgtttgtgtgtatatatatatgcctttgtgtatacacttatcaaagctattttcttatgaaaacgtccctctctccataccatcagtttctcagtt

SEQ ID NO: 584557 - DNA, 120 bp, Artificial Sequence
  ENSG00000172380_8 (sequence is synthesized)
ccagaagttatacctttattttgagctgtgtataggtagaataaaaaattcctttcatatcgttattgtacaaaaagtaaagagtatcctaaagattgtattcattgtaatcaagtaatg

SEQ ID NO: 584558 - DNA, 120 bp, Artificial Sequence
  ENSG00000172380_9 (sequence is synthesized)
caatcatctctcctctcttgaaatcttgctggacctcttaggctacaataaactgtaccaaactaaactgacagtccttcgataatatgaaacattaatttacaaggacccgttagggct

SEQ ID NO: 584559 - DNA, 120 bp, Artificial Sequence
  ENSG00000172380_10 (sequence is synthesized)
tcaatgatgctgagtctggaaaaggggaggagacccttgggaggactccaggcagctgtgctcccagggctcatgttctctactggattagggataggcacctctgaaatctccaccctg

SEQ ID NO: 584560 - DNA, 120 bp, Artificial Sequence
  ENSG00000172380_11 (sequence is synthesized)
atgattggaatgaaacggagtgaacatgagcccagctgagagaggagcaggaatgtgtgaaaaacagctgctctccttgtcccagctttgtgattgagccctctgtcttgctctctctgc

SEQ ID NO: 584561 - DNA, 120 bp, Artificial Sequence
  ENSG00000172380_12 (sequence is synthesized)
cttccctgtgtctttcttctcttaccagagcatctgtttgcagaggtaacattaccttccccagccacaggtatgtggaatacggtgaggaaaaaaaaaattaaaaaaaaaatgcaagct

SEQ ID NO: 584562 - DNA, 120 bp, Artificial Sequence
  ENSG00000172380_13 (sequence is synthesized)
gtcaggatgcttaagctcttttcagacatctgcagtttcatccctaccttgttcacataccatccaagaggcacataggctacccaagagagccttggattcagtggtacactccttggg

SEQ ID NO: 584563 - DNA, 120 bp, Artificial Sequence
  ENSG00000172380_14 (sequence is synthesized)
cccaagggctttagcagctggatatggggttccttgattttcctctgggcccaaatatagccctcacactcttggaatttccaggtatgggggtagccccaaaaggaggaatctcctatg

SEQ ID NO: 584564 - DNA, 120 bp, Artificial Sequence
  ENSG00000172380_15 (sequence is synthesized)
gccaataaggtatcttgactttatcaaagtagaagagagggtcacttcggagtcaaatcatacactaggcctttgatgctttaattcttcttcagttcattaaaagtaactactaaggaa

SEQ ID NO: 584565 - DNA, 120 bp, Artificial Sequence
  ENSG00000172380_16 (sequence is synthesized)
aggttaaaaacttcccctcaaaaaggaatcaaccccaggaagtaattatttacaacgattttcccaaattttgtacaatctgtcctggaaagcaaaccccttttaaaatctaatgtctgg

SEQ ID NO: 584566 - DNA, 120 bp, Artificial Sequence
  ENSG00000172380_17 (sequence is synthesized)
gctttgagtattagctcatttagggtggacaaatgcattactgttttcaaactgctcacatttattcagtatttctccaagttgctatctactcagccttatgaatgcccctcgcttttc

SEQ ID NO: 584567 - DNA, 120 bp, Artificial Sequence
  ENSG00000172380_18 (sequence is synthesized)
cccaaatcaattataggtacctgtttaggagagaggaagattttacctctcaaagggtgagatttgaaatttacactaaaaagacaactttacatttaatgcttcacttaatgagacatt

SEQ ID NO: 584568 - DNA, 120 bp, Artificial Sequence
  ENSG00000172380_19 (sequence is synthesized)
cttttttttataagtctatttttctactcagtttcagaacactaatctgattttcactctgatttttaacgtttctttaaatatttataatgtagcttctttcaaaatattttcatgaaa

SEQ ID NO: 584569 - DNA, 120 bp, Artificial Sequence
  ENSG00000172380_20 (sequence is synthesized)
aattacttttattataccattatgtgcatgttattggtagcaggcatagtttattatttagtactgaaacatgctcttttacctaacagtaaacaagtatgttttgatatatatctgtta

SEQ ID NO: 584570 - DNA, 120 bp, Artificial Sequence
  ENSG00000172380_21 (sequence is synthesized)
atatgcttatagtggtaagaaatggacttgaggtcccaggagatttcattttattcaccctggtcagatacaataaaggctatgagtataaatacataacttcctaaccaggtgtagggc

SEQ ID NO: 584571 - DNA, 120 bp, Artificial Sequence
  ENSG00000172380_22 (sequence is synthesized)
atgttcatgaatatcaaatcttttgatgctggacccaagagaggaaaagttgtagctaaatgttgatttacttataactagacgtctatgtgagaaaatatatgtatacatatatatgat

SEQ ID NO: 584572 - DNA, 120 bp, Artificial Sequence
  ENSG00000172380_23 (sequence is synthesized)
atgcagaagtcactttttttatcaggctttattctccttacaaagccacagtttaactgtctgcaacagttggtttatgttaatgatagacaaatacccagtgtttgttactttttccaa

SEQ ID NO: 584573 - DNA, 120 bp, Artificial Sequence
  ENSG00000172380_24 (sequence is synthesized)
ctaccactgtaatgataatctttctcacgtatatacatgcaacttcttggcttcatttccatgaagctgtttcaatatattcagtatactttgtccttaatgctgcttctgttaacagtg

SEQ ID NO: 584574 - DNA, 120 bp, Artificial Sequence
  ENSG00000172380_25 (sequence is synthesized)
atctctttctttttttcattcttatatcttcattagttcatcataaatctgtccagttgaggcctcaggaccacggcatgatttcatgactccgaagtattttacagaaacattttttaa

SEQ ID NO: 584575 - DNA, 120 bp, Artificial Sequence
  ENSG00000172380_26 (sequence is synthesized)
ataagggaaatattttatataccagatggttcacaagtgatggctcatagctagtttttttttttcttctaaaaaatgtcaggtttttaaaatcatttaccttattaaaatgaaaagtgc

SEQ ID NO: 584576 - DNA, 120 bp, Artificial Sequence
  ENSG00000172380_27 (sequence is synthesized)
catacttaacttttaaaggaaagacctgacttgctttttctctatttagactgtttttgtactttactaatctttaaactatcaggaaaaaaaccaaaactttataccaatgatttagta

SEQ ID NO: 584577 - DNA, 120 bp, Artificial Sequence
  ENSG00000172380_28 (sequence is synthesized)
attttgaggcatagggtagcttacgtagtggaggatgtgccaaatattctcttcaaatgccaccttctcaatttataactaaaatagtgttatctgactaattcctctgaattttgatgt

SEQ ID NO: 584578 - DNA, 120 bp, Artificial Sequence
  ENSG00000172380_29 (sequence is synthesized)
aagatctatataggcccccaaaatgatcgtagtacatgccagtcatttctcagtgaaataaatacaataccagagtacattatgggttttattgctttcttttatggtagacctgttaat

SEQ ID NO: 584579 - DNA, 120 bp, Artificial Sequence
  ENSG00000172380_30 (sequence is synthesized)
ggggaaaaaatacatcaaatcaaatagaatcttatatctgtatgttaaaatagagcacttacctgaagtcagtggcctggatcatagccctggatcatttcccagtctgtcctgtgctgt

SEQ ID NO: 584580 - DNA, 120 bp, Artificial Sequence
  ENSG00000172380_31 (sequence is synthesized)
gtgaccttggacaaggcgcttcatctctctgggcctctatttctccatttgtaaaacaagtggctgcagtagatgatggctgagagcccttcctgttcccagatgccttggtccaaagac

SEQ ID NO: 584581 - DNA, 120 bp, Artificial Sequence
  ENSG00000172380_32 (sequence is synthesized)
cccacccctctgctggtcctgccaacgtgttggtgctataagctgcttcagatataaaattggtttatctataatgtttgttcatttaatagcttctaaaaggcctttttgttatacagt

SEQ ID NO: 584582 - DNA, 120 bp, Artificial Sequence
  ENSG00000172380_33 (sequence is synthesized)
gctttttttctagttttatggacttggttactgtaataatgtcttgtttttagccatgtaactacaaacagatattctcttgatgtcttagtaaatttgcatttgatatatcattgatga

SEQ ID NO: 584583 - DNA, 120 bp, Artificial Sequence
  ENSG00000172380_34 (sequence is synthesized)
gattttgttgttatgtaatattctttggctacgcatctgtccagcatcttattaaccataatactgtgatcattatttggaaatatgtcctatggaaagaataaaagcatgtacttcaca

SEQ ID NO: 584584 - DNA, 120 bp, Artificial Sequence
  ENSG00000172380_35 (sequence is synthesized)
gctagcatgttcacagatttgaaagaagtttcattaaaagcaccattgctttctgtactgcgtcagtgcctcattgtatcatcctacttgtgttttgctcaataaatgaataaaagacca

SEQ ID NO: 584585 - DNA, 120 bp, Artificial Sequence
  ENSG00000172380_36 (sequence is synthesized)
ccctaccagtgctatgatgagatgtctatttatttgtacttttctttaatctctataatttatgatgtttccatgccttaaaaaaacagagcaacccatgttcctttgtaagaccatggg

SEQ ID NO: 584586 - DNA, 120 bp, Artificial Sequence
  ENSG00000172380_37 (sequence is synthesized)
caggataaagatccatgattacatgccaaatactactaaaataaaaacttttttgggtaatgaaactatttccaggcccctgttgatgggagtatccaaaacaacagagtgttatttcag

SEQ ID NO: 584587 - DNA, 120 bp, Artificial Sequence
  ENSG00000172382_0 (sequence is synthesized)
gctcgtgctccaacgcttctgccaccgccgaccacggccctgcgccccagccaggcctgaggacatgaggcggccggcggcggtgccgctcctgctgctgctgtgttttgggtctcagag

SEQ ID NO: 584588 - DNA, 120 bp, Artificial Sequence
  ENSG00000172382_1 (sequence is synthesized)
ggccaaggcagcaacagcctgtggtcgccccaggatgctgaaccgaatggtgggcgggcaggacacgcaggagggcgagtggccctggcaagtcagcatccagcgcaacggaagccactt

SEQ ID NO: 584589 - DNA, 120 bp, Artificial Sequence
  ENSG00000172382_2 (sequence is synthesized)
ctgcgggggcagcctcatcgcggagcagtgggtcctgacggctgcgcactgcttccgcaacacctctgagacgtccctgtaccaggtcctgctgggggcaaggcagctagtgcagccggg

SEQ ID NO: 584590 - DNA, 120 bp, Artificial Sequence
  ENSG00000172382_3 (sequence is synthesized)
accacacgctatgtatgcccgggtgaggcaggtggagagcaaccccctgtaccagggcacggcctccagcgctgacgtggccctggtggagctggaggcaccagtgcccttcaccaatta

SEQ ID NO: 584591 - DNA, 120 bp, Artificial Sequence
  ENSG00000172382_4 (sequence is synthesized)
tgctgggtcactggctggggcagccccagtgaggaagacctcctgcccgaaccgcggatcctgcagaaactcgctgtgcccatcatcgacacacccaagtgcaacctgctctacagcaaa

SEQ ID NO: 584592 - DNA, 120 bp, Artificial Sequence
  ENSG00000172382_5 (sequence is synthesized)
gacaccgagtttggctaccaacccaaaaccatcaagaatgacatgctgtgcgccggcttcgaggagggcaagaaggatgcctgcaagggcgactcgggcggccccctggtgtgcctcgtg

SEQ ID NO: 584593 - DNA, 120 bp, Artificial Sequence
  ENSG00000172382_6 (sequence is synthesized)
ggtcagtcgtggctgcaggcgggggtgatcagctggggtgagggctgtgcccgccagaaccgcccaggtgtctacatccgtgtcaccgcccaccacaactggatccatcggatcatcccc

SEQ ID NO: 584594 - DNA, 120 bp, Artificial Sequence
  ENSG00000172382_7 (sequence is synthesized)
aaactgcagttccagccagcgaggttgggcggccagaagtgagacccccggggccaggagccccttgagcagagctctgcacccagcctgcccgcccacaccatcctgctggtcctccca

SEQ ID NO: 584595 - DNA, 120 bp, Artificial Sequence
  ENSG00000172382_8 (sequence is synthesized)
gcgctgctgttgcacctgtgagccccaccagactcatttgtaaatagcgctccttcctcccctctcaaatacccttattttatttatgtttctcccaataaaaacccagcctgtgtgcca

SEQ ID NO: 584596 - DNA, 120 bp, Artificial Sequence
  ENSG00000172382_9 (sequence is synthesized)
ctgtctcaaaaaattaaaaaaaataataataataataatgaatgaagctggacggacttcgcgtgcaccgcggtcagctcggggtctgctggggggtctgggtcagctcagggtccagga

SEQ ID NO: 584597 - DNA, 120 bp, Artificial Sequence
  ENSG00000172382_10 (sequence is synthesized)
accgaggccaacggcaccccgtgctgcgctggggtgaggggtctgccctggggtctcggggttcagggctaggtcacggaggagtcggctctgggcgcttccttcctgaggagaggagct

SEQ ID NO: 584598 - DNA, 120 bp, Artificial Sequence
  ENSG00000172382_11 (sequence is synthesized)
agggcaagaaggatgcctgcaaggtgggagcaatgtggtgtccatggggactcagtccccaccgccaggcccagggcagggtgggatcatgccccgctccatgggctatgcattcaacca

SEQ ID NO: 584599 - DNA, 70 bp, Artificial Sequence
  ENSG00000172382_12 (sequence is synthesized)
gtgggatcatgccccgctccatgggctatgcattcaaccagctgagcagcttgttttgaaaaggcagatt

SEQ ID NO: 584600 - DNA, 120 bp, Artificial Sequence
  ENSG00000172382_13 (sequence is synthesized)
taggtccaactccagggctaacttccagttgcaaccgctgctcccgcccgcgggaggtgcctcgcaccgccccccgaccccctccatcccctccacccactcacccactccctgtgggtc

SEQ ID NO: 584601 - DNA, 120 bp, Artificial Sequence
  ENSG00000172382_14 (sequence is synthesized)
cctgcagaagcggcccggcaggctctgcccaccggcccctcctggcctttccccatcccgcacacacctcagctccaggacactcttcccgggaggaactctgctcacaaagcccaagga

SEQ ID NO: 584602 - DNA, 120 bp, Artificial Sequence
  ENSG00000172382_15 (sequence is synthesized)
ccagacagaacggcccttcctcccctcacccacctgaaccaccccagaaagccctgagcagaggccaggccacccagccctctgccatgtatgaaccacctggtcccacaccttccgggt

SEQ ID NO: 584603 - DNA, 120 bp, Artificial Sequence
  ENSG00000172382_16 (sequence is synthesized)
gtcccaggccccctcacctcacacctcaacaccgcagctctaattattttaaaccccacatctttttcttttttttcttcttgatctttaaaagaatatcatgacaaaaaaaaccccaca

SEQ ID NO: 584604 - DNA, 61 bp, Artificial Sequence
  ENSG00000172382_17 (sequence is synthesized)
ttgatctttaaaagaatatcatgacaaaaaaaaccccacatcttaaattcagatactcacg

SEQ ID NO: 584605 - DNA, 77 bp, Artificial Sequence
  ENSG00000172382_18 (sequence is synthesized)
cccaggtgcagtggtgcctgtggtcccaagtactcaggaagctgaggcgagaggatggcttgagcccaggagttgga

SEQ ID NO: 584606 - DNA, 89 bp, Artificial Sequence
  ENSG00000172382_19 (sequence is synthesized)
agttgcactactctgtctctaggggaaaaaaaaaatcggaaactcgggctgagagagggcaggtcacctgccagaggcccgcaggtggg

SEQ ID NO: 584607 - DNA, 120 bp, Artificial Sequence
  ENSG00000172382_20 (sequence is synthesized)
tgagagagggcaggtcacctgccagaggcccgcaggtggggctggccctgctgcacctggagggtggttctctccgagccagcctttcaggtaggcactgtgactgtccccacagcacag

SEQ ID NO: 584608 - DNA, 120 bp, Artificial Sequence
  ENSG00000172382_21 (sequence is synthesized)
gttaagtgacttgcccaaggccacacagcggccaggggtggaggtggaaatctgagtcgggcggtctggcttcaatgtcaacacgcatcaccgctgcacctggctgtcctagagatgact

SEQ ID NO: 584609 - DNA, 120 bp, Artificial Sequence
  ENSG00000172382_22 (sequence is synthesized)
ctcgaagacattgtgcagagagaggtgtggggcacggtggtggccagaggagccccagcccctcccgggcctgtccccacacgaggggccgcctcacgccgcctctctgtttctcccgcc

SEQ ID NO: 584610 - DNA, 72 bp, Artificial Sequence
  ENSG00000172382_23 (sequence is synthesized)
ggactaggacttatggagactgggggaagggcatccagattgtggggtgaggggagcaagcactcagagacc

SEQ ID NO: 584611 - DNA, 120 bp, Artificial Sequence
  ENSG00000172382_24 (sequence is synthesized)
atccagattgtggggtgaggggagcaagcactcagagaccagaagactctgcctaaatgagaagtacagggctactttaggaaggaaggatctgcatggggaggaggcatcgctgaaggg

SEQ ID NO: 584612 - DNA, 120 bp, Artificial Sequence
  ENSG00000172382_25 (sequence is synthesized)
gcagtgctcaggcagggagcatggagacacagctcctgcagactcccagagagcgagaaggcctgacagtgcgcgcccttctgcaagcaggatcctcaggcttggaaggagcaaggggtc

SEQ ID NO: 584613 - DNA, 120 bp, Artificial Sequence
  ENSG00000172382_26 (sequence is synthesized)
ggggggccagggaataaccctcccggtagtgtttgcattttaaagggcacttaattagcacaaattaatgagcagagcatccagggcagactctccatttcccgttgcccctgaccccgc

SEQ ID NO: 584614 - DNA, 120 bp, Artificial Sequence
  ENSG00000172382_27 (sequence is synthesized)
ttctgcagggcacccctttgcctgccctgcaccttctccacctcctcctcctgcccatccacagctgccccctcgccgcccgctgccttatcgtccagcaacccccggggtgtctctgcc

SEQ ID NO: 584615 - DNA, 120 bp, Artificial Sequence
  ENSG00000172382_28 (sequence is synthesized)
caccagtggtgttggggagggtgccccccagactgtgaggcagacagaaaggaagaggatgccgtaaaaaccctgggggtgcttgggccctccatggccacttcctgtccccacagcccc

SEQ ID NO: 584616 - DNA, 120 bp, Artificial Sequence
  ENSG00000172382_29 (sequence is synthesized)
tcaactccaggggactggttatcttttccgggcagagtgaagacatggtccatagcagctggcccgggcaccggaaggcactgggggttaaggggaagctgagggcctaggtgtggggag

SEQ ID NO: 584617 - DNA, 120 bp, Artificial Sequence
  ENSG00000172382_30 (sequence is synthesized)
gtggctgttctaacccctccccagctacgggcgaatcttgcccccacagaatcagacgcgtggagtgcaggggtggtgagaggactctctcaaggccaggaagttccaggctttgctacc

SEQ ID NO: 584618 - DNA, 120 bp, Artificial Sequence
  ENSG00000172382_31 (sequence is synthesized)
ctggggctgtacactatggtcctggctggggtctccaagctggggtagaggctccagtgtttggttaaaggcccagcaagaggccctttgtgtcctggggtgtgggaggcaatggacagc

SEQ ID NO: 584619 - DNA, 120 bp, Artificial Sequence
  ENSG00000172382_32 (sequence is synthesized)
agaaaatatgttcccatccttggttcccccgaacgaccccatatcttgcttctcttccgggcccctcactttatccgctccaaagcccccttgcacagcccagcagggggtcctgggcct

SEQ ID NO: 584620 - DNA, 120 bp, Artificial Sequence
  ENSG00000172382_33 (sequence is synthesized)
cgtctgccaagcctgctgcatgcctgggagaggggtcagctcttgggactctggaatcttgagaaggctgatccctggtggccaatgcagaccactgtaccttctctactcccctgaggc

SEQ ID NO: 584621 - DNA, 120 bp, Artificial Sequence
  ENSG00000172382_34 (sequence is synthesized)
cagggagaagcctgtggggctcgggcctcagcctcgggaccaaagtgagacttggggaaggagctcattccggagcagactgtgagagagccctgggcagctcaaatgtagagacagctc

SEQ ID NO: 584622 - DNA, 120 bp, Artificial Sequence
  ENSG00000172382_35 (sequence is synthesized)
ccgggcctcttccgctctgagctgttccgggaggaaaggccaaccttacagtgccagggctggaggctggaccctccccagaaacttccagacaaggatgggtgtggagtgtggagggag

SEQ ID NO: 584623 - DNA, 120 bp, Artificial Sequence
  ENSG00000172382_36 (sequence is synthesized)
cagataagctgtggcccatgggcctgggcctgagcatacggcagagccagccctgggggggaaactgcaggcccttgggctctccggtgaggtccctctgtggactgtccctctggagtc

SEQ ID NO: 584624 - DNA, 120 bp, Artificial Sequence
  ENSG00000172382_37 (sequence is synthesized)
ctcaggagctggggagggtcagtggagaggggctgcagggttggggagggcaggccaggctgcagctggcctggctgatcaccctctcctcacttccagggtctcagagggccaaggcag

SEQ ID NO: 584625 - DNA, 120 bp, Artificial Sequence
  ENSG00000172382_38 (sequence is synthesized)
caacaggtaagcacccagggccctggggtgggagggacaggagccggctggactgagccagggacactcatggccagagggaatttggaacgcacaggacactggggaattccagaggag

SEQ ID NO: 584626 - DNA, 120 bp, Artificial Sequence
  ENSG00000172382_39 (sequence is synthesized)
gggaaagtgggggctgtgtggaactggagcccagaaaggagaggaggaggaaggtccacacaagagcaggacgggcagcacagagccttgaggcgcggtgcaggatgagggcggcagggt

SEQ ID NO: 584627 - DNA, 120 bp, Artificial Sequence
  ENSG00000172382_40 (sequence is synthesized)
ctgaggatcaccctgaaccgtgactggccccctctgggtggctcccttgcagagggcttgacacctgttctatccttccaggcacctgtttgggtcaggccctgggacaagacccttccc

SEQ ID NO: 584628 - DNA, 120 bp, Artificial Sequence
  ENSG00000172382_41 (sequence is synthesized)
tgggttatctcagtgcctccgtggcccccaagaggcaggtgttaggttgcctttctcggcgaggagagtgagactttggggggcagctggggagggtctgcctgtatcccagactgcccc

SEQ ID NO: 584629 - DNA, 120 bp, Artificial Sequence
  ENSG00000172382_42 (sequence is synthesized)
gaagcccaggcctccgacttccccaaggtcttcgggcaggtcaggggcaggagggccgaggactggagtgtgaggctgagagctgggcctcggccatggaaccagccccagtgagcgccc

SEQ ID NO: 584630 - DNA, 120 bp, Artificial Sequence
  ENSG00000172399_0 (sequence is synthesized)
atatagccagttgatgtcagctgaatgccagtctcttcagaaaagctcagtccccagtttgagtcagagtagggaccatgctgtcccaggttcaaggataaaaaccatcaggcccaagtg

SEQ ID NO: 584631 - DNA, 120 bp, Artificial Sequence
  ENSG00000172399_1 (sequence is synthesized)
ccatccatagtccatctccagagtcttcctccacaaactgggattcatccccgctgaaaaagcacaatctaacagcaagggaacaaaaaaaccatgctatcacataatactatgatgaag

SEQ ID NO: 584632 - DNA, 120 bp, Artificial Sequence
  ENSG00000172399_2 (sequence is synthesized)
cagagaaaacagcaagcaacagccatcatgaaggaagtccatggaaatgatgttgatggcatggacctgggcaaaaaggtcagcatccccagagacatcatgttggaagaattatcccat

SEQ ID NO: 584633 - DNA, 120 bp, Artificial Sequence
  ENSG00000172399_3 (sequence is synthesized)
ctcagtaaccgtggtgccaggctatttaagatgcgtcaaagaagatctgacaaatacacatttgaaaatttccagtatcaatctagagcacaaataaatcacagtattgctatgcagaat

SEQ ID NO: 584634 - DNA, 120 bp, Artificial Sequence
  ENSG00000172399_4 (sequence is synthesized)
gggaaagtggatggaagtaacttggaaggtggttcgcagcaagcccccttgactcctcccaacaccccagatccacgaagccctccaaatccagacaacattgctccaggatattctgga

SEQ ID NO: 584635 - DNA, 120 bp, Artificial Sequence
  ENSG00000172399_5 (sequence is synthesized)
ccactgaaggaaattcctcctgaaaaattcaacaccacagctgtccctaagtactatcaatctccctgggaacaagccattagcaatgatccggagcttttagaggctttatatcctaaa

SEQ ID NO: 584636 - DNA, 120 bp, Artificial Sequence
  ENSG00000172399_6 (sequence is synthesized)
cttttcaagcctgaaggaaaggcagaactgcctgattacaggagctttaacagggttgccacaccatttggaggttttgaaaaagcatcaagaatggttaaatttaaagttccagatttt

SEQ ID NO: 584637 - DNA, 120 bp, Artificial Sequence
  ENSG00000172399_7 (sequence is synthesized)
gagctactattgctaacagatcccaggtttatgtcctttgtcaatcccctttctggcagacggtcctttaataggactcctaagggatggatatctgagaatattcctatagtgataaca

SEQ ID NO: 584638 - DNA, 120 bp, Artificial Sequence
  ENSG00000172399_8 (sequence is synthesized)
accgaacctacagatgataccactgtaccagaatcagaagacctatgaaaagaaagttgtatgtgccacataaaactctgaatataaaagttgctgttctactattttaactactggcaa

SEQ ID NO: 584639 - DNA, 120 bp, Artificial Sequence
  ENSG00000172399_9 (sequence is synthesized)
agccacttgcatttttcattagtagcaacaatagcaatttagtgattttccttttctgacattcaatttcaatctcagatcaaatactaataaacaattagaaatcttactttaaaaaac

SEQ ID NO: 584640 - DNA, 120 bp, Artificial Sequence
  ENSG00000172399_10 (sequence is synthesized)
agatggaaaagtaattgacagtttcacctttgtctcattttatatgatttattacagtgtaagtttttcaagtggaatctagaatcaaaatacagggagagatatgaagacctattcaga

SEQ ID NO: 584641 - DNA, 120 bp, Artificial Sequence
  ENSG00000172399_11 (sequence is synthesized)
gtttcatctggggatgaaagctatggaagatgatgtacaaatgttattgatggagaaaatggttgggtgtgtcctttctggtgaccatgagaaaataatatgtcttgatgaagtcttttc

SEQ ID NO: 584642 - DNA, 120 bp, Artificial Sequence
  ENSG00000172399_12 (sequence is synthesized)
attagtcactcttagaattctaaagtgctttgcacttttcaatatgttttgaatcattaggtaatttattctggatgatattctccaaaattcaattcagttattatattcatttagcat

SEQ ID NO: 584643 - DNA, 120 bp, Artificial Sequence
  ENSG00000172399_13 (sequence is synthesized)
taagtcaaggagactgagaatgactcaagggacgtcatagtaccatagttttaaggaccaaggtgtgcccagaattcaagtttcacaaatcccaatgctgtgcattgattatgttcaact

SEQ ID NO: 584644 - DNA, 120 bp, Artificial Sequence
  ENSG00000172399_14 (sequence is synthesized)
ttatgtgtgcattcttagaagagtaagaacaaataaagtacaccgtaatatacatataaatacattcatgtttgtgagagaaggaaagagtaagtaatttgaattggcagctttctttgc

SEQ ID NO: 584645 - DNA, 120 bp, Artificial Sequence
  ENSG00000172399_15 (sequence is synthesized)
taaatctttaaattctgttaagatcctcaagtaactggggagtacatgctttaggacacaaacaaaaacaaagggcatgaaagtatctgaaagcaatgtagcacatatctatcgtaatat

SEQ ID NO: 584646 - DNA, 120 bp, Artificial Sequence
  ENSG00000172399_16 (sequence is synthesized)
tattgacataaaagacacaaactaatataaagttatagttatatcttaaaatataattgaagaagcatatgacatataacttatagaaatcagtatcaattcctcccatttcaattcagt

SEQ ID NO: 584647 - DNA, 120 bp, Artificial Sequence
  ENSG00000172399_17 (sequence is synthesized)
aattcagttaagacttctgtgatagatgtttatagcagagaagaaatgtctcatcaatagaaaactatcagataaagtttaggagataggaagaaggactgtgtgtagtaatgaaaatac

SEQ ID NO: 584648 - DNA, 120 bp, Artificial Sequence
  ENSG00000172399_18 (sequence is synthesized)
caagttgcaacattacatgtttacaaaaaaaaatctgtgtttgtagtgtggaagttggtgactgttttaatcatcatctagacttgttaagtagaaaaattttaaaaatttgcttatgaa

SEQ ID NO: 584649 - DNA, 80 bp, Artificial Sequence
  ENSG00000172399_19 (sequence is synthesized)
aagatgtcttaagatatcttaattttatttataagttttggtgtttacctgttttaaaatgataatgttggcatctgtga

SEQ ID NO: 584650 - DNA, 120 bp, Artificial Sequence
  ENSG00000172399_20 (sequence is synthesized)
ttacctgttttaaaatgataatgttggcatctgtgataaactatcaatgaggctcccatcatgccattttttgttcattttaatctttaaaaaataaaaattaggcatattaattatgca

SEQ ID NO: 584651 - DNA, 120 bp, Artificial Sequence
  ENSG00000172403_0 (sequence is synthesized)
gcacaaattcgcagcaggcggctggggcggcggctggggcagcggctgcagcagcggcggacgctctgcattacccagtcttgcgtcctcggcaggcgcccgaagctgagtgcgcatcct

SEQ ID NO: 584652 - DNA, 120 bp, Artificial Sequence
  ENSG00000172403_1 (sequence is synthesized)
ctaccgcacccaagcttcgtctgtctcgtcaagctcttcatgctgcccaactaaaaggaaaacatgggcacaggggattttatctgcatttccatgactggaggggcgccctgggggttc

SEQ ID NO: 584653 - DNA, 120 bp, Artificial Sequence
  ENSG00000172403_2 (sequence is synthesized)
agattgcaaggtggcaaggagcagaagcagcccttacaagttgcaaagattcgaaatcagagcaaagcctctgggtctgggctctgtgagggagatgaagtggtttccatcaatggcaac

SEQ ID NO: 584654 - DNA, 120 bp, Artificial Sequence
  ENSG00000172403_3 (sequence is synthesized)
ccttgtgcagatctcacctaccctgaagtcatcaagctcatggaaagcataacagactctctccaaatgctcatcaaaagaccatccagtggaataagtgaggctttgatatctgaaaat

SEQ ID NO: 584655 - DNA, 120 bp, Artificial Sequence
  ENSG00000172403_4 (sequence is synthesized)
gaaaacaaaaacctcgagcatctcacacatgggggttatgtggaaagtaccaccctgcagattcgaccggccacaaagacccagtgcacagaattcttcctcgcccctgtcaagactgaa

SEQ ID NO: 584656 - DNA, 120 bp, Artificial Sequence
  ENSG00000172403_5 (sequence is synthesized)
gttcccctagctgagaaccaaagaagtggtcccgactgtgcaggcagcttgaaagaagaaacaggcccgagctaccaaagggctccccaaatgcctgactcccaaagaggacgcgtggca

SEQ ID NO: 584657 - DNA, 120 bp, Artificial Sequence
  ENSG00000172403_6 (sequence is synthesized)
gaagagctgatcttaagggagaaggtagaagcggtacagcctgggcctgtggttgagctgcaactgtccctttcacaggagagacataagggcgctagtggccctttagtggctctcccg

SEQ ID NO: 584658 - DNA, 120 bp, Artificial Sequence
  ENSG00000172403_7 (sequence is synthesized)
ggagctgaaaaatctaagtctcctgacccagaccctaacttgtcacatgacaggattgtccacataaattcgatccctactaatgagaaagcagaccctttcctgaggtccagcaagata

SEQ ID NO: 584659 - DNA, 120 bp, Artificial Sequence
  ENSG00000172403_8 (sequence is synthesized)
atccagatctccagtggcagagagttgagagtgatccaggaaagtgaagcaggagatgcgggactgccccgggtggaagtgatcctcgactgctctgacaggcagaagacagaagggtgc

SEQ ID NO: 584660 - DNA, 120 bp, Artificial Sequence
  ENSG00000172403_9 (sequence is synthesized)
aggcttcaggcaggaaaggagtgtgtggattctccagtggaaggagggcagtcagaagcacctccttctctggtatcctttgccgtctcatcagaaggcacagagcagggagaagatcca

SEQ ID NO: 584661 - DNA, 120 bp, Artificial Sequence
  ENSG00000172403_10 (sequence is synthesized)
cgctcggaaaaagatcacagcagacctcacaagcaccgagcgcggcatgcacggctcaggaggagtgaaagcctgtcagaaaaacaagtgaaggaagcaaaatctaaatgcaaaagcatt

SEQ ID NO: 584662 - DNA, 120 bp, Artificial Sequence
  ENSG00000172403_11 (sequence is synthesized)
gcccttcttctaacggatgctcccaaccccaactccaagggggtgttgatgtttaagaagcgacgtcggagggccaggaaatacaccctagttagctacggtactggcgagcttgagcga

SEQ ID NO: 584663 - DNA, 120 bp, Artificial Sequence
  ENSG00000172403_12 (sequence is synthesized)
gaggcggacgaggaggaagaaggtgacaaggaggatacatgtgaagtagcatttcttggtgcaagcgaatcagaggtggatgaagagttattgtctgacgttgacgacaacacacaagtt

SEQ ID NO: 584664 - DNA, 120 bp, Artificial Sequence
  ENSG00000172403_13 (sequence is synthesized)
gtgaactttgactgggattctggactggtggacattgaaaagaaactgaacagaggggacaagatggagatgttaccagacaccacaggcaagggagccctcatgtttgccaagaggagg

SEQ ID NO: 584665 - DNA, 120 bp, Artificial Sequence
  ENSG00000172403_14 (sequence is synthesized)
gagagaatggatcagatcacagcccaaaaagaagaggacaaggtaggtggaacgccaagcagagaacaagatgctgcccagaccgatggcctgagaaccacgacttcttaccaaagaaag

SEQ ID NO: 584666 - DNA, 120 bp, Artificial Sequence
  ENSG00000172403_15 (sequence is synthesized)
gaggaagagtcggtaagaacgcagagctctgtgagcaaaagctacatcgaggtgagtcatggtcttggccatgttccccaacagaatggcttcagtgggacatctgagacagcaaacatc

SEQ ID NO: 584667 - DNA, 120 bp, Artificial Sequence
  ENSG00000172403_16 (sequence is synthesized)
cagaggatggtccccatgaatagaacggccaaacccttcccagggtctgtgaatcagccagctacccccttctcgccaacccgaaacatgacgagtcccattgctgactttcctgcacct

SEQ ID NO: 584668 - DNA, 120 bp, Artificial Sequence
  ENSG00000172403_17 (sequence is synthesized)
ccaccttactctgcagtcactcctccccctgacgccttctccagaggggtttcaagtccgattgctggcccagcacagccccctccatggccccagcctgccccgtggtcccagccagcc

SEQ ID NO: 584669 - DNA, 120 bp, Artificial Sequence
  ENSG00000172403_18 (sequence is synthesized)
ttttacgattcgtctgagcgaatagcttcccgagatgagaggatctcagtgccagcaaaaagaacaggaatattgcaggaggccaaaaggagaagcacgacaaaacccatgtttactttt

SEQ ID NO: 584670 - DNA, 120 bp, Artificial Sequence
  ENSG00000172403_19 (sequence is synthesized)
aaagagcccaaagtaagcccaaatcctgaactcttgtcactccttcaaaattcagaaggcaaacggggcactggagctggaggtgattccggaccggaagaagactacctcagcttgggg

SEQ ID NO: 584671 - DNA, 120 bp, Artificial Sequence
  ENSG00000172403_20 (sequence is synthesized)
gcagaggcttgtaatttcatgcaaagctcctctgccaaacaaaagacccctcctcctgttgctccaaaacctgcagtcaagtcctcatcctcccaaccagtaactccagtttccccagtc

SEQ ID NO: 584672 - DNA, 120 bp, Artificial Sequence
  ENSG00000172403_21 (sequence is synthesized)
tggtctccaggagtggctcccacccaacctcctgccttccccacatccaacccatcaaagggcaccgttgtctcctccatcaaaatagcccagccttcttaccctcctgcccggcctgca

SEQ ID NO: 584673 - DNA, 120 bp, Artificial Sequence
  ENSG00000172403_22 (sequence is synthesized)
agtactttgaacgtggctggtcccttcaaaggaccacaagcagcagtagccagtcagaattacacacccaaaccaacagtttccacaccaacagtcaatgctgttcagcctggtgcagtg

SEQ ID NO: 584674 - DNA, 120 bp, Artificial Sequence
  ENSG00000172403_23 (sequence is synthesized)
ggaccatccaatgagcttccaggaatgagtgggagaggagctcagctctttgctaaaaggcagtcgagaatggagaagtatgtggtcgattcagacacggtgcaggcccacgctgctcga

SEQ ID NO: 584675 - DNA, 120 bp, Artificial Sequence
  ENSG00000172403_24 (sequence is synthesized)
gctcagtctcccactccatctctcccggccagttggaagtactcctccaatgtccgagcacctcctcctgtggcctataatcctatccactcgccgtcttacccactggctgctctcaag

SEQ ID NO: 584676 - DNA, 120 bp, Artificial Sequence
  ENSG00000172403_25 (sequence is synthesized)
tctcagccatcagctgcacagccctccaaaatgggcaagaaaaagggaaagaaacccctcaatgcattagatgtcatgaagcaccaaccgtatcagctcaatgcatccttgtttactttc

SEQ ID NO: 584677 - DNA, 120 bp, Artificial Sequence
  ENSG00000172403_26 (sequence is synthesized)
caacctccagatgcaaaggatggcctcccccagaagtcatcagtcaaggtcaattcagccctggccatgaagcaagctcttcctccccggccagtgaatgctgcctcacctacgaatgtg

SEQ ID NO: 584678 - DNA, 120 bp, Artificial Sequence
  ENSG00000172403_27 (sequence is synthesized)
caggcttcgtcagtgtactcggtaccagcctatacctctcctccttccttctttgcagaggcctcctcaccagtcagtgcatccccagtgcctgtgggcattcccacctcgccaaagcaa

SEQ ID NO: 584679 - DNA, 120 bp, Artificial Sequence
  ENSG00000172403_28 (sequence is synthesized)
gaatcagcctcatcatcttattttgtggcaccaaggccaaagttctcagccaagaaaagtggtgtcacaattcaggagagtgggcgctccctttctcttcctggaagatcagtcccaccc

SEQ ID NO: 584680 - DNA, 120 bp, Artificial Sequence
  ENSG00000172403_29 (sequence is synthesized)
cccatttctacatctccttgggtataccagcctacttatagttactctagtaaaccaaccgatggactagagaaagcaaacaagagaccaactccttgggaagcagcagcaaagtctcct

SEQ ID NO: 584681 - DNA, 120 bp, Artificial Sequence
  ENSG00000172403_30 (sequence is synthesized)
aggtgcttccagggcctccagaggattggaatgaaagactgtcctatattcctcaaacccagaaggcctatatgggctcatgtggaaggcaagagtataatgtcacagccaataataata

SEQ ID NO: 584682 - DNA, 120 bp, Artificial Sequence
  ENSG00000172403_31 (sequence is synthesized)
tgtccaccacctcccaatatggttcacagttgccatatgcatattataggcaggcttcaagaaatgattctgcaatcatgtccatggaaaccaggtctgattactgtcttccagtagctg

SEQ ID NO: 584683 - DNA, 120 bp, Artificial Sequence
  ENSG00000172403_32 (sequence is synthesized)
attacaactacaacccacacccaaggggatggagacgccaaacatgaaagttagaagaacggatcatgtgccaactgtagttttttaaaaaaaacgctcctttgtagggttttaaacttt

SEQ ID NO: 584684 - DNA, 120 bp, Artificial Sequence
  ENSG00000172403_33 (sequence is synthesized)
ctcctttgtagggttttaaacttttctaatagatttagattcacttttggtcttggcttgttctcataagtcatttatctaagtttgtgtttctgtgtgtgtgtgtgtgtgtgtatgtat

SEQ ID NO: 584685 - DNA, 120 bp, Artificial Sequence
  ENSG00000172403_34 (sequence is synthesized)
acaggtgagtgtgaatacttccttgttggctgatccatagagcattacttggaagaaaatttcactatttgcattgatgtgctggcatttatatgtaattcataattttgattccattaa

SEQ ID NO: 584686 - DNA, 120 bp, Artificial Sequence
  ENSG00000172403_35 (sequence is synthesized)
taggtagtctatgcaacaaactctactcaattaaagtaaaactaagtatttcttcattgtaccttagtccaggaagaaattaatggaatatggtgtgctaattatcactacctataacat

SEQ ID NO: 584687 - DNA, 120 bp, Artificial Sequence
  ENSG00000172403_36 (sequence is synthesized)
gaggaatataacattgcagaaatttctcataggggcatgccagtgagcaattactttataaaaatattttccttggtgttaagtatttctctgcaacttttttttttttttttttttttt

SEQ ID NO: 584688 - DNA, 120 bp, Artificial Sequence
  ENSG00000172403_37 (sequence is synthesized)
caggcgtgagccaccacacctggcctttctgcaacatttttttaaaaaaatctaataaatcttagatttttaaaaaagaattaaaatgtgggagttctcagaaagaaataaacacatgag

SEQ ID NO: 584689 - DNA, 120 bp, Artificial Sequence
  ENSG00000172403_38 (sequence is synthesized)
gaaagaaataaacacatgagaataagattattacacattttggaaggacttttgaggaatgatgtgatgtgtagagaatagaaagatttagatatatgcctgtgacaggaatagattctg

SEQ ID NO: 584690 - DNA, 120 bp, Artificial Sequence
  ENSG00000172403_39 (sequence is synthesized)
ggttcaggggtccccatctgtcaaatgagaagattggattatctaatcttttagatccttaacaactctgatattctgagattctctcatttgtagaatgcccgctgatgcattgtttat

SEQ ID NO: 584691 - DNA, 120 bp, Artificial Sequence
  ENSG00000172403_40 (sequence is synthesized)
tttttttgctcataatataaatatcagattatgtttaggagtggattaggtaattagtgtcactacatgtatcattaaaggtcctaaaaggaattgttaggcggcaggctttgtgttacg

SEQ ID NO: 584692 - DNA, 120 bp, Artificial Sequence
  ENSG00000172403_41 (sequence is synthesized)
tgttacatggagtgagggtagatgtgaagatttaaaacgattgatggatttaaggaagtggtacataaatatgtctgttattatgcaatcgtaggtcatgataatttattcagttataga

SEQ ID NO: 584693 - DNA, 120 bp, Artificial Sequence
  ENSG00000172403_42 (sequence is synthesized)
aaacatgccacagaagcctatgtaacaagtggtgcttctttagaaagttgtcattagaatgttctgaggaagttaagcagctgcttcatcaatcccatgacacatgccttgttagcatgc

SEQ ID NO: 584694 - DNA, 120 bp, Artificial Sequence
  ENSG00000172403_43 (sequence is synthesized)
ccatcaaataatcagatcaaacacctgctccttattgccatacccacgaactgttaaatataaaaaaattcaaagtatttgacatcttaagcaaatatccagaatatttttaagtaaaaa

SEQ ID NO: 584695 - DNA, 120 bp, Artificial Sequence
  ENSG00000172403_44 (sequence is synthesized)
accatcttaagtattcaaaatttccttggttttttaaaggtgataattttgctttgtgttacttttttgctcttgaatgtatcgttatgatggtctcttataatcatggtatctttcaca

SEQ ID NO: 584696 - DNA, 120 bp, Artificial Sequence
  ENSG00000172403_45 (sequence is synthesized)
gaataaaaattaaaaataatgccagggtgcaagtgaccaaggccttatcttgaaagttaaaaaaaaaaagtaaagaaatcacagtaagttctattagtgatgatagaaccagatataaaa

SEQ ID NO: 584697 - DNA, 120 bp, Artificial Sequence
  ENSG00000172403_46 (sequence is synthesized)
ttgttcagtgatggagaaaagaaacgataaatactttccaaggttatattgttaaattatcttaaattatcaaggtgtaagatgtaatgatcccaagagtttttatagaatcctaaaaaa

SEQ ID NO: 584698 - DNA, 120 bp, Artificial Sequence
  ENSG00000172403_47 (sequence is synthesized)
taacgcctgatgtatagattagttagcaaattctcagaaatcccccacataaaagccttactttgttcaaaatttattatagtggtttaatcattttagatttgaatgttttaagatagg

SEQ ID NO: 584699 - DNA, 120 bp, Artificial Sequence
  ENSG00000172403_48 (sequence is synthesized)
agagacttagcagaaaatacttggcttgccagggccacgttctacttcattgctttcttttataagtgcaaggagttatttccatcagttgacatagatattattcactaaaattttcag

SEQ ID NO: 584700 - DNA, 120 bp, Artificial Sequence
  ENSG00000172403_49 (sequence is synthesized)
cagactcaaaatagagaggagactttaaacttacatgttagcataaaacagacttctctctcattgcatgcactagatcaatattatcatctgtattaagctatctgaatttattcgaga

SEQ ID NO: 584701 - DNA, 120 bp, Artificial Sequence
  ENSG00000172403_50 (sequence is synthesized)
cattaagaaaaagacagtacatggtgggaaagctgcacatttctcacaaggaaaaaaacattctatatttgtagcagaaatcagtggtttgaaaagtcatactttgcagatatgaacctg

SEQ ID NO: 584702 - DNA, 120 bp, Artificial Sequence
  ENSG00000172403_51 (sequence is synthesized)
aaaatcaaagtgccattgttaaatcatcctaaagtgtactgtgggtattctccagcatacttgaaaatgaataaagttagattgctcacattgaagctaatggttgagacaagacacctg

SEQ ID NO: 584703 - DNA, 120 bp, Artificial Sequence
  ENSG00000172403_52 (sequence is synthesized)
ccagagtgaagtttgattcctatgggtgagaagatgtagatgactattgttctcactaaagttctaaaataatagcaagtgtagagaagagccgttgctttgaaaatacataccacattt

SEQ ID NO: 584704 - DNA, 120 bp, Artificial Sequence
  ENSG00000172403_53 (sequence is synthesized)
gttataaagcatttgtttgttagtatcaatcacataggtagaaagagtttgagttttactgtggattaaaaagccttccctaaaaagagagcatgccagtcatagagacactaatttggc

SEQ ID NO: 584705 - DNA, 120 bp, Artificial Sequence
  ENSG00000172403_54 (sequence is synthesized)
acttttcctccttcttaggtttaaatgttataccaatgcatgtgtttgaaatatccattaagatgatttaaaatttgtcttgtattttgagtttcttaaatgcgtggattcttgttcatt

SEQ ID NO: 584706 - DNA, 120 bp, Artificial Sequence
  ENSG00000172403_55 (sequence is synthesized)
tatctctgaatatgtctcttttatattttggcacaattatacacattggaaagggccaacctattagggctcaagtatgtatatgcaaaaaaaaaaagttatatcaaacaggcacagtta

SEQ ID NO: 584707 - DNA, 120 bp, Artificial Sequence
  ENSG00000172403_56 (sequence is synthesized)
ttacaactagagagaaattccagaaatatttgtttttttaagagaaagtaaattttcacattagatttctattcaaagtactaatatctacatggtccacacttttctattttaaaaaat

SEQ ID NO: 584708 - DNA, 120 bp, Artificial Sequence
  ENSG00000172403_57 (sequence is synthesized)
tgtgttctcttgttaaatagattaacatttccacttctgtttatcacaaaagactgtatttgaaatatgcatacggaaaattgaaattatattagtaataaatgtaacttgaaaaatcaa

SEQ ID NO: 584709 - DNA, 120 bp, Artificial Sequence
  ENSG00000172403_58 (sequence is synthesized)
gagtgtccactttgcttgaaatgaattgtttgcagtgtttcttgagtccctgagaatgcctagcaaagtcctcaacttacttaatttcagatatgtcacctcctaatctgggtccaagga

SEQ ID NO: 584710 - DNA, 120 bp, Artificial Sequence
  ENSG00000172403_59 (sequence is synthesized)
gtataatatttttaatgagtcaaaaatccaactcagattgacctaaaatatatttatcttctttgcacacttaaaaaatccaggagcaccccaaaatagacatgtaccgttatattaagt

SEQ ID NO: 584711 - DNA, 120 bp, Artificial Sequence
  ENSG00000172403_60 (sequence is synthesized)
aagcaggagacttaggatttgtgctgtagccacaagaaagacagtgatcagtgatatcaaacatcaggaatcagcctttatgtaacataacagctgtcctcctatggtgaaaggttcaaa

SEQ ID NO: 584712 - DNA, 120 bp, Artificial Sequence
  ENSG00000172403_61 (sequence is synthesized)
tgtagtgaaggtataacctatattgactgagatttcccttttaggtagtgccttatctctattactagtgttaaaggaataaggaatctatgaaggacagggagcagctctggtctgtca

SEQ ID NO: 584713 - DNA, 120 bp, Artificial Sequence
  ENSG00000172403_62 (sequence is synthesized)
atctcagccacctgtttgatatcacagagaagatactcggaggattgttggaatgtatatagtttagtaagaagtgggtaagaaagagggtcttaattactgagcacttattatgtatta

SEQ ID NO: 584714 - DNA, 120 bp, Artificial Sequence
  ENSG00000172403_63 (sequence is synthesized)
attaggttctttgccagatgtttttacatatataaactcatttcagaaaacttatttaaagtaaatggggccgggtatggtggttcatgcctggaatcctagcactttgggaggctgagg

SEQ ID NO: 584715 - DNA, 120 bp, Artificial Sequence
  ENSG00000172403_64 (sequence is synthesized)
cctgagcaacatagtgagaccctgtctcaataataataataataatagtaataatgaagtaaatgggataaggaaagaaggataattatctttaaaggttgattcccaccctccctcccc

SEQ ID NO: 584716 - DNA, 120 bp, Artificial Sequence
  ENSG00000172403_65 (sequence is synthesized)
tctttaaaggttgattcccaccctccctccccagttacttaaggaactaagtgagtacatctccagttgcccatgaaagcataagtttgttttcctcagctgaggcaagtggtagagtat

SEQ ID NO: 584717 - DNA, 120 bp, Artificial Sequence
  ENSG00000172403_66 (sequence is synthesized)
acaggataacgaagtaacatgtaaaaggcaggacgcacataaaggtgtacatggctattgtttcacctggagaaaccacatgattgggacctgaaggtttactgactgactacaggggct

SEQ ID NO: 584718 - DNA, 120 bp, Artificial Sequence
  ENSG00000172403_67 (sequence is synthesized)
gattgtgaagcacgaggaaccccatgtgtgtggagactgtagggtgagagcacacaattattagcatcatttctgagtgatctcacagattttttttcttgtgtttgctttgctttttga

SEQ ID NO: 584719 - DNA, 120 bp, Artificial Sequence
  ENSG00000172403_68 (sequence is synthesized)
caactgcttctcccacgttccttgcaattctattctctcaccttcactttactatttgtattcgatggaccaggataattcaggcaaggttaccttgtaaactttaattggccacacacc

SEQ ID NO: 584720 - DNA, 120 bp, Artificial Sequence
  ENSG00000172403_69 (sequence is synthesized)
atgttgtcacccagctggctatgaagtgaataatggtactgaaagtaaacctgaagacctttctcagatctattttaagtctgagtctgaccaaccatggaaaatattcgacatgaatta

SEQ ID NO: 584721 - DNA, 120 bp, Artificial Sequence
  ENSG00000172403_70 (sequence is synthesized)
atgtagagaactataaagcatttatgacagctccaagaaaaatcatctactctatgcaggagatatgtttagagacctctcagaaaaacttgcctggtttgagggtacacagtaccattt

SEQ ID NO: 584722 - DNA, 120 bp, Artificial Sequence
  ENSG00000172403_71 (sequence is synthesized)
taatcttctgaaaatatctgtattcctgctctttttctgctgtcactgtcaatctgctatatttttcactatcctattaaaatattactgtctcctttatctgttcaatgtccatatttt

SEQ ID NO: 584723 - DNA, 120 bp, Artificial Sequence
  ENSG00000172403_72 (sequence is synthesized)
aaaaaaatcttccttgtatgagctattctgatctaaataatttctctgatatttctctatatggctcccacaacaatttcattgttgttagcatatctatttctccatacattgtaaaac

SEQ ID NO: 584724 - DNA, 120 bp, Artificial Sequence
  ENSG00000172403_73 (sequence is synthesized)
tgtaatccttaggtatttctaaaacataaagaggagaattaagtcagctgcagaacaatggggctgattcttctgctttttctctggaaaatctttcattgcttttggtggaaatttacc

SEQ ID NO: 584725 - DNA, 120 bp, Artificial Sequence
  ENSG00000172403_74 (sequence is synthesized)
tagaggttacaaccacaggatgtagcttggtctcttatttgcctttttgggaaaccaattaagattaatacaggataaaggaaaaaagcaatctattcattatataacacagttgtttgt

SEQ ID NO: 584726 - DNA, 120 bp, Artificial Sequence
  ENSG00000172403_75 (sequence is synthesized)
attacttgttccctgcaaaggaaatctgttgaatgcttgcattttgaattcttttctaatagaacaaccaaaaaaggcttcttatggtgcagcaggaaaaaagatcatttttatagcttt

SEQ ID NO: 584727 - DNA, 120 bp, Artificial Sequence
  ENSG00000172403_76 (sequence is synthesized)
gcattcttaacatagcatttaaagagcggcatgaattagaggaaagacatggaacacacaggtagtcggtttgagatcatcggcttaaaagtatcctaggatggtaatgacccagaagta

SEQ ID NO: 584728 - DNA, 120 bp, Artificial Sequence
  ENSG00000172403_77 (sequence is synthesized)
tttccagttgtctagtggtgtggtatgcaggaatgagaagtgttttctttccatttcctgttggacaggtggcaatcttagcagagccactatttggagttgataactaaagatgcaaat

SEQ ID NO: 584729 - DNA, 120 bp, Artificial Sequence
  ENSG00000172403_78 (sequence is synthesized)
aacatgactatgccttctggtcatcctaggactatttggagttctccaaaaccttgtaagaggcatgtcaggcatgcagtaaaagcatctacaacttcagctgggcactggcagcatagg

SEQ ID NO: 584730 - DNA, 120 bp, Artificial Sequence
  ENSG00000172403_79 (sequence is synthesized)
tctcatcttggaccatacagtcccactttatagaagagggtggaagttctccaaaacaatatccacaacaaagtctgacctcactctgagggagatgggaagtgggaggaagaaggacta

SEQ ID NO: 584731 - DNA, 120 bp, Artificial Sequence
  ENSG00000172403_80 (sequence is synthesized)
accagctccctggagtaagaggaatttgctttccctgtctgcccaccaggggctatatgtgccacctttcaggttggggccaaggaagtgatgtcagtgtgacagaagggagagttagac

SEQ ID NO: 584732 - DNA, 120 bp, Artificial Sequence
  ENSG00000172403_81 (sequence is synthesized)
ctccagacgtcagcctccctcccatggggtacattttcaatctgagtgttgttgccttagctgtgttggtattagcttgattggttggtccgctggttatgaggtgtagggaggcagttt

SEQ ID NO: 584733 - DNA, 120 bp, Artificial Sequence
  ENSG00000172403_82 (sequence is synthesized)
ttgtttagtttttaggactttgcctcttcctttgtccttagcataatttctaggcagagcatccacgaagtcggttttcattgccagctcaagagcgacaatcatttacgagttcctatg

SEQ ID NO: 584734 - DNA, 120 bp, Artificial Sequence
  ENSG00000172403_83 (sequence is synthesized)
ttatgttaggtgccttatgtatattatcccaaatccactgcatggtttaaatacaggcactggaatataaatgaaaaaggtcattacagtcactgactttctgcaggaccttaaacattt

SEQ ID NO: 584735 - DNA, 120 bp, Artificial Sequence
  ENSG00000172403_84 (sequence is synthesized)
ctctttccacaagtttccccttaatcatgtgtcaaacctctcttcctgacgggaatgttgtgctataatgaatctgcataacgcttgggattctaggaggaaggaaggttccatggacat

SEQ ID NO: 584736 - DNA, 120 bp, Artificial Sequence
  ENSG00000172403_85 (sequence is synthesized)
gtaagtacagcatattcccctcagtcttctaggagggcagagtgaatcccagaactggtaagattgggaatctgagcattgccactttaatcttagaatatttatcattttgacacatcc

SEQ ID NO: 584737 - DNA, 120 bp, Artificial Sequence
  ENSG00000172403_86 (sequence is synthesized)
tgttttttagagaggaaaacaaacacagtttctgcattggtagtgtaaagcataccttgttaggaacgtgttttgtaagacacatttgggttgtcactctagagcatgtcaaactttgta

SEQ ID NO: 584738 - DNA, 120 bp, Artificial Sequence
  ENSG00000172403_87 (sequence is synthesized)
cttcaaaatatatttagtatgattgttagtggtaacatatatcaaggctttgaattaactgttttatttaattttcacaagaagcacttattttagccataggaaaaccaatctgagcta

SEQ ID NO: 584739 - DNA, 120 bp, Artificial Sequence
  ENSG00000172403_88 (sequence is synthesized)
caaatagttctttaaaataagcccaggttatttagctattctagaaagtgccgacttctttcaagaagcaggcattgtaggacagctgagaattatcacatagcctaaattctagcctgg

SEQ ID NO: 584740 - DNA, 120 bp, Artificial Sequence
  ENSG00000172403_89 (sequence is synthesized)
cagcaagagtcacatctgagatgtccaaaaaaaaaaaaaaaacacctgatctacattgaaagggggtagactaacgtatgtgagaccattttcctatttgcagttacaaggttaaagaac

SEQ ID NO: 584741 - DNA, 120 bp, Artificial Sequence
  ENSG00000172403_90 (sequence is synthesized)
tttgaaggtcattcggctgctaagaggcatgtcgaacactctgtgtggctctttcacagtaaaccctcctaagagcagaagacacatggctgttagtgtctgcgtttagatttaatttct

SEQ ID NO: 584742 - DNA, 120 bp, Artificial Sequence
  ENSG00000172403_91 (sequence is synthesized)
caaataaaggcccttggctgcgtatcatttcatccagttataaactagggctcctgcaagcacccccattctaagggtgaattattgaaatcagttgctatttgatgagtcacaactggc

SEQ ID NO: 584743 - DNA, 120 bp, Artificial Sequence
  ENSG00000172403_92 (sequence is synthesized)
ccagcaggcagggcatttgaagtcatggtcatcaaaaagaaatgattgttttttgaaaagctaaatgcttaaaatgcttctagagggaagtcgtggggcgtgtgctcattctctttaaaa

SEQ ID NO: 584744 - DNA, 120 bp, Artificial Sequence
  ENSG00000172403_93 (sequence is synthesized)
taaattctaagaaccaacactgtattcccagaaacatgaccctcgctggtcttgggtccacatatcattggactctgggggacacaaagatgcctgtgacactttggtgttgccgagtta

SEQ ID NO: 584745 - DNA, 120 bp, Artificial Sequence
  ENSG00000172403_94 (sequence is synthesized)
gtcaacaattattctgggaaaaagcagaattgaattcttctctagatgtcctaccagggttggccaagggccacaaagcaggctaataaattcccacaggatccagacaccaggcaaaat

SEQ ID NO: 584746 - DNA, 120 bp, Artificial Sequence
  ENSG00000172403_95 (sequence is synthesized)
tgctctaagaagccagttactgtcatccctctatggttctagaaaaaatagtacaaaaatgacaggtcatcctatgagcgtcatgccaatgaaaccccatcttctggagaagcccttgaa

SEQ ID NO: 584747 - DNA, 120 bp, Artificial Sequence
  ENSG00000172403_96 (sequence is synthesized)
tcagaattatcttttttcttgatgtcgtcagatgcagccagtttcttaatttttttaaaaactgtatgtttctgtggtatgtatatttgtacacctaactacctggcacttggaaatcac

SEQ ID NO: 584748 - DNA, 120 bp, Artificial Sequence
  ENSG00000172403_97 (sequence is synthesized)
agcactactcagaggcaattgaataaagagaaatttaattttaaatatcaagtcctgtcaaacatttctcaaacttctgattttatcaaaggtttgccagccaataaagtgcatcccaag

SEQ ID NO: 584749 - DNA, 120 bp, Artificial Sequence
  ENSG00000172403_98 (sequence is synthesized)
tatacaggggagaaagctagactcctacagggtcctagagtttaagtaatttttttgttattaatataggtaataatttttctaatttttattttttggttccaaatgtaaagctccttg

SEQ ID NO: 584750 - DNA, 120 bp, Artificial Sequence
  ENSG00000172403_99 (sequence is synthesized)
tgtttacctctgtttatgtcattcttgacatgtttatctaaattatgtgtgctctgtgacaggtgaaatgtaaatctgggatccatagtcaagatatcataaggacctacttcccagcct

SEQ ID NO: 584751 - DNA, 120 bp, Artificial Sequence
  ENSG00000172403_100 (sequence is synthesized)
acctttcttcctctacctgataatgataatactcaaaataacaacattcaaaggaaacacaaagaaatcctgctttcacatctcctatttcttgggctccttaataactactgatggttt

SEQ ID NO: 584752 - DNA, 120 bp, Artificial Sequence
  ENSG00000172403_101 (sequence is synthesized)
gttcatgaaaaaaaatttttaaatcaaaagattgtacttggccctgagttgaaaaaatttcaaaaatcaaaagtttgtacttggccctgagttgaaaaaaaaaattcacattctaagaat

SEQ ID NO: 584753 - DNA, 120 bp, Artificial Sequence
  ENSG00000172403_102 (sequence is synthesized)
aaacagaaaaatgttcttcttggaagtaaataacaaaagccatagtgttttcatttgtcttttcttcaggatacacggtagaagtcagagaatctttgatacttttatttggtgcaataa

SEQ ID NO: 584754 - DNA, 120 bp, Artificial Sequence
  ENSG00000172403_103 (sequence is synthesized)
tcaaggccatgcaacaacccaaaatcaagcattttggttcaagtcaggatgacatgagtggggacagaagctgtggcagtcattcaaataatctcatgggtcctgaggaaaagacaggag

SEQ ID NO: 584755 - DNA, 120 bp, Artificial Sequence
  ENSG00000172403_104 (sequence is synthesized)
ttaatgtattaagtttctactatatgcaggaactgtgttaaatattttacataagttttgataatagctaacattagctgagcacaaaatttgggccctgatttgtgctgagtatctttc

SEQ ID NO: 584756 - DNA, 120 bp, Artificial Sequence
  ENSG00000172403_105 (sequence is synthesized)
acagattactgcttttaatcagcagtccttgtgagctaggtatgatcattatccccattttatagattacagatgagattctgaggcacaaagaggctaagtaacttgccaaagatcata

SEQ ID NO: 584757 - DNA, 120 bp, Artificial Sequence
  ENSG00000172403_106 (sequence is synthesized)
cgatgttaagtaatggcccctggattcagtctgcagcctgaattcttaaccaattatactgtgatttcattattcttcagaattacactaaaaagaaggtattattcccattttacagat

SEQ ID NO: 584758 - DNA, 120 bp, Artificial Sequence
  ENSG00000172403_107 (sequence is synthesized)
gaggtatctaagctcagagaagctaaacaacttgtgcaacaatcactaagcttataagcagtggattagggttagatttagatatttgtctggcatccaaacctgtgctctccctacagt

SEQ ID NO: 584759 - DNA, 120 bp, Artificial Sequence
  ENSG00000172403_108 (sequence is synthesized)
accacatggtttccacagtctcatcagaccccggaatttcactccctgagactgcttaattgtgaatttcccaaactgattcaccaagagcctactgtctctgctttgtagatagctttg

SEQ ID NO: 584760 - DNA, 120 bp, Artificial Sequence
  ENSG00000172403_109 (sequence is synthesized)
accacattcaatgacattaggaaagactccatttcccaagatggctcagaaaatcagatgctatgacgcatgttgaaagtgaaaacccatctctgagaaagaagcatctgttttattagt

SEQ ID NO: 584761 - DNA, 120 bp, Artificial Sequence
  ENSG00000172403_110 (sequence is synthesized)
aaaaaaaaaaaatgaaatttacagcaatgttgtgtgacttctcaaaattctttcattttcttatttcagaatgaatagtgttgttcgttggctgggaatggggaagaatgtgatttttaa

SEQ ID NO: 584762 - DNA, 120 bp, Artificial Sequence
  ENSG00000172403_111 (sequence is synthesized)
aaataaagcataatcaaactctgcataaaaggaagtgctccctttggctttctgccattttaactaaatgtaactcagggaactttcttattaagtagtgaatcagcacctagcatggct

SEQ ID NO: 584763 - DNA, 120 bp, Artificial Sequence
  ENSG00000172403_112 (sequence is synthesized)
tgctactaaaccaataataacttaaggcatttcaacaagaataattctaaacagaataacgctgagggagtcacaagttttcagtatttcagactacactctgaaaaagagttacccctg

SEQ ID NO: 584764 - DNA, 120 bp, Artificial Sequence
  ENSG00000172403_113 (sequence is synthesized)
gaatcttagagtgtcacggtgccaatcccagtcaggacagcagtcaagtgcatgaggcagcaaacccttcccacctcaaagattcctcagtggaagatttctcaacaattatttctgtca

SEQ ID NO: 584765 - DNA, 120 bp, Artificial Sequence
  ENSG00000172403_114 (sequence is synthesized)
aaggcttcccagcaaggacacttttaaaccttacattttttccagtggttttttttttttccttttatatatcattgttattttgaaaacatctcctgaggaactagtgtgatagattct

SEQ ID NO: 584766 - DNA, 120 bp, Artificial Sequence
  ENSG00000172403_115 (sequence is synthesized)
aaacatgggtttggaacagtcccatcaccaacttcaaaaaaagaagatgtgagcttctaggttaattgtaaaaactcattacatttgcagagctttattgacttaatttaaaatcataga

SEQ ID NO: 584767 - DNA, 120 bp, Artificial Sequence
  ENSG00000172403_116 (sequence is synthesized)
accactaataaggtaacaattatgggggcttaagatgtgctaggtaccactctaagcacttttttggtcaccacaaaatgatgaaagtatgatgtaggtactattatcatcccactttaa

SEQ ID NO: 584768 - DNA, 120 bp, Artificial Sequence
  ENSG00000172403_117 (sequence is synthesized)
gatgagaaaattgaggtaaagaaaacttaaggaacttgtgtaacatggtagggctaagcctcgggacccaacagtcaaactctatggccatcatctaatcacaaggctatactacctccc

SEQ ID NO: 584769 - DNA, 120 bp, Artificial Sequence
  ENSG00000172403_118 (sequence is synthesized)
ctgattgcaagaagactcaggtcacaggtaaaaggaactgctcatcagaagtgatgagttttacatgtctcagagataactccaaagttacactaaaccttctaaatcaaaataagaaat

SEQ ID NO: 584770 - DNA, 120 bp, Artificial Sequence
  ENSG00000172403_119 (sequence is synthesized)
agtgcaacatcttagagtttggtagctccaagcaatagacatttttaaacagggtgcatggggaaaagctgtagtttttatctccatcagcctatttgcttattacaactcaataatggc

SEQ ID NO: 584771 - DNA, 120 bp, Artificial Sequence
  ENSG00000172403_120 (sequence is synthesized)
gaagggaagctcaacattttgctggtttctgttgaacaaattcccacagtgcactagaccacacgcctcaaacacctaccgcttccagccaaccagcatcacatattaccagagttatgg

SEQ ID NO: 584772 - DNA, 120 bp, Artificial Sequence
  ENSG00000172403_121 (sequence is synthesized)
taatttatacctggcaaataaaggaagaacagaatagtgatgagagaaaccctcaaatttcagtaacaataatgcagagaataaggttccttccaatttttaaattaaaaagaagacaag

SEQ ID NO: 584773 - DNA, 120 bp, Artificial Sequence
  ENSG00000172403_122 (sequence is synthesized)
acttttttttaatttaggaaaagcaaaaggtaatcatgtcttaaatgaacttcacatactattagatgagataaggtgtgtaaaccttgagcccacaagaagtacattggtagtgattaa

SEQ ID NO: 584774 - DNA, 120 bp, Artificial Sequence
  ENSG00000172403_123 (sequence is synthesized)
gagtgtgggctctagggccgcgctgcctgcctctgagtcccaggcctgcctcctgctggttgggagactttaaacaaaggattcagtcgccctgtgcttcaatacctcagctgtgaaacg

SEQ ID NO: 584775 - DNA, 120 bp, Artificial Sequence
  ENSG00000172403_124 (sequence is synthesized)
aagacaataataggtgtacctcacaagttgttatgaagattaaatgaaacaatatgcattttgtatataaaacactgcctggcacagagaaagtattcaacacatgttagctattattat

SEQ ID NO: 584776 - DNA, 120 bp, Artificial Sequence
  ENSG00000172403_125 (sequence is synthesized)
tcttctaaggggcactcaataaacaatagctactattttaaaaacttccaatgaggaaaacacaattaaacaagttcttttgtgttctctgttaatatgaatcccagtttgagacccaca

SEQ ID NO: 584777 - DNA, 120 bp, Artificial Sequence
  ENSG00000172403_126 (sequence is synthesized)
actaaaataggaaaagtagaaggagtgtcgctataaatttcacattgacacaagaaatctattcccaggagtcgttgagagatctttgtttcttctcttttttcttcttactgaagttta

SEQ ID NO: 584778 - DNA, 120 bp, Artificial Sequence
  ENSG00000172403_127 (sequence is synthesized)
tatgtttacattcctctgtattcagcctgtttgtccattttttcctgctttgtgttcatctattgtgccagcattcttttcgtggtatacaaagatgagatcagattcaaaaagactggt

SEQ ID NO: 584779 - DNA, 120 bp, Artificial Sequence
  ENSG00000172403_128 (sequence is synthesized)
tcaatatttttataaaataacatcagctttgagcctctactataaagacactgttttcagttcaaagtaccaatgttaaatagaatgaatgtagtggacttagtaatatgaagagagctc

SEQ ID NO: 584780 - DNA, 120 bp, Artificial Sequence
  ENSG00000172403_129 (sequence is synthesized)
ttctggggaaatgtttgtaaaccaaacatattctctaaacaggatagttggtatcctgagtaacctggtagcatagttgaagcttaaataggcctattacactgaaagtggagcagttgg

SEQ ID NO: 584781 - DNA, 120 bp, Artificial Sequence
  ENSG00000172403_130 (sequence is synthesized)
caaccctatccctgagactaccccacttcagacctgcaacagttgggctgacctaggagggcgcagctcacagctgtccttatccctcctttccacactgtcctaggacaaagggtcagc

SEQ ID NO: 584782 - DNA, 120 bp, Artificial Sequence
  ENSG00000172403_131 (sequence is synthesized)
aacctggcctttttagagtaattgatccccttgcctgagaggcatgatcactttccaaaaacagaaagagtgaaacctcggcctgaacagagcaaactcccagctcagggcaagtgatga

SEQ ID NO: 584783 - DNA, 120 bp, Artificial Sequence
  ENSG00000172403_132 (sequence is synthesized)
aaaacaattctaagaagctgagccactgacatagggaggaacttaatattccagctgcctttcaaacccagggaatttttgtgggttttctggtacttctagaatccttctgagtcagaa

SEQ ID NO: 584784 - DNA, 120 bp, Artificial Sequence
  ENSG00000172403_133 (sequence is synthesized)
gcagaagtcaagactcatcttgaagataaaaaatcaaaacaagctgagattctgaaaatgttatctgaatccagaatagcttttgtttcaaatgcaattgaattgatttagtcttgcttt

SEQ ID NO: 584785 - DNA, 120 bp, Artificial Sequence
  ENSG00000172403_134 (sequence is synthesized)
ccttttgtgccatttaattacatttaaaaataaagcaaaactaggcctcttactgtactaaaaacccctttgttcttttttcacctagcatatctaacactgataaagaaatgttcacaa

SEQ ID NO: 584786 - DNA, 120 bp, Artificial Sequence
  ENSG00000172403_135 (sequence is synthesized)
aaccattttctagagctaagaatctctaaggaattggttgaactaatataatgtactaatttaaggtttcattgcaatccttccacaattagatctttggtttggagttttttttttaat

SEQ ID NO: 584787 - DNA, 120 bp, Artificial Sequence
  ENSG00000172403_136 (sequence is synthesized)
tcacactcagagtctgttggttgtggttggattacttattactgtttaacaaatggtgcagatcataattcttcacgtaagtccaatatgggctagattttgaattctgcattatgaaat

SEQ ID NO: 584788 - DNA, 120 bp, Artificial Sequence
  ENSG00000172403_137 (sequence is synthesized)
actcactgaaatgtcacaactcattgtgggtggtattactgaaataaacagcaacactaaatatattacttagaacttttaattttaattttacattgaatgaactaatatgatttcctt

SEQ ID NO: 584789 - DNA, 120 bp, Artificial Sequence
  ENSG00000172403_138 (sequence is synthesized)
tatatacagcactttagtatgagcaaactattcccttcgtagtgtaacatatagctttccactttttgttcctagtgtaaaattaagatttccccaccttagagatagccccaccttaga

SEQ ID NO: 584790 - DNA, 120 bp, Artificial Sequence
  ENSG00000172403_139 (sequence is synthesized)
gattctgatttactaggtttgggtgggacctaggaatttgtttttgtaacatacaacccaggtgattctgatgctaatgggctgtgaactacactttgaataacacttttctaacatgca

SEQ ID NO: 584791 - DNA, 120 bp, Artificial Sequence
  ENSG00000172403_140 (sequence is synthesized)
aaccacttaaatcaactttattctttaaaacccataaatagttttcctgtttatccagtcagggacagccagacttgtaaactgcacctgcttccacagtcttagtgccccgtctaaaag

SEQ ID NO: 584792 - DNA, 120 bp, Artificial Sequence
  ENSG00000172403_141 (sequence is synthesized)
gaacaggcaggcgctgaagcactcatcttgccgattttatttcaaacgtccaggagatggcagcaaactctccttccctctcagtgcttcacaggcagccattctaaagctcgttgcatt

SEQ ID NO: 584793 - DNA, 120 bp, Artificial Sequence
  ENSG00000172403_142 (sequence is synthesized)
acaatttgctttgaatattctttttttaaaaaagacaaaagactaaagggggccttgagacgtgatttttatctgaccccctgcttctaatcaagaatgagtataaatatttctagggat

SEQ ID NO: 584794 - DNA, 120 bp, Artificial Sequence
  ENSG00000172403_143 (sequence is synthesized)
agaatagaatgatacaattttattatctagaaaagagattgaatttccttggctattttttcttatctctggggaaaaagattgtatgacttcccttggctgttgggccctagactctgt

SEQ ID NO: 584795 - DNA, 120 bp, Artificial Sequence
  ENSG00000172403_144 (sequence is synthesized)
tatctccaaatccaaaatattcttactaataactagcttaaatctatctggcagtaatctaaacattcttattttgggatctaggctaatggaaaattttgaagcactttgaatgcttat

SEQ ID NO: 584796 - DNA, 120 bp, Artificial Sequence
  ENSG00000172403_145 (sequence is synthesized)
tagctttttaaaatgaaaataaatacgattataaaattttcaaaagaaaaaggaagttcatgcactttatgcatcatagggaaagagcccaatatttttgtttaactttaacattaatct

SEQ ID NO: 584797 - DNA, 120 bp, Artificial Sequence
  ENSG00000172403_146 (sequence is synthesized)
tggcaaatagagtagtatgtcaacaaaatgcaaaatcagtcagaggctgcttatatgttacaagagtgtacggaacaaagaaacaggcagacccacttggtgacggctttgatcctaaca

SEQ ID NO: 584798 - DNA, 120 bp, Artificial Sequence
  ENSG00000172403_147 (sequence is synthesized)
agcacattgttttcaaaactttgaggcactaaagtttatttctaaaacagaaaagatggtgacgtgttggaagttctgtgatgtgaaatatatgtttgtacatttaccagtgggaggaga

SEQ ID NO: 584799 - DNA, 120 bp, Artificial Sequence
  ENSG00000172403_148 (sequence is synthesized)
aaagactaatgggagagctggatattataaatgatgggttaatgctggagcctaggtcactgcacaggtttgatgccatgtggtcaatgaatgactgatctgttcattgtattttgtttg

SEQ ID NO: 584800 - DNA, 120 bp, Artificial Sequence
  ENSG00000172403_149 (sequence is synthesized)
tttttgttttgttttttgtttttgttttggataattgcttaagaatttagacacacatactactaaaggatctctcttttcctctctttctctcaaatgtgtattgatgagggcctatcc

SEQ ID NO: 584801 - DNA, 120 bp, Artificial Sequence
  ENSG00000172403_150 (sequence is synthesized)
attttagtctccccagaagttactttttatcttaggctaagattacatatccatagcagttaagagggctgatgtagtattttagctaattcataatatttttgtaaattcatcaatgca

SEQ ID NO: 584802 - DNA, 120 bp, Artificial Sequence
  ENSG00000172403_151 (sequence is synthesized)
tttgcatgaattaatactaaaagtgaaaaaattgtttaacaattgtaatagtcaataaatacctaacatcaaatcaaaatgaaggcaaactttgggatggggagaagtcaggagaatact

SEQ ID NO: 584803 - DNA, 120 bp, Artificial Sequence
  ENSG00000172403_152 (sequence is synthesized)
aaagaatgagatccttttaataaatgtgtggtctacatggcaaaatttgctgtagtattaacatacaatgttatctcaagacaattatacattgcagcttcatgaatgcattaagaaagc

SEQ ID NO: 584804 - DNA, 120 bp, Artificial Sequence
  ENSG00000172403_153 (sequence is synthesized)
gtggcacatgcctgtaatcccaggtacccggcagggtgaggcaggagaattacttgaacctggggagcagaggttgcagtgagcccatatcgtactgctgcagtccagcctgggtgacag

SEQ ID NO: 584805 - DNA, 66 bp, Artificial Sequence
  ENSG00000172403_154 (sequence is synthesized)
attacttgaacctggggagcagaggttgcagtgagcccatatcgtactgctgcagtccagcctggg

SEQ ID NO: 584806 - DNA, 120 bp, Artificial Sequence
  ENSG00000172403_155 (sequence is synthesized)
atttgttgccttcaaaatattcagaacatgttgctctggagctcaggagagaaggtgaagtaaagatctgaattcggcaactcggaagcgaagctccaatcttgaggatggatcagattg

SEQ ID NO: 584807 - DNA, 120 bp, Artificial Sequence
  ENSG00000172403_156 (sequence is synthesized)
gtgagggagactgtcatatagagtgagaagagagatccaaggacagaactgcaggaagcatcaatatttgaggaatgagaaaggaagaaaagcctcccacaaaagagatgagacaagagg

SEQ ID NO: 584808 - DNA, 120 bp, Artificial Sequence
  ENSG00000172404_0 (sequence is synthesized)
aacataaaagtgtacctatttgcagtcactacctctatcaccaccaccagcagagcctgagctgaggaaaccacggttctcaatacccagcacacccacttccaactatctgttaaaaca

SEQ ID NO: 584809 - DNA, 120 bp, Artificial Sequence
  ENSG00000172404_1 (sequence is synthesized)
tggtggattactatgaagttctaggactgcaaagatatgcttcacctgaggacattaaaaaagcttatcataaagtggcacttaaatggcaccctgataaaaatccagaaaataaagaag

SEQ ID NO: 584810 - DNA, 120 bp, Artificial Sequence
  ENSG00000172404_2 (sequence is synthesized)
aagcagagagaaaattcaaagaagtagctgaggcatacgaggtattatcaaatgatgagaaacgggacatttatgataaatatggcacagaaggattaaacggaggtggaagtcattttg

SEQ ID NO: 584811 - DNA, 120 bp, Artificial Sequence
  ENSG00000172404_3 (sequence is synthesized)
atgatgaatgtgagtacggcttcacattccataagccagatgatgtttttaaagaaatttttcatgaaagggatccattttcttttcacttctttgaagactcgcttgaggacctgttaa

SEQ ID NO: 584812 - DNA, 120 bp, Artificial Sequence
  ENSG00000172404_4 (sequence is synthesized)
atcgtccaggaagctcctatggaaacagaaacagagatgcaggatactttttctccactgccagtgaatatccaatttttgagaaattttcttcatatgatacaggatatacatcacagg

SEQ ID NO: 584813 - DNA, 120 bp, Artificial Sequence
  ENSG00000172404_5 (sequence is synthesized)
gttcattggggcatgaaggccttacttctttctcttccctggcttttgataatagtgggatggacaactacatatctgttacaacttcagacaaaatcgttaatggcagaaatattaata

SEQ ID NO: 584814 - DNA, 120 bp, Artificial Sequence
  ENSG00000172404_6 (sequence is synthesized)
caaagaaaattattgaaagtgatcaagaaagagaagctgaagataatggagagttgacattttttcttgtaaatagtgtggccaatgaagagggctttgcaaaagaatgcagctggagaa

SEQ ID NO: 584815 - DNA, 120 bp, Artificial Sequence
  ENSG00000172404_7 (sequence is synthesized)
cacagtcattcaacaactattcaccaaattctcacagctccaaacatgtatctcaatatactttcgtggacaatgatgagggaggtatatcttgggttaccagcaacagagatcccccta

SEQ ID NO: 584816 - DNA, 120 bp, Artificial Sequence
  ENSG00000172404_8 (sequence is synthesized)
ttttctcagcaggagtcaaagagggtggtaagaggaaaaaaaagaagcgtaaagaggtgcaaaagaagtctaccaaaaggaattgttaaattgactcttcaaatatataacatttgaaca

SEQ ID NO: 584817 - DNA, 120 bp, Artificial Sequence
  ENSG00000172404_9 (sequence is synthesized)
caattgtgtgtgttttggttaatcacaaattttgtagataacacttaatactatactaagagcttttcaacacttttagcaggattgtggacatttggttagtagtttttttgaatgggt

SEQ ID NO: 584818 - DNA, 120 bp, Artificial Sequence
  ENSG00000172404_10 (sequence is synthesized)
aaggatgagtttgtggtgacagttggtgctaataagaatttgcctgggcagtatagtgagatcttttctctacaaaaaatttaaaaattagccaagtgtggtggtgtgcacctgtagtcc

SEQ ID NO: 584819 - DNA, 120 bp, Artificial Sequence
  ENSG00000172404_11 (sequence is synthesized)
cacgccactgcactccagcttgggtgacaaagtaagaccctgtcttaaaaaaaaaaaaaaggaatttggaaaactgcaatgagttttttacttttgaatttttctttagtagagtttata

SEQ ID NO: 584820 - DNA, 120 bp, Artificial Sequence
  ENSG00000172404_12 (sequence is synthesized)
tacttttgaatttttctttagtagagtttatagcctatttttcttttttctaattaaaaccactatacaaacttacgaaacatgcatagcattagaagacaagaatgtatcaagacacac

SEQ ID NO: 584821 - DNA, 120 bp, Artificial Sequence
  ENSG00000172404_13 (sequence is synthesized)
aggttcagactacacaattattcatgaaatggctgttttccaatggaggaacagcatttgatgcattataacttaaaggtactacaaattaaaaattaaagtataaagtattttaagtta

SEQ ID NO: 584822 - DNA, 120 bp, Artificial Sequence
  ENSG00000172404_14 (sequence is synthesized)
cagtggctcacacctgtaatcctagcatcttgggaggcccaggcaggagggttgaagtcagaatttcacgacagtccgggtaacataatgagacctgtcctctatgaaaaaactttttta

SEQ ID NO: 584823 - DNA, 120 bp, Artificial Sequence
  ENSG00000172404_15 (sequence is synthesized)
ttcacgacagtccgggtaacataatgagacctgtcctctatgaaaaaacttttttaaaaatttagctgggtgtggtggtacgtgcctgtaggcctagctacttaggaggctgaggtggga

SEQ ID NO: 584824 - DNA, 120 bp, Artificial Sequence
  ENSG00000172404_16 (sequence is synthesized)
gctatgatcttgccattgcactccagctgagagtgtgaccctgtctctaaagaaaaactatagaaaatttaaaaaattaaaaaacgggtaacatggtaaattttatgtagtatattttac

SEQ ID NO: 584825 - DNA, 120 bp, Artificial Sequence
  ENSG00000172404_17 (sequence is synthesized)
cacattttttttaaaggccagtcttatcctgaattcctcagagcagtctgtatggtaggccatcagtgaatcactccagacaggaaattttctatttttgtttagagtttgtacacaaaa

SEQ ID NO: 584826 - DNA, 120 bp, Artificial Sequence
  ENSG00000172404_18 (sequence is synthesized)
tctacaaatacattactctaaaatagcacctatagccattttaatttagtcatgttgggagaaaaatagatgggttacaaatacatcagatatcgagcaaatggtttgagttacatctag

SEQ ID NO: 584827 - DNA, 120 bp, Artificial Sequence
  ENSG00000172404_19 (sequence is synthesized)
cagcactaaaacttattcaactttggccaaatacaaatgcgaaattagaaaaaaattataatatctgctatttttaaaagacagctatagtcaagagcttgtgttttgtatcggtatttg

SEQ ID NO: 584828 - DNA, 120 bp, Artificial Sequence
  ENSG00000172404_20 (sequence is synthesized)
atttttagtgggcagatgggagaaggaaaggttatttattctatagaagagactgcggacaattagtattcaaagtttattttcagaaaataaaataataaaagcccagggtattttaaa

SEQ ID NO: 584829 - DNA, 120 bp, Artificial Sequence
  ENSG00000172409_0 (sequence is synthesized)
ttgtttccggcgtgggtccgggcaagaaccgcttgtagtttggtttaaattctgcacgggaggaccttctgagtttacctgttgggctcctggctgcgcagctacacagaagagatggga

SEQ ID NO: 584830 - DNA, 120 bp, Artificial Sequence
  ENSG00000172409_1 (sequence is synthesized)
gaagaggctaatgatgacaagaagccaaccactaaatttgaactagagcgagaaacagaacttcgctttgaggtggaggcatctcagtcagttcagttggagttgttgactggcatggca

SEQ ID NO: 584831 - DNA, 120 bp, Artificial Sequence
  ENSG00000172409_2 (sequence is synthesized)
gagatctttggcacagagctgacccgaaacaagaaattcacctttgatgctggtgccaaggtggctgttttcacttggcatggctgttctgtgcaactgagcggccgcactgaggtggct

SEQ ID NO: 584832 - DNA, 120 bp, Artificial Sequence
  ENSG00000172409_3 (sequence is synthesized)
tatgtctccaaggacactcctatgttgctttacctcaacactcacacagccttggaacagatgcggaggcaagcggaaaaggaagaagagcgaggtccccgagtgatggtagtgggcccc

SEQ ID NO: 584833 - DNA, 120 bp, Artificial Sequence
  ENSG00000172409_4 (sequence is synthesized)
actgatgtgggcaagtctacagtgtgtcgccttctgctcaactacgcagtgcgtttgggccgccgtcccacttatgtggagctggatgtgggccagggttctgtgtccatccctggtacc

SEQ ID NO: 584834 - DNA, 120 bp, Artificial Sequence
  ENSG00000172409_5 (sequence is synthesized)
cattttggttccaccactcctggcactaacatcaagctttataataagattacatctcgtttagcagatgtgttcaaccaaaggtgtgaggtgaaccgaagggcatctgtgagtggctgt

SEQ ID NO: 584835 - DNA, 120 bp, Artificial Sequence
  ENSG00000172409_6 (sequence is synthesized)
gtcattaacacctgtggctgggtcaagggctctggttaccaggctctggtgcatgcagcctcagcttttgaggtggatgtcgttgttgttctggatcaagaacgactgtacaatgaactg

SEQ ID NO: 584836 - DNA, 120 bp, Artificial Sequence
  ENSG00000172409_7 (sequence is synthesized)
aaacgggacctcccccactttgtacgcactgtgctgctccctaaatctgggggtgtggtggagcgctccaaggacttccggcgggaatgtagggatgagcgtatccgtgagtatttttat

SEQ ID NO: 584837 - DNA, 120 bp, Artificial Sequence
  ENSG00000172409_8 (sequence is synthesized)
ggattccgaggctgtttctatccccatgccttcaatgtcaaattttcagatgtgaaaatctacaaagttggggcacccaccatcccagactcctgtttacctttgggcatgtctcaagag

SEQ ID NO: 584838 - DNA, 120 bp, Artificial Sequence
  ENSG00000172409_9 (sequence is synthesized)
gataatcagctcaagctagtacctgtcactcctgggcgagatatggtgcaccacctactgagtgttagcactgccgagggtacagaggagaacctgtccgagacaagtgtagctggcttc

SEQ ID NO: 584839 - DNA, 120 bp, Artificial Sequence
  ENSG00000172409_10 (sequence is synthesized)
attgtggtgaccagtgtggacctggagcatcaggtgtttactgttctgtctccagcccctcgcccactgcctaagaacttccttctcatcatggatatccggttcatggatctgaagtag

SEQ ID NO: 584840 - DNA, 120 bp, Artificial Sequence
  ENSG00000172409_11 (sequence is synthesized)
gtttccggcgtgggtccgggcaagaaccgcttgtagtttggtttaaattctgcacgggaggaccttctgagtttacctgttgggctcctggctgcgcaggcacagcagctacacagaaga

SEQ ID NO: 584841 - DNA, 120 bp, Artificial Sequence
  ENSG00000172409_12 (sequence is synthesized)
agataaaagactgttggggccacctgaccagtaaactgtggactagtagaaagttcatattctacctctaaaaacaggtagtggtaacctgactcttctaatcttgaaccaaaaggaaaa

SEQ ID NO: 584842 - DNA, 120 bp, Artificial Sequence
  ENSG00000172409_13 (sequence is synthesized)
ccatgagactgtaattggtttcttagaccacctaagatgccactttgaattctctaagaccctggagaattgcatttctttcactgtgctactatgtggtttttaaaaaatcaatgcttt

SEQ ID NO: 584843 - DNA, 120 bp, Artificial Sequence
  ENSG00000172409_14 (sequence is synthesized)
atattccatatgtggttcttacccatttatctaggatgaaagtgtgaattagagggactccttccaataaagttcaaacttaaaaaaaatcattttaataaatatttttgccatatcata

SEQ ID NO: 584844 - DNA, 120 bp, Artificial Sequence
  ENSG00000172409_15 (sequence is synthesized)
attcccagtcaagccaaggaaaggctgcacagaaggccagagaatcacaaaggggagtaggggtcattttttcacccatctcggatcacagggagaagcaagttgggcaaatgactggag

SEQ ID NO: 584845 - DNA, 120 bp, Artificial Sequence
  ENSG00000172409_16 (sequence is synthesized)
aaaaaacaaaggcaagccgagtgctggggagagatgttcccctgaagtgagacggggctggaccgtaggagaaaggggagagggagggctggcgggggcaactgacagctgacagcagag

SEQ ID NO: 584846 - DNA, 120 bp, Artificial Sequence
  ENSG00000172409_17 (sequence is synthesized)
aactgcgtttgtttccggcgtgggtccgggcaagaaccgcttgtagtttggtttaaattctgcacgggaggaccttctgagtttacctgttgggctcctggctgcgcagatctgatattt

SEQ ID NO: 584847 - DNA, 120 bp, Artificial Sequence
  ENSG00000172410_0 (sequence is synthesized)
ttaccatatcagattcacattcagtcctcagcaaaatgaagggctccattttcactctgtttttattctctgtcctatttgccatctcagaagtgcggagcaaggagtctgtgagactct

SEQ ID NO: 584848 - DNA, 120 bp, Artificial Sequence
  ENSG00000172410_1 (sequence is synthesized)
gtgggctagaatacatacggacagtcatctatatctgtgctagctccaggtggagaaggcatcaggaggggatccctcaagctcagcaagctgagacaggaaactccttccagctcccac

SEQ ID NO: 584849 - DNA, 120 bp, Artificial Sequence
  ENSG00000172410_2 (sequence is synthesized)
gaagcattcagtgatgtcaagacaagatttacaaactttgtgttgcactgatggctgttccatgactgatttgagtgctctttgctaagacaagagcaaatacccaatgggtggcagagc

SEQ ID NO: 584850 - DNA, 120 bp, Artificial Sequence
  ENSG00000172410_3 (sequence is synthesized)
tttatcacatgtttaattacagtgttttactgcctggtagaacactaatattgtgttattaaaatgatggcttttgggtaggcaaaacttcttttctaaaaggtatagctgagcggttga

SEQ ID NO: 584851 - DNA, 120 bp, Artificial Sequence
  ENSG00000172410_4 (sequence is synthesized)
aaccacagtgatctctattttctccctttgccaaggttaatgaactgttcttttcaaattctactaatgctttgaaatttcaaatgctgcgcaaaattgcaataaaaatgctataaacca

SEQ ID NO: 584852 - DNA, 120 bp, Artificial Sequence
  ENSG00000172421_0 (sequence is synthesized)
tttattggattcctgatctgattgaagcccagaagtggtaggtagcacggcttaaaagtagacagagtcactggccacatggcagtttcagaaattaaaccaaaacttaagctgaatcct

SEQ ID NO: 584853 - DNA, 120 bp, Artificial Sequence
  ENSG00000172421_1 (sequence is synthesized)
ctaacaaaagtacccatctcccacaataaaagggatagagacttaccaggatctcttcaatgccaattacaacacaaagaaaagaagctaagtgcttcacaaatggcagctttccaagat

SEQ ID NO: 584854 - DNA, 120 bp, Artificial Sequence
  ENSG00000172421_2 (sequence is synthesized)
gcctacaacttcttctacaaggacaaaactggctgtattgatttccatggactgatgtgcactgtagctaagctgggaatgaatctgaccaagcatgatgtctataatgaattgaaatgt

SEQ ID NO: 584855 - DNA, 120 bp, Artificial Sequence
  ENSG00000172421_3 (sequence is synthesized)
gctgatattgatcgagatgggaaggtgaacttctcagactttatcaaggttctaacagataagaatctcttcctcaaggcagtggttccagaaaaggagacctgtttagatttggctggc

SEQ ID NO: 584856 - DNA, 120 bp, Artificial Sequence
  ENSG00000172421_4 (sequence is synthesized)
aacccaggaatcctattgtttgaaatcctatcaaggcttctagagacttcagccctacccagaaagtctataatagaaatagtaagctatttccaaagaaaattccagcatactggccca

SEQ ID NO: 584857 - DNA, 120 bp, Artificial Sequence
  ENSG00000172421_5 (sequence is synthesized)
ggaatgttgtggagtccctacactatgggctatggaaaaaggacacttaagccagacatatgcacacctccaagctcaagcatggctgcctttgctaatgctgcccggattgcaataatg

SEQ ID NO: 584858 - DNA, 120 bp, Artificial Sequence
  ENSG00000172421_6 (sequence is synthesized)
gtggatggggtggtgatgggaaagccattcaaagacatgcagaaattagagatgctaagaataaaggagcctttgcatttctttgaggattattttttccataaaagagactggaaaaca

SEQ ID NO: 584859 - DNA, 120 bp, Artificial Sequence
  ENSG00000172421_7 (sequence is synthesized)
caggcagcaaatataaagtctatggaccctgcctcaggttattcaaataacatcttcaccattgatcaaatgctcaagaaaaagcagacttgtacagtggccgatgcaactgctattaaa

SEQ ID NO: 584860 - DNA, 120 bp, Artificial Sequence
  ENSG00000172421_8 (sequence is synthesized)
caacatgtgaagagagctactgatacctataatttaggaattgcccttgaacaccgaaaagagatgctaaacctctggcagaagatccgaggggatttgattgggatggactctagaaat

SEQ ID NO: 584861 - DNA, 120 bp, Artificial Sequence
  ENSG00000172421_9 (sequence is synthesized)
gagtccttttatgacaccttttctacttatacatggtcctggaatgtttgccaagaattactttctcctaaggacttaaggttatatgatgcctatgtgaatagaaattcctcccataac

SEQ ID NO: 584862 - DNA, 120 bp, Artificial Sequence
  ENSG00000172421_10 (sequence is synthesized)
tccagatcctcttcctcatcagataccagtgaatgttacacagactcaggaagaaaaagaaaacggaaaggtttaaagggatttcaacaatgaaatttctacattttctaaacagctcat

SEQ ID NO: 584863 - DNA, 120 bp, Artificial Sequence
  ENSG00000172421_11 (sequence is synthesized)
cacaaactactttttcatagttatcaaaattattgtttcttgcttttgtctaagtacattcttagaagctggaaattttgacatcttttggattctgaccagtaaaaaagtttaagtcat

SEQ ID NO: 584864 - DNA, 120 bp, Artificial Sequence
  ENSG00000172421_12 (sequence is synthesized)
ggccaagggtcaaaacaaaaaaggtggagatttttttggaaaacatgggaactaaaatcaaggatgaggaacttgaggaactcattacccaactaccaactgagggtgagacagcagttg

SEQ ID NO: 584865 - DNA, 120 bp, Artificial Sequence
  ENSG00000172421_13 (sequence is synthesized)
acctgaatgacttaatggatgctgtcagttacatcaagggagaggtgattgatgtccagaacttagacaatttctagcaagcgaagggattgagctcacagaagaagaaatgaaggagtt

SEQ ID NO: 584866 - DNA, 120 bp, Artificial Sequence
  ENSG00000172421_14 (sequence is synthesized)
gatgcctcatttgacatttaacggaaatggaaagattaatgttaattcaataatggagggcctgaagaagtttaaaccaaaaggaatggtgactctgcataagttgaaaactgcaaatga

SEQ ID NO: 584867 - DNA, 120 bp, Artificial Sequence
  ENSG00000172421_15 (sequence is synthesized)
agaagtggtaggtagcacggcttaaaagtaggtaaatatcgtgattttgtaggattctatgctaagtcctttttaaaaaatctattatctatgagaattgaaggtatttttttaaagaaa

SEQ ID NO: 584868 - DNA, 120 bp, Artificial Sequence
  ENSG00000172421_16 (sequence is synthesized)
tgattattttgaggtatggggatgatttcacagcacctttcaaatgcctgaattgttgagccattctggtgttcccagctctgtggcagagtcactggccacatggcagtttcagaaatt

SEQ ID NO: 584869 - DNA, 120 bp, Artificial Sequence
  ENSG00000172421_17 (sequence is synthesized)
cttctttctgctttcatttctgagtaggggttgagagtatgcatttttcattttatgacatccttatctactttttcttgtttctatgaaggagggcaggttaatgtcaatgacctaaca

SEQ ID NO: 584870 - DNA, 120 bp, Artificial Sequence
  ENSG00000172421_18 (sequence is synthesized)
agtgttctacaaaacactgggttcagactcgaagcaaaagaaatcaacgacctgaagactcacatgccagtgactggaaaaaaagtcaatgtcagtaatctggaaactcttctaaataat

SEQ ID NO: 584871 - DNA, 120 bp, Artificial Sequence
  ENSG00000172421_19 (sequence is synthesized)
atagaaatcgaagttgggaaagaggaatatgaggacctactgaaccatctgccagttgatgaaaatgaaatggttgatgtgaatgtggtgatggatgaagcaaaagcttttacaggagaa

SEQ ID NO: 584872 - DNA, 120 bp, Artificial Sequence
  ENSG00000172421_20 (sequence is synthesized)
aaagttaatgtcagtaatctggggaatgagctgaggaaaatggggctcgtactcactgatgaggagcacgagaagctgctgaaaactctgccaattcgcatggaaaggtatataagaata

SEQ ID NO: 584873 - DNA, 120 bp, Artificial Sequence
  ENSG00000172421_21 (sequence is synthesized)
aaggtgtgaaggccctcaacgggccaagggtcaaaacaaaaaaggtggagatttttttggaaaacatgggaactaaaatcaaggatgaggaacttgaggaactcattacccaactaccaa

SEQ ID NO: 584874 - DNA, 88 bp, Artificial Sequence
  ENSG00000172421_22 (sequence is synthesized)
agctgaaaattctaaaaaccagagcacgtcttctcctccaaaggattgcagctcctcaccagcaactattgacagaagtaggcttcag

SEQ ID NO: 584875 - DNA, 120 bp, Artificial Sequence
  ENSG00000172425_0 (sequence is synthesized)
gggattttggagttgagcaccatggggactccaaatgatcaggcagtgctgcaggccatcttcaaccctgacaccccatttggagacattgttggattggacctcggagaggaagcagaa

SEQ ID NO: 584876 - DNA, 120 bp, Artificial Sequence
  ENSG00000172425_1 (sequence is synthesized)
aaggaagaacgagaagaagatgaagttttccctcaagcacagctggaacagtccaaggccctggagctgcagggggtgatggcagcagaggctggggacctcagcacagccctggagagg

SEQ ID NO: 584877 - DNA, 120 bp, Artificial Sequence
  ENSG00000172425_2 (sequence is synthesized)
tttggccaagccatctgcctgctgcctgagagggcttcagcctacaacaaccgtgcccaggcccggcgactccagggagacgtggcaggcgccctggaggatctggaacgcgcggtggag

SEQ ID NO: 584878 - DNA, 120 bp, Artificial Sequence
  ENSG00000172425_3 (sequence is synthesized)
gagctttgtgcagcgcggactcctggcgcggctgcagggccgagacgacgacgcccgcagggacttcgagagggcggcacggctgggcagccccttcgcgcggcgccagctggtgctgct

SEQ ID NO: 584879 - DNA, 120 bp, Artificial Sequence
  ENSG00000172425_4 (sequence is synthesized)
caacccctacgccgcgctgtgcaaccgcatgctggccgacatgatggggcagctgcgccgcccccgtgacagccgctgagcgccgcggacccgggcgtccgcgggcgaggggacgggact

SEQ ID NO: 584880 - DNA, 120 bp, Artificial Sequence
  ENSG00000172425_5 (sequence is synthesized)
gggccctgaaccaataaagccgtcgggcctcaccgactccgcctgctcctgcgtcctgcccgcgcccggagagaagggcactcgggggtactcggcgcgggctggggaccagccgggggg

SEQ ID NO: 584881 - DNA, 120 bp, Artificial Sequence
  ENSG00000172425_6 (sequence is synthesized)
tggtgagccgcggccgcccacctgccgggtaagggcccctcgggcccgtggtcgggcatcgattggccccgcctggcgcagcccccgcccctgcagcggactgcggtgctcatcagacct

SEQ ID NO: 584882 - DNA, 120 bp, Artificial Sequence
  ENSG00000172426_0 (sequence is synthesized)
aggtctccatggaggcggcttctcctagcaactcgacgggcgttgagcggagccgctgacctgatggacgccgacagcctcctgctgtctctggagctggcgtccggcagtgggcagggc

SEQ ID NO: 584883 - DNA, 120 bp, Artificial Sequence
  ENSG00000172426_1 (sequence is synthesized)
ctcagcccggaccgtcgggcctcgctgctcacgtctcttatgctggttaagcgcgactaccgctatgatcgggttctcttctggggccgcatccttggcctcgtcgccgattactacatc

SEQ ID NO: 584884 - DNA, 120 bp, Artificial Sequence
  ENSG00000172426_2 (sequence is synthesized)
gcgcagggcctgagtgaggaccagctcgcaccgcgcaagacgctctatagcctgaactgcacagagtggagcctcttgccccctgccacagaggagatggtggcgcagtcgtctgtggtg

SEQ ID NO: 584885 - DNA, 120 bp, Artificial Sequence
  ENSG00000172426_3 (sequence is synthesized)
aagggccgcttcatgggggacccatcatacgaatatgaacacactgagctgcagaaggtgaatgaaggtgaaaaagtctttgaagaagaaatagtggtccagatcaaggaagagacccgc

SEQ ID NO: 584886 - DNA, 120 bp, Artificial Sequence
  ENSG00000172426_4 (sequence is synthesized)
ttggtgtctgtcattgaccagattgacaaggctgtggccatcatcccccgaggcgccctcttcaagaccccttttggacccacccatgtcaatcggacctttgaaggactgtccttgtct

SEQ ID NO: 584887 - DNA, 120 bp, Artificial Sequence
  ENSG00000172426_5 (sequence is synthesized)
gaggccaagaagctcagctcctacttccatttcagggagcctgttgagctaaagaataagaccttgcttgagaaggctgacctggacccctccctggatttcatggactccttggagcat

SEQ ID NO: 584888 - DNA, 120 bp, Artificial Sequence
  ENSG00000172426_6 (sequence is synthesized)
gacattcccaaagggtcctggagcatccagatggagaggggcaatgccctggtggtgctgcgcagcctgctctggccgggcctcaccttctaccatgctccccgcaccaagaactatggc

SEQ ID NO: 584889 - DNA, 120 bp, Artificial Sequence
  ENSG00000172426_7 (sequence is synthesized)
tacgtctacgtgggcactggcgagaagaacatggacttgcccttcatgctatagaatgggagccagcctggatgtttttaaacagagtctaaacatgattttcttaagcttcagtgaact

SEQ ID NO: 584890 - DNA, 120 bp, Artificial Sequence
  ENSG00000172426_8 (sequence is synthesized)
tggcctgcctgttctgtcctatcttcttaactccacctccgtctggttccagattctgaaaggcccactgagccagggagctcatttctaaaccaagtggcagaggggttggaatgtgct

SEQ ID NO: 584891 - DNA, 120 bp, Artificial Sequence
  ENSG00000172426_9 (sequence is synthesized)
aatgaaagagattctagacaacgatgggtggaaatggctgtgggagaaggtgacaaccagggcccctttgaggaacgcagtttcttggattcacacgagagcggcaagtgtgtcaggcag

SEQ ID NO: 584892 - DNA, 120 bp, Artificial Sequence
  ENSG00000172426_10 (sequence is synthesized)
ccacagtaaggagctcacagctgtcatgaagaggatgggacctgtttggcccatgaattcaattgactcattggccccatcacaagagatcagtgactcaatgctcagcacccagctggc

SEQ ID NO: 584893 - DNA, 120 bp, Artificial Sequence
  ENSG00000172426_11 (sequence is synthesized)
aatgtgcccaggaccccctgcacttcccaagcagtgagcgcacacccaatgggtaagcccatgaacccagtttatgacactgcgttgggcaaaactcctgtccccagcactgagcatggc

SEQ ID NO: 584894 - DNA, 120 bp, Artificial Sequence
  ENSG00000172426_12 (sequence is synthesized)
ctaagccccatagcagctggcaagggacccaactgccctgcctgcctctagctcccagcattgctactgtgcaggccaagggtactgaagttagtcccactgtcccctgtccatgcatgt

SEQ ID NO: 584895 - DNA, 120 bp, Artificial Sequence
  ENSG00000172426_13 (sequence is synthesized)
tggagggaccaggccatcgtggtggggtgggacaggagtatagttgtggccaagggcttgtgagtgggcctcctactccccagcacaggtgcaggaggaactctggaagcactgctctct

SEQ ID NO: 584896 - DNA, 120 bp, Artificial Sequence
  ENSG00000172426_14 (sequence is synthesized)
gtcagtgatacagcttccaaggtgttcttgagtagcagacattgtccctcagaaggggtgaccccacgggcatgcgcaccctgttccagcgggggccttttttgtagatgggcttgacgg

SEQ ID NO: 584897 - DNA, 120 bp, Artificial Sequence
  ENSG00000172426_15 (sequence is synthesized)
agccaggagcccagcgcgtcaggtacctgtggagggagaacaaagaggtgcctgtgagggctgggggcccaagctggacgtgggagagtggagcactacctcctcaggccaggccacggt

SEQ ID NO: 584898 - DNA, 120 bp, Artificial Sequence
  ENSG00000172426_16 (sequence is synthesized)
tgggcaagcaaatcctttcaccagtttccctttcctgaagtgcagggattttcctgggagtaactgctgagcgtcctgtaaacagatgggctgggctcttgctgccgcaagcctgtgtgg

SEQ ID NO: 584899 - DNA, 120 bp, Artificial Sequence
  ENSG00000172426_17 (sequence is synthesized)
ccaggttcaggcagcccagggccacaagctcccttgatctttgtaaatgtcaatgttggtgtgtgtttgctgaggaaaaggtggcgaagaggctgcctgaagagcagatcattcctctct

SEQ ID NO: 584900 - DNA, 120 bp, Artificial Sequence
  ENSG00000172426_18 (sequence is synthesized)
ggcctcagccatggggcgagaagagctgatgtaaggctctggaggaacccattgctcttccccatttggctcactcagctaccccaaccttcagggaactccccagggtactataactgg

SEQ ID NO: 584901 - DNA, 120 bp, Artificial Sequence
  ENSG00000172426_19 (sequence is synthesized)
tataagacccctgcccctcacccaacctgtgatgggaatcaaggggtaagggcccgtgggcgcagccctagcctaggaaggttcctgtaaataggaggggggtggggaaagatggctgcc

SEQ ID NO: 584902 - DNA, 120 bp, Artificial Sequence
  ENSG00000172426_20 (sequence is synthesized)
gcccatggacctttggcctcctttggggatggccagggccctgatagttcccagaaaagtggctcatgccggctaggattgggttttactctgtccagaataaaacttggatcctgtcca

SEQ ID NO: 584903 - DNA, 120 bp, Artificial Sequence
  ENSG00000172428_0 (sequence is synthesized)
ctagagcgccgcggccccgagatgaagccggcggtggacgagatgttccccgagggcgccgggccctacgtggacctggacgaggcgggaggcagcaccgggctcttgatggacttggca

SEQ ID NO: 584904 - DNA, 120 bp, Artificial Sequence
  ENSG00000172428_1 (sequence is synthesized)
atgatgacatccagtgagatgccctctggctgcaggcggggccaagcccttggtacagagccgcagtgtgagcctgcgcaggacagtttcaggtggttttaaagaacacgtggaaatccc

SEQ ID NO: 584905 - DNA, 120 bp, Artificial Sequence
  ENSG00000172428_2 (sequence is synthesized)
ttgaatttaggacctggttaaccagaaagataagactgttcttaacgacctagatgattctgttcatctctgaacgggatcaggttttgtcctcactccaattaaaagaaagcaatgtca

SEQ ID NO: 584906 - DNA, 120 bp, Artificial Sequence
  ENSG00000172428_3 (sequence is synthesized)
atgtggcgcgcgccggaagcggctctgaggccggaagtgagcctagagcgccgcggccccgagatgaagccggcggtggacgagatgttccccgagggcgccgggccctacgtggacctg

SEQ ID NO: 584907 - DNA, 120 bp, Artificial Sequence
  ENSG00000172428_4 (sequence is synthesized)
gacgaggtggcacgggcccggcgggagtctccgagcgcgggaggcagcaccgggctcttgatggacttggcagccaatgaaaaggccgttcatgcagacttttttaacgattttgaagat

SEQ ID NO: 584908 - DNA, 120 bp, Artificial Sequence
  ENSG00000172428_5 (sequence is synthesized)
ctttttgatgatgatgacatccacagctcaggactgcccaggacaagccagcagtcctccatggttcccgcactgcagcgagggcagtcggagcacggggtccgtgggaaggcagcagag

SEQ ID NO: 584909 - DNA, 120 bp, Artificial Sequence
  ENSG00000172428_6 (sequence is synthesized)
agagaagtggcagctttggacagagcgtttgggagcacaggccatgggcagggggcggaggcgctaatgtttaccagatgcagagaacatccgctgtgtggcaccaacaaagcaacaagt

SEQ ID NO: 584910 - DNA, 120 bp, Artificial Sequence
  ENSG00000172428_7 (sequence is synthesized)
gaggggaaaatgggcacaggacgcttaagaaacagtttacggaagaaccaatccaagtggctgggaagttatctagaggtgctcagaaccacaagaagcaggcgagaggtcagcgaagac

SEQ ID NO: 584911 - DNA, 120 bp, Artificial Sequence
  ENSG00000172428_8 (sequence is synthesized)
agcacaatatcagtttctactcactggaggggtaaatgttttaagagtgatgaaacaccatccgttgctggtggagaagaagggaagaagaccacacagccatgcatagatgtgaggtag

SEQ ID NO: 584912 - DNA, 120 bp, Artificial Sequence
  ENSG00000172428_9 (sequence is synthesized)
cacagagaagtagtggtgcttaggtcagtggtaggtttcttttttaaaggcagacaggaatcaaggaacagaagcccttgagagaccttaaaaatcattcctttgaattcctccccctcc

SEQ ID NO: 584913 - DNA, 120 bp, Artificial Sequence
  ENSG00000172428_10 (sequence is synthesized)
ccccaatacacattcctgtgtctggaactaaaatgttgactccaacttgagcctgtttcccctcacccatcttctttttttgtgggggtagtggccctgcaatgcacttatcacctgttc

SEQ ID NO: 584914 - DNA, 120 bp, Artificial Sequence
  ENSG00000172428_11 (sequence is synthesized)
gagcggaagggcggcgtcctggtgcgcgggtcccggggaggggaggccgggcgggtgggcgatgggcgcggctcccaggctccctgccccgcggagagcaaatcccggtttctccgagca

SEQ ID NO: 584915 - DNA, 120 bp, Artificial Sequence
  ENSG00000172428_12 (sequence is synthesized)
agcacctggtgaaaggcggcgaccgaccgcggcgggaagcgtgtgccctagcccgggggaccaggaggcgcagcctgagggttgagtgcctgctgggtgcccccacggcccccgggaaca

SEQ ID NO: 584916 - DNA, 120 bp, Artificial Sequence
  ENSG00000172428_13 (sequence is synthesized)
ctccccgccgcggtgcgaggggccccgtgtgccgcgcacccttccacccgtgttttgctgtttttttgactctgggcgtcccaggggtgcagcggccgtggggccctggtttgctttcac

SEQ ID NO: 584917 - DNA, 120 bp, Artificial Sequence
  ENSG00000172428_14 (sequence is synthesized)
ctcttcatctgctcactggccgcgagtgtgtcttcttcagacaaacgtctgaaggtcaagccctgggctcctgtgaacccggccgtctttgcggcagagtctgaggctccttctttattc

SEQ ID NO: 584918 - DNA, 120 bp, Artificial Sequence
  ENSG00000172428_15 (sequence is synthesized)
cctctggtcggaggcgtgctctgcaggcactgctcccattgctggcagccttttctccccgtggccgcccggccgcccatcagaggcgttgcagacgcccgccctcgccagcgcaaagac

SEQ ID NO: 584919 - DNA, 80 bp, Artificial Sequence
  ENSG00000172432_0 (sequence is synthesized)
actctgctcaggccggccggacacggcagtggcagtaagggcggcggcgacggcggcggcggtcgggggaggggccgggc

SEQ ID NO: 584920 - DNA, 120 bp, Artificial Sequence
  ENSG00000172432_1 (sequence is synthesized)
gagctgttcggcggctgctgccggcccggagggggcccggccgtgggcggaaccctcaaggctaggggggccggcagcagcagcggctgcggggggccaaagggaaagaagaagaacgga

SEQ ID NO: 584921 - DNA, 120 bp, Artificial Sequence
  ENSG00000172432_2 (sequence is synthesized)
aggaacagagggggcaaagccaacaaccccccgtatttgccccccgaggctgaagatggaaacattgaatataaattgaagctggtgaatccatcccagtaccgctttgagcacctggtg

SEQ ID NO: 584922 - DNA, 120 bp, Artificial Sequence
  ENSG00000172432_3 (sequence is synthesized)
acacaaatgaagtggcggctccaggagggacgtggtgaggccgtctaccagattggggtagaggacaatgggctgctggtggggctggctgaggaggaaatgcgagcttcgctcaagacc

SEQ ID NO: 584923 - DNA, 120 bp, Artificial Sequence
  ENSG00000172432_4 (sequence is synthesized)
ctgcaccggatggcagagaaggttggggcagacataaccgttcttcgagagcgagaagtggattatgatagcgacatgccccggaagatcaccgaggtgctagtacgaaaggtccctgac

SEQ ID NO: 584924 - DNA, 120 bp, Artificial Sequence
  ENSG00000172432_5 (sequence is synthesized)
aaccaacagttcctagacctccgtgtggccgtcctggggaatgtggactctgggaagtcaactctgcttggagtcctgacccagggagagctggacaatgggcggggccgggctcggctc

SEQ ID NO: 584925 - DNA, 120 bp, Artificial Sequence
  ENSG00000172432_6 (sequence is synthesized)
aaccttttccgccacctgcatgagattcagtctggccgaacctccagcatcagcttcgagatcctgggctttaacagcaagggagaggtggtgaattacagcgactcacggacagcagaa

SEQ ID NO: 584926 - DNA, 120 bp, Artificial Sequence
  ENSG00000172432_7 (sequence is synthesized)
gagatctgtgagagcagctccaagatgatcaccttcatcgacctggcaggccaccataagtacctacacaccaccatctttggcctcacatcatactgccccgactgcgccctgctcctc

SEQ ID NO: 584927 - DNA, 120 bp, Artificial Sequence
  ENSG00000172432_8 (sequence is synthesized)
gtcagtgccaacactgggattgctggcaccacaagggaacatctggggctggccctggccctgaaagtgcccttcttcatcgtggtcagcaagatcgacctatgtgccaagaccacagtg

SEQ ID NO: 584928 - DNA, 120 bp, Artificial Sequence
  ENSG00000172432_9 (sequence is synthesized)
gagaggacagtacgccagctggagcgggtcctcaagcagcctggctgccacaaggtccccatgctggtcacctctgaggatgatgccgtcactgctgcccagcagtttgctcagtcaccc

SEQ ID NO: 584929 - DNA, 120 bp, Artificial Sequence
  ENSG00000172432_10 (sequence is synthesized)
aatgtcacccccatcttcacattgtccagtgtgtctggagagagtctggacctcctcaaagtctttctgaatattctgccgccactcaccaacagcaaagagcaggaggaactcatgcag

SEQ ID NO: 584930 - DNA, 120 bp, Artificial Sequence
  ENSG00000172432_11 (sequence is synthesized)
cagctgacggagttccaggtggatgaaatctacacagtaccagaggtggggactgttgttggaggaacactttccagtgggatttgccgtgagggggaccagctggtggtgggccccacg

SEQ ID NO: 584931 - DNA, 120 bp, Artificial Sequence
  ENSG00000172432_12 (sequence is synthesized)
gcagcatccagcgcaaccgctctgcctgtcgtgtgctgcgagctggtcaggctgctacactggcgcttggggactttgaccgtgcactgcttcgcaagggcatggtgatggtgagcccgg

SEQ ID NO: 584932 - DNA, 120 bp, Artificial Sequence
  ENSG00000172432_13 (sequence is synthesized)
agatgaatcctaccatctgctcggtgtttgaggcagagatagtcttactgttccatgccaccaccttccgacgaggattccaggtgacagtacacgtgggcaacgtacgtcagacggcag

SEQ ID NO: 584933 - DNA, 120 bp, Artificial Sequence
  ENSG00000172432_14 (sequence is synthesized)
tggtggaaaagatccatgccaaggacaaactgcggacaggcgagaaggcagtggtacgtttccgcttcctgaaacacccagagtacctgaaggtgggcgccaaactgctgttccgggagg

SEQ ID NO: 584934 - DNA, 120 bp, Artificial Sequence
  ENSG00000172432_15 (sequence is synthesized)
gtgtcaccaagggcatcggccatgtcactgatgtacaagccattacagcaggagaagcccaggccaacatgggcttctgaacccttcaggcagggacagttctattgctgtccctacaat

SEQ ID NO: 584935 - DNA, 120 bp, Artificial Sequence
  ENSG00000172432_16 (sequence is synthesized)
atataaggtgacttctggccatgctgccctgccattggcggctctgtgtgttaataggctagggagagaggggtgctgtctgccacttgctccctgccaactttctggagaggtgccaaa

SEQ ID NO: 584936 - DNA, 120 bp, Artificial Sequence
  ENSG00000172432_17 (sequence is synthesized)
cttggtgtggccaggaaagggcagtcctgagggagaagacaggattcagggcagtgctccgaagctgtgtgctcacctggttggctcatcaaacctggcaaccctgtggcctgtctgccg

SEQ ID NO: 584937 - DNA, 120 bp, Artificial Sequence
  ENSG00000172432_18 (sequence is synthesized)
gagctgactggatccactcatcaattcttcgtccccactactaagactgggcatgttttgctggtgtggtctctgcacttcaggaatggtcacaacagggggtagccctcaaaagcactc

SEQ ID NO: 584938 - DNA, 120 bp, Artificial Sequence
  ENSG00000172432_19 (sequence is synthesized)
ctttttctatacctcttctcaaggccatgtaagttgcccatctctacctggctgtggacaaaaggttatctgctcttggccatctggtggtggtggcggcccagagtctgaagaaatggc

SEQ ID NO: 584939 - DNA, 120 bp, Artificial Sequence
  ENSG00000172432_20 (sequence is synthesized)
acagggacagtgaatggtagtgttgccaccctgtgctgaggcctgaggcctcttcctcagctttatctccctttccttcactcaagggccatttccccagtccctatctcccccatcccc

SEQ ID NO: 584940 - DNA, 120 bp, Artificial Sequence
  ENSG00000172432_21 (sequence is synthesized)
tcccggcttataggccccacaggtgctatttgttgtgctggcccaggcgtggggctaccaagcaaaggcttggcatataccaaaggccagctgcatgcccatcagtctggtctttttcct

SEQ ID NO: 584941 - DNA, 120 bp, Artificial Sequence
  ENSG00000172432_22 (sequence is synthesized)
ctgcggtcatgttggctttcatgctggatcaaatgttttactttcccagactggtggcatctgagttccccatcctaccactctcaccccactttcctgccccacctaaaccctcgtttt

SEQ ID NO: 584942 - DNA, 120 bp, Artificial Sequence
  ENSG00000172432_23 (sequence is synthesized)
agtaatttgtagtgactgttcccttccctctgttgcagggaaccaggaggaaagggaaagatgttgccatatttcctactctttaggcatggactctcctttccctttgttagtgtcctg

SEQ ID NO: 584943 - DNA, 120 bp, Artificial Sequence
  ENSG00000172432_24 (sequence is synthesized)
ggttcccatggactcagggatttgttggctaaggtttctctgtgcatatatatatatatacatatgtatatatatttaaatacacatatatattgtacagaataaaaatgttttattgaa

SEQ ID NO: 584944 - DNA, 120 bp, Artificial Sequence
  ENSG00000172432_25 (sequence is synthesized)
gtggatgaaatctacacagtaccagaggtggggactgttgttggaggaacactttccagattaggctttcactatcagaagagctggagaacggtagtctgttggctttggagggaagaa

SEQ ID NO: 584945 - DNA, 120 bp, Artificial Sequence
  ENSG00000172432_26 (sequence is synthesized)
acagtattgctgcctattggggaatctccaggcccctgagagagaagtgtgggtcttgagctccaggaagaaaactagagtgtattcaactgacttcatctcacacagggaaatgagaga

SEQ ID NO: 584946 - DNA, 61 bp, Artificial Sequence
  ENSG00000172432_27 (sequence is synthesized)
gggttccagcaattctcctgcctcagccttgagtagctggagtcaccatattggccaggct

SEQ ID NO: 584947 - DNA, 90 bp, Artificial Sequence
  ENSG00000172432_28 (sequence is synthesized)
acgcggctggcctaagactctgcaaagcagagaatgaaacccaaggggataacttgctccttcagtgattaggtgttcggtgttgttaaa

SEQ ID NO: 584948 - DNA, 120 bp, Artificial Sequence
  ENSG00000172432_29 (sequence is synthesized)
aacttgctccttcagtgattaggtgttcggtgttgttaaaccagcaagtgtctctctgtccaccatcactgctggccttttatgaaattagtcttctgattctgaactctggcagtgagc

SEQ ID NO: 584949 - DNA, 120 bp, Artificial Sequence
  ENSG00000172432_30 (sequence is synthesized)
aatgccctgaggggactgtgaacaagctctgcccctcttaggaaatcaatggggaatcaactaaattaaataaaaaatggggtcaagattaagaggcagggtcacccagggaatggttta

SEQ ID NO: 584950 - DNA, 120 bp, Artificial Sequence
  ENSG00000172432_31 (sequence is synthesized)
tccgtagttcaagtgagcagaatactgaggcctttcacgtgaaataggtagctaccctgtatttgaagagttggccacttgctagtggtcagaatagtaaggagcccacttctgtgccct

SEQ ID NO: 584951 - DNA, 120 bp, Artificial Sequence
  ENSG00000172432_32 (sequence is synthesized)
ggcagagatacagtgccagctacttaaagaagagtagaatttagagacaaaaggtaaagagcagctgatatgtaaattgcaaagcccaccccaggaataaagaaagaaaatcttacatca

SEQ ID NO: 584952 - DNA, 120 bp, Artificial Sequence
  ENSG00000172432_33 (sequence is synthesized)
ttctccagaggtcagaaaagagggaggcctgccccagactggcagagaactccttgatcccacaatgggaataaaaccccacttagggtgggtagcggcctgataggcctctggagggtg

SEQ ID NO: 584953 - DNA, 120 bp, Artificial Sequence
  ENSG00000172432_34 (sequence is synthesized)
cccagggaggaggggcacgggaggagaacacctctttcaggtcccgggaccccagggaggaagggcagagactggactctcaggctgaagatggaaacattgaatataaattgaagctgg

SEQ ID NO: 584954 - DNA, 120 bp, Artificial Sequence
  ENSG00000172456_0 (sequence is synthesized)
ggcttctccaacccggcccggcccttccttcccctttcccgcagtcgttgcctcctcctcccctgcctcctcctccccttcctcctcctggccgcttagtctcacacccgccgggccgtt

SEQ ID NO: 584955 - DNA, 120 bp, Artificial Sequence
  ENSG00000172456_1 (sequence is synthesized)
gttcccgagacgttgttgagtcccctgtgtcctcttctgggtggaggaactgcaatgtctggtggagaacagaaaccagagaggtactatgtgggtgtggacgttggaacaggcagtgtc

SEQ ID NO: 584956 - DNA, 120 bp, Artificial Sequence
  ENSG00000172456_2 (sequence is synthesized)
cgtgcagctctggtggaccagagtggggtcctgttggcttttgcagaccagccaattaagaattgggagccccagttcaaccaccatgagcagtcctccgaggacatctgggctgcgtgc

SEQ ID NO: 584957 - DNA, 120 bp, Artificial Sequence
  ENSG00000172456_3 (sequence is synthesized)
tgtgttgtcacaaagaaagttgtacaagggattgatttaaaccaaattcgaggacttgggtttgatgccacgtgttctctggttgttttggataagcagtttcacccattaccagtcaac

SEQ ID NO: 584958 - DNA, 120 bp, Artificial Sequence
  ENSG00000172456_4 (sequence is synthesized)
caggaaggggattcccatcgaaacgtcatcatgtggctggaccatcgagcagtcagtcaagttaacaggatcaatgagaccaagcacagtgtcctccagtacgtcgggggggtgatgtct

SEQ ID NO: 584959 - DNA, 120 bp, Artificial Sequence
  ENSG00000172456_5 (sequence is synthesized)
gtggaaatgcaggccccgaaacttctgtggctgaaagagaacttgagagagatttgctgggataaggcgggacatttctttgatctcccggacttcttatcgtggaaggcaacaggtgtc

SEQ ID NO: 584960 - DNA, 120 bp, Artificial Sequence
  ENSG00000172456_6 (sequence is synthesized)
acagcacggtctctctgctccctggtgtgtaagtggacatattcagcagagaaaggctgggacgacagtttctggaaaatgattggtttggaagactttgttgcagataattacagcaaa

SEQ ID NO: 584961 - DNA, 120 bp, Artificial Sequence
  ENSG00000172456_7 (sequence is synthesized)
ataggaaaccaagtgctacctcctggagcttctcttggaaatgggctcacaccagaggcagcaagagaccttggccttctccctgggattgcggtcgcagcttcactcattgatgcccat

SEQ ID NO: 584962 - DNA, 120 bp, Artificial Sequence
  ENSG00000172456_8 (sequence is synthesized)
ggggcagccagtgacgtcacggctggctgtcatctgtggaacgtcttcttgtcacatggggatcagcaaagacccgatttttgtaccaggcgtctgggggccttatttctcagccatggt

SEQ ID NO: 584963 - DNA, 120 bp, Artificial Sequence
  ENSG00000172456_9 (sequence is synthesized)
acctgggttctggctgaatgaaggtggtcagagcgttactggaaaattgatagaccacatggtacaaggccatgctgcttttccagaactacaagtaaaggccacagccagatgccagag

SEQ ID NO: 584964 - DNA, 120 bp, Artificial Sequence
  ENSG00000172456_10 (sequence is synthesized)
tatatatgcatatttgaacagtcacctggatctgattaagaaggctcagcctgtgggtttccttactgttgatttacatgtttggccagatttccatggcaaccggtctcccttagcaga

SEQ ID NO: 584965 - DNA, 120 bp, Artificial Sequence
  ENSG00000172456_11 (sequence is synthesized)
tctgacactaaagggcatggtcaccggattgaaactgtctcaggaccttgatgatcttgccattctctacctggccacagttcaagccattgctttggggactcgcttcattatagaagc

SEQ ID NO: 584966 - DNA, 120 bp, Artificial Sequence
  ENSG00000172456_12 (sequence is synthesized)
catggaggcagcagggcactcaatcagtactcttttcctatgtggaggcctcagcaagaatcccctttttgtgcaaatgcatgcggacattactggcatgcctgtggtcctgtcgcaaga

SEQ ID NO: 584967 - DNA, 120 bp, Artificial Sequence
  ENSG00000172456_13 (sequence is synthesized)
ggtggagtccgttcttgtgggtgctgctgttctgggtgcctgtgcctcaggggatttcgcttctgtacaggaagcaatggcaaaaatgagcaaagttgggaaagttgtgttcccgagact

SEQ ID NO: 584968 - DNA, 120 bp, Artificial Sequence
  ENSG00000172456_14 (sequence is synthesized)
acaggataaaaaatactatgataagaaataccaagtattcctgaagctggttgaacaccagaaggagtatttggcgatcatgaatgatgactgaacagggcttgcaggtgctgatgccag

SEQ ID NO: 584969 - DNA, 120 bp, Artificial Sequence
  ENSG00000172456_15 (sequence is synthesized)
aagcttctgtgccattgcattaaagacttgtcatttgatccatgttcaagacccttgaggtattgtttcatcatttctgtattgtctttcaataaagaaaacaaacatgtgcaaccagaa

SEQ ID NO: 584970 - DNA, 120 bp, Artificial Sequence
  ENSG00000172456_16 (sequence is synthesized)
gtcaccggattgaaactgtctcaggaccttgatgatcttgccattctctacctggccacagttcaagccattgctgaagcaatggcaaaaatgagcaaagttgggaaagttgtgttcccg

SEQ ID NO: 584971 - DNA, 120 bp, Artificial Sequence
  ENSG00000172456_17 (sequence is synthesized)
agactacaggataaaaaactatttcctgtatgatatcctatgggaagccagaggtgttgtaatccagaaacacccattgttcaccaggactgcaggacacatgctttcagaattcaaggg

SEQ ID NO: 584972 - DNA, 120 bp, Artificial Sequence
  ENSG00000172456_18 (sequence is synthesized)
aagaatttaaaatgaaggacatcgttgctaaacaagaaactaatgactgagtggagctgtgtaatgtaattatacttaagatgggacttctgacgaattacagaagaatctttgtgctgt

SEQ ID NO: 584973 - DNA, 120 bp, Artificial Sequence
  ENSG00000172456_19 (sequence is synthesized)
ctcatgtctccataaatacacttaactgctattgacagtaatagaagggagtcttgaatatgaaaagctttttttatccttttatgatttctagagggaaaacttaaaagaacaattatg

SEQ ID NO: 584974 - DNA, 120 bp, Artificial Sequence
  ENSG00000172456_20 (sequence is synthesized)
tttttaaaaaagatgtttctcccagtacttctgaatatttgacaatcctataaaatttgtaaaactaaagtaactttaaaagcaaagacttctgctaataaatcccgacttctcagttta

SEQ ID NO: 584975 - DNA, 120 bp, Artificial Sequence
  ENSG00000172456_21 (sequence is synthesized)
gaatagcagggcacagtccgattcatctcagtattccctcggccagcagagcgcttaataaacatcagtggatctgaacttgaatcaaatggcaggtagcagcttgcagaagcctgaaaa

SEQ ID NO: 584976 - DNA, 120 bp, Artificial Sequence
  ENSG00000172456_22 (sequence is synthesized)
gaggggggaaattttgcatgatcgcatggagaatggattttgttgctttatctgatattgtcctcagctcctcctgaatttgccgagatcttacagcagtcagtaaggtggaggaactgc

SEQ ID NO: 584977 - DNA, 120 bp, Artificial Sequence
  ENSG00000172456_23 (sequence is synthesized)
aagatgtccggctgaagttcttaaccattaccttacactaatcaacagcaacaataataataaccacctttctaggatgcaaattatgttccaagaactttcattatttcattacatctg

SEQ ID NO: 584978 - DNA, 120 bp, Artificial Sequence
  ENSG00000172456_24 (sequence is synthesized)
catagccccaagagtaaataatatcctgttctattgaagaagaaactgaggtcccaagacatgaaattacttgctcaaggtcacacactgccctcaactctgtgatgtcaaaattccctt

SEQ ID NO: 584979 - DNA, 120 bp, Artificial Sequence
  ENSG00000172456_25 (sequence is synthesized)
ctccataggtaacagatcctatctggctacttttcattattaaggagaatggagatgtctcggattttttgtgcacaaattgtcctcagaaccaaacaaaataaccagcataggagagaa

SEQ ID NO: 584980 - DNA, 120 bp, Artificial Sequence
  ENSG00000172456_26 (sequence is synthesized)
ttcacaaagtaagagactcataaagtaaaatgttttgctttactttttgcctttttcatcctgctttgtttttcaacatgtgtaaatcattctgttactataaacttaataaagaagtaa

SEQ ID NO: 584981 - DNA, 120 bp, Artificial Sequence
  ENSG00000172456_27 (sequence is synthesized)
aagagcaaagaccaaaaatgtaataatgaaataaagtttttatcagttataattttttggcatgatcaggttatctttggtgtacacttcagggttttgtatttcaaacacaactcttct

SEQ ID NO: 584982 - DNA, 120 bp, Artificial Sequence
  ENSG00000172456_28 (sequence is synthesized)
taaaacttttcatgtgtcccagatgtgacctagtttccttctgggaaatgaatgctgagtgttgtacagacaagtcaaacagacatagctattttaggagtcattaatgtagtgcttata

SEQ ID NO: 584983 - DNA, 120 bp, Artificial Sequence
  ENSG00000172456_29 (sequence is synthesized)
gaaaccaaatatgtaaacccacctggccaggaaaacctttattgagtatatactttgtgctgagtgatattccaggctccagaaatgaaaatacaaagggcaaggcccaatcttgaagag

SEQ ID NO: 584984 - DNA, 120 bp, Artificial Sequence
  ENSG00000172456_30 (sequence is synthesized)
ctcatgaactagtaaaagagaacaacaaacatgttacaaggcaaaaacaaattacaaatgtaaataataaagccaaagcataatatgtacaataatggaagcctgaaaaaggtaaagaag

SEQ ID NO: 584985 - DNA, 120 bp, Artificial Sequence
  ENSG00000172456_31 (sequence is synthesized)
tattacataaaatggagccatttgttctgtcttaggagagctcaaaaaagccttcacagaaaaggtagaatccaagcaaattcaaaagtttaaagtccagtttggaaattttctttcaat

SEQ ID NO: 584986 - DNA, 120 bp, Artificial Sequence
  ENSG00000172456_32 (sequence is synthesized)
atgtttctgctctcttcgtgtatttttaaaattaaggtaaaattcagataacataaaatccacccttttagtcattttaaagtgtacaattttttagtacattttaaagtgtacaattca

SEQ ID NO: 584987 - DNA, 120 bp, Artificial Sequence
  ENSG00000172456_33 (sequence is synthesized)
gtggtgtttagtacactcacaatgttttgcaaccattaccactacctaattctagaatatctttatcatccaaaaagaaaccctgtgcccattgagtagtcactggcctttccatttacc

SEQ ID NO: 584988 - DNA, 120 bp, Artificial Sequence
  ENSG00000172456_34 (sequence is synthesized)
ccaactcctccagcacgcgacaaccactaatttgctttctgtctctatgcctcttctggacactttatataaatacaaccatacaatatgtaggcatttgtgtctggcttctttcagtta

SEQ ID NO: 584989 - DNA, 120 bp, Artificial Sequence
  ENSG00000172456_35 (sequence is synthesized)
gcataatatttttgaggttcttccttgttatagcatgaatcagtactttattccttttcatagatgaataacatcccattgtatgtatatgccacatcttgttaatctgtttatcaattg

SEQ ID NO: 584990 - DNA, 120 bp, Artificial Sequence
  ENSG00000172456_36 (sequence is synthesized)
gaggacagtgggttgtttctacattttagctattgagaatagggctgcctccatatttgtgtacaagatttgtctgaactcttcttttcaattatcttaactatatacctaatgatatgg

SEQ ID NO: 584991 - DNA, 120 bp, Artificial Sequence
  ENSG00000172456_37 (sequence is synthesized)
cccaaacctcatcttgaattgtagctcctataatccccatgtgttgtgggagggacctggtggcaggtaattgaatcccggtgtctggtttttcctgttctgttcttgtgacagtgaata

SEQ ID NO: 584992 - DNA, 120 bp, Artificial Sequence
  ENSG00000172456_38 (sequence is synthesized)
cttgtgacagtgaataagtctcatgaggtctgatggttttataatgggcagttctgcaaatgctgtctttcctgccaccatgtaagacgtgcctttgctcctccttcaccttccgccatg

SEQ ID NO: 584993 - DNA, 120 bp, Artificial Sequence
  ENSG00000172456_39 (sequence is synthesized)
tgtaagacgtgcctttgctcctccttcaccttccgccatgattgtgaggtcttcccagccatgggaactgtgagtccattaaacctctttttatttataaattacccagtcttgggtatt

SEQ ID NO: 584994 - DNA, 120 bp, Artificial Sequence
  ENSG00000172456_40 (sequence is synthesized)
tagcattgttgggtcttatgataacactaggtttaacttttcgaggaaccaccaaactattttttttcacgttggctgcaccattttacattcccaccagccatatatgaacgttccaat

SEQ ID NO: 584995 - DNA, 120 bp, Artificial Sequence
  ENSG00000172456_41 (sequence is synthesized)
ttctccacacctcaccaatattcatcacattctgttttgttttgttttgtattgttttgttttgtttactttttcccatcctagcgagtgtgaagtatctcattgtggttttcctttgta

SEQ ID NO: 584996 - DNA, 120 bp, Artificial Sequence
  ENSG00000172456_42 (sequence is synthesized)
tttccctaatgactgatgatgctgactatctttttatgtgcttactggccatctgtatattttccttagagaaatgactattcagatcccttgcccatttttgaattaggttgtcttttg

SEQ ID NO: 584997 - DNA, 120 bp, Artificial Sequence
  ENSG00000172456_43 (sequence is synthesized)
ttatcgaattgtaagagttctgtataaattctggatataagtctcatcagatctataataggcaaatattttctcccattctgtaagttgtctatttttttgataaatcacccactccag

SEQ ID NO: 584998 - DNA, 120 bp, Artificial Sequence
  ENSG00000172456_44 (sequence is synthesized)
tgacatagccaccatgtgctcacacacgcctcatcaggggcccaagcaccagcccattccagggtccactgccagtgaccctgttcattccagcagctgagtcactacacacctcaccca

SEQ ID NO: 584999 - DNA, 120 bp, Artificial Sequence
  ENSG00000172456_45 (sequence is synthesized)
gaggccagaggactggcccacccaaggcctgccactggtggcaacctcacccactccagtggccaagccactgaacatctgtgcaacacccaagacctaaggactggccgactcagagtc

SEQ ID NO: 585000 - DNA, 120 bp, Artificial Sequence
  ENSG00000172456_46 (sequence is synthesized)
tgacacctctggaaacctcacccactcagaaacagagctaccaaaggcctatagccctctcaggggccacagatctggcccactgggggcccactacactttgcaaagctgcaccatagc

SEQ ID NO: 585001 - DNA, 120 bp, Artificial Sequence
  ENSG00000172456_47 (sequence is synthesized)
ctccacaaactcttgcagcctaggccgctgaggcacttgcagacactgctaacattgaatacaccaaacagaatcacacagagactacactattgcacccacctggacccaaagccaaaa

SEQ ID NO: 585002 - DNA, 120 bp, Artificial Sequence
  ENSG00000172456_48 (sequence is synthesized)
cactacccaaccaacactaaaggacaaatctacaggaaaaattatttctttatgaaagttgctcaataaaatgagacaagacaactgctacaccagatgtgcagatatcaacataaggac

SEQ ID NO: 585003 - DNA, 120 bp, Artificial Sequence
  ENSG00000172456_49 (sequence is synthesized)
acaagatgtatgcaaaagcaaggaaacctgacacctccaaaggaacataataattttccagtagcagactccaaaaaagaaaatctatgaaatgcctaaaaatgaactcaaaataattat

SEQ ID NO: 585004 - DNA, 120 bp, Artificial Sequence
  ENSG00000172456_50 (sequence is synthesized)
cttaaaaaaactcagtgagatataagagaatacaaatagaccattcaatgaattcgggaaaacaattatcatcagaataagaaattcaacagagataggtactataaaatggaaccaaac

SEQ ID NO: 585005 - DNA, 120 bp, Artificial Sequence
  ENSG00000172456_51 (sequence is synthesized)
ggccgcgctttacaggggccgcgctttacaggggccgcgctttacaggggccgcgctttacaggggccgcgctttacaggggccgcgctttacaggggccgcgctttacaggggccgcgc

SEQ ID NO: 585006 - DNA, 120 bp, Artificial Sequence
  ENSG00000172456_52 (sequence is synthesized)
tttacaggggccgcgccggcgggggcgggatcgcgcgcaaggcggggctgtagccgccccgggaccgccctgctcaggcgccgtggggttcggcgcggctacgtgcagaatccgtctagc

SEQ ID NO: 585007 - DNA, 120 bp, Artificial Sequence
  ENSG00000172456_53 (sequence is synthesized)
ggtaacagatcctatctggctacttttcattattaaggaacctgtcttaaatcctccaaggtgtcattcatttagttatttgacactaagcccctaagtgaaattataactatggctaaa

SEQ ID NO: 585008 - DNA, 120 bp, Artificial Sequence
  ENSG00000172456_54 (sequence is synthesized)
acttgtccacacttaaacaccatgctttcccattctgagtgatggcaccctcatccccacccaaagctactgtgggtgctactgccttacagagtatactgtggtgtgctgcctggatat

SEQ ID NO: 585009 - DNA, 120 bp, Artificial Sequence
  ENSG00000172456_55 (sequence is synthesized)
ttccagcatcttggagtgctttcagcagacagccatcagccatcagccttctttgtgaattgcctaggctgccacgtcacctctctagggcagcccacatgcaatgaatgatttgtcaac

SEQ ID NO: 585010 - DNA, 120 bp, Artificial Sequence
  ENSG00000172456_56 (sequence is synthesized)
atggaagcgtacagaccaactcccctcattcaaacttggaacaacttggaaggaccattccagcttcagcactccccagggataagtcaagactttcattgagcctgcaccacaacctgc

SEQ ID NO: 585011 - DNA, 120 bp, Artificial Sequence
  ENSG00000172456_57 (sequence is synthesized)
tttctccctctgcccactacttcttccttccctcctctctcacagctgttattcccaacagcatttcttaataaccctccaacatgctaatctccatctcagggtctacttcctggaaaa

SEQ ID NO: 585012 - DNA, 120 bp, Artificial Sequence
  ENSG00000172456_58 (sequence is synthesized)
tccaatttacaacaggctgcaataacaaaagtcctcgaagttaagattttttttttctgtttatggtacaattttaaaatctcttgctctatggatgcgcattctctagtgacagagatg

SEQ ID NO: 585013 - DNA, 120 bp, Artificial Sequence
  ENSG00000172456_59 (sequence is synthesized)
tcgtctcccttaatttgaacttgcacttggcttcaatttctccattgaatccttagagtaatctctctttgggcagcccaacaggttggcaataacatctcttggaagtaaaatgcatta

SEQ ID NO: 585014 - DNA, 120 bp, Artificial Sequence
  ENSG00000172456_60 (sequence is synthesized)
aaaggcagtttcattaagtgatataaaatccatgtaactcaagtcttcaacagccctagaagtaaaatttccagtatctcatacagttcctaaattaatattaatttcatagcaagagtg

SEQ ID NO: 585015 - DNA, 120 bp, Artificial Sequence
  ENSG00000172456_61 (sequence is synthesized)
agtttcaagccagtgtgaaaaataaatgaatattcatttttacacacagtgggaaggaatccacatccttgatcacctttctccagtctctaccttaatagttatgctggctgaaaatat

SEQ ID NO: 585016 - DNA, 120 bp, Artificial Sequence
  ENSG00000172456_62 (sequence is synthesized)
ccataggatatttgtccctatcttcccagtcccattacctaaacattcagatccaagtcaattatggtcaaggttgttccattaacagaaagctaaatcttacccataatgtctgggatt

SEQ ID NO: 585017 - DNA, 120 bp, Artificial Sequence
  ENSG00000172456_63 (sequence is synthesized)
ggtcttgcttccctaaaccctagtatggtatttgatggagctcaaatacaccttaggtatttgtgcccactgtgtttacaggtctaagaacaaggaggtgttgtaaaacgtcagttttca

SEQ ID NO: 585018 - DNA, 120 bp, Artificial Sequence
  ENSG00000172456_64 (sequence is synthesized)
ttcctgtctctctttctgtgactctgcctcgggcatataaatctcctccctcggggcctggaaactattattccaaagtacctcccagattctgaaaattgtcacagctgctgcattcag

SEQ ID NO: 585019 - DNA, 120 bp, Artificial Sequence
  ENSG00000172456_65 (sequence is synthesized)
cttcttctgaactttgatattgacttgaggtagcctgagtttgcaatttgctataattctttgcctatttgattgcagaccactcttgtgggcatcatccagaaaagcaaactaatccct

SEQ ID NO: 585020 - DNA, 120 bp, Artificial Sequence
  ENSG00000172456_66 (sequence is synthesized)
atggtggatctcatatcattctggctacctctgtctcggttgctgagattgagcctatgttgcagttctttcctttctccctctttcttccctcccttcttttatgccttcatccttcct

SEQ ID NO: 585021 - DNA, 120 bp, Artificial Sequence
  ENSG00000172456_67 (sequence is synthesized)
tcctaccttcaacatttgcaggacatgtgtttgggggtctgtggaaggggaagctttacctaaacaatgctgtcagaattctctgtgtgtgggttcaataatttccttcaggaatgaatg

SEQ ID NO: 585022 - DNA, 120 bp, Artificial Sequence
  ENSG00000172456_68 (sequence is synthesized)
ctttgctgctgacgtccaattgcactctttgctgctgacatgatctctctactagcatgactgcaggaactgtatgtctagatctgcatctgtccaggtcagagtcttctagctgatatc

SEQ ID NO: 585023 - DNA, 120 bp, Artificial Sequence
  ENSG00000172456_69 (sequence is synthesized)
cattctgagacattcagggttacctagaaatcagcaggaaagccttagaattctcagtttcttcatttcatcatttgtatgtgtaagacacagatatcttctttacaagtagggcctact

SEQ ID NO: 585024 - DNA, 120 bp, Artificial Sequence
  ENSG00000172456_70 (sequence is synthesized)
gcagttctatttaaagtgcctagctagggattttctcctcttatcatttatctatttacttacagaccaactcagaacataaaatctctttctcatcctttctccccaacacacacaaaa

SEQ ID NO: 585025 - DNA, 120 bp, Artificial Sequence
  ENSG00000172456_71 (sequence is synthesized)
cttcctttggatgccacaaaatgagcacttgactgaaaatatgcttatacgcgtttttacagactacgccaagccacagcaaatccctgattgcagtataactaactaaataaattgcac

SEQ ID NO: 585026 - DNA, 120 bp, Artificial Sequence
  ENSG00000172456_72 (sequence is synthesized)
aggacttgtgtacatcaactcccagcaaagtccaaagatcaaagttgaaagaggatactgaattccttcccagatttctgggacactgcttctgtgcactgtcaccaaataaatcctgga

SEQ ID NO: 585027 - DNA, 120 bp, Artificial Sequence
  ENSG00000172456_73 (sequence is synthesized)
tgtggagaaaggagggaagaattccctgatgtctgccgtttatgtgcacatctgttgcagtgggaaggaaaataacatttatggagtaccttctataatagaagtttcctggatcccacc

SEQ ID NO: 585028 - DNA, 120 bp, Artificial Sequence
  ENSG00000172456_74 (sequence is synthesized)
catgagggcgatcctggaatgttgtctcaagtgtggggccaaagcacagccaggaggagcattccctgagggcagtttgaagattcagagctggcaatagaaggcaaggtcctccctaaa

SEQ ID NO: 585029 - DNA, 120 bp, Artificial Sequence
  ENSG00000172456_75 (sequence is synthesized)
gctgagaccatctcaacaataccccggcttgctctaagggaatcaggacttcgtctttgaaggaaactgttctggggaagcaatggcaaaaatgagcaaagttgggaaagttgtgttccc

SEQ ID NO: 585030 - DNA, 120 bp, Artificial Sequence
  ENSG00000172456_76 (sequence is synthesized)
gtaaacataagaatgggccaaagacttcaacccatctgtgacttggcattgtctctgaggggggaaattttgcatgatcgcatggagaatggattttgttgctttatctgatattgtcct

SEQ ID NO: 585031 - DNA, 120 bp, Artificial Sequence
  ENSG00000172456_77 (sequence is synthesized)
gggtgcctgtgcctcaggggatttcgcttctgtacagtgggggaaatagatagctcagttgtggacgatagcagcaatgggaagcagtatttgagaagaaatcagactctcttcttccag

SEQ ID NO: 585032 - DNA, 120 bp, Artificial Sequence
  ENSG00000172456_78 (sequence is synthesized)
tcttttgcaagacagctgtccccaaagggatgaatccattacctttcaccagagttgagttcgttttccatttcatctttctgcttaaagagaaagccctttaaaagcgcagcgcataca

SEQ ID NO: 585033 - DNA, 120 bp, Artificial Sequence
  ENSG00000172456_79 (sequence is synthesized)
ttgagtgcgtgtacttaatttttaatatgtgtgtgcccacagccaagagaacagagaaccttaaataataatgaaactgaattgtacatgtcgtatgttttatgtggcactgattcctaa

SEQ ID NO: 585034 - DNA, 120 bp, Artificial Sequence
  ENSG00000172456_80 (sequence is synthesized)
atatgctcctagcagccaggtattatttaatacatccccattaatcaagctgccaaatctaaatgaaaaccatgtttaaatatgtttaataagattatagcttttggttgaatatcaaac

SEQ ID NO: 585035 - DNA, 120 bp, Artificial Sequence
  ENSG00000172456_81 (sequence is synthesized)
taacatagctacatttttccttccagccagctctcatttactgtcttacatttttactctgaaagcttttgtactatcaaaccaatcttgattataaaacaaattataccacaaactttt

SEQ ID NO: 585036 - DNA, 120 bp, Artificial Sequence
  ENSG00000172456_82 (sequence is synthesized)
agtatcgtgagcttcagctgagtccctcagtgtaaatgttaggagaaagaacagttctgagattttttttctggctaaaaaatgatatttttcttcttcttggggtgagcctttgagttt

SEQ ID NO: 585037 - DNA, 120 bp, Artificial Sequence
  ENSG00000172456_83 (sequence is synthesized)
aaaaggaaattaaaaattcaattagagatactaaattgtttgtagcttctgtattaaatgatgtctgccttttgcatagttattgaaagtgtttcatattaaatgtactttttctttttg

SEQ ID NO: 585038 - DNA, 120 bp, Artificial Sequence
  ENSG00000172456_84 (sequence is synthesized)
tgttctgggtgcctgtgcctcaggggatttcgcttctgtacagagtgatccaagaacaggacctgttactttccatccattgtcatttcatagaccccttgaagcaacccagtggttggt

SEQ ID NO: 585039 - DNA, 120 bp, Artificial Sequence
  ENSG00000172456_85 (sequence is synthesized)
agcagcaatctttgtgcagatgaggactctgaagctcagaaatgttgtataacttgtttaatacaaagcccacgctctttgtattccatcagaccatatcctgtagatacatatacattg

SEQ ID NO: 585040 - DNA, 120 bp, Artificial Sequence
  ENSG00000172456_86 (sequence is synthesized)
ctagggaagtacactatggcaactgagacacctctcacaaggtggtatcgtttataaaaaatagcattatgtatttgtcatcattgcttggttgagtgtccaacacagaaataaaaataa

SEQ ID NO: 585041 - DNA, 120 bp, Artificial Sequence
  ENSG00000172456_87 (sequence is synthesized)
caaggcggggctgtagccgccccgggaccgccctgctcaggcgccgtggggttcggcgcggctacgtgcagaatccgtctagctaaaatgtaatttcagattggacaagtactgtggagg

SEQ ID NO: 585042 - DNA, 120 bp, Artificial Sequence
  ENSG00000172456_88 (sequence is synthesized)
agtattccctcggccagcagagcgcttaataaacatcagtggatctgaacttgaatcaaatggcaggtagcagcttgcagaagcctgaaaaacctgggcactgaggtctcgcatgcctgt

SEQ ID NO: 585043 - DNA, 120 bp, Artificial Sequence
  ENSG00000172456_89 (sequence is synthesized)
gtaatgccatttttaaagagacttagagccatcagtatactctaggccactggctccccaagatacagcacatgcttttgtgacagagattcttaattaaaagattgtttgcaaaaaaga

SEQ ID NO: 585044 - DNA, 120 bp, Artificial Sequence
  ENSG00000172456_90 (sequence is synthesized)
atcctacagacaatgaaaatgcctgttagtgcttgaaagatagtcacctggatgatccagaagatagatgtattaattctttaaatgaggtaagagaacttagagaacctagagataccc

SEQ ID NO: 585045 - DNA, 120 bp, Artificial Sequence
  ENSG00000172456_91 (sequence is synthesized)
caagaatatacccagggactatagataagaaactctgatgtagaagaaggaccatggattctggagtcaaaacttcttagtttcacatcccagccatactccttaatagatacaggacct

SEQ ID NO: 585046 - DNA, 120 bp, Artificial Sequence
  ENSG00000172456_92 (sequence is synthesized)
tgagctagttacttaacctctttatgcctgtctcttcatctgtaaaactgaagataataactgatatggagtgatttctagaatattttgaagcaagctgagtgcaaaaaaaatttacga

SEQ ID NO: 585047 - DNA, 120 bp, Artificial Sequence
  ENSG00000172456_93 (sequence is synthesized)
tatactccctttcatgtaaaaagaaagacataggaaaatacatgtgtatctgttcatttttgcaaaagaaatataggaagtggccaggtgcggtggctcactcctgtaaccccagcacct

SEQ ID NO: 585048 - DNA, 120 bp, Artificial Sequence
  ENSG00000172456_94 (sequence is synthesized)
ggcattcaaatcaagatttaaaagaatacagtacctgccactcagaactctactgcaagctggattatgtctatgaagccccaggctttgacccttgctctaaatagagctaaggataaa

SEQ ID NO: 585049 - DNA, 120 bp, Artificial Sequence
  ENSG00000172457_0 (sequence is synthesized)
ggaaaagtgtgacttccaagagctggccttccaaaccaagggctttcacctccgtggacatggaagtgggaaattgcaccatcctgactgaattcatcttgttgggtttctcagcagatt

SEQ ID NO: 585050 - DNA, 120 bp, Artificial Sequence
  ENSG00000172457_1 (sequence is synthesized)
cccagtggcagccgattctatttggagtgtttctgatgctctatttgataaccttgtcaggaaacatgaccttggttatcttaatccgaactgattcccacttgcatacacctatgtact

SEQ ID NO: 585051 - DNA, 120 bp, Artificial Sequence
  ENSG00000172457_2 (sequence is synthesized)
ttttcattggcaatctgtcttttttggatttctggtatacctctgtgtatacccccaaaatcctggccagttgtgtctcagaagataagcgcatttccttggctggatgtggggctcagc

SEQ ID NO: 585052 - DNA, 120 bp, Artificial Sequence
  ENSG00000172457_3 (sequence is synthesized)
tgtttttttcctgtgttgtagcctacactgaatgctatctcctggcagccatggcatatgaccgccatgcagcaatttgtaacccattgctttattcaggtaccatgtccaccgccctct

SEQ ID NO: 585053 - DNA, 120 bp, Artificial Sequence
  ENSG00000172457_4 (sequence is synthesized)
gtactgggcttgttgctggctcctacataggaggatttttgaatgccatagcccatactgccaatacattccgcctgcatttttgtggtaaaaatatcattgaccactttttctgtgatg

SEQ ID NO: 585054 - DNA, 120 bp, Artificial Sequence
  ENSG00000172457_5 (sequence is synthesized)
caccaccattggtaaaaatgtcctgtacaaacaccagggtctacgaaaaagtcctgcttggtgtggtgggcttcacagtactctccagcattcttgctatcctgatttcctatgtcaaca

SEQ ID NO: 585055 - DNA, 120 bp, Artificial Sequence
  ENSG00000172457_6 (sequence is synthesized)
tcctcctggctatcctgagaatccactcagcttcaggaagacacaaggcattctccacctgtgcttcccacctcatctcagtcatgctcttctatggatcattgttgtttatgtattcaa

SEQ ID NO: 585056 - DNA, 120 bp, Artificial Sequence
  ENSG00000172457_7 (sequence is synthesized)
ggcctagttccacctactccctagagagggacaaagtagctgctctgttctacaccgtgatcaacccactgctcaaccctctcatctatagcctgagaaacaaagatatcaaagaggcct

SEQ ID NO: 585057 - DNA, 120 bp, Artificial Sequence
  ENSG00000172457_8 (sequence is synthesized)
tcaggaaagcaacacagactatacaaccacaaacatgaaggttattctctttgcaaatgctgttattgaattttccagattattggcttataaatgtgttcatttgcatttctgtagttc

SEQ ID NO: 585058 - DNA, 120 bp, Artificial Sequence
  ENSG00000172457_9 (sequence is synthesized)
aattaagttcaataagtcatatttaaaacattaaaatattgaccacatgactccttgttattcgtttgttatgatgtaaacaaaacaaagtaatatttaaaacttataatattgggttgt

SEQ ID NO: 585059 - DNA, 120 bp, Artificial Sequence
  ENSG00000172457_10 (sequence is synthesized)
ttggggaacaaaataaattacgtgggttaatgaatatagtttgactttgaagtttggtaagcaatctttactaggtgacaagaatatctgaaagggtgaggcttctggaaatatgctcaa

SEQ ID NO: 585060 - DNA, 120 bp, Artificial Sequence
  ENSG00000172457_11 (sequence is synthesized)
gattttacaaatatttattttaagaaaatcatttcctcaaaatttcttcagaaagctctaattgagcatatagggagtatctttgtaaaactcatgccttctacataaagagaatattag

SEQ ID NO: 585061 - DNA, 120 bp, Artificial Sequence
  ENSG00000172457_12 (sequence is synthesized)
gaagatgtttaagagttgttcagattacaaacaacaatgacaacaaaaaactatctcaaaattaatgaataaatatgtgtctttagaattgcatatcatcctaacagtcttctctcttac

SEQ ID NO: 585062 - DNA, 120 bp, Artificial Sequence
  ENSG00000172457_13 (sequence is synthesized)
aaggagtgagtactccgcagtactctctctcaggtcacacagcgatgtgacaacatcaaacgaaataaaacaaatgaacaacaatagtaaccactgttccctagttacctttctctttcc

SEQ ID NO: 585063 - DNA, 120 bp, Artificial Sequence
  ENSG00000172457_14 (sequence is synthesized)
tttgtcctgaccaaaagacataagctgcatgtttgtccctggcctgaacctagcctgggccttgaacattcctaagaactggtaaacttgtttagatcgatgcctgaaaccctgaaaaat

SEQ ID NO: 585064 - DNA, 120 bp, Artificial Sequence
  ENSG00000172457_15 (sequence is synthesized)
caaacatgttgctaaccacatggaaactagccttggcctcgagcccaattccctaaaccctgatataaactccataactgaacccccttgtgatggcaggttgggttgatatttcattta

SEQ ID NO: 585065 - DNA, 120 bp, Artificial Sequence
  ENSG00000172457_16 (sequence is synthesized)
gtagcctttagaagatggcaagttaaggattaatggttacaattttcaaatcacaagcttgcagctcagaggttagcaactttgttgaggaaaggttataacatttgctggaattagcac

SEQ ID NO: 585066 - DNA, 120 bp, Artificial Sequence
  ENSG00000172457_17 (sequence is synthesized)
atttaaaaaattaattaaattttgaaaatttaggacaaatagttgtagccatttcatttgtctttacttgacatttctcaactttctcttcagctgcatttattttccaacacatcctac

SEQ ID NO: 585067 - DNA, 120 bp, Artificial Sequence
  ENSG00000172457_18 (sequence is synthesized)
ctctttccatcaaaataatcttaacattcttattcctctatcacaaaggaagctgtttgagtacttgactagaaggatttggggtgtatcccgcaaatatcaatgatccatattatgttt

SEQ ID NO: 585068 - DNA, 120 bp, Artificial Sequence
  ENSG00000172457_19 (sequence is synthesized)
tcttttcatctccataatagtcactatgtaggaaaaataattgggtcaatattatgggaaagaacatcgtaaaaatttaatttcactttaggatatcagaataattacttttccattttg

SEQ ID NO: 585069 - DNA, 120 bp, Artificial Sequence
  ENSG00000172457_20 (sequence is synthesized)
cattaatcggagatactgaattttaaaaactgtatcagtattcaattgaatctacaatactgtagtatatattatagtctgatctcaaaatcataacaaacaaacgaaacacaaagaaac

SEQ ID NO: 585070 - DNA, 120 bp, Artificial Sequence
  ENSG00000172458_0 (sequence is synthesized)
aaaatgttttcagctcctggaggcgaaaggtgcagagtcgctctgtgtccgtgaggccgggcggcgacctcgctcagtcggcttctcggtccgagtccccgggtctggatgctggtagcc

SEQ ID NO: 585071 - DNA, 80 bp, Artificial Sequence
  ENSG00000172458_1 (sequence is synthesized)
ctggatgctggtagccggcttcctgctggcgctgccgccgagctgggccgcgggcgccccgagggcgggcaggcgccccg

SEQ ID NO: 585072 - DNA, 120 bp, Artificial Sequence
  ENSG00000172458_2 (sequence is synthesized)
cagctgtacgggcgcctggcggccggcgtgctcagtgccttccaccacacgctgcagctggggccgcgtgagcaggcgcgcaacgcgagctgcccggcagggggcaggcccgccgaccgc

SEQ ID NO: 585073 - DNA, 120 bp, Artificial Sequence
  ENSG00000172458_3 (sequence is synthesized)
cccaccaacctgcgcagcgtgtcgccctgggcctacagaatctcctacgacccggcgaggtaccccaggtacctgcctgaagcctactgcctgtgccggggctgcctgaccgggctgttc

SEQ ID NO: 585074 - DNA, 120 bp, Artificial Sequence
  ENSG00000172458_4 (sequence is synthesized)
ggcgaggaggacgtgcgcttccgcagcgcccctgtctacatgcccaccgtcgtcctgcgccgcacccccgcctgcgccggcggccgttccgtctacaccgaggcctacgtcaccatcccc

SEQ ID NO: 585075 - DNA, 120 bp, Artificial Sequence
  ENSG00000172458_5 (sequence is synthesized)
gtgggctgcacctgcgtccccgagccggagaaggacgcagacagcatcaactccagcatcgacaaacagggcgccaagctcctgctgggccccaacgacgcgcccgctggcccctgaggc

SEQ ID NO: 585076 - DNA, 120 bp, Artificial Sequence
  ENSG00000172458_6 (sequence is synthesized)
cggtcctgccccgggaggtctccccggcccgcatcccgaggcgcccaagctggagccgcctggagggctcggtcggcgacctctgaagagagtgcaccgagcaaaccaagtgccggagca

SEQ ID NO: 585077 - DNA, 120 bp, Artificial Sequence
  ENSG00000172458_7 (sequence is synthesized)
tgcttttagctacaagcaagcagcgtggctggaagctgatgggaaacgacccggcacgggcatcctgtgtgcggcccgcatggagggtttggaaaagttcacggaggctccctgaggagc

SEQ ID NO: 585078 - DNA, 120 bp, Artificial Sequence
  ENSG00000172458_8 (sequence is synthesized)
ctctcagatcggctgctgcgggtgcagggcgtgactcaccgctgggtgcttgccaaagagatagggacgcatatgctttttaaagcaatctaaaaataataataagtatagcgactatat

SEQ ID NO: 585079 - DNA, 120 bp, Artificial Sequence
  ENSG00000172458_9 (sequence is synthesized)
acctacttttaaaatcaactgttttgaatagaggcagagctattttatattatcaaatgagagctactctgttacatttcttaacatataaacatcgttttttacttcttctggtagaat

SEQ ID NO: 585080 - DNA, 120 bp, Artificial Sequence
  ENSG00000172458_10 (sequence is synthesized)
tttttaaagcataattggaatccttggataaattttgtagctggtacactctggcctgggtctctgaattcagcctgtcaccgatggctgactgatgaaatggacacgtctcatctgacc

SEQ ID NO: 585081 - DNA, 120 bp, Artificial Sequence
  ENSG00000172458_11 (sequence is synthesized)
cactcttccttccactgaaggtcttcacgggcctccaggtggaccaaagggatgcacaggcggctcgcatgccccagggccagctaagagttccaaagatctcagatttggttttagtca

SEQ ID NO: 585082 - DNA, 120 bp, Artificial Sequence
  ENSG00000172458_12 (sequence is synthesized)
tgaatacataaacagtctcaaactcgcacaattttttcccccttttgaaagccactggggccaatttgtggttaagaggtggtgagataagaagtggaacgtgacatctttgccagttgt

SEQ ID NO: 585083 - DNA, 120 bp, Artificial Sequence
  ENSG00000172458_13 (sequence is synthesized)
cagaagaatccaagcaggtattggcttagttgtaagggctttaggatcaggctgaatatgaggacaaagtgggccacgttagcatctgcagagatcaatctggaggcttctgtttctgca

SEQ ID NO: 585084 - DNA, 120 bp, Artificial Sequence
  ENSG00000172458_14 (sequence is synthesized)
ttctgccacgagagctaggtccttgatcttttctttagattgaaagtctgtctctgaacacaattatttgtaaaagttagtagttcttttttaaatcattaaaagaggcttgctgaagga

SEQ ID NO: 585085 - DNA, 120 bp, Artificial Sequence
  ENSG00000172458_15 (sequence is synthesized)
agccaagcttcccacgtggccagggacacttctgcgatcccatcagaggggaaaacttgatgtgtttcaagaatgccctggtgccaagcttctgcagagcagcacgcagaaaatgtgaag

SEQ ID NO: 585086 - DNA, 120 bp, Artificial Sequence
  ENSG00000172458_16 (sequence is synthesized)
acaaaagaatgactgcccacaggaggcgcggcacagggcagaactctgctcggttgcttgtccgtgtttgaatctcctacgacccggcgaggtaccccaggtacctgcctgaagcctact

SEQ ID NO: 585087 - DNA, 120 bp, Artificial Sequence
  ENSG00000172458_17 (sequence is synthesized)
tttgagtactgaaacctttattcccattttactggaaacaaagaacatgaacaatttactagtcagaaaaaaagtgttttataacccaaaacaaatatttgccaagagctgtaaattgct

SEQ ID NO: 585088 - DNA, 120 bp, Artificial Sequence
  ENSG00000172458_18 (sequence is synthesized)
taaatcgcttaaactggagatttcagtgagatttttagcagtagattactaagctccttagttatagaacattcaatgcataggaaagtgtttttcctacaaagcataactgaaatgtag

SEQ ID NO: 585089 - DNA, 120 bp, Artificial Sequence
  ENSG00000172458_19 (sequence is synthesized)
tttaactaatggtttacaattcagtcaaataccaaagctgcaaaccatttagggagtcatcaattacatattttgtacactttcaaaaagcttacagctgggatgggttgtttattttca

SEQ ID NO: 585090 - DNA, 120 bp, Artificial Sequence
  ENSG00000172458_20 (sequence is synthesized)
aagcatgactgctttaaaatgatcatattctttagcctgccacctaggaagcattaagcatttacttgcagaatgaacaaacgagcacgttgtcttgtgttatgaagtatataatatagt

SEQ ID NO: 585091 - DNA, 120 bp, Artificial Sequence
  ENSG00000172458_21 (sequence is synthesized)
tcgttttagtttcttcattcgcagactatcaggctcatttcacgtgactgcttgcacttagaactgagttatcacggagtaggaactctccaacatcgtcgtcatagaccaagagatgcc

SEQ ID NO: 585092 - DNA, 120 bp, Artificial Sequence
  ENSG00000172458_22 (sequence is synthesized)
gttgttgaggagaaaggagcaacagcctcctcccaccttattaaaaatagagatttaaaaaaacctctaatttcctcgaagtacagaatctcaagaggtagctctaaggagaatccctct

SEQ ID NO: 585093 - DNA, 120 bp, Artificial Sequence
  ENSG00000172458_23 (sequence is synthesized)
gggtttgagcgcattcctcttccagggggcctattcttggactgctttccttaatagagaaatctctctgagccaaaatcggcctcccccaattccatcctgtcggccccacttttctgc

SEQ ID NO: 585094 - DNA, 120 bp, Artificial Sequence
  ENSG00000172458_24 (sequence is synthesized)
ttcggagacttccaagccagtccccactcctccttcagccagtcgggcccgcacccgcgcccggcagggccagccctctcctcctcctgcgtggcgcagcacaggccctgagcgcgcgac

SEQ ID NO: 585095 - DNA, 120 bp, Artificial Sequence
  ENSG00000172458_25 (sequence is synthesized)
cccaggccctgggcgccccgccgcatgctcgcggctggaagccccagtttgcgtggcccttcgggttattccgctcaagagccgccgcgtcgccccatctcggcgcgaatctgaaagcgc

SEQ ID NO: 585096 - DNA, 120 bp, Artificial Sequence
  ENSG00000172458_26 (sequence is synthesized)
gcgctttcgggggagaagatgttgggggcactggtctggatgctggtagccggcttcctgctggcgctgccgccgagctgggccgcgggcgccccgagggcgggcaggcgccccgcgcgg

SEQ ID NO: 585097 - DNA, 120 bp, Artificial Sequence
  ENSG00000172459_0 (sequence is synthesized)
ccaggcacacatacacttgaagcaatggataaagaaaacagctcaatggtgactgagtttatcttcatgggcatcacccaggaccctcagatggagatcatcttcttcgtggtcttcctc

SEQ ID NO: 585098 - DNA, 120 bp, Artificial Sequence
  ENSG00000172459_1 (sequence is synthesized)
atagtttacctggttaatgtagtggggaatattggtatgattatcctgattacaacagacactcagcttcacacacccatgtattttttcctctgcaacctctcctttgttgacctgggc

SEQ ID NO: 585099 - DNA, 120 bp, Artificial Sequence
  ENSG00000172459_2 (sequence is synthesized)
tactcctcagccattgcccccaggatgctggctgacttcctaacaaatcacaaagttatctccttctccagctgtgccacccagtttgctttttttgtaggttttgtggatgctgagtgc

SEQ ID NO: 585100 - DNA, 120 bp, Artificial Sequence
  ENSG00000172459_3 (sequence is synthesized)
tatgtcctggcagccatggcctatggtcgttttgtggccatttgtcgacccctccactatagcaccttcatgtccaagcaggtctgcttggctctcatgctgggctcttacctggctggt

SEQ ID NO: 585101 - DNA, 120 bp, Artificial Sequence
  ENSG00000172459_4 (sequence is synthesized)
aatcatttcttctgcgaaatcccaccactcttggccctctcttgctcagacacctacatcagtgagatcttgctcttcagtctgtgtggcttcattgaattcagcaccatcctcatcatc

SEQ ID NO: 585102 - DNA, 120 bp, Artificial Sequence
  ENSG00000172459_5 (sequence is synthesized)
ttcatctcctatacctttatccttgttgcaatcatcagaatgcgttcagctgaaggccgccttaaggctttctccacctgcgggtctcaccttactggcatcaccctcttctatggcaca

SEQ ID NO: 585103 - DNA, 120 bp, Artificial Sequence
  ENSG00000172459_6 (sequence is synthesized)
gtcatgtttatgtacctgaggccaacatccagctactccctggaccaagacaagtgggcctctgtgttctacacggttatcatccccatgttaaatcccttgatctacagtttgcggaac

SEQ ID NO: 585104 - DNA, 120 bp, Artificial Sequence
  ENSG00000172459_7 (sequence is synthesized)
aaggatgtgaaagctgctttcaaaaagctaattggaaaaaaatctcaataataacacaaaatgaaaatctgtttctgtcataggtaaatgacagtagtagaagggcatagaaaatgcaaa

SEQ ID NO: 585105 - DNA, 120 bp, Artificial Sequence
  ENSG00000172461_0 (sequence is synthesized)
agtagctgtagcagcttcagcgaagccggagatgggcagagagcgcgcgcggcgcagcagctccagattcactgctctcccctgcagctccccgcgcccccgccgctgtcgctgcctcgg

SEQ ID NO: 585106 - DNA, 120 bp, Artificial Sequence
  ENSG00000172461_1 (sequence is synthesized)
tgtcccccagccccagtcgcgctcttaggacagcgccgccaccgccgcctggccctgcctgcctcctgcgccgcgcagccctcgcgagcgccccggatggcgctttacccctaggaccga

SEQ ID NO: 585107 - DNA, 120 bp, Artificial Sequence
  ENSG00000172461_2 (sequence is synthesized)
tttagaatgtaataactcaaggatttgataatacagtgaagtagtataacaactgtctacgtgcttcccatgatatgttctctatattgaaaaattatgacatcaacatccaaaggaatt

SEQ ID NO: 585108 - DNA, 120 bp, Artificial Sequence
  ENSG00000172461_3 (sequence is synthesized)
cttcgcccatttttaattgtctgcattatcctgggctgtttcatggcatgtcttctcatttacatcaaacctaccaacagctggatcttcagtccaatggaatcagccagctctgtgctg

SEQ ID NO: 585109 - DNA, 120 bp, Artificial Sequence
  ENSG00000172461_4 (sequence is synthesized)
aaaatgaaaaacttcttttccaccaaaactgattattttaatgaaactactattctggtgtgggtgtggccatttgggcagacctttgaccttacatcctgccaagcaatgttcaacatc

SEQ ID NO: 585110 - DNA, 120 bp, Artificial Sequence
  ENSG00000172461_5 (sequence is synthesized)
caaggatgccatctcacaacggaccgttcactgtacaacaaatcccatgcagttctgatccatcaccgagacatcagttgggatctgacaaatttacctcagcaagctaggccacccttc

SEQ ID NO: 585111 - DNA, 120 bp, Artificial Sequence
  ENSG00000172461_6 (sequence is synthesized)
cagaaatggatttggatgaatttggaatcaccaactcacactccccaaaagagtggcattgagcacttgtttaacctgactctgacttaccgccgtgattcagatatccaagtgccttat

SEQ ID NO: 585112 - DNA, 120 bp, Artificial Sequence
  ENSG00000172461_7 (sequence is synthesized)
ggcttcttgacggtaagcacaaatcccttcgtgtttgaagtgccaagcaaagagaaattggtgtgctgggttgtgagtaactggaaccctgagcatgccagagtcaagtattacaatgag

SEQ ID NO: 585113 - DNA, 120 bp, Artificial Sequence
  ENSG00000172461_8 (sequence is synthesized)
ctaagcaaaagcattgaaatccatacctacgggcaagcatttggagaatatgtcaatgataaaaatttgattcctaccatatctacttgtaaattttatctttcctttgaaaattcaatc

SEQ ID NO: 585114 - DNA, 120 bp, Artificial Sequence
  ENSG00000172461_9 (sequence is synthesized)
cacaaggattacatcacggaaaagctatacaatgcttttctggctggctctgtacctgttgttctgggaccatctagggaaaactatgagaattatattccagcagattcattcattcat

SEQ ID NO: 585115 - DNA, 120 bp, Artificial Sequence
  ENSG00000172461_10 (sequence is synthesized)
gtggaagattataactctcccagtgagctagcaaagtatctgaaggaagtcgacaaaaacaataagttataccttagttactttaactggaggaaggatttcactgtaaatcttccacga

SEQ ID NO: 585116 - DNA, 120 bp, Artificial Sequence
  ENSG00000172461_11 (sequence is synthesized)
ttttgggaatcacatgcatgtttggcttgcgatcatgtgaaaaggcatcaagaatataagtctgttggtaatttagagaaatggttttggaattaaaatttttcatcacttgcacacttg

SEQ ID NO: 585117 - DNA, 120 bp, Artificial Sequence
  ENSG00000172461_12 (sequence is synthesized)
ataaatattttgatgagatatcatccaagtattgaggataagaagagatgcaacatactacttttgtgtcacaatttatttttatcaccctctctagggtaacgtgtatattttggtgga

SEQ ID NO: 585118 - DNA, 120 bp, Artificial Sequence
  ENSG00000172461_13 (sequence is synthesized)
gatttttaaaagctcagcatgagcaatcattccattcggttttaaattatcctgtatatacctaattatgtgcactggagagtaatttattcttcattatcatttgtaaacattgttttt

SEQ ID NO: 585119 - DNA, 120 bp, Artificial Sequence
  ENSG00000172461_14 (sequence is synthesized)
tcacatttttgtagttgtccataatgtaagcttgtggtttgattattgtttccacactgatcagctgtttaatctatttgggaaatgaagatgcacatcttaaagtatgaaaaattttca

SEQ ID NO: 585120 - DNA, 120 bp, Artificial Sequence
  ENSG00000172461_15 (sequence is synthesized)
ctaagtattacaatgtctagttccaactttgcatactataacagaggaagaacatgttgcgattgaattctaacctctttgactccgaagatgaatgaagtgtataactgtctctatttg

SEQ ID NO: 585121 - DNA, 120 bp, Artificial Sequence
  ENSG00000172461_16 (sequence is synthesized)
atctattttttttacctgtttatcacatttgtgaaggtgaaattattcatggagtgaataagaaagatatgaagcagaactgttctattcgggaagctattagacttctcatttattttc

SEQ ID NO: 585122 - DNA, 120 bp, Artificial Sequence
  ENSG00000172461_17 (sequence is synthesized)
attaagctgatttgcagctacttattctcatggtcttaaattaaattattcaagtatttttaaatatccaatttgttgtgattttcagcacctgggaagtaatcccaataatactttaga

SEQ ID NO: 585123 - DNA, 120 bp, Artificial Sequence
  ENSG00000172461_18 (sequence is synthesized)
aaatctaagacagttctttctgctactgatgacactcattgtcataataaaacaaataatttcctcaaataacaaagaaaaatgatacctataaatatatttataaatggtgtcatttat

SEQ ID NO: 585124 - DNA, 120 bp, Artificial Sequence
  ENSG00000172461_19 (sequence is synthesized)
gaacaatgtttaattatgtatcaatttaagatttttttctgaagccctaatatttaaaatggtcttattttaccatatggatataagatttggctcataatgatgagccctatcatttga

SEQ ID NO: 585125 - DNA, 120 bp, Artificial Sequence
  ENSG00000172461_20 (sequence is synthesized)
tttgagttctatcatttaagagagcctaaataaaattatcatcaaggtattaaatataagacgttaaatataataaagtggggatatatagaaaacacacagtgttagcacacagtaaga

SEQ ID NO: 585126 - DNA, 120 bp, Artificial Sequence
  ENSG00000172461_21 (sequence is synthesized)
tctcaatgcacatttgttggatgaataaataaatgcaattgaattcccagaaaaatgattgtttcaaggaagtgacagttctactttagaagtactaattggagatgacttttatatccc

SEQ ID NO: 585127 - DNA, 120 bp, Artificial Sequence
  ENSG00000172461_22 (sequence is synthesized)
attttggtaattattcatacatagcacatatgaccatgatgttcagggctttatagaaccaaataaacctaccattacatgaaaattttgaagagtatattcctgaacttgcagctgcct

SEQ ID NO: 585128 - DNA, 120 bp, Artificial Sequence
  ENSG00000172461_23 (sequence is synthesized)
atagcattctcctccataaggctagaggagagctggatataagcagagatcgtaggtgaaaaaagatgggccattaaggattcttcaaggaaaacattcctcaaaatgatctttagtgcc

SEQ ID NO: 585129 - DNA, 120 bp, Artificial Sequence
  ENSG00000172461_24 (sequence is synthesized)
tttattcctttcaggccaataatccacccaaaaattagaatgttctgagacatccatttgggtctatttgtgacttattcgtattacaaattgacatcagcaaaattcaaaaagaattca

SEQ ID NO: 585130 - DNA, 120 bp, Artificial Sequence
  ENSG00000172461_25 (sequence is synthesized)
gtaaaaagggcatagatccagctatccagactatcttgtgagagaataagctcaccccagcaccagaaagatttgagcagaggaatattcctgtaatgaatagaggattgtttgattctc

SEQ ID NO: 585131 - DNA, 120 bp, Artificial Sequence
  ENSG00000172461_26 (sequence is synthesized)
aggtatatttcttaagccaagattgaatgcagtgtcaggcactgccttaacacccacagagataagatgaacaaggtactatcactgcctaaaatgagcttacaattaagtggatagaca

SEQ ID NO: 585132 - DNA, 120 bp, Artificial Sequence
  ENSG00000172461_27 (sequence is synthesized)
tataaaagcttcctttcaattcagcctgagactgtttatatgcatgtgctactccgaatgacgtttgtatgggtcaatgctgatttaatggggaaaaaaagtagaaaatttccccaattg

SEQ ID NO: 585133 - DNA, 120 bp, Artificial Sequence
  ENSG00000172461_28 (sequence is synthesized)
cttagctgtttgacatgtttctgagctgcaaactttgtcaactcttttgacccaacatattattctctccgtattatctcttctaaccacaatgcattaagaaataatatttttatgtgg

SEQ ID NO: 585134 - DNA, 120 bp, Artificial Sequence
  ENSG00000172461_29 (sequence is synthesized)
atgtcctcctcaataagtaaagatctccatccatatttaattaattggtaagacagtcaaattcatacatttacatttactttgtcaaattttttggtctataaaaagcatagagatcta

SEQ ID NO: 585135 - DNA, 120 bp, Artificial Sequence
  ENSG00000172461_30 (sequence is synthesized)
aagaggatacactgctaacaagtttagaaagcacctgcttttttttattattattatttttgtgatagagtcttgctctgtcgcccaggccggagtgcagtggtgcagtctcggctcact

SEQ ID NO: 585136 - DNA, 64 bp, Artificial Sequence
  ENSG00000172461_31 (sequence is synthesized)
ctggcccacctgttttttttgaaggcagaaaaacattcaatattaaaagcattcaatattattt

SEQ ID NO: 585137 - DNA, 120 bp, Artificial Sequence
  ENSG00000172461_32 (sequence is synthesized)
gcagaaaaacattcaatattaaaagcattcaatattatttcaacctgccttggctctagtgaatgttcatgatttgaaagaactgaaagacctaaaggcagtgtctctattgttgactac

SEQ ID NO: 585138 - DNA, 120 bp, Artificial Sequence
  ENSG00000172461_33 (sequence is synthesized)
aaatgtaggctctttgttggactatgactataatcacacactgataatatgacgcaagtagaggcagtactactaagtatctagcaggtgctttgaaaccccattactaagtcccagaag

SEQ ID NO: 585139 - DNA, 120 bp, Artificial Sequence
  ENSG00000172461_34 (sequence is synthesized)
actgtttcctaaatttgaagtggaagaattaaatgactcaatggaaccctttagctgtgggtccattgatgtgtgagttttagagctggaaggaattataattttgttgtttataattgc

SEQ ID NO: 585140 - DNA, 120 bp, Artificial Sequence
  ENSG00000172461_35 (sequence is synthesized)
gtttataattgctataatatagaaattataattgcttttctttctacttatgagttaactagatccagagatatttattcaagacacacattcacacacacatacacacacacacacaca

SEQ ID NO: 585141 - DNA, 120 bp, Artificial Sequence
  ENSG00000172461_36 (sequence is synthesized)
agtgacaatagttaagatttggatttaaggatcctatctttctttatcccactttcttttcaatcgcattcataacttattatagaattatgtctcaatttttacaaatgtgaatgtctt

SEQ ID NO: 585142 - DNA, 120 bp, Artificial Sequence
  ENSG00000172461_37 (sequence is synthesized)
attggtatttttagggcctatagaatggtacacctcatgtagaagaacttcgacttttgaaggtatacaataaataaaacatcaaacttgttagcattcgttctggtttaaatattttag

SEQ ID NO: 585143 - DNA, 120 bp, Artificial Sequence
  ENSG00000172461_38 (sequence is synthesized)
gagttgagttcagcagaaggaaatgggctatcactacatttaagtgaaatacaaccctcaagaaagtgtatggttcacagccactcctttaataaatcctgtgggttgcaattctttgta

SEQ ID NO: 585144 - DNA, 120 bp, Artificial Sequence
  ENSG00000172461_39 (sequence is synthesized)
agaaactcatgaaaaagatatattgattcaacaaaattggtttgctgttgattatacaaaccaataattatgcctagaattaaattgtggacacaaaaaagggaacagaccatttaaaat

SEQ ID NO: 585145 - DNA, 120 bp, Artificial Sequence
  ENSG00000172461_40 (sequence is synthesized)
ggacacaaaaaagggaacagaccatttaaaatgttttatttcaaaatatcgaaaagctattaccttcaatactctaaatatttaaatattaattattgtagacatcagtaagaataaata

SEQ ID NO: 585146 - DNA, 120 bp, Artificial Sequence
  ENSG00000172461_41 (sequence is synthesized)
atatatactgaattgtccacatccagagtattacaccctgaacaagaaagacatgagagcctgacagtcatatatattatgacagctgtatatctgacaatatgaagtagaaactgaaaa

SEQ ID NO: 585147 - DNA, 120 bp, Artificial Sequence
  ENSG00000172461_42 (sequence is synthesized)
aaaaaatcatcttagtgggaaacaaatacatgcttaaaattgttatatttactgtaaaactcctgataatcttagattgtgcagaaatgtttcttattttgaggggcttagaaagctcag

SEQ ID NO: 585148 - DNA, 120 bp, Artificial Sequence
  ENSG00000172461_43 (sequence is synthesized)
cgcatttgatgtataaagcaacagaatatttaggaattatttgcggaggctttaaattcttacctccaattggaggttaaatattaaaagaataggaaactatgcctctgatattttttt

SEQ ID NO: 585149 - DNA, 120 bp, Artificial Sequence
  ENSG00000172461_44 (sequence is synthesized)
tgtcagcctatttttaaactagattccatgagtcttaaggtaatatcctagaattttttttttgcgtgaattaaagttaccacaaatttcaggtccttaccttatgactgtgtttgatca

SEQ ID NO: 585150 - DNA, 120 bp, Artificial Sequence
  ENSG00000172461_45 (sequence is synthesized)
tatctttgagttcccttgaactctgatctcattttgagaaacattttgagaaacttcttaacaattacaatcgagctgttaaatataacaaacatcagaatctaaaggataagcacagtg

SEQ ID NO: 585151 - DNA, 120 bp, Artificial Sequence
  ENSG00000172461_46 (sequence is synthesized)
cctaatgtacaggagggtcatatcaaatacttgttgaataaatacatgaatgtgataagtggtcctgtaaaatattttttaagagtagtgacaatgtttattggtaccaattggagatga

SEQ ID NO: 585152 - DNA, 120 bp, Artificial Sequence
  ENSG00000172461_47 (sequence is synthesized)
tattttatatttattttgttagtttgtcacctggatgcaaaaggaaggcattttaattcctttctatcttacaacattgtaaagcatcaaaagaagtaacatctcaagaaagattagaaa

SEQ ID NO: 585153 - DNA, 120 bp, Artificial Sequence
  ENSG00000172461_48 (sequence is synthesized)
ggatttggatcacgttaacattctatgcaaatattagtaacatatcaactgtttctaaaaggaaagaaaattagtatttaaggagagtataaagtgcgagcactgtgaagggcagatatc

SEQ ID NO: 585154 - DNA, 120 bp, Artificial Sequence
  ENSG00000172461_49 (sequence is synthesized)
tattaccaaaccacatggagagaaatatagtctctctcctaacttcattccattgtattgcaatcagtcaattaaggtgattttttttttctggatgtctcaatctagagattttgtagc

SEQ ID NO: 585155 - DNA, 120 bp, Artificial Sequence
  ENSG00000172461_50 (sequence is synthesized)
attttgcaaatgggtatgcttcactactatccacagtgttctcccctttagtaattcatattgaatatatccatattcatatgcattttataaaacagttaacagaatctaaataagata

SEQ ID NO: 585156 - DNA, 120 bp, Artificial Sequence
  ENSG00000172461_51 (sequence is synthesized)
tagccggctaaatctggaatgtgagtgctaccctaggttattagttcaacaaactaattttgagagagccacttaacctctctggaccttgtttgtaagctttcttctagcactattact

SEQ ID NO: 585157 - DNA, 120 bp, Artificial Sequence
  ENSG00000172461_52 (sequence is synthesized)
ttaggatattccatacagatttccttctcatttctctgtgtagatatttaaagtatgaaattgattatttaaactaatatgtggaaagaacctaatccagagcttggaatatagaaagtg

SEQ ID NO: 585158 - DNA, 120 bp, Artificial Sequence
  ENSG00000172461_53 (sequence is synthesized)
ctcaattaactgacattcctcctgtatttcctccctccccttagttgtctatgacttttgaactcactgctcactgacatcttaattgcctgcagaaaaatcaatcatattttaggcatt

SEQ ID NO: 585159 - DNA, 120 bp, Artificial Sequence
  ENSG00000172461_54 (sequence is synthesized)
attttgaaatattttagagttttctgtactattcaaactcttattacaaaaatctaaagatatttattgatgcaaaaaatttagggagtcattggaaatacctgaggcaatcccaggcta

SEQ ID NO: 585160 - DNA, 120 bp, Artificial Sequence
  ENSG00000172461_55 (sequence is synthesized)
acaataaaatagcataattttaagtaagctagattgagttcatttgaacatttagttattttttagctcatagttaacatatgtccatgcatttgatttactttaaaaatattttattta

SEQ ID NO: 585161 - DNA, 120 bp, Artificial Sequence
  ENSG00000172461_56 (sequence is synthesized)
aaaataacctctcaaacaccagttgctttctgtcagttttactcaaagcatgcttcctaggtcacctgacctagaatcaccagaagtgttaacaataccgatttctgggctttgagccat

SEQ ID NO: 585162 - DNA, 120 bp, Artificial Sequence
  ENSG00000172461_57 (sequence is synthesized)
gaaattagaatttcttcaaataatccatgcccccccgtcacccaaaaaaagagcatgcttttaatacatttccaaaattatcctgtttctgctataactggtgaaccatcctgtcctaaa

SEQ ID NO: 585163 - DNA, 120 bp, Artificial Sequence
  ENSG00000172461_58 (sequence is synthesized)
ctagcagttctcaaacatgcatatgcctttgaaacttcctagatcatctacataaaaatcatttgaaatattgttaataatacacagcttctgaatctctgggtgtgagatgggaccagg

SEQ ID NO: 585164 - DNA, 120 bp, Artificial Sequence
  ENSG00000172461_59 (sequence is synthesized)
aatcttattttaaaaatctccccagatggttctggtgtcctgctagttttgaggttttcatcccacctgtttagatgggtagtattctattaaatatgaggtattacctttctttagttc

SEQ ID NO: 585165 - DNA, 120 bp, Artificial Sequence
  ENSG00000172461_60 (sequence is synthesized)
acctggaatcttcttaaatatatcggtaaagtattctacttcaaaatccaagacattttgtatacctaattatttcacacaagagcgtggaactcaccagtcttgtgacttggggcaggt

SEQ ID NO: 585166 - DNA, 120 bp, Artificial Sequence
  ENSG00000172461_61 (sequence is synthesized)
tatttatagtctccagacactttttccagttgcgagttgcttatagtagttcgcgaacctgaatgcacattagaaccatctggagaggctttaaaattgcagatgtccaaaccccacctc

SEQ ID NO: 585167 - DNA, 120 bp, Artificial Sequence
  ENSG00000172461_62 (sequence is synthesized)
cagagagctgatctatttagtttgaggaagagcccagaagtctaacaggtgtaaatgttccacaggtaatactaatgcaggcatacctcaggaaatcaccagttctcgtcttggaggaac

SEQ ID NO: 585168 - DNA, 120 bp, Artificial Sequence
  ENSG00000172461_63 (sequence is synthesized)
tattaggaaaataaaagattatatatcttgaaaaaaatctctaatttgctttctaggttctaactgcatgtttatattttgcaacaggaaagactggtctagacaattactaggatatat

SEQ ID NO: 585169 - DNA, 120 bp, Artificial Sequence
  ENSG00000172461_64 (sequence is synthesized)
gcttctgtgatctgcttttctattgtatgtgtttaagagaccacattcttgggttccaaagtctccttgtctgataggtaatttgcaattgagatatggcaaagaattgtagcatccaaa

SEQ ID NO: 585170 - DNA, 120 bp, Artificial Sequence
  ENSG00000172461_65 (sequence is synthesized)
tttttgacaactacagatttagaattgaatccaaggtctgccattcactagctatgtgcaagttactcaacttctcttatcctcagattttgcagctgtaaagcagaggtagcatatttc

SEQ ID NO: 585171 - DNA, 120 bp, Artificial Sequence
  ENSG00000172461_66 (sequence is synthesized)
tgagaaattatattcaggtgactagatatgtgttcaagtgttatcttttattcttataaaagataattgtgaggaatccagtgctattttcacaattttaattctaaaactctgaagaca

SEQ ID NO: 585172 - DNA, 120 bp, Artificial Sequence
  ENSG00000172461_67 (sequence is synthesized)
ttaaacaggcagtttgtaggaatcattgaaattttatacaagccgaaggaacaacattcagcaaaacggaaacaaataaatacagcatggaagcatatattcatgtttcccataattact

SEQ ID NO: 585173 - DNA, 120 bp, Artificial Sequence
  ENSG00000172461_68 (sequence is synthesized)
aagttacggaaggggtgtgaggagctggcagtggtggtgaataggcattgtttgcattactaaatatatataccatttcttaagataattggaactcaagcagtcctaattttctctccc

SEQ ID NO: 585174 - DNA, 120 bp, Artificial Sequence
  ENSG00000172461_69 (sequence is synthesized)
tgttatgagcaatcagtaaatttgtagtcaatttaacttattatcagttggtatagcgcatgtcacagaataggatagcaagaagattctcagagatcattttctggtaaagaaaaaggc

SEQ ID NO: 585175 - DNA, 120 bp, Artificial Sequence
  ENSG00000172461_70 (sequence is synthesized)
ctagcaatatttaacagtttgacttaatccatcacttcagctggtccactagttttgacacaggactagttaatgatttgttaggaagtctccatctactcttaaactaatttaaaaaaa

SEQ ID NO: 585176 - DNA, 120 bp, Artificial Sequence
  ENSG00000172461_71 (sequence is synthesized)
agctaaaagttgcttttaatatgttagggtataacttcaataaacaggagtatttatctagtggttcagaaataaaataattgttagccagcctgtgattaaggctaccataattgcata

SEQ ID NO: 585177 - DNA, 120 bp, Artificial Sequence
  ENSG00000172461_72 (sequence is synthesized)
ataaatagctttgacgtgaataatctcagttgttcaagtgtacaaatttaaagctgtactatgttagaataaaaaagtaggctcaaggaaaatttctatttttctatatgaaaaagagaa

SEQ ID NO: 585178 - DNA, 120 bp, Artificial Sequence
  ENSG00000172461_73 (sequence is synthesized)
tgatattcaaaatagtatttttaagtagtttctaattgtgttcctttaaagagtattagaaatgtctgttatgtcagtaacattagaaaacttcaaaaactgatttatttttctgagttc

SEQ ID NO: 585179 - DNA, 120 bp, Artificial Sequence
  ENSG00000172461_74 (sequence is synthesized)
tctggaaaccaaacaattttgaattagttgtgtaagtaaagtaagttaagttatagcttgctggaattttattgtggaaaacaaatatagattttatctgaaaaattttaagggccaatt

SEQ ID NO: 585180 - DNA, 120 bp, Artificial Sequence
  ENSG00000172461_75 (sequence is synthesized)
ctacagaaagttatgctaacatgctaactttccacacatggctgcattccattttgattaatgagggttcaggaaatagaaaggcagtctctgcagaagcagtatccaaaggctaaatta

SEQ ID NO: 585181 - DNA, 120 bp, Artificial Sequence
  ENSG00000172461_76 (sequence is synthesized)
acaacccaggactaccactcattatgtgagaaatatgggccagagttacaatatcacatctccagtctcagattggcctcattagccaccttcagttccttaaatgagataatcctgaag

SEQ ID NO: 585182 - DNA, 120 bp, Artificial Sequence
  ENSG00000172461_77 (sequence is synthesized)
atgccatccttgtccaaggtgagattgccagaggatatgagctcatctaggatggaatacatgtctccagggactgtaatgagatcaggcttttcatttactggttttctgcctcaagag

SEQ ID NO: 585183 - DNA, 120 bp, Artificial Sequence
  ENSG00000172461_78 (sequence is synthesized)
tccttaagcaaatgaagattatctgattgtctatgtaaacctggaagtagtctactttttagataaaagataatctatcttgaatatttcatatgtgattttaaaataattaatcaaaaa

SEQ ID NO: 585184 - DNA, 120 bp, Artificial Sequence
  ENSG00000172461_79 (sequence is synthesized)
acaaagactatcatatttgagaacaagattttacttagaagggaaaaaaaagaactttcagcttaatcggggttaagggagtaattgtgacaatataaaatggcattgttatagaatccc

SEQ ID NO: 585185 - DNA, 120 bp, Artificial Sequence
  ENSG00000172461_80 (sequence is synthesized)
taaaaggtaaataatgtatgagatgaaggtaggaagtaatgtgtgcttgcagaaatgcaactggtcaaaattacttgaatgaaattgttgaggttaaacatcttcattataataatatgt

SEQ ID NO: 585186 - DNA, 120 bp, Artificial Sequence
  ENSG00000172461_81 (sequence is synthesized)
cttattctgattccaagacaatacgaatgtagagaagagatttttaaatggaaaaagtaaggagctaacaagtctgtacctagattcaagttcacaaagcggcaaaaaggagaaaagtgt

SEQ ID NO: 585187 - DNA, 120 bp, Artificial Sequence
  ENSG00000172461_82 (sequence is synthesized)
caacaagaaacaagaagaggagtagtaaactaaggatcaaagcccaagttccagttttcacaatctgctgtataattcactaacatttctgagccatagatttttaatctgtaaaaggag

SEQ ID NO: 585188 - DNA, 120 bp, Artificial Sequence
  ENSG00000172461_83 (sequence is synthesized)
tgtgatggactgtacattagaagtacctgagaagctcttaataaatcttgatgaattggttagaaattctaatttaattagcctggcacagtgcacaaactgccatatattcgtgcagat

SEQ ID NO: 585189 - DNA, 120 bp, Artificial Sequence
  ENSG00000172461_84 (sequence is synthesized)
gttttcttcttttcttactgcgcatttccatgtggccatgtcactacaaggggtggggaagaagttaatgtgtaattgcttcaggagctctgaataaaaggttgctgaagcaaaatactg

SEQ ID NO: 585190 - DNA, 120 bp, Artificial Sequence
  ENSG00000172461_85 (sequence is synthesized)
caatgaagttctgaaaatgaagagttaggactttacatgatttctcttgcctcattccctcaagaatgcacatatagacacacatatgccaatatcttttttatgtagttcaagtataac

SEQ ID NO: 585191 - DNA, 120 bp, Artificial Sequence
  ENSG00000172461_86 (sequence is synthesized)
tttgaataaaatgacttacattcaaggaaggtcaaaactattattctgaaacaaaatgtgacaattctagccattatgtgaattgtaagggtcagtaatccataaattatttggatggta

SEQ ID NO: 585192 - DNA, 120 bp, Artificial Sequence
  ENSG00000172461_87 (sequence is synthesized)
attgtatgttttattaatgtgatgtaattttgcactattgtattgtcatatttaatcaaactcttaaaaataccctgaaacataatgccaaatgtacagtttataggttcgtgttatttc

SEQ ID NO: 585193 - DNA, 120 bp, Artificial Sequence
  ENSG00000172461_88 (sequence is synthesized)
tgataagaatttaattgcattgtgctaatagttgtttattgctattaactttctgtgtatgtattattgcgatgcagacccaatagggttattttaagcacactaattagtcatctggat

SEQ ID NO: 585194 - DNA, 120 bp, Artificial Sequence
  ENSG00000172461_89 (sequence is synthesized)
ttttatagataaaatcacatgttgatcagaaatcatttttctacttatttttttgtagagtatttttccacacttgaaaaaaacatgattattttatatcaaacatcaacttttctttaa

SEQ ID NO: 585195 - DNA, 120 bp, Artificial Sequence
  ENSG00000172461_90 (sequence is synthesized)
atcttattttagtagctaatgcatgtttgaaataagatgtgttagaaattatatgactatattaaggttgtgtttatattaggtgaaaaattgcatgcaattggtgaatcatgcagcttt

SEQ ID NO: 585196 - DNA, 120 bp, Artificial Sequence
  ENSG00000172461_91 (sequence is synthesized)
ggggacatttacactgccactcacacacaggctctgtctcaatccgtatgcatgattcacgtcctttcaaaagtcccttttcaacatttggtaaagtgaaaatgttattcatagtgctaa

SEQ ID NO: 585197 - DNA, 120 bp, Artificial Sequence
  ENSG00000172461_92 (sequence is synthesized)
tgagccaataaacaatgctgcgtttcttttttctaactgcagcatattgtggtaaattttctcccaaaactttatttttggagttattgttggcaataaatacaacaaattatttgttgg

SEQ ID NO: 585198 - DNA, 120 bp, Artificial Sequence
  ENSG00000172461_93 (sequence is synthesized)
caagtgatacaatttactgtataacaacttaatagtacaaagcatgaagatgtgaaaatatcatcttaaccagtttcattctatgaacataatattctggcagctttttctataactgag

SEQ ID NO: 585199 - DNA, 120 bp, Artificial Sequence
  ENSG00000172461_94 (sequence is synthesized)
aatggtatatctttttatacactgcctaaatcagtactactgccagtcacctgaggtcaggtctgcacaacactaaattgggcaataacatagaacatctaggcagtcttgacagtcaac

SEQ ID NO: 585200 - DNA, 120 bp, Artificial Sequence
  ENSG00000172461_95 (sequence is synthesized)
cagtgtaatcactaggggaagaaaaagtaggcctacccttttacttattaacttaagtaataaaaattgtataaaaatatgaatgttggctgcagaggagcctttacatgcagataattt

SEQ ID NO: 585201 - DNA, 120 bp, Artificial Sequence
  ENSG00000172461_96 (sequence is synthesized)
gaagcagtctttgaaaataacaaaaattattccatttaatgaagggtttgttttgtttagcttttctcttttattcagaaaacatacctgtgcttttgaaagggcttaatcccaaacagg

SEQ ID NO: 585202 - DNA, 120 bp, Artificial Sequence
  ENSG00000172461_97 (sequence is synthesized)
taatatgtgtggatcaatcatctctcctcccatgaaattaatcattcatggtaatatattaaggctggaacgtagctcttagtgacttaaaacatgacagtaagcatttacactgttgga

SEQ ID NO: 585203 - DNA, 120 bp, Artificial Sequence
  ENSG00000172461_98 (sequence is synthesized)
aggtaatttcattgctatgttattaaaatgatgggaatcctatttatacatttatttatttatttatttacagaagattggttccttccagttcaatttaacagcttcagtgaagttagt

SEQ ID NO: 585204 - DNA, 120 bp, Artificial Sequence
  ENSG00000172461_99 (sequence is synthesized)
ataatgataagaaaaattgactgtagctattattccaagtgaaaatcatgcagctgagtcctgctgcatcctgggagcaaagcattaattcaaatgaggagtagtcagtcctagcactgt

SEQ ID NO: 585205 - DNA, 120 bp, Artificial Sequence
  ENSG00000172461_100 (sequence is synthesized)
agacgccgactttaccaaccaagatagtgtatgtgtgtgacattcagctaacattgatctaggcacttagtttgctaccacattgttcccttcattgattgaaactgtaaataacataac

SEQ ID NO: 585206 - DNA, 120 bp, Artificial Sequence
  ENSG00000172461_101 (sequence is synthesized)
actttaaggcagctaagcaaatattttaataagccatgaaaggcaagatgccagagaaaatctgtatattcagctatttggagaactcgtgttttccacaaattaaactggagatgtcat

SEQ ID NO: 585207 - DNA, 120 bp, Artificial Sequence
  ENSG00000172461_102 (sequence is synthesized)
ttgaaattttcttcccttaaacatgctgtcacaacatggattccttctcatggatgtctttctaggcttataaatatatggtgtgattgctataattttgtgaaattttattcagcaatt

SEQ ID NO: 585208 - DNA, 120 bp, Artificial Sequence
  ENSG00000172461_103 (sequence is synthesized)
aatagtgatttcagcaatatgtactaagattccaaggcagaaataaatgtataaaggatttgagcctgtatgtgtaagaagaaactctctcttcagtcatatttcctaaattcagtgtaa

SEQ ID NO: 585209 - DNA, 120 bp, Artificial Sequence
  ENSG00000172461_104 (sequence is synthesized)
gtacctcgctgatttagcactggagttattccttgaatgtgtaaataatgatgttctattctgacctaatgaattcctgtaatgtgaatatttaaaataaaagaattcaatttaaatgta

SEQ ID NO: 585210 - DNA, 120 bp, Artificial Sequence
  ENSG00000172461_105 (sequence is synthesized)
gcaaatttggatgagaggaaaactacacttctaaggctcccctgacatagtttctttggagtgcaattcagcctctctttattgagggcctatggggcaagaactgaagtgatgatggca

SEQ ID NO: 585211 - DNA, 120 bp, Artificial Sequence
  ENSG00000172461_106 (sequence is synthesized)
ggcacaagaaaccttaagtttctttcactggagagctcttcagttcatccatgaagctgagtcccagattaaaaaccattgctgtggtttgtctgtattttggtgtatcaaagcagacaa

SEQ ID NO: 585212 - DNA, 120 bp, Artificial Sequence
  ENSG00000172461_107 (sequence is synthesized)
atagctgtgcttctcaaaccttacagtccatgtgaatcacctgaagatattattaaaatgcagattcttattcaatagatctgggttgggatgggagatttctaacaaactcttaagtaa

SEQ ID NO: 585213 - DNA, 120 bp, Artificial Sequence
  ENSG00000172461_108 (sequence is synthesized)
actcctactctggaaaccacactttgacaagcaagggtctgtaaaactagaaagctagaggccttttagttcatggctcttaaccaagagcctgcgaatctctgggacatttatccacag

SEQ ID NO: 585214 - DNA, 120 bp, Artificial Sequence
  ENSG00000172461_109 (sequence is synthesized)
gttttaggattctatgagtcccaagaaataaatgcaaaattttatatgtatgtgggtatgggcatttttttattttctggagagttaacagttattagcctttgtaagaggcttatgaag

SEQ ID NO: 585215 - DNA, 120 bp, Artificial Sequence
  ENSG00000172461_110 (sequence is synthesized)
acctaattaaaataagtgggtagtgattgaatcagtcccatttttagatgagtaaactaaggtctaaggaagctaaattatctgcgaggttcacagagtttgttacaaacctaggaattg

SEQ ID NO: 585216 - DNA, 120 bp, Artificial Sequence
  ENSG00000172461_111 (sequence is synthesized)
catccaggtttctggtgcctaatccaggggctttgattgtactagactgtctttcaaactttgatttgagagaaataagtgtaataattcagtaaataaatttaataatgaaagaacaaa

SEQ ID NO: 585217 - DNA, 120 bp, Artificial Sequence
  ENSG00000172464_0 (sequence is synthesized)
tgtgcatcttctttcttattgcagctcaaatgatgagacttatgaaagaggttcgaggcagaaatcaaacagaagtaacagaatttctcctcttaggactttccgacaatccagatctac

SEQ ID NO: 585218 - DNA, 120 bp, Artificial Sequence
  ENSG00000172464_1 (sequence is synthesized)
aaggagtcctctttgcattgtttctgttgatctatatggcaaacatggtgggcaatttggggatgattgtattgattaagattgatctctgtctccacacccccatgtatttctttctca

SEQ ID NO: 585219 - DNA, 120 bp, Artificial Sequence
  ENSG00000172464_2 (sequence is synthesized)
gtagcctctcttttgtagatgcctcttactcttcttccgtcactcccaagatgctggtgaacctcatggctgagaataaggccatttcttttcatggatgtgctgcccagttctacttct

SEQ ID NO: 585220 - DNA, 120 bp, Artificial Sequence
  ENSG00000172464_3 (sequence is synthesized)
ttggctccttcctggggactgagtgcttcctgttggccatgatggcatatgaccgctatgcagccatttggaaccccctgctctacccagttctcgtgtctgggagaatttgctttttgc

SEQ ID NO: 585221 - DNA, 120 bp, Artificial Sequence
  ENSG00000172464_4 (sequence is synthesized)
tacagggatgacttttaggttgtccttttgtggttctaataggatcaaccatttctactgtgacaccccgccactgctcaaactctcttgctctgatacccacttcaatggcattgtgat

SEQ ID NO: 585222 - DNA, 120 bp, Artificial Sequence
  ENSG00000172464_5 (sequence is synthesized)
catggcattctcaagttttattgtcatcagctgtgttatgattgtcctcatttcctacctgtgtatcttcattgccgtcttgaagatgccttcgttagagggcaggcacaaagccttctc

SEQ ID NO: 585223 - DNA, 120 bp, Artificial Sequence
  ENSG00000172464_6 (sequence is synthesized)
cacctgtgcctcttacctcatggctgtcaccatattctttggaacaatcctcttcatgtacttgcgccctacatctagctactcaatggagcaagacaaggttgtctctgtcttttatac

SEQ ID NO: 585224 - DNA, 120 bp, Artificial Sequence
  ENSG00000172464_7 (sequence is synthesized)
agtaataatccctgtgctaaatcccctcatctatagtttaaaaaataaggatgtaaaaaaggccctaaagaagatcttatggaaacacatcttgtagagccatgttacccatcatttgtt

SEQ ID NO: 585225 - DNA, 120 bp, Artificial Sequence
  ENSG00000172465_0 (sequence is synthesized)
ctttggtcgagagggaaagcagaagaagtctgctggtcacagcggggcacctcgaggagaggacgactaggagcacacggcccggaaaggtccagaataactgtgcttgaagaagaaaat

SEQ ID NO: 585226 - DNA, 120 bp, Artificial Sequence
  ENSG00000172465_1 (sequence is synthesized)
tcccaacatggacaaaccacgcaaagaaaatgaagaagagccgcagagcgcgcccaagaccgatgaggagaggcctccggtggagcactctcccgaaaagcagtcccccgaggagcagtc

SEQ ID NO: 585227 - DNA, 120 bp, Artificial Sequence
  ENSG00000172465_2 (sequence is synthesized)
ttcggaggagcagtcctcggaggaggagttctttcctgaggagctcttgcctgagctcctgcctgagatgctcctctcggaggagcgccctccgcaggagggtctttccaggaaggacct

SEQ ID NO: 585228 - DNA, 120 bp, Artificial Sequence
  ENSG00000172465_3 (sequence is synthesized)
gtttgaggggcgccctcccatggagcagcctccttgtggagtaggaaaacataagcttgaagaaggaagctttaaagaaaggttggctcgttctcgcccgcaatttagaggggacataca

SEQ ID NO: 585229 - DNA, 120 bp, Artificial Sequence
  ENSG00000172465_4 (sequence is synthesized)
aatgcactggaaggcaaaacggagccgtccttatcctatttaatgtgttcggcctttaattctgttttgcctgctaatagtattgccattgccacctggactttctgtttgcattttctt

SEQ ID NO: 585230 - DNA, 120 bp, Artificial Sequence
  ENSG00000172465_5 (sequence is synthesized)
aatgccttttcccatattctgaattttaactttttgtgaggctttattttagatgtttagcatgtaactcgcttaaagttgaggtttccccctaaaatctacaagtttccctctttcagt

SEQ ID NO: 585231 - DNA, 120 bp, Artificial Sequence
  ENSG00000172465_6 (sequence is synthesized)
catgagccctacacatttgcatgaaagatgtacattatatattgtgaaacgaaaaaagcaattttcaaatggtatatattgtatcccatttttgtaaaaaaaatgtatatttatatatta

SEQ ID NO: 585232 - DNA, 120 bp, Artificial Sequence
  ENSG00000172465_7 (sequence is synthesized)
atatgcaaagaaaaagctaaaagtatagacttcaaaggcataacagtggttgtgtggtaagataataggtgattttttaaatttttgttttatctgaatttctcattttttcaggacaaa

SEQ ID NO: 585233 - DNA, 120 bp, Artificial Sequence
  ENSG00000172465_8 (sequence is synthesized)
cgttttacttgtgttgcaaaaatatataatgaaaaaatcacacaattttgaagaaaactgtcaatcagcttataacgacaatgtggcacttaataaatacttgtcagaactttaaaaaaa

SEQ ID NO: 585234 - DNA, 120 bp, Artificial Sequence
  ENSG00000172465_9 (sequence is synthesized)
cctgtccaccatctccctattaccctttggtcgagagggaaagcagaagaagtctgctggtcacagcggggcacctcgaggagaggacgactaggagcacacggcccggaaaggtccagg

SEQ ID NO: 585235 - DNA, 120 bp, Artificial Sequence
  ENSG00000172465_10 (sequence is synthesized)
gggtacgcagtgggccgggactggggcgcgagggtggacgccgaaaggcatggagtctgcaggccgcactgtcccgcccctgtcactgcgggcgaggcctgtagcaaagcctgctgggaa

SEQ ID NO: 585236 - DNA, 120 bp, Artificial Sequence
  ENSG00000172465_11 (sequence is synthesized)
aatggtgggctttcgggaaggagggggcgaccgggaagcggcggagtcgggagagccggagagcctctgggaaagcgcaaggttgaggacctggcccccgaatcaggaaaaggcaggtat

SEQ ID NO: 585237 - DNA, 120 bp, Artificial Sequence
  ENSG00000172466_0 (sequence is synthesized)
gtttctgcgtctgccgtggacagcgaagctgctgcggttcctgagccggaggtttgcgccggagtgcctgtgaagaaaacggggtattgccctgaggcttatattctgcctcagttgtct

SEQ ID NO: 585238 - DNA, 120 bp, Artificial Sequence
  ENSG00000172466_1 (sequence is synthesized)
tttcttgaaatattataaatcagaatgtctgcacagtcagtggaagaagattcaatacttatcatcccaactccagatgaagaggaaaaaattctgagagtgaagttggaggaggatcct

SEQ ID NO: 585239 - DNA, 120 bp, Artificial Sequence
  ENSG00000172466_2 (sequence is synthesized)
gatggcgaagagggatcaagtatcccctggaaccatctcccagacccagagattttccgacagcgattcaggcagtttggataccaggattcacctgggccccgtgaggctgtgagccag

SEQ ID NO: 585240 - DNA, 120 bp, Artificial Sequence
  ENSG00000172466_3 (sequence is synthesized)
ctccgagaactttgccgtctgtggctcaggccagagacgcacacaaaagaacaaatcttggagctggtagtgctggagcagtttgttgccatcctacccaaagagctacagacttgggtt

SEQ ID NO: 585241 - DNA, 120 bp, Artificial Sequence
  ENSG00000172466_4 (sequence is synthesized)
cgagatcatcatccagagaatggagaggaggcagtgacagtgctggaggatttggagagtgaacttgatgaccctggacaaccggtttctctccgtcgacgaaaacgggaagtactagta

SEQ ID NO: 585242 - DNA, 120 bp, Artificial Sequence
  ENSG00000172466_5 (sequence is synthesized)
gaagacatggtatctcaagaagaagctcagggattaccaagttctgagcttgatgctgtggagaaccagctcaagtgggcatcctgggagctccattccctaaggcactgtgatgatgat

SEQ ID NO: 585243 - DNA, 120 bp, Artificial Sequence
  ENSG00000172466_6 (sequence is synthesized)
ggtaggactgaaaatggagcactagctccaaagcaggagcttccttcagcattagaatcccatgaagttcctggcactctcaatatgggtgttcctcaaatttttaaatatggagaaacc

SEQ ID NO: 585244 - DNA, 120 bp, Artificial Sequence
  ENSG00000172466_7 (sequence is synthesized)
tgtttccccaagggcaggtttgaaagaaagagaaatccctctcgaaagaaacaacatatatgtgatgaatgtggaaaacacttcagtcagggctcagcccttattcttcatcaaagaatt

SEQ ID NO: 585245 - DNA, 120 bp, Artificial Sequence
  ENSG00000172466_8 (sequence is synthesized)
cacagtggggagaaaccttatggatgtgttgagtgtgggaaagcattcagccgaagttccattcttgtgcaacaccagagagtccacactggagaaaaaccttacaaatgtcttgaatgt

SEQ ID NO: 585246 - DNA, 120 bp, Artificial Sequence
  ENSG00000172466_9 (sequence is synthesized)
gggaaagcctttagccagaattcggggcttattaatcatcagagaatccatactggggagaaaccttatgaatgcgttcagtgtgggaaatcgtatagtcaaagctcaaatctttttaga

SEQ ID NO: 585247 - DNA, 120 bp, Artificial Sequence
  ENSG00000172466_10 (sequence is synthesized)
catcagagaagacacaatgcagaaaaacttctgaatgttgtgaaagtttaagaaattgaaaaaaaaaaaagaatcagcactcaggtctttttcttcagaaatgaagacaaaatttaaaat

SEQ ID NO: 585248 - DNA, 120 bp, Artificial Sequence
  ENSG00000172466_11 (sequence is synthesized)
atgaaatgatgcagaatagttttttccctattgactgtcagaaaatccactgggaaatgtaaaaatcttcactcaccattatgatatttatcttgaaagaaatggtgtcatacctgccta

SEQ ID NO: 585249 - DNA, 120 bp, Artificial Sequence
  ENSG00000172466_12 (sequence is synthesized)
gaaactgaaattttaaacttaattcaggtcttaatgcctaaattttccatgtgatgtttatagtctgtattacttctccaaataatgaactacctgattcattgtccctttcttgaaagt

SEQ ID NO: 585250 - DNA, 120 bp, Artificial Sequence
  ENSG00000172466_13 (sequence is synthesized)
ttcttttttaagacaaatacattatttctgcattgatcattgaaatgttctttatatggatacattcccttatatattaaaaggcaacaggaattacaaagtctgaaaaccattttaaac

SEQ ID NO: 585251 - DNA, 120 bp, Artificial Sequence
  ENSG00000172466_14 (sequence is synthesized)
catcttttaaaaatttacccttatttccttttacctaatttgaatatgcatttgagaaaataagaggataaaggatggctaagagcctcaaaatgaaccataagatctcagataagaagt

SEQ ID NO: 585252 - DNA, 120 bp, Artificial Sequence
  ENSG00000172466_15 (sequence is synthesized)
gatggtgataaaacatcaaaaagtgaatggaacaccttgattggggaagatatgcaaatactttgatctaagaattgaaatgtatcaagaatttatattttgcctgcaggaaaattcaaa

SEQ ID NO: 585253 - DNA, 120 bp, Artificial Sequence
  ENSG00000172466_16 (sequence is synthesized)
agctactcatcctctctataatttggagtcatcttactaatgaaaataatgttttcccatatattattaaaaagcatacagtctaaataataaacagttgtaaaataatgaaggtagaaa

SEQ ID NO: 585254 - DNA, 120 bp, Artificial Sequence
  ENSG00000172466_17 (sequence is synthesized)
ttataacactagggaaaaatttgtagcggatggcagtgttgaaggcaaatgtaaacataagggtaatggtctgtcatggcttttagaaaaagatgatagagttcatcattattttgcctt

SEQ ID NO: 585255 - DNA, 120 bp, Artificial Sequence
  ENSG00000172466_18 (sequence is synthesized)
catctttgttaaggacagaaaattccctgacaggtgggcaagtatcaggttacctattttttattcctttggtacaaaagggttgaacgtcaggctaaaaaagcagccatgcatttatta

SEQ ID NO: 585256 - DNA, 120 bp, Artificial Sequence
  ENSG00000172466_19 (sequence is synthesized)
ttaaacattttctaccgacaaggcactgtgctaggtactgtaatcctaccataagtaggtaggtatttcttccactgtaaatcataggggtttgctgttttatgtgagttagcctcttcc

SEQ ID NO: 585257 - DNA, 120 bp, Artificial Sequence
  ENSG00000172466_20 (sequence is synthesized)
ccttgtctgagcattcctcaggggaggtcacctgtgaggttcccagaactgtagttttttttaccagggtgttgtatttggagggggaggaggactcggctcaaaagagctagctggctc

SEQ ID NO: 585258 - DNA, 120 bp, Artificial Sequence
  ENSG00000172466_21 (sequence is synthesized)
tccagtgttcagaggtgagtccacgatactcttaccacaatttggaagtttgtgaatctttttaaagaactaatcaatctctaatagcattgaggttgtacctacatattaagttgaatg

SEQ ID NO: 585259 - DNA, 120 bp, Artificial Sequence
  ENSG00000172466_22 (sequence is synthesized)
cctacatattaagttgaatggactgttctatttaaaaaataaacaactagacaattaactagtttattaacctatcacaattgaatttttttttaattttcagtcttaacacatttttta

SEQ ID NO: 585260 - DNA, 120 bp, Artificial Sequence
  ENSG00000172466_23 (sequence is synthesized)
ttgtagtagtaggattatatactccttggctgagaattccaagtactgtggttctactgtttagtggaaaactctggaagttaaaatatagaatatgagaggaggcttttttataatggg

SEQ ID NO: 585261 - DNA, 120 bp, Artificial Sequence
  ENSG00000172466_24 (sequence is synthesized)
catcattgtgtggaaaatgacccatgtgaatacaaatatttcctagttcagagattttggttatatctggtgcttggatcaagtttaaaaatggaaggtgagattttgcatgagcctatt

SEQ ID NO: 585262 - DNA, 120 bp, Artificial Sequence
  ENSG00000172466_25 (sequence is synthesized)
aaaaagcatagtaataaatgcaaggccagctggtggaaaagtgaggcagaatggagcttgtttataggttttctgataacaattataaaaaatgtgctttatagattaagatttattgaa

SEQ ID NO: 585263 - DNA, 120 bp, Artificial Sequence
  ENSG00000172466_26 (sequence is synthesized)
atgatataatgtattttaagttatacaagaaaatgtagggacttttgtttgggtctttttctctttgtggctgaggggaaacaagtcagtgtccaataaagctgtaaactcctctgctct

SEQ ID NO: 585264 - DNA, 120 bp, Artificial Sequence
  ENSG00000172466_27 (sequence is synthesized)
aagataaatgatgtgatttatttatttataactggcttctttccaagtaggttttcaggtggcatatttggaagacggctggaatgacagaattcttgtatcagagtaggtaagaaggga

SEQ ID NO: 585265 - DNA, 120 bp, Artificial Sequence
  ENSG00000172466_28 (sequence is synthesized)
gcaacctctcaatggctattatgtcatgctttttaagatcgtatgcggttcctatatacaaggaagcttccctgtggtagatttgtcataaatgccaaagatatttggtaatgtgagtgt

SEQ ID NO: 585266 - DNA, 120 bp, Artificial Sequence
  ENSG00000172466_29 (sequence is synthesized)
agaaaaagtagtatgagggttggcaaatactgtttttgtcttggcagctctaatatctgcattgttcagaaaggattctgaggctaaggcaaagctctgtgggaaaaagggactggacca

SEQ ID NO: 585267 - DNA, 120 bp, Artificial Sequence
  ENSG00000172466_30 (sequence is synthesized)
aaaaaaactggatggtggcacacaagaagaggaaatgatgagatgtgtactttctatctctggttaggcttagtccccactagacaaattgattttaaatactatgtagtgatttttaaa

SEQ ID NO: 585268 - DNA, 120 bp, Artificial Sequence
  ENSG00000172466_31 (sequence is synthesized)
ttccatccacacattcattacccacacagataatcatagaaatttgggggagtgcctagcttctgatgaagtggtgatatggcagtgccaagcagtggcatcgccagagtatctgtttgg

SEQ ID NO: 585269 - DNA, 120 bp, Artificial Sequence
  ENSG00000172466_32 (sequence is synthesized)
ttagcaaatgagcagtcattttaggtcatgcagattgctgatatctgcccagtagccactgagcatttgctggttttttcttctggctttcttggaggttaagctctctgtagtcatacc

SEQ ID NO: 585270 - DNA, 120 bp, Artificial Sequence
  ENSG00000172466_33 (sequence is synthesized)
cagttggtacttgatctttagcaatatgtctcatattcatgtaaattgaagggagggttacatgtactgaaataatctgcatgctaggcattggcttagacaccgtacctatctcactta

SEQ ID NO: 585271 - DNA, 120 bp, Artificial Sequence
  ENSG00000172466_34 (sequence is synthesized)
gatttgtggactaggaaagcaagattcagagatcatgtgacttgcatgtggcctagagataaaattcaaatctggttctgtagactccagggacatattcaccatgccatgggtggtggc

SEQ ID NO: 585272 - DNA, 120 bp, Artificial Sequence
  ENSG00000172466_35 (sequence is synthesized)
tattaaaccttgataaatttgtgtttatggttaacaaatgtgaaagctattaaacattgctggtttgaattttttacagtgcagaaatgtaaaatgaaaaaggatatttcctttcacagt

SEQ ID NO: 585273 - DNA, 120 bp, Artificial Sequence
  ENSG00000172466_36 (sequence is synthesized)
gttaccgagaagtcatgataatttcgtttgttcttccagatttaggcatatacttatttaatcaataatgtgttaacagctgacacctgtggttgctgtgacaggcactatttgaagtgc

SEQ ID NO: 585274 - DNA, 120 bp, Artificial Sequence
  ENSG00000172466_37 (sequence is synthesized)
tttatcatggattaactcttaatcctcagctaccgtataaagtaggacataaccccatttcacatgcactacactgagacttgcctcctctccccccacattgaagatgttcttttttca

SEQ ID NO: 585275 - DNA, 120 bp, Artificial Sequence
  ENSG00000172466_38 (sequence is synthesized)
taactatatactattccattgcatgaatattctgtaatttatttaatcccctatggattgataattaggttcattatagatagaagtgtaattaacattcctgtacatgtattttgctac

SEQ ID NO: 585276 - DNA, 120 bp, Artificial Sequence
  ENSG00000172466_39 (sequence is synthesized)
ttgtgtgggtatttctgtaggatgaataactagaaatttattggatcaggtttcacatttgcagttttgaaaactactaccaaaaagatttcaccaatttacaactccatcattagtaag

SEQ ID NO: 585277 - DNA, 120 bp, Artificial Sequence
  ENSG00000172466_40 (sequence is synthesized)
aatgcctgtttgcctatagtctgccaaccctgaatccttaaaaatttttgccaatctggtaggcaaaatttctttcttttctttgaatattaatgaggaggaacatcttttcatgtttct

SEQ ID NO: 585278 - DNA, 120 bp, Artificial Sequence
  ENSG00000172466_41 (sequence is synthesized)
tggccatttgcatttcctattatgaattgcttttgcccattttcctttttttaattatgaaagtctaatgactaccttctcattgtataaaaaacacagttctttgaatagagagaccct

SEQ ID NO: 585279 - DNA, 120 bp, Artificial Sequence
  ENSG00000172466_42 (sequence is synthesized)
tttctccaatgctaccaatcacattccacttaccacagtttaacatacatcctctagtcacctttccgtacgaatatacatacacataaaaacactttttacataaataggatctcatat

SEQ ID NO: 585280 - DNA, 120 bp, Artificial Sequence
  ENSG00000172466_43 (sequence is synthesized)
tctgtagctttttaaaattttggtctcaaaaaaagataacaggtctttaaatttctttaatggttgaatatgattaaatactatgaaaatgccattatttattcccttaatttttttcct

SEQ ID NO: 585281 - DNA, 120 bp, Artificial Sequence
  ENSG00000172466_44 (sequence is synthesized)
ctcgctattacattgccaaagtaaacatcctattcagatgtctttgtgcatgtgtgtgaatatttctttagtctggagtccagtaaggtggatttttggatcaaagggtttgttctctgt

SEQ ID NO: 585282 - DNA, 120 bp, Artificial Sequence
  ENSG00000172466_45 (sequence is synthesized)
ccaccttcagtcttcccaaaggccttcataactgtattttcaccaagtgtatggagaatgttcatttccccatataaccatacctacacttgatagtttttatctgttgggcgaaaaaga

SEQ ID NO: 585283 - DNA, 120 bp, Artificial Sequence
  ENSG00000172466_46 (sequence is synthesized)
accttttcttattttgcatttccctgattataaaaaaaaatggtgagattggggttattttcatgtttattggccatttatagtttactgtggattgtttgtatcccttacctgctttct

SEQ ID NO: 585284 - DNA, 120 bp, Artificial Sequence
  ENSG00000172466_47 (sequence is synthesized)
attgggttatgtgtggatatattgtttttatttgttcagcatctccttccccatcttctggtaacacaacctttatttatttgtggggaacctattccctgtggcttaggtgagcatgtg

SEQ ID NO: 585285 - DNA, 120 bp, Artificial Sequence
  ENSG00000172466_48 (sequence is synthesized)
accaggcctggcctcctgagtcccacagcttcctagccacagtgataaaagaatgggtatataacttaagccaggctaaggaaagcccttaacagaacttctgctggaactactggaaag

SEQ ID NO: 585286 - DNA, 120 bp, Artificial Sequence
  ENSG00000172466_49 (sequence is synthesized)
aaggctttatggagatcccaggaaccaaggaccatgtaagcctgaatttgtgccatgtggagagagtctgtctgaggagaaactcggatgctagcagaaatggaaagagaactaagttct

SEQ ID NO: 585287 - DNA, 120 bp, Artificial Sequence
  ENSG00000172466_50 (sequence is synthesized)
gatgtcatttttctggaggccctagatccagctgtgcctaaagcctgccctacctccggactttaaagttttgtgagccaataaagtccctttcttgtttaagataattgaattgagttt

SEQ ID NO: 585288 - DNA, 120 bp, Artificial Sequence
  ENSG00000172466_51 (sequence is synthesized)
ctgttctgattaatataggttatttgtattttcttattgatttgtagaaaacctttgtaattttaaattctagactttatgcactatataagttaataaaattagcatggccttccatga

SEQ ID NO: 585289 - DNA, 120 bp, Artificial Sequence
  ENSG00000172466_52 (sequence is synthesized)
gcgccgggggcttctgggaaaaggcttgtgaacggcgtttctgcgtctgccgtggacagcgaagctgctgcggttcctgagccggaggagtgcctgtgaagaaaacggggtattgccctg

SEQ ID NO: 585290 - DNA, 120 bp, Artificial Sequence
  ENSG00000172466_53 (sequence is synthesized)
caggatctaggatgggatactgtggtgagcaagacagacaaggtccctgcccttaagggacttaaagacaaaacaaaacaaaaaataaaacaagtaaataaatgagatcacttccattaa

SEQ ID NO: 585291 - DNA, 120 bp, Artificial Sequence
  ENSG00000172466_54 (sequence is synthesized)
taacagtgccatgaagggtcatgcgccatgaaaggcaggtggtgaggctgaggatcttgggccacaatgagccgaggagctgaggggattactgagaggatccacaagataatgcacgtg

SEQ ID NO: 585292 - DNA, 120 bp, Artificial Sequence
  ENSG00000172466_55 (sequence is synthesized)
tttggtcatctgaaatccgcggtcctgagtgctgggaagaggggctagaggacgtcgggccggggccggggccggggccgggatacacagcaggtctatgcagcagtaaggtgggcgatc

SEQ ID NO: 585293 - DNA, 120 bp, Artificial Sequence
  ENSG00000172466_56 (sequence is synthesized)
cacctgggacgaggtaccctgcccaaacattgtcgggaccgtgggccttccctccatttcccacaagcggagtgcctgtgaagaaaacggggtattgccctgaggcttatattctgcctc

SEQ ID NO: 585294 - DNA, 120 bp, Artificial Sequence
  ENSG00000172466_57 (sequence is synthesized)
gtgctggtatgccactgaatgaggtctgagcaggttttcttcacatctgaggggacagtgccagccagtcaacttttggggtggggctgaagtctgctgaaaatctgcagttttacatgt

SEQ ID NO: 585295 - DNA, 120 bp, Artificial Sequence
  ENSG00000172466_58 (sequence is synthesized)
ttcatgggacattcttctgtgcaataaagtttgagaagtatcattcttgatatatggggctgatattttcaacttctcatcatctgaattttagagtgacttttcacctgcgttccttat

SEQ ID NO: 585296 - DNA, 120 bp, Artificial Sequence
  ENSG00000172466_59 (sequence is synthesized)
ttcagctgtctagtctcttccacacttgggaatttctgtttcctgtgtgccgtttgtctccacttaatcttcacgctcctctgtttttcaagtctccaagcctcactatcctcctctaac

SEQ ID NO: 585297 - DNA, 120 bp, Artificial Sequence
  ENSG00000172466_60 (sequence is synthesized)
ctttcagtctctctctcttagccttatctcctgacttgatctttttgttaattatttactgttttcctcttcgctgaaggcagttgctaaccctatatgaactggatctttactccttaa

SEQ ID NO: 585298 - DNA, 120 bp, Artificial Sequence
  ENSG00000172466_61 (sequence is synthesized)
ggcatgaagttttagaaaagtcttaaatgacacttgctgttatctctgcctgcgtgtgagtgatgctaacccatgttggtaattcaggcttttctttcattggacacgtttcactgaggc

SEQ ID NO: 585299 - DNA, 120 bp, Artificial Sequence
  ENSG00000172466_62 (sequence is synthesized)
ttagaaataacgatttttctaagtaccatgacaaataccacatgggagaagctgcttttattggaaaactttcatttattaggggcatactgaatttttatgtcatgtctttggttaaca

SEQ ID NO: 585300 - DNA, 120 bp, Artificial Sequence
  ENSG00000172466_63 (sequence is synthesized)
caggaggcccccagcttatcttcagccccttcttgtcaagactcctgtgttctgcttttaggctaacattggctgtgacctgacttggcttgttcatttcagaaatagccactttctgac

SEQ ID NO: 585301 - DNA, 120 bp, Artificial Sequence
  ENSG00000172466_64 (sequence is synthesized)
atgtttttctaatttacatctttgtattttgatgtaatttctccctttctcaaagtaaaagaacattataatgatttcctagtggccaattttattttatttttattcttacaaagtttc

SEQ ID NO: 585302 - DNA, 120 bp, Artificial Sequence
  ENSG00000172466_65 (sequence is synthesized)
atccatacctagccacatcattttgactatctccctaaccatcttagaatctaccatctttctgacctttgttttctgactaccatttgtaaaccacttgcctatgttttattcagatat

SEQ ID NO: 585303 - DNA, 120 bp, Artificial Sequence
  ENSG00000172466_66 (sequence is synthesized)
cccttatatcatgatgttatactgttattcagagtaatttcattttttcttttttgagaataggccttaacaccagtgtcagagtggtttatagatgtgtgctagctattttagttcatt

SEQ ID NO: 585304 - DNA, 120 bp, Artificial Sequence
  ENSG00000172466_67 (sequence is synthesized)
aggctacaaaccggtacggcatgttgctgtactgaatactgtagagaattgtaacacaatgctaactatttgtgtatcaaaacatagaaaagataagagtaaaatatgatataaaatgtt

SEQ ID NO: 585305 - DNA, 120 bp, Artificial Sequence
  ENSG00000172466_68 (sequence is synthesized)
tgaaaaaaaaaaaagatatgcctgtacagggcacttaccatgaatggacctcgctggattggaagttgctctaagaagtcatgcctgtgaagaaaacggggtattgccctgaggcttata

SEQ ID NO: 585306 - DNA, 120 bp, Artificial Sequence
  ENSG00000172468_0 (sequence is synthesized)
taagtgtacatgcttaggccttctgaagcagcatttgaagctgcagtcctgaaaaccatgcaggccggaagagtagataaagaaatatttatttgagatggcacatgtttcttcagaaac

SEQ ID NO: 585307 - DNA, 120 bp, Artificial Sequence
  ENSG00000172468_1 (sequence is synthesized)
tcaagatgtttcccccaaagatgaattaactgcttcagaagcctccactaggtctccattgtgtgaacacaccttccctggggactcagacttacggtcaatgattgaagaacatgcttt

SEQ ID NO: 585308 - DNA, 120 bp, Artificial Sequence
  ENSG00000172468_2 (sequence is synthesized)
tcaggttttgtcacaaggatccttgttagaaagtccaagttacacagtttgtgtctctgagccagataaagatgatgattttctttctctgaactttcccaggaaactttggaaaatagt

SEQ ID NO: 585309 - DNA, 120 bp, Artificial Sequence
  ENSG00000172468_3 (sequence is synthesized)
ggaaagtgaccaattcaagtctatttcatgggatgagaatggaacttgcatagtgattaatgaagaactcttcaagaaagaaattttggaaacaaaggctccttacagaatatttcaaac

SEQ ID NO: 585310 - DNA, 120 bp, Artificial Sequence
  ENSG00000172468_4 (sequence is synthesized)
ctttctagccacctttctgtcagaagagaaagaatcgtctgtcttaagcaagatacgcttcaccaaaatgaaactttccagatcttcaacttatgaaaacaggtatttatgttgcaactt

SEQ ID NO: 585311 - DNA, 120 bp, Artificial Sequence; identical to SEQ ID NO: 564447
  ENSG00000172468_5 (sequence is synthesized)

SEQ ID NO: 585312 - DNA, 120 bp, Artificial Sequence; identical to SEQ ID NO: 564448
  ENSG00000172468_6 (sequence is synthesized)

SEQ ID NO: 585313 - DNA, 120 bp, Artificial Sequence; identical to SEQ ID NO: 564449
  ENSG00000172468_7 (sequence is synthesized)

SEQ ID NO: 585314 - DNA, 120 bp, Artificial Sequence; identical to SEQ ID NO: 564440
  ENSG00000172468_8 (sequence is synthesized)

SEQ ID NO: 585315 - DNA, 120 bp, Artificial Sequence; identical to SEQ ID NO: 564441
  ENSG00000172468_9 (sequence is synthesized)

SEQ ID NO: 585316 - DNA, 120 bp, Artificial Sequence; identical to SEQ ID NO: 564442
  ENSG00000172468_10 (sequence is synthesized)

SEQ ID NO: 585317 - DNA, 120 bp, Artificial Sequence; identical to SEQ ID NO: 564443
  ENSG00000172468_11 (sequence is synthesized)

SEQ ID NO: 585318 - DNA, 120 bp, Artificial Sequence; identical to SEQ ID NO: 564444
  ENSG00000172468_12 (sequence is synthesized)

SEQ ID NO: 585319 - DNA, 120 bp, Artificial Sequence; identical to SEQ ID NO: 564445
  ENSG00000172468_13 (sequence is synthesized)

SEQ ID NO: 585320 - DNA, 120 bp, Artificial Sequence; identical to SEQ ID NO: 564446
  ENSG00000172468_14 (sequence is synthesized)

SEQ ID NO: 585321 - DNA, 120 bp, Artificial Sequence
  ENSG00000172468_15 (sequence is synthesized)
taccatctggtaacaaggctcccatttctacttggagtggagattcctggttgctgtgatgaaatgggatacactggggatccagctgcacaacttttcggaagcagcattcactgtgga

SEQ ID NO: 585322 - DNA, 120 bp, Artificial Sequence
  ENSG00000172468_16 (sequence is synthesized)
tttggtatattatgcagcttttggtgtcacaggctaaggtctgacaagattcaccatgcagttttctgggatagcagaaaatgaacatggatttggacagccagattcctcaggatggaa

SEQ ID NO: 585323 - DNA, 120 bp, Artificial Sequence
  ENSG00000172468_17 (sequence is synthesized)
acctagtggtgccatctaaccatatacgtatatttccaagttgtgcataagtagaaaaagtttagaatccatcatctaaaaagggaatcctgatttcctttcctggcagaccatgacaga

SEQ ID NO: 585324 - DNA, 120 bp, Artificial Sequence
  ENSG00000172468_18 (sequence is synthesized)
aagacaaaggtcatttcacctatatccacatgctattaactttttagttctcaaactgggttttcagaaggtagtgtgatagacatggttaaatggttaacaggaagaatgtttaaaaaa

SEQ ID NO: 585325 - DNA, 120 bp, Artificial Sequence
  ENSG00000172468_19 (sequence is synthesized)
atggttaaatggttaacaggaagaatgtttaaaaaaaaaattccggctggggtggtggctcaggcctgtaatcacagcattttgggaggccaagctgagtcaggagaatcgcttgaaccc

SEQ ID NO: 585326 - DNA, 87 bp, Artificial Sequence
  ENSG00000172468_20 (sequence is synthesized)
ttgcgtaaagaaatccacaacaataaaaaggctaatgccagacacaataaaaaatgaaaagaataacttgggtgaacagcaaggcaa

SEQ ID NO: 585327 - DNA, 120 bp, Artificial Sequence; identical to SEQ ID NO: 564456
  ENSG00000172468_21 (sequence is synthesized)

SEQ ID NO: 585328 - DNA, 120 bp, Artificial Sequence
  ENSG00000172469_0 (sequence is synthesized)
gaggggctgtctgggctcggggcgcggcggcagtcagctctatgttcgcggtcttaacctctcctctggccgagtccttgcaagaagtgaattacccgaccctgcaaaacacttactatt

SEQ ID NO: 585329 - DNA, 120 bp, Artificial Sequence
  ENSG00000172469_1 (sequence is synthesized)
ttggagtttaaagtatgtcatcatggcaaagtttcggagaaggacttgcatcattttggcactttttattctatttattttctctctgatgatgggtttaaaaatgctgagaccaaatac

SEQ ID NO: 585330 - DNA, 120 bp, Artificial Sequence
  ENSG00000172469_2 (sequence is synthesized)
agctacttttggagctccttttggacttgaccttcttccagaacttcatcaacgaactattcatttggggaaaaattttgatttccaaaagagtgacagaatcaacagtgaaacaaatac

SEQ ID NO: 585331 - DNA, 120 bp, Artificial Sequence
  ENSG00000172469_3 (sequence is synthesized)
caagaatttaaaaagtgttgaaatcactatgaaaccttccaaagcctctgaacttaacttggatgaactaccacctctgaacaattatctacatgtattttattacagttggtatggaaa

SEQ ID NO: 585332 - DNA, 120 bp, Artificial Sequence
  ENSG00000172469_4 (sequence is synthesized)
tccacaatttgatggtaaatatatacattggaatcatccagtgttagagcattgggaccctagaatagccaagaattatccacaagggagacacaaccctccagatgacattggctccag

SEQ ID NO: 585333 - DNA, 120 bp, Artificial Sequence
  ENSG00000172469_5 (sequence is synthesized)
cttttatcctgaattgggaagttacagttctcgggatccttctgtcatagaaactcacatgagacaaatgcgctcagcttcaattggtgtactagccctctcttggtacccacctgatgt

SEQ ID NO: 585334 - DNA, 120 bp, Artificial Sequence
  ENSG00000172469_6 (sequence is synthesized)
aaatgatgaaaatggagaacctactgataacttggtacccactattttggataaagctcataaatataacctaaaggttacttttcacatagaaccatatagcaatcgagatgatcaaaa

SEQ ID NO: 585335 - DNA, 120 bp, Artificial Sequence
  ENSG00000172469_7 (sequence is synthesized)
catgtacaaaaatgtcaagtatattatagacaaatatggaaatcatccggccttttacaggtacaagacgaagactggcaatgctcttcctatgttttatgtctatgattcctatattac

SEQ ID NO: 585336 - DNA, 120 bp, Artificial Sequence
  ENSG00000172469_8 (sequence is synthesized)
caagcctgaaaaatgggccaatctgttaaccacctcagggtctcggagtattcgcaattctccttatgatggactgtttattgcccttctggtagaagaaaaacataagtatgatattct

SEQ ID NO: 585337 - DNA, 120 bp, Artificial Sequence
  ENSG00000172469_9 (sequence is synthesized)
tcaaagtggttttgatggaatttacacatattttgccacaaatggctttacttatggctcatcacatcagaattgggctagcctaaaattattttgtgataaatacaacttaatatttat

SEQ ID NO: 585338 - DNA, 120 bp, Artificial Sequence
  ENSG00000172469_10 (sequence is synthesized)
cccaagtgtgggcccaggatacatagataccagcatccgtccatggaacacgcaaaacactcggaaccgaatcaatgggaagtattatgaaattggtctgagtgccgcacttcagacacg

SEQ ID NO: 585339 - DNA, 120 bp, Artificial Sequence
  ENSG00000172469_11 (sequence is synthesized)
ccccagcttaatttctatcacctcttttaatgagtggcatgaaggaactcagattgaaaaagctgttcccaaaagaaccagtaatacagtgtacctagattaccgtcctcataaaccagg

SEQ ID NO: 585340 - DNA, 120 bp, Artificial Sequence
  ENSG00000172469_12 (sequence is synthesized)
tctttacctagaactgactcgcaagtggtctgaaaaatacagtaaggaaagagcaacttatgcattagatcgccagctgcctgtttcttaatgcattgattaaagtttaatagttatcaa

SEQ ID NO: 585341 - DNA, 120 bp, Artificial Sequence
  ENSG00000172469_13 (sequence is synthesized)
aaaatagctttcgttttgagttctggaaagaaaactgtcaaaatcagtatatactattagttatatttaaaaatatttttttaaattctttacagataatattatacttgttacccttca

SEQ ID NO: 585342 - DNA, 120 bp, Artificial Sequence
  ENSG00000172469_14 (sequence is synthesized)
tacttgttacccttcacaataccacatgagaaaatatctgagacaaaatgtatacaaatatattccttatggcataatttattgcatttctgactgaaatcaaaattctgatttgatggc

SEQ ID NO: 585343 - DNA, 120 bp, Artificial Sequence
  ENSG00000172469_15 (sequence is synthesized)
aattgaattttcattttacaatagataaatgcttgtgctacctaaagcacttagcacacagttaaattatatttacatcctagacccaaataaataggattgtgtgtatatttgggatat

SEQ ID NO: 585344 - DNA, 120 bp, Artificial Sequence
  ENSG00000172469_16 (sequence is synthesized)
ctattgaagaaaaaaagaaaaccccttaaagataatgtacatgcttcatgtcatgtctttaaaataatttaatcaactttattgtcttagtatttagactctggataactctacaataat

SEQ ID NO: 585345 - DNA, 120 bp, Artificial Sequence
  ENSG00000172469_17 (sequence is synthesized)
gaggaaattcttaagaataacaaaatcactgtaccttcctctcaattttgctgtgaacctgaaatggctttaaattaatactcttattttttatttaatttaattacataaattaaacct

SEQ ID NO: 585346 - DNA, 120 bp, Artificial Sequence
  ENSG00000172469_18 (sequence is synthesized)
taccatgaccaaattgtgttaggacggcctgctatctacagcacagtgtgtcatttgcagatttgtggttacctataccacgctaggtgttttgacatgtttagtgtttctgctttacag

SEQ ID NO: 585347 - DNA, 120 bp, Artificial Sequence
  ENSG00000172469_19 (sequence is synthesized)
agaagctatgaaagtccttttatgaaaaagttactgattgcttctcagttattaggaaaacagttgtttcacaattattatgtagatatgatgcccaaatatcatttttagtatatcttg

SEQ ID NO: 585348 - DNA, 120 bp, Artificial Sequence
  ENSG00000172469_20 (sequence is synthesized)
tcgatctttaagttgttactattgtgttattcatgtctttaaatcagataccaaatattttttaggaaagaaaaatgttattactgtcattaggttgtcttttaatactttaagttattt

SEQ ID NO: 585349 - DNA, 120 bp, Artificial Sequence
  ENSG00000172469_21 (sequence is synthesized)
tgacgaaaagtaatagagaaaatttacttagcattttagattctagagacatggaaatgaaaattattttatgtctagagtaggtcctgaagtttggctttacattaagtttagcactgt

SEQ ID NO: 585350 - DNA, 120 bp, Artificial Sequence
  ENSG00000172469_22 (sequence is synthesized)
agcactgtatcagaatgaagaaactaatattttacataaaaactaatactttcaattttttatatagtaatatccccattttgtaaatgttagacttttatcatacctgtaagttaaaat

SEQ ID NO: 585351 - DNA, 120 bp, Artificial Sequence
  ENSG00000172469_23 (sequence is synthesized)
tcaataacttgtcatgttgtgacaaattgatcacttgtgtacgaaaaataaatctccttaaaaactaaataaaatgcactgtattcttacagttaatgtttataactatagtaaaaaatt

SEQ ID NO: 585352 - DNA, 120 bp, Artificial Sequence
  ENSG00000172469_24 (sequence is synthesized)
aatatatatcctattacataaatgttatttcttaggtgttccattaagaagagcaatagaataatgctaaaaaataatgcctataaatcttcagagtataaagacatccattcagaaaca

SEQ ID NO: 585353 - DNA, 120 bp, Artificial Sequence
  ENSG00000172469_25 (sequence is synthesized)
cagaaacaaaaattagcactaaattttttataaaatagaccagatgacaaaatttattttatttttaaacagtggttttgacacaaattatgttattgaaaagcattattaatgtttaat

SEQ ID NO: 585354 - DNA, 120 bp, Artificial Sequence
  ENSG00000172469_26 (sequence is synthesized)
aattttggaatttgccatttctcagagaatgatcaggccttaggaaattaatacagtagtagtaatcattttctaggggaaaataaaagaataaatcactatactgatattttgatacaa

SEQ ID NO: 585355 - DNA, 120 bp, Artificial Sequence
  ENSG00000172469_27 (sequence is synthesized)
gcaagcacttacatggtaatcactatatagatccaacctgtggattttcttcttatgtccatttaactagaatatattattttaggtataatttacaaatgtcacacctaataatctttt

SEQ ID NO: 585356 - DNA, 120 bp, Artificial Sequence
  ENSG00000172469_28 (sequence is synthesized)
ataatataccatatttcattaaagttttgttagagaagtatctaccacagaggagtttttgtcattgtgtacgttgtgtatttgaacccaccatgacagaaagtaaattttaggaaatag

SEQ ID NO: 585357 - DNA, 120 bp, Artificial Sequence
  ENSG00000172469_29 (sequence is synthesized)
ttatgagattaagggaaaatctataaaaacaaggttagcatattctcaacacagataccaccactttctttttcccattatagacatggtgaatccacacagcatacttcatctctgagc

SEQ ID NO: 585358 - DNA, 120 bp, Artificial Sequence
  ENSG00000172469_30 (sequence is synthesized)
tttgttgtgattcctcaacacattaccctaaccagccagcagtaacagatttcagagtaagataaagcagattctgtcttcattgcaaaaagttattctcaatggaagaatggcatctga

SEQ ID NO: 585359 - DNA, 120 bp, Artificial Sequence
  ENSG00000172469_31 (sequence is synthesized)
tctcataattactagtttatattaatatagtttttttctccctttttaataaaataattacagtcatccctcagtgtctgtgggggattggttccagttacccctatagataccaaaatc

SEQ ID NO: 585360 - DNA, 120 bp, Artificial Sequence
  ENSG00000172469_32 (sequence is synthesized)
tgcagatgctcaagtccctgatataaactggcatagtagttgcatataatctatgcacatcctcctgtatacattaagtcatctctagattatttataacacttaatacaatgtaaatgc

SEQ ID NO: 585361 - DNA, 120 bp, Artificial Sequence
  ENSG00000172469_33 (sequence is synthesized)
tatgtagttgttataccatactggttagtgaataattacatgaaaaaaaagagtctgtacatcttcagagtttcagtcggcaatttcttggccatggatgtagaacctacagataaggtg

SEQ ID NO: 585362 - DNA, 120 bp, Artificial Sequence
  ENSG00000172469_34 (sequence is synthesized)
agccaactgcattaggaaataactctaataattctgttaattcttagagaggaaaactttcaaaatcttcctcaggtatttattacaactgcctttaccattttagttgtaacacagttt

SEQ ID NO: 585363 - DNA, 120 bp, Artificial Sequence
  ENSG00000172469_35 (sequence is synthesized)
aaattgttatgataacaagtaaataagagcaaagaatgtatttcttaattcaaaactatacgtttgaattcaatatggtataacttaaagtggtataatacatacaatgcatgaatcata

SEQ ID NO: 585364 - DNA, 120 bp, Artificial Sequence
  ENSG00000172469_36 (sequence is synthesized)
atggattcttttataagttattaatttttatggtttaatcagtctaattgttttgactgttatagaaaccaaatattttactgtttcttttaaggactaatattgtcaaaaactgctgtt

SEQ ID NO: 585365 - DNA, 120 bp, Artificial Sequence
  ENSG00000172469_37 (sequence is synthesized)
attaacttcacttgagttgtttaacttccttctgttttaagattgtaattaaaaattactattttgttatatggaatggttaatttttacctaataaaaacatagatgaaatacattgta

SEQ ID NO: 585366 - DNA, 120 bp, Artificial Sequence
  ENSG00000172469_38 (sequence is synthesized)
gaaattgggtattcttacatttttccagctctacataaagatggaacaagaagttcatgagccaaagaatgtggtagcctctacaagcttgaatggcaaggaaagggattctttcctaga

SEQ ID NO: 585367 - DNA, 120 bp, Artificial Sequence
  ENSG00000172469_39 (sequence is synthesized)
gcctccagaaaggaatgtcatccagtccaatacctggccttgatcttagcatattaagacccatgtcaacactcctgacatgcaaaactgtaaggtgtactagccctctcttggtaccca

SEQ ID NO: 585368 - DNA, 120 bp, Artificial Sequence
  ENSG00000172469_40 (sequence is synthesized)
tatgcatataaatgattttttgtgtaactttactagttaattttctcattattattaattatattgttaagctcatacctccaaattaaactgtatgtatgatcttaaacatccaggcaa

SEQ ID NO: 585369 - DNA, 120 bp, Artificial Sequence
  ENSG00000172469_41 (sequence is synthesized)
gcaaccacattttaacactgcccttagtgtatattgtttaatttttacattttggagcatttctggatatattgttgatttctaatttaattcactttctcaattttattaaattatgat

SEQ ID NO: 585370 - DNA, 120 bp, Artificial Sequence
  ENSG00000172469_42 (sequence is synthesized)
ttacataaaatacaatgaatttcccactttaagtttatagctcattgatgttactcaaaagtatatacctgtttgaataccaccccaatcaagaagtaaaatatttctatagcccaaaaa

SEQ ID NO: 585371 - DNA, 120 bp, Artificial Sequence
  ENSG00000172476_0 (sequence is synthesized)
ccaaacatggatcctcatgattttattttctagattggctgataggctgaataatctcctgtagggtaagaagtgtcaactgtatcaagcacatggaggtggactggctacaggagaaag

SEQ ID NO: 585372 - DNA, 120 bp, Artificial Sequence
  ENSG00000172476_1 (sequence is synthesized)
tgtgacgtgggtgaaggagttcttattgagccatgggaggaagaaatagtacagaagagcaaagaataataatgagtcagctagacagaagacaggagtcatcagatttgtaccctagtt

SEQ ID NO: 585373 - DNA, 120 bp, Artificial Sequence
  ENSG00000172476_2 (sequence is synthesized)
actcgacccatcaactgactgtggtttttgggaacaggcccggcaccacctctgcgcacaaccccgcgggcctggctcaggcgggagtgcggggccagcaccatgagcgccccgggcagc

SEQ ID NO: 585374 - DNA, 120 bp, Artificial Sequence
  ENSG00000172476_3 (sequence is synthesized)
cccgaccaggcctatgacttcctgctcaagttcctgctggtgggcgacagggacgtaggcaagagtgagatcctggagagcctgcaggatggtgcagctgagtccccgtacagccatctc

SEQ ID NO: 585375 - DNA, 120 bp, Artificial Sequence
  ENSG00000172476_4 (sequence is synthesized)
ggggggatcgactacaagacgaccaccatcctgctggacggccagcgggtgaagctgaagctctgggatacgtcggggcagggaagattttgtaccatattccgctcctactctcgtggt

SEQ ID NO: 585376 - DNA, 120 bp, Artificial Sequence
  ENSG00000172476_5 (sequence is synthesized)
gcacaaggagtgatcctggtctacgacattgcaaaccgctggtctttcgagggtatggatcgatggattaagaagattgaggaacatgcccctggtgtccctaaaatcctggtggggaat

SEQ ID NO: 585377 - DNA, 120 bp, Artificial Sequence
  ENSG00000172476_6 (sequence is synthesized)
cgcctacatctggcattcaagaggcaggtgcccagggagcaggcccaggcctacgccgagcgcctgggtgtgaccttctttgaggtcagccctctgtgcaatttcaacatcatagagtct

SEQ ID NO: 585378 - DNA, 120 bp, Artificial Sequence
  ENSG00000172476_7 (sequence is synthesized)
ttcacggagctggccaggatagtgctgctgcggcacaggatgaattggctcgggaggccgagcaaggtactgagcttgcaagacctctgctgccgcaccatcgtgtcctgcacacctgtg

SEQ ID NO: 585379 - DNA, 120 bp, Artificial Sequence
  ENSG00000172476_8 (sequence is synthesized)
agtccttctccatggctaagggcctgaatgccaggatgatgcgaggcctctcctactccctcaccaccagctccactcacaagagcagcctctgcaaagtggagatcgtctgcccacccc

SEQ ID NO: 585380 - DNA, 120 bp, Artificial Sequence
  ENSG00000172476_9 (sequence is synthesized)
agagcccacccaaaaactgcaccagaaacagctgcaaaatttcttaaggaaggcaccaaaaggaaacaagctggaatcgctccaggaaaaactctggttacacctggaagatggaagtcg

SEQ ID NO: 585381 - DNA, 120 bp, Artificial Sequence
  ENSG00000172476_10 (sequence is synthesized)
cattgtagattcaagaaattagttttcagtttctcacgggaaccatgctgcttgggaatgtgtgtgatgccttctgtcaataaaaacacattacacagtttgactttgaatttctatttg

SEQ ID NO: 585382 - DNA, 120 bp, Artificial Sequence
  ENSG00000172476_11 (sequence is synthesized)
gatgtgcatgaagctcttgttttaaacgtgtgtttataaaggggaaattagtactttgctcaactcttgataacgtgaaattttgaatgttacttatatcataatcacgctgcaactttt

SEQ ID NO: 585383 - DNA, 120 bp, Artificial Sequence
  ENSG00000172476_12 (sequence is synthesized)
tccttaaaataaccgcctttgttagaatggtgatatggcaatgatgagtataaattcaaggaaatttgagaagcaatgatagtgagataattcagtcatcgatagtacaagaggggcctt

SEQ ID NO: 585384 - DNA, 120 bp, Artificial Sequence
  ENSG00000172476_13 (sequence is synthesized)
tttgtaaacctcctttttaatgtcaaagcaccaatttataaaacactgcagatgcatatagagattgtatataacagatctgtccagcttgtgcatgaaatggatttgataaagtttttg

SEQ ID NO: 585385 - DNA, 120 bp, Artificial Sequence
  ENSG00000172476_14 (sequence is synthesized)
ctatgttatttactacatttggggattaatacgtgatttatatgtatgtttttctgtaaatctactttttttgtacgagatgttctacaagatatgaagctaagggaggaaaacaccaaa

SEQ ID NO: 585386 - DNA, 120 bp, Artificial Sequence
  ENSG00000172476_15 (sequence is synthesized)
gatatctctagttatgttgaacatagccaatatggtttcaatggatcaataagaaaaaaccatttcagtaaggaatgaaatacgtacttatttgagaaaatgtttcttaacagtaaaaaa

SEQ ID NO: 585387 - DNA, 120 bp, Artificial Sequence
  ENSG00000172476_16 (sequence is synthesized)
atactctcaacaggttttctcatttgctccttgggacagctcggtaaggatgatacagtcagttctatctcacagataatcaagctcaggctttcagagcctaagtcaccttcccaggta

SEQ ID NO: 585388 - DNA, 120 bp, Artificial Sequence
  ENSG00000172476_17 (sequence is synthesized)
agtggcaggattggaatgaggtttcatccctcaccctccctaaaggaccctgagcacccccttttagaagatgggcttccagggcttgagaaatgtcagattccactcccctgctattgt

SEQ ID NO: 585389 - DNA, 120 bp, Artificial Sequence
  ENSG00000172476_18 (sequence is synthesized)
ggccccatgggtcccccactccacaacccctctgggtgatgaggaagacagaagtgaaatcctgcactttatgccaagagactgggtgtgggaccgtatgagttggctgatcccttaagt

SEQ ID NO: 585390 - DNA, 120 bp, Artificial Sequence
  ENSG00000172476_19 (sequence is synthesized)
ggtgagtgggctcaggcagaagcttaggtgttggccttgggacaggtgagctgaagagaaggaaagtaacctgcactgaactactttaggcaaatgcactctatatttcatctcctttat

SEQ ID NO: 585391 - DNA, 120 bp, Artificial Sequence
  ENSG00000172476_20 (sequence is synthesized)
cctaacggctgttcaaggtaccgatgattatgatcattattccaatcagggtgctgtctttaagggagtttgtgtaaatcagggagagaactttattatctccttattgtcagctaaatc

SEQ ID NO: 585392 - DNA, 120 bp, Artificial Sequence
  ENSG00000172476_21 (sequence is synthesized)
tggaattaatctaaaggttttttttttctctatttgccctgaagcccacagagaaatagaaatgtttttcttatcctttattcacgtttgttctgtattgatgagtatttagaatgtttc

SEQ ID NO: 585393 - DNA, 120 bp, Artificial Sequence
  ENSG00000172476_22 (sequence is synthesized)
tcattttttcctttttaaaaagatttcagcaatgctatttcaaataaccacttacctggctattttggacatgtgaaaattttttcctccattacatttgtaaacatctatcccttgggg

SEQ ID NO: 585394 - DNA, 120 bp, Artificial Sequence
  ENSG00000172476_23 (sequence is synthesized)
cttgatttcaataatttaaactcccttatatgtgtatgagcattctcatttctttaaccatctttgtacctgttgtagttacaatatttaagtgtatttataactgataagtgtgtttcc

SEQ ID NO: 585395 - DNA, 120 bp, Artificial Sequence
  ENSG00000172476_24 (sequence is synthesized)
atttccttgatgtatttggtccctcatcctgcccccatacacagacacacacagagcctttttcttttgcatctttttcttttgcaaattaaaaaaaaattctttttcggtttttttcta

SEQ ID NO: 585396 - DNA, 120 bp, Artificial Sequence
  ENSG00000172476_25 (sequence is synthesized)
catttaaattttgtcagatgataggtgataaaaggatatttagatggtttcattagcattctttaatgtattagtgagctagaatgcattttcttgtgattactggccatttgcgtttct

SEQ ID NO: 585397 - DNA, 120 bp, Artificial Sequence
  ENSG00000172476_26 (sequence is synthesized)
tcacctgtgaaccatatacatattttttcagttttgttattttgttataggagctgtacatgtgttaaacctaaaacccttcactgatggatgcatgcattatttcaacacatctttgtt

SEQ ID NO: 585398 - DNA, 120 bp, Artificial Sequence
  ENSG00000172476_27 (sequence is synthesized)
gggtgaatattatttatgagacactctagcaaaatccatgtcctagatatctcttctgagatcttggctcttatatttatgggagatgtccccctgcagcaagaaaagtattagtgccca

SEQ ID NO: 585399 - DNA, 120 bp, Artificial Sequence
  ENSG00000172476_28 (sequence is synthesized)
tgtaaacatgcgtggcttgtcaaggatcacatgcacagacagttcacacttactcctaaacccggcatggccacagagtagaaagggtgtgtagtgcgttatatgaggagagcactggct

SEQ ID NO: 585400 - DNA, 120 bp, Artificial Sequence
  ENSG00000172476_29 (sequence is synthesized)
tgtgatttctgtgatctctatattaatggcaatgttttaaaaaattacataacatttctgagtttgccttttctcatttgtaaaatggaaacaattatagctaccaaagacaactgttct

SEQ ID NO: 585401 - DNA, 120 bp, Artificial Sequence
  ENSG00000172476_30 (sequence is synthesized)
gaaagcaaaagaacaaaatattttaagcgtcatacacagcatagggtacgtacagtactcaacacatcttagtccctttcctatcccatacccgtccttcctttaaaggagattcctttg

SEQ ID NO: 585402 - DNA, 120 bp, Artificial Sequence
  ENSG00000172476_31 (sequence is synthesized)
acataatccaaaaggcatggttccataacgatcacatgaaagttttaagggaaatgtataggtttccatgatgaattaactgctgtgtcactactctgtgctgggtaagaaaaaggaaaa

SEQ ID NO: 585403 - DNA, 120 bp, Artificial Sequence
  ENSG00000172476_32 (sequence is synthesized)
caatcgctgaatcagtttcctagggtttgtaaaagaaatccatcaaagccaccacctcatttcgctttatttcacagacttccccatctcattttttatgttctatgctaatttctcaag

SEQ ID NO: 585404 - DNA, 120 bp, Artificial Sequence
  ENSG00000172478_0 (sequence is synthesized)
actgtgctgtcactctggaattctgctgtgtgggagctgaggccccacctgcagacctgctgctcacctgggcaggtgcctcctcacagcccatctgcacagctggcctgcggagtcctc

SEQ ID NO: 585405 - DNA, 120 bp, Artificial Sequence
  ENSG00000172478_1 (sequence is synthesized)
ctcaggggccactggccctcacctgccactgttgaagggatgcctgcccctgctctccccacctcagccatggccgtgcaggtgcccctgtggcaccactacctgcaggccatccggtcc

SEQ ID NO: 585406 - DNA, 120 bp, Artificial Sequence
  ENSG00000172478_2 (sequence is synthesized)
cgggaggcgccgcgtgcccaggacttccagcgcgcagagaacgtgctgctcacggtgctggagcgcgtgcatgccctggacccccgcttcatcgtggactactcccgtggcctggaggcc

SEQ ID NO: 585407 - DNA, 120 bp, Artificial Sequence
  ENSG00000172478_3 (sequence is synthesized)
ttccagttcgccctgcgctcctctgaggacccaatggacatggaggtgcccctgtgggtggatgccgaggctctactgattgaggaaccagaggccacccagccggaggatggccttgaa

SEQ ID NO: 585408 - DNA, 120 bp, Artificial Sequence
  ENSG00000172478_4 (sequence is synthesized)
ttatgccacctgggtgtgcccagggaaggggctggcctggagcggtggaccaccgaggataccttcactgcctcctcggagggtgacgccaagtgccgtggacacattgtgcccagcaag

SEQ ID NO: 585409 - DNA, 120 bp, Artificial Sequence
  ENSG00000172478_5 (sequence is synthesized)
gtcctgtgtgtcctcaaggacctgctggtagcagccatcgtacactgcaagcaccacagtctcatcgcaccaggttcgctgaacgcggccagcctgagggaggagcagctccacctgtcc

SEQ ID NO: 585410 - DNA, 120 bp, Artificial Sequence
  ENSG00000172478_6 (sequence is synthesized)
ttgctggtgtccagcggctggagaacaatcagcttccacgtggtgcccgtggtgagaaggaagcttggggcgcctgccctggagggggtgcagcagatgcccggattccctgagggcagc

SEQ ID NO: 585411 - DNA, 120 bp, Artificial Sequence
  ENSG00000172478_7 (sequence is synthesized)
ttgagaaggatcctcagccaaggggtggacctggtgccggccagcgcccagctctggaggacctccactgactacctgctcacgaggctgctgggggagctgggctccctgcagggtcat

SEQ ID NO: 585412 - DNA, 120 bp, Artificial Sequence
  ENSG00000172478_8 (sequence is synthesized)
cgcctggacagcctctccatcctcgaccgggtcaaccacgagagctggcgtgacagtggccagactgacggcctgacctttggccacctgaagatggtgctgctgtgggcctctgtgctc

SEQ ID NO: 585413 - DNA, 120 bp, Artificial Sequence
  ENSG00000172478_9 (sequence is synthesized)
ttcctggcgcccgaggactgggcagaactgcagggcgccgtgtaccgcctgctggtggtgctgctctgttgcctggccacgcggaagctgccccacttcctccacccgcagcgcaacctg

SEQ ID NO: 585414 - DNA, 120 bp, Artificial Sequence
  ENSG00000172478_10 (sequence is synthesized)
gggcagcggcctggaccttggtgccatctaccagcgcgtggagggcttcgccagccagcccgaggcggccctgcgcatccacgccacccacctgggccgcagccccccgccgcgcatcgg

SEQ ID NO: 585415 - DNA, 120 bp, Artificial Sequence
  ENSG00000172478_11 (sequence is synthesized)
ctccgggctcaaggcgctcctgcagctgccagccagtgaccccacttactgggccactgcctacttcgacgtcctgctggacaagttccaggtcttcaacatccaggataaggaccggat

SEQ ID NO: 585416 - DNA, 120 bp, Artificial Sequence
  ENSG00000172478_12 (sequence is synthesized)
ctctgccatgcagagcatcttccagaagaccaggactctgggaggcgaggagagctgagctgggccacctggtctcagccacctgttcttggctccccaacagactctgcactgcaccat

SEQ ID NO: 585417 - DNA, 120 bp, Artificial Sequence
  ENSG00000172478_13 (sequence is synthesized)
gggaggctcctgggatgtttggaagaagaaacgggcttctccttgagggggtagtggagggattttgtccccagcagtggcctctgagagtctttcagtgcctggtggggcagggcaggc

SEQ ID NO: 585418 - DNA, 120 bp, Artificial Sequence
  ENSG00000172478_14 (sequence is synthesized)
ctcttggagcacctcctccctgggtcagggcctggatgcaggtgccaagctctccatgtggtgcatgttgacccagccacgtggtgttgtcaagcaaacagcatcggcaggagacctgga

SEQ ID NO: 585419 - DNA, 120 bp, Artificial Sequence
  ENSG00000172478_15 (sequence is synthesized)
gctgaggacttggccctgcctgcactgtatgccattccttggtgacgaaatgctgtatatttggttttgaaaaaatgaatgtgctgggtatacacagcagaaagggtactgtccactttt

SEQ ID NO: 585420 - DNA, 120 bp, Artificial Sequence
  ENSG00000172478_16 (sequence is synthesized)
tgtatatcagtgtggaaaatatttcccctagaagtagaaaaggctcatgtgctgatggataattttgagtcttctccattctctgtgaatgacccccttccccaggcatccccacctcct

SEQ ID NO: 585421 - DNA, 120 bp, Artificial Sequence
  ENSG00000172478_17 (sequence is synthesized)
acctcgttcttagagcaaactaaagccaactgagggtgcacacacagccatgagcccacctgcccaggactactcccatctgcttcttcccgtccccgtggaagtggcccctgatatgga

SEQ ID NO: 585422 - DNA, 120 bp, Artificial Sequence
  ENSG00000172478_18 (sequence is synthesized)
ttgtatctgtatccccacccaaatctcaggtagaattggatctgtgtccccacccaagtctcaggtagacttgtaatccccagtgttggaggaggggcccagtgggaggtgattggatca

SEQ ID NO: 585423 - DNA, 120 bp, Artificial Sequence
  ENSG00000172478_19 (sequence is synthesized)
tgagtgagttctcatgagatctggttttttgagtgtgtggcccctccccctctccttttgctctcttcctctttctccggccatgtaagatatgcctccttctccttcaccttccaccat

SEQ ID NO: 585424 - DNA, 90 bp, Artificial Sequence
  ENSG00000172478_20 (sequence is synthesized)
tccccctctccttttgctctcttcctctttctccggccatgtaagatatgcctccttctccttcaccttccaccatgattgtcagtttag

SEQ ID NO: 585425 - DNA, 120 bp, Artificial Sequence
  ENSG00000172478_21 (sequence is synthesized)
atcactggtgctgcaagtcgctgagctgacagttgtgccgaggactgtcaccattgggcaggcatggtggccagctcctcacttggctgaggtccagggatggacacaggtgtctggggt

SEQ ID NO: 585426 - DNA, 120 bp, Artificial Sequence
  ENSG00000172478_22 (sequence is synthesized)
actggtgctgcaagtcgctgagctgacagttgtgccgaggactgtcaccattgggcaggcatggtggccagctcctcacttggctgaggtccagggatggacacaggttcgctgaacgcg

SEQ ID NO: 585427 - DNA, 120 bp, Artificial Sequence
  ENSG00000172482_0 (sequence is synthesized)
agtgcagccccaggttcccgagcggcaggttgggtgcggaccatggcctctcacaagctgctggtgaccccccccaaggccctgctcaagcccctctccatccccaaccagctcctgctg

SEQ ID NO: 585428 - DNA, 120 bp, Artificial Sequence
  ENSG00000172482_1 (sequence is synthesized)
gggcctggtccttccaacctgcctcctcgcatcatggcagccggggggctgcagatgatcgggtccatgagcaaggatatgtaccagatcatggacgagatcaaggaaggcatccagtac

SEQ ID NO: 585429 - DNA, 120 bp, Artificial Sequence
  ENSG00000172482_2 (sequence is synthesized)
gtgttccagaccaggaacccactcacactggtcatctctggctcgggacactgtgccctggaggccgccctggtcaatgtgctggagcctggggactccttcctggttggggccaatggc

SEQ ID NO: 585430 - DNA, 120 bp, Artificial Sequence
  ENSG00000172482_3 (sequence is synthesized)
atttgggggcagcgagccgtggacatcggggagcgcataggagcccgagtgcacccgatgaccaaggaccctggaggccactacacactgcaggaggtggaggagggcctggcccagcac

SEQ ID NO: 585431 - DNA, 120 bp, Artificial Sequence
  ENSG00000172482_4 (sequence is synthesized)
aagccagtgctgctgttcttaacccacggggagtcgtccaccggcgtgctgcagccccttgatggcttcggggaactctgccacaggtacaagtgcctgctcctggtggattcggtggca

SEQ ID NO: 585432 - DNA, 120 bp, Artificial Sequence
  ENSG00000172482_5 (sequence is synthesized)
tccctgggcgggacccccctttacatggaccggcaaggcatcgacatcctgtactcgggctcccagaaggccctgaacgcccctccagggacctcgctcatctccttcagtgacaaggcc

SEQ ID NO: 585433 - DNA, 120 bp, Artificial Sequence
  ENSG00000172482_6 (sequence is synthesized)
aaaaagaagatgtactcccgcaagacgaagcccttctccttctacctggacatcaagtggctggccaacttctggggctgtgacgaccagcccaggatgtaccatcacacaatccccgtc

SEQ ID NO: 585434 - DNA, 120 bp, Artificial Sequence
  ENSG00000172482_7 (sequence is synthesized)
atcagcctgtacagcctgagagagagcctggccctcattgcggaacagggcctggagaacagctggcgccagcaccgcgaggccgcggcgtatctgcatgggcgcctgcaggcactgggg

SEQ ID NO: 585435 - DNA, 120 bp, Artificial Sequence
  ENSG00000172482_8 (sequence is synthesized)
ctgcagctcttcgtgaaggacccggcgctccggcttcccacagtcaccactgtggctgtacccgctggctatgactggagagacatcgtcagctacgtcatagaccacttcgacattgag

SEQ ID NO: 585436 - DNA, 120 bp, Artificial Sequence
  ENSG00000172482_9 (sequence is synthesized)
atcatgggtggccttgggccctccacggggaaggtgctgcggatcggcctgctgggctgcaatgccacccgcgagaatgtggaccgcgtgacggaggccctgagggcggccctgcagcac

SEQ ID NO: 585437 - DNA, 120 bp, Artificial Sequence
  ENSG00000172482_10 (sequence is synthesized)
tgccccaagaagaagctgtgacctgcccactggcacacagctggcactggcacacacctgtcccatgcccaccctgagggatcaggagcaaacagaccctgcaaggtcctccaggcctgg

SEQ ID NO: 585438 - DNA, 120 bp, Artificial Sequence
  ENSG00000172482_11 (sequence is synthesized)
ggacaggaaagccactgacccagcccgggaggcagaaccaggcagcctccctggccccaggcagcccttttccctccagtggcacctcctggaaacagtccacttgggcgcaaaacccag

SEQ ID NO: 585439 - DNA, 120 bp, Artificial Sequence
  ENSG00000172482_12 (sequence is synthesized)
gtccccaggccatgagcctcccgggaatgtttaataaagggcctggccaactctcctcactgtgtggggtggtctgtgaaagagtgagaggagagcatctctgctccctgagctgcctga

SEQ ID NO: 585440 - DNA, 120 bp, Artificial Sequence
  ENSG00000172482_13 (sequence is synthesized)
ttgtggactttagggggacactcctcatcctggagcccacagggtagatcctcccctggaggaggtgctgtcaccacactctagccccagatgtcacacccccaaacgtcctcacgcacc

SEQ ID NO: 585441 - DNA, 120 bp, Artificial Sequence
  ENSG00000172482_14 (sequence is synthesized)
acatccaggtgaacccacacggcgcacagggctggttggagacccctgtcatggacaagggtacctgcgtgctggagagcgcacagccaggacctgagcccatgacacgtggaagcctcc

SEQ ID NO: 585442 - DNA, 120 bp, Artificial Sequence
  ENSG00000172482_15 (sequence is synthesized)
aatggaaggtcccctatgctcccatccagccagtgcccacccctcaactgcctgacttctgtgaccatagatcagcctggcatatttgaatttatttatttattttgaaacggagtttca

SEQ ID NO: 585443 - DNA, 120 bp, Artificial Sequence
  ENSG00000172482_16 (sequence is synthesized)
caagcgtgagccactgtgcccagccatagttgaatttcatggtcagtggaacacacagcaggtcctccactgtgccagcttctttcacttactgtttttgacactcacatgtaccgtcgt

SEQ ID NO: 585444 - DNA, 120 bp, Artificial Sequence
  ENSG00000172482_17 (sequence is synthesized)
tcgtgggcgccggtgtgtctttgttgctgagtgccgtcccgtcatatggacgtgcgtcgtgggcgccggtgtgtcttgttgctgagtgccgtcccgtcatatggacacctcatgatttgt

SEQ ID NO: 585445 - DNA, 120 bp, Artificial Sequence
  ENSG00000172482_18 (sequence is synthesized)
tggttcatcaccatagttgagcatctgggttatttctattttggggctgttatgaatacggaggtagtgaaattcttactcaagccttcgtgtggccatatattttcatttttcttggat

SEQ ID NO: 585446 - DNA, 120 bp, Artificial Sequence
  ENSG00000172482_19 (sequence is synthesized)
aaataactaggagtggaattgcagggtcatacaataggcttaaccttatacgagactgccacgaaattctccgaagtggctcttccatgtttcattcccgcagctacagcgtccagggtg

SEQ ID NO: 585447 - DNA, 120 bp, Artificial Sequence
  ENSG00000172482_20 (sequence is synthesized)
ctccacgtcctcacccacactccatgttgtctttttttgctagggggtgtaaaatcctgtctgatttggttttagtttgcatttccctgatgcctattgatgttgagcaacttctcatga

SEQ ID NO: 585448 - DNA, 120 bp, Artificial Sequence
  ENSG00000172482_21 (sequence is synthesized)
gctatcggccgtttgtagatcttctgaaaagtgtcagttcaaatattttgttcatatttggatttttatcttcttattgtcaatgtgtgatcattttaaaatatattctagatactatca

SEQ ID NO: 585449 - DNA, 120 bp, Artificial Sequence
  ENSG00000172482_22 (sequence is synthesized)
gaagccctgctggaagcgtgcgtccagcagccgatgctgcggattcggccccatctccaccaggcccagggaaacactcactccttactgcggcaagagcggctccatgaactacccagc

SEQ ID NO: 585450 - DNA, 120 bp, Artificial Sequence
  ENSG00000172482_23 (sequence is synthesized)
accccagtgtttccactgagctttcagatccaggcgtggggactggcaggagggacagcttctggtgggggacatttgagatgccccagagctgtagcagaagcagtgggaagaggaagg

SEQ ID NO: 585451 - DNA, 120 bp, Artificial Sequence
  ENSG00000172482_24 (sequence is synthesized)
gccagggctccagtcaatcaggcgttgggcacccctctgcccaaccccccagaggctcagtttcacatctgccctgcgccctgccaggctgcccatagcagtgagcaccactgtcagggt

SEQ ID NO: 585452 - DNA, 120 bp, Artificial Sequence
  ENSG00000172482_25 (sequence is synthesized)
ggagatgccccagcctcctcctcccatgcacaccatcagggaggagtagaggcaggcccagcccctgctacctggagctgtgccacccatggggggtttgtgggggtgttctggcccctg

SEQ ID NO: 585453 - DNA, 120 bp, Artificial Sequence
  ENSG00000172482_26 (sequence is synthesized)
ctggcagagtgcagattgcaggggcacatgcgcagagaagacgggccagggccagagtagagagcagctgctgctccggggacccacctggggtggccatgagagctggtggctggaggc

SEQ ID NO: 585454 - DNA, 120 bp, Artificial Sequence
  ENSG00000172482_27 (sequence is synthesized)
cgggaggacccgtgaccagaggtaatggcactgaggggcccagggctggagagaccacccctcacctgtccagagctgaggcaggagcagtgctgcggaggatgccaggtcgggggagct

SEQ ID NO: 585455 - DNA, 120 bp, Artificial Sequence
  ENSG00000172482_28 (sequence is synthesized)
ggccctgagaggagagggggcctgggagccagcaccctgagccctggccctgatccactccagccctgtgtagcccaacagcccttcccctccttgcccagtcccctccccctgcaaggc

SEQ ID NO: 585456 - DNA, 120 bp, Artificial Sequence
  ENSG00000172482_29 (sequence is synthesized)
actctccactcttctcccccaggggccacaggcagacctcccctctgtctctctgaaccctcctctgtctctcccagacccagatgtttccttctgccctggggtagtcccaggccctgc

SEQ ID NO: 585457 - DNA, 120 bp, Artificial Sequence
  ENSG00000172482_30 (sequence is synthesized)
cccaggcaaagtcaaactgggggctccaggggctcccctgcaccaaggcctgcagagtcaggttcttcctcccgcaccacagagggcggggcttcctgcccaccccacccatgtcactgc

SEQ ID NO: 585458 - DNA, 120 bp, Artificial Sequence
  ENSG00000172487_0 (sequence is synthesized)
tcccccaaacagatgaatttccaaactctgacatggctcctgaaaatttcaccagagtcactgagtttattcttacaggtgtctctagctgtccagagctccagattcccctcttcctgg

SEQ ID NO: 585459 - DNA, 120 bp, Artificial Sequence
  ENSG00000172487_1 (sequence is synthesized)
tctttctggtgctctatgggctgaccatggcagggaacctgggcatcatcaccctcaccagtgttgactctcgacttcaaacccccatgtactttttcctgcaacatctggctctcatta

SEQ ID NO: 585460 - DNA, 120 bp, Artificial Sequence
  ENSG00000172487_2 (sequence is synthesized)
atcttggtaactctactgtcattgcccctaaaatgctgattaactttttagtaaagaagaaaactacctcattctatgaatgtgccacccaactgggagggttcttgttctttattgtat

SEQ ID NO: 585461 - DNA, 120 bp, Artificial Sequence
  ENSG00000172487_3 (sequence is synthesized)
cggaggtaatcatgctggctttgatggcctatgaccgctatgtggctatttgtaaccctctgctgtacatggtggtggtgtctcggcggctctgcctcctgctggtctccctcacatacc

SEQ ID NO: 585462 - DNA, 120 bp, Artificial Sequence
  ENSG00000172487_4 (sequence is synthesized)
cttgctctgatacttacttaccagaaacagttgtctttatatctgcagcaacaaatgtggttggttccttgattatagttctagtatcttatttcaatattgttttgtctattttaaaaa

SEQ ID NO: 585463 - DNA, 120 bp, Artificial Sequence
  ENSG00000172487_5 (sequence is synthesized)
tatgttcatcagaaggaaggaaaaaagccttttctacctgtgcttcacatatgatggcagtcacaattttttatgggacattgctattcatgtatgtgcagccccgaagtaaccattcac

SEQ ID NO: 585464 - DNA, 120 bp, Artificial Sequence
  ENSG00000172487_6 (sequence is synthesized)
tggatactgatgataagatggcttctgtgttttacacgttggtaattcctatgctgaatcccttgatctacagcctgaggaataaggatgtgaagactgctctacagagattcatgacaa

SEQ ID NO: 585465 - DNA, 120 bp, Artificial Sequence
  ENSG00000172487_7 (sequence is synthesized)
atctgtgctattcctttaaaacaatgtaattttaaacagtacaggtaaatgaggagagagttaatataagctgccattatgtaaaagaaaatgtaggaaaaagaaaaggtaggtagccga

SEQ ID NO: 585466 - DNA, 120 bp, Artificial Sequence
  ENSG00000172487_8 (sequence is synthesized)
gaaaaaaaaaatgttatttaccaattctgcctgggattaagcaggtagacagtttgaaataaaaatggtttccagcagttagaaaaaaaaattaaaaaaagttaaataagtttgaatgag

SEQ ID NO: 585467 - DNA, 120 bp, Artificial Sequence
  ENSG00000172489_0 (sequence is synthesized)
atggactccactttcacaggctataacctttataacctgcaagtaaaaactgaaatggacaagttgtcatcaggtttggatatatacaggaatccactgaagaacaagactgaagtcacc

SEQ ID NO: 585468 - DNA, 120 bp, Artificial Sequence
  ENSG00000172489_1 (sequence is synthesized)
atgtttatattgacaggcttcacagatgattttgagctgcaagtcttcctatttttactattttttgcaatctatctctttaccttgataggcaatttagggctggttgtgttggtcatt

SEQ ID NO: 585469 - DNA, 120 bp, Artificial Sequence
  ENSG00000172489_2 (sequence is synthesized)
gaggattcctggctccacaaccccatgtattattttcttagtgttttatcattcttggatgcttgctattctacagttgtcactccaaaaatgttggtcaatttcctggcaaaaaataaa

SEQ ID NO: 585470 - DNA, 120 bp, Artificial Sequence
  ENSG00000172489_3 (sequence is synthesized)
tccatttcatttatcggatgtgcaacacagatgcttctttttgttacttttggaactacagaatgttttctcttggctgcaatggcttatgatcactatgtagccatctacaaccctctc

SEQ ID NO: 585471 - DNA, 120 bp, Artificial Sequence
  ENSG00000172489_4 (sequence is synthesized)
ggcattttacatgctactatacatatagtggctacatttagcctgtccttctgtggatccaatgaaattaggcatgtcttttgtgatatgcctcctctccttgctatttcttgttctgac

SEQ ID NO: 585472 - DNA, 120 bp, Artificial Sequence
  ENSG00000172489_5 (sequence is synthesized)
actcacacaaaccagcttctactcttctactttgtgggttctattgagatagtcactatcctgattgtcctcatttcctgtgatttcattctgttgtccattctgaagatgcattctgct

SEQ ID NO: 585473 - DNA, 120 bp, Artificial Sequence
  ENSG00000172489_6 (sequence is synthesized)
aagggaaggcaaaaggccttctctacatgtggctctcacctaactggagtgacaatttatcatggaacaattctcgtcagttatatgagaccaagttccagctatgcttcagaccatgac

SEQ ID NO: 585474 - DNA, 120 bp, Artificial Sequence
  ENSG00000172489_7 (sequence is synthesized)
atcatagtgtcaatattttacacaattgtgattcccaagttgaatcccatcatctatagtttgaggaacaaagaagtaaaaaaggcagtgaagaaaatgttgaaattggtttacaaatga

SEQ ID NO: 585475 - DNA, 120 bp, Artificial Sequence
  ENSG00000172493_0 (sequence is synthesized)
ggcaatttcttttcctttctaactgtggcccgcgttgtgctgttgctgggcaggcgttgggcgccggcggtcttcgagcgtgggggcccgctggctttcccttctcagaaactgcgccgg

SEQ ID NO: 585476 - DNA, 120 bp, Artificial Sequence
  ENSG00000172493_1 (sequence is synthesized)
gggcgctcgcttgccccggattcggacgcggcgctccccgggctcgtctgaagtgcagatcgccgcagaggccccagtgcccggatgtccatcaggattagcgcgagccaatacgggccg

SEQ ID NO: 585477 - DNA, 120 bp, Artificial Sequence
  ENSG00000172493_2 (sequence is synthesized)
agcccggggctgcgccgaggacgcccggggctcgagagcaggtagtcccgtaacatcggggcgccgcgccgggacgcgtccccgcccggctccgccaaatggtgagcgcggcgctggcag

SEQ ID NO: 585478 - DNA, 120 bp, Artificial Sequence
  ENSG00000172493_3 (sequence is synthesized)
cagggcccgcggggtgaaggcgctcatggacggaagacccctggctctataagctgaattatggcagcccagtcaagtttgtacaatgacgacagaaacctgcttcgaattagagagaag

SEQ ID NO: 585479 - DNA, 120 bp, Artificial Sequence
  ENSG00000172493_4 (sequence is synthesized)
gaaagacgcaaccaggaagcccaccaagagaaagaggcatttcctgaaaagattcccctttttggagagccctacaagacagcaaaaggtgatgagctgtctagtcgaatacagaacatg

SEQ ID NO: 585480 - DNA, 120 bp, Artificial Sequence
  ENSG00000172493_5 (sequence is synthesized)
ttgggaaactacgaagaagtgaaggagttccttagtactaagtctcacactcatcgcctggatgcttctgaaaataggttgggaaagccgaaatatcctttaattcctgacaaagggagc

SEQ ID NO: 585481 - DNA, 120 bp, Artificial Sequence
  ENSG00000172493_6 (sequence is synthesized)
agcattccatccagctccttccacactagtgtccaccaccagtccattcacactcctgcgtctggaccactttctgttggcaacattagccacaatccaaagatggcgcagccaagaact

SEQ ID NO: 585482 - DNA, 120 bp, Artificial Sequence
  ENSG00000172493_7 (sequence is synthesized)
gaaccaatgccaagtctccatgccaaaagctgcggcccaccggacagccagcacctgacccaggatcgccttggtcaggaggggttcggctctagtcatcacaagaaaggtgaccgaaga

SEQ ID NO: 585483 - DNA, 120 bp, Artificial Sequence
  ENSG00000172493_8 (sequence is synthesized)
gctgacggagaccactgtgcttcggtgacagattcggctccagagagggagctttctcccttaatctctttgccttccccagttccccctttgtcacctatacattccaaccagcaaact

SEQ ID NO: 585484 - DNA, 120 bp, Artificial Sequence
  ENSG00000172493_9 (sequence is synthesized)
cttccccggacgcaaggaagcagcaaggttcatggcagcagcaataacagtaaaggctattgcccagccaaatctcccaaggacctagcagtgaaagtccatgataaagagacccctcaa

SEQ ID NO: 585485 - DNA, 120 bp, Artificial Sequence
  ENSG00000172493_10 (sequence is synthesized)
gacagtttggtggcccctgcccagccgccttctcagacatttccacctccctccctcccctcaaaaagtgttgcaatgcagcagaagcccacggcttatgtccggcccatggatggtcaa

SEQ ID NO: 585486 - DNA, 120 bp, Artificial Sequence
  ENSG00000172493_11 (sequence is synthesized)
gatcaggcccctagtgaatcccctgaactgaaaccactgccggaggactatcgacagcagacctttgaaaaaacagacttgaaagtgcctgccaaagccaagctcaccaaactgaagatg

SEQ ID NO: 585487 - DNA, 120 bp, Artificial Sequence
  ENSG00000172493_12 (sequence is synthesized)
ccttctcagtcagttgagcagacctactccaatgaagtccattgtgttgaagagattctgaaggaaatgacccattcatggccgcctcctttgacagcaatacatacgcctagtacagct

SEQ ID NO: 585488 - DNA, 120 bp, Artificial Sequence
  ENSG00000172493_13 (sequence is synthesized)
gagccatccaagtttcctttccctacaaaggactctcagcatgtcagttctgtaacccaaaaccaaaaacaatatgatacatcttcaaaaactcactcaaattctcagcaaggaacgtca

SEQ ID NO: 585489 - DNA, 120 bp, Artificial Sequence
  ENSG00000172493_14 (sequence is synthesized)
tccatgctcgaagacgaccttcagctcagtgacagtgaggacagtgacagtgaacaaaccccagagaagcctccctcctcatctgcacctccaagtgctccacagtcccttccagaacca

SEQ ID NO: 585490 - DNA, 120 bp, Artificial Sequence
  ENSG00000172493_15 (sequence is synthesized)
gtggcatcagcacattccagcagtgcagagtcagaaagcaccagtgactcagacagttcctcagactcagagagcgagagcagttcaagtgacagcgaagaaaatgagcccctagaaacc

SEQ ID NO: 585491 - DNA, 120 bp, Artificial Sequence
  ENSG00000172493_16 (sequence is synthesized)
ccagctccggagcctgagcctccaacaacaaacaaatggcagctggacaactggctgaccaaagtcagccagccagctgcgccaccagagggccccaggagcacagagcccccacggcgg

SEQ ID NO: 585492 - DNA, 120 bp, Artificial Sequence
  ENSG00000172493_17 (sequence is synthesized)
cacccagagagtaagggcagcagcgacagtgccacgagtcaggagcattctgaatccaaagatcctccccctaaaagctccagcaaagccccccgggccccacccgaagccccccacccc

SEQ ID NO: 585493 - DNA, 120 bp, Artificial Sequence
  ENSG00000172493_18 (sequence is synthesized)
ggaaagaggagctgtcagaagtctccggcacagcaggagcccccacaaaggcaaaccgttggaaccaaacaacccaaaaaacctgtcaaggcctctgcccgggcaggttcacggaccagc

SEQ ID NO: 585494 - DNA, 120 bp, Artificial Sequence
  ENSG00000172493_19 (sequence is synthesized)
ctgcagggggaaagggagccagggcttcttccctatggctcccgagaccagacttccaaagacaagcccaaggtgaagacgaaaggacggccccgggccgcagcaagcaacgaacccaag

SEQ ID NO: 585495 - DNA, 120 bp, Artificial Sequence
  ENSG00000172493_20 (sequence is synthesized)
ccagcagtgcccccctccagtgagaagaagaagcacaagagctccctccctgccccctctaaggctctctcaggcccagaacccgcgaaggacaatgtggaggacaggacccctgagcac

SEQ ID NO: 585496 - DNA, 120 bp, Artificial Sequence
  ENSG00000172493_21 (sequence is synthesized)
tttgctcttgttcccctgactgagagccagggcccaccccacagtggcagcggcagcaggactagtggctgccgccaagccgtggtggtccaggaggacagccgcaaagacagactccca

SEQ ID NO: 585497 - DNA, 120 bp, Artificial Sequence
  ENSG00000172493_22 (sequence is synthesized)
ttgcctttgagagacaccaagctgctctcaccgctcagggacactcctcccccacaaagcttgatggtgaagatcaccctagacctgctctctcggataccccagcctcccgggaagggg

SEQ ID NO: 585498 - DNA, 120 bp, Artificial Sequence
  ENSG00000172493_23 (sequence is synthesized)
agccgccagaggaaagcagaagataaacagccgcccgcagggaagaagcacagctctgagaagaggagctcagacagctcaagcaagttggccaaaaagagaaagggtgaagcagaaaga

SEQ ID NO: 585499 - DNA, 120 bp, Artificial Sequence
  ENSG00000172493_24 (sequence is synthesized)
gactgtgataacaagaaaatcagactggagaaggaaatcaaatcacagtcatcttcatcttcatcctcccacaaagaatcttctaaaacaaagccctccaggccctcctcacagtcctca

SEQ ID NO: 585500 - DNA, 120 bp, Artificial Sequence
  ENSG00000172493_25 (sequence is synthesized)
aagaaggaaatgctccccccgccacccgtgtcctcgtcctcccagaagccagccaagcctgcacttaagaggtcaaggcgggaagcagacacctgtggccaggaccctcccaaaagtgcc

SEQ ID NO: 585501 - DNA, 120 bp, Artificial Sequence
  ENSG00000172493_26 (sequence is synthesized)
agcagtaccaagagcaaccacaaagactcttccattcccaagcagagaagagtagaggggaagggctccagaagctcctcggagcacaagggttcttccggagatactgcaaatcctttt

SEQ ID NO: 585502 - DNA, 120 bp, Artificial Sequence
  ENSG00000172493_27 (sequence is synthesized)
ccagtgccttctttgccaaatggtaactctaaaccagggaagcctcaagtgaagtttgacaaacaacaagcagaccttcacatgagggaggcaaaaaagatgaagcagaaagcagagtta

SEQ ID NO: 585503 - DNA, 120 bp, Artificial Sequence
  ENSG00000172493_28 (sequence is synthesized)
atgacggacagggttggaaaggcttttaagtacctggaagccgtcttgtccttcattgagtgcggaattgccacagagtctgaaagccagtcatccaagtcagcttactctgtctactca

SEQ ID NO: 585504 - DNA, 120 bp, Artificial Sequence
  ENSG00000172493_29 (sequence is synthesized)
gaaactgtagatctcattaaattcataatgtcattaaaatccttctcagatgccacagcgccaacacaagagaaaatatttgctgttttatgcatgcgttgccagtccattttgaacatg

SEQ ID NO: 585505 - DNA, 120 bp, Artificial Sequence
  ENSG00000172493_30 (sequence is synthesized)
gcgatgtttcgttgtaaaaaagacatagcaataaagtattctcgtactcttaataaacacttcgagagttcttccaaagtcgcccaggcaccttctccatgcattgcaagcacaggcaca

SEQ ID NO: 585506 - DNA, 120 bp, Artificial Sequence
  ENSG00000172493_31 (sequence is synthesized)
ccatcccctctttccccaatgccttctcctgccagctccgtagggtcccagtcaagtgctggcagtgtggggagcagtggggtggctgccactatcagcaccccagtcaccatccagaat

SEQ ID NO: 585507 - DNA, 120 bp, Artificial Sequence
  ENSG00000172493_32 (sequence is synthesized)
atgacatcttcctatgtcaccatcacatcccatgttcttaccgcctttgacctttgggaacaggccgaggccctcacgaggaagaataaagaattctttgctcggctcagcacaaatgtg

SEQ ID NO: 585508 - DNA, 120 bp, Artificial Sequence
  ENSG00000172493_33 (sequence is synthesized)
tgcaccttggccctcaacagcagtttggtggacctggtgcactatacacgacagggttttcagcagctacaagaattaaccaaaacaccttaatggagccccaggttgattcaatgcctt

SEQ ID NO: 585509 - DNA, 120 bp, Artificial Sequence
  ENSG00000172493_34 (sequence is synthesized)
gggaactatttttgcacattggaagcctcaaaaacagtccagacatttgtttcatcaggacaccaaactctaaaaaagaagcaccacgagatggccaggacatttgtccacttaaactct

SEQ ID NO: 585510 - DNA, 120 bp, Artificial Sequence
  ENSG00000172493_35 (sequence is synthesized)
caacaacagtgtgatcattggttggacactgtggttatgcagaagcagagatgaggaggctggccccagagatgatcttgcccttcctaactaaaggacagaagtgcaatttagcttaaa

SEQ ID NO: 585511 - DNA, 120 bp, Artificial Sequence
  ENSG00000172493_36 (sequence is synthesized)
tgggtgtatgaatggtctagaaacatttctattttttttttaaaccagcaggatacaagttgcaaatgaaatgaggagaaacagtttcaactctgaaagtgaatttcacgtcatctcagt

SEQ ID NO: 585512 - DNA, 120 bp, Artificial Sequence
  ENSG00000172493_37 (sequence is synthesized)
agccacgctagtccattcccagaaggaaatttttttttttaacaatgacttttggtaaagggttttgtggatgattttttttcttttgagttttgggagaaatatttgtttagtaacttc

SEQ ID NO: 585513 - DNA, 120 bp, Artificial Sequence
  ENSG00000172493_38 (sequence is synthesized)
taatggccatctgtaaaccataagtaatgaaggactccactgtgccccactttctgccaatgaacagtggcttgataataccaagtattgttgtaatttataaaattgaaggcaaccccc

SEQ ID NO: 585514 - DNA, 120 bp, Artificial Sequence
  ENSG00000172493_39 (sequence is synthesized)
tagagcgctgcacattgaccccagctctgacttctcattactgtgctgaaagtcagcccacgtcggagcggtgaggaggagccacagcacatggggtgccacctcgaggtctgcacagga

SEQ ID NO: 585515 - DNA, 120 bp, Artificial Sequence
  ENSG00000172493_40 (sequence is synthesized)
ggacttggcgctgccatttcctacccctgccatttcccacccctgcttcagcgaaagggactctctaacagggcagtcactgttgactctattctgaatttcctcccttggggaagaagg

SEQ ID NO: 585516 - DNA, 120 bp, Artificial Sequence
  ENSG00000172493_41 (sequence is synthesized)
gaaccaacatttatacctgaccagatggctaaagtgcttttaaagttttgtttaagtagagctggaatttgaggtgctgatctgtggtctacagttatgtggtaactcatgttgtccagc

SEQ ID NO: 585517 - DNA, 120 bp, Artificial Sequence
  ENSG00000172493_42 (sequence is synthesized)
caactcagagtttcgtcagtgaacaagaaacatgaaatctgcttcttagagaggctatatttttctgctacaaatattttatatttatagcaaaactagactttcagagtccttgattgt

SEQ ID NO: 585518 - DNA, 120 bp, Artificial Sequence
  ENSG00000172493_43 (sequence is synthesized)
ctaggggaagttaactccctgagaggatgtagagatttggggtggttgattagacttttgaaaaactcatcaccacatgccttcactccagagtgttctcagctagatttgatttggttg

SEQ ID NO: 585519 - DNA, 120 bp, Artificial Sequence
  ENSG00000172493_44 (sequence is synthesized)
aggaggaactgtggccctccgtaagttattgccatagtgtatgcattaaaccaagtccattttgaatgacctaaaatgaagtaacacaatcagaaatcccatgtgcccataagcacagat

SEQ ID NO: 585520 - DNA, 120 bp, Artificial Sequence
  ENSG00000172493_45 (sequence is synthesized)
ttttctttttcattgaaactttaaaggttattattggaaacattactttgagtgcagtgtttttaaaagccaattcttttttatcccttttagaagtagaatttgcacacttactacaat

SEQ ID NO: 585521 - DNA, 120 bp, Artificial Sequence
  ENSG00000172493_46 (sequence is synthesized)
tgaggagtgtcatctctataactttttctccgcctttgtcccattctgcccctgtacatgtttcctaccaagcatgtttcacattttcctattagtggaggagggagaaccatatttatt

SEQ ID NO: 585522 - DNA, 120 bp, Artificial Sequence
  ENSG00000172493_47 (sequence is synthesized)
tataatgaagacatctaagatccctatgatgaatgcaggaactctcttggtagtttgtaaatacacaaagggatgtgtcgagggatgggagcgatgcttatctctcacagtgtgagtggt

SEQ ID NO: 585523 - DNA, 120 bp, Artificial Sequence
  ENSG00000172493_48 (sequence is synthesized)
ctgtgtgaggctgttccttcagtttcttctccagactgttctttggttgtcactaagtcagaggtctggtccctcatgtttaggtgaaagccagagaatgacagctgtagtcatatctga

SEQ ID NO: 585524 - DNA, 120 bp, Artificial Sequence
  ENSG00000172493_49 (sequence is synthesized)
gcataagaccttgatgtgtgattcctgatgaccggtttcatttattcatgttataaagcaaagccctggtcctttttaaactactagttttaaaaacctgtgttaaatgaacagtaattg

SEQ ID NO: 585525 - DNA, 120 bp, Artificial Sequence
  ENSG00000172493_50 (sequence is synthesized)
cctggtaggtttggtgtgtgtgtagcattgtgtgtccatctgttatatgtaaaggacaaggcaccagaatcaggctttatttcgatattgaagatgttatttaacatctttcttttttcc

SEQ ID NO: 585526 - DNA, 120 bp, Artificial Sequence
  ENSG00000172493_51 (sequence is synthesized)
ttactcccttagccatcccctccccttttgtcctatcattccctagaacaagccacctgtcaattgtgaagggttgtgttctttatggcaggttctatgcagattgtgccagagcatgtg

SEQ ID NO: 585527 - DNA, 120 bp, Artificial Sequence
  ENSG00000172493_52 (sequence is synthesized)
cgtgttctgttggcaagccacagtgctcccttgactgaagacatttccaggtagatttctcagccagctctaaaacagattgctttttcagtggccttactctttgtgggtttttttttt

SEQ ID NO: 585528 - DNA, 120 bp, Artificial Sequence
  ENSG00000172493_53 (sequence is synthesized)
tttctctgaacttgatataaagattttatttgtcccttgaaaaagtaacaaatgtgcatagatcaatttgtactactttggtcattggatatttctgatccttattgcattgtacctaaa

SEQ ID NO: 585529 - DNA, 120 bp, Artificial Sequence
  ENSG00000172493_54 (sequence is synthesized)
ggagagtaactaatggtaacctttttaatagagtatgtgaaaggtagtggctgatgaatccttaacgttcatagggtctttttgctgttacggttgtatatagaggtctgaaggattttt

SEQ ID NO: 585530 - DNA, 120 bp, Artificial Sequence
  ENSG00000172493_55 (sequence is synthesized)
aaaatgatttgcactttttcactgcatgcttacaattcccaaaggcaaaatctgtactgaggtagatcatttgaaagggctagattataaaattaagccttagagtatggaaagttctta

SEQ ID NO: 585531 - DNA, 120 bp, Artificial Sequence
  ENSG00000172493_56 (sequence is synthesized)
cttataacaataatagtacacacttcagagtaagacaaatgcaaagcatcttaaggagtgaaaatagagtgtaaatcttgcctttggcactacaaggtgtgtgtgtgtgtgtgtgtgtgt

SEQ ID NO: 585532 - DNA, 120 bp, Artificial Sequence
  ENSG00000172493_57 (sequence is synthesized)
gtgtctttagtaggaaatggaagaacactgttttattttttaaagtgtttaatgtttctgtcctttctgtgaattattgaatttaagagccctgctaaataatgaaaaaacactttacta

SEQ ID NO: 585533 - DNA, 120 bp, Artificial Sequence
  ENSG00000172493_58 (sequence is synthesized)
aaatttatcaaattatactgggttcggattgtgaaaacattggccacctagtagcagtggtgaggagtgggagggcccagcaagcatttatcagaaatagaatcacaataggaggagaat

SEQ ID NO: 585534 - DNA, 120 bp, Artificial Sequence
  ENSG00000172493_59 (sequence is synthesized)
ttgactgtctgatattatgatttgattacaatactgaatgggaaaagtatctaatattttgtaacaaaaagaccttcatattatctgttttgaccaaaatatgtagctatttcccttaca

SEQ ID NO: 585535 - DNA, 120 bp, Artificial Sequence
  ENSG00000172493_60 (sequence is synthesized)
cagattggaccgcacttatctcccttgtcctgtatcctttaatttcaggtctcaggatgtttagaaagctaaaaccccctacccctttctggctgaaaacttgccttatttggtatctta

SEQ ID NO: 585536 - DNA, 120 bp, Artificial Sequence
  ENSG00000172493_61 (sequence is synthesized)
cacattaatgttactagcatcaggagcttactgttttattatgattcatcttcagtaatttttagaagcaagaagaaagccattgtgtcctctacaattaacaaaacttatctctgatat

SEQ ID NO: 585537 - DNA, 120 bp, Artificial Sequence
  ENSG00000172493_62 (sequence is synthesized)
acaaagggatataaatatatacacttaaatagagaaaaagaggttgattgaattgtgcctttgagtgaacccagtttttaaataccgctgtgtttgtttcgccatggcttcagggatgct

SEQ ID NO: 585538 - DNA, 120 bp, Artificial Sequence
  ENSG00000172493_63 (sequence is synthesized)
acatggctcttgcaccttttactcctctgctttatgaagtttgagttgtatttgtgcatcttaaagtaggttgaggcttgaggctgggctttcgggtttttttgttttttgttttgtttt

SEQ ID NO: 585539 - DNA, 120 bp, Artificial Sequence
  ENSG00000172493_64 (sequence is synthesized)
gttttgttttgttttcttgtacttaaacctgcttgcttcctaccacagattctttattttcccaaacactacaaaaaaacttttaaaactttgccatttcatctgtttacactctttgcc

SEQ ID NO: 585540 - DNA, 120 bp, Artificial Sequence
  ENSG00000172493_65 (sequence is synthesized)
actgattagcagtatttaaatcttgcaagaatattttgtgctttctttagaaacacaagagtatagatttttctcactgaaaagtgagagttacgcattgcagccatgaagggatgctag

SEQ ID NO: 585541 - DNA, 120 bp, Artificial Sequence
  ENSG00000172493_66 (sequence is synthesized)
gatcaattatggcagtaccttttttcccctcctgttcttgagccagttgtctcttttgttttgggtcccacttaggattaatggatgtaaggtattttcctgtgcctttattttgtgtca

SEQ ID NO: 585542 - DNA, 120 bp, Artificial Sequence
  ENSG00000172493_67 (sequence is synthesized)
ttctattggaaggaggtgtaacggcagaatagcatcgtgttgggggttttccttcaaacactgcaagtgatattgccaccatgtgaacctcaaatatgcaatccagttgtgttggtttct

SEQ ID NO: 585543 - DNA, 120 bp, Artificial Sequence
  ENSG00000172493_68 (sequence is synthesized)
cggtgacttggagtgttcatctcttcatgaattgtgagcactgaccatgttcttcagttcttaattatggtgagttgacaaataccaactactgcttttctttaggtggctataaatttc

SEQ ID NO: 585544 - DNA, 120 bp, Artificial Sequence
  ENSG00000172493_69 (sequence is synthesized)
ttactgtcaggaggaaatgacattatattctgttccactgaacgtcagagatcagcaggcactgtactgggtagagaagtgcctatacttctctacctaagagggcaggagggaaaccct

SEQ ID NO: 585545 - DNA, 120 bp, Artificial Sequence
  ENSG00000172493_70 (sequence is synthesized)
acagctccttgtgagcctatatattagtatatcggcctggagaggacaagggaataagaccactcatagtgaggctggccaagctgcactggtcggaccaggcagtggctgacctaagga

SEQ ID NO: 585546 - DNA, 120 bp, Artificial Sequence
  ENSG00000172493_71 (sequence is synthesized)
agacaacttgctttgcttaaaagtagattttttaagcaatgcttaacacaggcagcattcacctttgttcaggccatcgacatgtattgttaaaattactgcatatccccctcagatatc

SEQ ID NO: 585547 - DNA, 120 bp, Artificial Sequence
  ENSG00000172493_72 (sequence is synthesized)
aagtatacactgttcatgttggggttgtgtgtgtgtatgtgtgtatgtacgcacgcatgtgtcccaaatcttgttttaattttttttttctgaatgtgatcatgttttggatgatacctg

SEQ ID NO: 585548 - DNA, 120 bp, Artificial Sequence
  ENSG00000172493_73 (sequence is synthesized)
ggatgatacctgagcagggttgccttttttttatttattaccattatatattatattatattatattatatattttttgctttcttataactttggaggaaagtcaaatcttggtattat

SEQ ID NO: 585549 - DNA, 120 bp, Artificial Sequence
  ENSG00000172493_74 (sequence is synthesized)
aaaaaggagtaaattttccagttgataaatgaaaatcactggcctatgtttaataagtttttctttaattactgtggaataacgtgccagctatcatcaacacaatgattttgtacatag

SEQ ID NO: 585550 - DNA, 120 bp, Artificial Sequence
  ENSG00000172493_75 (sequence is synthesized)
ggtagggaagcagtgatgctctcaatgggaagatgtgcaacacaaattaaggggaactccatgtattttacctacttcagcaatggaactgcaacttggggctttgtgaataaaatttag

SEQ ID NO: 585551 - DNA, 120 bp, Artificial Sequence
  ENSG00000172493_76 (sequence is synthesized)
ctgccttgtatagtcgtttgaaagaatatgtgatctgtgagagaattatagtttttttttagaagaaaaatctgcaaaagatctttccaaagacaatgtgccacagatcttttgttctct

SEQ ID NO: 585552 - DNA, 120 bp, Artificial Sequence
  ENSG00000172493_77 (sequence is synthesized)
gtaatgaggattaattgctgtttaaacaaaaatgtaattgttcatctttaaattctttccttttcataagaggatcaagctgtaaaaaaacaaaaaaattaataaaaatttcgagaaatc

SEQ ID NO: 585553 - DNA, 120 bp, Artificial Sequence
  ENSG00000172493_78 (sequence is synthesized)
ccctgcgcactcggccgccgcctgcgcgcgttgcggccgcagctgcacctttgcctccgcggttccgcagccgagccccgggaggaggcgctcccctgcgtcgtccgcacttgcgccctt

SEQ ID NO: 585554 - DNA, 120 bp, Artificial Sequence
  ENSG00000172493_79 (sequence is synthesized)
ggaggaggcgctcccctgcgtcgtccgcacttgcgccctttcccaccgcaacaggtcaggggagggcggaggtgacgagggcgcccgacccgggactagaggacggaagggtctggaaga

SEQ ID NO: 585555 - DNA, 120 bp, Artificial Sequence
  ENSG00000172493_80 (sequence is synthesized)
acagtcagcatttcctttaatgcggtggttccctctggtctcggcccgagttctcatgccaggcagcggcagctgtggtaccaactgcctgggagccccgtggcgctgttgcagacctac

SEQ ID NO: 585556 - DNA, 120 bp, Artificial Sequence
  ENSG00000172493_81 (sequence is synthesized)
tagcaaccacctaatctacggtgatcaacacttcttgggtcttgacatagcaaagaaatttttcttctgcactagaatcagtggattaataaactcaagctcatttggacaatgtaataa

SEQ ID NO: 585557 - DNA, 120 bp, Artificial Sequence
  ENSG00000172493_82 (sequence is synthesized)
gatacttattgaagatctgctgtcagatgatgccttaaaatctgatagatcaaagatgacctatgggagagaatacgagaatagaaaaatgggagtccctgttctgtttaacctggcaga

SEQ ID NO: 585558 - DNA, 120 bp, Artificial Sequence
  ENSG00000172493_83 (sequence is synthesized)
taagcacacagccagattgtgaaacaatgtgataaacgctctagcagaagagcaaataaagtgttaaaggatcatagaaaacagcaaagtgtcacggatgaaatctttctaatgagaacc

SEQ ID NO: 585559 - DNA, 120 bp, Artificial Sequence
  ENSG00000172493_84 (sequence is synthesized)
catggcttttgggtagggggaattctttttggctttaggatcttgttaataacccgcgaaaaactcagatctgagatggacgactgattatagatattgaaatgcagtttgcagaaaggt

SEQ ID NO: 585560 - DNA, 120 bp, Artificial Sequence
  ENSG00000172493_85 (sequence is synthesized)
ttagagaacctttttatggagccaaaatttatatacagtaaaacatagagatcataagagtacagtttgtgtttcaaaaaatagatacacctataggatccaaaacccaatcaagagaga

SEQ ID NO: 585561 - DNA, 120 bp, Artificial Sequence
  ENSG00000172493_86 (sequence is synthesized)
gaagatttcggttaccagaaagtttcaggaaggttttcaggtgtcttatttattgttttgggagacactggggtaacaatgtgaacacgaaaaaattttttttgattaatacctcctcag

SEQ ID NO: 585562 - DNA, 120 bp, Artificial Sequence
  ENSG00000172493_87 (sequence is synthesized)
agtctgagaggcgtggagaattttgcttgtgcaagattatttcagagcaaggtcgtgcggtgtgtgtagaagatgaacagactagccactttgcattgactggaaacaatggcatttaca

SEQ ID NO: 585563 - DNA, 120 bp, Artificial Sequence
  ENSG00000172497_0 (sequence is synthesized)
gtagcgctctcgccctggccatggagcggccggcgcccggcgaggtggtcatgagccaagccatccagccggcgcacgccactgcgcgcggcgagctgagcgcggggcagctgctcaagt

SEQ ID NO: 585564 - DNA, 120 bp, Artificial Sequence
  ENSG00000172497_1 (sequence is synthesized)
ggatcgacaccaccgcctgcctggcggctgagaaacatgctggagtttcctgcgttacagcctcagtggatgacatacagtttgaggagacagctagagttggacaagttataaccatca

SEQ ID NO: 585565 - DNA, 120 bp, Artificial Sequence
  ENSG00000172497_2 (sequence is synthesized)
aagcaaaagttactagagcattcagcacaagcatggagatcagtatcaaggtcatggtacaggatatgctcactggcattgagaagcttgttagtgtggctttctccacatttgtagcca

SEQ ID NO: 585566 - DNA, 120 bp, Artificial Sequence
  ENSG00000172497_3 (sequence is synthesized)
aaccagttggaaaagaaaagattcatttaaaaccagtcacacttctaactgaacaagatcatgtggaacataatctggctgctgagagaaggaaagttcgattacaacatgaagatacct

SEQ ID NO: 585567 - DNA, 120 bp, Artificial Sequence
  ENSG00000172497_4 (sequence is synthesized)
ttaacaatttaatgaaggaaagtagcaaatttgatgatctcatttttgatgaagaggaaggagcggtttccacaaggggcacctccgttcagagcattgaactggtcctcccaccccatg

SEQ ID NO: 585568 - DNA, 120 bp, Artificial Sequence
  ENSG00000172497_5 (sequence is synthesized)
caaaccatcacggaaatacatttggtggccagattatggcgtggatggagacagtggctactatttctgcaagccgcctgtgttgggctcatccctttctgaagtccgtagatatgttta

SEQ ID NO: 585569 - DNA, 120 bp, Artificial Sequence
  ENSG00000172497_6 (sequence is synthesized)
agttccggggaccatctacagttggagatcgtcttgtcttcactgccattgtcaacaatacatttcagacctgtgttgaagttggagttcgcgtggaggcctttgactgtcaggaatggg

SEQ ID NO: 585570 - DNA, 120 bp, Artificial Sequence
  ENSG00000172497_7 (sequence is synthesized)
ccgagggccgagggcgtcacatcaacagtgcttttctcatttacaatgctgctgatgataaggaaaatctcatcacgtttcccagaatccaacccatttcaaaggatgatttcagacgct

SEQ ID NO: 585571 - DNA, 120 bp, Artificial Sequence
  ENSG00000172497_8 (sequence is synthesized)
tgttatttcccacaaagaagaggttccactttgcatacactgggatatcagcaagcaggcatccctgagtgacagcaatgtggaggccctcaaaaaactggcagccaaaaggggttggga

SEQ ID NO: 585572 - DNA, 120 bp, Artificial Sequence
  ENSG00000172497_9 (sequence is synthesized)
ggttaccagcactgtggaaaagataaaaatatatactctggaagagcatgatgttttatctgtttgggttgaaaagcacgtgggaagtccagcacatttggcttatcgtctcttgtctga

SEQ ID NO: 585573 - DNA, 120 bp, Artificial Sequence
  ENSG00000172497_10 (sequence is synthesized)
ctttacaaagcgacctttgtgggacccccattttgtgtcctgtgaagtcatagactgggtgagtgaagatgatcagctgtatcacatcacctgtcctatactgaatgatgacaaacccaa

SEQ ID NO: 585574 - DNA, 120 bp, Artificial Sequence
  ENSG00000172497_11 (sequence is synthesized)
agacttggtagtactcgtatcacgaagaaaacccctcaaagatggtaacacttacacagtggcagtgaagtcggtcattttgccatcggtccccccgtctccacagtacatcagaagtga

SEQ ID NO: 585575 - DNA, 120 bp, Artificial Sequence
  ENSG00000172497_12 (sequence is synthesized)
aatcatatgtgccggatttctcatccatgctattgacagcaattcatgcatcgtatcttactttaaccatatgtctgctagcatccttccttactttgctggaaatcttggtggctggtc

SEQ ID NO: 585576 - DNA, 120 bp, Artificial Sequence
  ENSG00000172497_13 (sequence is synthesized)
aaaatccattgaagaaacagcagcctcttgtatacagttcttagagaatcctcctgatgatgggtttgtaagcacattttaaaggtcaactttcaattactggtaatttaatttcccact

SEQ ID NO: 585577 - DNA, 120 bp, Artificial Sequence
  ENSG00000172497_14 (sequence is synthesized)
tttaattccaagcacccttagccctgacatctgtcaagctttggggccacaaaataatttaatataaccctaagcaaaatgcagtgacggagttaaaaaacaaaatgcatcttaagtcaa

SEQ ID NO: 585578 - DNA, 120 bp, Artificial Sequence
  ENSG00000172497_15 (sequence is synthesized)
ataccagtgatttggattagcattaaaagagctttagaattctgttgtaagtcatctgtggctctgcctcttccaggggcacagatagtggaaaattgcctgtatgcagtactatgtgtt

SEQ ID NO: 585579 - DNA, 120 bp, Artificial Sequence
  ENSG00000172497_16 (sequence is synthesized)
ctataaaatggcatgaatttagtttaaattatcgtaaacatttttaggttacagaggtgaaacatgcattctgtgtgaaattccaaaaaaaaaattataaaatctaaaatgatttgctaa

SEQ ID NO: 585580 - DNA, 120 bp, Artificial Sequence
  ENSG00000172497_17 (sequence is synthesized)
taagtttgatgaaacatctgcagattaattggctctgccagatagcgaaaaatctcttaatttacccagatgtcctaattaattgtaatcttgtaatttgtgtccacactatgggaatcc

SEQ ID NO: 585581 - DNA, 120 bp, Artificial Sequence
  ENSG00000172497_18 (sequence is synthesized)
taaggtcatcctttcggatcatctattccagaaggtcccccagaagattagggtcttagcctcccctacaccagcaagactcagatcctttcttgaaaaagctccaagtcaataagaaat

SEQ ID NO: 585582 - DNA, 120 bp, Artificial Sequence
  ENSG00000172497_19 (sequence is synthesized)
taaaatattgtactttctttttgaaacaggtatcttactttaaccatatgtctgctagcatccttccttactttgctggaaatcttggtggctggtcaaaatccattgaagaaacagcag

SEQ ID NO: 585583 - DNA, 120 bp, Artificial Sequence
  ENSG00000172497_20 (sequence is synthesized)
cgctatcggggagctattgcacgcaagcgaattcgcctaggcagaaaatatgttatttcccacaaagaagaggttccactttgcatacactgggatatcagcaagcagataaaaatatat

SEQ ID NO: 585584 - DNA, 120 bp, Artificial Sequence
  ENSG00000172500_0 (sequence is synthesized)
ataagctgggtcccgatgccgcgagcggaatctcggcgctcccggaagtggcctgaaggcggcgcgccagtcccgagcagtgctcgctcctgctcggggcgctgcggccccgggcgtcgc

SEQ ID NO: 585585 - DNA, 120 bp, Artificial Sequence
  ENSG00000172500_1 (sequence is synthesized)
catgaccagtgagctggacatcttcgtggggaacacgacccttatcgacgaggacgtgtatcgcctctggctcgatggttactcggtgaccgacgcggtggccctgcgggtgcgctcggg

SEQ ID NO: 585586 - DNA, 120 bp, Artificial Sequence
  ENSG00000172500_2 (sequence is synthesized)
aatcctggagcagactggcgccacggcagcggtgctgcagagcgacaccatggaccattaccgcaccttccacatgctcgagcggctgctgcatgcgccgcccaagctactgcaccagct

SEQ ID NO: 585587 - DNA, 120 bp, Artificial Sequence
  ENSG00000172500_3 (sequence is synthesized)
catcttccagattccgccctcccggcaggcactactcatcgagaggtactatgcctttgatgaggcctttgttcgggaggtgctgggcaagaagctgtccaaaggcaccaagaaagacct

SEQ ID NO: 585588 - DNA, 120 bp, Artificial Sequence
  ENSG00000172500_4 (sequence is synthesized)
ggatgacatcagcaccaaaacaggcatcaccctcaagagctgccggagacagtttgacaactttaaacgggtcttcaaggtggtagaggaaatgcggggctccctggtggacaatattca

SEQ ID NO: 585589 - DNA, 120 bp, Artificial Sequence
  ENSG00000172500_5 (sequence is synthesized)
cgtcttctttgctaacaaccgctttgagacagggaagaaaaaactgcagtatctgagcttcggtgactttgccttctgcgctgagctcatgatccaaaactggacccttggagccgtcga

SEQ ID NO: 585590 - DNA, 120 bp, Artificial Sequence
  ENSG00000172500_6 (sequence is synthesized)
ctcacagatggatgacatggacatggacttagacaaggaatttctccaggacttgaaggagctcaaggtgctagtggctgacaaggaccttctggacctgcacaagagcctggtgtgcac

SEQ ID NO: 585591 - DNA, 120 bp, Artificial Sequence
  ENSG00000172500_7 (sequence is synthesized)
tgctctccggggaaagctgggcgtcttctctgagatggaagccaacttcaagaacctgtcccgggggctggtgaacgtggccgccaagctgacccacaataaagatgtcagagacctgtt

SEQ ID NO: 585592 - DNA, 120 bp, Artificial Sequence
  ENSG00000172500_8 (sequence is synthesized)
tgtggacctcgtggagaagtttgtggaaccctgccgctccgaccactggccactcagcgacgtgcggttcttcctgaatcagtattcagcgtctgtccactccctcgatggcttccgaca

SEQ ID NO: 585593 - DNA, 120 bp, Artificial Sequence
  ENSG00000172500_9 (sequence is synthesized)
ccaggccctctgggaccgctacatgggcaccctccgcggctgcctcctgcgcctgtatcatgactgaggtgcctcccaacgctccgcccacgctgacaataaagttgctctgagtttgga

SEQ ID NO: 585594 - DNA, 120 bp, Artificial Sequence
  ENSG00000172500_10 (sequence is synthesized)
cactactcatcgagaggtgctcaccctctgggatggtggagacatcaaccagtctgactgtatacccattttgccggctgaaacaggcccagggagggatgggatttacccagccatcag

SEQ ID NO: 585595 - DNA, 120 bp, Artificial Sequence
  ENSG00000172500_11 (sequence is synthesized)
tcagacctaggccctgctaggccccgccagactccctttcctgtcttttatggagggtcaatggtgttctctgactccacaaggtactatgcctttgatgaggcctttgttcgggaggtg

SEQ ID NO: 585596 - DNA, 120 bp, Artificial Sequence
  ENSG00000172500_12 (sequence is synthesized)
cccatctacacttcactccctccctttggccactggcccagttccagcctctgattgtggcagcagcttcatacctagtcttctcctcccttcccctttcccctcctttttttttttttt

SEQ ID NO: 585597 - DNA, 62 bp, Artificial Sequence
  ENSG00000172500_13 (sequence is synthesized)
tttttttcgagatggagtcttgctctgtggcccataattcttgtgcctcagcctctgcagta

SEQ ID NO: 585598 - DNA, 120 bp, Artificial Sequence
  ENSG00000172500_14 (sequence is synthesized)
tcatagagaagtgacttgagacacgtcacacagtgacttgaggcagagagaggccagaactcggacacccagctgaggttgcaggtgggagctgcttcctaagaaggaatttcaagccct

SEQ ID NO: 585599 - DNA, 120 bp, Artificial Sequence
  ENSG00000172500_15 (sequence is synthesized)
ggccctcagttcctggcatccgctcctgttcatggcccccacccaggctccccctgcccatagaatgttttccccacacacaccttgtctgcagacaaagggcccattgcctctctgtgg

SEQ ID NO: 585600 - DNA, 120 bp, Artificial Sequence
  ENSG00000172500_16 (sequence is synthesized)
acccttggcatcttcagcctccagttcgccacccctaccgggcagctctgcccctgccagggattggccggcaggtggcactgctgctccctctggtggccgctgacgggagcagctcat

SEQ ID NO: 585601 - DNA, 120 bp, Artificial Sequence
  ENSG00000172500_17 (sequence is synthesized)
aaacaatggggacttggttgatggagggaggtggatggatctggggaggggcctgctcctcctcccccagcttctgtgctcagctgccaacttctggggcagaaagcagagctccaagga

SEQ ID NO: 585602 - DNA, 120 bp, Artificial Sequence
  ENSG00000172500_18 (sequence is synthesized)
gagcacctggtgtccgtgtacaaggatggatgtgtacagtggctccttgggaactgagacatatctcagggaatggtgtctgtgctcagcccatccaccagaagagtctgctcacaagcc

SEQ ID NO: 585603 - DNA, 120 bp, Artificial Sequence
  ENSG00000172500_19 (sequence is synthesized)
tacaggcgtgagccaccgtgcctggctccctgttgtgccttccaagctatcctgtactgtatggccagagtgacctttcagaatgacctgaaattttatcagacccctgataaactttca

SEQ ID NO: 585604 - DNA, 120 bp, Artificial Sequence
  ENSG00000172500_20 (sequence is synthesized)
ccctgataaactttcattggctcccactgcctcctgggtagcagctgcactccttggctttgacctatggactgtcctgttatctcatccctgcagacctctctaggcttacatttctcc

SEQ ID NO: 585605 - DNA, 120 bp, Artificial Sequence
  ENSG00000172500_21 (sequence is synthesized)
agccccaggctttcctttactcatgttgcttctacctggagggtactgttcttggcaatatctaccccttgaaatccaagacaagaggtgagatgccaccttctccacaagcctttttgg

SEQ ID NO: 585606 - DNA, 120 bp, Artificial Sequence
  ENSG00000172500_22 (sequence is synthesized)
tacgccaggaagaagtaacccttctgggtctttgatgcctttcttttgtatctcctgtgagctttctgtttatagcttagcatttgttttttattttttagtttctagggcttagccagg

SEQ ID NO: 585607 - DNA, 120 bp, Artificial Sequence
  ENSG00000172500_23 (sequence is synthesized)
cgctttgagacagggaagaaaaaactgcagtatctgagcttcggtgactttgccttctgcgctgagctcatgatccaaaactggacccttggagccgtcggacttgaaggagctcaaggt

SEQ ID NO: 585608 - DNA, 120 bp, Artificial Sequence
  ENSG00000172500_24 (sequence is synthesized)
gctagtggctgacaaggaccttctggacctgcacaagaggtgaccttgtaggggcccatggggcggggcctgcagtaggggcccaggtggctataggcgtgaccctgtctctctgcagcc

SEQ ID NO: 585609 - DNA, 120 bp, Artificial Sequence
  ENSG00000172508_0 (sequence is synthesized)
gctgtgccactgccaccgccgccgccgctgcatcccgcccggtccgagtccgcccgccacgcccgccgagccgctgccgccgccagctctccctggatccatcgggtcccgagtgggatt

SEQ ID NO: 585610 - DNA, 120 bp, Artificial Sequence
  ENSG00000172508_1 (sequence is synthesized)
gcccactgggctccaaggacctggaggaagagggcccctggggagggggctctggcctgccgcccacaggctgcttccctggctcctggcgccaggacgtgggcctggactgcaagggat

SEQ ID NO: 585611 - DNA, 120 bp, Artificial Sequence
  ENSG00000172508_2 (sequence is synthesized)
cccccgagggggccgaggcccgggcttggactgtctactactacagcctcctgcagagctgtctgcagcaagctggccttccggagactcaggaccgcggccaggtgccccgcacaggct

SEQ ID NO: 585612 - DNA, 120 bp, Artificial Sequence
  ENSG00000172508_3 (sequence is synthesized)
gtcctggggcggaggtgaccttgtgcgttctgggctcccccagcacctttctgcctgtgctgctggagggtggggtccagagcccgggaaacatgctcctttgcctgtcccctgcttggc

SEQ ID NO: 585613 - DNA, 120 bp, Artificial Sequence
  ENSG00000172508_4 (sequence is synthesized)
tgatgaaggtgccagcacccgggcagccgggtgaggcagccctgctagtctccaaggctgtgagcttccaccctgggggcctgacattcctggatgactttgtccccccgcgccgtgcca

SEQ ID NO: 585614 - DNA, 120 bp, Artificial Sequence
  ENSG00000172508_5 (sequence is synthesized)
cctactttttggcaggcctgggcctggggcctggccggggccgagaggcagcagaactcgcccgtgacctgacctgccccacaggagcttcggctgagctggcccggctgctggaggacc

SEQ ID NO: 585615 - DNA, 120 bp, Artificial Sequence
  ENSG00000172508_6 (sequence is synthesized)
ggctgctgacaaggcagttgctggcccagcagggtggtgtggctgtgccagcaaccctggctttcacctacaagccgccggggctgctgcggggaggggatgccagcctagggctacggc

SEQ ID NO: 585616 - DNA, 120 bp, Artificial Sequence
  ENSG00000172508_7 (sequence is synthesized)
tggtggagctgagtggcaaagagggccaggagacgctggtgaaagaggaagtggaggcttttctgcgctccgaggccctgggtgatatcctgcaggtagctgtgaagctcagtggctggc

SEQ ID NO: 585617 - DNA, 120 bp, Artificial Sequence
  ENSG00000172508_8 (sequence is synthesized)
gctggcgggggcggcaggcatggcgtctgcacccgcgggcagagctgggtgcagtggtggacacagtgctggcgctgctggagaagctggaggaggaggagagtgtcctggtggaggctg

SEQ ID NO: 585618 - DNA, 120 bp, Artificial Sequence
  ENSG00000172508_9 (sequence is synthesized)
tgtacccacctgcccagctgccctgctcagatggtccttcacccggccccggcctggccgtgcgaatctgtgctgtggtgtgtcggacacagggtgataggccactgctgagcaaggtgg

SEQ ID NO: 585619 - DNA, 120 bp, Artificial Sequence
  ENSG00000172508_10 (sequence is synthesized)
tgtgcggcgtgggccgcggggaccgccctctacggcaccacaactccctgccgaggacgctggaggtggcgctggcccagtgcggcctgggcgaggaggcgcaggtggcggctgtgcggc

SEQ ID NO: 585620 - DNA, 120 bp, Artificial Sequence
  ENSG00000172508_11 (sequence is synthesized)
gctggccgccgtgctggctctggaggccggcctgagtgccgagcagcgcggcgggcgccgggcgcacacggacttcctgggcgtggatttcgcgctgacagcggccggcggcgtgctgac

SEQ ID NO: 585621 - DNA, 120 bp, Artificial Sequence
  ENSG00000172508_12 (sequence is synthesized)
ggatttcgcgctgacagcggccggcggcgtgctgaccccagtggccctggagctgaacggcggcctgtgtctggaggcgtgcggcgcgctggaggggctgtgggccgcgccgcggctggg

SEQ ID NO: 585622 - DNA, 120 bp, Artificial Sequence
  ENSG00000172508_13 (sequence is synthesized)
ccgacgaggcggtggcggcgccgctggtggagaccatgcttcggcggtcggcgcgctgcctcatggagggaaaacagctgctggtggtcggcgctggcggcgtcagcaagaagttcgtgt

SEQ ID NO: 585623 - DNA, 120 bp, Artificial Sequence
  ENSG00000172508_14 (sequence is synthesized)
gggaggcggcgcgcgactacgggctccagctgcacctcgtggagtcagaccccaaccactttgcatcccagttggtacagaccttcatccactttgacatgacagagcaccggagggatg

SEQ ID NO: 585624 - DNA, 120 bp, Artificial Sequence
  ENSG00000172508_15 (sequence is synthesized)
aggagaacgcacggctgctggcagagttggtgcgggctcgcggcctcaagctagatggctgcttctcctactgggatgactgcctggtgctcacagccctgctctgccaggagctaggtc

SEQ ID NO: 585625 - DNA, 120 bp, Artificial Sequence
  ENSG00000172508_16 (sequence is synthesized)
tccatgctgtgccctgctgcccactggagagtgaggctgatgtggagagggccgtgcaccaggtacccctgccaggtgtcatgaagctggagttcggggcaggtgcagtgggtgtccggc

SEQ ID NO: 585626 - DNA, 120 bp, Artificial Sequence
  ENSG00000172508_17 (sequence is synthesized)
tggtagaggatgcgccacagtgccatgagcacttttcccggattacccgagacttgcagggcgaggccgaccacccaggcattgggctgggctggggcaatgccatgctgctgatggagt

SEQ ID NO: 585627 - DNA, 120 bp, Artificial Sequence
  ENSG00000172508_18 (sequence is synthesized)
ttgtggagggcaccgagcacgacgtggacctggtgttgtttggtgggcggttgctggctgcctttgtctccgacaatggccctacgaggctgcctggcttcactgagacggcggcctgca

SEQ ID NO: 585628 - DNA, 120 bp, Artificial Sequence
  ENSG00000172508_19 (sequence is synthesized)
tgcccaccgggctggcaccagagcaggaggcacagatggttcaggcagccttccgctgttgcctgggctgcgggttgctcgatggagtcttcaacgtggagctcaagctgaccggggctg

SEQ ID NO: 585629 - DNA, 120 bp, Artificial Sequence
  ENSG00000172508_20 (sequence is synthesized)
ggcctcggcttatcgagatcaacccccgcatgggtggcttctacctgcgtgattggatcctggagctctatggtgttgacctgctgctggctgctgttatggtggcctgtggcttgcgtc

SEQ ID NO: 585630 - DNA, 120 bp, Artificial Sequence
  ENSG00000172508_21 (sequence is synthesized)
ctgccctgcccacccgcccacgtgctcgtggccatctggtgggcgtcatgtgccttgtgtcccagcacctgcaggccctgagttccaccgccagccgtgagaccctgcaggccctgcacg

SEQ ID NO: 585631 - DNA, 120 bp, Artificial Sequence
  ENSG00000172508_22 (sequence is synthesized)
accgtggactgctacgcctcaatctgctggaggaggccctggtgcctggcgagtatgaggagccctactgcagtgtggcctgtgccggacccagccccaccgaggcccgtctccgcctgc

SEQ ID NO: 585632 - DNA, 120 bp, Artificial Sequence
  ENSG00000172508_23 (sequence is synthesized)
tgggcctctgccagggcctgggcatcgatgggcccagctaccctgttgcccacttcctgtctcacttcaaatagcactggggtcagggggcagggaagcagtgctgggtggaggcactgt

SEQ ID NO: 585633 - DNA, 120 bp, Artificial Sequence
  ENSG00000172508_24 (sequence is synthesized)
ggtgccctctgctccctggagctcttcctgcttctctccccatcaccatgccccagccccagcctggcccgctgcaatgcctaggtctgttccagagcagcagggcaatttagacaccaa

SEQ ID NO: 585634 - DNA, 120 bp, Artificial Sequence
  ENSG00000172508_25 (sequence is synthesized)
ggcatcctggactcaagggcctcttgccctcccgaaggccccagtccagcctacagcttccccagcattctagccttggagaaatgacaatggccacacacacacacacacacacacaca

SEQ ID NO: 585635 - DNA, 120 bp, Artificial Sequence
  ENSG00000172508_26 (sequence is synthesized)
cacacctctgacgccagctccccaggtgggagtgggcccaaacccagcccctcctgtccacctctccaggtctcactctcttcctgccatctacaagaggagaggacctggctgggcccc

SEQ ID NO: 585636 - DNA, 120 bp, Artificial Sequence
  ENSG00000172508_27 (sequence is synthesized)
aagccttggacaaatcctgggaaaacctgagactagaacccttgtcttcctcttacccaaattctaggatagctctgaagcctgctggaaacttggtggcatccaacctgcctcattcgg

SEQ ID NO: 585637 - DNA, 120 bp, Artificial Sequence
  ENSG00000172508_28 (sequence is synthesized)
cctgaccggtagaggcaggtggcctgtggacagaagtaatcctctttctgctcaccccaggcagacacaactgcctatgttcccccgatgagaggaaacaggctgagagaagaaaaatga

SEQ ID NO: 585638 - DNA, 120 bp, Artificial Sequence
  ENSG00000172508_29 (sequence is synthesized)
ctgctccaggattataccacagtggagagcgggtcacaggacatgatgcagggtccaggtttctgttttgatcaagtcttacatgcccattcagcttctaggcccccctcacctccctgc

SEQ ID NO: 585639 - DNA, 120 bp, Artificial Sequence
  ENSG00000172508_30 (sequence is synthesized)
cctcattcacaagtggccctgagacacgtgaacacctccctcctatgcatcacaaaccttctccaccgagctttggtgctttggcctctggcacacctaactagcattggcagaggagag

SEQ ID NO: 585640 - DNA, 120 bp, Artificial Sequence
  ENSG00000172508_31 (sequence is synthesized)
tctacactctcttcctcattcagggaagatgctttaagaaatcctgcctctgtgcagcagaggagctggaggcagctccccaggcatccctccccaaataaaggcttatgtactggtgaa

SEQ ID NO: 585641 - DNA, 120 bp, Artificial Sequence
  ENSG00000172508_32 (sequence is synthesized)
ccactcccaaagtctaggggctggaaggccaggcagggacttggctgccctgactccttcgtctctctgtccctctgtctctgccatcagtctctcagccactccacccacgagatgctc

SEQ ID NO: 585642 - DNA, 120 bp, Artificial Sequence
  ENSG00000172508_33 (sequence is synthesized)
gctgtgccactgccaccgccgccgccgctgcatcccgcccggtccgagtccgcccgccacgcccgccgagccgctgccgccgccagtctctcagccactccacccacgagatggtgagtc

SEQ ID NO: 585643 - DNA, 120 bp, Artificial Sequence
  ENSG00000172508_34 (sequence is synthesized)
ttctgtggtccctcccccacaaggcccaagtccctgggcagagagtgggcccagaggacagcaggcagcacctaggacctaagcctgggagttgccccctgcagacagcttagacccacg

SEQ ID NO: 585644 - DNA, 120 bp, Artificial Sequence
  ENSG00000172508_35 (sequence is synthesized)
accagctcccccacccccaccctgcggctgcatcctgggaggtgggcactcttagtgccctgtgacattcattcattccatggcccctcagggagctcaccttctaggagacggcacaga

SEQ ID NO: 585645 - DNA, 120 bp, Artificial Sequence
  ENSG00000172508_36 (sequence is synthesized)
ggctctggccctggcaaactgggattcgagcccaggcatgaggcccagtcctctgccgtctgggccacagcacaccatctcccaacaaccaagagattctcttcgtcccagcctcatcag

SEQ ID NO: 585646 - DNA, 120 bp, Artificial Sequence
  ENSG00000172508_37 (sequence is synthesized)
cccccaggggatgggagagggcaggcaccaggcaacaaggtccaaagagacctcacgacttgctcaaggtggccgagcctgtcccctggaggacagactcagctgccaggcctgtccagg

SEQ ID NO: 585647 - DNA, 120 bp, Artificial Sequence
  ENSG00000172508_38 (sequence is synthesized)
cctggggactgcaaagaacaagaattccattcacacgaagcctcccagcagccccatattgggggggcgccagcctcagagaggggagggacgttaggtttcatccaaagaaagcatttc

SEQ ID NO: 585648 - DNA, 120 bp, Artificial Sequence
  ENSG00000172508_39 (sequence is synthesized)
cgtgactcaaaatatctgcaggggggatactgtctagcctcctaatgtttagcccagggctgggcacacagtagggcttcaagacctacgtggggatgacagtggaatcacatttaggtg

SEQ ID NO: 585649 - DNA, 120 bp, Artificial Sequence
  ENSG00000172508_40 (sequence is synthesized)
tcagcacactccatgccgggtcatgagacagaaataagccacctcagagtgatggctgggttcgttcattcatctactcttcagtcaacaaacacttactgagaagtggctgtgtgccag

SEQ ID NO: 585650 - DNA, 120 bp, Artificial Sequence
  ENSG00000172508_41 (sequence is synthesized)
gcacgctttaggtgctggggttgcctccatgaacaaaacaagcagaaaactctgctgctgtgaagcaagctaaggcggagcccagcatggcaggggcgggaggggctggctggcaagaca

SEQ ID NO: 585651 - DNA, 120 bp, Artificial Sequence
  ENSG00000172508_42 (sequence is synthesized)
caacacaagcctttcctctcctagtccccgggacggtgtcagccctgaacatagcccaggctgggagagtggggggcttacacccttgggtgacttaatgtgcccactggcccaccctgc

SEQ ID NO: 585652 - DNA, 120 bp, Artificial Sequence
  ENSG00000172508_43 (sequence is synthesized)
ggctcccaaagtgctgggattataggcagccaccgcaccaggagaggctggatcttatagacatcctggcccctgtgtgcaagtccactgggtccagaagtgaggagggggctgcacaga

SEQ ID NO: 585653 - DNA, 120 bp, Artificial Sequence
  ENSG00000172508_44 (sequence is synthesized)
tgcacagatgtgtggagaccctggcccaggagggcctctctgggagaacgtgcaatagggcaaagcgctggcagctgggacagaaagctgcagggctgggacctccggcctccatccaaa

SEQ ID NO: 585654 - DNA, 120 bp, Artificial Sequence
  ENSG00000172508_45 (sequence is synthesized)
gccctacgtctgtgaccctcgacgacagtccctgtccatctgtacctggccctctgtcgggacttcctctgtgtctctgaagacccccgtctctccctgcctgctccgtgccctcctcct

SEQ ID NO: 585655 - DNA, 120 bp, Artificial Sequence
  ENSG00000172508_46 (sequence is synthesized)
gctgtgccactgccaccgccgccgccgctgcatcccgcccggtccgagtccgcccgccacgcccgccgagccgctgccgccgccagtctctcagccactccacccacgagatgctctccc

SEQ ID NO: 585656 - DNA, 120 bp, Artificial Sequence
  ENSG00000172519_0 (sequence is synthesized)
cgctctcagatgtcctcccaggtgggagtcactagacacccctgtgctcctaaccactgggtcttctttcctctctccaccaactaggggtggccgccatgcaggggctaaaccacacct

SEQ ID NO: 585657 - DNA, 120 bp, Artificial Sequence
  ENSG00000172519_1 (sequence is synthesized)
ccgtgtctgaattcatcctcgttggcttctctgccttcccccacctccagctgatgctcttcctgctgttcctgctgatgtacctgttcacgctgctgggcaacctgctcatcatggcca

SEQ ID NO: 585658 - DNA, 120 bp, Artificial Sequence
  ENSG00000172519_2 (sequence is synthesized)
ctgtctggagcgagcgcagcctccacatgcccatgtacctcttcctgtgtgccctctccatcaccgagatcctctacaccgtggccatcatcccgcgcatgctggccgacctgctgtcca

SEQ ID NO: 585659 - DNA, 120 bp, Artificial Sequence
  ENSG00000172519_3 (sequence is synthesized)
cccagcgctccatcgccttcctggcctgtgccagtcagatgttcttctccttcagcttcggcttcacccactccttcctgctcactgtcatgggctacgaccgctacgtggccatctgcc

SEQ ID NO: 585660 - DNA, 120 bp, Artificial Sequence
  ENSG00000172519_4 (sequence is synthesized)
gggctgctcctgggctggtggcttggtcatggggatggtggtgacctcggccattttccacctcgccttctgtggacacaaggagatccaccatttcttctgccacgtgccacctctgtt

SEQ ID NO: 585661 - DNA, 120 bp, Artificial Sequence
  ENSG00000172519_5 (sequence is synthesized)
gaagttggcctgtggagatgatgtgctggtggtggccaaaggcgtgggcttggtgtgtatcacggccctgctgggctgttttctcctcatcctcctctcctatgccttcatcgtggccgc

SEQ ID NO: 585662 - DNA, 120 bp, Artificial Sequence
  ENSG00000172519_6 (sequence is synthesized)
catcttgaagatcccttctgctgaaggtcggaacaaggccttctccacctgtgcctctcacctcactgtggtggtcgtgcactatggctttgcctccgtcatttacctgaagcccaaagg

SEQ ID NO: 585663 - DNA, 120 bp, Artificial Sequence
  ENSG00000172519_7 (sequence is synthesized)
tccccagtctccggaaggagacaccttgatgggcatcacctacacggtcctcacacccttcctcagccccatcatcttcagcctcaggaacaaggagctgaaggtcgccatgaagaagac

SEQ ID NO: 585664 - DNA, 120 bp, Artificial Sequence
  ENSG00000172519_8 (sequence is synthesized)
ttgcttcaccaaactctttccacagaactgctgaaatggctgactttctctcaagagatgtagcgaatgggaacactttagtcttcctcctttatttcttttcctttcctccctccctcc

SEQ ID NO: 585665 - DNA, 120 bp, Artificial Sequence
  ENSG00000172519_9 (sequence is synthesized)
ttgccttccttccatccttcctccctccctccctcccccttccttcttctctgcctacttccctctttcccttctctctgtctctttctgtttctatacctctctgtctctgtcactctc

SEQ ID NO: 585666 - DNA, 90 bp, Artificial Sequence
  ENSG00000172519_10 (sequence is synthesized)
tctgtcactctctttctccctccttggactgagtctcgttctgtcacccaggttggagtgcgttggcacaatctcggctcactgcaacct

SEQ ID NO: 585667 - DNA, 120 bp, Artificial Sequence
  ENSG00000172519_11 (sequence is synthesized)
tcccaaagtgctgggatcacaggcgtgagtcaccacacccagccctgacttttttactgtagacatcccagtggtttcttattggggttttgatttgcatttccccaatgactaatgaca

SEQ ID NO: 585668 - DNA, 120 bp, Artificial Sequence
  ENSG00000172519_12 (sequence is synthesized)
attggggttttgatttgcatttccccaatgactaatgacaggctttaggtgcttaacacatgtgagttattttacttcacagggaagataggattactaactccattttgtttgttcgtt

SEQ ID NO: 585669 - DNA, 84 bp, Artificial Sequence
  ENSG00000172519_13 (sequence is synthesized)
agggaagataggattactaactccattttgtttgttcgttagttggttggttttatacacccaatcatggctaagtgcagcgtc

SEQ ID NO: 585670 - DNA, 120 bp, Artificial Sequence
  ENSG00000172519_14 (sequence is synthesized)
caattctcccacctcagcctccagagaagctagcactgcagatgcatgccaccacaagggtaactttgtattttttgtagcgacaggatctcacgatgttgcccaggctagtcttgaact

SEQ ID NO: 585671 - DNA, 120 bp, Artificial Sequence
  ENSG00000172519_15 (sequence is synthesized)
ctcggcctccccaaatgctgggattacaggcatgagccgtgacaccggccaagttctattctgaagatgaggaagctaagttatgaagagattaagttaattagccaaaggtcttgtcac

SEQ ID NO: 585672 - DNA, 120 bp, Artificial Sequence
  ENSG00000172519_16 (sequence is synthesized)
tgacatggaaaagctagaattgaacctattctttaaattagagctggggataagaagtacacatttctcagggcctgtgaagaggggaagtcagtctgttccagaaagggaggaagagct

SEQ ID NO: 585673 - DNA, 120 bp, Artificial Sequence
  ENSG00000172519_17 (sequence is synthesized)
ggattgaaaacaagagacacattctagctagcaccaatggagtgagcccagaactagaaatatgctgtctctatgggtttaggaggaatcacccagtgtcagagaattagggatacacct

SEQ ID NO: 585674 - DNA, 120 bp, Artificial Sequence
  ENSG00000172519_18 (sequence is synthesized)
tatgagtttggccaaactggctgtagtatttctgtgttttttagtagacgtgttaatacgaaagagtgtgtcacattcaaatattaaattgggccaggcacagtgcctcacacctgtaat

SEQ ID NO: 585675 - DNA, 84 bp, Artificial Sequence
  ENSG00000172519_19 (sequence is synthesized)
aaccttatctctacaaaaaaattaaaaaattagctagacatggctgcatgtgcctgtagtaccagctactcaagaggctgaggt

SEQ ID NO: 585676 - DNA, 78 bp, Artificial Sequence
  ENSG00000172519_20 (sequence is synthesized)
agtaattgtgccactgccctccagcctgagtgacagagtgagaccttgtcccaaaaaattaaattaaattaaattaaa

SEQ ID NO: 585677 - DNA, 120 bp, Artificial Sequence
  ENSG00000172519_21 (sequence is synthesized)
tgagaccttgtcccaaaaaattaaattaaattaaattaaacgctttgcaaaaaaaaaaaactacccattaaatccgggttcctgggttatattagaagttccggccgggtgcagtggctc

SEQ ID NO: 585678 - DNA, 120 bp, Artificial Sequence
  ENSG00000172519_22 (sequence is synthesized)
cagagcgagactctgtctcaaaaaaacaataaaaaaaagaagaagaagttctagggcacttaactactaatatctgggggggcattctttgcctcccctataaaatgtaaagggatccca

SEQ ID NO: 585679 - DNA, 120 bp, Artificial Sequence
  ENSG00000172519_23 (sequence is synthesized)
cccaaatgttaaacttccacccccatcacctcgagttgtcatggaaaagagaatgttataccctgtttataccccacgtgtcctggggtgtagctagtgctttctagctgatcatgattc

SEQ ID NO: 585680 - DNA, 120 bp, Artificial Sequence
  ENSG00000172519_24 (sequence is synthesized)
tgaagataccttggaataggctgggaaacaggtaaaaatcagactgtgtgagtttgaaagagtgcaggaaaggtggcttctgggttatatccaagatgtgtcattgtggttccccgtggt

SEQ ID NO: 585681 - DNA, 120 bp, Artificial Sequence
  ENSG00000172519_25 (sequence is synthesized)
cttcactttatttagtagtagtcattgtgtaaatttgaaacaaccggagaagttgggcttagtgttgtttttatacatggcatattctagaccctgagggccaggtcagggtgaggtgag

SEQ ID NO: 585682 - DNA, 120 bp, Artificial Sequence
  ENSG00000172519_26 (sequence is synthesized)
ggagacacctcacctcctttaaacattatttaaaatgttgacattttgttcaccgtggattttttttgcattcattttggttttttaaaatattgcattaggccgggtgtggtggctcac

SEQ ID NO: 585683 - DNA, 65 bp, Artificial Sequence
  ENSG00000172519_27 (sequence is synthesized)
agctactcgagaggctgaggcaggataattgctttaaccggggagacagacactccatctaaaaa

SEQ ID NO: 585684 - DNA, 120 bp, Artificial Sequence
  ENSG00000172519_28 (sequence is synthesized)
aaaaaaaaaaaaaaaaaaagcataaacgtaatttatcttgattgctgaattttttgatggccccttacattgggtgctcaaagtgactgccttatctccccacaaaggaaaaacaaaacg

SEQ ID NO: 585685 - DNA, 120 bp, Artificial Sequence
  ENSG00000172519_29 (sequence is synthesized)
tccccacaaaggaaaaacaaaacgcttgcatttttccctcaaaagactaaaaaatagaagccatcattaatttaaaataggattaagtgccaaaagttcagtgagaacacagcaggtctg

SEQ ID NO: 585686 - DNA, 120 bp, Artificial Sequence
  ENSG00000172519_30 (sequence is synthesized)
ggggtgtcaactctccatgccccaggtgtggaaacagtccccctctgcctgctagctttggccagccccctcccccgggaccctgtcctcatctccccccattaatcagccttcactttc

SEQ ID NO: 585687 - DNA, 120 bp, Artificial Sequence
  ENSG00000172519_31 (sequence is synthesized)
tgaagtctcacacctcctgcattcctcactgtttgccaagccttgataatggtcccctctgtgattggtatccccaaggcaggaccagagcccagagaggtgattaaggggcaggagatc

SEQ ID NO: 585688 - DNA, 120 bp, Artificial Sequence
  ENSG00000172519_32 (sequence is synthesized)
ccaggcttcagggacctgctccctgagttccttggagcccagtgttgtagtcctaattgctagagaccaaggccagcttgaaagatgtgatctgtgtccttcacttcttttgttcttttc

SEQ ID NO: 585689 - DNA, 120 bp, Artificial Sequence
  ENSG00000172519_33 (sequence is synthesized)
ttccccggtgctggcctaacctccttgcatgtggataaaaattcaatcccctcctcatggaggttgtccctcttgtttcacccccaaaatcctccagtttctgtctgccaagcagctaga

SEQ ID NO: 585690 - DNA, 83 bp, Artificial Sequence
  ENSG00000172519_34 (sequence is synthesized)
cccccaaaatcctccagtttctgtctgccaagcagctagaaggaagctctgtctcccagcctggagtgcagtggtgctatctc

SEQ ID NO: 585691 - DNA, 72 bp, Artificial Sequence
  ENSG00000172519_35 (sequence is synthesized)
gccaccacacccaaactggtctcggactcctgatttcaggtgatactaccacctcggcctcccaaggtgccg

SEQ ID NO: 585692 - DNA, 89 bp, Artificial Sequence
  ENSG00000172519_36 (sequence is synthesized)
agaaggatctttctaaagggaaactctgaaaaatcatccctctacttaaaccttctgtttctcttaggatacagtatagactctagtgt

SEQ ID NO: 585693 - DNA, 120 bp, Artificial Sequence
  ENSG00000172519_37 (sequence is synthesized)
accttctgtttctcttaggatacagtatagactctagtgtgatcatcagggctgcgtggccaggtctatacttcatccccaaattcattctttgaccctatagcccaatgggctccctgc

SEQ ID NO: 585694 - DNA, 120 bp, Artificial Sequence
  ENSG00000172519_38 (sequence is synthesized)
tgtcccggcagtaaaccaagcacacccggaccccaggaaccttgcatctactcttttttttttcttcagagattggggcatgaaatcttccattcctctttgcattgctggtttgcatta

SEQ ID NO: 585695 - DNA, 120 bp, Artificial Sequence
  ENSG00000172519_39 (sequence is synthesized)
ttgggggtattagaagacactggcttttggcaagaggagtctagattccaggtttggtgctaactgacaaagtatcttgcggcaggtagaaataatcagttttcttgcattttttccctc

SEQ ID NO: 585696 - DNA, 120 bp, Artificial Sequence
  ENSG00000172519_40 (sequence is synthesized)
gaaagactaaaaaatggaagccatcattaatttaaaacaggattaagtgccaaaagttcagtgaaaacacagccacatctgtgttttctctgtgttagtatctcacacacaattccactc

SEQ ID NO: 585697 - DNA, 120 bp, Artificial Sequence
  ENSG00000172519_41 (sequence is synthesized)
caaatacatccctgatgctgatgaaacgttatgtatataattgtatgttgtctacaaggtaaaccttaaaagtatgacaaatagaggttactatatgttcattgaatgtctttttttttt

SEQ ID NO: 585698 - DNA, 69 bp, Artificial Sequence
  ENSG00000172519_42 (sequence is synthesized)
atagaggttactatatgttcattgaatgtctttttttttttttgagagagagagagagagagaaataag

SEQ ID NO: 585699 - DNA, 90 bp, Artificial Sequence
  ENSG00000172519_43 (sequence is synthesized)
gcaaccttcacctcccaggttcaaacaattctcctgtgtcagactccctggaattacaggcgtgccaccatgcctggctaaatttgccat

SEQ ID NO: 585700 - DNA, 120 bp, Artificial Sequence
  ENSG00000172519_44 (sequence is synthesized)
acaggcatgagccaccacgcctggccccttgcatctactcttgcttttgcctgtaatacccttcccccacctgctcgcacactcccttcggtcttcctgagggtcacctcctcagaaagc

SEQ ID NO: 585701 - DNA, 120 bp, Artificial Sequence
  ENSG00000172519_45 (sequence is synthesized)
cggtcttcctgagggtcacctcctcagaaagctctttcctgacttctccacactcggtcaccacccctattacaagccctcatagcaactcacttaggtccctcagagcttttatcacaa

SEQ ID NO: 585702 - DNA, 120 bp, Artificial Sequence
  ENSG00000172519_46 (sequence is synthesized)
gttcccatatatattaattggtgcaattatttgtttatttatgtcttcctctttctagggcagacattgagatcgggatgtcttatctaattggttcaaccctgtcttcccagtggtgcc

SEQ ID NO: 585703 - DNA, 120 bp, Artificial Sequence
  ENSG00000172519_47 (sequence is synthesized)
tagaaaaatgcctggtacacagtaggtgctcaataaatgctttttgagtgaatacagcagggtttgtcattctgcgcccggctgacatttggggacagtggtgggggctgttctgtgcat

SEQ ID NO: 585704 - DNA, 120 bp, Artificial Sequence
  ENSG00000172519_48 (sequence is synthesized)
tgtaggatgttgagcagcgtcactgactttgacatactaggtgctgtaacatacatatcctctgcctcgtttcaaagaccaaaaattgtctctagaaatttccaaatgtgccctgggaag

SEQ ID NO: 585705 - DNA, 120 bp, Artificial Sequence
  ENSG00000172519_49 (sequence is synthesized)
gggagcaaaatcaccattggcagagaagcatgggaatgcagagactgggctaatagagctccagctgcgtcttacccctcttggctcccttagaactttgctcatgggatggttcgtttt

SEQ ID NO: 585706 - DNA, 120 bp, Artificial Sequence
  ENSG00000172519_50 (sequence is synthesized)
atgtgtcaccttgactgggtcaaagggatgctcagagatctgattggatattatttctgggtatgtttatgaaggtgtttctggaagagatgaacatttggattggtgaactgagtaaaa

SEQ ID NO: 585707 - DNA, 120 bp, Artificial Sequence
  ENSG00000172519_51 (sequence is synthesized)
caggtgggccttcccagtgtgagagggcatcctctaatctgtggagggtccgaatagaagaaaacagcagaggaggttggactcacattccctttgcctggcaatcttcttgctcttact

SEQ ID NO: 585708 - DNA, 120 bp, Artificial Sequence
  ENSG00000172519_52 (sequence is synthesized)
gctcctggttctcaggccttcagacccaggttggactctacaccattcgttttcagctattggccgagtcaacactgtctttcctggttctcaccttgcacatggcatatcatgagactt

SEQ ID NO: 585709 - DNA, 120 bp, Artificial Sequence
  ENSG00000172530_0 (sequence is synthesized)
agagcggcggcttctctcgcgaggacggacgccattatcgcatctccccgacaaacaccacgagaattccgcagcccacacggtgaccaaaagccagccccactgtgagttgaactcttt

SEQ ID NO: 585710 - DNA, 120 bp, Artificial Sequence
  ENSG00000172530_1 (sequence is synthesized)
cgtgttgaccggccactctccgtgctctggatgatgtcggaacacgacctggccgatgtggttcagattgcagtggaagacctgagccctgaccacccagttgttttggagaatcatgta

SEQ ID NO: 585711 - DNA, 120 bp, Artificial Sequence
  ENSG00000172530_2 (sequence is synthesized)
gtgacagatgaagacgaacctgctttgaaacgccagcgactagaaatcaattgccaggatccatctataaagtcattcctgtattccatcaaccagacaatctgcttgcggttggatagc

SEQ ID NO: 585712 - DNA, 120 bp, Artificial Sequence
  ENSG00000172530_3 (sequence is synthesized)
attgaagccaaattgcaagccctggaggctacttgtaaatccttagaagaaaagctggatctggtcacgaacaagcagcacagccccatccaggtccccatggtggccggctcccctctc

SEQ ID NO: 585713 - DNA, 120 bp, Artificial Sequence
  ENSG00000172530_4 (sequence is synthesized)
ggggcaacccagacgtgcaacaaagtgcgatgcgctgtgcctgggcgtcggcagaacaccattgtggtgaaggtgccgggccaagaagacagccaccacgaggacggggagagcggctcg

SEQ ID NO: 585714 - DNA, 120 bp, Artificial Sequence
  ENSG00000172530_5 (sequence is synthesized)
gaggccagcgactctgtgtccagctgtgggcaggcgggcagtcagagcatcgggagcaacgtcacgctcatcaccctgaactcggaagaggactaccccaatggcacctggctgggcgac

SEQ ID NO: 585715 - DNA, 120 bp, Artificial Sequence
  ENSG00000172530_6 (sequence is synthesized)
gagaacaaccccgagatgcgggtacgctgcgccatcatcccctccgacatgctgcacatcagcaccaactgccgcacggccgagaagatggcgctcacgctgctggactacctcttccac

SEQ ID NO: 585716 - DNA, 120 bp, Artificial Sequence
  ENSG00000172530_7 (sequence is synthesized)
cgcgaggtgcaggctgtgtccaacctctcggggcagggcaagcacgggaagaagcagctggacccgctcaccatctacggcatccggtgtcaccttttctataaatttggcatcacagaa

SEQ ID NO: 585717 - DNA, 120 bp, Artificial Sequence
  ENSG00000172530_8 (sequence is synthesized)
tccgactggtaccgaatcaagcagagcatcgactccaagtgccgcacggcgtggcggcgcaagcagcggggccagagcctggcggtcaagagcttctcgcggagaacgcccaactcgtcc

SEQ ID NO: 585718 - DNA, 120 bp, Artificial Sequence
  ENSG00000172530_9 (sequence is synthesized)
tactgcccttcagagccgatgatgagcaccccacctcctgccagcgagctcccgcagccacagccgcagccgcaggccctgcactacgcgctggccaacgcacagcaggtgcagatccac

SEQ ID NO: 585719 - DNA, 120 bp, Artificial Sequence
  ENSG00000172530_10 (sequence is synthesized)
cagatcggagaagacggacaggtgcaagtaatcccacagggacacctccacatcgcccaggtgccgcagggggagcaagtccagatcacgcaggacagcgagggcaacctccagatccat

SEQ ID NO: 585720 - DNA, 120 bp, Artificial Sequence
  ENSG00000172530_11 (sequence is synthesized)
cacgtggggcaggacggtcagcttctagaggccacccgcatcccctgcctcctggccccatccgtcttcaaagccagcagtggccaggtgctgcagggtgcacagctgatcgccgtggcc

SEQ ID NO: 585721 - DNA, 120 bp, Artificial Sequence
  ENSG00000172530_12 (sequence is synthesized)
tcctcggaccccgcggcggcgggcgtggatgggtcgccactccagggcagcgacatccaggttcagtacgtgcagctggcgccagtgagtgaccacacggccggggcacagacggccgaa

SEQ ID NO: 585722 - DNA, 120 bp, Artificial Sequence
  ENSG00000172530_13 (sequence is synthesized)
gccctgcagcccacgctacagccggagatgcagctcgagcacggggccatccagattcagtgagcggtgcccatggcaccaggagcccctcgccggctccgcctacggcccggcccccac

SEQ ID NO: 585723 - DNA, 120 bp, Artificial Sequence
  ENSG00000172530_14 (sequence is synthesized)
gcgccctgctctcacggcctcggcacaggcagcggctgcacgtgttctgctgaagtgcgtctgaaggccgctgcctccgcggggaacagcatcctatcaactgaaagagcagccgccgcc

SEQ ID NO: 585724 - DNA, 120 bp, Artificial Sequence
  ENSG00000172530_15 (sequence is synthesized)
gcccccagccggagacccctttcgtttgagtcctgctgttggtgtcggagcacgaggggaggcacggtgcggagagcgtcgcatatgcgcgggaaatcaagaactatgatatttttctgt

SEQ ID NO: 585725 - DNA, 120 bp, Artificial Sequence
  ENSG00000172530_16 (sequence is synthesized)
ttaaacagctttttttaatttgctatggtgtttataacaaaaaagaaaatttgaaaaaaaaaatcccaggggagtagcaggagccctttgctgtgtgctctgtccagtgtcatgagacgg

SEQ ID NO: 585726 - DNA, 120 bp, Artificial Sequence
  ENSG00000172530_17 (sequence is synthesized)
gagccctttgctgtgtgctctgtccagtgtcatgagacgggagccctttgctgtgtgctctgtccagtgtcatgagacgggagccctttgctgtgtgctctgtccagtgtcatgaggcag

SEQ ID NO: 585727 - DNA, 120 bp, Artificial Sequence
  ENSG00000172530_18 (sequence is synthesized)
gtgtttgcaaagccagctctcggttccgatggggtattgctgacctacttttctaggggaaatgctcttaaacactgtaattatgcatttctaatgaaataaaatgtatttatgaccaca

SEQ ID NO: 585728 - DNA, 120 bp, Artificial Sequence
  ENSG00000172530_19 (sequence is synthesized)
agtattcttggggagaaagataacagggaagtgaggagggttcagctgtggaagtgctgggatggctgatccgagtgaccatggcctagacggggtttaaaccctggactgaagaaagtg

SEQ ID NO: 585729 - DNA, 120 bp, Artificial Sequence
  ENSG00000172530_20 (sequence is synthesized)
catctgtaaagtgaggtaggccccttcaagacatgtaaggagtatctatggctgtggaatgcatctttttagactggccgctctgcatggatctgatcacgggtgaccaaaagccagccc

SEQ ID NO: 585730 - DNA, 120 bp, Artificial Sequence
  ENSG00000172530_21 (sequence is synthesized)
cgatgcccagggtggcatgactgtagccagccctgggcctcagagactctggcagagcgtggcgtccctcataggtcccggcccctcgtgggaggtattcaggtttctacccttccacag

SEQ ID NO: 585731 - DNA, 120 bp, Artificial Sequence
  ENSG00000172530_22 (sequence is synthesized)
gggaggacgtgctgggggaggggagactcttgcagcctcactttggttcaacttcagggtcagaagagattgggcagctgctgagcttccaagcaggaataggactaccccaatggcacc

SEQ ID NO: 585732 - DNA, 120 bp, Artificial Sequence
  ENSG00000172530_23 (sequence is synthesized)
gcgctaccgttttggaatgataccaacacttacgtggttacgaacgttagatctgtcccataggaatgagttgggatggagtgactgaaaatgtcaagccagttctcatgcaagtgtgcc

SEQ ID NO: 585733 - DNA, 120 bp, Artificial Sequence
  ENSG00000172530_24 (sequence is synthesized)
ctctctcacacgcgccttcaacagagagtagtcagtcagggagggtgagtttcagttggtttctttagctcctgtctatatcagcgcccagtggtgaatcttgccaggagaggtggtgac

SEQ ID NO: 585734 - DNA, 120 bp, Artificial Sequence
  ENSG00000172530_25 (sequence is synthesized)
attatcgcatctccccgacaaacaccacgagaattccgcagcccacacgctgcacctggggcccttcagcccctgcaggagaagaatggggcgagtgattggtacgtggccttcccagcc

SEQ ID NO: 585735 - DNA, 120 bp, Artificial Sequence
  ENSG00000172530_26 (sequence is synthesized)
tgcagagccgcctgctttggttgtaatcataggcaagctcagcctgctttggttgtagtcgtagacaagctcaggtttccgcctctgcacgtcccggtgggctcgcctgggactcccttt

SEQ ID NO: 585736 - DNA, 120 bp, Artificial Sequence
  ENSG00000172530_27 (sequence is synthesized)
agagaaacactctccgccaccctccatcctgacccccgtgcagaggatgaagtgctgtcccagaagccccctctcaggggtgccgtaagtctcagagagaggagcaccccggggcctccg

SEQ ID NO: 585737 - DNA, 120 bp, Artificial Sequence
  ENSG00000172530_28 (sequence is synthesized)
tggcagaatcctgtgagtgtctttggttaaaatgtgcaggaagtgttaactcctaagctgccagcagatggtgtgccgagatactgtgaagtcacatgaacttgattcctgttggaaaga

SEQ ID NO: 585738 - DNA, 120 bp, Artificial Sequence
  ENSG00000172530_29 (sequence is synthesized)
catatatggggttcagcaccatccacagtttctggcgtccacgtggtgggggtagggggtgcttcttgaaaccctcatggatgagggggactactgtgaaccaaaagcttaatttaaaga

SEQ ID NO: 585739 - DNA, 120 bp, Artificial Sequence
  ENSG00000172530_30 (sequence is synthesized)
agtgaccacagactatattgcactattcaggatttagttatctttttgaattgtaaacagataatcaagaacaaacattccggaagatgtttcttgtttcctttgcttttgattttcttc

SEQ ID NO: 585740 - DNA, 120 bp, Artificial Sequence
  ENSG00000172530_31 (sequence is synthesized)
ggacttgggaatgttttgaaacaacaggaacgacatcaccctaggtttgtgttttcaagccagatattccggcgtggatgctaagaattcttacatgggcaagtattaatatttgaatgc

SEQ ID NO: 585741 - DNA, 120 bp, Artificial Sequence
  ENSG00000172530_32 (sequence is synthesized)
agccgtgattgaggtggaggtggagacaaaaggcgtgcgtccctagaacatgttttgtccccactgccggagggaatattctgtgtcagctatcgcacgcaccctttccctccatgtgag

SEQ ID NO: 585742 - DNA, 120 bp, Artificial Sequence
  ENSG00000172530_33 (sequence is synthesized)
tggactccacactctaagcaaggcgctctggactgcaaactcagcttgtgcctctctccagccctgtggcctcgctggacaatttttctaatctctttggagctgatcttcatgttgaaa

SEQ ID NO: 585743 - DNA, 120 bp, Artificial Sequence
  ENSG00000172530_34 (sequence is synthesized)
aaacgcatgattgaaaactgtggcgtcgtcccccagactacagtaatactcaacaatgatcggcagaacgccattgtagccaagatggaagaccccttgagcaacagggcaccggattcc

SEQ ID NO: 585744 - DNA, 120 bp, Artificial Sequence
  ENSG00000172530_35 (sequence is synthesized)
aagtgcgatgcgtcgtcccccagactacagtaatactcaacaatgatcggcagaacgccattgtagccaagatggaagaccccttgagcaacagggcaccggattccctggaaaatgtca

SEQ ID NO: 585745 - DNA, 120 bp, Artificial Sequence
  ENSG00000172530_36 (sequence is synthesized)
ttctctcgcgaggacggacgccattatcgcatctccccgacaaacaccacgagaattccgcagcccacacggatgcagaaagtagatgacattccatccacactgtgtgagcaaattgga

SEQ ID NO: 585746 - DNA, 120 bp, Artificial Sequence
  ENSG00000172530_37 (sequence is synthesized)
tgtaggcatggagttttaaaagtttcattaagtgagaattcatctgcaaaggcttaggtggagatggttgatgcgctccctgcctgtgaggagtcatgaggccgaaggcatagccgtgtg

SEQ ID NO: 585747 - DNA, 120 bp, Artificial Sequence
  ENSG00000172530_38 (sequence is synthesized)
ctgtactcaagggacacccgcacctcagcccctgagtagctgggactatccagttgttttggagaatcatgtagtgacagatgaagacgaacctgctttgaaacgccagcgactagaaat

SEQ ID NO: 585748 - DNA, 120 bp, Artificial Sequence
  ENSG00000172530_39 (sequence is synthesized)
ggactgatgtttttcactgatgagatggtaggggttgtcttgctattggagaaatacatcatccctgaagaactgtgagcaagtggagcgagtgtgggctttgaagggtagcgagcttgc

SEQ ID NO: 585749 - DNA, 120 bp, Artificial Sequence
  ENSG00000172530_40 (sequence is synthesized)
accctgaccggggagggcccgggtcacacagttgttgatgtggaacaggtaattgccctgtttggagttgcctgttctgcccaggaatgtactccagggcctgatggcgatgctggaact

SEQ ID NO: 585750 - DNA, 120 bp, Artificial Sequence
  ENSG00000172530_41 (sequence is synthesized)
aagaggaggcagttgtagggttcacttttagctggaagttcttaggggacagaaaaataacttggagtagtgagtggttctgagtaagctcaggaaacgtcaaataaaaactggatctgg

SEQ ID NO: 585751 - DNA, 120 bp, Artificial Sequence
  ENSG00000172530_42 (sequence is synthesized)
tcatttaacacgcagctcgcagatatccagtgctagaagaaaacaccaaaacgcggtaaaattctgtatgtgggtccacttcccgtgtctggcgattaaaataagaatatattcttgcga

SEQ ID NO: 585752 - DNA, 120 bp, Artificial Sequence
  ENSG00000172530_43 (sequence is synthesized)
ttgtataggtgattgtctttcgttttcaataggaattgaatgcagtaagttagaaattgctaataatactaacgatggctttgtgatgagtgacagtatgcagtctcgtcaccatacatt

SEQ ID NO: 585753 - DNA, 120 bp, Artificial Sequence
  ENSG00000172530_44 (sequence is synthesized)
cataccgtgttcatttaaaattattttgttaaaacaggatatctgcaaataaacatttagcagggtctgacagacaacacagttcctttttacaacaaatgaaaatgaatttctaactgg

SEQ ID NO: 585754 - DNA, 120 bp, Artificial Sequence
  ENSG00000172530_45 (sequence is synthesized)
agagctcttagtagctctgtggttgagtgagttggttccttgcgtgcagcccgtgacctggcgtggtgatgccgcacagctcagcaaggcgtcccccttcggggaagctgggcgacacac

SEQ ID NO: 585755 - DNA, 120 bp, Artificial Sequence
  ENSG00000172530_46 (sequence is synthesized)
tttcatttggggtcagggtaggggaatgagtacaatgctttttgagttgtttgttcatctttaaaataataaatagtacctagaaatgtcaatattttgttttggggcttttgttgctac

SEQ ID NO: 585756 - DNA, 120 bp, Artificial Sequence
  ENSG00000172530_47 (sequence is synthesized)
tggaggttgaatttttgcagaactggggttttcttgttattctcaagtggcctgtgatgtgtcttggcgtgtttgccgtgtctgagggtgtcttggtgtgtttctactcatgaccgtctc

SEQ ID NO: 585757 - DNA, 120 bp, Artificial Sequence
  ENSG00000172530_48 (sequence is synthesized)
ctcctctcgttctttgtagggcaacctccagatccatcacgtggggcaggacggtcaggtgctgcagggtgcacagctgatcgccgtggcctcctcggaccccgcggcggcgggcgtgga

SEQ ID NO: 585758 - DNA, 120 bp, Artificial Sequence
  ENSG00000172530_49 (sequence is synthesized)
gtcacttagtgtgttaagattgacactgttttgattatcagcacctatggcaatgtgatattcagtgtattttttccccttttagttctggacctgcagatagggtggctttgattttgg

SEQ ID NO: 585759 - DNA, 120 bp, Artificial Sequence
  ENSG00000172530_50 (sequence is synthesized)
aatgaggtgaccaacagataaaactttattttaaagttgggaagaaatcattattattgattgggttttatcgtgggttttctcaaaccaaacagggcagccccgcagagcatggagtca

SEQ ID NO: 585760 - DNA, 120 bp, Artificial Sequence
  ENSG00000172530_51 (sequence is synthesized)
gaagtcagaagcttgcaggtttggagttaggactgactcagtggcacattaattgcccagtgtctgggcttttcttgggattaaggagttatcctgtttttctgcctgactgagaataag

SEQ ID NO: 585761 - DNA, 120 bp, Artificial Sequence
  ENSG00000172530_52 (sequence is synthesized)
ttcaaccttaaggtgtcagcactgtttactatcttaatgttaaaataattctgtaaaacttttcatgttaaacattttttttctctgtcactgatttcagttgttttggagaatcatgta

SEQ ID NO: 585762 - DNA, 120 bp, Artificial Sequence
  ENSG00000172530_53 (sequence is synthesized)
gggcaggtcccacggaggggatgctgcggccaggctccgtggggtggggcaccctgcgacgggctgctcctcttcccagggccaccggtgagactctcagtgcacagagtgcggttctgt

SEQ ID NO: 585763 - DNA, 120 bp, Artificial Sequence
  ENSG00000172530_54 (sequence is synthesized)
gtggaggtgtgggatgcatctcctggccctcccgtagtggggtgcaaccccaagtgaagaccccgtggctcatgtcaagtgccctcagggctggggctgcccacccgcctgcctgggccg

SEQ ID NO: 585764 - DNA, 120 bp, Artificial Sequence
  ENSG00000172530_55 (sequence is synthesized)
tcttgacaccggagctgcctgcctggatgttggagcgcccagtggattgagtgggaagtgggcctgggtgcttacaggcgatggggtcaccagagcccacccaggggcctcgcctgtccc

SEQ ID NO: 585765 - DNA, 120 bp, Artificial Sequence
  ENSG00000172530_56 (sequence is synthesized)
ccattctcattccatactctgggaggcggtacaaggtcgggagggccagcggggctctctgccaccaggactcacttccgcccatcttggaactgggcctcactttcctgcgagcttctg

SEQ ID NO: 585766 - DNA, 120 bp, Artificial Sequence
  ENSG00000172530_57 (sequence is synthesized)
ctgggttctcagtgcccaccagcagctcctttgctctccctgagcccttgaggtcactctgccttgggaatggggagggtttgggtctcagcctcacgctcacggtcctggcttggattt

SEQ ID NO: 585767 - DNA, 120 bp, Artificial Sequence
  ENSG00000172530_58 (sequence is synthesized)
taggcctcagtggcactctgggagcgcttgtgctcttcatggttgccactgggattttccaggaggctctgtggcatttgctgttgctctctttttctgtggaagctctgccttgctttt

SEQ ID NO: 585768 - DNA, 120 bp, Artificial Sequence
  ENSG00000172530_59 (sequence is synthesized)
ttttttttcccttttttctgctctgtaggtgcttgagggcggagttgcagatccagcagagactcgatggcactctctcactggatctgatgcgacttgagagcgatggggagacaggat

SEQ ID NO: 585769 - DNA, 65 bp, Artificial Sequence
  ENSG00000172530_60 (sequence is synthesized)
cggccgaaccctttacctcaggtgttccgcccgccttggcctcccacagggctgagattacaggc

SEQ ID NO: 585770 - DNA, 120 bp, Artificial Sequence
  ENSG00000172530_61 (sequence is synthesized)
tccaccgtgcccggccgccatcacttatttatattatgtgttacctataggacttatctaagaccataatcactgccgcgtgtgctaagtcccgcgcgcgtgcactcaggcccctctgga

SEQ ID NO: 585771 - DNA, 120 bp, Artificial Sequence
  ENSG00000172530_62 (sequence is synthesized)
tagacactggggacccctgaccacttatgtcagggaaaacgccaccaagcgctccggaacctcagggcaggacccgccgcagcagcaggtgaccaaaagccagccccactgtgagttgaa

SEQ ID NO: 585772 - DNA, 120 bp, Artificial Sequence
  ENSG00000172530_63 (sequence is synthesized)
atttccactggccccttaagagaggcaggagtttaacctggactctctggacccggggctgtttgtggaagggcctcggcatgtccttgggtttagtctggctgcacgtggtgggctcca

SEQ ID NO: 585773 - DNA, 120 bp, Artificial Sequence
  ENSG00000172531_0 (sequence is synthesized)
aggccggaaggaggctgccggagggcgggaggcaggagcgggccaggagctgctgggctggagcggcggcgccgccatgtccgacagcgagaagctcaacctggactcgatcatcgggcg

SEQ ID NO: 585774 - DNA, 120 bp, Artificial Sequence
  ENSG00000172531_1 (sequence is synthesized)
cctgctggaagtgcagggctcgcggcctggcaagaatgtacagctgacagagaacgagatccgcggtctgtgcctgaaatcccgggagatttttctgagccagcccattcttctggagct

SEQ ID NO: 585775 - DNA, 120 bp, Artificial Sequence
  ENSG00000172531_2 (sequence is synthesized)
ggaggcacccctcaagatctgcggtgacatacacggccagtactacgaccttctgcgactatttgagtatggcggtttccctcccgagagcaactacctctttctgggggactatgtgga

SEQ ID NO: 585776 - DNA, 120 bp, Artificial Sequence
  ENSG00000172531_3 (sequence is synthesized)
caggggcaagcagtccttggagaccatctgcctgctgctggcctataagatcaagtaccccgagaacttcttcctgctccgtgggaaccacgagtgtgccagcatcaaccgcatctatgg

SEQ ID NO: 585777 - DNA, 120 bp, Artificial Sequence
  ENSG00000172531_4 (sequence is synthesized)
tttctacgatgagtgcaagagacgctacaacatcaaactgtggaaaaccttcactgactgcttcaactgcctgcccatcgcggccatagtggacgaaaagatcttctgctgccacggagg

SEQ ID NO: 585778 - DNA, 120 bp, Artificial Sequence
  ENSG00000172531_5 (sequence is synthesized)
ctgacaaggacgtgcagggctggggcgagaacgaccgtggcgtctcttttacctttggagccgaggtggtggccaagttcctccacaagcacgacttggacctcatctgccgagcacacc

SEQ ID NO: 585779 - DNA, 120 bp, Artificial Sequence
  ENSG00000172531_6 (sequence is synthesized)
aggtggtagaagacggctacgagttctttgccaagcggcagctggtgacacttttctcagctcccaactactgtggcgagtttgacaatgctggcgccatgatgagtgtggacgagaccc

SEQ ID NO: 585780 - DNA, 120 bp, Artificial Sequence
  ENSG00000172531_7 (sequence is synthesized)
tcatgtgctctttccagatcctcaagcccgccgacaagaacaaggggaagtacgggcagttcagtggcctgaaccctggaggccgacccatcaccccaccccgcaattccgccaaagcca

SEQ ID NO: 585781 - DNA, 120 bp, Artificial Sequence
  ENSG00000172531_8 (sequence is synthesized)
agaaatagcccccgcacaccaccctgtgccccagatgatggattgattgtacagaaatcatgctgccatgctgggggggggtcaccccgacccctcaggcccacctgtcacggggaacat

SEQ ID NO: 585782 - DNA, 120 bp, Artificial Sequence
  ENSG00000172531_9 (sequence is synthesized)
ggagccttggtgtatttttcttttctttttttaatgaatcaatagcagcgtccagtcccccagggctgcttcctgcctgcacctgcggtgactgtgagcaggatcctggggccgaggctg

SEQ ID NO: 585783 - DNA, 120 bp, Artificial Sequence
  ENSG00000172531_10 (sequence is synthesized)
cagctcagggcaacggcaggccaggtcgtgggtctccagccgtgcttggcctcagggctggcagccggatcctggggcaacccatctggtctcttgaataaaggtcaaagctggattctc

SEQ ID NO: 585784 - DNA, 120 bp, Artificial Sequence
  ENSG00000172531_11 (sequence is synthesized)
cccgcggacgcgcctgagaggtccggggccagctccgacgcgcggagcagctccccccctctcccgggctgggggcgcacgggttgcctgggctcttggggcgagggagaaacccgggaa

SEQ ID NO: 585785 - DNA, 120 bp, Artificial Sequence
  ENSG00000172531_12 (sequence is synthesized)
gggagaaacccgggaagcccggtccaggaaggggtcctgcgctgtgaggtttttggtggcagccccctgcgcacgacagtcgcctcccgaggcgctgagggtagctgggggcttcccctg

SEQ ID NO: 585786 - DNA, 120 bp, Artificial Sequence
  ENSG00000172531_13 (sequence is synthesized)
ggaggcttgaggccgcggtcccgggaggctcagcagcaacagctgcctgtgggcaaggaggggccgaggaggcctaggcgcccccggaggtatccatggggccacccgtgtcgcccaccc

SEQ ID NO: 585787 - DNA, 120 bp, Artificial Sequence
  ENSG00000172531_14 (sequence is synthesized)
cctccatgtgctgtgatcaccctgctcctgccccatctgcctcctctggaagcctccctggcccagctctgcaccaggcggtgcctgggtgatgggtgatgggtgatgtagcgccaggca

SEQ ID NO: 585788 - DNA, 120 bp, Artificial Sequence
  ENSG00000172531_15 (sequence is synthesized)
tcttgctgacgccgccagcgccgaccaccagcagctgttttccctccatgaggcagcgcgccgaccgccgaagcatggtctccaccagcggcgccgccaccgcctcgtcggccgccggcc

SEQ ID NO: 585789 - DNA, 120 bp, Artificial Sequence
  ENSG00000172531_16 (sequence is synthesized)
ccagccgcggcgcggcccacagcccctccagcgcgccgcacgcctccagacacaggccgccgttcagctccagggccactgggcttctccagcagcgccagcactgtgtccaccactgca

SEQ ID NO: 585790 - DNA, 120 bp, Artificial Sequence
  ENSG00000172534_0 (sequence is synthesized)
acacaagatggcggctcccagggaggaggcatgagcgccctgccgttaccgcttcttctgccgtacagttgccgcttcggggcctaactctagctctttgaagcggctcctgtgggaagg

SEQ ID NO: 585791 - DNA, 120 bp, Artificial Sequence
  ENSG00000172534_1 (sequence is synthesized)
agtcataaggcgggaagtgaggatcggacaccgccttgagtttggtgtgcagtggaagaactgacctaggaggaagagaataggggggaacggggagctagtctcaagatggcggctccc

SEQ ID NO: 585792 - DNA, 120 bp, Artificial Sequence
  ENSG00000172534_2 (sequence is synthesized)
acggcggcaggcgcagcctgagcagcagaggcggactaaggggagaggcgcgagacttcacaagccgtacggcgcgagcccccaaacggccctcgagagctcgagctggttccaccggcc

SEQ ID NO: 585793 - DNA, 120 bp, Artificial Sequence
  ENSG00000172534_3 (sequence is synthesized)
tccggcccgcctccattcgttaggtgtgtcgaggctgtttcgggagcggcggctgcactaaggcgctgggcggggaagcgggacggtctcaagatggcggctcccacaattgtggtctga

SEQ ID NO: 585794 - DNA, 120 bp, Artificial Sequence
  ENSG00000172534_4 (sequence is synthesized)
gcgccggcggggctgcgacgaccgcggcgcttgtggctcctttccacccgccccggaagccggccagtgctggggacttgggggtgtgggaaccgggccggggctccgccatttccggcg

SEQ ID NO: 585795 - DNA, 120 bp, Artificial Sequence
  ENSG00000172534_5 (sequence is synthesized)
ggggagggctacgactgaggaagggaggagagagaggcggctcaagatggcggctcccagggcctcccgcccgagcttgtaagcgggagcgcccggacaagtagtcggggcgacgggact

SEQ ID NO: 585796 - DNA, 120 bp, Artificial Sequence
  ENSG00000172534_6 (sequence is synthesized)
cagcggcctccagcttcttgagcctaggcgctcgacagtttcgggcggctcttgcggagacggggtgagcgagaagaaagggaagagccaaagggaaggagggcagttaagatggcggcc

SEQ ID NO: 585797 - DNA, 120 bp, Artificial Sequence
  ENSG00000172534_7 (sequence is synthesized)
tccatggagtcgtctaccgctgtgtgagaaaccgcttctccgtgagagctgccttagacgaaagggggtgtgtgaaaggaattgaggggctcccttcccgcttgttgacttctccccacc

SEQ ID NO: 585798 - DNA, 120 bp, Artificial Sequence
  ENSG00000172534_8 (sequence is synthesized)
gcaccctttcccggaactatggcttcggccgtgtcgcccgccaacttgccagcggtgcttctgcagccccgctggaagcgagtggtgggctggtcgggtccggtgccacggccccgccac

SEQ ID NO: 585799 - DNA, 120 bp, Artificial Sequence
  ENSG00000172534_9 (sequence is synthesized)
ggccaccgcgccgtggccatcaaggagctcatcgtggtgtttggcggcggcaacgagggaatagtggacgaactgcacgtgtacaacacggcaaccaaccagtggttcatcccagccgtg

SEQ ID NO: 585800 - DNA, 120 bp, Artificial Sequence
  ENSG00000172534_10 (sequence is synthesized)
aggggggacattccccctgggtgtgcagcctatggcttcgtgtgtgacgggactcgcctcctggtgtttggtgggatggtggagtatgggaaatacagcaatgacctctacgaactccag

SEQ ID NO: 585801 - DNA, 120 bp, Artificial Sequence
  ENSG00000172534_11 (sequence is synthesized)
gcgagccggtgggagtggaagagactcaaagcaaagacgcccaaaaacgggccccctccgtgtcctcgactcgggcacagcttctcccttgtgggcaacaaatgctacctgtttgggggt

SEQ ID NO: 585802 - DNA, 120 bp, Artificial Sequence
  ENSG00000172534_12 (sequence is synthesized)
ctggccaatgatagcgaggacccaaagaacaacattccaaggtacctgaatgacttatatatcctggaattacggccaggctctggagtggtagcctgggacattcccatcacttacggg

SEQ ID NO: 585803 - DNA, 120 bp, Artificial Sequence
  ENSG00000172534_13 (sequence is synthesized)
gtcctaccaccaccccgggagtcacatactgccgtggtctacaccgaaaaagacaataagaagtccaagctggtgatctacggcgggatgagtggctgcaggctgggggacctgtggacc

SEQ ID NO: 585804 - DNA, 120 bp, Artificial Sequence
  ENSG00000172534_14 (sequence is synthesized)
ctagatattgacaccctgacgtggaataagcccagtctcagcggggtggcgcctcttcctcgcagtctccactcggcaaccaccatcggaaataaaatgtacgtgtttggtggctgggtg

SEQ ID NO: 585805 - DNA, 120 bp, Artificial Sequence
  ENSG00000172534_15 (sequence is synthesized)
cctctcgtcatggatgacgtcaaagtggccacacacgagaaggagtggaagtgtaccaacacgctggcttgtctcaacctggataccatggcctgggagaccatcctgatggatacactg

SEQ ID NO: 585806 - DNA, 120 bp, Artificial Sequence
  ENSG00000172534_16 (sequence is synthesized)
gaggacaacatcccccgtgctcgggctggccactgcgcagtcgccatcaacacccgcctgtacatttggagtgggcgtgacggctaccgcaaggcctggaacaaccaggtctgctgcaag

SEQ ID NO: 585807 - DNA, 120 bp, Artificial Sequence
  ENSG00000172534_17 (sequence is synthesized)
gacctctggtacctagagacagaaaagccaccacccccagcccgagtacaactggtacgcgccaacaccaactccctggaggtgagctggggggcagtggcaacagccgacagctacctt

SEQ ID NO: 585808 - DNA, 120 bp, Artificial Sequence
  ENSG00000172534_18 (sequence is synthesized)
ctccagctccagaaatatgacattcctgccacggctgctactgccacctcccctacacccaatccggtcccatctgtgcctgccaaccctcccaagagccctgccccagcagcagccgca

SEQ ID NO: 585809 - DNA, 120 bp, Artificial Sequence
  ENSG00000172534_19 (sequence is synthesized)
cctgctgtgcagccgctgacccaagtaggcatcacgctcctgccccaggctgcccccgcacccccgaccaccaccaccatccaggtcttgccaacggtgcctggcagctccatttctgtg

SEQ ID NO: 585810 - DNA, 120 bp, Artificial Sequence
  ENSG00000172534_20 (sequence is synthesized)
cccaccgcagccaggactcaaggtgtccctgctgttctcaaagtgaccggtcctcaggctacaacaggaactccattggtcaccatgcgacctgccagccaggctgggaaagcccctgtc

SEQ ID NO: 585811 - DNA, 120 bp, Artificial Sequence
  ENSG00000172534_21 (sequence is synthesized)
accgtgacctcccttcccgccggagtgcggatggttgtgccaacacagagtgcccagggaacggtgattggcagtagcccacagatgagtgggatggccgcactggccgctgcggccgct

SEQ ID NO: 585812 - DNA, 120 bp, Artificial Sequence
  ENSG00000172534_22 (sequence is synthesized)
gccacccagaagatccccccttcctcggcacccacggtgctgagtgtcccagcgggtaccaccatcgtgaagaccatggctgtgacacctggcactaccaccctcccagccactgtgaag

SEQ ID NO: 585813 - DNA, 120 bp, Artificial Sequence
  ENSG00000172534_23 (sequence is synthesized)
gtggcctcctcgccagtcatggtgagcaaccctgccactcgcatgctgaagactgcagccgcccaggtggggacatcggtttcctccgccaccaacacgtctacccgccctatcatcaca

SEQ ID NO: 585814 - DNA, 120 bp, Artificial Sequence
  ENSG00000172534_24 (sequence is synthesized)
gtgcacaagtcaggcactgtgacagtggcccagcaagcccaggtggtgaccacagttgtgggcggggtcaccaagaccatcaccctggtgaagagccccatctctgtcccaggaggcagt

SEQ ID NO: 585815 - DNA, 120 bp, Artificial Sequence
  ENSG00000172534_25 (sequence is synthesized)
gctctgatttccaatctgggcaaagtgatgtcggtggtccagaccaaaccagttcagacttcagcagtcacaggccaggcgtccacgggtcctgtgactcagatcatccagaccaaaggg

SEQ ID NO: 585816 - DNA, 120 bp, Artificial Sequence
  ENSG00000172534_26 (sequence is synthesized)
cccctgccagcgggaacaatcctgaagctggtgacctcagcagatggcaagcccaccaccatcatcactaccacgcaggccagtggggcggggaccaagcccaccatcctgggcatcagc

SEQ ID NO: 585817 - DNA, 120 bp, Artificial Sequence
  ENSG00000172534_27 (sequence is synthesized)
agcgtctcccccagtaccaccaagcccggcacgaccaccatcatcaaaaccatccccatgtcggccatcatcacccaggcgggcgccacgggtgtgaccagcagtcctggcatcaagtcc

SEQ ID NO: 585818 - DNA, 120 bp, Artificial Sequence
  ENSG00000172534_28 (sequence is synthesized)
cccatcaccatcatcaccaccaaggtgatgacttcaggaactggagcacctgcgaaaatcatcactgctgtccccaaaattgccactggccacgggcagcagggagtgacccaggtggtg

SEQ ID NO: 585819 - DNA, 120 bp, Artificial Sequence
  ENSG00000172534_29 (sequence is synthesized)
cttaagggggccccgggacagccaggcaccatcctccgcactgtgcccatggggggtgttcgcctggtcacacccgtcaccgtctccgccgtcaagccagccgtcaccacgttggttgtg

SEQ ID NO: 585820 - DNA, 120 bp, Artificial Sequence
  ENSG00000172534_30 (sequence is synthesized)
aaaggcaccacaggtgtcacgaccctaggcacagtgacaggcaccgtctccaccagccttgccggggcggggggccacagcactagtgcttccctggccacgcccatcaccaccttgggc

SEQ ID NO: 585821 - DNA, 120 bp, Artificial Sequence
  ENSG00000172534_31 (sequence is synthesized)
accattgccaccctctcaagccaggtgatcaaccccactgccatcactgtgtcggccgcacagaccacgctgacagcggcaggcgggctcacaaccccaaccatcaccatgcagcccgtg

SEQ ID NO: 585822 - DNA, 120 bp, Artificial Sequence
  ENSG00000172534_32 (sequence is synthesized)
tcccagcccacccaggtaactctgatcacggcacctagtggggtggaggcccagcctgtgcatgacctccctgtgtccattctggcctccccgactacagaacagcccaccgccacagtt

SEQ ID NO: 585823 - DNA, 120 bp, Artificial Sequence
  ENSG00000172534_33 (sequence is synthesized)
accatcgccgactcaggccagggtgatgtgcagcctggcactgtcaccttggtgtgctccaacccaccctgtgagacccacgagactggcaccaccaacacggccaccactactgttgtg

SEQ ID NO: 585824 - DNA, 120 bp, Artificial Sequence
  ENSG00000172534_34 (sequence is synthesized)
gctaaccttgggggacacccccagcccacccaagtgcagttcgtctgtgacagacaggaggcagctgcttctcttgtgacctcgactgtgggccagcagaatggtagcgtggtccgagtc

SEQ ID NO: 585825 - DNA, 120 bp, Artificial Sequence
  ENSG00000172534_35 (sequence is synthesized)
tgttcgaacccgccctgcgagacccacgagacgggcaccaccaacaccgccaccaccgccacctccaacatggccgggcagcatggctgctcaaacccaccctgcgagacccacgagacg

SEQ ID NO: 585826 - DNA, 120 bp, Artificial Sequence
  ENSG00000172534_36 (sequence is synthesized)
tggggcgctggaggcagcccagggctctaagtcccagtgccaaacccgccagaccagcgcgaccagcaccaccatgactgtgatggccaccggggccccgtgctcggccggcccactcct

SEQ ID NO: 585827 - DNA, 120 bp, Artificial Sequence
  ENSG00000172534_37 (sequence is synthesized)
tgggccgagcatggcacgggagcccgggggccgcagccctgcttttgtgcagttggcccctctgagcagcaaagtcaggctgagcagcccaagcattaaggaccttcctgcggggcgcca

SEQ ID NO: 585828 - DNA, 120 bp, Artificial Sequence
  ENSG00000172534_38 (sequence is synthesized)
cagccatgcggtcagcaccgctgccatgacccgttccagcgtgggtgctggggagccccgcatggcacctgtgtgcgagagcctccagggtggctcgcccagcaccacagtgactgtgac

SEQ ID NO: 585829 - DNA, 120 bp, Artificial Sequence
  ENSG00000172534_39 (sequence is synthesized)
agccctggaggcactgctgtgcccctcggccaccgtgacccaagtctgctccaacccaccatgtgagacccacgagacaggcaccaccaacaccgccactacctcgaatgcaggcagcgc

SEQ ID NO: 585830 - DNA, 120 bp, Artificial Sequence
  ENSG00000172534_40 (sequence is synthesized)
ccagagggtgtgctccaacccgccatgcgagacccacgagacgggcaccacccacacggccaccaccgctacttcaaacgggggcacgggccagcccgagggtgggcagcagccccctgc

SEQ ID NO: 585831 - DNA, 120 bp, Artificial Sequence
  ENSG00000172534_41 (sequence is synthesized)
tggtcgcccctgtgagacacaccagaccacttccactggcaccaccatgtcggtcagcgtgggtgccctgcttcccgacgccacttcttcccacaggaccgtggagtctggcctagaggt

SEQ ID NO: 585832 - DNA, 120 bp, Artificial Sequence
  ENSG00000172534_42 (sequence is synthesized)
ggcggcggcacccagcgtcaccccccaggctggcaccgcgctgctggctcctttcccaacacagagggtgtgctccaaccccccctgtgagacccacgagacgggcaccactcacacggc

SEQ ID NO: 585833 - DNA, 120 bp, Artificial Sequence
  ENSG00000172534_43 (sequence is synthesized)
caccactgtcacttccaacatgagttcaaaccaagaccccccacctgctgccagcgatcagggagaggtggagagcacccagggcgacagcgtgaacatcaccagctccagtgccatcac

SEQ ID NO: 585834 - DNA, 120 bp, Artificial Sequence
  ENSG00000172534_44 (sequence is synthesized)
gacaaccgtgtcctccacactgacgcgggctgtgaccaccgtgacgcagtccacaccggtcccgggcccctctgtgccgcccccagaggaactccaggtgtcgccaggtcctcgccagca

SEQ ID NO: 585835 - DNA, 120 bp, Artificial Sequence
  ENSG00000172534_45 (sequence is synthesized)
gctgccgccacggcagcttctgcagtcggcttccacagccctgatgggggagtccgccgaggtcctgtcagcctcccagacccctgagctcccggccgccgtggatctgagcagcacagg

SEQ ID NO: 585836 - DNA, 120 bp, Artificial Sequence
  ENSG00000172534_46 (sequence is synthesized)
ggagccatcttcgggccaggagtctgccggctctgcggtggtggccactgtggtggtccagccacccccacccacacagtccgaagtagaccagttatcacttccccaagagctaatggc

SEQ ID NO: 585837 - DNA, 120 bp, Artificial Sequence
  ENSG00000172534_47 (sequence is synthesized)
cgaggcccaagctggcaccaccaccctcatggtaacggggctcacccccgaggagctggcagtgacggctgctgcagaagcagctgcccaggccgcagccacggaggaagcccaggccct

SEQ ID NO: 585838 - DNA, 120 bp, Artificial Sequence
  ENSG00000172534_48 (sequence is synthesized)
ggccatccaggcggtgctccaggccgcgcagcaggccgtcatgggcaccggcgagcccatggacacctccgaggcagcagcaaccgtgactcaggcggagctggggcacctgtcggccga

SEQ ID NO: 585839 - DNA, 120 bp, Artificial Sequence
  ENSG00000172534_49 (sequence is synthesized)
gggtcaggagggccaggccaccaccatacccattgtgctgacacagcaggagctggctgccctggtgcagcagcagcagctgcaggaggcccaggcccagcagcagcatcaccacctccc

SEQ ID NO: 585840 - DNA, 120 bp, Artificial Sequence
  ENSG00000172534_50 (sequence is synthesized)
cactgaggccctggcccctgccgacagtctcaacgacccagccattgagagcaattgcctcaatgagctggccggcacggtccccagcactgtggcgctgctgccctcaacggccactga

SEQ ID NO: 585841 - DNA, 120 bp, Artificial Sequence
  ENSG00000172534_51 (sequence is synthesized)
gagcctggctccatccaacacatttgtggccccccagccggttgtggtggccagcccagccaagctgcaggctgcagctaccctgaccgaagtggccaatggcatcgagtccctgggtgt

SEQ ID NO: 585842 - DNA, 120 bp, Artificial Sequence
  ENSG00000172534_52 (sequence is synthesized)
gaagccagacctgccgcccccacccagcaaagcccccatgaagaaggaaaaccagtggtttgatgtgggagtcattaagggcaccaatgtaatggtgacacactatttcctgccaccaga

SEQ ID NO: 585843 - DNA, 120 bp, Artificial Sequence
  ENSG00000172534_53 (sequence is synthesized)
tgatgctgtcccatcagacgatgatttgggcaccgtccctgactataaccagctgaagaagcaggagctgcagccaggcacagcctataagtttcgtgttgccggaatcaatgcctgtgg

SEQ ID NO: 585844 - DNA, 120 bp, Artificial Sequence
  ENSG00000172534_54 (sequence is synthesized)
ccgggggcccttcagcgaaatctcagcctttaagacgtgcctgcctggtttcccaggggccccttgtgccattaaaatcagcaaaagtccggatggtgctcacctcacctgggagccacc

SEQ ID NO: 585845 - DNA, 120 bp, Artificial Sequence
  ENSG00000172534_55 (sequence is synthesized)
ctctgtgacctccggcaagattatcgagtactccgtgtacctggccatccagagctcacaggctgggggcgagctcaagagctccaccccggcccagctggccttcatgcgggtgtactg

SEQ ID NO: 585846 - DNA, 120 bp, Artificial Sequence
  ENSG00000172534_56 (sequence is synthesized)
cgggcccagcccctcctgcctggtgcagtcctccagcctttccaacgcccacatcgactacaccaccaagcccgccatcatcttccgcatcgccgcccgcaatgagaagggctatggccc

SEQ ID NO: 585847 - DNA, 120 bp, Artificial Sequence
  ENSG00000172534_57 (sequence is synthesized)
ggccacacaagtgaggtggctgcaggaaaccagtaaagacagctctggcaccaagccagccaacaagcggcccatgtcctctccagaaatgaaatctgctccaaagaaatctaaggccga

SEQ ID NO: 585848 - DNA, 120 bp, Artificial Sequence
  ENSG00000172534_58 (sequence is synthesized)
tggtcagtgagaggaagctgactagcccctggattcttctccagacccccctgcttcaggaacacccgccagggcccacccctcccaccccgtcccagcattcgcacttcaccctcgcga

SEQ ID NO: 585849 - DNA, 120 bp, Artificial Sequence
  ENSG00000172534_59 (sequence is synthesized)
gccgctgttcactcctctcccctttctctttctctctgtttttaaaataatctaaagaaagcacattttaccattgctgttgggaggaagcagaggcagatgggaaagcagagagaggag

SEQ ID NO: 585850 - DNA, 120 bp, Artificial Sequence
  ENSG00000172534_60 (sequence is synthesized)
cgcgcttcctttcctccccgctgccgcccaccctggggagagacttttgcggggagggaaggcggagctgaggacagccagctccgccctcccaaggctgtgcgttcctgagggccaggt

SEQ ID NO: 585851 - DNA, 120 bp, Artificial Sequence
  ENSG00000172534_61 (sequence is synthesized)
cgggggcaggcatggaggggaggaaaggcgtccctcttggccctccccagagtggctttcctggcaccctggcctgggtgtctggttctgttttcttttcttccccttgtgtttccagtc

SEQ ID NO: 585852 - DNA, 120 bp, Artificial Sequence
  ENSG00000172534_62 (sequence is synthesized)
acctaacttcccttcctcaggctcccccggcccaccctgctcagtgaccccacaggaagcttacacattttctcagaggcctttgtgctcccacctcttctaccctccccctcttctttc

SEQ ID NO: 585853 - DNA, 120 bp, Artificial Sequence
  ENSG00000172534_63 (sequence is synthesized)
ccattttaaaaaagaaaagaaggaaaaagaaaaaaggggcaaggagccccgcggcggcctgggcagcgcctgtgcagacctccctgcaggccgcactgccaactgctgcatttgttgtgt

SEQ ID NO: 585854 - DNA, 120 bp, Artificial Sequence
  ENSG00000172534_64 (sequence is synthesized)
tttttaggttgcaattggtgaagttcacactttcattgtaattttagcgtgtggggttttgtcccttttttgttgttgttagctgtgtacagaatgtgtaatcttttttcttttctcttt

SEQ ID NO: 585855 - DNA, 120 bp, Artificial Sequence
  ENSG00000172534_65 (sequence is synthesized)
ttttgtttttgtttttttacttttttcttcttggctaattcttggcagggatctttctggaggaaaagctggggccagccagggcaggagaggtgtgaaatctgccacgaggggcctgct

SEQ ID NO: 585856 - DNA, 120 bp, Artificial Sequence
  ENSG00000172534_66 (sequence is synthesized)
ccacgaggggcctgctgtttgccacccagcccaacttcctgttgctggcccctgccctctgcccttttgcctgtcctcaggccgctggaacaaaggaaggacagctcattcctcatgggc

SEQ ID NO: 585857 - DNA, 120 bp, Artificial Sequence
  ENSG00000172534_67 (sequence is synthesized)
gatcactccgcatctatagggtcgagcctaggggagcttgagggagggctggggcctccttgtcctggatttccagctctccccatgccccctccctgagcaccaccggcaccgcctccc

SEQ ID NO: 585858 - DNA, 120 bp, Artificial Sequence
  ENSG00000172534_68 (sequence is synthesized)
aaacagggctgctggtttccgcagccactgctccacctcccccaaatcgtcatggaaagggtggagaatggaggggaaccaggcgtccttggaggcagcttgggagggtgactgtgtagt

SEQ ID NO: 585859 - DNA, 120 bp, Artificial Sequence
  ENSG00000172534_69 (sequence is synthesized)
gtcacccacaagggaggctagggcaatggagcaggccaccagcagcagctgtgcagcatggaactcaggccaggctccgaggctgggggatctgcttggagttttctgccccccacccca

SEQ ID NO: 585860 - DNA, 120 bp, Artificial Sequence
  ENSG00000172534_70 (sequence is synthesized)
aacttctgtcgaggagcaaggcttgccagcaagtcagaaggatttgaaccgagcagccaatctttccagccctcccctaccgacctctgcctggagacgcagcagcctgtgtcctccagg

SEQ ID NO: 585861 - DNA, 120 bp, Artificial Sequence
  ENSG00000172534_71 (sequence is synthesized)
gcctctggtttgttgtattatagtatatttcgctgtggaaaatgtcacgtttagtcaccttggagcccactcacctggtcctgttgttttaccccatcccttctctcgcgcgcctattga

SEQ ID NO: 585862 - DNA, 120 bp, Artificial Sequence
  ENSG00000172534_72 (sequence is synthesized)
tttgtttctgaggagagtacaccgttcactattgtagagtaacccctgtgactcaatattaccatagtgcgatgtcgttttgtgctattttgaacaattaaaagactttttttgaaataa

SEQ ID NO: 585863 - DNA, 120 bp, Artificial Sequence
  ENSG00000172538_0 (sequence is synthesized)
gctggggccagctggaggccttcagtacagccccagccaactctcactgaacagctggagcaccgacaccctgggcactcatttcaaatcatgaaatgctacttcacagatcacagggga

SEQ ID NO: 585864 - DNA, 120 bp, Artificial Sequence
  ENSG00000172538_1 (sequence is synthesized)
gaacagtcacccaccgatgggaccaccctcagcttgaccagccctgagtccactgaggagagtgtggaagtgttctggccagggactatacagagagaagggtcgtccccacggccgggg

SEQ ID NO: 585865 - DNA, 120 bp, Artificial Sequence
  ENSG00000172538_2 (sequence is synthesized)
cctgccattccccgggaggagggcctctacttcgctgccagggaccgggggatgcgggactggagcagctccccatcctcagagtcctccgagtaccagtcctactcccagtaccagtcg

SEQ ID NO: 585866 - DNA, 120 bp, Artificial Sequence
  ENSG00000172538_3 (sequence is synthesized)
tgctgctcctgcatgtgcgatgaggacaatgctgctccgcagagtgtgtgtgccttctacacgcacgtgcagactgtgcggggtgtggctgtggcctgggagacggaggccggcttcgag

SEQ ID NO: 585867 - DNA, 120 bp, Artificial Sequence
  ENSG00000172538_4 (sequence is synthesized)
ccggtcaccaggaagccccgcatccatgaagcccagttcatcaagaggcagaggtggaacggctcctccttcgaaatggcttccaacaccgatatgcgctgggacctggaagcctgcaag

SEQ ID NO: 585868 - DNA, 120 bp, Artificial Sequence
  ENSG00000172538_5 (sequence is synthesized)
gtcaccaccaactacggggtgcgctgcgtggcctgctgcagggtcttgccctccctggacgctctgctggagcacgcccagcatggcatccgggagggcttcagctgtcagatctttttt

SEQ ID NO: 585869 - DNA, 120 bp, Artificial Sequence
  ENSG00000172538_6 (sequence is synthesized)
gaggagatgctggagagaaggcgggctcagggccaagcacatgaccaacagctggaggaggagcagagtccttcagacaacagcgaatgttcccggccccagggtgaggtgctctcagca

SEQ ID NO: 585870 - DNA, 120 bp, Artificial Sequence
  ENSG00000172538_7 (sequence is synthesized)
cagcagcaggagaagcagtgagccagaggggagatacccaaccctgccctcacctccagggcctgggactgctccttccccagccagcagtatcagagccactagggcagggagagagga

SEQ ID NO: 585871 - DNA, 120 bp, Artificial Sequence
  ENSG00000172538_8 (sequence is synthesized)
ccagggtcagggggaaggaaaggcatggagtgtagagcaaggagggccaggagactggaaggaacccccttcctgccctaggcacagcatctccaccagagtccatttcaaaacccaaac

SEQ ID NO: 585872 - DNA, 120 bp, Artificial Sequence
  ENSG00000172538_9 (sequence is synthesized)
gagagggctttgagtgtttctgatggcaggcacaacatctgaaacccacaaacgcatggccagagggatttctatttttgccggtggatcaggcaggtccacacttgctaagtatatgtg

SEQ ID NO: 585873 - DNA, 120 bp, Artificial Sequence
  ENSG00000172538_10 (sequence is synthesized)
ggtcacaggacagccaactgcaaattactctccagccctatttttttcactattacaaatctgtcatatgccctagttctatgtcttatgttattgggattaaacttgaataacacaaaa

SEQ ID NO: 585874 - DNA, 120 bp, Artificial Sequence
  ENSG00000172543_0 (sequence is synthesized)
actccagactgcaccggcatggcactgactgcccacccctcctgcctcctggccctgttggtggcaggcctagcccaaggcatcagaggcccccttagggcccaggacctaggtccccag

SEQ ID NO: 585875 - DNA, 120 bp, Artificial Sequence
  ENSG00000172543_1 (sequence is synthesized)
ccgctagagctgaaagaggccttcaagttgttccagatccagttcaaccggagttacctgagcccagaagagcatgctcaccgcctggacatctttgcccacaacctggcccaggctcag

SEQ ID NO: 585876 - DNA, 120 bp, Artificial Sequence
  ENSG00000172543_2 (sequence is synthesized)
aggctgcaggaggaggacttgggcacagctgagtttggggtgactccattcagtgacctcacagaggaggagtttggccagctctatggctatcggagggcagctggaggggtccccagc

SEQ ID NO: 585877 - DNA, 120 bp, Artificial Sequence
  ENSG00000172543_3 (sequence is synthesized)
atgggcagagaaataaggtctgaagagccagaggagtcagtacctttcagctgtgactggcggaaggtggccagcgccatctcacccatcaaggaccagaaaaactgcaactgctgctgg

SEQ ID NO: 585878 - DNA, 120 bp, Artificial Sequence
  ENSG00000172543_4 (sequence is synthesized)
gccatggcagcggcaggcaacatagagaccctgtggcgcatcagtttctgggattttgtggatgtctccgtgcaggaactgctggactgtggccgctgtggggatggctgccacggtggc

SEQ ID NO: 585879 - DNA, 120 bp, Artificial Sequence
  ENSG00000172543_5 (sequence is synthesized)
ggcaaagtcagagcccacaggtgccaccccaagaagtaccagaaggtggcctggatccaggacttcatcatgctgcagaacaacgagcacagaattgcgcagtacctggccacttatggc

SEQ ID NO: 585880 - DNA, 120 bp, Artificial Sequence
  ENSG00000172543_6 (sequence is synthesized)
cccatcaccgtgaccatcaacatgaagccccttcagctataccggaaaggtgtgatcaaggccacacccaccacctgtgacccccagcttgtggaccactctgtcctgctggtgggtttt

SEQ ID NO: 585881 - DNA, 120 bp, Artificial Sequence
  ENSG00000172543_7 (sequence is synthesized)
ggcagcgtcaagtcagaggaggggatatgggcagagacagtctcatcgcagtctcagcctcagcctccacaccccaccccatactggatcctgaagaactcctggggggcccaatgggga

SEQ ID NO: 585882 - DNA, 120 bp, Artificial Sequence
  ENSG00000172543_8 (sequence is synthesized)
gagaagggctatttccggctgcaccgagggagcaatacctgtggcatcaccaagttcccgctcactgcccgtgtgcagaaaccggatatgaagccccgagtctcctgccctccctgaacc

SEQ ID NO: 585883 - DNA, 120 bp, Artificial Sequence
  ENSG00000172543_9 (sequence is synthesized)
cacctggccccctcagctctgtcctgttaggccaactgcctccttgccagccccacccccaggtttttgcccatcctcccaatctcaatacagcctgaataaaccaagacaagacctctg

SEQ ID NO: 585884 - DNA, 120 bp, Artificial Sequence
  ENSG00000172543_10 (sequence is synthesized)
ttgtggatgtctccgtgcagggcggcctggccagtgaaaaggactacccgttccagggcaaagtcagagcccacaggtgccaccccaagaagtaccagaaggtggcctggatccaggact

SEQ ID NO: 585885 - DNA, 120 bp, Artificial Sequence
  ENSG00000172548_0 (sequence is synthesized)
agcacggggcggtgactccagagctgggagcctggcagcgtcctcaccccaggaaggcatgcgcccctctgcgggcggccccagccctgggccccctgcccccggaattgcccaagatgc

SEQ ID NO: 585886 - DNA, 120 bp, Artificial Sequence
  ENSG00000172548_1 (sequence is synthesized)
cgggtgactcctccccggggactctcccactctgggacgcgtcactctccccacccctgggtccggaccccggcggcttctcgcgcgcgagccacgcgggggacaagtcgcggccacctg

SEQ ID NO: 585887 - DNA, 120 bp, Artificial Sequence
  ENSG00000172548_2 (sequence is synthesized)
ctccggagctggggagcccgggcgccgtccgcccgcgcgtcggttcgtgtgccccgggccccatggagctgcgggtcagcaacaccagctgcgagaacggttccctgctccacctctact

SEQ ID NO: 585888 - DNA, 120 bp, Artificial Sequence
  ENSG00000172548_3 (sequence is synthesized)
gctcctcccaagaagtcctgtgccagattgtcaatgacctcagccctgaggtgcccagcaatgccacctttcacagctggcaggaaagaatcaggcagaactatggcttctacatcggcc

SEQ ID NO: 585889 - DNA, 120 bp, Artificial Sequence
  ENSG00000172548_4 (sequence is synthesized)
tgggcctggcattcctgtctagcttcctcatcggcagcagcgtcatcctcaagaagaaaggcctcttgcgactcgtggccacgggagccactcgagctgtggatggaggcttcggctacc

SEQ ID NO: 585890 - DNA, 120 bp, Artificial Sequence
  ENSG00000172548_5 (sequence is synthesized)
tgaaagatgcaatgtggtgggctggatttctcaccatggctgctggagaagttgccaactttggagcctacgcatttgcacctgcaacagtcgtcacgcctctgggagcgctgagtgtcc

SEQ ID NO: 585891 - DNA, 120 bp, Artificial Sequence
  ENSG00000172548_6 (sequence is synthesized)
tcataagtgccatcctctcctcatatttcctgagggagagtctgaacctgctggggaagctgggctgtgtgatctgtgtggccggaagcacagtgatggtgatacatgctcctgaggaag

SEQ ID NO: 585892 - DNA, 120 bp, Artificial Sequence
  ENSG00000172548_7 (sequence is synthesized)
agaaggtcactaccatcatggagatggcttccaagatgaaagacacagggttcatcgtgtttgctgtgcttctgctggtgtcatgcctcatcctcatctttgtcattgccccacgttacg

SEQ ID NO: 585893 - DNA, 120 bp, Artificial Sequence
  ENSG00000172548_8 (sequence is synthesized)
ggcaaaggaatatcctcatctacatcatcatctgctctgtgatcggggccttctctgtggctgctgtcaaggggctgggcatcaccatcaagaacttcttccaggggctgccagttgtcc

SEQ ID NO: 585894 - DNA, 120 bp, Artificial Sequence
  ENSG00000172548_9 (sequence is synthesized)
ggcacccgctcccctacatcctgtccctcatcctggcactgtccctcagcactcaggtcaacttcctcaacagagcactggacattttcaacacttccctggtgttccccatctactacg

SEQ ID NO: 585895 - DNA, 120 bp, Artificial Sequence
  ENSG00000172548_10 (sequence is synthesized)
tgttcttcaccacggtggtcgttacctcgtccatcatcctcttcaaggagtggtacagcatgtctgctgtggacattgcaggcaccctctcgggctttgtcaccatcatcttgggcgtgt

SEQ ID NO: 585896 - DNA, 120 bp, Artificial Sequence
  ENSG00000172548_11 (sequence is synthesized)
tcatgctgcatgctttcaaagacctggacatcagctgcgccagcttgccccacatgcacaaaaacccacccccttctcccgccccggaacccactgttattagactggaagacaagaacg

SEQ ID NO: 585897 - DNA, 120 bp, Artificial Sequence
  ENSG00000172548_12 (sequence is synthesized)
tccttgtggacaatatagaacttgccagcacctcatcaccagaagagaaacccaaagtatttataatccattcctgaagcttggaatatgtgagtgagaggatgagtccgatggtacagc

SEQ ID NO: 585898 - DNA, 120 bp, Artificial Sequence
  ENSG00000172548_13 (sequence is synthesized)
tccagtgcaactgttaccaatgggctctcttttcttgagaagttcatttatacctcatcactgtttccaggagaaaaatctttacccaaatagcaatggtggcagaacttcctggaaaca

SEQ ID NO: 585899 - DNA, 120 bp, Artificial Sequence
  ENSG00000172548_14 (sequence is synthesized)
gattcagtgaccaaatacccaagtttacatcagtgcctgcaggttccctggaccttccttctcattcattctttcggtgccatctctatgccgttgggaagaagatggagtctgacccac

SEQ ID NO: 585900 - DNA, 120 bp, Artificial Sequence
  ENSG00000172548_15 (sequence is synthesized)
tgaatgtagcacagtccaaggacttctctaagatattggtcattggaagttccttcacaccaattctcctcctgagacggaatctccgttgttgttgttgttgttgttttctagcccaag

SEQ ID NO: 585901 - DNA, 120 bp, Artificial Sequence
  ENSG00000172548_16 (sequence is synthesized)
gatgacatagagctggctcccagaggcccacagagcaattggccatgcctccctatccagagctgacagggacacaaccagtgtaaaatatcctgttgcctttgtcacttcctctttgga

SEQ ID NO: 585902 - DNA, 120 bp, Artificial Sequence
  ENSG00000172548_17 (sequence is synthesized)
ggcagaagcaagacctcagctgaccttcttactgtgaaagccacttgatgtctcagggaaaaatttcaaccagctcattccccgagcactccagcctggcagtcagcacctcggcatcca

SEQ ID NO: 585903 - DNA, 120 bp, Artificial Sequence
  ENSG00000172548_18 (sequence is synthesized)
cccagtccatcccaccatcaccccttccccctctacttacatcctaaggagtcggtcactgagacataaaggcagtaatcgcagaactggaaacaaaacaataatagagccacagccaaa

SEQ ID NO: 585904 - DNA, 120 bp, Artificial Sequence
  ENSG00000172548_19 (sequence is synthesized)
ctctggtggccaaacccagtgttgcattttgtcttactctgaaagaagaacagcaaattcactgcttcaaagtggcctggctgccaagctagaatttggcagaacgcactttactattcc

SEQ ID NO: 585905 - DNA, 120 bp, Artificial Sequence
  ENSG00000172548_20 (sequence is synthesized)
tcaaggagtcaaccaacctatgatctggggaggtgggaagaggatgaggagcaaagttgggatttggcagaaggcagtcccaggctctctggatactaggggctaacttttgtgttgact

SEQ ID NO: 585906 - DNA, 120 bp, Artificial Sequence
  ENSG00000172548_21 (sequence is synthesized)
ctggtgctcatctgggaacttaggagaaacgagctcaggggtaatttctgggttgcagccttaaaggcttggacagctgtgaatctcaatggccaactggaggtgcagacttggcatggg

SEQ ID NO: 585907 - DNA, 120 bp, Artificial Sequence
  ENSG00000172548_22 (sequence is synthesized)
gtgcattctagctgttgaccagattgctaccgagtcccctcctccactgatgagctgcccacactgggaagcagcatgccctgactgttccaacaccacctgctatggggagtacctttg

SEQ ID NO: 585908 - DNA, 120 bp, Artificial Sequence
  ENSG00000172548_23 (sequence is synthesized)
gtcccctcacatttggccagaggcatacaaaaaaccagagcagctggagagggagataattactattccttcccttcctatctcctttctagccacaagagtgtgggggttggagaagaa

SEQ ID NO: 585909 - DNA, 120 bp, Artificial Sequence
  ENSG00000172548_24 (sequence is synthesized)
ccattagaaagggaaattagtgggctggtgtatctggaaagagggaagacttgatcctcagccccgaggttggtgcagggcctcccctgtgtgactctacctgcactctgtgtttatatc

SEQ ID NO: 585910 - DNA, 120 bp, Artificial Sequence
  ENSG00000172548_25 (sequence is synthesized)
ctgtgccctaagtgggccaagcccaggtaaattcctgctggccttggaactccaaggtttggctgaccagcagactggctccctgactcttcagcctcaaatccccagtttttgatgaat

SEQ ID NO: 585911 - DNA, 120 bp, Artificial Sequence
  ENSG00000172548_26 (sequence is synthesized)
gtggatttctgtctgtaattaaaagcaatgcaacaagttggctcttgagaatggcagtaaactgagggccctaagagtgtggtctgcagggtcaagaataaagattacagattatattta

SEQ ID NO: 585912 - DNA, 120 bp, Artificial Sequence
  ENSG00000172548_27 (sequence is synthesized)
gcgggtcagcaacaccagctgcgagaacggtgcgtacggcagggctggggaccaggcgggctccgcgcttcgcgccctcccctccttgccaccgctctccctcgcatcctctcctcccag

SEQ ID NO: 585913 - DNA, 120 bp, Artificial Sequence
  ENSG00000172548_28 (sequence is synthesized)
gggggccaaagctggggaggggcagggccagcacgaggtggctcccacccagctttgaagatctgggttctggctgagacttcactttcatcttcgcagctgggatggctgagaggagtc

SEQ ID NO: 585914 - DNA, 120 bp, Artificial Sequence
  ENSG00000172548_29 (sequence is synthesized)
cctgctccggagctggggagcccgggcgccgtccgcccgcgcgtcggttcgtgtgccccgggccccatggagctgcgggtcagcaacaccagctgcgagaacgctgggatggctgagagg

SEQ ID NO: 585915 - DNA, 120 bp, Artificial Sequence
  ENSG00000172548_30 (sequence is synthesized)
atagctcgataatatcactgcctgttggtagtggactcttgacttctacatggtagaagctggaactcctaggccaacttcccccagtccgcaggcagttaatgtgttggcccacttaga

SEQ ID NO: 585916 - DNA, 120 bp, Artificial Sequence
  ENSG00000172548_31 (sequence is synthesized)
acatagctggtccgttacttaaagtttgcccaaatttgcatactcacacatttcccccactttccacccaccctctcctgctatcaaaccctgactcttttaggtggaaaattaaccagg

SEQ ID NO: 585917 - DNA, 120 bp, Artificial Sequence
  ENSG00000172548_32 (sequence is synthesized)
tttccattcataatcccctatgtcaagttttgatcctcgtctcagccagagctatcccagtgaccatctgcttttaaaggggagacccaggtggttctctatcagcagagagatggaaaa

SEQ ID NO: 585918 - DNA, 120 bp, Artificial Sequence
  ENSG00000172548_33 (sequence is synthesized)
agacacttttctgataaccacacacagctatcacatattgagggtttactgtctgctaaactttctaagtgttatcctgtgtattaactcaggagtttacaaactggaaactcagataga

SEQ ID NO: 585919 - DNA, 120 bp, Artificial Sequence
  ENSG00000172548_34 (sequence is synthesized)
gagtttacaaactggaaactcagatagagagaaagaacttaggccccttgggaatgtcagatttttcttttcctgctaattaattaattaatttatttattgagacggagtttcactctt

SEQ ID NO: 585920 - DNA, 120 bp, Artificial Sequence
  ENSG00000172551_0 (sequence is synthesized)
agcgccttgccttctcttaggctttgaagcatttttgtctgtgctccctgatcttcaggtcaccaccatgaagttcttagcagtcctggtactcttgggagtttccatctttctggtctc

SEQ ID NO: 585921 - DNA, 120 bp, Artificial Sequence
  ENSG00000172551_1 (sequence is synthesized)
tgcccagaatccgacaacagctgctccagctgacacgtatccagctactggtcctgctgatgatgaagcccctgatgctgaaaccactgctgctgcaaccactgcaaccactgctgctcc

SEQ ID NO: 585922 - DNA, 120 bp, Artificial Sequence
  ENSG00000172551_2 (sequence is synthesized)
ctgcaaccaccgctgcttctaccactgctcgtaaagacattccagttttacccaaatgggttggggatctcccgaatggtagagtgtgtccctgagatggaatcagcttgagtcttctgc

SEQ ID NO: 585923 - DNA, 120 bp, Artificial Sequence
  ENSG00000172551_3 (sequence is synthesized)
aattggtcacaactattcatgcttcctgtgatttcatccaactacttaccttgcctacgatatcccctttatctctaatcagtttattttctttcaaataaaaaataactatgagcaaca

SEQ ID NO: 585924 - DNA, 120 bp, Artificial Sequence
  ENSG00000172551_4 (sequence is synthesized)
cctgatgctgaaaccactcctaccactgcaaccaccgctgcttctaccactgctcgtaaagacattccagttttacccaaatgggttggggatctcccgaatggtagagtgtgtccctga

SEQ ID NO: 585925 - DNA, 120 bp, Artificial Sequence
  ENSG00000172551_5 (sequence is synthesized)
ttgtcctctttgggaaacttatgatctccccaaactggcttctgtaaggcctctcccttcccattcctcctttgttctttaaccacttttgatcttcccttcagcgaccttgaagccttt

SEQ ID NO: 585926 - DNA, 120 bp, Artificial Sequence
  ENSG00000172551_6 (sequence is synthesized)
gatatatcccccttttaactctaccaccttcatccctctgttcattctgccaggcttttcatttcccacttcaacctctcagctcccaacagtcacttgaactatagaccccttggcctc

SEQ ID NO: 585927 - DNA, 120 bp, Artificial Sequence
  ENSG00000172551_7 (sequence is synthesized)
gcaaccaccgctgcttctaccactgctcgtaaagacattccagattttttttttcatattcacaggaacccaaaggctgagagcaatctcatgaatacggaattgctacagatacatggc

SEQ ID NO: 585928 - DNA, 120 bp, Artificial Sequence
  ENSG00000172551_8 (sequence is synthesized)
tcctccttcccagacatccccctgcgtttatctccatgtgtttggcttaatgtggagttcgagcaattttttcccttttgaaatgtctcacattctacatatgaataattgattcctctg

SEQ ID NO: 585929 - DNA, 120 bp, Artificial Sequence
  ENSG00000172551_9 (sequence is synthesized)
tatctttctaacacaaatggaatagtcagtatgcctttggtaatttataataggtacgtcagggtttcaggaagtttgaaaggtcacagattattaggatactatagggaaattacttga

SEQ ID NO: 585930 - DNA, 120 bp, Artificial Sequence
  ENSG00000172551_10 (sequence is synthesized)
catcttaagagtagataaaatataaatttataaaagtagctttatcaggctacttttactgtgactgtaaattcacctcaggaatgtttatatttcataagctctaccattttgttaaag

SEQ ID NO: 585931 - DNA, 120 bp, Artificial Sequence
  ENSG00000172551_11 (sequence is synthesized)
gacatctctgtcctgagactcttggaaacattacaaaagttgatcaattgggttgtgacagtctgttcaaacttctttaaactgcatgttaatagttcattgattatccatttattctct

SEQ ID NO: 585932 - DNA, 120 bp, Artificial Sequence
  ENSG00000172551_12 (sequence is synthesized)
ctcctgaacaacattcaaaggcccccagaataactttgggttgtctgggcctggtatctaaatatggatcaaccaactggcaaattcacatatccaagggatcctaatgagcctagaaaa

SEQ ID NO: 585933 - DNA, 120 bp, Artificial Sequence
  ENSG00000172551_13 (sequence is synthesized)
aaatcctaaatcctcatttaaaaatagattaatttaacaaatgaaaataaacaaaaacaaatataccccacccccaatatgtgggtatatgcacacacatacacacacacacacatgcct

SEQ ID NO: 585934 - DNA, 120 bp, Artificial Sequence
  ENSG00000172551_14 (sequence is synthesized)
acacacactttggtatgctgtaatagataagtgagttctttcttctgcaccctcacagaaaataattagggaaatgtggataggctttaccatttgtctttcactatgcatctatttctc

SEQ ID NO: 585935 - DNA, 120 bp, Artificial Sequence
  ENSG00000172551_15 (sequence is synthesized)
taggccattgtctcttaaataagtgaaggaacatgcatacatatgaacatgcataaatggttttacaccttcaagtctgtttttgagtattctaaaatgtttctttagttacttacagtg

SEQ ID NO: 585936 - DNA, 120 bp, Artificial Sequence
  ENSG00000172551_16 (sequence is synthesized)
atcagccaagataattacatttatctaattgaatttacaaattattttgattgtattattgatgttgaaccatccttgatctcatagatcatgttgtgcttttatgcacattattttaat

SEQ ID NO: 585937 - DNA, 120 bp, Artificial Sequence
  ENSG00000172551_17 (sequence is synthesized)
acagagttcacattgatttactattttattttcatgcagctagattataaattggtttgtgtgtgtcattttattttttatgccattcttggtttttcatagcagcaaacaaaaaacaag

SEQ ID NO: 585938 - DNA, 120 bp, Artificial Sequence
  ENSG00000172551_18 (sequence is synthesized)
atgtgattttcaagagttcatattataggacatttttcatcatggcaatttgctaaacttagactaaagaccttaacaaacacctcaccaaagaagatatacagatgcaaataagcatat

SEQ ID NO: 585939 - DNA, 120 bp, Artificial Sequence
  ENSG00000172551_19 (sequence is synthesized)
gaaaagatactctacattatatgtcatcagagaaacataaattaaaacaacaatgagataccactgcacacctattagaatggacaaaattcagaactctgacagcacctaatgctggtg

SEQ ID NO: 585940 - DNA, 120 bp, Artificial Sequence
  ENSG00000172551_20 (sequence is synthesized)
aggatgtggagcaacaggaatactcactcattgctggtgggaatgcaaaatggtatagccactttgaaagacactttggccatttcttacaaaactgatcatactcttaccatatgttcc

SEQ ID NO: 585941 - DNA, 120 bp, Artificial Sequence
  ENSG00000172551_21 (sequence is synthesized)
tgcaatcatgctctttgatatttacccaaatgaactgaaagcttatatctacataaaaatctgcaaagagatgtttatagcagctttattcataattgtcaaaacttgaagcaaccgaga

SEQ ID NO: 585942 - DNA, 120 bp, Artificial Sequence
  ENSG00000172551_22 (sequence is synthesized)
tgtccttcaataggtgaatggaaaagaaaactgtggtatattcaggcaattgaatattattcattgctaaaaagaattgggctatcaagctatgaaaagacatggaagaacttaaattca

SEQ ID NO: 585943 - DNA, 120 bp, Artificial Sequence
  ENSG00000172551_23 (sequence is synthesized)
tattattaagttaaagaagcctatctggaaaggctacatattgtataatttcaactatatgacatctggaagaagcaaaagtacagagatagtaaaaagatcagtggttgtcagggctga

SEQ ID NO: 585944 - DNA, 120 bp, Artificial Sequence
  ENSG00000172551_24 (sequence is synthesized)
agagaggaggaatgaataggcagagcacagagaattttagggcagtaatagtatctttatgatactgtaatggtgtatacatggcattatacatttttctaaacccatggaatgtacatc

SEQ ID NO: 585945 - DNA, 120 bp, Artificial Sequence
  ENSG00000172551_25 (sequence is synthesized)
aagagagaacccgaacataaactaaataaagacttcaggtgataatgtaccaatataggttcatcagctgtaacaaatgtaccactctagtgggaaatattgataatgggggaggctgtg

SEQ ID NO: 585946 - DNA, 120 bp, Artificial Sequence
  ENSG00000172551_26 (sequence is synthesized)
catgtgtggggacagaggcatatggaaaatctctgtgccttttactcaattttgctatgaaactaaaactgctctaaaaaataaagtcttaaaaaaattagctatactttgacaactgaa

SEQ ID NO: 585947 - DNA, 120 bp, Artificial Sequence
  ENSG00000172551_27 (sequence is synthesized)
gtatttgttaaatttcttaatcctgtattttcccaggagtaatttcctttaaaatatgttttgaattacttttgaaagcttttatctctttttcagtcgattaggagatgtcagtggatt

SEQ ID NO: 585948 - DNA, 120 bp, Artificial Sequence
  ENSG00000172551_28 (sequence is synthesized)
ctttattttaaaattttgaaatcaataatccttggatttacatatttttaatgtaaaaatggaatgaagtataatatcataggaaaatgttcacagattatatacatacagcttgatgca

SEQ ID NO: 585949 - DNA, 120 bp, Artificial Sequence
  ENSG00000172551_29 (sequence is synthesized)
taaacacaaattgaatacaacttttaaaccagcaatcaaattgactttacagaaatgggatcattcagtaagagttattttgtgtttattttctttcattcaagataatgtttctgtcat

SEQ ID NO: 585950 - DNA, 120 bp, Artificial Sequence
  ENSG00000172551_30 (sequence is synthesized)
tgcccagaatccgacaacagctgctccagctgacacgtatccagctagtgagtctgcacttgaatgtcatctctttccagcaataaccatttttcacttccagcctcatgtcaaacagcc

SEQ ID NO: 585951 - DNA, 120 bp, Artificial Sequence
  ENSG00000172551_31 (sequence is synthesized)
tggatagtctttgttataaggaatcctaagcaaaagtctgtgaaagctatattcctgattttaaaattcaccacaaacatagtgaatctgcttatttcttatacattcttagaatatatg

SEQ ID NO: 585952 - DNA, 120 bp, Artificial Sequence
  ENSG00000172551_32 (sequence is synthesized)
aaatctaggccatagacttatacaaatgtggacttattattcattgttttccagcataaggcacaagagcatgaggtctgatgttgtagcctgagaatttttgagagatgcctctaataa

SEQ ID NO: 585953 - DNA, 80 bp, Artificial Sequence
  ENSG00000172554_0 (sequence is synthesized)
cggacgcggcgcctggcggggccctgggaggctcggacggggtcctggcgttgagctcggccggcccggagcgcggaccc

SEQ ID NO: 585954 - DNA, 120 bp, Artificial Sequence
  ENSG00000172554_1 (sequence is synthesized)
gagcgcggacccagccgcaggggcggcgatgggcaccgagggacccccgcccccggccgcctcccgcggacgccagggctgcctgctggtacctgcgcggacgaaaaccactattgctct

SEQ ID NO: 585955 - DNA, 120 bp, Artificial Sequence
  ENSG00000172554_2 (sequence is synthesized)
gttgtatgatgaagagtccgaaaatgcctatgacatccggctgaagctgacgaaagaggtgctgacaattcagaaacaagatgttgtctgtgtgggcggaagccaccagggcaggaatcg

SEQ ID NO: 585956 - DNA, 120 bp, Artificial Sequence
  ENSG00000172554_3 (sequence is synthesized)
cagaactgttacactccgcagacagccagttggcggcttgggcctgagtataaagggaggttctgagcacaacgtccctgtcgtcatatcaaaaatattcgaagaccaagcagctgacca

SEQ ID NO: 585957 - DNA, 120 bp, Artificial Sequence
  ENSG00000172554_4 (sequence is synthesized)
gacagggatgttgttcgtaggagatgctgttctccaggttaatggcatacatgtagaaaatgcaactcatgaagaagtggtgcatctgctgagaaatgctggcgatgaagttaccatcac

SEQ ID NO: 585958 - DNA, 120 bp, Artificial Sequence
  ENSG00000172554_5 (sequence is synthesized)
cgttgagtatctcagggaagcgccggcatttctgaagctcccgttagggtccccagggccatccagcgaccacagcagtggggcctcctctcccctctttgacagcggtttgcatctgaa

SEQ ID NO: 585959 - DNA, 120 bp, Artificial Sequence
  ENSG00000172554_6 (sequence is synthesized)
cggaaactccagtaccacagccccatcgtcaccttcctcgcccatagctaaggacccgaggtatgagaagcgctggctggacaccttgtccgtgcctctgtccatggctcgcatctcaag

SEQ ID NO: 585960 - DNA, 120 bp, Artificial Sequence
  ENSG00000172554_7 (sequence is synthesized)
actggctgcgggcggtctcagccaacatcagggagctgacacttcagaacatgaagatggcgaacaaatgctgctctccttccgaccaggttgtgcatatggggtgggtaaatgagaaac

SEQ ID NO: 585961 - DNA, 120 bp, Artificial Sequence
  ENSG00000172554_8 (sequence is synthesized)
tccaaggagctgactcctctcaaaccttcagacccaagttcctagcactgaagggcccgtccttctacgttttcagcactcctccggtgagcacattcgattgggtgcgagcagaaagga

SEQ ID NO: 585962 - DNA, 120 bp, Artificial Sequence
  ENSG00000172554_9 (sequence is synthesized)
cctatcacctctgtgaggtgctatttaaagttcacaagttctggctcacagaggactgctggttgcaagcaaacttgtatctgggtcttcaagattttgactttgaggaccagaggccct

SEQ ID NO: 585963 - DNA, 120 bp, Artificial Sequence
  ENSG00000172554_10 (sequence is synthesized)
attgcttcagcatcgtggccggccatgggaagagccatgttttcaacgtggagcttggcagcgagctggccatgtgggagaagtccttccaaagagccacgttcatggaagttcagagaa

SEQ ID NO: 585964 - DNA, 120 bp, Artificial Sequence
  ENSG00000172554_11 (sequence is synthesized)
ccgggtccagaacatacatgtgcagctggcaaggagagatgctgtgtttcacggtggatttcgcgttgggatttacctgttttgagagtaagaccaagaatgtgctctggagatttaaat

SEQ ID NO: 585965 - DNA, 120 bp, Artificial Sequence
  ENSG00000172554_12 (sequence is synthesized)
tttcccagcttaagggatcttcagatgatgggaaaactcgagtaaagctgctgtttcagaatctggacaccaaacagattgagacgaaggaactcgagttccaggacctgagggctgtcc

SEQ ID NO: 585966 - DNA, 120 bp, Artificial Sequence
  ENSG00000172554_13 (sequence is synthesized)
tgcactgcatccactccttcatagcagccaaggtggcctccgtggaccccggcttcatggacagtcagagtcttgccagaaaatacatgtacagcagctaaaggttgtttctgttgagtg

SEQ ID NO: 585967 - DNA, 120 bp, Artificial Sequence
  ENSG00000172554_14 (sequence is synthesized)
ctgaaaaattaaattattttcgtaagaaatgattctttcctgcagaatattgcaactttgtgttgttttatgatgagcctatagttgtgataccaataaaacatgtcactagtttccaaa

SEQ ID NO: 585968 - DNA, 120 bp, Artificial Sequence
  ENSG00000172554_15 (sequence is synthesized)
gccattaggtaatgattgggaaaactaagaacccaggatggctgctcatcggaggggccagtcatctcacagacactttgtgacaaatgtccagcagtttgtgcactgagacggaaaaat

SEQ ID NO: 585969 - DNA, 120 bp, Artificial Sequence
  ENSG00000172554_16 (sequence is synthesized)
tgtgtagaatcatgtgttgtgctcttctctgctcccctggaagcctccgtcaacaggtcgagtttgcgactccacggagaaactgcactgatgtcaccaacttcgtgtcctgggctactc

SEQ ID NO: 585970 - DNA, 120 bp, Artificial Sequence
  ENSG00000172554_17 (sequence is synthesized)
accagcccatttcggactggactttgtgtccccccagattcacatgtcgaagccctaacccctaaatgagggcgtcaggagacagagacggggcctctggaagtgactagggtgagagga

SEQ ID NO: 585971 - DNA, 120 bp, Artificial Sequence
  ENSG00000172554_18 (sequence is synthesized)
ctggtgatgggatcagtgcctgcaagaagaagccctctggagcgcacttcctctctccaccacgcaaggacacagccagaaggccaggccctcaccaggaaggatctggcaccttgctcg

SEQ ID NO: 585972 - DNA, 120 bp, Artificial Sequence
  ENSG00000172554_19 (sequence is synthesized)
cacctgatcacagactcccagcctctggaattccgaggaaggaacctctgctgctgagaagccacccaggcatggctaagctgactcaaacaccgcagtgaatccaatggcttcagagtc

SEQ ID NO: 585973 - DNA, 120 bp, Artificial Sequence
  ENSG00000172554_20 (sequence is synthesized)
attttacaggtgttgggagatttcatttcatagttgactcctttctaaggaagaaatggacttggcttacctgtcagagtttgacatgctggtgaattggaggttggaacgcatcctcct

SEQ ID NO: 585974 - DNA, 120 bp, Artificial Sequence
  ENSG00000172554_21 (sequence is synthesized)
tgaattggaggttggaacgcatcctcctaccttgactttgtcggcgcagagcaggtgtgcactgtaatgggagctgcaggtggaaatggggagaggccaggcatggtggctcacgcttgt

SEQ ID NO: 585975 - DNA, 120 bp, Artificial Sequence
  ENSG00000172554_22 (sequence is synthesized)
aggatcacttgagtccagaaggccaagtctgcagtgagctatgattgcaccactgccttccagcctggatgacagtcaaaaaaaaagagagcgcatctagacttttagtgtctcaatcaa

SEQ ID NO: 585976 - DNA, 120 bp, Artificial Sequence
  ENSG00000172554_23 (sequence is synthesized)
atttaaacaatggcaaatacattgtgcacaaaaaagctgcttttagatgctgtgttgagagagagagagatagagagagagacagaaaaggggaaagcctccaggccatggctactggtg

SEQ ID NO: 585977 - DNA, 120 bp, Artificial Sequence
  ENSG00000172554_24 (sequence is synthesized)
ttaatttgctgcaaaaagcagtgactgctgctgtgggctgaaggaggctgccccctaggcaggtgtgggccagggtctctcccagtgccgtcaggcttagggccatgattccaggaggga

SEQ ID NO: 585978 - DNA, 120 bp, Artificial Sequence
  ENSG00000172554_25 (sequence is synthesized)
gaaatctttgaaggcattggttgaattcagtagcatcaatggtcaacattcaattattttgttcatacaccacatatatgcttcaaactaaataaaaaataagactgataacaaattgaa

SEQ ID NO: 585979 - DNA, 120 bp, Artificial Sequence
  ENSG00000172554_26 (sequence is synthesized)
aggttgtgcatatggggtgggtaaatgagaaactccaaggagctgactcctctcaaaccttcagacccaagttcctagcactgaagggcccgtccttctacgttttcagcactcctccgc

SEQ ID NO: 585980 - DNA, 120 bp, Artificial Sequence
  ENSG00000172554_27 (sequence is synthesized)
ggttttatcttaaataacccccttctgttacatggtcatgttcggccttgaattgttgtagcctagatattttctagagctataactcgtgaaataaaaagtgagaagagccctaatgga

SEQ ID NO: 585981 - DNA, 120 bp, Artificial Sequence
  ENSG00000172554_28 (sequence is synthesized)
acagcacctgcgacctggaggccatcagcacagggtcaccagccacatggaagtggatgaggaggagagggagaagaaaggatgttgaaaatgctcagtggcattacgggagcatttctg

SEQ ID NO: 585982 - DNA, 120 bp, Artificial Sequence
  ENSG00000172554_29 (sequence is synthesized)
acccgatggcctagccagccgctgactgactgttgacggcaagccgctgaccttgaacttcagtgctcagggtttccagtcgtatcaacacactgcgatccacaagttctggctcacaga

SEQ ID NO: 585983 - DNA, 120 bp, Artificial Sequence
  ENSG00000172554_30 (sequence is synthesized)
caaccatcgtaacctcacagtgaaagatatgactcacgtgtttgtggtgatgctgacgtagacaaacctactgcactgccaatcatataaaaggaaacagtaatgtcctggaccttcaca

SEQ ID NO: 585984 - DNA, 120 bp, Artificial Sequence
  ENSG00000172554_31 (sequence is synthesized)
ttcactcactcctcactcatggcttcacccagaacaacttccagtcctgaaggctctattcatggcactcaccttatttcagaagaagaaggcagatgggctctatagtagtcataatgg

SEQ ID NO: 585985 - DNA, 120 bp, Artificial Sequence
  ENSG00000172554_32 (sequence is synthesized)
aaacagacctactacagataagcagattttgaaaagtgatactgcaagtcagaattatactgctaaatactctaatttgttttgcaaaggagagtatcatgtttaaatagtcataccaaa

SEQ ID NO: 585986 - DNA, 120 bp, Artificial Sequence
  ENSG00000172554_33 (sequence is synthesized)
caggggggctgatggtgcgtttaatgaaatggccgacacaggtcctgggttgttgagtgaatgtcagaagcagagcgtggacagcaggggctccgtgctgcgtttcagggctgatttgct

SEQ ID NO: 585987 - DNA, 120 bp, Artificial Sequence
  ENSG00000172568_0 (sequence is synthesized)
ggcagtgggattactcagtgttgagagaaacaacacggaaagcccagagcagaggagggagaaggccccattctctcagctttaatctactgcacctcggagggcagagctctaaccaga

SEQ ID NO: 585988 - DNA, 120 bp, Artificial Sequence
  ENSG00000172568_1 (sequence is synthesized)
cacgctgcaagcatcagaatcgggatgaacatcgaggtggggaacatttcttatacaggagccatcatctcctggtcgtcctcggagccctgcctggaggactattaccatattatgtac

SEQ ID NO: 585989 - DNA, 120 bp, Artificial Sequence
  ENSG00000172568_2 (sequence is synthesized)
aggcccaactggaacagcatcttctctggctatcttcgctacagcttccaccacgaggagaaggtgcctcgaacgatcagctccgtggtgctggaacatcttgccccttccactctctac

SEQ ID NO: 585990 - DNA, 120 bp, Artificial Sequence
  ENSG00000172568_3 (sequence is synthesized)
ttcctgtgcatcagctgtaagaaggctgccttcccttacaggcactactgcaccatgttccacaccctggataagagtccgctggctcctggaagctccctggtagacccccagatctcc

SEQ ID NO: 585991 - DNA, 120 bp, Artificial Sequence
  ENSG00000172568_4 (sequence is synthesized)
ctttgggtgctgatggccattctgctggcctgcttcacagccgtcttggccttcatctgcctccagttctggtgtgtccgttgccatgagccgcgatggtcttacagggctggccacatg

SEQ ID NO: 585992 - DNA, 120 bp, Artificial Sequence
  ENSG00000172568_5 (sequence is synthesized)
gaggaggccaatgggttggtgagatggccagaggaggccccggatcttggtcagagggaggaagacctgcaggggctccccctggtggaaatgccacgcaagaactccagagatggagct

SEQ ID NO: 585993 - DNA, 120 bp, Artificial Sequence
  ENSG00000172568_6 (sequence is synthesized)
gaactggatcccgaagccaaccaggatgcccctgatgcgggtgccttacagagggggggtggtgacccacccgctatactgcctcattgtggggaatgagagtggggaggagagcgcccg

SEQ ID NO: 585994 - DNA, 120 bp, Artificial Sequence
  ENSG00000172568_7 (sequence is synthesized)
catcatgtagcctaaagctttccacacagtaggtcgtttgtacaaatgtgtctatagactacccatttctctcccatcaaacgtcactgctattgtaggtcacctgggttggatgaatgc

SEQ ID NO: 585995 - DNA, 120 bp, Artificial Sequence
  ENSG00000172568_8 (sequence is synthesized)
tatgccaaggcacaaacgaggcatctcagcagcagcgtccactcggaggacacagttaagaattgaaagcattgttttaacattaaaacaaacatggatatgttataaagtagaaagcaa

SEQ ID NO: 585996 - DNA, 120 bp, Artificial Sequence
  ENSG00000172568_9 (sequence is synthesized)
aaatttgcatgacaaataaaacacagcacttgaaggaaacacttgagttacaagtaggctctcagaggtacacttttgggcaaaggtagatgtccagtttcctctgcccttgaggggatt

SEQ ID NO: 585997 - DNA, 120 bp, Artificial Sequence
  ENSG00000172568_10 (sequence is synthesized)
atttggaaataatttgggattatttggaaataatttgtgagaacccttgctctggagtgttttccaacttttaggcaatcacataccaccgctctctattttttaaaaccatggattatc

SEQ ID NO: 585998 - DNA, 120 bp, Artificial Sequence
  ENSG00000172568_11 (sequence is synthesized)
ttcactattattaataatactttcctttaaattgactcattttttaagcgtaaacttattttcaaagacagccttatattactccataagtgaaaaaccagcaccctcctgctgcaaaca

SEQ ID NO: 585999 - DNA, 120 bp, Artificial Sequence
  ENSG00000172568_12 (sequence is synthesized)
gaagggaagagacataagaataaacatcatgaaaacaagataatattaaataatctgacttagcttctattgcctgccagtgattctgagcttaatgcctgcttgcttgtctttgataaa

SEQ ID NO: 586000 - DNA, 120 bp, Artificial Sequence
  ENSG00000172568_13 (sequence is synthesized)
aagggagatccagtgttggagaggtaataaagacatattagcaccaatatttgtctttctccttgatatagcataaggtttgaaagagaatcgaaaagggaagtgctgtttttactttgc

SEQ ID NO: 586001 - DNA, 120 bp, Artificial Sequence
  ENSG00000172568_14 (sequence is synthesized)
gagtcagtgttagttaaatgccatgtctgtgaaccacctcaaatgctgtcagtcagcttcccttgatttgagaaaattgtcttgaccagactaggcaggctgttctggagaagacgcctg

SEQ ID NO: 586002 - DNA, 120 bp, Artificial Sequence
  ENSG00000172568_15 (sequence is synthesized)
tactctccaagcatcatccaagaccttcccagtaccctcttatatctatagagcacaaaatcccagaatcacaggacgacactgcagtgaatcaactaagaaacagcaggagctgagaag

SEQ ID NO: 586003 - DNA, 120 bp, Artificial Sequence
  ENSG00000172568_16 (sequence is synthesized)
ccaagacgagaagccccacatccctattcccttgcctacctcatgcattccctgctcggcacccagacttttgcccccattcctgctacttgtgaacaaataaagattcatatactcaca

SEQ ID NO: 586004 - DNA, 120 bp, Artificial Sequence
  ENSG00000172568_17 (sequence is synthesized)
aaccagacacgctgcaagcatcaggtaagacatatagatggctcttcttggaaatggaaatggcttcttttcacactctgcttggagaagggccgggcaaatgaatagttaaaaataggg

SEQ ID NO: 586005 - DNA, 120 bp, Artificial Sequence
  ENSG00000172572_0 (sequence is synthesized)
gggggccactgggaattcagtgaagagggcaccctataccatggcagtgcccggcgacgctgcacgagtcagggacaagcccgtccacagtggggtgagtcaagcccccacggcgggccg

SEQ ID NO: 586006 - DNA, 120 bp, Artificial Sequence
  ENSG00000172572_1 (sequence is synthesized)
ggactgccaccatcgtgcggaccccgcatcgccgcgggactcgggctgccgtggctgctggggagacctggtgctgcagccgctccggagctctcggaaactttcctccgcgctgtgcgc

SEQ ID NO: 586007 - DNA, 120 bp, Artificial Sequence
  ENSG00000172572_2 (sequence is synthesized)
gggctccctgtcctttctgctggcgctgctggtgaggctggtccgcggggaggtcggctgtgacctggagcagtgtaaggaggcggcggcggcggaggaggaggaagcagccccgggagc

SEQ ID NO: 586008 - DNA, 120 bp, Artificial Sequence
  ENSG00000172572_3 (sequence is synthesized)
agaagggggcgtcttcccggggcctcggggaggtgctcccgggggcggtgcgcggctcagcccctggctgcagccctcggcgctgctcttcagtctcctgtgtgccttcttctggatggg

SEQ ID NO: 586009 - DNA, 120 bp, Artificial Sequence
  ENSG00000172572_4 (sequence is synthesized)
cttgtacctcctgcgcgccggggtgcgcctgcctctggctgtcgcgctgctggccgcctgctgcgggggggaagcgctcgtccagattgggctgggcgtcggggaggatcacttactctc

SEQ ID NO: 586010 - DNA, 120 bp, Artificial Sequence
  ENSG00000172572_5 (sequence is synthesized)
actccccgccgcgggggtggtgctcagctgcttggccgccgcgacatggctggtgctgaggctgaggctgggcgtcctcatgatcgccttgactagcgcggtcaggaccgtgtccctcat

SEQ ID NO: 586011 - DNA, 120 bp, Artificial Sequence
  ENSG00000172572_6 (sequence is synthesized)
ttccttagagaggttcaaggtcgcctggagaccttacctggcgtacctggccggcgtgctggggatcctcttggccaggtacgtggaacaaatcttgccgcagtccgcggaggcggctcc

SEQ ID NO: 586012 - DNA, 120 bp, Artificial Sequence
  ENSG00000172572_7 (sequence is synthesized)
aagggagcatttggggtcccagctgattgctgggaccaaggaagatatcccggtgtttaagaggaggaggcggtccagctccgtcgtgtccgccgagatgtccggctgcagcagcaagtc

SEQ ID NO: 586013 - DNA, 120 bp, Artificial Sequence
  ENSG00000172572_8 (sequence is synthesized)
ccatcggaggacctccctgccctgtataccgagggaacagctcatggggcattcagaatgggaccacaaacgagggccaagaggatcacagtcttcaggaaccagtattactgtggacat

SEQ ID NO: 586014 - DNA, 120 bp, Artificial Sequence
  ENSG00000172572_9 (sequence is synthesized)
cgccgtcatgggcgaggcccacggcctcattaccgacctcctggcagacccttctcttccaccaaacgtgtgcacatccttgagagccgtgagcaacttgctcagcacacagctcacctt

SEQ ID NO: 586015 - DNA, 120 bp, Artificial Sequence
  ENSG00000172572_10 (sequence is synthesized)
ccaggccattcacaagcccagagtgaatcccgtcacttcgctcagtgaaaactatacctgttctgactctgaagagagctctgaaaaagacaagcttgctattccaaagcgcctgagaag

SEQ ID NO: 586016 - DNA, 120 bp, Artificial Sequence
  ENSG00000172572_11 (sequence is synthesized)
gagtttgcctcctggcttgttgagacgagtttcttccacttggaccaccaccacctcggccacaggtctacccaccttggagcctgcaccagtacggagagaccgcagcaccagcatcaa

SEQ ID NO: 586017 - DNA, 120 bp, Artificial Sequence
  ENSG00000172572_12 (sequence is synthesized)
actgcaggaagcaccttcatccagtcctgattcttggaataatccagtgatgatgaccctcaccaaaagcagatcctttacttcatcctatgctatttctgcagctaaccatgtaaaggc

SEQ ID NO: 586018 - DNA, 120 bp, Artificial Sequence
  ENSG00000172572_13 (sequence is synthesized)
taaaaagcaaagtcgaccaggtgccctcgctaaaatttcacctctttcatcgccctgctcctcacctctccaagggactcctgccagcagcctggtcagcaaaatttctgcagtgcagtt

SEQ ID NO: 586019 - DNA, 120 bp, Artificial Sequence
  ENSG00000172572_14 (sequence is synthesized)
tccagaatctgctgacacaactgccaaacaaagcctaggttctcacagggccttaacttacactcagagtgccccagacctatcccctcaaatcctgactccacctgttatatgtagcag

SEQ ID NO: 586020 - DNA, 120 bp, Artificial Sequence
  ENSG00000172572_15 (sequence is synthesized)
ctgtggcagaccatattcccaagggaatcctgctgatgagcccctggagagaagtggggtagccactcggacaccaagtagaacagatgacactgctcaagttacctctgattatgaaac

SEQ ID NO: 586021 - DNA, 120 bp, Artificial Sequence
  ENSG00000172572_16 (sequence is synthesized)
caataacaacagtgacagcagtgacattgtacagaatgaagatgaaacagagtgcctgagagagcctctgaggaaagcatcggcttgcagcacctatgctcctgagaccatgatgtttct

SEQ ID NO: 586022 - DNA, 120 bp, Artificial Sequence
  ENSG00000172572_17 (sequence is synthesized)
ggacaaaccaattcttgctcccgaacctcttgtcatggataacctggactcaattatggagcagctaaatacttggaattttccaatttttgatttagtggaaaatataggaagaaaatg

SEQ ID NO: 586023 - DNA, 120 bp, Artificial Sequence
  ENSG00000172572_18 (sequence is synthesized)
tggccgtattcttagtcaggtatcttacagactttttgaagacatgggcctctttgaagcttttaaaattccaattagggaatttatgaattattttcatgctttggagattggatatag

SEQ ID NO: 586024 - DNA, 120 bp, Artificial Sequence
  ENSG00000172572_19 (sequence is synthesized)
ggatattccttatcataacagaatccatgccactgatgttttacatgctgtttggtatcttactacacagcctattccaggcctctcaactgtgattaatgatcatggttcaaccagtga

SEQ ID NO: 586025 - DNA, 120 bp, Artificial Sequence
  ENSG00000172572_20 (sequence is synthesized)
ttcagattctgacagtggatttacacatggacatatgggatatgtattctcaaaaacgtataatgtgacagatgataaatacggatgtctgtctgggaatatccctgccttggagttgat

SEQ ID NO: 586026 - DNA, 120 bp, Artificial Sequence
  ENSG00000172572_21 (sequence is synthesized)
ggcgctgtatgtggctgcagccatgcacgattatgatcatccaggaaggactaatgctttcctggttgcaactagtgctcctcaggcggtgctatataacgatcgttcagttttggagaa

SEQ ID NO: 586027 - DNA, 120 bp, Artificial Sequence
  ENSG00000172572_22 (sequence is synthesized)
tcatcacgcagctgctgcatggaatcttttcatgtcccggccagagtataacttcttaattaaccttgaccatgtggaatttaagcatttccgtttccttgtcattgaagcaattttggc

SEQ ID NO: 586028 - DNA, 120 bp, Artificial Sequence
  ENSG00000172572_23 (sequence is synthesized)
cactgacctgaagaaacactttgacttcgtagccaaatttaatggcaaggtaaatgatgatgttggaatagattggaccaatgaaaatgatcgtctactggtttgtcaaatgtgtataaa

SEQ ID NO: 586029 - DNA, 120 bp, Artificial Sequence
  ENSG00000172572_24 (sequence is synthesized)
gttggctgatatcaatggtccagctaaatgtaaagaactccatcttcagtggacagatggtattgtcaatgaattttatgaacagggtgatgaagaggccagccttggattacccataag

SEQ ID NO: 586030 - DNA, 120 bp, Artificial Sequence
  ENSG00000172572_25 (sequence is synthesized)
ccccttcatggatcgttctgctcctcagctggccaaccttcaggaatccttcatctctcacattgtggggcctctgtgcaactcctatgattcagcaggactaatgcctggaaaatgggt

SEQ ID NO: 586031 - DNA, 120 bp, Artificial Sequence
  ENSG00000172572_26 (sequence is synthesized)
ggaagacagcgatgagtcaggagatactgatgacccagaagaagaggaggaagaagcaccagcaccaaatgaagaggaaacctgtgaaaataatgaatctccaaaaaagaagactttcaa

SEQ ID NO: 586032 - DNA, 120 bp, Artificial Sequence
  ENSG00000172572_27 (sequence is synthesized)
aaggagaaaaatctactgccaaataactcagcacctcttacagaaccacaagatgtggaagaaagtcattgaagaggagcaacggttggcaggcatagaaaatcaatccctggaccagac

SEQ ID NO: 586033 - DNA, 120 bp, Artificial Sequence
  ENSG00000172572_28 (sequence is synthesized)
ccctcagtcgcactcttcagaacagatccaggctatcaaggaagaagaagaagagaaagggaaaccaagaggcgaggagataccaacccaaaagccagaccagtgacaatggatagaatg

SEQ ID NO: 586034 - DNA, 120 bp, Artificial Sequence
  ENSG00000172572_29 (sequence is synthesized)
ggctgtgtttccaaacagattgacttgtcaaagactctcttcaagccagcacaacatttagacacaacactgtagaaatttgagatgggcaaatggctattgcattttgggattcttcgc

SEQ ID NO: 586035 - DNA, 120 bp, Artificial Sequence
  ENSG00000172572_30 (sequence is synthesized)
attttgtgtgtatatttttacagtgaggtacattgttaaaaactttttgctcaaagaagctttcacattgcaacaccagcttctaaggattttttaaggagggaatatatatgtgtgtgt

SEQ ID NO: 586036 - DNA, 120 bp, Artificial Sequence
  ENSG00000172572_31 (sequence is synthesized)
atagatacatgtaaaacatattcacacccatgcacgcacacacatacacactgaaggccacgattgctggctccacaatttagtaacatttatattaagatatatatatagtggtcactg

SEQ ID NO: 586037 - DNA, 120 bp, Artificial Sequence
  ENSG00000172572_32 (sequence is synthesized)
tgatataataaatcataaaggaaaccaaatcacaaaggagatggtgtggcttagcaaggaaacagtgcaggaaatgtaggttaccaactaagcagcttttgctcttagtactgagggatg

SEQ ID NO: 586038 - DNA, 79 bp, Artificial Sequence
  ENSG00000172572_33 (sequence is synthesized)
ttaccaactaagcagcttttgctcttagtactgagggatgaaagttccagagcattatttgaattctgatacatcctgc

SEQ ID NO: 586039 - DNA, 120 bp, Artificial Sequence
  ENSG00000172572_34 (sequence is synthesized)
gtgcttgtgtgcatgtgtgtgcatatgtaaagagatttttgtggtttaagtaactcagaatagctgtagcaaatgactgaatacatgtgaacaaacagaaggaagttcactctggagtgt

SEQ ID NO: 586040 - DNA, 120 bp, Artificial Sequence
  ENSG00000172572_35 (sequence is synthesized)
ctttgggaggcagccattccaaatgccctcctccatttagcttcaataaagggccttttgctgatggagggcactcaagggctgggtgagagggccacgtgtttggtattacattactgc

SEQ ID NO: 586041 - DNA, 120 bp, Artificial Sequence
  ENSG00000172572_36 (sequence is synthesized)
tatgcaccacttgaaggagctctatcaccagcctcaaacccgaaagactgaggcattttccagtctacttgcctaatgaatgtataggaactgtctatgagtatggatgtcactcaacta

SEQ ID NO: 586042 - DNA, 120 bp, Artificial Sequence
  ENSG00000172572_37 (sequence is synthesized)
agatcaaatcaccatttaaggggatggcattctttatacctaaacacctaagagctgaagtcaggtcttttaatcaggttagaattctaaatgatgccagagaaggcttgggaaattgta

SEQ ID NO: 586043 - DNA, 120 bp, Artificial Sequence
  ENSG00000172572_38 (sequence is synthesized)
cttcagcgtgatagcctgtgtcttcttaatttgctgcaaaatatgtggtagagaaagaaaaggaaacagaaaaatcactctgggttatatagcaagagatgaaggagaatatttcaacac

SEQ ID NO: 586044 - DNA, 120 bp, Artificial Sequence
  ENSG00000172572_39 (sequence is synthesized)
agggtttttgtgttgacataggaaaagcctgattcttggcaactgttgtagtttgtctttcaggggtgaaggtcccactgacaacccctgttgtggtgttccacacgctgtttgttgggg

SEQ ID NO: 586045 - DNA, 120 bp, Artificial Sequence
  ENSG00000172572_40 (sequence is synthesized)
tagcttccatcggcagtctggcccattgtcagtcatgcttcttctggccggggagattatagagagattgtttgaagattgggttattattgaaagtctttttttttgtttgttttgttt

SEQ ID NO: 586046 - DNA, 120 bp, Artificial Sequence
  ENSG00000172572_41 (sequence is synthesized)
tggtttgtttgtttatctacacttgtttatgctgtgagccaaacctctatttaaaaagttgatactcactttcaatattttatttcatattattatatatgtcatgatagttatcttgat

SEQ ID NO: 586047 - DNA, 120 bp, Artificial Sequence
  ENSG00000172572_42 (sequence is synthesized)
gtaaatatgaagatttttttgtttctgtagatagtaaactctttttttaaaaaaggaaaagggaaacatttttataaagttatattttaatcaccatttttatacattgtagttctctcc

SEQ ID NO: 586048 - DNA, 120 bp, Artificial Sequence
  ENSG00000172572_43 (sequence is synthesized)
aagcccagtaagagaatgatgattcatttgcatggaggtcgatggacaaccaatcatctaccttttctaatttaaatgataatctgatatagttttattgccagttaaatgaggatgctg

SEQ ID NO: 586049 - DNA, 120 bp, Artificial Sequence
  ENSG00000172572_44 (sequence is synthesized)
caaagcatgttttttcactagtaacttttgctaactgaatgaattctgggtccatatctcccagatgaaaaactgttaaccaataccatattttatagttggtgtccatttctttccaac

SEQ ID NO: 586050 - DNA, 120 bp, Artificial Sequence
  ENSG00000172572_45 (sequence is synthesized)
actgtttgttatgattcttccttgagtacttatatacagacctgctcattatctaaacaatcttaccttctaagtaaaccttgattgtgatttccagtttttattttctctgacgtagta

SEQ ID NO: 586051 - DNA, 120 bp, Artificial Sequence
  ENSG00000172572_46 (sequence is synthesized)
gaaaggaatgtttacattaaaaatacttttgtttctcataaatggatattgtactcccccctttcaaagcattattttacaataattcatggcattttaaaaaataaggcaaagataata

SEQ ID NO: 586052 - DNA, 120 bp, Artificial Sequence
  ENSG00000172572_47 (sequence is synthesized)
cgacaaaaaatatacatggtttcaaggcaaattctccaataagttggaaaatgtaaaaaggatcaagtggatgcagcctctacctaaataattaaaatatatttcagtatatttctgaat

SEQ ID NO: 586053 - DNA, 120 bp, Artificial Sequence
  ENSG00000172572_48 (sequence is synthesized)
taacaccaggtcttcattatttagaacttactaaattgttttcattttcttagttttacctgtgtatctccatgtttgcaaaaattactataagtcaaattttgccagtgaatttaacta

SEQ ID NO: 586054 - DNA, 120 bp, Artificial Sequence
  ENSG00000172572_49 (sequence is synthesized)
tttttctttccttgcaattaaggggaaaaaagcatttatcttatcttctcataccccttgcatctaagtacttagcaaagtcaatattttcccattttccaaatgcgtccatctctaaca

SEQ ID NO: 586055 - DNA, 120 bp, Artificial Sequence
  ENSG00000172572_50 (sequence is synthesized)
taaatattaattgaacatagagctatgtttggagtgagtggactggcaggacagttggaagtccatcacagtctattgacagtttcatcaaagctgtatagtccaactagtggggcagct

SEQ ID NO: 586056 - DNA, 120 bp, Artificial Sequence
  ENSG00000172572_51 (sequence is synthesized)
tggctactatggtggaagtctcagcaaactgcctggttttgtttgtttgttttgttttaaggtacaggaaataagaggaataatagtggccaaagcaattagaacatcttcattccagaa

SEQ ID NO: 586057 - DNA, 120 bp, Artificial Sequence
  ENSG00000172572_52 (sequence is synthesized)
ctgtgttcagcaatccaggcagattgatacatttttctttaaaaataaattgctattacagctagacgtcaattgggataaataaagggatgaagatccactaagtttgtgactttcata

SEQ ID NO: 586058 - DNA, 120 bp, Artificial Sequence
  ENSG00000172572_53 (sequence is synthesized)
cacacccagtacatctcaaaggatgctaagggacattttctgccagtagagttctccccctttttggtgacagcaatattattatgttcacatctaactccagagcttacttcctgtggt

SEQ ID NO: 586059 - DNA, 120 bp, Artificial Sequence
  ENSG00000172572_54 (sequence is synthesized)
gccaatgtatttgttgcaatttactacatttttatatgagcctatttataggtgccattaaactcaggtctttcaaatgaaagagtttctagcccacttagggaaaaagataattgttta

SEQ ID NO: 586060 - DNA, 120 bp, Artificial Sequence
  ENSG00000172572_55 (sequence is synthesized)
gaaaaccataaaatcaatggtaggaaaagttggaactggttacctggatgccatggttctctgttaaataaagtaagagaccaggtgtattctgagtgtcatcagtgttattttcagcat

SEQ ID NO: 586061 - DNA, 120 bp, Artificial Sequence
  ENSG00000172572_56 (sequence is synthesized)
gctaataaatgtctttccggttatatatctatctaaattaacctttaaaatattggtttccttgataaaagcaccacttttgcttttgttagctgtaatattttttgtcatttagataag

SEQ ID NO: 586062 - DNA, 120 bp, Artificial Sequence
  ENSG00000172572_57 (sequence is synthesized)
acctggtttggctctcaataaaagatgaagacagtagctctgtacagggatatatctatattagtcttcatctgatgaatgaagaaattttctcatattatgttcaagaaagtatttact

SEQ ID NO: 586063 - DNA, 120 bp, Artificial Sequence
  ENSG00000172572_58 (sequence is synthesized)
tcctaaaaatagaattcccgattctgtctattttggttgaataccagaacaaatctttccgttgcaatcccagtaaaacgaaagaaaaggaatatcttacagactgttcatattagatgt

SEQ ID NO: 586064 - DNA, 120 bp, Artificial Sequence
  ENSG00000172572_59 (sequence is synthesized)
atgtagactgttaatttgcaatttccccatatttcctgcctatcttacccagataactttctttgaaggtaaaagctgtgcaaaaggcatgagactcaggcctactctttgtttaaatga

SEQ ID NO: 586065 - DNA, 80 bp, Artificial Sequence
  ENSG00000172572_60 (sequence is synthesized)
aggcatgagactcaggcctactctttgtttaaatgatggaaaaatataaattattttctaagtaataaaagtataaaaat

SEQ ID NO: 586066 - DNA, 120 bp, Artificial Sequence
  ENSG00000172572_61 (sequence is synthesized)
gattaatgagaagtgaataatctaaaaatcatttatattctactgtgggaggtattcttggtgcttccatgtcagtatcgggctctccattgtcctcatcatttatagtacttctaaaat

SEQ ID NO: 586067 - DNA, 120 bp, Artificial Sequence
  ENSG00000172572_62 (sequence is synthesized)
aataatggaaacctcaataagggtcttgtcctcttctgtcatcctaaccctgattctagtttaatgcctttcctgacttatatgccatttgtaaataaacttcctttcaaactgttagaa

SEQ ID NO: 586068 - DNA, 120 bp, Artificial Sequence
  ENSG00000172572_63 (sequence is synthesized)
atttgactctccaatagtgattgccacccataagttgttcaggaaatgttgaatcaatgaatgagagtggggcataaaatgggaaatttgagcacacagaactttcatttaacctacttc

SEQ ID NO: 586069 - DNA, 120 bp, Artificial Sequence
  ENSG00000172572_64 (sequence is synthesized)
actatttgactatggtgtggccttgcttttaattggaggatagctggagttgcaatcagtattcatgaaagcatgtttttaaaaaaatgagaatcagtctaacagaatctgaactttaaa

SEQ ID NO: 586070 - DNA, 120 bp, Artificial Sequence
  ENSG00000172572_65 (sequence is synthesized)
ggatttcaaatcccaaaggcagatgccaggatattccttctaagagctttctggtatcccagattggttgtgtttatatgaatatagattttatattcatcttgtctcggcagaatacat

SEQ ID NO: 586071 - DNA, 120 bp, Artificial Sequence
  ENSG00000172572_66 (sequence is synthesized)
tttgatcagcaacccactctctttattcatttcctttgacaatttttccgtgtattttcttttttcttcagcttcctgtttttggttaaatattttgaaatataatcagactaaactctg

SEQ ID NO: 586072 - DNA, 120 bp, Artificial Sequence
  ENSG00000172572_67 (sequence is synthesized)
aactaattacaagattttgtctctaaattaactctcttcatctgagggaaacagaaagatgaaaggacctattatttttgaaaagaaacaaattctaagtctttctatattaccagagtg

SEQ ID NO: 586073 - DNA, 80 bp, Artificial Sequence
  ENSG00000172575_0 (sequence is synthesized)
gcgctcgcacaaagtttgtgcctgcggtgcacctcggtcgggctcgccgggctcgagggctggcgggcgccggggctacg

SEQ ID NO: 586074 - DNA, 120 bp, Artificial Sequence
  ENSG00000172575_1 (sequence is synthesized)
ggggcgatgcgccgcgcccggccgcgctaggtgagccggcaccgggagcgcgggccgcggccatgggcaccctgggcaaggcgagagaggctccgcggaaaccttcccatggctgcagag

SEQ ID NO: 586075 - DNA, 120 bp, Artificial Sequence
  ENSG00000172575_2 (sequence is synthesized)
agagctgcctctaaagcaagactagaggcaaagccagccaacagccccttcccctcccatcccagcttggcccacatcacccagttccgaatgatggtgtctctgggacatttagccaaa

SEQ ID NO: 586076 - DNA, 120 bp, Artificial Sequence
  ENSG00000172575_3 (sequence is synthesized)
ggagccagcctggacgatctcattgacagctgcattcaatcttttgatgcagatggaaacctgtgtcgaagtaaccaactgttgcaagtcatgctgaccatgcaccgaattgtcatctcc

SEQ ID NO: 586077 - DNA, 120 bp, Artificial Sequence
  ENSG00000172575_4 (sequence is synthesized)
tctgcagaactgctccaaaaagttatcaccctctataaggatgctttggcaaagaattcaccaggactttgcctgaagatctgttattttgtaaggtattggataacagaattctgggtc

SEQ ID NO: 586078 - DNA, 120 bp, Artificial Sequence
  ENSG00000172575_5 (sequence is synthesized)
atgtttaaaatggacgccagcttgacagacactatggaggagtttcaggaactggtgaaagctaagggtgaggagttacattgccgcctgattgacacaactcaaatcaatgcccgtgac

SEQ ID NO: 586079 - DNA, 120 bp, Artificial Sequence
  ENSG00000172575_6 (sequence is synthesized)
tggtccaggaaacttactcaaaggataaaatcaaataccagcaagaaacggaaagtctccctgctctttgaccatctggaaccagaagagctatccgagcacctcacctaccttgagttc

SEQ ID NO: 586080 - DNA, 120 bp, Artificial Sequence
  ENSG00000172575_7 (sequence is synthesized)
aagtctttccggaggatatcgttctctgattatcagaattaccttgtaaatagctgtgtgaaggaaaaccccaccatggagcgatctattgctctgtgcaacggcatctcccagtgggta

SEQ ID NO: 586081 - DNA, 120 bp, Artificial Sequence
  ENSG00000172575_8 (sequence is synthesized)
caactgatggttctcagccgccccacgccgcagctccgagcagaagtcttcatcaagttcatccaggtggctcagaagctccaccaactacagaacttcaatacactgatggctgtgata

SEQ ID NO: 586082 - DNA, 120 bp, Artificial Sequence
  ENSG00000172575_9 (sequence is synthesized)
ggtgggctgtgtcacagctcaatctcgaggctcaaggagacaagttcgcatgtcccacatgaaatcaataaggttctcggtgagatgactgagctgctgtcctcctccagaaactacgac

SEQ ID NO: 586083 - DNA, 120 bp, Artificial Sequence
  ENSG00000172575_10 (sequence is synthesized)
aattaccggcgagcctatggagagtgcaccgacttcaagatccccattctgggtgtgcatctcaaggacctcatctccctgtatgaagccatgcctgactatctggaggacgggaaagtg

SEQ ID NO: 586084 - DNA, 120 bp, Artificial Sequence
  ENSG00000172575_11 (sequence is synthesized)
aacgtccataagctactggccctatacaatcatatcagtgaattggtccagctgcaagaggtggccccacccttggaggctaacaaggacttggtacacttgctgacgttatccctggat

SEQ ID NO: 586085 - DNA, 120 bp, Artificial Sequence
  ENSG00000172575_12 (sequence is synthesized)
ctttactacactgaggatgaaatctatgagctttcctatgcccgggaaccaaggaaccacagagctccaccactaacaccttcaaagccaccagtagtagtggactgggcttctggagtg

SEQ ID NO: 586086 - DNA, 120 bp, Artificial Sequence
  ENSG00000172575_13 (sequence is synthesized)
tctcccaaacctgatccaaaaaccattagcaaacacgtccagaggatggtggattctgtcttcaagaactatgatcacgaccaggatggatacatttctcaggaagaatttgaaaagatt

SEQ ID NO: 586087 - DNA, 120 bp, Artificial Sequence
  ENSG00000172575_14 (sequence is synthesized)
gctgcgagttttccattttccttctgtgtgatggacaaagacagggaaggcctcatcagcagggatgagatcacagcctacttcatgagagccagctcaatctattccaagctgggcctg

SEQ ID NO: 586088 - DNA, 120 bp, Artificial Sequence
  ENSG00000172575_15 (sequence is synthesized)
ggctttcctcacaacttccaagagaccacctacctgaagcccactttttgtgacaactgtgctggatttctctggggagtgatcaaacaaggatatcgatgtaaagactgcgggatgaac

SEQ ID NO: 586089 - DNA, 120 bp, Artificial Sequence
  ENSG00000172575_16 (sequence is synthesized)
tgtcacaaacaatgcaaagatctggttgtgtttgagtgtaagaagcgagccaagaacccagtagctcccacagagaacaacacttctgtggggccagtgtccaacctttgctcattggga

SEQ ID NO: 586090 - DNA, 120 bp, Artificial Sequence
  ENSG00000172575_17 (sequence is synthesized)
gccaaagatctgctccatgcacctgaggaaggaccttttacattccctaatggggaggctgtggaacatggtgaggagagtaaggatcggaccatcatgctgatgggagtgtcctcacag

SEQ ID NO: 586091 - DNA, 120 bp, Artificial Sequence
  ENSG00000172575_18 (sequence is synthesized)
aagatttctcttcggctgaagagggctgttgcccacaaggccacccagactgaatcacagccttggattggcagtgagggcccttcaggtccctttgtgctgtcttccccaaggaagaca

SEQ ID NO: 586092 - DNA, 120 bp, Artificial Sequence
  ENSG00000172575_19 (sequence is synthesized)
gcccaggatactctatatgtgcttcccagtcccacctctccatgtcctagcccagtcttggtcagaaagcgggcttttgtcaagtgggagaataaagactccctcataaaatcaaaggag

SEQ ID NO: 586093 - DNA, 120 bp, Artificial Sequence
  ENSG00000172575_20 (sequence is synthesized)
atagaatccctccagcttgaaaaaagcaatcatgtcttagctcaaatggagcagggtgactgttcttagcccagaaactaagtagcacaatctgtagatgagtatagtgatctcatttcc

SEQ ID NO: 586094 - DNA, 120 bp, Artificial Sequence
  ENSG00000172575_21 (sequence is synthesized)
taaactgtaatgcacagacctgaggaactttacactgaccagctttaaaacagtactttaaaaggaaaagcctgttactgtttatttacctaaaagattcctaatgtgcagcactgtttt

SEQ ID NO: 586095 - DNA, 120 bp, Artificial Sequence
  ENSG00000172575_22 (sequence is synthesized)
ctctttcagttagttgactcaaagggggaaaactaaagaatgcaaaacttttgctattcataccactgatgttcatcaaaagtatgcgatctaaaacatgactatcatttcctgacaatg

SEQ ID NO: 586096 - DNA, 120 bp, Artificial Sequence
  ENSG00000172575_23 (sequence is synthesized)
gggcatctcggtggcctgcctggctgattcttccttaaaactaaaatctctggaaaatggatttgcttcttaccctgtgttttctgcaaactgacttactttgttccagccaaagcttgc

SEQ ID NO: 586097 - DNA, 120 bp, Artificial Sequence
  ENSG00000172575_24 (sequence is synthesized)
taataatagaaaactacccatattccaaaagtagatttcctctgtatcccagcatactttgtgaacctggctccttcttcactacctcagatctaatcaattagtccatgtaccctcctt

SEQ ID NO: 586098 - DNA, 120 bp, Artificial Sequence
  ENSG00000172575_25 (sequence is synthesized)
cctcactacagtcataacacatgagcatatctacctagaagccaatttctactgatgtagccacaactttttagaggcctattaaacatgacgttatccaattgcaggtcaacttatagt

SEQ ID NO: 586099 - DNA, 120 bp, Artificial Sequence
  ENSG00000172575_26 (sequence is synthesized)
tgtagccttacaacttacaggcatcagaaaataagtaatcaaattaggtacctggaaacatagctattaccatctcatattactgtctaattaaaataaacataacgcaaacatgtttgt

SEQ ID NO: 586100 - DNA, 120 bp, Artificial Sequence
  ENSG00000172575_27 (sequence is synthesized)
ccttatatattctacagtggatagaattaggaattgatggcttaaaaaaaaaagtctatgaagagtctgtttaactcttcatgttccatctttctcttctgaagtaaactattttgaaag

SEQ ID NO: 586101 - DNA, 120 bp, Artificial Sequence
  ENSG00000172575_28 (sequence is synthesized)
ttctctttttgaaatgaatttgtgcttaactgtcttcactattaatactatttagaaataagctaattggatcagtggcttaaataatagctgactgtgtgtacatatgtatataatatg

SEQ ID NO: 586102 - DNA, 120 bp, Artificial Sequence
  ENSG00000172575_29 (sequence is synthesized)
tatatacaatatcaggcatgcatgtggcttggaattttgtttcctccataaaatgtggaagtgaattaaacaagttttagtcatttatacaaagtcacaaatataaagttcagtttgtca

SEQ ID NO: 586103 - DNA, 120 bp, Artificial Sequence
  ENSG00000172575_30 (sequence is synthesized)
caagattaaattgctcacaaggtaaaattgtattgtttggcaaaatcacaagtaacaatcctgtgagttttctattatgaaggttaataataaatgggctcatttagttgcctgggcacc

SEQ ID NO: 586104 - DNA, 120 bp, Artificial Sequence
  ENSG00000172575_31 (sequence is synthesized)
tattcacaaattcatttgtcagcctctttttagttctcttaaaaaaaaaaaaatcatatgatcattttcctttttgggggtacttagcttccatgcctataaagtctggtaccagactga

SEQ ID NO: 586105 - DNA, 120 bp, Artificial Sequence
  ENSG00000172575_32 (sequence is synthesized)
cttgaaattcataaacaagttgtccaattgccaagaatatgttaacaattaaaagttccaaactaaagccaatagcaccaagtcttcataagaatacaaagtatacatacagtattgctt

SEQ ID NO: 586106 - DNA, 120 bp, Artificial Sequence
  ENSG00000172575_33 (sequence is synthesized)
acctggaggattcagatcatttaggaattctctttgatgaaagatcagttcccatttgagttcctccttgcactgagttttagtgatatagaactagcttgtagttagtgtttcattaca

SEQ ID NO: 586107 - DNA, 120 bp, Artificial Sequence
  ENSG00000172575_34 (sequence is synthesized)
ttataaagaatagttttacacacgtatttaccgttttccaaatttaaactcagaaatacccaaagcaggcctgcttaagcccactacctggcatataaacttatagtaacactttgttac

SEQ ID NO: 586108 - DNA, 120 bp, Artificial Sequence
  ENSG00000172575_35 (sequence is synthesized)
tttctttttaataggacaagcatgagttaggacaaactctaaaaattcatattcttcactattcttgttttcctttgattgatatagaccaaagatggtgtactctaattttttaaaaca

SEQ ID NO: 586109 - DNA, 120 bp, Artificial Sequence
  ENSG00000172575_36 (sequence is synthesized)
gtaatggaacacaatttttttcattcttcctcctctccattcgaagtaaagatccccagttagtttttatataaataatctatagggattcaaaaggtgtcacagtccacttaattagtc

SEQ ID NO: 586110 - DNA, 120 bp, Artificial Sequence
  ENSG00000172575_37 (sequence is synthesized)
aaattagcaatggctaaacagtatcaagtactgcagaatttatcactgaaatggataagaggaaatagtttagtcacaggtttttacagtccagcaagggccaaagaggtatagtataca

SEQ ID NO: 586111 - DNA, 120 bp, Artificial Sequence
  ENSG00000172575_38 (sequence is synthesized)
agttaatagtatttgtgttgagcaacatggggctagtgggatcacagaaatctggaaaaaaaaaaaaaaggctttggcttatcaagcctagtgtaaatttctgcatctcacacgacttta

SEQ ID NO: 586112 - DNA, 120 bp, Artificial Sequence
  ENSG00000172575_39 (sequence is synthesized)
gtttggccaggtatttatctgccaaaacaaggacaaatcttgttgtattaacagcagggtcacttctcattttctttgctgacttacctttttactgaccgttgtgaatttctgtctcaa

SEQ ID NO: 586113 - DNA, 120 bp, Artificial Sequence
  ENSG00000172575_40 (sequence is synthesized)
aatgtataatatagaaatgcaagaaaaaaacaaatgtacagattgtaaagttttttgatacctaatgtaagttttctttgtgtaatatttatatgataaaagacattaggatccctacaa

SEQ ID NO: 586114 - DNA, 120 bp, Artificial Sequence
  ENSG00000172575_41 (sequence is synthesized)
ctattgagattatcagcactatcacctggacaagcagcggatgggccgcccctcttggccaggtcttctgtgcgcactgacgttgtatgaaagttgtccccacatctcctacacccaccg

SEQ ID NO: 586115 - DNA, 120 bp, Artificial Sequence
  ENSG00000172575_42 (sequence is synthesized)
acgccaggcggccgcgtctgggccagatatggatcacgcctgtggagcgcacctccacacaggcagccctcgtccaaggtgcagggcgcagggcacagggcacatgtctacggcccagtc

SEQ ID NO: 586116 - DNA, 120 bp, Artificial Sequence
  ENSG00000172575_43 (sequence is synthesized)
ttccccttcaggaagtgggagacagtaggacagagcaatcctaatgccaggatgaagagcactagttgcaaccctgaaatctcacctttgctggggagatgtctctttaacagccaacca

SEQ ID NO: 586117 - DNA, 120 bp, Artificial Sequence
  ENSG00000172575_44 (sequence is synthesized)
tatacaggagaggccctggaggggagaaggcgtcctcactgcagtgctccgagcagcggccgcaggaagaggcgtggaagctgcgggtcggctgcgggaaagggggtcccatgggagccg

SEQ ID NO: 586118 - DNA, 120 bp, Artificial Sequence
  ENSG00000172575_45 (sequence is synthesized)
ctaggcgcagcccgtttcccgagctgaggtggaggtcgacgggcacaggtgccctgcaaggcgcgggcgtggtagccgggagcccgctcctctccaactcccctgagacttaaccctttg

SEQ ID NO: 586119 - DNA, 120 bp, Artificial Sequence
  ENSG00000172575_46 (sequence is synthesized)
gagaccacctacctgaagcccactttttgtgacaactgtgctggatttctctggggagtgatcaaacaaggatatcgatgtaaagatatcaggatactgcttctgatgctgagattcact

SEQ ID NO: 586120 - DNA, 120 bp, Artificial Sequence
  ENSG00000172575_47 (sequence is synthesized)
gataagggctacatcaagagtgtgagctctgggcttcaccaagtgagaagaatgctagcttcattaggaatgttaagtgtcttagctccagaagatagaacagacatgtgtgacaagaaa

SEQ ID NO: 586121 - DNA, 120 bp, Artificial Sequence
  ENSG00000172578_0 (sequence is synthesized)
gctcagctcctgcaatggggcctgcctgacacttgggcgctccttcagtctcgatgttgatggcaggacaaaggggcgcctggaccatgggtgatgtggtcgagaagagtttggaagggc

SEQ ID NO: 586122 - DNA, 120 bp, Artificial Sequence
  ENSG00000172578_1 (sequence is synthesized)
ccctggcaccttctacagatgagccctcccagaaaacaggagacttggtcgagatcttaaatggggaaaaggtcaaatttgacgacgcgggactctccttaattcttcagaatggcctgg

SEQ ID NO: 586123 - DNA, 120 bp, Artificial Sequence
  ENSG00000172578_2 (sequence is synthesized)
aaaccctgcgaatggaaaacgctctgacagatgtcatcttgtgtgtggacattcaggaattctcctgccaccgcgtggtgcttgccgcagccagcaactatttcagggccatgttctgca

SEQ ID NO: 586124 - DNA, 120 bp, Artificial Sequence
  ENSG00000172578_3 (sequence is synthesized)
acgatttaaaggaaaagtatgagaaaaggatcattattaaaggggttgatgctgagaccatgcacactctgttggactacacgtacaccagcaaggcgctgatcaccaagcagaatgtcc

SEQ ID NO: 586125 - DNA, 120 bp, Artificial Sequence
  ENSG00000172578_4 (sequence is synthesized)
agcgggtcctggaggctgctaacctcttccagttcctgcggatggtggatgcctgtgccagcttcctcactgaagccttgaacccagaaaactgcgttggaatactgaggctggctgaca

SEQ ID NO: 586126 - DNA, 120 bp, Artificial Sequence
  ENSG00000172578_5 (sequence is synthesized)
cacactcgctggacagtctaaagaagcaggttcagagttacatcattcaaaactttgtgcagattctgaactctgaggagtttcttgacctgcccgtggacactctgcaccacatcttga

SEQ ID NO: 586127 - DNA, 120 bp, Artificial Sequence
  ENSG00000172578_6 (sequence is synthesized)
agagtgatgacctttacgtgaccgaggaggctcaggtgtttgagaccgtgatgagctgggtccggcacaagccatcagaacgactctgcttactcccctatgtcctcgagaacgtgcgct

SEQ ID NO: 586128 - DNA, 120 bp, Artificial Sequence
  ENSG00000172578_7 (sequence is synthesized)
taccgcttctggacccgtggtactttgtggagacggtggaagcagatcctctcatcaggcagtgcccagaggtcttcccgctgctccaggaagccaggatgtaccacctttctggcaatg

SEQ ID NO: 586129 - DNA, 120 bp, Artificial Sequence
  ENSG00000172578_8 (sequence is synthesized)
agatcatttcggaacgcaccaagcccaggatgcatgagttccagtctgaggtgttcatgatcattggcggctgcacgaaggatgaacggtttgtggcagaggtgacctgcctggaccccc

SEQ ID NO: 586130 - DNA, 120 bp, Artificial Sequence
  ENSG00000172578_9 (sequence is synthesized)
tgaggcgcagccgcctggaggtggccaagctcccgctaacagagcatgagctggagagtgagaataagaagtgggtggagtttgcatgcgtgacattgaaaaatgaggtctacatctcag

SEQ ID NO: 586131 - DNA, 120 bp, Artificial Sequence
  ENSG00000172578_10 (sequence is synthesized)
gtggcaaagaaacacagcatgatgtttggaaatataattcttcgatcaacaagtggattcagattgagtatttaaacataggccgctggaggcataagatggtggtgttgggtggcaagg

SEQ ID NO: 586132 - DNA, 120 bp, Artificial Sequence
  ENSG00000172578_11 (sequence is synthesized)
tctatgtgatcggaggctttgacggcttacagagaatcaacaatgtggagacctacgacccctttcacaactgctggtcagaggccgcacccctccttgtccatgtcagttcctttgcag

SEQ ID NO: 586133 - DNA, 120 bp, Artificial Sequence
  ENSG00000172578_12 (sequence is synthesized)
ccaccagccataagaagaagctgtatgtgatcgggggagggcccaatgggaaactggccacagacaagactcagtgttatgacccttccaccaacaagtggagtttgaaggcggccatgc

SEQ ID NO: 586134 - DNA, 120 bp, Artificial Sequence
  ENSG00000172578_13 (sequence is synthesized)
ccgtggaggctaaatgcatcaatgcagtgagtttccgggaccgcatctatgtcgttggtggggccatgagagcgctgtacgcctacagcccgctggaagacagctggtgcctggtgaccc

SEQ ID NO: 586135 - DNA, 120 bp, Artificial Sequence
  ENSG00000172578_14 (sequence is synthesized)
agctcagccacgagcgggccagctgcggtatcgcgccctgcaacaaccggctctacatcaccggcgggcgggacgagaagaacgaggttatcgccacggtgctgtgctgggaccccgagg

SEQ ID NO: 586136 - DNA, 120 bp, Artificial Sequence
  ENSG00000172578_15 (sequence is synthesized)
cccagaaactgacagaggagtgcgtcctgccccggggcgtgtcgcaccacggcagcgtcaccatcaggaagtcgtacacccacatccgcaggatcgtgcccggagcagtgtctgtctgac

SEQ ID NO: 586137 - DNA, 120 bp, Artificial Sequence
  ENSG00000172578_16 (sequence is synthesized)
ggcaggatggggagctggagagcccccccgaccctcagcgtacccgcctcacctctcaccctcctccagtcccacttcaggcagcaggctcgagtttgaggccatacatcaggggatccc

SEQ ID NO: 586138 - DNA, 120 bp, Artificial Sequence
  ENSG00000172578_17 (sequence is synthesized)
cttgactcactttgggggaaccttggaagtcacagtttggggtcacttgagaccggccaggaatgtttgcatgacctacctcaggaggggaggcgaggaagagtaatatttagcattcag

SEQ ID NO: 586139 - DNA, 120 bp, Artificial Sequence
  ENSG00000172578_18 (sequence is synthesized)
gacccacccaccctatgccggcttctgtgccaggcacttccttttatcggttcatttaacctggtgactggctcttatcacttctagtttacaggtgagggaaccaagtttcacagaggc

SEQ ID NO: 586140 - DNA, 120 bp, Artificial Sequence
  ENSG00000172578_19 (sequence is synthesized)
taagtggcgtgcccctgatcactcagatagcaagtagctaccccaggagtctaaaatccaggtctttcatctccgaagtcaatgctctttccaccatgctgcctatctcagagcaggaaa

SEQ ID NO: 586141 - DNA, 86 bp, Artificial Sequence
  ENSG00000172578_20 (sequence is synthesized)
aatgctctttccaccatgctgcctatctcagagcaggaaaaacaaacaaaaaacaacaacaaaacctggctcttcctatgggaggc

SEQ ID NO: 586142 - DNA, 82 bp, Artificial Sequence
  ENSG00000172578_21 (sequence is synthesized)
gtggaggttgcagtgagccgagatcgccacactgcactgcagcccgggaaacaaaagtgaagctctgtctcctggctcattt

SEQ ID NO: 586143 - DNA, 120 bp, Artificial Sequence
  ENSG00000172578_22 (sequence is synthesized)
gctcatttcttgtttcggcaagtctgctaaaagattcactcagcacagcagggaaataaaggtgtttcctgctttctttccttttctttcttattctgcatcctccctcgtccccgccct

SEQ ID NO: 586144 - DNA, 120 bp, Artificial Sequence
  ENSG00000172578_23 (sequence is synthesized)
ttaccaatatttaaaccaaggagtcatttgggctccttgccaagaacatctcataggttcttccacttgaaaggtctgggggatgggcttgggaaggcctgtttgctttgaaagagatga

SEQ ID NO: 586145 - DNA, 120 bp, Artificial Sequence
  ENSG00000172578_24 (sequence is synthesized)
ttgggaaggcctgtttgctttgaaagagatgaaatacttgtgttctgtcctcctcccattgaaaccctcttttttttttttttgagatgaagtcgcccaggctggagtgcagtggcatga

SEQ ID NO: 586146 - DNA, 120 bp, Artificial Sequence
  ENSG00000172578_25 (sequence is synthesized)
acaggtgtgagccactgggcccggtctttttttttttaaatgatcataagatggcccattttggaccggaactgtcattgccagacagaattgtacctttagcacattctggtgccctgg

SEQ ID NO: 586147 - DNA, 120 bp, Artificial Sequence
  ENSG00000172578_26 (sequence is synthesized)
cctcttagtgttcaccagttgtactgcaatatagacaagatgtctctagagactcaaactactgttttattaaaaaagtaaacacctgagcacagctggcctacacaggagcgacagatt

SEQ ID NO: 586148 - DNA, 120 bp, Artificial Sequence
  ENSG00000172578_27 (sequence is synthesized)
ctccttgatggtacactttctagtttttacacagtgatttaggtccacgttcctgataccccatcctcctgaagccttcgttttcaagacttttaaaaagcacttctacttggttttttg

SEQ ID NO: 586149 - DNA, 120 bp, Artificial Sequence
  ENSG00000172578_28 (sequence is synthesized)
atcagtgtagctcaattgtgacttaaagaacagaatctgtccttcactgtaagagctacagctttcaaatgagctcactggaaattcattctaatccccaagctggagaaacaggttaag

SEQ ID NO: 586150 - DNA, 120 bp, Artificial Sequence
  ENSG00000172578_29 (sequence is synthesized)
agatcctgtttcatatgctgtatttaaaaagcaacaatgataacaacatagtaactgcgttacccaatggactttattttcatcatatgatttcaattctctttatagagttttatttca

SEQ ID NO: 586151 - DNA, 120 bp, Artificial Sequence
  ENSG00000172578_30 (sequence is synthesized)
tatccggtgtggcttgttcttttcagcagtttgggaagttagttattagagttgatagtgaattgaattttcattaaacagtcacggttagaagaagctaatatttgaaacagattttaa

SEQ ID NO: 586152 - DNA, 120 bp, Artificial Sequence
  ENSG00000172578_31 (sequence is synthesized)
aaacttgaaaaattacaggtgagatttctgtttatgccagattattgaagataaatataaatgtatgttggtgtgtgaaatgctctgtgccttagaagcgtgacagttcagctctctgct

SEQ ID NO: 586153 - DNA, 120 bp, Artificial Sequence
  ENSG00000172578_32 (sequence is synthesized)
gtggaaagtaacacagggcaatagaaacatatttgtggaattttagaacaaactattgctgactcatgagcactataataaccatcaggaagctcccaactgaagcaatgtaacagtgta

SEQ ID NO: 586154 - DNA, 120 bp, Artificial Sequence
  ENSG00000172578_33 (sequence is synthesized)
atctagttcaattcagcaaacattcatggagttcttcatgtctgtcaagccttgaggacacccacgaatggcaaatctccacgctagacactcaatacaggtaaataggccaccagttaa

SEQ ID NO: 586155 - DNA, 120 bp, Artificial Sequence
  ENSG00000172578_34 (sequence is synthesized)
tattcttgtttttattttcttcaagttagctaaaaatgagatgcgtatgaagtgaggaggctggatccaagtcttgattgcctttcagggggtcaaggtggtaagctgtgcagtgaagtc

SEQ ID NO: 586156 - DNA, 120 bp, Artificial Sequence
  ENSG00000172578_35 (sequence is synthesized)
aaccagtggccatggcttacatgtttgtctctttgagatcgccaccagaaccatttgtgaactgatttgtgaaggaaaagtcagtcttactccaaagactattgcagggaggaacttcca

SEQ ID NO: 586157 - DNA, 120 bp, Artificial Sequence
  ENSG00000172578_36 (sequence is synthesized)
gagaggaaatccaatgacaatggtactggcatacacagggagcctcccttcaaaaagacagcgcccctagtcagggaggggatggcggtcctttgataagacccataggcaaacttcgag

SEQ ID NO: 586158 - DNA, 120 bp, Artificial Sequence
  ENSG00000172578_37 (sequence is synthesized)
cccatcagcaggtcaaccctatgctgggaaagtgaggatttgggatttctgtgctataaacctgattctaaatgtaggacccaagtttctggactacttcagaatacctaaatgaatcat

SEQ ID NO: 586159 - DNA, 120 bp, Artificial Sequence
  ENSG00000172578_38 (sequence is synthesized)
ggaaacactctttatgattttttacaacaccagatatgcaggtgaattgtggaaaatgtcatgtagctgacactcaagaaatagggattcctaataatggcatgggtagggaacagatac

SEQ ID NO: 586160 - DNA, 120 bp, Artificial Sequence
  ENSG00000172578_39 (sequence is synthesized)
acctggttagaaggtctagggttctgtatatgaagctgccagtctgtagctcttcgagaaagaaagttcaagtcatttgggggaaacttaagaatagtcatcagggttttagcttctagg

SEQ ID NO: 586161 - DNA, 120 bp, Artificial Sequence
  ENSG00000172578_40 (sequence is synthesized)
caccagccaaggatgagaacttctaaaatctaaaatccatttcaagaaataaagacgaacacatttgcaggaaggtaactgttataacccacaccatcagcagggggaaagccaagctga

SEQ ID NO: 586162 - DNA, 120 bp, Artificial Sequence
  ENSG00000172578_41 (sequence is synthesized)
gaataaacccagagacaaagaaccctcggactcaggcaggacatggcaggatgttctggcacagcagactggagactgaggcagggcctgtgagtggacagagcacccctggctgggaag

SEQ ID NO: 586163 - DNA, 120 bp, Artificial Sequence
  ENSG00000172578_42 (sequence is synthesized)
aagaagatggggtaggaggaggtcaggttccaaggatgcaggtctggaaaatgatatcggaggccctggagtttgtgagcttggctctagtcccaagaagggtgagggagaataagggta

SEQ ID NO: 586164 - DNA, 120 bp, Artificial Sequence
  ENSG00000172578_43 (sequence is synthesized)
agggagtattctaggcaaggaactaaggaaggaatccccttcttagagcagaggcacaagttagagcaggcccagcatttgggccaacttactgtggggcctctgagctgctcagctggg

SEQ ID NO: 586165 - DNA, 120 bp, Artificial Sequence
  ENSG00000172578_44 (sequence is synthesized)
tctcctgtcctagagggaaggtggcccagagtctttggtggagcggaatctgtagatgaggttaagggactccagttgccaaggttgatctgaaacaggcagggagctaagctcatcaga

SEQ ID NO: 586166 - DNA, 120 bp, Artificial Sequence
  ENSG00000172578_45 (sequence is synthesized)
acaccaacagattcatgttctcgtcttagctttcatctattctggtctcaatggcttcgggaaacacacatatacacatacaccatgcccttgaactcaaagcaaactacgctctcaggg

SEQ ID NO: 586167 - DNA, 120 bp, Artificial Sequence
  ENSG00000172578_46 (sequence is synthesized)
aaatacaaatatcacgttcttatagctgtaaagtatagcttagctatttatagaagactatgaggtactgttgtgagttatttgcttatcctgttttattctgaaaaatgaaagtgctca

SEQ ID NO: 586168 - DNA, 120 bp, Artificial Sequence
  ENSG00000172578_47 (sequence is synthesized)
atagaatttttaacgttggcaacaccataaggatttcttatgttaagtcccaacttggggttgcaaaatcattttttcccttaatacctgggtgttgtattagatctcataatttgacaa

SEQ ID NO: 586169 - DNA, 120 bp, Artificial Sequence
  ENSG00000172578_48 (sequence is synthesized)
gttaaccttttagaaatccacatatatctcaaatctggctactgcaaaaccagttttgacaggtcagattttcatatgtataggtataaatagccaacactcagtgaacaaaatccttta

SEQ ID NO: 586170 - DNA, 120 bp, Artificial Sequence
  ENSG00000172578_49 (sequence is synthesized)
agcattttggttacataaagttgtatgttttaagtgatcaaactaagaatattgtttataggttttaaaaaccaaaccaataaaatttttatttattcaataaaatatgcacagaacaga

SEQ ID NO: 586171 - DNA, 120 bp, Artificial Sequence
  ENSG00000172578_50 (sequence is synthesized)
gtgtgtgtgtgtgtgtgtgtttgagagacagagagagagacagaagatagaaaggcggagaggcctgtaatgacgtgagagctcccgcctgaatcacatgatttgagtggggcctggatg

SEQ ID NO: 586172 - DNA, 81 bp, Artificial Sequence
  ENSG00000172578_51 (sequence is synthesized)
tcaccaagcagaatgtccagcgggtcctggaggctgctaacctcttccagctggatgtaaggacttctcaaaaactgctca

SEQ ID NO: 586173 - DNA, 87 bp, Artificial Sequence
  ENSG00000172578_52 (sequence is synthesized)
tctactaaaaatagaaaaattagctgggccaagggaatcgattgaacctaggaggcggaagttacagtgagccgagatcgcaccact

SEQ ID NO: 586174 - DNA, 86 bp, Artificial Sequence
  ENSG00000172578_53 (sequence is synthesized)
tccagcctccaaacaaacaaacaaacaaacaaaaaactgcccaagactccaacagaaattacttggtctccttccaggcgacacta

SEQ ID NO: 586175 - DNA, 120 bp, Artificial Sequence
  ENSG00000172578_54 (sequence is synthesized)
ctccaacagaaattacttggtctccttccaggcgacactaagaagcccaatcctggctcttggaaatggtgtgggccaagaaaggaggaaatatttcacaggctaatactaataattgct

SEQ ID NO: 586176 - DNA, 120 bp, Artificial Sequence
  ENSG00000172578_55 (sequence is synthesized)
tcattttataggtgcctgatgaagtgccaggcacctactatgatatactatgtacacacatgaatttctgttgtcatggacagagactcacagattatatctattcaacaccatagaagc

SEQ ID NO: 586177 - DNA, 120 bp, Artificial Sequence
  ENSG00000172578_56 (sequence is synthesized)
cagtcaatctaggcaagaaaaccagctggattatttccttgctatcatctacataaaatcagcctgttgactatttgatgcactccctctcacacttaaatttggtcaaccagtgttgct

SEQ ID NO: 586178 - DNA, 120 bp, Artificial Sequence
  ENSG00000172578_57 (sequence is synthesized)
tgctgtgtggctactgtaagcattaagcaatcagggttagtctactgggtccacatgacagccacagtggcccttttcagagcattcaccagagtctttttttttgagacagagtcttgc

SEQ ID NO: 586179 - DNA, 61 bp, Artificial Sequence
  ENSG00000172578_58 (sequence is synthesized)
aggtaggtctttttaccctcaatgtatagatgaggggcataaaattcagcaatgttaagga

SEQ ID NO: 586180 - DNA, 120 bp, Artificial Sequence
  ENSG00000172578_59 (sequence is synthesized)
taaaattcagcaatgttaaggaaacgctaaagtctccacagctagtaagaggggagcctggatttgactcctgtggtcctgtgcgtagcctgtgtgttctccagtgcacatgctctgtcc

SEQ ID NO: 586181 - DNA, 120 bp, Artificial Sequence
  ENSG00000172578_60 (sequence is synthesized)
atgcctcagagtgacgcctgaaacaagccatcaccctgaaggcagctagggcctccggggagggtgtcctcagggaggactgcccagtgcaatgttctgagaaccagcagtgctctgtgc

SEQ ID NO: 586182 - DNA, 120 bp, Artificial Sequence
  ENSG00000172578_61 (sequence is synthesized)
gagtgtgtcgggggcaagactggcccagcaccctctggggaaccttggatgcctggggccacctgtaggggaaagaaagagatcagactgttactgtgtatatgtggaatgaagaagaca

SEQ ID NO: 586183 - DNA, 78 bp, Artificial Sequence
  ENSG00000172578_62 (sequence is synthesized)
gatcagactgttactgtgtatatgtggaatgaagaagacataagaaactccattttgttctgtactacagccccaatc

SEQ ID NO: 586184 - DNA, 74 bp, Artificial Sequence
  ENSG00000172578_63 (sequence is synthesized)
ctccagtctcgagagtacccagggacagaatgcactgcggaaggtccccgactgagacagcctgagatatggcc

SEQ ID NO: 586185 - DNA, 72 bp, Artificial Sequence
  ENSG00000172578_64 (sequence is synthesized)
ctgctcgtccctggaaatggaatgtctcggtgtaaaacccgatcgcacattctatttactgagataggagaa

SEQ ID NO: 586186 - DNA, 86 bp, Artificial Sequence
  ENSG00000172578_65 (sequence is synthesized)
ggcaatattgctctttactacactgagatgtttgtgtaaactcaaacataaatctggcctacatgacatcaaggcacagcaccttt

SEQ ID NO: 586187 - DNA, 60 bp, Artificial Sequence
  ENSG00000172578_66 (sequence is synthesized)
attgctctttactacactgagatgtttgtgtaaactcaaacataaatctggcctacatcg

SEQ ID NO: 586188 - DNA, 89 bp, Artificial Sequence
  ENSG00000172578_67 (sequence is synthesized)
accctatagtcctgccacatccccctcaccgagatagtaaagatagtgatcaataaatactaaggaaactcagagaccagtgtcggcgt

SEQ ID NO: 586189 - DNA, 120 bp, Artificial Sequence
  ENSG00000172578_68 (sequence is synthesized)
cttttctcagtctcttgtcccacctgatgagaaatacccacaagtgtggaggagctggcctccttcacccgcaagcatccccagaatgagtctgctgctggccatttaacaactcttttg

SEQ ID NO: 586190 - DNA, 120 bp, Artificial Sequence
  ENSG00000172578_69 (sequence is synthesized)
agtctgctgctggccatttaacaactcttttgtctttatatttctcggtgtttgatctcaattgtttatgcttttatttttaggtataacttgcatttagtaaaatgtacacttcttaaa

SEQ ID NO: 586191 - DNA, 120 bp, Artificial Sequence
  ENSG00000172578_70 (sequence is synthesized)
tgccgtggtggtcagctttctgatcactttacttccaaggagaacagttttggtggctctgagcttccctcctcctaggagctattgcttcagtattgctgatcaagtcacagaaacaat

SEQ ID NO: 586192 - DNA, 120 bp, Artificial Sequence
  ENSG00000172578_71 (sequence is synthesized)
gtccttccaagtggtgaaggtctgtgtgggcacctgtcctaatttggacagaaccccagatgtgcacagaggctcaccctgtccttagatgggagatctcttggtctgcatgtcttggtg

SEQ ID NO: 586193 - DNA, 120 bp, Artificial Sequence
  ENSG00000172578_72 (sequence is synthesized)
tagagtcttgtctcctcagatgccttctctcctattcttctccacactggacacatgcggatcactttactacaccgtttatgaacccagagtgatttggtcatgttagaaatcatccct

SEQ ID NO: 586194 - DNA, 120 bp, Artificial Sequence
  ENSG00000172578_73 (sequence is synthesized)
tctttattttcccatggatgatgagccacttacaggcctgcatgtcagactttagtaatgcaacctcaggtatatatcagacccaggaaaagaaaagccacctcatctcatttccaggtt

SEQ ID NO: 586195 - DNA, 120 bp, Artificial Sequence
  ENSG00000172578_74 (sequence is synthesized)
attcccagtttcaaattttctttctccttatcagatcagatgtccaagcatgttccagcttaatggaatgtacaacacagtcattgtaggcacaagcaaaggtagccaggtcaccacatc

SEQ ID NO: 586196 - DNA, 120 bp, Artificial Sequence
  ENSG00000172578_75 (sequence is synthesized)
tagccaagactgtcagcctgaaaagtgctatattgagagcccttaacatgtatgggggacatgcccaggatcttctcaaaacaagccctatcacagagctgctccacgatctaaaaggat

SEQ ID NO: 586197 - DNA, 120 bp, Artificial Sequence
  ENSG00000172578_76 (sequence is synthesized)
cctgtaaataaatgggcaagaggctcttggaagtctcctttactgtcctggggttcacaggatagaagcacacgtctgacttaatctcaaaatcctcaatgctgccccataatggaagag

SEQ ID NO: 586198 - DNA, 120 bp, Artificial Sequence
  ENSG00000172578_77 (sequence is synthesized)
atgaatgaatatgaatatgcatgtataaaacatcattttcctcccacactggctgacttcatctgtataaacttattcttgcctgagagctggattccgggagaggctggcacatcccaa

SEQ ID NO: 586199 - DNA, 120 bp, Artificial Sequence
  ENSG00000172578_78 (sequence is synthesized)
cacacagcttgctctagcttgcgtggagcctggagggagggtgggaaatgcatgctttcattcttgctgtgtcttaagaggagtcaagcccatgggccttgtgactataggcaaaagatg

SEQ ID NO: 586200 - DNA, 120 bp, Artificial Sequence
  ENSG00000172578_79 (sequence is synthesized)
cccagttctgtgtcccggagctctgtcctgtatcctgggagctactgcagcaatctgggcagcatgactgacagcttcttcttgtgccctgtgcctctacaggccgcacccctccttgtc

SEQ ID NO: 586201 - DNA, 120 bp, Artificial Sequence
  ENSG00000172578_80 (sequence is synthesized)
gagcgcctggctgcagcacgtaaacggtgtgtcgcggtgtctccagcgctggcaactcactgcccctaggacccactctggctttcaggagagccatcaatcgactgtttctcttggcaa

SEQ ID NO: 586202 - DNA, 120 bp, Artificial Sequence
  ENSG00000172578_81 (sequence is synthesized)
gagggtagacttggcctaatcagaagttgaattttagtggttaagagggaagaaaccagaaaaatggagcgatgcccaccgtgtttcctccctctcctcaggtggggccatgagagcgct

SEQ ID NO: 586203 - DNA, 120 bp, Artificial Sequence
  ENSG00000172586_0 (sequence is synthesized)
gcaaagcctgccgggagcttggtgcgctatggcgacacccagcctgcggggtcgtctggcgcggtttgggaacccgcggaagcctgtgctgaagcccaataaacctctcattctagctaa

SEQ ID NO: 586204 - DNA, 120 bp, Artificial Sequence
  ENSG00000172586_1 (sequence is synthesized)
ccgcgtcggggagcggcgccgggagaagggcgaggcgacttgcatcacggagatgtcggtgatgatggcttgctggaagcagaatgaattccgcgacgatgcgtgcagaaaagagatcca

SEQ ID NO: 586205 - DNA, 120 bp, Artificial Sequence
  ENSG00000172586_2 (sequence is synthesized)
gggcttcctcgattgtgccgcgagggctcaggaagcccgaaagatgagatcaatacaggaaaccctgggagagtctgggagtttacttccaaataaattgaataagttgttacagaggtt

SEQ ID NO: 586206 - DNA, 120 bp, Artificial Sequence
  ENSG00000172586_3 (sequence is synthesized)
ccttacctcagctgaaaatggacaagtattttcaatgactgaaatatagcttctgacaactatgcagaggcattttagagacattggcattgccatgccctctttggagggtagaagagg

SEQ ID NO: 586207 - DNA, 120 bp, Artificial Sequence
  ENSG00000172586_4 (sequence is synthesized)
caaaacacttttttcaccctttggaatcatagtatgggtagaagttatgatttatcttgaaataaaatcctctgaacagaacttggccttttgttgtgaattaggtactctcttcattct

SEQ ID NO: 586208 - DNA, 120 bp, Artificial Sequence
  ENSG00000172586_5 (sequence is synthesized)
tgagcctcccctagaccctggaaattctttccttcctgatttgccctaggagcaggacaaataccgttgtattgtctttccctgcatttgaagtcttttacaccatttagtgcccttgct

SEQ ID NO: 586209 - DNA, 120 bp, Artificial Sequence
  ENSG00000172586_6 (sequence is synthesized)
tttggatgcaataaggaagttgaagttgccttcgtctgtaaatacttagtgattgcctattttgtgcgtagtccctgcaaggtgctctctgaataataaagttaacaaactggtgaccta

SEQ ID NO: 586210 - DNA, 120 bp, Artificial Sequence
  ENSG00000172586_7 (sequence is synthesized)
ctttcattcatttgggaggtatattattcacgccaaagtgggaaaggttacagttttgaaggctgtgtgatcttgacggatttattcattgctctgaactttcgagttactgtacgtaaa

SEQ ID NO: 586211 - DNA, 120 bp, Artificial Sequence
  ENSG00000172586_8 (sequence is synthesized)
atgaggctaaccaataccaccttaaagaatgttgtgagtgtcagatgaagtaatgaatgggaaaatcattttgaaaaatgtaaattgctgctcaagtagacattattgtgtgaaatagaa

SEQ ID NO: 586212 - DNA, 120 bp, Artificial Sequence
  ENSG00000172586_9 (sequence is synthesized)
aaagagactaaaactaaataatgacaatagtttggtttcctgtctaggcttaattgttagctgagatagtagcttctgaacatagtctcatttgtaggtcccaacgcccttttgttgaaa

SEQ ID NO: 586213 - DNA, 120 bp, Artificial Sequence
  ENSG00000172586_10 (sequence is synthesized)
agaggctgacatagatctctccaggctggttaacatcttcatgtgctttagggcattgtgagaactatgggcctacatcaggacaaacttgattgattgattggttttttgggtcagatc

SEQ ID NO: 586214 - DNA, 120 bp, Artificial Sequence
  ENSG00000172590_0 (sequence is synthesized)
ggctaccccggctactcctgctcagcatggctgctttagggactgttctcttcagtgtccggaggctgcactgcagcgtagccgcttgggcgggcggccagtggcgactacagcagggac

SEQ ID NO: 586215 - DNA, 120 bp, Artificial Sequence
  ENSG00000172590_1 (sequence is synthesized)
tggctgccaacccctccggctacgggccccttaccgagctcccagactggtcatatgcggatggccgccctgctcccccaatgaaaggccagcttcgaagaaaagctgaaagggagacgt

SEQ ID NO: 586216 - DNA, 120 bp, Artificial Sequence
  ENSG00000172590_2 (sequence is synthesized)
ttgcaagacgagttgtactgctgtcacaggaaatggacgctggattacaagcatggcagctcaggcagcagaagttgcaggaagaacaaaggaagcaggaaaatgctcttaaacccaaag

SEQ ID NO: 586217 - DNA, 120 bp, Artificial Sequence
  ENSG00000172590_3 (sequence is synthesized)
gggcttcactgaagagcccacttccaagtcaataaaaagcaactcctgcctcccttcctcaccctgtctctggatttcttttctatcacctagatgcttcatccagccagaagatagcct

SEQ ID NO: 586218 - DNA, 120 bp, Artificial Sequence
  ENSG00000172590_4 (sequence is synthesized)
agctgggacaccaagaacaagctgttagatcactgcctgggaggcttggcttagtactctcatctctggttccattccagttcagctaagtcttgctttaaaatttttacctcctagctg

SEQ ID NO: 586219 - DNA, 67 bp, Artificial Sequence
  ENSG00000172590_5 (sequence is synthesized)
cagcctggtcaacatggtgaaaccctgtccctactaaagatacaaacaattagccgggcgtggtggg

SEQ ID NO: 586220 - DNA, 120 bp, Artificial Sequence
  ENSG00000172590_6 (sequence is synthesized)
actccgtctcaaaaaaaaaaaaaaatttacctcctttgcaggccataggactagcccaactatgagaaatagctgttctgtgaacgtgaaaaggggacagcagttttcccagttttggcc

SEQ ID NO: 586221 - DNA, 120 bp, Artificial Sequence
  ENSG00000172590_7 (sequence is synthesized)
tgaacgtgaaaaggggacagcagttttcccagttttggccaggcagtcaagcctttaacagctcatgcacagtttaggccatgtacagctggcatctaataaatgttttcatgaaaaaga

SEQ ID NO: 586222 - DNA, 120 bp, Artificial Sequence
  ENSG00000172590_8 (sequence is synthesized)
tggctgctttagggactgttctcttcagtgagtgggtatagatagggaccgtggactcgggggccctttggggacgggcacaggacccctgatccggctgcgcggcctctcccccaactc

SEQ ID NO: 586223 - DNA, 120 bp, Artificial Sequence
  ENSG00000172590_9 (sequence is synthesized)
ctacttccggctaccccggctactcctgctcagcatggctgctttagggactgttctcttcagtgagtgggtgtccggaggctgcactgcagcgtagccgcttgggcgggcggccagtgg

SEQ ID NO: 586224 - DNA, 120 bp, Artificial Sequence
  ENSG00000172590_10 (sequence is synthesized)
ctagagggaacgcccctggacggggagctgggggtatcaaggtgggggcgtgtaaaagtgtttaactttttatttggaaaacggaatttggggaaagaaaccctcttgtttattttgtag

SEQ ID NO: 586225 - DNA, 120 bp, Artificial Sequence
  ENSG00000172590_11 (sequence is synthesized)
attgcatttcgactaaggaaggtaaagctaaacaggatcttggcttgtggagataagcagaagataattctgacttggggccgccagggtggaagggggtgacaagacttctgcgttttt

SEQ ID NO: 586226 - DNA, 120 bp, Artificial Sequence
  ENSG00000172590_12 (sequence is synthesized)
caaagggggacatttttttttaaccaagaaccacttttctctgtggttagtgaattttcagtatttggtaccaaatgcagggagagctctttgaaaagctgcagaaataagcgtctcaga

SEQ ID NO: 586227 - DNA, 120 bp, Artificial Sequence
  ENSG00000172590_13 (sequence is synthesized)
ggggtagaaggatgaagactatggatggcaggctcccttcagaaaattcttttacctttacttacaaaagagagagggagggagaataaatattagccctagaagggagaaccttagaga

SEQ ID NO: 586228 - DNA, 120 bp, Artificial Sequence
  ENSG00000172590_14 (sequence is synthesized)
agttgaagctactccccattctccttatgagactccagtgtacaagtaggaaatttgaggcctacagaagtgaattgcacatgatcatacagctaggtagtagcaaatccaggactagaa

SEQ ID NO: 586229 - DNA, 120 bp, Artificial Sequence
  ENSG00000172590_15 (sequence is synthesized)
cataggccagtcctccttgacaacacagagatctgaatatttaataccctattgttgctctctaggggtatgatcctgcttaattggataattggtgactgaggaagatggtgaagattt

SEQ ID NO: 586230 - DNA, 69 bp, Artificial Sequence
  ENSG00000172590_16 (sequence is synthesized)
ctgaagtgcagtggcatgatcatcccccaagtaggtgggaccacaggcacacaccaccattcctggcta

SEQ ID NO: 586231 - DNA, 120 bp, Artificial Sequence
  ENSG00000172590_17 (sequence is synthesized)
agtaggtgggaccacaggcacacaccaccattcctggctaatttttttttttaacttttagtagagacaggctcttgctatgttgcccaagctggtcttgtactccttagctcaagtgat

SEQ ID NO: 586232 - DNA, 120 bp, Artificial Sequence
  ENSG00000172590_18 (sequence is synthesized)
ggcatgagccaccacgcccagcctatggaccttattcttaatccaggcttcccttctcgctaagtttgtggtcttggacaaattacttaattttatcttagtctcagtttccatatctgt

SEQ ID NO: 586233 - DNA, 120 bp, Artificial Sequence
  ENSG00000172590_19 (sequence is synthesized)
aattttatcttagtctcagtttccatatctgtaaaagaatacctatctcatgtggttcttttaaggataaaatgaaacaaccaatgtaaagcatgtggcatacacaatattggttcccct

SEQ ID NO: 586234 - DNA, 120 bp, Artificial Sequence
  ENSG00000172590_20 (sequence is synthesized)
tcctggtaaataacacctcttctctgtcttgccttcaaacttttgggcagagttttcactctgtttctttctttgcggaaagtaaactacttgggttagatactgcatcttttcagcaag

SEQ ID NO: 586235 - DNA, 120 bp, Artificial Sequence
  ENSG00000172590_21 (sequence is synthesized)
tcagcaggtatttatggatttttattaacatgcttatgtgtctacactatactgtgaatagcaaaagctagcaacacagtccctgacccaaagaacttaaagtctaactgggacaaagca

SEQ ID NO: 586236 - DNA, 120 bp, Artificial Sequence
  ENSG00000172590_22 (sequence is synthesized)
ccctgacccaaagaacttaaagtctaactgggacaaagcatggactttttaaaaattaagtaatagtattcagggccatgcatctacagttccagatactcgggaggctgaggcaggaga

SEQ ID NO: 586237 - DNA, 80 bp, Artificial Sequence
  ENSG00000172590_23 (sequence is synthesized)
cttgtctcaaaaataataataaataatatttcaatactctgcgcctttccaaaaggacctgaggtagctaaataacactt

SEQ ID NO: 586238 - DNA, 120 bp, Artificial Sequence
  ENSG00000172590_24 (sequence is synthesized)
gctacgggccccttaccgagctcccagactggtcatatgcgggggtatgatcctgcttaattggataattggtgactgaggaagatggtgaagattttttctacttgttatttactagac

SEQ ID NO: 586239 - DNA, 120 bp, Artificial Sequence
  ENSG00000172590_25 (sequence is synthesized)
tggacatattttaggataattaagctacaatgtatatgaaatggaagagaggagctagagattggttcttcccttattcctatcacagtatttgcacaaggtgatgcagtccatctctaa

SEQ ID NO: 586240 - DNA, 120 bp, Artificial Sequence
  ENSG00000172594_0 (sequence is synthesized)
gtcttctgtctccgcctcaccctcaggcctgacggtccgagtggagctgcgggacagcccgaacctccaggtcagccccgcggccctccatggcgctggtgcgcgcactcgtctgctgcc

SEQ ID NO: 586241 - DNA, 120 bp, Artificial Sequence
  ENSG00000172594_1 (sequence is synthesized)
tgctgactgcctggcactgccgctccggcctcgggctgcccgtggcgcccgcaggcggcaggaatcctcctccggcgataggacagttttggcatgtgactgacttacacttagacccta

SEQ ID NO: 586242 - DNA, 120 bp, Artificial Sequence
  ENSG00000172594_2 (sequence is synthesized)
cttaccacatcacagatgaccacacaaaagtgtgtgcttcatctaaaggtgcaaatgcctccaaccctggcccttttggagatgttctgtgtgattctccatatcaacttattttgtcag

SEQ ID NO: 586243 - DNA, 120 bp, Artificial Sequence
  ENSG00000172594_3 (sequence is synthesized)
catttgattttattaaaaattctggacaagaagcatctttcatgatatggacaggggatagcccacctcatgttcctgtacctgaactctcaacagacactgttataaatgtgatcacta

SEQ ID NO: 586244 - DNA, 120 bp, Artificial Sequence
  ENSG00000172594_4 (sequence is synthesized)
atatgacaaccaccatccagagtctctttccaaatctccaggttttccctgcgctgggtaatcatgactattggccacaggatcaactgcctgtagtcaccagtaaagtgtacaatgcag

SEQ ID NO: 586245 - DNA, 120 bp, Artificial Sequence
  ENSG00000172594_5 (sequence is synthesized)
tagcaaacctctggaaaccatggctagatgaagaagctattagtactttaaggaaaggtggtttttattcacagaaagttacaactaatccaaaccttaggatcatcagtctaaacacaa

SEQ ID NO: 586246 - DNA, 120 bp, Artificial Sequence
  ENSG00000172594_6 (sequence is synthesized)
acttgtactacggcccaaatataatgacactgaacaagactgacccagccaaccagtttgaatggctagaaagtacattgaacaactctcagcagaataaggagaaggtgtatatcatag

SEQ ID NO: 586247 - DNA, 120 bp, Artificial Sequence
  ENSG00000172594_7 (sequence is synthesized)
tttcaaaaatacagtgatgtcattgcaggacaattttatggacacactcacagagacagcattatggttctttcagataaaaaaggaagtccagtaaattctttgtttgtggctcctgct

SEQ ID NO: 586248 - DNA, 120 bp, Artificial Sequence
  ENSG00000172594_8 (sequence is synthesized)
gttacaccagtgaagagtgttttagaaaaacagaccaacaatcctggtatcagactgtttcagtatgatcctcgtgattataaattattggatatgttgcagtattacttgaatctgaca

SEQ ID NO: 586249 - DNA, 120 bp, Artificial Sequence
  ENSG00000172594_9 (sequence is synthesized)
gaggcgaatctaaagggagagtccatctggaagctggagtatatcctgacccagacctacgacattgaagatttgcagccggaaagtttatatggattagctaaacaatttacaatccta

SEQ ID NO: 586250 - DNA, 120 bp, Artificial Sequence
  ENSG00000172594_10 (sequence is synthesized)
gacagtaagcagtttataaaatactacaattacttctttgtgagttatgacagcagtgtaacatgtgataagacatgtaaggcctttcagatttgtgcaattatgaatcttgataatatt

SEQ ID NO: 586251 - DNA, 120 bp, Artificial Sequence
  ENSG00000172594_11 (sequence is synthesized)
tcctatgcagattgcctcaaacagctttatataaagcacaattactagtatttcacagtttttgctaatagaaaatgctgattctgattctgagatcaatttgtgggaattttacataaa

SEQ ID NO: 586252 - DNA, 120 bp, Artificial Sequence
  ENSG00000172594_12 (sequence is synthesized)
tctttgttaattactgagtgggcaagtagacttcctgtctttgctttctttttttttttctttttgatgccttaatgtagatatctttatcattctgaattgtattatatatttaaagtg

SEQ ID NO: 586253 - DNA, 120 bp, Artificial Sequence
  ENSG00000172594_13 (sequence is synthesized)
ctcattaatagaatgatggatgtaaattggatgtaaatattcagtttatataattatatctaatttgtacccttgttgaaattgtcatttatacaataaagcgaattctttatctctaaa

SEQ ID NO: 586254 - DNA, 120 bp, Artificial Sequence
  ENSG00000172594_14 (sequence is synthesized)
accagtatgtcagtgtttgacatcaactgcaccactgatacacgagtcggaatttgagcttctacaagtacattccttcctaggccaaacactgacgctaagaaatacgagaacagatca

SEQ ID NO: 586255 - DNA, 120 bp, Artificial Sequence
  ENSG00000172594_15 (sequence is synthesized)
tcagaaatgcttaaagaatttttcctattagtagtgtcaaaattgtgacaataactagctagtgatagggcatgggaatgggtcttatagagggagaatatggtcttaatcctaaccatc

SEQ ID NO: 586256 - DNA, 120 bp, Artificial Sequence
  ENSG00000172594_16 (sequence is synthesized)
aagaaaggcaaagacaagtacttcggggactgtaaaagtaatcttttaatacttcatgagaagttgtatcaatagtgagttttcagaataaaattatccagtttgtggatgattaattta

SEQ ID NO: 586257 - DNA, 120 bp, Artificial Sequence
  ENSG00000172594_17 (sequence is synthesized)
tgttttccttcataatcttcttcaatttctcttttcttttgagtaatgttctggttcatttgcatgtccatgacaaggttagcaagtaaggttaatattgataaatatttactttttcca

SEQ ID NO: 586258 - DNA, 120 bp, Artificial Sequence
  ENSG00000172602_0 (sequence is synthesized)
agttggagggaggcagggaatctggcttgattggcgtgctgagacgcacctggcgcaaccctcccttctgaatcgaagttcaagtcccgcggacactgcaaccatgaaggagagacgggc

SEQ ID NO: 586259 - DNA, 120 bp, Artificial Sequence
  ENSG00000172602_1 (sequence is synthesized)
cccccagccagtcgtggccagatgtaagctcgttctggtcggggacgtgcagtgtgggaagaccgcgatgttgcaagtgttagcgaaggattgctatccagagacctatgtgcccaccgt

SEQ ID NO: 586260 - DNA, 120 bp, Artificial Sequence
  ENSG00000172602_2 (sequence is synthesized)
gttcgaaaattacacagcctgtttggagacagaggaacagagggtggagcttagtctctgggatacctcaggatctccctactacgataatgtccgtccactctgctacagcgactcgga

SEQ ID NO: 586261 - DNA, 120 bp, Artificial Sequence
  ENSG00000172602_3 (sequence is synthesized)
tgcagtattactatgttttgacatcagccgtccagagacagtggacagcgcactcaagaagtggaggacagaaatcctagattattgtcccagcacccgcgttttgctcattggctgcaa

SEQ ID NO: 586262 - DNA, 120 bp, Artificial Sequence
  ENSG00000172602_4 (sequence is synthesized)
gacagacctgcgaacagacctgagtactctgatggagctgtcccaccagaagcaggcgcccatctcctatgagcagggttgtgcaatagcaaagcagctgggtgcagaaatctacctgga

SEQ ID NO: 586263 - DNA, 120 bp, Artificial Sequence
  ENSG00000172602_5 (sequence is synthesized)
aggctcagctttcacctcagaaaagagcatccacagcatctttcggacggcatccatgctgtgtctgaacaagcctagcccactgccccagaagagccctgtccgaagcctctccaaacg

SEQ ID NO: 586264 - DNA, 120 bp, Artificial Sequence
  ENSG00000172602_6 (sequence is synthesized)
gaggggggagacaaccccctacttcctcccttggggtgcagaggcacggggagagggaggatgagacaatttaggacactggacatgagtttttcagatggccacggtgagggcttggaa

SEQ ID NO: 586265 - DNA, 120 bp, Artificial Sequence
  ENSG00000172602_7 (sequence is synthesized)
ggagacaggaatggggcgaggaaggagccaggcccggcatgaggacctgacgctgagagagaaccatcataccccaagccaggcactagattttggagggggcgactaccccagtgcccc

SEQ ID NO: 586266 - DNA, 120 bp, Artificial Sequence
  ENSG00000172602_8 (sequence is synthesized)
ccccgctccagaggaaggaaagctgtgggggacggggggcatgctggcctcatgggcttgggggcctacagcagcctcaccttcagcttcatgcctcttccacacagcgtttccatgcag

SEQ ID NO: 586267 - DNA, 120 bp, Artificial Sequence
  ENSG00000172602_9 (sequence is synthesized)
gtcaggggatgggaggggtccctgagcccttcccttcccctctaaggaggcagcaacggagagtggggaagtggagcggcagctcccttgggggcttagcccaggtgcttcgtaactgca

SEQ ID NO: 586268 - DNA, 120 bp, Artificial Sequence
  ENSG00000172602_10 (sequence is synthesized)
atcggaagtgcaggagctggtcagagccaatgagaaggaaacctcatctttgcatagcccatgcctcatggagaggtgacatcatacattcacatgcttctcacctaagtccccagggtc

SEQ ID NO: 586269 - DNA, 120 bp, Artificial Sequence
  ENSG00000172602_11 (sequence is synthesized)
caagggagaagccccagacccccttctcttgcagagtgtgggggtggtggtgctgcaggggcagggctgggtgggggtcaccagactttttctgcccttagggtagtacagctggcattt

SEQ ID NO: 586270 - DNA, 120 bp, Artificial Sequence
  ENSG00000172602_12 (sequence is synthesized)
gttttatagactcttgtctttggaattggggggagggggggagtgtttcaatctgttatatgttctgtgtttaatgaagaaaacctatttattaatgaaaaatataatacatataaagaa

SEQ ID NO: 586271 - DNA, 120 bp, Artificial Sequence
  ENSG00000172602_13 (sequence is synthesized)
ttgaggatggtattcccagggctttagggcttaggcctattggggaaggaaaacaccatggctcaccatcagctctttctggcctacaccaggatctccctactacgataatgtccgtcc

SEQ ID NO: 586272 - DNA, 120 bp, Artificial Sequence
  ENSG00000172602_14 (sequence is synthesized)
tctccctgcctgcccgccttggggtagatttccacctgctcaggagacgtggctcccccagccccagcccatcctcagccgctttctgaggctttaccatcctcagctgctttttggctg

SEQ ID NO: 586273 - DNA, 120 bp, Artificial Sequence
  ENSG00000172602_15 (sequence is synthesized)
cccagtcgctctgaactcatctcttctaccttcaagaaggaaaaggccaaaagctgttccattatgtgaagtgggggtcaccagactttttctgcccttagggtagtacagctggcattt

SEQ ID NO: 586274 - DNA, 81 bp, Artificial Sequence
  ENSG00000172602_16 (sequence is synthesized)
agcctgggcaacagagcgagactgtttactaatgccttggctctatacccagaatttttttttccttttcctttttttttt

SEQ ID NO: 586275 - DNA, 120 bp, Artificial Sequence
  ENSG00000172602_17 (sequence is synthesized)
ttttccttttttttttttttttttttccagagacagggtcttactctgtcacccagaatgaagtgcagtggtgtgatcctagctcactacagtgcagaactcctgggctcaagggatcct

SEQ ID NO: 586276 - DNA, 120 bp, Artificial Sequence
  ENSG00000172602_18 (sequence is synthesized)
tcctgggctcaagggatcctctctagtatttgagactatagttgtgtgcccacttccagtgaatttttaaacattttttaaaagtgtttattattattttattatctttatttttgagat

SEQ ID NO: 586277 - DNA, 120 bp, Artificial Sequence
  ENSG00000172602_19 (sequence is synthesized)
ttatttttgtaattccaaagcgctgggattatgggtgtaagccaccgcgcccggccacctaggctggtcttgaactcctggcctcctcaagtgatcctcccatcacagcctcctgagtag

SEQ ID NO: 586278 - DNA, 120 bp, Artificial Sequence
  ENSG00000172602_20 (sequence is synthesized)
ctgggattagaggcactagccactgccccagctatccccagaaattctaatttagtttggcatcaatatagttttaagagtattccagatgatttataatgtgcagtcaggcatcgtctt

SEQ ID NO: 586279 - DNA, 120 bp, Artificial Sequence
  ENSG00000172602_21 (sequence is synthesized)
aaaaaaaaaaaaaaaaagaaaagataatcgaataatctgcagagggtggtgtttggagactggcagctgggtcccctctggagtggccctggggagtgacgcacagaggcagcgtcccag

SEQ ID NO: 586280 - DNA, 120 bp, Artificial Sequence
  ENSG00000172602_22 (sequence is synthesized)
accttgtcatgaatgccctcttgtataacatcaagaaatggaagccagggaaggaagagatttgcccaaggccacaccattagctacagctctgggactggaacttgggtctccttaccc

SEQ ID NO: 586281 - DNA, 120 bp, Artificial Sequence
  ENSG00000172602_23 (sequence is synthesized)
cactgcctcccgccctttttgttatcccatgctgccttgccagaggccccgcaagggagggtggtattgaagactcaggaagcagaggacggagagtcagagaacctttaggtgatacgg

SEQ ID NO: 586282 - DNA, 120 bp, Artificial Sequence
  ENSG00000172602_24 (sequence is synthesized)
tatgagggtcaggcatgggaccttttggaggcagcttctatagaccctgatcccagtcccactgagaatgggcaagccaggcaggtctgagctgagctgctggtatgaaatgcttaggtc

SEQ ID NO: 586283 - DNA, 120 bp, Artificial Sequence
  ENSG00000172602_25 (sequence is synthesized)
tgggcagatccaccaatgctgaggagtcctaggaaaccttgtgtatctagcatagtatagaagatgctgggatcatgttcttcccttgagaagagactggttggcttccccctggcattc

SEQ ID NO: 586284 - DNA, 120 bp, Artificial Sequence
  ENSG00000172602_26 (sequence is synthesized)
gaattgcccttgtgccctctctggtgactgagccatagactgggggaacaggctcctgggtcagcactctgggggccccaaaggcctcatgggcaggaaaatgatgtaattagtgcaacg

SEQ ID NO: 586285 - DNA, 120 bp, Artificial Sequence
  ENSG00000172602_27 (sequence is synthesized)
gtgatgctgtgactcagagggaggactgggctggtgatgagtgaggtgatgtgtgtgacgttgccagccaagcttctcctggtatctgtctgccactaactctccttccttcctccttct

SEQ ID NO: 586286 - DNA, 120 bp, Artificial Sequence
  ENSG00000172613_0 (sequence is synthesized)
ggacccggaggtcgcggagagctgggcagtgttggccgctggcggagcgctggggcagcatgaagtgcctggtcacgggcggcaacgtgaaggtgctcggcaaggccgtccactccctgt

SEQ ID NO: 586287 - DNA, 120 bp, Artificial Sequence
  ENSG00000172613_1 (sequence is synthesized)
cccgcatcggggacgagctctacctggaacccttggaggacgggctctccctccggacggtgaactcctcccgctctgcctatgcctgctttctctttgccccgctcttcttccagcaat

SEQ ID NO: 586288 - DNA, 120 bp, Artificial Sequence
  ENSG00000172613_2 (sequence is synthesized)
accaggcagccacccctggtcaggacctgctgcgctgtaagatcctgatgaagtctttcctgtctgtcttccgctcactggcgatgctggagaagacggtggaaaaatgctgcatctccc

SEQ ID NO: 586289 - DNA, 120 bp, Artificial Sequence
  ENSG00000172613_3 (sequence is synthesized)
tgaatggccggagcagccgcctggtggtccagctgcattgcaagttcggggtgcggaagactcacaacctgtccttccaggactgtgagtccctgcaggccgtcttcgacccagcctcgt

SEQ ID NO: 586290 - DNA, 120 bp, Artificial Sequence
  ENSG00000172613_4 (sequence is synthesized)
gcccccacatgctccgcgccccagcacgggttctgggggaggctgttctgcccttctctcctgcactggctgaagtgacgctgggcattggccgtggccgcagggtcatcctgcgcagct

SEQ ID NO: 586291 - DNA, 120 bp, Artificial Sequence
  ENSG00000172613_5 (sequence is synthesized)
accacgaggaggaggcagacagcactgccaaagccatggtgactgagatgtgccttggagaggaggatttccagcagctgcaggcccaggaaggggtggccatcactttctgcctcaagg

SEQ ID NO: 586292 - DNA, 120 bp, Artificial Sequence
  ENSG00000172613_6 (sequence is synthesized)
aattccgggggctcctgagctttgcagagtcagcaaacttgaatcttagcattcattttgatgctccaggcaggcccgccatcttcaccatcaaggactctttgctggacggccactttg

SEQ ID NO: 586293 - DNA, 120 bp, Artificial Sequence
  ENSG00000172613_7 (sequence is synthesized)
tcttggccacactctcagacaccgactcgcactcccaggacctgggctccccagagcgtcaccagccagtgcctcagctccaggctcacagcacaccccacccggacgactttgccaatg

SEQ ID NO: 586294 - DNA, 120 bp, Artificial Sequence
  ENSG00000172613_8 (sequence is synthesized)
tgagggctcgcgggtgctgccctccatttccctttcacctggcccccagccccccaagagccccggtccccactccgaggaggaagatgaggctgagcccagtacagtgcctgggactcc

SEQ ID NO: 586295 - DNA, 120 bp, Artificial Sequence
  ENSG00000172613_9 (sequence is synthesized)
cccacccaagaagttccgctcactgttcttcggctccatcctggcccctgtacgctccccccagggccccagccctgtgctggcggaagacagtgagggtgaaggctgaaccaagaacct

SEQ ID NO: 586296 - DNA, 120 bp, Artificial Sequence
  ENSG00000172613_10 (sequence is synthesized)
gaagcctgtacccagaggccttggactagacgaagccccagccagtggcagaactgggtctctcagccctggggatcagaaaggtgggcttgctggagctgagctgtttcactgcctctc

SEQ ID NO: 586297 - DNA, 120 bp, Artificial Sequence
  ENSG00000172613_11 (sequence is synthesized)
gcaggccccagctggctgtcactgtaaagctgtcccacagcggtcgggcctgggccgttatctccccacaacccccagccaatcaggactttccagacttggccctgaactactgacgtt

SEQ ID NO: 586298 - DNA, 120 bp, Artificial Sequence
  ENSG00000172613_12 (sequence is synthesized)
cctacctcttatttctcattgagcctcaggctatactccagctggccaaggctggaaacctgtctccctcaggctcaccttcctaaggaaaatgtcatagtaggtgctgctggcccctgg

SEQ ID NO: 586299 - DNA, 120 bp, Artificial Sequence
  ENSG00000172613_13 (sequence is synthesized)
tgatccagcttctctgccaatcatgacctgttccttcctgaagtcctgggcatgcatctgggacccccgtggagctgacaagttttccttgctttcctgatactctttggcgctgacttg

SEQ ID NO: 586300 - DNA, 120 bp, Artificial Sequence
  ENSG00000172613_14 (sequence is synthesized)
gaattctaagagccttggacccgagtgtgtggctagggttgccctggctggggcccggtgccgagactcccaagcggctctgtgcagaagagctgccaggcagtgtcttagatgtgagac

SEQ ID NO: 586301 - DNA, 120 bp, Artificial Sequence
  ENSG00000172613_15 (sequence is synthesized)
ggaggccatggcgagaatccagctttgacctttattcaagagaccagatgggttgccccaggatccggctgccagccctgaggccaagcacggctggagacccacgacctggcctgccgt

SEQ ID NO: 586302 - DNA, 120 bp, Artificial Sequence
  ENSG00000172613_16 (sequence is synthesized)
tgccctgagctgcagcctcggccccaggatcctgctcacagtcaccgcaggtgcaggcaggaagcagccctgggggactggacgctgctattgattcattaaaaaaagaaaagaaaaata

SEQ ID NO: 586303 - DNA, 120 bp, Artificial Sequence
  ENSG00000172613_17 (sequence is synthesized)
cccggacccggaggtcgcggagagctgggcagtgttggccgctggcggagcgctggggcagcatgaagtgcctggtcacgggcggcaacgtgaagggtgagtgcaggtcggcctggcagc

SEQ ID NO: 586304 - DNA, 120 bp, Artificial Sequence
  ENSG00000172613_18 (sequence is synthesized)
aggtctttcaaggcattccaagcataaggaagagcatgaatgaggcctagaaggatgccagtgcccgaggtgacgtgggagcccttttcccagagttacatgctgggcccatgatgggtg

SEQ ID NO: 586305 - DNA, 120 bp, Artificial Sequence
  ENSG00000172613_19 (sequence is synthesized)
tgggcctgcatgggacaggagagcttgttgcagagatgtgatgctaggctgaggtgtcttatcccatgcagtctttcctgtctgtcttccgctcactggcgatgctggagaagacggtgg

SEQ ID NO: 586306 - DNA, 120 bp, Artificial Sequence
  ENSG00000172613_20 (sequence is synthesized)
cccacagctgcgtcctctctgaccttcgcaatccggtgcgcggcccgcggaacgccccgatctccaggggcacggaaggccgaggcgtgccgggggagccaggagcagctggctggcggg

SEQ ID NO: 586307 - DNA, 120 bp, Artificial Sequence
  ENSG00000172613_21 (sequence is synthesized)
gacaacgccatccccagcacacatccacctggggcagccagaaagcactggtttgcaggaactgagggctgcagctctgaaacagggacccaggccagggtcctcaaggtcatagaaccc

SEQ ID NO: 586308 - DNA, 120 bp, Artificial Sequence
  ENSG00000172613_22 (sequence is synthesized)
cataaccccattaggtgtcaggggcagaaacaggactgtgtgaagattcacagcctccacctcccttgccttcacggagcttcggcatctacccttattccaggcggctgctcaggggca

SEQ ID NO: 586309 - DNA, 120 bp, Artificial Sequence
  ENSG00000172613_23 (sequence is synthesized)
ccgttctacccctttctgcctggagaaactgccgtttttccttaaaggatcctcgaagccggaaggagcagccacctcccactcccggctgctgcaagcaagctgctttgacttctttct

SEQ ID NO: 586310 - DNA, 120 bp, Artificial Sequence
  ENSG00000172613_24 (sequence is synthesized)
ctccccggtcacgtgacaccccggacaacgtgcgccgtcacgtgacggcagagcctgtgagcgtttttctcacgtgacggaggcgcctgcacgtggaccaatggggaggcgggggcgggg

SEQ ID NO: 586311 - DNA, 120 bp, Artificial Sequence
  ENSG00000172613_25 (sequence is synthesized)
ccggcaggggcggtgcgcgggaagggaccccggacccggaggtcgcggagagctgggcagtgttggccgctggcggagcgctggggcagcatgaagtgcctggtcacgggcggcaacgtg

SEQ ID NO: 586312 - DNA, 120 bp, Artificial Sequence
  ENSG00000172613_26 (sequence is synthesized)
agacacgtgcaagcccaatccatgcaaaacacagggagggccatggtaaaagcatcacagcggggacctgagagggtggtgacgctcaagttcgtcaagaaaggtaagcacgtcttttgg

SEQ ID NO: 586313 - DNA, 120 bp, Artificial Sequence
  ENSG00000172613_27 (sequence is synthesized)
aggggctcctgagctttgcagagtcagcaaacttgaatcttagcattcattttgatgctccaggcaggcccgccatcttcaccatcaaggactctttgctggacggccactttgtcttgg

SEQ ID NO: 586314 - DNA, 120 bp, Artificial Sequence
  ENSG00000172613_28 (sequence is synthesized)
ctggccgcttgactcagctaagcgcgaaggtgttgtttcttcctgaggtgcgctggggctgggacccggtctgcagaaggtccaggggatggcgtcgggggattgaggagaggagaccaa

SEQ ID NO: 586315 - DNA, 120 bp, Artificial Sequence
  ENSG00000172613_29 (sequence is synthesized)
gccggccttgcctccgggaccagcgcttccaaattctctggggcgtcccggcgcgcacacgctcctgaggcctcggcgttctgaggaaaggggctggcgtggcgacccgggtcctcgagg

SEQ ID NO: 586316 - DNA, 120 bp, Artificial Sequence
  ENSG00000172638_0 (sequence is synthesized)
cgtccagggagctgtgccgtccgcccgtccgtctgcccgcaggcattgcccgagccagccgagccgccagagccgcgggccgcgggggtgtcgcgggcccaaccccaggatgctcccctg

SEQ ID NO: 586317 - DNA, 120 bp, Artificial Sequence
  ENSG00000172638_1 (sequence is synthesized)
ccaggatgctcccctgcgcctcctgcctacccgggtctctactgctctgggcgctgctactgttgctcttgggatcagcttctcctcaggattctgaagagcccgacagctacacggaat

SEQ ID NO: 586318 - DNA, 120 bp, Artificial Sequence
  ENSG00000172638_2 (sequence is synthesized)
gcacagatggctatgagtgggacccagacagccagcactgccgggatgtcaacgagtgtctgaccatccctgaggcctgcaagggggaaatgaagtgcatcaaccactacgggggctact

SEQ ID NO: 586319 - DNA, 120 bp, Artificial Sequence
  ENSG00000172638_3 (sequence is synthesized)
tgtgcctgccccgctccgctgccgtcatcaacgacctacacggcgagggacccccgccaccagtgcctcccgctcaacaccccaacccctgcccaccaggctatgagcccgacgatcagg

SEQ ID NO: 586320 - DNA, 120 bp, Artificial Sequence
  ENSG00000172638_4 (sequence is synthesized)
acagctgtgtggatgtggacgagtgtgcccaggccctgcacgactgtcgccccagccaggactgccataacttgcctggctcctatcagtgcacctgccctgatggttaccgcaagatcg

SEQ ID NO: 586321 - DNA, 120 bp, Artificial Sequence
  ENSG00000172638_5 (sequence is synthesized)
ggcccgagtgtgtggacatagacgagtgccgctaccgctactgccagcaccgctgcgtgaacctgcctggctccttccgctgccagtgcgagccgggcttccagctggggcctaacaacc

SEQ ID NO: 586322 - DNA, 120 bp, Artificial Sequence
  ENSG00000172638_6 (sequence is synthesized)
gctcctgtgttgatgtgaacgagtgtgacatgggggccccatgcgagcagcgctgcttcaactcctatgggaccttcctgtgtcgctgccaccagggctatgagctgcatcgggatggct

SEQ ID NO: 586323 - DNA, 120 bp, Artificial Sequence
  ENSG00000172638_7 (sequence is synthesized)
tctcctgcagtgatattgatgagtgtagctactccagctacctctgtcagtaccgctgcatcaacgagccaggccgtttctcctgccactgcccacagggttaccagctgctggccacac

SEQ ID NO: 586324 - DNA, 120 bp, Artificial Sequence
  ENSG00000172638_8 (sequence is synthesized)
attgatgagtgtgagtctggtgcgcaccagtgctccgaggcccaaacctgtgtcaacttccatgggggctaccgctgcgtggacaccaaccgctgcgtggagccctacatccaggtctct

SEQ ID NO: 586325 - DNA, 120 bp, Artificial Sequence
  ENSG00000172638_9 (sequence is synthesized)
gagaaccgctgtctctgcccggcctccaaccctctatgtcgagagcagccttcatccattgtgcaccgctacatgaccatcacctcggagcggagcgtgcccgctgacgtgttccagatc

SEQ ID NO: 586326 - DNA, 120 bp, Artificial Sequence
  ENSG00000172638_10 (sequence is synthesized)
caggcgacctccgtctaccccggtgcctacaatgcctttcagatccgtgctggaaactcgcagggggacttttacattaggcaaatcaacaacgtcagcgccatgctggtcctcgcccgg

SEQ ID NO: 586327 - DNA, 120 bp, Artificial Sequence
  ENSG00000172638_11 (sequence is synthesized)
ccggtgacgggcccccgggagtacgtgctggacctggagatggtcaccatgaattccctcatgagctaccgggccagctctgtactgaggctcaccgtctttgtaggggcctacaccttc

SEQ ID NO: 586328 - DNA, 120 bp, Artificial Sequence
  ENSG00000172638_12 (sequence is synthesized)
tgaggagcaggagggagccaccctccctgcagctaccctagctgaggagcctgttgtgaggggcagaatgagaaaggcaataaagggagaaagaaagtcctggtggctgaggtgggcggg

SEQ ID NO: 586329 - DNA, 120 bp, Artificial Sequence
  ENSG00000172638_13 (sequence is synthesized)
tcacactgcaggaagcctcaggctggggcagggtggcacttgggggggcaggccaagttcacctaaatgggggtctctatatgttcaggcccaggggcccccattgacaggagctgggag

SEQ ID NO: 586330 - DNA, 120 bp, Artificial Sequence
  ENSG00000172638_14 (sequence is synthesized)
ctctgcaccacgagcttcagtcaccccgagaggagaggaggtaacgaggagggcggactccaggccccggcccagagatttggacttggctggcttgcaggggtcctaagaaactccact

SEQ ID NO: 586331 - DNA, 120 bp, Artificial Sequence
  ENSG00000172638_15 (sequence is synthesized)
ctggacagcgccaggaggccctgggttccattcctaactctgcctcaaactgtacatttggataagccctagtagttccctgggcctgtttttctataaaacgaggcaactggactgtta

SEQ ID NO: 586332 - DNA, 120 bp, Artificial Sequence
  ENSG00000172638_16 (sequence is synthesized)
cagccagcactgccggggtgtgtgtgcctgggggaccaaacacccccaggaacccggaaagggattgatagctgctttccaagggacagccccacctccaagaactgccgtgggagccca

SEQ ID NO: 586333 - DNA, 120 bp, Artificial Sequence
  ENSG00000172638_17 (sequence is synthesized)
gaaacccaggaaaccttgtccctacccctcagaggagctggatcctgtacgccttctctgaaccactctcctgtcccagctctttgtctcatcacaacctgggagggtagcgtccccagg

SEQ ID NO: 586334 - DNA, 120 bp, Artificial Sequence
  ENSG00000172638_18 (sequence is synthesized)
ggtgggtaaggaggccccccatcttgggctgagctagggctagggccgtggggagggatagagacccacttgcaggccgagaatgagggcaacagtgggaacagctgccccatctccagc

SEQ ID NO: 586335 - DNA, 120 bp, Artificial Sequence
  ENSG00000172638_19 (sequence is synthesized)
cttggccaaccctggggaggggtcctgagcaggcagacttagcttgttgagcagagtgggaaggctttgctggggccacacatctcagagaaggccgagctgggttcctgcctccgctcc

SEQ ID NO: 586336 - DNA, 120 bp, Artificial Sequence
  ENSG00000172638_20 (sequence is synthesized)
ctcccctcggttgctgcagagacactgcaggaagtctgccttccagtgtctgtcccctgggagccacaggccttggaggaaggacagtccaggaatcagtgttgctggggatgtttggac

SEQ ID NO: 586337 - DNA, 120 bp, Artificial Sequence
  ENSG00000172638_21 (sequence is synthesized)
aggaccttatttcctgtgcaacccccaacatgtggttttagaggttaggggtgcctttcctgatggctccaggctggtgaactcttacgcgtgctgttgagagaaccgaatacaagtgtt

SEQ ID NO: 586338 - DNA, 120 bp, Artificial Sequence
  ENSG00000172638_22 (sequence is synthesized)
ccccattcaagccaggcttcacccccggcccctgccacctcaccctccgtcatcagacacagaggactgtagcggggagtgtttgggaggtgtcctggctgaccctgcctaattcagctc

SEQ ID NO: 586339 - DNA, 120 bp, Artificial Sequence
  ENSG00000172638_23 (sequence is synthesized)
ctcggacacaggattatgggtggtgaagccttgagtcccagccggctcgagcccacctgccctctgccctctgccctccgccctccttctcctgcctctatccctagacatagacgagtg

SEQ ID NO: 586340 - DNA, 120 bp, Artificial Sequence
  ENSG00000172638_24 (sequence is synthesized)
ctgtgtactcctctgtggacccccaggccctagctatgccgtgcctcctgccacacagttctccatttgaggcctccgcctcctgtcactgtgcacccagctgcctcctgggtactcgac

SEQ ID NO: 586341 - DNA, 120 bp, Artificial Sequence
  ENSG00000172638_25 (sequence is synthesized)
cccggctggctgtggagcactcccaggctagtgggggaggcacaaggagaggcagctacgtccttactgaagcctactggtgagactgaggatgtgggtgccacctgtcccacatatcag

SEQ ID NO: 586342 - DNA, 120 bp, Artificial Sequence
  ENSG00000172638_26 (sequence is synthesized)
gctcacctgcatttacctgcatttgaattttgcactaggacaagtcactcctctctgagcctgtttcttcttctataaaatgggttgtcttgaggattaggtgagagtgtgatagatggg

SEQ ID NO: 586343 - DNA, 120 bp, Artificial Sequence
  ENSG00000172638_27 (sequence is synthesized)
ctccagcaagtctcaagctgcagtgctttaaagtgaatgaactgccacttaatgagaacctgccctcgtagtgtattccctgacacacttggcctccttcctctcaagaatcctaggagt

SEQ ID NO: 586344 - DNA, 120 bp, Artificial Sequence
  ENSG00000172638_28 (sequence is synthesized)
tctgggcagagagaagtctgtgagctgcggcagcctgggcaaactttctttgaaccctccatctcccggctgaacttgtggcttgtctcatccccctctgtcttcctacattcagtctaa

SEQ ID NO: 586345 - DNA, 80 bp, Artificial Sequence
  ENSG00000172638_29 (sequence is synthesized)
gggcgtgggccggagtctcggccgagtccgcggcagcgtagcgcccacagaggcccgcgctcctcggccttcgccgcagg

SEQ ID NO: 586346 - DNA, 120 bp, Artificial Sequence
  ENSG00000172638_30 (sequence is synthesized)
gggacccgggcctgggacctgggcctgtgaggagtcggcccccagccctgggaggccccgaggcccaagcacggtcctgagcgggcagtggcgggggctgggctcgggctcccggtacag

SEQ ID NO: 586347 - DNA, 120 bp, Artificial Sequence
  ENSG00000172638_31 (sequence is synthesized)
aactcggccaggctgctatgccccacccctcccccaaagccccgcccccggaggcggggtttctgcaggaagacgggggtactctaaatgcaattctaacggttaaatgcaattctaacg

SEQ ID NO: 586348 - DNA, 80 bp, Artificial Sequence
  ENSG00000172638_32 (sequence is synthesized)
ccgggtaggggcctgtggctggccgggggcggagaagcggggggtcggggtccctccccctggcgctggctcaggaatcc

SEQ ID NO: 586349 - DNA, 120 bp, Artificial Sequence
  ENSG00000172638_33 (sequence is synthesized)
catatctccctccacgtttgttgggaggattacataaaaataatcacaaagtcctgggtaaatggtgactttcatgattcagctaagagaggttaagtgacccgcccaagctcatacagc

SEQ ID NO: 586350 - DNA, 120 bp, Artificial Sequence
  ENSG00000172638_34 (sequence is synthesized)
caggatgagatggggccagggctggatcccagacttcttacaccctgtaaactggcatgtaccccctatgttatgctttgctgcgggatgaggcctcactgctacctggcagcatgaggg

SEQ ID NO: 586351 - DNA, 120 bp, Artificial Sequence
  ENSG00000172638_35 (sequence is synthesized)
gaacaagagaaaggaaatgttctgcctgtgaagctcacagttagttggaggtgaccactgggtgctcaggttgactgtgggttgcaggaattgggcgttacagcacaagccagacccata

SEQ ID NO: 586352 - DNA, 120 bp, Artificial Sequence
  ENSG00000172638_36 (sequence is synthesized)
agactcatctagtctaacacactcattttactgattgggaaaatgagattcccctagatcagctggtgggattcacacccaagcctctagattcccagtaacttatttagtgtttcttcc

SEQ ID NO: 586353 - DNA, 120 bp, Artificial Sequence
  ENSG00000172640_0 (sequence is synthesized)
aattgggcttctgggaccaagtgggtaccttctattaccccacagctatacccttgtgcttttcccatcatctttcctcctcaaacaggccccagatgctaaggaatggcagcatagtga

SEQ ID NO: 586354 - DNA, 120 bp, Artificial Sequence
  ENSG00000172640_1 (sequence is synthesized)
cggaatttatcctcgtgggctttcagcagagctccacttccacacgagcattgctctttgccctcttcttggccctctacagcctcaccatggccatgaatggcctcatcatctttatca

SEQ ID NO: 586355 - DNA, 120 bp, Artificial Sequence
  ENSG00000172640_2 (sequence is synthesized)
cctcctggacagaccccaagctcaacagccccatgtacttcttcctcggccatctgtctctcctggatgtctgcttcatcaccactaccatcccacagatgttgatccacctcgtggtca

SEQ ID NO: 586356 - DNA, 120 bp, Artificial Sequence
  ENSG00000172640_3 (sequence is synthesized)
gggaccacattgtctcctttgtatgttgcatgacccagatgtactttgtcttctgtgttggtgtggccgagtgcatcctcttggctttcatggcctatgaccgttatgttgctatctgct

SEQ ID NO: 586357 - DNA, 120 bp, Artificial Sequence
  ENSG00000172640_4 (sequence is synthesized)
acccacttaactatgtcccgatcataagccagaaggtctgtgtcaggcttgtgggaactgcctggttctttgggctgatcaatggcatctttctcgagtatatttcattccgagagccct

SEQ ID NO: 586358 - DNA, 120 bp, Artificial Sequence
  ENSG00000172640_5 (sequence is synthesized)
ccatcgtggtaattctcagccccatggtgctcactgtcacttcctatgtgcacatcctggccaccatcctcagcaaagcctcctcctcaggtcgggggaagactttctctacttgtgcct

SEQ ID NO: 586359 - DNA, 120 bp, Artificial Sequence
  ENSG00000172640_6 (sequence is synthesized)
ctcacctgactgtggtcatctttctctacacttcagctatgttctcttacatgaacccccacagcacacatgggcctgacaaagacaaacctttctccctcctgtacaccatcattaccc

SEQ ID NO: 586360 - DNA, 120 bp, Artificial Sequence
  ENSG00000172640_7 (sequence is synthesized)
ccatgtgcaaccccatcatttatagtttccgcaacaaggaaattaaggaggccatggtgagggcacttggaagaaccaggctggcccagccacagtctgtctagcaggaaggccctgaaa

SEQ ID NO: 586361 - DNA, 120 bp, Artificial Sequence
  ENSG00000172640_8 (sequence is synthesized)
ggaaagctccttcacctggggaatgggagagttaccccatccccagccctggcagatgagtaactctcctatgctgaaaggctccaggaaagagcgttcatggcttccttggcactagaa

SEQ ID NO: 586362 - DNA, 120 bp, Artificial Sequence
  ENSG00000172640_9 (sequence is synthesized)
tcagacctgaaagttcctcctgatgtccaatgtcctgatgttatctctctgacttcacttccacattgttttttcttggaccttcctcgggagaatttcggattttccttagtttttttc

SEQ ID NO: 586363 - DNA, 120 bp, Artificial Sequence
  ENSG00000172650_0 (sequence is synthesized)
agcgggaagaccatctctgcaagtgcagcatagcctcggcctaggacagtgggagtgtgtggccaaagctgtgagcagaggcacaggtggtggcagacagtagaggcgccccatggggaa

SEQ ID NO: 586364 - DNA, 120 bp, Artificial Sequence
  ENSG00000172650_1 (sequence is synthesized)
catactgacctgttgtgtgcaccctagcgtcagcctcgagtttgaccagcaacaggggtcggtgtgtccctctgaatctgagatctatgaggcaggagctggggacaggatggcaggagc

SEQ ID NO: 586365 - DNA, 120 bp, Artificial Sequence
  ENSG00000172650_2 (sequence is synthesized)
gcccatggctgctgctgtgcagcctgctgaggtgaccgttgaagttggtgaggacctccacatgcaccacattcgtgaccaggagatgcctgaagctttggagtttagcctttctgccaa

SEQ ID NO: 586366 - DNA, 120 bp, Artificial Sequence
  ENSG00000172650_3 (sequence is synthesized)
agaagaagcaactgtacaaaccatgtatctactgagcgtttcagtcaacaatacagctcgtgttcgacaatattccttgatgacagcacagccagccagcattatcttacaatgacaata

SEQ ID NO: 586367 - DNA, 82 bp, Artificial Sequence
  ENSG00000172650_4 (sequence is synthesized)
ttgatgacagcacagccagccagcattatcttacaatgacaataatatctgtgaccttggagatacctcatcatatcacaca

SEQ ID NO: 586368 - DNA, 120 bp, Artificial Sequence
  ENSG00000172650_5 (sequence is synthesized)
gaacagaaatggaggtgggagtttaaataactattcctcctccattccatcgactcccagcaccagccaggaggaccctcagttcagtgttcctcccactgccaacacacccacccccgt

SEQ ID NO: 586369 - DNA, 120 bp, Artificial Sequence
  ENSG00000172650_6 (sequence is synthesized)
ttgcaagcggtccatgcgctggtccaacctgtttacatctgagaaagggagtcacccagacaaagagaggaaagccccggagaatcatgctgacaccatcgggagcggcagagccatccc

SEQ ID NO: 586370 - DNA, 120 bp, Artificial Sequence
  ENSG00000172650_7 (sequence is synthesized)
cattaaacagggcatgctcttaaagcgaagtgggaaatggctgaagacatggaaaaagaaatacgtcaccctgtgttccaatggcgtgctcacctattattcaagcttaggtgattatat

SEQ ID NO: 586371 - DNA, 120 bp, Artificial Sequence
  ENSG00000172650_8 (sequence is synthesized)
tggcctatccaaggacatggacaccgggctgggtgactccatatgcttcagccccagtatctccagcaccaccagccccaagctcaacccgcccccctctcctcatgccaataaaaagaa

SEQ ID NO: 586372 - DNA, 120 bp, Artificial Sequence
  ENSG00000172650_9 (sequence is synthesized)
acacctaaagaagaaaagcaccaacaactttatgattgtgtctgccactggccaaacatggcactttgaagccacgacgtatgaggagcgggatgcctgggtccaagccatccagagcca

SEQ ID NO: 586373 - DNA, 120 bp, Artificial Sequence
  ENSG00000172650_10 (sequence is synthesized)
gatcctggccagcctgcagtcatgcgagagcagtaaaagcaagtcccagctgaccagccagagcgaggccatggccctgcagtcgatccaaaacatgcgtgggaacgcccactgtgtgga

SEQ ID NO: 586374 - DNA, 120 bp, Artificial Sequence
  ENSG00000172650_11 (sequence is synthesized)
ctatgagacccagaatcctaagtgggccagtttgaacttgggagtcctcatgtgtattgaatgctcaggaatccaccgcagtcttggcacccgcctttcccgtgtgcgatctctggagct

SEQ ID NO: 586375 - DNA, 120 bp, Artificial Sequence
  ENSG00000172650_12 (sequence is synthesized)
ggatgactggccagttgagctcaggaaggttatgtcatctattggcaatgacctagccaacagcatctgggaagggagcagccaggggcagacaaaaccctcagtaaagtccacgaggga

SEQ ID NO: 586376 - DNA, 120 bp, Artificial Sequence
  ENSG00000172650_13 (sequence is synthesized)
agagaaggaacggtggatccgttccaaatatgaggagaagctctttctggccccactaccctgcactgagctgtccctgggccagcacctgctgcgggccaccgctgatgaggacctgca

SEQ ID NO: 586377 - DNA, 120 bp, Artificial Sequence
  ENSG00000172650_14 (sequence is synthesized)
gacagccatcctgctgctggcacatggctcccgtgaggaggtgaacgagacctgtggggagggagacggctgcacggcgctccatctggcctgccgcaaggggaatgtggtcctggcaca

SEQ ID NO: 586378 - DNA, 120 bp, Artificial Sequence
  ENSG00000172650_15 (sequence is synthesized)
gctcctgatctggtacggggtggacgtcatggcccgagatgcccacgggaacacagcgctgacctacgcccggcaggcctccagccaggagtgcatcaacgtgcttctgcagtacggctg

SEQ ID NO: 586379 - DNA, 120 bp, Artificial Sequence
  ENSG00000172650_16 (sequence is synthesized)
ccccgacgagtgcgtgtagtatctgttttatttgactgcagtctccttggtgcaaaaacaaaatgggaaaaataaggataactcagaatttcaaaaggaaatcacaaattcagctagtaa

SEQ ID NO: 586380 - DNA, 120 bp, Artificial Sequence
  ENSG00000172650_17 (sequence is synthesized)
tagcattttcagtacttttcataaactaagtaaatacacaaaatgttgatttttctgaccataagacatattttatgtccttttgccaaggtggatgtgttagtctcaggccctcctggc

SEQ ID NO: 586381 - DNA, 120 bp, Artificial Sequence
  ENSG00000172650_18 (sequence is synthesized)
gggcattctgtgccacatgcctgggctcccacctggggccagtgggcttcagtctgtaggtgactacagaaggaggaggagctccgtctgttctctcttcaggcagttgttgtgtctctc

SEQ ID NO: 586382 - DNA, 120 bp, Artificial Sequence
  ENSG00000172650_19 (sequence is synthesized)
agcgcttgttgggttcacaacctattaaataagccagctggtcttcaccctcccagacaagtcaactcaggggaggcagcagggtgtgggccttgacccgcagccctagccggggccggg

SEQ ID NO: 586383 - DNA, 120 bp, Artificial Sequence
  ENSG00000172650_20 (sequence is synthesized)
aatacagctcgtgttcgacaatattccttgatgacagcacagccagccagcattatcttacaatgacaataatatcgcactgagaagccttttaggaaaatcaggatggatgtgaggcat

SEQ ID NO: 586384 - DNA, 120 bp, Artificial Sequence
  ENSG00000172650_21 (sequence is synthesized)
gcatcccagaagattctgattttcaccccagctcaatcattccaaactttgctgctgattgaaatcacctgggaaacgtttaccaagaaccttgatgcccaaagccatacccaatactaa

SEQ ID NO: 586385 - DNA, 120 bp, Artificial Sequence
  ENSG00000172650_22 (sequence is synthesized)
taaattaaaatgtctcatgtggaagatgaggcagatattaaagcttctcaggcgattttaatgtgcagcaaagtttgagagccactgcttaatttgagtttaggacgagaaactgctcct

SEQ ID NO: 586386 - DNA, 120 bp, Artificial Sequence
  ENSG00000172650_23 (sequence is synthesized)
tttgagtttaggacgagaaactgctcctatttggtgggaccttgggcaagtcagttttaagtgtgaccttggagatacctcatcatatcacacaaagagatgcagatagatctttgagca

SEQ ID NO: 586387 - DNA, 120 bp, Artificial Sequence
  ENSG00000172661_0 (sequence is synthesized)
gtcacgccccgggcagcttggctggggctaggcttccggggctctgcggtcctcggcctgtgctggcagcctcggagcccaccgagccgggcggctgggatgatgaaccggacgaccccc

SEQ ID NO: 586388 - DNA, 120 bp, Artificial Sequence
  ENSG00000172661_1 (sequence is synthesized)
gaccaggagctggtgccggcgtcggagcccgtgtgggagcggccgtggtcggtggaggagatccgcaggagcagccagagctggtcgctggcggccgacgcgggcctactacagtttcta

SEQ ID NO: 586389 - DNA, 120 bp, Artificial Sequence
  ENSG00000172661_2 (sequence is synthesized)
caggaattctcacagcaaactatctctaggacccatgaaatcaagaaacaagtggacggactaatccgggaaaccaaagccacagattgtcgcctgcataatgtcttcaatgacttcctt

SEQ ID NO: 586390 - DNA, 120 bp, Artificial Sequence
  ENSG00000172661_3 (sequence is synthesized)
atgctctctaatacccagttcatagagaatcgtgtatatgatgaagaagtggaggagccagtactcaaggctgaggcagaaaaaacagagcaggagaagacacgagagcagaaagaagta

SEQ ID NO: 586391 - DNA, 120 bp, Artificial Sequence
  ENSG00000172661_4 (sequence is synthesized)
gatctcattcctaaagtccaggaggctgtgaactatggcttacaagtattggacagtgcctttgagcaacttgatatcaaagcaggaaactcagactccgaggaagatgatgctaatggg

SEQ ID NO: 586392 - DNA, 120 bp, Artificial Sequence
  ENSG00000172661_5 (sequence is synthesized)
cgggtggaactgatccttgaaccaaaggatctatacattgatcgtcctttaccatatctcattgggtcaaagctgttcatggaacaagaagatgtaggtcttggagagctgtccagtgaa

SEQ ID NO: 586393 - DNA, 120 bp, Artificial Sequence
  ENSG00000172661_6 (sequence is synthesized)
gaaggctctgtaggcagtgatcgtggcagtattgtggacactgaggaagagaaagaagaggaggagtcagatgaagattttgcccatcacagtgacaatgaacaaaaccagcacaccaca

SEQ ID NO: 586394 - DNA, 120 bp, Artificial Sequence
  ENSG00000172661_7 (sequence is synthesized)
caaatgagtgatgaggaagaggatgatgatggctgtgacctttttgctgactctgagaaggaggaggaagatattgaggacattgaagaaaatactagacctaaaagaagcagacctaca

SEQ ID NO: 586395 - DNA, 120 bp, Artificial Sequence
  ENSG00000172661_8 (sequence is synthesized)
tcgtttgcagatgagctggctgcccgcatcaagggggatgccatgggtcgagtggacgaggagccgacaaccttaccctcaggagaagcaaaacctcggaagacactcaaagagaagaag

SEQ ID NO: 586396 - DNA, 120 bp, Artificial Sequence
  ENSG00000172661_9 (sequence is synthesized)
gaaaggagaactccttcagacgatgaagaggataacttattcgcaccccccaagctgaccgacgaggacttctcgccatttggctctggaggtggcctgttcagtggcggcaaggggcta

SEQ ID NO: 586397 - DNA, 120 bp, Artificial Sequence
  ENSG00000172661_10 (sequence is synthesized)
tttgatgatgaggacgaggagagtgacctcttcacggaagcctcccaggatcggcaagctggagcctctgttaaggaggagtcttcatcatccaaacctggaaagaaaatcccagcagga

SEQ ID NO: 586398 - DNA, 120 bp, Artificial Sequence
  ENSG00000172661_11 (sequence is synthesized)
gctgtttctgtatttttaggagacacggatgtgtttggtgctgcctccgttccatcactgaaggagccacagaagcctgagcagcccactccaaggaaaagcccctatggtccccctccc

SEQ ID NO: 586399 - DNA, 120 bp, Artificial Sequence
  ENSG00000172661_12 (sequence is synthesized)
actggcctctttgatgatgatgatggtgatgatgatgacgactttttctcggcaccccacagcaaaccttctaaaacacgcaaagtccaatccactgccgatatctttggtgacgaagaa

SEQ ID NO: 586400 - DNA, 120 bp, Artificial Sequence
  ENSG00000172661_13 (sequence is synthesized)
ggagatctgttcaaagaaaaagccgtagcatcgccagaagccactgtgagtcagacagatgaaaataaagcaagagcagaaaaaaaggttaccttatcttacagcaaaaatctcaagccc

SEQ ID NO: 586401 - DNA, 120 bp, Artificial Sequence
  ENSG00000172661_14 (sequence is synthesized)
tcatcagaaacaaagactcaaaaaggcttattttcagatgaggaggactctgaggatttgttttcttctcaaagtgcgagtaacttaaaaggtgcatctctgctgcctggcaagctcccc

SEQ ID NO: 586402 - DNA, 120 bp, Artificial Sequence
  ENSG00000172661_15 (sequence is synthesized)
acgtcggtttccctgtttgatgatgaagatgaagaggataatctttttgggggtacagctgctaagaagcagacattgtctctacaagctcagagagaagagaaagcaaaagcctccgag

SEQ ID NO: 586403 - DNA, 120 bp, Artificial Sequence
  ENSG00000172661_16 (sequence is synthesized)
ctctccaaaaagaaagcatctgccctgttgttcagcagtgatgaggaggaccagtggaatattcctgcttcacagacccacttagcatctgacagcaggtctaaaggagaacccagggat

SEQ ID NO: 586404 - DNA, 120 bp, Artificial Sequence
  ENSG00000172661_17 (sequence is synthesized)
tctgggaccctccagagccaggaggccaaggctgtgaaaaagaccagtctctttgaggaagacaaagaagatgatctttttgccattgccaaggacagccaaaagaagacccagagagtg

SEQ ID NO: 586405 - DNA, 120 bp, Artificial Sequence
  ENSG00000172661_18 (sequence is synthesized)
tcactcctctttgaagacgatgttgatagcggaggctctctgtttggctctcctcccacatctgttcctcctgcaacaaagaaaaaagagactgtctctgaggcaccacctttgctgttc

SEQ ID NO: 586406 - DNA, 120 bp, Artificial Sequence
  ENSG00000172661_19 (sequence is synthesized)
gccaaggagtcattaaaatttgggagaactgatgtggctgagtcagaaaaggaaggacttttgactagatctgctcaggaaacagtcaagcattctgatttattttcttcatcatcccca

SEQ ID NO: 586407 - DNA, 120 bp, Artificial Sequence
  ENSG00000172661_20 (sequence is synthesized)
tgggacaaaggaaccaagcctagaaccaaaactgttcttagcttgtttgatgaggaagaggataaaatggaagatcaaaacattatccaggctccacagaaagaagtaggaaagggctgc

SEQ ID NO: 586408 - DNA, 120 bp, Artificial Sequence
  ENSG00000172661_21 (sequence is synthesized)
gatcctgatgcccaccccaagagcacaggtgtcttccaggatgaagagctgcttttcagccacaagctccaaaaggacaatgacccagatgttgacctttttgctggcaccaaaaaaacc

SEQ ID NO: 586409 - DNA, 120 bp, Artificial Sequence
  ENSG00000172661_22 (sequence is synthesized)
aagctgttagagccaagtgttgggagcctgtttggggatgatgaagatgatgatcttttcagctctgccaagtcccagcctttggtacaagagaaaaagagagtagtgaaaaaagaccac

SEQ ID NO: 586410 - DNA, 120 bp, Artificial Sequence
  ENSG00000172661_23 (sequence is synthesized)
tctgttaactctttcaaaaaccagaaacatcctgaatccattcaaggtagtaaagaaaaaggcatatggaagccggaaacacctcaggcaaatttagcgatcaacccagcggccttgctg

SEQ ID NO: 586411 - DNA, 120 bp, Artificial Sequence
  ENSG00000172661_24 (sequence is synthesized)
cccacagcggcttcccagatctctgaagtaaagcctgttttgccagaattggcttttccttcatctgaacacagaaggagccacggtctggaaagtgtgcctgtccttcccgggagtggg

SEQ ID NO: 586412 - DNA, 120 bp, Artificial Sequence
  ENSG00000172661_25 (sequence is synthesized)
gaggccggtgtgagttttgatcttccagctcaggcagacaccttacacagtgcaaacaagagccgtgtcaagatgagagggaagcgtagaccgcagacccgtgcagctaggcggctggct

SEQ ID NO: 586413 - DNA, 120 bp, Artificial Sequence
  ENSG00000172661_26 (sequence is synthesized)
gctcaggagtccagcgaggctgaggacatgagcgtccccagaggacccattgcacagtgggctgatggcgccatttccccaaatggccatcggccacagctcagagcagccagtggagaa

SEQ ID NO: 586414 - DNA, 120 bp, Artificial Sequence
  ENSG00000172661_27 (sequence is synthesized)
gacagcactgaggaggccctggcagctgccgctgcaccttgggaaggtggtcctgtgcctggagtggacacaagcccctttgcaaagtctctgggtcattccagaggggaggctgacctt

SEQ ID NO: 586415 - DNA, 120 bp, Artificial Sequence
  ENSG00000172661_28 (sequence is synthesized)
tttgattctggggacattttttccacgggcactggatctcagtccgtggagagaacaaaacccaaggcaaagatagcagagaatcctgccaacccaccagtgggtggtaaagcaaagagc

SEQ ID NO: 586416 - DNA, 120 bp, Artificial Sequence
  ENSG00000172661_29 (sequence is synthesized)
cccatgtttcctgctctaggcgaggccagcagtgatgatgatctctttcagtctgctaaaccaaaaccagcaaagaaaacaaatccctttcctctcctggaagatgaggatgacctcttt

SEQ ID NO: 586417 - DNA, 120 bp, Artificial Sequence
  ENSG00000172661_30 (sequence is synthesized)
acagatcagaaagtcaagaagaatgagacaaaatccagtagtcagcaggatgtcatattaacaacacaagatatttttgaggatgatatatttgctacggaagcaattaaaccctctcag

SEQ ID NO: 586418 - DNA, 120 bp, Artificial Sequence
  ENSG00000172661_31 (sequence is synthesized)
aaaaccagagagaaggagaaaacattggaatctaatttatttgatgataacattgatatctttgctgacttaactgtaaaaccaaaagaaaagtccaaaaagaaagtggaagccaagtct

SEQ ID NO: 586419 - DNA, 120 bp, Artificial Sequence
  ENSG00000172661_32 (sequence is synthesized)
atatttgatgatgatatggatgacatcttctccactggtatccaggctaagacaaccaaaccaaaaagccgatctgcacaggccgcacctgaaccaagatttgaacacaaggtgtccaac

SEQ ID NO: 586420 - DNA, 120 bp, Artificial Sequence
  ENSG00000172661_33 (sequence is synthesized)
atctttgatgatcccctgaatgcctttggaggccagtagagcacacagggtatccacatgttaccctgcagctacattgttgagttagtgatgatattgtatatgctcatggtcttaact

SEQ ID NO: 586421 - DNA, 120 bp, Artificial Sequence
  ENSG00000172661_34 (sequence is synthesized)
ggattacaaaaagcaaatactagaacagctagctcatcttttacccaatgtacttagtatttttctgcactggtttaatcatgcttaatactacaaaacaaaaataaatatttcacagtg

SEQ ID NO: 586422 - DNA, 120 bp, Artificial Sequence
  ENSG00000172661_35 (sequence is synthesized)
gttggtttgttttgtttttaaaccacagtttgatttagttagccttgctggggccataatatgcttcagggtgtgtaaaagaagaaatctctttgtggctttcatgggcagggaatctca

SEQ ID NO: 586423 - DNA, 120 bp, Artificial Sequence
  ENSG00000172661_36 (sequence is synthesized)
gagatagcaaatgccacctgaccagaagtctttgttatatggatgggaaccctaacttagggcttgggcaggggaaagagaaagaagatgagagattatacttcatgagtcttagcaata

SEQ ID NO: 586424 - DNA, 120 bp, Artificial Sequence
  ENSG00000172661_37 (sequence is synthesized)
tgggagcaggttttcactgaattctgagggtgcctctgcatgtcctccaaggcaaagtttggcaaactgtggcccccccactgtcatattttgttaataaaattttattggaacacaatc

SEQ ID NO: 586425 - DNA, 120 bp, Artificial Sequence
  ENSG00000172661_38 (sequence is synthesized)
atatggaagccggaaacacctcaggactcatcaggtctcgctccatttaaaaccaaagaaccatccactcggatcgggaagatacaagcaaatttagcgatcaacccagcggccttgctg

SEQ ID NO: 586426 - DNA, 120 bp, Artificial Sequence
  ENSG00000172661_39 (sequence is synthesized)
catcttgtattccttgactccatatctgatctggcagctttccacttatgtgacagaggaggaggcatacgtgaagtagtgctagtgaaacatcaggccccaggagagatttgaatgcct

SEQ ID NO: 586427 - DNA, 120 bp, Artificial Sequence
  ENSG00000172661_40 (sequence is synthesized)
ttcccattaaagagctacagaaagtgacagttttgctccatcacagatttatttacaggcataagaaacacttgtctttctgtttcccaaatggatttttaactggatgtaatcttacac

SEQ ID NO: 586428 - DNA, 120 bp, Artificial Sequence
  ENSG00000172661_41 (sequence is synthesized)
aggactcatcaggtctcgctccatttaaaaccaaagaaccatccactcggatcgggaagatacaagtaattaaaacactggaatcttcattgcctgccctgtggcatctataaacttttt

SEQ ID NO: 586429 - DNA, 120 bp, Artificial Sequence
  ENSG00000172661_42 (sequence is synthesized)
tgggtttcctactcttgtcagctgctgccaaacatcttctcatctcttcccccgcctcccctcccctgcacctagttgttgtctcctgtgtgctgcgtctttaacatctattctttgagc

SEQ ID NO: 586430 - DNA, 120 bp, Artificial Sequence
  ENSG00000172661_43 (sequence is synthesized)
ccagtggtgggcataggtgtaagacgctctgttttaattctgagactagattgggcgattttcctacgtttctctactcctctcgtattatacattatgtgtaccgaatcttgtcatgtg

SEQ ID NO: 586431 - DNA, 120 bp, Artificial Sequence
  ENSG00000172661_44 (sequence is synthesized)
aggcatatggaagccggaaacacctcaggttagaaatcctctttaaggattttcagctcttgtttgcatcccagtacagagaaattccattatgcagacccacagttatttagacttgtc

SEQ ID NO: 586432 - DNA, 120 bp, Artificial Sequence
  ENSG00000172661_45 (sequence is synthesized)
tgcattaaggaggaaacagcaaccagggctacagctttgtcttcactgcacttcccccgagtcatctcccctctcctcactccacacgccagagtttcatgaatctatactttaatagtt

SEQ ID NO: 586433 - DNA, 120 bp, Artificial Sequence
  ENSG00000172661_46 (sequence is synthesized)
agtgttttttgatgccatgccagatttgactctgaagtggagttaaggtaggatgaagaatcttcttcccactaaagaatttatttctccctctggatttccttggaatagaattaaaat

SEQ ID NO: 586434 - DNA, 120 bp, Artificial Sequence
  ENSG00000172663_0 (sequence is synthesized)
gacgctgggtgtgtgggcgcagatggcggcggcgcacggcgcctgagcgggccggggccatgagcgccgcccggccccagttcagcattgatgatgccttcgagctgtccctggaggacg

SEQ ID NO: 586435 - DNA, 120 bp, Artificial Sequence
  ENSG00000172663_1 (sequence is synthesized)
ggggccctgggcccgagtccagcggggtcgcgcgctttgggccgctgcacttcgagcgtcgggcccggttcgaggtggctgacgaggacaagcagtcccggctgcgctaccagaacctgg

SEQ ID NO: 586436 - DNA, 120 bp, Artificial Sequence
  ENSG00000172663_2 (sequence is synthesized)
agaacgatgaggatggagcccaggcctctccggagccggatgggggagtcggcaccagggattccagccgaacttccatccgcagctcccagtggtccttcagcaccatcagcagcagca

SEQ ID NO: 586437 - DNA, 120 bp, Artificial Sequence
  ENSG00000172663_3 (sequence is synthesized)
cccagcgctcctacaacacctgctgcagctggacccaacaccctttgatccagaagaaccgccgagtggtgctggcctccttcctgctcctgctgctggggctggtgctgatcctggtcg

SEQ ID NO: 586438 - DNA, 120 bp, Artificial Sequence
  ENSG00000172663_4 (sequence is synthesized)
gcgtgggactggaggcgaccccctctccaggtgtctccagcgccatcttcttcgtgccgggcttcctgttgttggtgcctggagtctatcacgtgatcttcatctactgcgcggtcaagg

SEQ ID NO: 586439 - DNA, 120 bp, Artificial Sequence
  ENSG00000172663_5 (sequence is synthesized)
gccaccggggcttccagttcttctacctgccctacttcgagaagtgatcgcggcgcagcgtggaccccttgcgcccatgggggcgcccctcttgccctgttccgttcccctcatctcaag

SEQ ID NO: 586440 - DNA, 120 bp, Artificial Sequence
  ENSG00000172663_6 (sequence is synthesized)
ggaagaggccctccaggaccctcgaaaccccagcccctagggagtttgctcaggaagttcggggcatgcaggcctggccctgggaaagccgcccgtcgcctgctctgtgccttaacttat

SEQ ID NO: 586441 - DNA, 120 bp, Artificial Sequence
  ENSG00000172663_7 (sequence is synthesized)
tctcgggccgtgcggctgctaggttgctgttattttgtgctaataaaagagtaattaattccaccagaggcaattgctctcctcctgtcctgccactgctagcccagcccaccagcctga

SEQ ID NO: 586442 - DNA, 120 bp, Artificial Sequence
  ENSG00000172663_8 (sequence is synthesized)
ccacagcccccctcccaaggactgaccctgacgctgaagggcttcgagcaccaccgaacgcgtggcagccctgatgctgaggcttgcccaagggcacggggcatgttaggggcagagctg

SEQ ID NO: 586443 - DNA, 120 bp, Artificial Sequence
  ENSG00000172663_9 (sequence is synthesized)
ggcgtaggactcctgccttgccagccaggagccggccggaacagcctgccccacccccagcccttggatgactcaaccagcccgtctctgtctggtggccctggccgagggcacgcagag

SEQ ID NO: 586444 - DNA, 120 bp, Artificial Sequence
  ENSG00000172663_10 (sequence is synthesized)
atgacgcaggcctgggacctggaggctggtatcctagttccagcctggctctggggccctgggctgccacagccagccctgaatgtgggccatgtcaaggcaatggcccagccccctcca

SEQ ID NO: 586445 - DNA, 120 bp, Artificial Sequence
  ENSG00000172663_11 (sequence is synthesized)
cccactgccctccttcccagtcccagaggttgggagaacctgggggcagagggcataggaagccgcgcctgacagacaccctcagtggtcaaagacttagaaatgcagaacgttagaaac

SEQ ID NO: 586446 - DNA, 120 bp, Artificial Sequence
  ENSG00000172663_12 (sequence is synthesized)
aaaccatctcagaattttggaacatcagcatttcagaatcttacgaaacaagaaacagaatctttgagaaacctgaaatctgagatcatagtagctaccagttatcaatttgttgaaaga

SEQ ID NO: 586447 - DNA, 70 bp, Artificial Sequence
  ENSG00000172663_13 (sequence is synthesized)
cgaccaacctggacaacatggcgagaacccatctctatttaaaaaaaaaaaaagaaaagaaaatatacta

SEQ ID NO: 586448 - DNA, 120 bp, Artificial Sequence
  ENSG00000172663_14 (sequence is synthesized)
atcttgtaatcttcactacctccgtcccattttacagataaggactgactcacccaaggacagccagcaggtggtaggtagaattaggaacgtagcccagggctcttcccatgacactgt

SEQ ID NO: 586449 - DNA, 120 bp, Artificial Sequence
  ENSG00000172663_15 (sequence is synthesized)
cggggagggagaaggaaaccggcactgagctggtctcccctaccggccaaccaagaggctggctgagtgagcaagggttgggaggccctgttggtgcacctgcccgtactgtctatctcc

SEQ ID NO: 586450 - DNA, 120 bp, Artificial Sequence
  ENSG00000172663_16 (sequence is synthesized)
cccaccaaaacacgggtcccacaaaccactgtctgcagcacccaacacagcggggccttcaggattctgagttagaggaatggacacccagactcttgctctcgctcccacctttccagg

SEQ ID NO: 586451 - DNA, 120 bp, Artificial Sequence
  ENSG00000172663_17 (sequence is synthesized)
ccccgcagacttcccaccctcatcccccattcaaggcacttagggggcacccattggatgcaggaactcctaaaccagtggtcccccaactagctatggtaaaggaccagttttcatttc

SEQ ID NO: 586452 - DNA, 90 bp, Artificial Sequence
  ENSG00000172663_18 (sequence is synthesized)
gtcccccaactagctatggtaaaggaccagttttcatttctaatccatcacggtccagtactttcataagaagaactagccgggtgccag

SEQ ID NO: 586453 - DNA, 120 bp, Artificial Sequence
  ENSG00000172663_19 (sequence is synthesized)
aatacaaaaacttagccaggcatggtggggcgcctgtagtcccacccacttgcgaggctggagtgggaggatcacggagcctgggaggctgcagtggagtcatgattgcaccactgcact

SEQ ID NO: 586454 - DNA, 120 bp, Artificial Sequence
  ENSG00000172663_20 (sequence is synthesized)
attgcaccactgcactccagcctggaagacagactgagacctatttaaaaaataaataaataaataacataaaaattttaaaaactagaaaaatgaaataaaaaacatacagaggctggg

SEQ ID NO: 586455 - DNA, 69 bp, Artificial Sequence
  ENSG00000172663_21 (sequence is synthesized)
cacgccactatacagaatacaagtccacagtttatcagattaattagacataaaattacatttcaataa

SEQ ID NO: 586456 - DNA, 120 bp, Artificial Sequence
  ENSG00000172663_22 (sequence is synthesized)
acatttcaataaatataatcagaacaaacataggaaaaaggaaaaatgacaaaaaccattgaatatgaacaaacaggcaattaacacagaatcgcagctaacaactttttactccttgtt

SEQ ID NO: 586457 - DNA, 65 bp, Artificial Sequence
  ENSG00000172663_23 (sequence is synthesized)
ggtttaagcgattctcatgcctcagccttctcagtagctgcgactacaggcacatgccaccatgc

SEQ ID NO: 586458 - DNA, 120 bp, Artificial Sequence
  ENSG00000172663_24 (sequence is synthesized)
cccgacttcattctacagtcttaacagaaagcaatttcagaagtggtgattcccatcattagaagtctgcgttaggaatcagcaaggtatagtccacagagtggtttttatattttgtaa

SEQ ID NO: 586459 - DNA, 120 bp, Artificial Sequence
  ENSG00000172663_25 (sequence is synthesized)
tggttggagaaaagtcaaagaataataagattttatgacataaaattatataaaattcaaatttccatgtcaataaatgaagttttactgttatttattaaaatttctgatatagccaca

SEQ ID NO: 586460 - DNA, 120 bp, Artificial Sequence
  ENSG00000172663_26 (sequence is synthesized)
gtgtgcagtgctgatcctggtcggcgtgggactggaggcgaccccctctccaggtgagcgaccctcccgcccccacaggcagaggacacccctgtcttgtgtccacgggtccacggcaag

SEQ ID NO: 586461 - DNA, 120 bp, Artificial Sequence
  ENSG00000172663_27 (sequence is synthesized)
ccctcccacctcccggcagtacacggctccttttcagctgggagtgaggcttgcccgggcagtcagcggcagcccggaaggcctcgaagcctccgccccctcgccctgaccgggctctgg

SEQ ID NO: 586462 - DNA, 120 bp, Artificial Sequence
  ENSG00000172663_28 (sequence is synthesized)
cctgagggttggggtcaagaggggccccgtgggaggctctgccctccttttgtacaggctctgcctcccccttgacactgagcctcccagcatcctgaggaggcagctggctgccatcat

SEQ ID NO: 586463 - DNA, 120 bp, Artificial Sequence
  ENSG00000172663_29 (sequence is synthesized)
ttttacaggtgaggagacagaggccttgtgacctgggcacacagccaggaaatcacacatagctgaaaatggaacctggcttatcactgcaaagacttttccttttttaaaaaatttaac

SEQ ID NO: 586464 - DNA, 120 bp, Artificial Sequence
  ENSG00000172663_30 (sequence is synthesized)
ctgtttaaatccattagaggacagaagagtagcagctaccatttattctgtgtctactctgggcaaggtgcagggcagttttattttcccatcttacagaagtcctacaagtgaggtggt

SEQ ID NO: 586465 - DNA, 120 bp, Artificial Sequence
  ENSG00000172663_31 (sequence is synthesized)
ctggcacttccccttgtctggcatctaagcactgacaagcacccctctcctacccattgctcagatgggggaacttttggtccagagcaggcagatctcacaccaggtgttctttggctc

SEQ ID NO: 586466 - DNA, 120 bp, Artificial Sequence
  ENSG00000172663_32 (sequence is synthesized)
ccaggcacctcgttctttggggtagaggaggcagagtccccagaaaggatccagggttggggtcacgagtgatccataagaagggactaactgtggctgctaccctggctcatctctccg

SEQ ID NO: 586467 - DNA, 120 bp, Artificial Sequence
  ENSG00000172663_33 (sequence is synthesized)
cttctccaggaaggccaaggctccccagccagccaggcccctggcacagagtctggcctctgctcagggtgtttgagtgtgggggagggggctgccacttcccagcaccgctgtacactg

SEQ ID NO: 586468 - DNA, 120 bp, Artificial Sequence
  ENSG00000172663_34 (sequence is synthesized)
gccctggtagtgctgccaagttctttcatttttcccctcaacccagcaaggcaagcctggggctaccagagcgccttagagggcctttgtagggtgcagggagtgagtttcagcccccat

SEQ ID NO: 586469 - DNA, 120 bp, Artificial Sequence
  ENSG00000172663_35 (sequence is synthesized)
cagggagtgagtttcagcccccatcataccctatacccctttatttttatttatttattttttgaggaggagtcttgctctgtcgcccaggcaggagtgtagtggcgcaatctcggctca

SEQ ID NO: 586470 - DNA, 120 bp, Artificial Sequence
  ENSG00000172663_36 (sequence is synthesized)
caggcgtgagccaccacgcccagccctttttattttttagagacagggtcttgttctgttgcccaagctggagagctgtggtatgatcactgcagcctcaaactcttggactcaagccat

SEQ ID NO: 586471 - DNA, 86 bp, Artificial Sequence
  ENSG00000172663_37 (sequence is synthesized)
agggtcttgttctgttgcccaagctggagagctgtggtatgatcactgcagcctcaaactcttggactcaagccatcctcccagct

SEQ ID NO: 586472 - DNA, 120 bp, Artificial Sequence
  ENSG00000172663_38 (sequence is synthesized)
cctgtaccccagccccagctcctatccccagggaccctgctcagtcacccaccccacttcactcactctcttccatcccgtcctattgattcctagcctgaccctcactttcctcacagg

SEQ ID NO: 586473 - DNA, 120 bp, Artificial Sequence
  ENSG00000172663_39 (sequence is synthesized)
gtctcctacactgtagggtcaccctaccctagtgcccagctgtactcacctctttcagaaacccccagtctggtctggcccccaccttcatacaggtcacctgtcctacagaatccccta

SEQ ID NO: 586474 - DNA, 120 bp, Artificial Sequence
  ENSG00000172663_40 (sequence is synthesized)
tcacattcaccctgctctcctgccacccagctggacccaacaccctttgatccagaagaaccgccgagtggtgctggcctccttcctgctcctgctgctggggctgggtgagtggccctg

SEQ ID NO: 586475 - DNA, 120 bp, Artificial Sequence
  ENSG00000172663_41 (sequence is synthesized)
aacttccatccgcagctcccagtggtccttcagcaccatcagcagcagcacccagcgctcctacaacacctgctgcaggtgagcctgcccgcctaagcccccagccgagcagccctggct

SEQ ID NO: 586476 - DNA, 120 bp, Artificial Sequence
  ENSG00000172663_42 (sequence is synthesized)
tgggtgaggagacagaggccttgtgacctgggcacacagccaggaaatcacacatagctgaaaatggaacctggcttatcactgcaaagacttttccttttttaaaaaatttaacctgtt

SEQ ID NO: 586477 - DNA, 120 bp, Artificial Sequence
  ENSG00000172663_43 (sequence is synthesized)
ttgctgaatgactaaaagcccaccccaaggaacaaagaaaaatctctcctttcacacacttcccagggcctgctcagtgccttgctctggaaacagagcttggtgagcttcctggggagg

SEQ ID NO: 586478 - DNA, 120 bp, Artificial Sequence
  ENSG00000172663_44 (sequence is synthesized)
gtctctgcctagggcaccttcagctcaggtggtgggtgagccgggctgggggtgggagcccccgccctcaccactgctcctgcccccacccccgcggctccgtctgtgtgcagtgctgat

SEQ ID NO: 586479 - DNA, 120 bp, Artificial Sequence
  ENSG00000172667_0 (sequence is synthesized)
agtcacttcctgcagctgtttccctgtgggtcgggttggactgacttttgacagtcagccttcggctgcggagggggctcggcggcggccggcggagaaagttgctccgagaagaggctg

SEQ ID NO: 586480 - DNA, 120 bp, Artificial Sequence
  ENSG00000172667_1 (sequence is synthesized)
ggtcgagctgggccgagccgggcgcgcagggcgggcgtcgcgggcgtcccgggcggacgcggcgcggagactgccggcgcgtcccgggggttccgatttgaagaccttgcttctcatcac

SEQ ID NO: 586481 - DNA, 120 bp, Artificial Sequence
  ENSG00000172667_2 (sequence is synthesized)
ccactggattatgccccaggcttccctacccaatgatcctcttgcaacacgccgtgcttcctccacctaagcagccctcaccctcgcctcctatgtcagtggccaccaggtctacaggaa

SEQ ID NO: 586482 - DNA, 120 bp, Artificial Sequence
  ENSG00000172667_3 (sequence is synthesized)
ccttgcagcttccaccacagaagccttttgggcaggaggcttccttgcctcttgcaggggaagaagagttatcgaagggaggggagcaagactgtgccctggaggagctatgtaagcccc

SEQ ID NO: 586483 - DNA, 120 bp, Artificial Sequence
  ENSG00000172667_4 (sequence is synthesized)
tgtactgcaaactctgcaatgtcaccttgaactctgcacagcaagcccaggctcattatcagggtaaaaatcatggtaagaaactccgaaattactatgcagcaaatagctgtcctcctc

SEQ ID NO: 586484 - DNA, 120 bp, Artificial Sequence
  ENSG00000172667_5 (sequence is synthesized)
ctgctagaatgagcaatgtggtcgagcctgcagctactccagttgttccagtccctccgcagatgggctcctttaagccaggaggccgagtgatcctggccacggagaatgattactgta

SEQ ID NO: 586485 - DNA, 120 bp, Artificial Sequence
  ENSG00000172667_6 (sequence is synthesized)
agctctgtgatgcctccttcagttccccagctgtggctcaggctcactatcaagggaagaatcatgccaagaggctgcggctggcggaagctcagagtaactcattctcggaatcctcag

SEQ ID NO: 586486 - DNA, 120 bp, Artificial Sequence
  ENSG00000172667_7 (sequence is synthesized)
agctgggtcaacggcgggccaggaaagaagggaatgagtttaagatgatgcctaacaggagaaatatgtatacagtacagaataattcagcaggtccttacttcaatccccgctctcggc

SEQ ID NO: 586487 - DNA, 120 bp, Artificial Sequence
  ENSG00000172667_8 (sequence is synthesized)
agagaattccacgtgatctggccatgtgtgttactccaagtggccagttttactgctcaatgtgtaatgttggagctggcgaagagatggaattccggcagcatttagagagcaagcaac

SEQ ID NO: 586488 - DNA, 120 bp, Artificial Sequence
  ENSG00000172667_9 (sequence is synthesized)
ataagagcaaggtgtctgaacagcggtacaggaatgagatggagaatctgggatatgtatagtgattatcatattaagatagagcagcttttcctgcctgttgtttgccttttgtcaact

SEQ ID NO: 586489 - DNA, 120 bp, Artificial Sequence
  ENSG00000172667_10 (sequence is synthesized)
tgccctgctttgtggtctttttgatatgagtacattcctctgcttaatgttaatacatgtaacccacagtggtaccatgagatgtcaaaacctgggggcccgggggcggggcggggggag

SEQ ID NO: 586490 - DNA, 120 bp, Artificial Sequence
  ENSG00000172667_11 (sequence is synthesized)
gtgggtgtgaagaacgtgcttcttaggtcataacgcttttgcagggtcaatggtgttgagccgctcatagcatgtgacctacctaccccatcagaaataactttttatcttgctcaagtt

SEQ ID NO: 586491 - DNA, 120 bp, Artificial Sequence
  ENSG00000172667_12 (sequence is synthesized)
ctggtcaactagtagcctgacggcttagaactttgactatttaaaagtttcattttcttttgcaattttagttttatgtactgttaaagaattgtactgaattctttttagatcacagta

SEQ ID NO: 586492 - DNA, 120 bp, Artificial Sequence
  ENSG00000172667_13 (sequence is synthesized)
aaaataggttggcagagatttcagtttcccagggcttaaccagaaccgccacctcaatgcattgtcagtagaatacattattagaaactgttaaggtctttcccgggacatttttttctg

SEQ ID NO: 586493 - DNA, 120 bp, Artificial Sequence
  ENSG00000172667_14 (sequence is synthesized)
ccattttcttttgcaattgtagttttatgtactgttaaagaattgtattgaattctttttagatcaaagtaaaaataggtcagcagagatttcagtttcccagggcttaaccagaaccgc

SEQ ID NO: 586494 - DNA, 120 bp, Artificial Sequence
  ENSG00000172667_15 (sequence is synthesized)
cacctcaatgcattgtcagtaggatacattattagaaactgttagggtctttcccaggacatttttttttctgtatcatgtctccccatcattgaagcgcaaattttcttgaattcaaat

SEQ ID NO: 586495 - DNA, 120 bp, Artificial Sequence
  ENSG00000172667_16 (sequence is synthesized)
actcccaatgagcttgtatacttccaaacagctaaacttgatttccagttgtggatttcacacatataattgccgccttcttccctcctcttttttcccccctagttgaatcagcttgtc

SEQ ID NO: 586496 - DNA, 120 bp, Artificial Sequence
  ENSG00000172667_17 (sequence is synthesized)
taacaagcccattttcatgccccagctgtgctgtgggttttccaagcctcatatttgaatattcaatgagtttaagatggatatgatttcaaaaaatagggccgggcgcggtggctcacg

SEQ ID NO: 586497 - DNA, 120 bp, Artificial Sequence
  ENSG00000172667_18 (sequence is synthesized)
aaaaaaaaaaaatatatatatatatagatatattttccagcagtttttaggaaacaaaggtgtgtttgattttccaatttagagttacttcattgatagtaacatgcgcttatatcatga

SEQ ID NO: 586498 - DNA, 120 bp, Artificial Sequence
  ENSG00000172667_19 (sequence is synthesized)
ttacttcattgatagtaacatgcgcttatatcatgatctaaaccataagttcagattgcttgatattttgttttgccagacttttttgataatctgattcttacggtttacttacatttt

SEQ ID NO: 586499 - DNA, 120 bp, Artificial Sequence
  ENSG00000172667_20 (sequence is synthesized)
cctctgtcttgccagtctggtggccatcctgaaaaatatcaccacctgctgttttatacacagaggaattttttaaaaagcaaataaagtttcactatcttcgtttccagtagaaatata

SEQ ID NO: 586500 - DNA, 120 bp, Artificial Sequence
  ENSG00000172667_21 (sequence is synthesized)
cacgaactatggttttattctttgtaattcggctttcttgaagatactaacaagtatatgatagatcactttggcatctgataattatatcagtattattatttttgtttttttgcgttt

SEQ ID NO: 586501 - DNA, 120 bp, Artificial Sequence
  ENSG00000172667_22 (sequence is synthesized)
ataattatatcagtattattatttttgtttttttgcgtttaaaataagaagttgtatgaacccaggaggtggaggttgcagtcagccaagaatcgtgccactgcactccagtctgggcga

SEQ ID NO: 586502 - DNA, 120 bp, Artificial Sequence
  ENSG00000172667_23 (sequence is synthesized)
tataatatatatctagattaactaatggagtgctctgtgaatattcattaactacattttatctatttactatattttatatgggtaagaccagtggtcatccgtatttcttttgaaagc

SEQ ID NO: 586503 - DNA, 120 bp, Artificial Sequence
  ENSG00000172667_24 (sequence is synthesized)
ccacttgatcaggaagtttatattttaagcagtatgtttgcacaatggtcagttcacatttgattgcttgtattactaattagaggtaaaacttctattttttcttgataattctgtagg

SEQ ID NO: 586504 - DNA, 120 bp, Artificial Sequence
  ENSG00000172667_25 (sequence is synthesized)
caaaaaaaattggggaaggcaaattacaatcattcttcttctgtaatactttgggacaatttttaaacaactcagacccatgtttaaaaacgagttttgtgtgattaacccttgtatagt

SEQ ID NO: 586505 - DNA, 120 bp, Artificial Sequence
  ENSG00000172667_26 (sequence is synthesized)
atccagttactgtcttctcttgaagtggtggttctttgagaagtagaattattttgtaacttttcttctcccagaaacagaagaatcaaatactattctgttaggattctatctagacct

SEQ ID NO: 586506 - DNA, 120 bp, Artificial Sequence
  ENSG00000172667_27 (sequence is synthesized)
gtgactcttagtataataacccttttattattattattattattattttttcagtaatctataaagtagagttgcttagttttgagcaatttagggcttttcttattggccagtaggtta

SEQ ID NO: 586507 - DNA, 120 bp, Artificial Sequence
  ENSG00000172667_28 (sequence is synthesized)
ttcattttgctgctaaatataattttttggttaattttaacattatagtgctggccgcttggttctatgattacctaaaaatctagtttttttcctccataggtagatgtgtgtgtatgc

SEQ ID NO: 586508 - DNA, 120 bp, Artificial Sequence
  ENSG00000172667_29 (sequence is synthesized)
atacccccacacacacacgtacatatatgttgtcatagagaggtatttcaacccttatttcaaataacagtagaagatacgaacatgaatttatattttgtaaaaatgtcattcatccac

SEQ ID NO: 586509 - DNA, 120 bp, Artificial Sequence
  ENSG00000172667_30 (sequence is synthesized)
tttgttttccattggaaatagttttataagaagggttccccttgctctctccacttaacaatttcattatatacgtagaaaaagcagccgacttaagggcttgatgttttttcaggcctt

SEQ ID NO: 586510 - DNA, 120 bp, Artificial Sequence
  ENSG00000172667_31 (sequence is synthesized)
gtggattcaggtttccagtttcccagtgcccttaatggatgttatgaatgcataagcacattttcttttaaagaaagaagttagatttatagtgttatttcttacttgctatatttcttt

SEQ ID NO: 586511 - DNA, 120 bp, Artificial Sequence
  ENSG00000172667_32 (sequence is synthesized)
gcactaaaaaagagctatgtgtttgttttataggacactttagtaccgtattgcctacaataactcagtttgctccttaaattccaaactctgggaagttgataaataacttccatgatc

SEQ ID NO: 586512 - DNA, 120 bp, Artificial Sequence
  ENSG00000172667_33 (sequence is synthesized)
acttgtaaaagttacatgcacatctgaaaaaaaatcacaaatctctatgacagtaggttatgttttgagcttgttaccttgcagtattcttctctgttccataggtgaaaacaaagggtg

SEQ ID NO: 586513 - DNA, 120 bp, Artificial Sequence
  ENSG00000172667_34 (sequence is synthesized)
acagaggttatcaggcaggaaatgcctaaatagatacatctctgcatggtacaatttctcatattcatgtattccataaacagtgttttttctctgtttaagcagactgttgtttcttct

SEQ ID NO: 586514 - DNA, 120 bp, Artificial Sequence
  ENSG00000172667_35 (sequence is synthesized)
gtaacatactttaggatttgcaccttgtgctccccaggaattatgttagtgtccttttctatgctgtcttcaaggatggacagaggcctaaaccacaacaacaacaaaaattagaaaaaa

SEQ ID NO: 586515 - DNA, 120 bp, Artificial Sequence
  ENSG00000172667_36 (sequence is synthesized)
aaatacttagatttcggtaatcatccataggaactcatagcatcagtctcttttctctgtgaataatatctttgtgtaagttgtcataaaaaatcaacgttagaagatgacaattagaat

SEQ ID NO: 586516 - DNA, 120 bp, Artificial Sequence
  ENSG00000172667_37 (sequence is synthesized)
tcttcttaggtattgagggtaagaagttgtaaagaaagaaaattcgtgtttcaactaaaagattggattgcatatacctttgaagtggttttgtaaaaaaagttcagttactaaactgag

SEQ ID NO: 586517 - DNA, 120 bp, Artificial Sequence
  ENSG00000172667_38 (sequence is synthesized)
tgtgccctgtaatccttttgagtgcactgaagatgctttgaaaatactttgttggtcttcacattgtgcatcatgtcctgcaacttgtaaatatgtgcatgttgtttatgtttgtctgcc

SEQ ID NO: 586518 - DNA, 120 bp, Artificial Sequence
  ENSG00000172667_39 (sequence is synthesized)
tgtctcttattgcactaaattctgcaaggtgaataatttttttataccatttatttggaaaaagttcctcctccaactcttcttcactgaccttttaattagttggtaaacttagaaaac

SEQ ID NO: 586519 - DNA, 120 bp, Artificial Sequence
  ENSG00000172667_40 (sequence is synthesized)
caggtaggatttttgaagccctgagtttaaaagaagaatcgtggctatttgacatcatccttacattcccctgacttaaaaagctaacaagaagcacgagatcttccacctcattttaga

SEQ ID NO: 586520 - DNA, 120 bp, Artificial Sequence
  ENSG00000172667_41 (sequence is synthesized)
aagcttttctacagaactatatgcttgcttatagctacctatctacagtttgaacagggagaaagggagatatgtatgtctggttacatcttccttcactcttgaattggctgggacagc

SEQ ID NO: 586521 - DNA, 120 bp, Artificial Sequence
  ENSG00000172667_42 (sequence is synthesized)
aagcaacaacagtttgaggtccagtgacctacgtaaaatgagtgtcgtttgtgtcaggggacacatgtaactgtgcaacatggtattttctacagggagggctaggaagggtggttttgg

SEQ ID NO: 586522 - DNA, 120 bp, Artificial Sequence
  ENSG00000172667_43 (sequence is synthesized)
aacctaacctactttgtgtcttcattgtcagaactaaggttggaaatgccctttaaagaacttggtgaggcatatgctaggacaatagagctgctttagaaagaaattgagacatgtttt

SEQ ID NO: 586523 - DNA, 120 bp, Artificial Sequence
  ENSG00000172667_44 (sequence is synthesized)
gtcaggacagataaaagtttaatgcaggcttttgaacagatgttttaaaacaaatttgaccttaccaactatttttttcttctagccaaatcattgtacaggagtttcatatatgataaa

SEQ ID NO: 586524 - DNA, 120 bp, Artificial Sequence
  ENSG00000172667_45 (sequence is synthesized)
aagtgttttgttattgtttttgctttcttggcaggggagaacccctaccattgtgagcagttactgtcactctggctgaatggacaaatagctgtgtaaatagcttctcataaaacgctt

SEQ ID NO: 586525 - DNA, 120 bp, Artificial Sequence
  ENSG00000172667_46 (sequence is synthesized)
ctactgatagctgtttgactttttcttcccgttatgaatgggaggaacatttgtaaacttcctttctgggtagctaccaaaaaacgtactggcttatggtcccatgtgaccttgtctccg

SEQ ID NO: 586526 - DNA, 120 bp, Artificial Sequence
  ENSG00000172667_47 (sequence is synthesized)
ttaagcccagaatctgagtgcctttagcaagtgttagcatttcacagagagaagagagacagaattattgctattaatcaccattcataaataggagcttggaataacaaaggtctgtgt

SEQ ID NO: 586527 - DNA, 120 bp, Artificial Sequence
  ENSG00000172667_48 (sequence is synthesized)
gaattctgttctacgtcttttttttcccttttttaaataaatgtcaatttgatatcaagtaaaactattgtcattattgatcagaaaccatacattctgaaaatgaatccagttttccca

SEQ ID NO: 586528 - DNA, 120 bp, Artificial Sequence
  ENSG00000172667_49 (sequence is synthesized)
agctggcagaagtcagagatcatttttcaccttgatctgtgttgcgtttgtacttagtgaatggcagtgtggttgattggaagagcttgacactgatgtttggaaaaattctttattcta

SEQ ID NO: 586529 - DNA, 120 bp, Artificial Sequence
  ENSG00000172667_50 (sequence is synthesized)
gtggtcattttcaaacttgtcttctgtagagaggggaaaaattatgtatttgcagctaaagcgaagagactggcacaataattattaattgtgttagttcatttctatattaaatgaagc

SEQ ID NO: 586530 - DNA, 120 bp, Artificial Sequence
  ENSG00000172667_51 (sequence is synthesized)
atcttcacaaatcaggtttgaagccattaaaagcaaaattttccctagtttaattaatttaaaattctaaattgcctgactacttagaatcttagaaacgccctgctagactgattttat

SEQ ID NO: 586531 - DNA, 120 bp, Artificial Sequence
  ENSG00000172667_52 (sequence is synthesized)
tatagaaatgttaacatgttcctcaacattttctcaagaaaattttcagacatatatcaaagttgaaaaaactttgcagtataaccactgctagattctgccatcaacatttgactatac

SEQ ID NO: 586532 - DNA, 120 bp, Artificial Sequence
  ENSG00000172667_53 (sequence is synthesized)
ttgtattgccatgtatctgttcatattctctatccctcttttcatccatcgatccatcagattttttttttaaagaacattccaaagtaaattttaggcaatacactgccctaaattctt

SEQ ID NO: 586533 - DNA, 120 bp, Artificial Sequence
  ENSG00000172667_54 (sequence is synthesized)
agcatgggtgtcattaattaaggtttagtattcgtttaaatatctattttgaaagtggtgtatgaagttgataatctgagccaattaacatacttttttttttttcctcctgtggacttt

SEQ ID NO: 586534 - DNA, 120 bp, Artificial Sequence
  ENSG00000172667_55 (sequence is synthesized)
tgtcttccagtttctctttttgtgtgtacttagggtgagggaggacaattcctttcaaacacaagtttattttagaattggtcatttttaagtgcttgtcataaattttaaagtttcaat

SEQ ID NO: 586535 - DNA, 120 bp, Artificial Sequence
  ENSG00000172667_56 (sequence is synthesized)
ataatttttcttttccccacttctgataatgtatttttgccaaactatgcagcttcttcaaaaaactgtaaattactgattggggtttatgaaatcagcgaatacctcatttcaatctgt

SEQ ID NO: 586536 - DNA, 120 bp, Artificial Sequence
  ENSG00000172667_57 (sequence is synthesized)
tgctgcttttctccctcttgtcacttctcctttcactactttcagctgctctaccagaaggtagaggggagtaaagggtcaaacccctatataattagctgttttaaacaactctaggag

SEQ ID NO: 586537 - DNA, 120 bp, Artificial Sequence
  ENSG00000172667_58 (sequence is synthesized)
agcagattaagtagcttagtaagttgaaactattaatttttctaaagaatttgatttgaattccttgagaattgtaattatccacacttcctccagctataattagcagaattaaaaatg

SEQ ID NO: 586538 - DNA, 120 bp, Artificial Sequence
  ENSG00000172667_59 (sequence is synthesized)
attgtactgtacaatgagttgttgaaattgtaagccttagtaaccatctttagctttattgtagtcatgtttagaaaaaattatttttacatatgcctttatttttatgcccactttttg

SEQ ID NO: 586539 - DNA, 120 bp, Artificial Sequence
  ENSG00000172667_60 (sequence is synthesized)
tggataagattctttagataaaatctaaagaattttaagtgactttctccaggtcatgaagattcaatgggtagaattgaatcagaattgaaatgttccagattcatattcttgtgtgtg

SEQ ID NO: 586540 - DNA, 120 bp, Artificial Sequence
  ENSG00000172667_61 (sequence is synthesized)
tttgataaaattcatggcttccaaagtaactgaacacttcctttgggcccttggagggaaaatccatatttttactaattacacttttttttttagacatctggcagttctttgaactta

SEQ ID NO: 586541 - DNA, 120 bp, Artificial Sequence
  ENSG00000172667_62 (sequence is synthesized)
aacatattctcatggccatagttccaaattaagcccgacgcagttgctaaaaatcttgctgcactgttgaatactaataatgcaacatttattggatgtttttgcattttgatgaccttc

SEQ ID NO: 586542 - DNA, 120 bp, Artificial Sequence
  ENSG00000172667_63 (sequence is synthesized)
atgattcatttataagtctttgtaagtgcttaagtgaccccctcactagtgaaaataataaatgttctatatcatttattattatttgtgtattctctacatgatatatttttttaagga

SEQ ID NO: 586543 - DNA, 120 bp, Artificial Sequence
  ENSG00000172667_64 (sequence is synthesized)
agagtaactccacatgtcagaatgagtgatattatcctagggcaaagcgcaaatagggcagtttgtttctactctgcaaatatggcatgtataggaacaaaactcttttggagtggctgg

SEQ ID NO: 586544 - DNA, 120 bp, Artificial Sequence
  ENSG00000172667_65 (sequence is synthesized)
tcattgttctgccctcttttggtacctgagtacctttctggggttttgtaaatcgtgtgtcatttgtaagaatttcacgttaactctgcgttacttggtgttcacctgtggtatccttga

SEQ ID NO: 586545 - DNA, 120 bp, Artificial Sequence
  ENSG00000172667_66 (sequence is synthesized)
ctgaccataatgatttagtttgggtatgatgtgtctgctttgaaatgccttactggagtatgtcagatcctgctttaaagcattccatatatctgctgggacaataagttgcttctcctt

SEQ ID NO: 586546 - DNA, 120 bp, Artificial Sequence
  ENSG00000172667_67 (sequence is synthesized)
ggaaatatgctctagattcagaagcaaaaccgattttgctttcaccattaaggttgcattttaatgcagttattgttttaaattagagaataaaatgtaaaaccaagggaggctttagaa

SEQ ID NO: 586547 - DNA, 120 bp, Artificial Sequence
  ENSG00000172667_68 (sequence is synthesized)
ccctttattgaatggcatggcaaacttttaaaactgcttttgctatttcactagaactatctttgataaaggatatagctaaaaaatgtcagcccaaactgtgtgtaattagggttgttt

SEQ ID NO: 586548 - DNA, 120 bp, Artificial Sequence
  ENSG00000172667_69 (sequence is synthesized)
attaaaattttctctaaatgtcatacagaggcttaagatctgtgtatgctgttgggtcggagtgccagtcactgctttggaagtctgtgttctggggctgcagaatgacaaacgtgtcat

SEQ ID NO: 586549 - DNA, 120 bp, Artificial Sequence
  ENSG00000172667_70 (sequence is synthesized)
gggattaaaaccaatcaactgtgaattgtgaaattgaaactactctttcggttttattttctttagcatattgagtatagaaatctgaaacttatttaaaatttatactgcttttgttga

SEQ ID NO: 586550 - DNA, 120 bp, Artificial Sequence
  ENSG00000172667_71 (sequence is synthesized)
tggctcattttggctgtgtatcctcacttatgtactgatttctgataaaggcttgacattattataacacgcattttgtgttccagtttaataaaacggtttctgagtcttgtctgaaaa

SEQ ID NO: 586551 - DNA, 120 bp, Artificial Sequence
  ENSG00000172667_72 (sequence is synthesized)
atccactcagccgccttaaccgccaaccagcaggctaagggaggaacagaatgaacaatgtttggatcccaatgactggagatgaaagttgcaaaagctctgcccaggcttctaccaagg

SEQ ID NO: 586552 - DNA, 120 bp, Artificial Sequence
  ENSG00000172667_73 (sequence is synthesized)
attaactttccagggcatctgctgaactgctcttcggggctgtctgctgagattggcggcgggaccctcccgcctctcactcgtgcctttgttccccacgccggcctaaccccgcgcccc

SEQ ID NO: 586553 - DNA, 120 bp, Artificial Sequence
  ENSG00000172667_74 (sequence is synthesized)
ctcgcggccagggcacctgacccacgcgccgcccgccggggatgcgggagccgccactgctaccgctgccaccgctgccgggcctgctccgccaagcacatgcgcagtggcgacgccgag

SEQ ID NO: 586554 - DNA, 120 bp, Artificial Sequence
  ENSG00000172667_75 (sequence is synthesized)
cggcgcgtcccgggggttccggcatttcacgtggaccaggtggatcatctgtgcgtgcagctgccttggccctctcagttgcccccgccccgtgggagtcgggggattccatccttcgtg

SEQ ID NO: 586555 - DNA, 120 bp, Artificial Sequence
  ENSG00000172667_76 (sequence is synthesized)
gctttcaggacgagcccctggagcgccggggactagcggttcctttccgatgctctttccatctgccctccacgtgacagggcttgcgctgcttctatttatcagtttgcttgtttcagg

SEQ ID NO: 586556 - DNA, 120 bp, Artificial Sequence
  ENSG00000172667_77 (sequence is synthesized)
tttcagtgatatgaagttaaaaccagatctgaaaggtcaatggtgtagtggaaagcgtgtagatgttggcattagacccaagttaaacctcagaccttccagttacagacggtgtcatca

SEQ ID NO: 586557 - DNA, 120 bp, Artificial Sequence
  ENSG00000172667_78 (sequence is synthesized)
aacggaaagagagattcaagacacacaaagaggataaacatggagttgaaggccatgtgaagatggaagcagagactggaatgatgcatcaccatcaagaattgctggcacccacaagaa

SEQ ID NO: 586558 - DNA, 120 bp, Artificial Sequence
  ENSG00000172667_79 (sequence is synthesized)
gctaggagagaggcgtgggacagattctccctctaaacctccagaagaaaccaactctgctgacactgtgatttcagacttctggtcctcacaactgtgagagaattcatttctgttgct

SEQ ID NO: 586559 - DNA, 120 bp, Artificial Sequence
  ENSG00000172667_80 (sequence is synthesized)
ataagccaccaaatttgtggtaacttgttctgcagccttaggaaattaacacatttggtgtgttaattaggttgataattaggtcaacttcccataagtgaaagcctgtgggaatgttgg

SEQ ID NO: 586560 - DNA, 120 bp, Artificial Sequence
  ENSG00000172667_81 (sequence is synthesized)
gctaagagacctatttctgatttctggctccacaacttattagtttgtggtcataaacatttaacctctgtgaacctcagttttcttatctgtagaatgggcttccttgaaggagccttc

SEQ ID NO: 586561 - DNA, 120 bp, Artificial Sequence
  ENSG00000172667_82 (sequence is synthesized)
tcctgaatccagtctgtaaaaaacttttgttctctaggcaaactttccctttatctctacacttaggccctgtgttaattatttttgcttatctttgattctatcagactgaacaaattc

SEQ ID NO: 586562 - DNA, 120 bp, Artificial Sequence
  ENSG00000172667_83 (sequence is synthesized)
tctgagggctgagattatatgatgtttaccttaatggtaatgatacctataacacagcaggtatcctcaatccatgcttatatggttgtttggaggagtaagtctggtacttggtagcaa

SEQ ID NO: 586563 - DNA, 120 bp, Artificial Sequence
  ENSG00000172667_84 (sequence is synthesized)
tggttatctatgataattatttatgactgtttttaagatttgtagtcttctttttcatttttagtcacacatctgtacatccctcagggaaaaggcagaatttagactgtttttttgaga

SEQ ID NO: 586564 - DNA, 120 bp, Artificial Sequence
  ENSG00000172667_85 (sequence is synthesized)
aacatgtatacttaagctcgtggagaggttcaaggaaaatgctgtaggtgaaggatacaacaggaaatgagcgtggtctgctcacaggatgctaggagcctatctgcatagaggggaagc

SEQ ID NO: 586565 - DNA, 120 bp, Artificial Sequence
  ENSG00000172667_86 (sequence is synthesized)
ttcattcctgcataaaaagatgtattcttaggtattcttagctgtattgtaagttccctttcccttaaagcatggtatgcaaactctatagtataggatccacatttttgcacgtgtttc

SEQ ID NO: 586566 - DNA, 120 bp, Artificial Sequence
  ENSG00000172667_87 (sequence is synthesized)
ctttttgttaaacttatttgtttatatacatgacctcaacatgtttgtggcctagggtcatgtgtggtgaaactaaatgggatcacagatctcagaactatggccagaccagctgtccga

SEQ ID NO: 586567 - DNA, 120 bp, Artificial Sequence
  ENSG00000172667_88 (sequence is synthesized)
atctgggattatctccatctataaatagtgactgggcacaaaatcaactagcaaaattaagggttatagggcttgggtatttggggaaaaaaagaaaggaaagcatgccaagaaatccaa

SEQ ID NO: 586568 - DNA, 120 bp, Artificial Sequence
  ENSG00000172667_89 (sequence is synthesized)
gtgttagaaattaaccctccaggaacaaaagcagtggaaagctataggcaaccgcaattgacagcaataaatctcgtcaggaatggaaatgtatgaattggtaaaaaggaaaatataagg

SEQ ID NO: 586569 - DNA, 120 bp, Artificial Sequence
  ENSG00000172671_0 (sequence is synthesized)
gttgtcggccagtgccttccgtgaagttgctcgccgggtcgttgggccctgtcgacctgtaggcgggcgagcgagccagcggacaagactgcgggtgaggctgagctagcgagcggccgg

SEQ ID NO: 586570 - DNA, 80 bp, Artificial Sequence
  ENSG00000172671_1 (sequence is synthesized)
gccgccgccggccgtcgtggggccggaatggcgcaaggccggagtggcgcgggcgctcggcgctgggctgccgggtagag

SEQ ID NO: 586571 - DNA, 120 bp, Artificial Sequence
  ENSG00000172671_2 (sequence is synthesized)
agagtcctgtccccgcccctcgccttgcggcctgacgccggccgctgctgcccggggaccggagcggcgggccgcctttgcccaggacacacgctctggcgtttgttcctttgggcgtga

SEQ ID NO: 586572 - DNA, 120 bp, Artificial Sequence
  ENSG00000172671_3 (sequence is synthesized)
cgccagcttcaacgggtacgcggctttcccgacgggtgctgatctccgagtcgctgttgtcacgcggactgctgtcctccagattcaggccggtgggtctggggagcccggattggtctt

SEQ ID NO: 586573 - DNA, 120 bp, Artificial Sequence
  ENSG00000172671_4 (sequence is synthesized)
ggaggagcaacggctgcgcaggtgactcggtggcctcaagtgtgtacaaaactcaaaacatgaacaacaatatatattaccaatcttcaaacctggtttgcctagaactggaatacagtt

SEQ ID NO: 586574 - DNA, 120 bp, Artificial Sequence
  ENSG00000172671_5 (sequence is synthesized)
gcctgcgacatattttagaagaactagaaaagtcaaagtaatggataacagaaaagagcctccattcttcaatgatgataacatgggaccattttactacagacttcatttctgtgatac

SEQ ID NO: 586575 - DNA, 120 bp, Artificial Sequence
  ENSG00000172671_6 (sequence is synthesized)
catggagctcttcattgaaacattaactggaacatgttttgagctgagagtttcaccttttgaaactgttatttctgtgaaagcaaaaattcgaagattggaaggtattcccatctgtcg

SEQ ID NO: 586576 - DNA, 120 bp, Artificial Sequence
  ENSG00000172671_7 (sequence is synthesized)
acaacacttaatttggaataacatggaacttgaaaatgattattgcttgaatgattacaacatttcagaagggtgtaccttgaagctagttttggctatgcgtggcggacctataaatac

SEQ ID NO: 586577 - DNA, 120 bp, Artificial Sequence
  ENSG00000172671_8 (sequence is synthesized)
tagaagagttcctacagacgatccacttaggaagatggcagagtacttggattccagtcgagttgaggtctgggagaagacctcctgcagcaaacaagttacatttttggtataccaaga

SEQ ID NO: 586578 - DNA, 120 bp, Artificial Sequence
  ENSG00000172671_9 (sequence is synthesized)
aggagatcaattgaatttctttcctgcagtagataggggagatggcactttaacaccgttatctgactcttcaaagaaaatagattttcatttgcatgtcctacggagaaaaggagaaca

SEQ ID NO: 586579 - DNA, 120 bp, Artificial Sequence
  ENSG00000172671_10 (sequence is synthesized)
tcgtatgagtggtggttctatgtataattcagatacagatgaggatgaagaaactgagccttcttcttctgggcaacagataattgaaaattcaataactatgaataagatgaagctgct

SEQ ID NO: 586580 - DNA, 120 bp, Artificial Sequence
  ENSG00000172671_11 (sequence is synthesized)
gaaggctaagatgaagaacatgaatctcagcaaaaagcctaagaaagctgtcaagataaaacctcacccacctgtagctcctcgaccttctagtggttccactgcaccatctcgccaccg

SEQ ID NO: 586581 - DNA, 120 bp, Artificial Sequence
  ENSG00000172671_12 (sequence is synthesized)
attgttaagggtcctccccaacattggtcaatcttgttcacctgcttttgggaatgcatatccgcccgaaatctccaggaatggaatttcaagtttggcaactcaactctctgctgagag

SEQ ID NO: 586582 - DNA, 120 bp, Artificial Sequence
  ENSG00000172671_13 (sequence is synthesized)
atacatatcttctatcactggtgaatttcttaaggaagataatagctgggagaataacacactgtctcacttcagtagcaacgtcaaactacctcctcagataccccatttggagttggg

SEQ ID NO: 586583 - DNA, 120 bp, Artificial Sequence
  ENSG00000172671_14 (sequence is synthesized)
aaatgaccaggagcttgctgactctgttctccatcttggatcatccctgcctaggcaaacaaaacattttttaggaaacttgccatctagtaatgggaacattgtcttaccttcagaaga

SEQ ID NO: 586584 - DNA, 120 bp, Artificial Sequence
  ENSG00000172671_15 (sequence is synthesized)
ctggcttcatttgcagaaggaaatgctgatgaacagagcagcggcttagaaggtgcgtgcaaagtgaatctggagttgctactcactaatgctgacaaagggttgaaagctccagagcag

SEQ ID NO: 586585 - DNA, 120 bp, Artificial Sequence
  ENSG00000172671_16 (sequence is synthesized)
catctcaagcatgttgcaggagtgctgaatggggaatcagtagagacttcagttcttaactaccgggaattaagtcctcacaagaatagactcttgtcacctcttcgctgttctgcacca

SEQ ID NO: 586586 - DNA, 120 bp, Artificial Sequence
  ENSG00000172671_17 (sequence is synthesized)
atgtcgctacataattctctggtgaaaccagagagacagtccaaatgttttgagtttgggaagctacagccttcttcttctcagtcactggatgttcaaaacataactgattcttctttc

SEQ ID NO: 586587 - DNA, 120 bp, Artificial Sequence
  ENSG00000172671_18 (sequence is synthesized)
tctaggactacttgctttcaaggtgttaaagttgattcacttgggaaaagatctgatgttatttccaaagttgaggctcgggatatcacagaaatgactaacaaggcttccaaagagcct

SEQ ID NO: 586588 - DNA, 120 bp, Artificial Sequence
  ENSG00000172671_19 (sequence is synthesized)
gttggttgtgtaaataatatcagttttcttgcctcactggccgggagcacaagcagaaatagattacagagcacacgtggggcaggcaggcttcagaactctggaactgggctgtctaca

SEQ ID NO: 586589 - DNA, 120 bp, Artificial Sequence
  ENSG00000172671_20 (sequence is synthesized)
aacctccagcattttcaggaagaaaactttaggaaaagttctccccagttagaacatacaggagtttttttgtctacccatggtgttggaatgaatggaaataatgcagcagcagggaaa

SEQ ID NO: 586590 - DNA, 120 bp, Artificial Sequence
  ENSG00000172671_21 (sequence is synthesized)
agcgtaggagaatgtactactcatcacctcccacctgtgaaagcccctcttcagacaaagaagaaaacaacaaatcattgttttctttgtggaaagaaaacaggactggctagtagctac

SEQ ID NO: 586591 - DNA, 120 bp, Artificial Sequence
  ENSG00000172671_22 (sequence is synthesized)
gaatgcagatgtggaaacaacttctgtgcatctcatcgttatgcagaaactcatggctgtacctatgattacaagagtgcagggaggagatacttgcacgaggcaaatcctgtggttaat

SEQ ID NO: 586592 - DNA, 120 bp, Artificial Sequence
  ENSG00000172671_23 (sequence is synthesized)
gcaccaaagcttccaaaaatctaactcttcctctacatcttactgttctgcccgggattcgtattataatgacagaagaaatgttgtttagactattatttttgttcgactctaaaagat

SEQ ID NO: 586593 - DNA, 120 bp, Artificial Sequence
  ENSG00000172671_24 (sequence is synthesized)
ttgccaaataacaaaagcatacaatgcatactgttggagaacaagaatgctactgtattttacatctttatttcttggtgaaacaaaagttttaaaagtagttttaacaactttacactg

SEQ ID NO: 586594 - DNA, 120 bp, Artificial Sequence
  ENSG00000172671_25 (sequence is synthesized)
gaatgatttagctttgttattgcatgtcttgtgttaagtgttttgtatatgatattgcagttttactaggcaaatcttcaaaagatgcactttaggaaacgaaatatttcctaaataacc

SEQ ID NO: 586595 - DNA, 120 bp, Artificial Sequence
  ENSG00000172671_26 (sequence is synthesized)
aggcttccacattgtacagaatgagcagtcatgtaatgaatggctctactcagattgaccatatgggttttttctttttctttcttttattcttctccttctttttttttcagaggtggg

SEQ ID NO: 586596 - DNA, 120 bp, Artificial Sequence
  ENSG00000172671_27 (sequence is synthesized)
atgggtggagattttttaaaaatcccacgtgtgaaagtttactggctttattagcaagttcctttttacttcaagctactttttataaaaaagaacatttttccagtgtggtttttaaca

SEQ ID NO: 586597 - DNA, 120 bp, Artificial Sequence
  ENSG00000172671_28 (sequence is synthesized)
gataatacatttcttccacattcagattagtattcggacatgaatccattctataaaacacatcgtgttcatgatagtgtatattttactactttttgaatgttaattttaaaatagaag

SEQ ID NO: 586598 - DNA, 120 bp, Artificial Sequence
  ENSG00000172671_29 (sequence is synthesized)
atgtcccacttgccattaaatatagaagccaactttttaccttttgaaatatggctacatttaaaacaaaatctcacagctcggtttttcttatttgttgagtgctattaccaggagaaa

SEQ ID NO: 586599 - DNA, 80 bp, Artificial Sequence
  ENSG00000172671_30 (sequence is synthesized)
tcggtttttcttatttgttgagtgctattaccaggagaaattcaaataaatattcaatttcattatgaatttcattattt

SEQ ID NO: 586600 - DNA, 120 bp, Artificial Sequence
  ENSG00000172671_31 (sequence is synthesized)
agcggagcgttgtcggccagtgccttccgtgaagttgctcgccgggtcgttgggccctgtcgacctgtaggcgggcgagcgagccagcggacaagactgcgggtacaaaactcaaaacat

SEQ ID NO: 586601 - DNA, 120 bp, Artificial Sequence
  ENSG00000172671_32 (sequence is synthesized)
tacctggtttgtgatgtgtctgggtttcatggatattatcatggccccggttgcatcctttctcagaatataagtagttctgaaatccagtcattcattcaacaaatacgtattgagcgt

SEQ ID NO: 586602 - DNA, 120 bp, Artificial Sequence
  ENSG00000172671_33 (sequence is synthesized)
ctactgaatggtcagtgcaatgttccaagtatggtagacatgggagagaaagtctctgcttcatgacagtgcctacaataaatgtgtaaagagtcgatgtaactcctaatggttgtaagt

SEQ ID NO: 586603 - DNA, 120 bp, Artificial Sequence
  ENSG00000172671_34 (sequence is synthesized)
gctatgcagaaaatagggtaggaagggccctcgaaaaagatgacattagtggagacttgattgatgagagggttttattaagcacaagaagagacggcagtattcacattggtccctgag

SEQ ID NO: 586604 - DNA, 120 bp, Artificial Sequence
  ENSG00000172671_35 (sequence is synthesized)
gtcacatgaattcccatgaagtggaggagactagtcagagcatcctcttctgtggacctcattttgaggaagtccttcagatttatttgatccttcactaaccagaaaaccgaaggataa

SEQ ID NO: 586605 - DNA, 120 bp, Artificial Sequence
  ENSG00000172671_36 (sequence is synthesized)
gtattgattctactcctggcttgcttccacatgtcaaattatatccctatgtttaataattttggttagaaaataggattattgccatctttttcttagctatttcaagaggatttaatg

SEQ ID NO: 586606 - DNA, 120 bp, Artificial Sequence
  ENSG00000172671_37 (sequence is synthesized)
agatatgctactttggctgttggactgctttttataggttagagaaaaacaaagttaataatgttagggccttttagcactcctgataccagagacttttaattaattggatttaggtaa

SEQ ID NO: 586607 - DNA, 120 bp, Artificial Sequence
  ENSG00000172671_38 (sequence is synthesized)
ttgtcctatgtgacatttatagtaataactataaatgtttatagtaataactatgtgatgtttatagtaataactcttgaagtagcacaagaaccctgtgtttactgaaccattatgtta

SEQ ID NO: 586608 - DNA, 120 bp, Artificial Sequence
  ENSG00000172671_39 (sequence is synthesized)
agatagaattatatagtgtttaatgccatgtgaactctattgtattacatttttgaaagttggttatttgtgcgtagtactactttaaaccaaagtgtttaatcaaaacacctacttttc

SEQ ID NO: 586609 - DNA, 120 bp, Artificial Sequence
  ENSG00000172671_40 (sequence is synthesized)
aaaacacctacttttcttattagaactaaaattattttatatgtttatgaggagtgtgatacagattctgaggtaaatatatatattttttacttttctttttttttttgagacggagtc

SEQ ID NO: 586610 - DNA, 120 bp, Artificial Sequence
  ENSG00000172671_41 (sequence is synthesized)
ggagacagacgttacagtgagtggagactgcgccactacagtccagtctgggtgacagaggttacagtgagtggagactgcgccactacagtccagtctgggtgacagagtgagactctg

SEQ ID NO: 586611 - DNA, 120 bp, Artificial Sequence
  ENSG00000172671_42 (sequence is synthesized)
tgttcagtacacatttgagagaaggcttcagagaggagttgataattgatgatgtcttacaggataagtcaaattctactgggttgacaaggtagagtttactttagaagagattgcaga

SEQ ID NO: 586612 - DNA, 120 bp, Artificial Sequence
  ENSG00000172671_43 (sequence is synthesized)
ggagaagctcagatgctttctctgtgataacccagcttggggattatgcaaaataaaatatttaaattgcctgtttataacatcattaagatgatgttcaatagctatcttcagttgaac

SEQ ID NO: 586613 - DNA, 120 bp, Artificial Sequence
  ENSG00000172671_44 (sequence is synthesized)
ttctaattggctgaagtaaagaacaagtagatagctcatgggtttccaaaagacaaaaacagatccttccttgtcctttaagttaggaggtttaaaccaatctgagagtgtacctttttc

SEQ ID NO: 586614 - DNA, 120 bp, Artificial Sequence
  ENSG00000172671_45 (sequence is synthesized)
gtcttatgatgaacctgcttggattttgtttgagtggcaccttggaagaacccctccctgaatattctattaaaaatttaattaaaaaattaaaagttaatataaaatagatgaataata

SEQ ID NO: 586615 - DNA, 120 bp, Artificial Sequence
  ENSG00000172671_46 (sequence is synthesized)
cagcaaaaaggtgaagctgttggcatttgaccaggcttatctctagcttacccctgcagagcactcagcaatgaggtctgttggtcattgtgaaaaaattataaagtattattcatttca

SEQ ID NO: 586616 - DNA, 120 bp, Artificial Sequence
  ENSG00000172673_0 (sequence is synthesized)
agctactccaccccactctggctgtagtgtgacattcctgcctgcctgaggaagaaatggtgagcaggggctgcaattgcagacaagtgtcacccagaagccacaagtttctgtgagcac

SEQ ID NO: 586617 - DNA, 120 bp, Artificial Sequence
  ENSG00000172673_1 (sequence is synthesized)
caggtctacaaactacccaaggcatagcaatggcattatcactggaagaattcgtccactcccttgacctcaggaccctacccagggttctagaaatccaggcaggcatctatcttgaag

SEQ ID NO: 586618 - DNA, 120 bp, Artificial Sequence
  ENSG00000172673_2 (sequence is synthesized)
gctctatttatgaaatgtttggaaatgaatgctgtttttcaacaggagaagtgattaaaattactggtctcaaagttaagaagatcatagctgaaatttgtgagcagattgaaggttgtg

SEQ ID NO: 586619 - DNA, 120 bp, Artificial Sequence
  ENSG00000172673_3 (sequence is synthesized)
agtctctacagccatttgaactgcctatgaattttccaggtctttttaagattgtggctgataaaactccataccttactatggaagaaatcacaaggaccattcatattggaccaagta

SEQ ID NO: 586620 - DNA, 120 bp, Artificial Sequence
  ENSG00000172673_4 (sequence is synthesized)
gactagggcatccttgcttctatcatcagaaggatataaaactagagaacctcatcataaagcagggtgagcaaatcatgctcaactcagttgaagagattgatggagaaataatggtga

SEQ ID NO: 586621 - DNA, 120 bp, Artificial Sequence
  ENSG00000172673_5 (sequence is synthesized)
gctgtgcagtagcaaggaatcatcaaactcactcatttaatttgcctttgtcacaagaaggagaattctacgagtgtgaagatgaacgtatttacactctaaaggagattgttgaatgga

SEQ ID NO: 586622 - DNA, 120 bp, Artificial Sequence
  ENSG00000172673_6 (sequence is synthesized)
agattcctaagaacagaacaagaactgtaaaccttacagatttttcaaataagtgggactcaacgaatccatttcctaaagacttttatggtaccctgattctcaagcctgtttatgaaa

SEQ ID NO: 586623 - DNA, 120 bp, Artificial Sequence
  ENSG00000172673_7 (sequence is synthesized)
ttcaaggtgtgatgaaatttcgaaaagatataatccgcatcctccccagtctagatgtcgaagtcaaagacatcactgattcttacgatgctaactggtttcttcagctgttatcaacag

SEQ ID NO: 586624 - DNA, 120 bp, Artificial Sequence
  ENSG00000172673_8 (sequence is synthesized)
aagatctttttgaaatgactagtaaagagttccccatagtgactgaagtcatagaagcacctgaaggaaaccacctgccccaaagcattttacagcctgggaaaaccattgtgatccaca

SEQ ID NO: 586625 - DNA, 120 bp, Artificial Sequence
  ENSG00000172673_9 (sequence is synthesized)
aaaagtaccaggcatcaagaatcttagcttcagaaattagaagcaattttcctaaaagacacttcttgatccccactagctataaaggcaagttcaagcggcgaccgagggagttcccaa

SEQ ID NO: 586626 - DNA, 120 bp, Artificial Sequence
  ENSG00000172673_10 (sequence is synthesized)
cggcctatgacctagagatcgctaagagtgaaaaggagcctcttcacgtggtggccaccaaagcgtttcattcccctcatgacaagctgtcatccgtatctgttggggaccagtttctgg

SEQ ID NO: 586627 - DNA, 120 bp, Artificial Sequence
  ENSG00000172673_11 (sequence is synthesized)
tgcatcagtcagagacgactgaagtcctctgtgagggaataaaaaaagtggtgaatgttctggcctgtgaaaaaatcctcaaaaagtcctatgaggctgcgctgctccctttgtacatgg

SEQ ID NO: 586628 - DNA, 120 bp, Artificial Sequence
  ENSG00000172673_12 (sequence is synthesized)
aaggaggttttgtagaggtgattcatgataagaaacagtacccgatttctgagctctgtaaacagttccgtttgcccttcaatgtgaaggtgtctgtcagggatctttccattgaagagg

SEQ ID NO: 586629 - DNA, 120 bp, Artificial Sequence
  ENSG00000172673_13 (sequence is synthesized)
acgtgttggctgccacaccaggactgcagttggaggaggacattacagactcttacctactcataagtgactttgccaaccccacggagtgctgggaaattcctgtgggccgcttgaata

SEQ ID NO: 586630 - DNA, 120 bp, Artificial Sequence
  ENSG00000172673_14 (sequence is synthesized)
tgactgttcagttagttagtaatttctctagggatgcagaaccatttctagtcaggactctggtagaagagatcactgaagagcaatattacatgatgcggagatatgaaagctcagcct

SEQ ID NO: 586631 - DNA, 120 bp, Artificial Sequence
  ENSG00000172673_15 (sequence is synthesized)
cacatcccccacctcgccctccgaaacacccctcagtagaggaaacaaagttaaccctgctaaccttagcagaagaaaggacggtagacctgcccaagtctcccaagcgtcatcacgtag

SEQ ID NO: 586632 - DNA, 120 bp, Artificial Sequence
  ENSG00000172673_16 (sequence is synthesized)
caagctggcctggattcaaaagtactgattggtagtcagaatgatttggtggatgaagagaaagaaaggagcaaccgtggggccacagcaatagcagaaacattcaaaaatgaaaaacat

SEQ ID NO: 586633 - DNA, 120 bp, Artificial Sequence
  ENSG00000172673_17 (sequence is synthesized)
caaaaataacaagatgtgacagaagccacttaggcagcaaacataaatgttgcagtgaaaaaagaagctagccttctagctgaaaaacgagtattccccaatggactccagaagaaactt

SEQ ID NO: 586634 - DNA, 120 bp, Artificial Sequence
  ENSG00000172673_18 (sequence is synthesized)
gattcatcgctgcaaaggaaagaacaaccttaaaacttttaacagataaaacttacagaaacctatgatatagaattcatatagtctattctgttgtgtctaaatctgtaggcattgtgt

SEQ ID NO: 586635 - DNA, 120 bp, Artificial Sequence
  ENSG00000172673_19 (sequence is synthesized)
tgttgttctttaggacgtatttatttaacttgcacattttttcagattcttatttctactaccaacaactaagtaattgggaaataattctgtatttcagtttctgagtaaaaccagtct

SEQ ID NO: 586636 - DNA, 120 bp, Artificial Sequence
  ENSG00000172673_20 (sequence is synthesized)
gaaataggataaaagccaccaaatattttcttttttttccagaatttgttttgccattttttagtgctatcatcattcctaacaagactaacttacagaaaaataattatatctgactga

SEQ ID NO: 586637 - DNA, 120 bp, Artificial Sequence
  ENSG00000172673_21 (sequence is synthesized)
tttaaaatgttcaggtttcttatccaaatcccttggaactatggaaaggagtttgatttcacattcacagtgtatttacaaaatacgctgtgtcataaatatgtttgaattccaacagcc

SEQ ID NO: 586638 - DNA, 120 bp, Artificial Sequence
  ENSG00000172673_22 (sequence is synthesized)
aaagccattgagagtcataggagttttccataaccttctcttctatgacccaacaacaagctcatgactgaaatttcaccagatttctgagacgatgtcttaatattctatgtgctatgt

SEQ ID NO: 586639 - DNA, 120 bp, Artificial Sequence
  ENSG00000172673_23 (sequence is synthesized)
accagataattctttagatgaatgtttcttaggattgtaggaaaattatctagttaatcataatatttgatggaaagaaaaagacaataaaattgtaatataataaatttggctgacaag

SEQ ID NO: 586640 - DNA, 120 bp, Artificial Sequence
  ENSG00000172673_24 (sequence is synthesized)
aaaccaaagtgattcttaattagtatacatcagaatgatgctcttatagttgtaccatctataaaaattactttaagggctctcacattttaataatttatcttattatgtattaagtat

SEQ ID NO: 586641 - DNA, 120 bp, Artificial Sequence
  ENSG00000172673_25 (sequence is synthesized)
acaggaacaatattatttttcctttaacaaaatgaagagacaggctatctggttaatgttacataggaatttaatagtaatgcttgaacttcatccatagatcatactctgtacaaaatt

SEQ ID NO: 586642 - DNA, 120 bp, Artificial Sequence
  ENSG00000172673_26 (sequence is synthesized)
tgttagctaacatcctatctcataattattttatgttttgtggagaaatttgttgattttgtaccaaagtgtttctgaagacaataaattgtgagtcaactttagaacaaaaaaaattag

SEQ ID NO: 586643 - DNA, 120 bp, Artificial Sequence
  ENSG00000172673_27 (sequence is synthesized)
agttttttcaatgtttatattctgattaagcttactttaccttacattttttctaagtaacaatgaatcctgatttctagtgtcctaaaaattgcttagtgatttgattgtggtaatatc

SEQ ID NO: 586644 - DNA, 120 bp, Artificial Sequence
  ENSG00000172673_28 (sequence is synthesized)
atttcttatctacaatgtctaaagttttatgggacagtttttcttttatttattttgcctgtttgtgcagataagaacagaaacttttctaagacccacatttggttattgaaggccaca

SEQ ID NO: 586645 - DNA, 120 bp, Artificial Sequence
  ENSG00000172673_29 (sequence is synthesized)
gcgaatcttaacctaacagccttgacaaactgcaccataggtgtttttagactcatataatttgttatttttcaaacaatagtgaataattaatatttttgtttggaatttgagaacaat

SEQ ID NO: 586646 - DNA, 120 bp, Artificial Sequence
  ENSG00000172673_30 (sequence is synthesized)
taaatttgtacttttagtaactaccattctttgattagaaaattaagagaatgcatatcttactttggttgtaaattatcaagggctttctaatagaaatcatatataacatttctaaat

SEQ ID NO: 586647 - DNA, 120 bp, Artificial Sequence
  ENSG00000172673_31 (sequence is synthesized)
ataagtcctttcacatactgtgtttccagttgtcttgatattgaaaagtgtaataaacttcatgctcacctattggagatttgggaaggttgaaaataaacttcctaatttttatttgta

SEQ ID NO: 586648 - DNA, 120 bp, Artificial Sequence
  ENSG00000172673_32 (sequence is synthesized)
tgttctcttctatgtttaactctagaataactatcttcctgtaacgattaagttaaaatattctttaactagaattgaaataaattgttcactaaggagggggctgcttgtgctaaaaaa

SEQ ID NO: 586649 - DNA, 120 bp, Artificial Sequence
  ENSG00000172673_33 (sequence is synthesized)
ttcacagataaagtgttctgcagactcaaggtttatacttacaattacgagatttatatttgcattagtctctttggctggtgggtaggggtgagaggctcttcctggatcccttatttt

SEQ ID NO: 586650 - DNA, 120 bp, Artificial Sequence
  ENSG00000172680_0 (sequence is synthesized)
atgccctcgcccctggccctacgcccctacctccggagcgagttttccccatcggtggacgcgcggccctgcagcagtccctcagagctacctgcgaagctgcttctgggggccactctt

SEQ ID NO: 586651 - DNA, 120 bp, Artificial Sequence
  ENSG00000172680_1 (sequence is synthesized)
cctcgggccccgcggctgccgcgccggctggcctggtgctccattgactgggagcaggtgtgcttgctgcagaggctgggagctggagggtttggctcggtgtacaaggcgacttaccgc

SEQ ID NO: 586652 - DNA, 120 bp, Artificial Sequence
  ENSG00000172680_2 (sequence is synthesized)
ggtgttcctgtggccataaagcaagtgaacaagtgcaccaagaaccgactagcatctcggcggagtttctgggctgagctcaacgtagcaaggctgcgccacgataacatcgtgcgcgtg

SEQ ID NO: 586653 - DNA, 120 bp, Artificial Sequence
  ENSG00000172680_3 (sequence is synthesized)
gtggctgccagcacgcgcacgcccgcagggtccaatagcctagggaccatcatcatggagttcggtggcaacgtcactttacaccaagtcatctatggcgccgccggccaccctgagggg

SEQ ID NO: 586654 - DNA, 120 bp, Artificial Sequence
  ENSG00000172680_4 (sequence is synthesized)
ggcctgctcttcctccactcgcaaagcattgtgcacttggacctgaagcccgcgaacatcttgatcagtgagcaggatgtctgtaaaattagtgacttcggttgctctgagaagttggaa

SEQ ID NO: 586655 - DNA, 120 bp, Artificial Sequence
  ENSG00000172680_5 (sequence is synthesized)
gatctgctgtgcttccagacaccctcttaccctctaggaggcacatacacccaccgcgccccggagctcctgaaaggagagggcgtgacgcctaaagccgacatttattcctttgccatc

SEQ ID NO: 586656 - DNA, 120 bp, Artificial Sequence
  ENSG00000172680_6 (sequence is synthesized)
actctctggcaaatgactaccaagcaggcgccgtattcgggggagcggcagcacatactgtacgcggtggtggcctacgacctgcgcccgtccctctccgctgccgtcttcgaggactcg

SEQ ID NO: 586657 - DNA, 120 bp, Artificial Sequence
  ENSG00000172680_7 (sequence is synthesized)
ctccccgggcagcgccttggggacgtcatccagcgctgctggagacccagcgcggcgcagaggccgagcgcgcggctgcttttggtggatctcacctctttgaaagctgaactcggctga

SEQ ID NO: 586658 - DNA, 120 bp, Artificial Sequence
  ENSG00000172687_0 (sequence is synthesized)
gtccaatcaggcacgcagcttgagcggagaggacggcttccgggatgtggcgggatttgtccgcttctttgtctttggctgccgctggaactccgggtctcgtcttcactgctctgtgtc

SEQ ID NO: 586659 - DNA, 120 bp, Artificial Sequence
  ENSG00000172687_1 (sequence is synthesized)
ctctgctcctagaggcccagcctctggtcctgtgacctgcaggtattgggaatccacagctaagacgccgggacaccctggaagcctagaaatggacgacctgaggtatggagtgtatcc

SEQ ID NO: 586660 - DNA, 120 bp, Artificial Sequence
  ENSG00000172687_2 (sequence is synthesized)
tgtcaagggggcaagtggataccctggggctgagaggaatcttctggagtactcttattttgaaaaggggccgttgacatttagggatgtggtcatagaattctctcaggaggagtggca

SEQ ID NO: 586661 - DNA, 120 bp, Artificial Sequence
  ENSG00000172687_3 (sequence is synthesized)
atgcctggacactgctcagcaagatttgtataggaaagtgatgttagagaacttcagaaacctggtgttcttgggtattgatgtctctaagccagatctgatcacctgtctggagcaagg

SEQ ID NO: 586662 - DNA, 120 bp, Artificial Sequence
  ENSG00000172687_4 (sequence is synthesized)
aaaagatccctggaatatgaagagacacagtatggtagccacacccccagaaagtggggtattgaaatttcctactataattatattgctgtctaggtgtttcttccagtctgtcaatat

SEQ ID NO: 586663 - DNA, 120 bp, Artificial Sequence
  ENSG00000172687_5 (sequence is synthesized)
ttgctttatatatttggaaccttagtgtgacatacacacagacacacagacgtgcacacacacacacacacacacaaaatttgtcataggttcccagttaataaatctattattgtttaa

SEQ ID NO: 586664 - DNA, 120 bp, Artificial Sequence
  ENSG00000172687_6 (sequence is synthesized)
tgtctttctttgtctctttgcagttttgacttaaagtactttatgtaagatatgacagtttttgacttaagatgtggcttttgtaatactattttgacctcttctgctctcatttggtta

SEQ ID NO: 586665 - DNA, 120 bp, Artificial Sequence
  ENSG00000172687_7 (sequence is synthesized)
atatttgcatgcaatgtctaaatctatcttgccaccttcagtatgtttttaatcattagatgtcagctgacccttgtagaaaggcaaattggatcttggtttttaataattttaaataaa

SEQ ID NO: 586666 - DNA, 120 bp, Artificial Sequence
  ENSG00000172687_8 (sequence is synthesized)
tttctttattgaaagtatgtctcttgattggaaagttttctgaaacaaagagacttactaattttttttgttgttctatttgattcttgcatctttgtcccacattttctctctttgttt

SEQ ID NO: 586667 - DNA, 120 bp, Artificial Sequence
  ENSG00000172687_9 (sequence is synthesized)
ctctctgtggctgttttatttttactttgatatgcttttacttctttcttatgttgttttctgtgtctatacaggcatattctttgtggtacgtgggggattacataaaacctttaagag

SEQ ID NO: 586668 - DNA, 120 bp, Artificial Sequence
  ENSG00000172687_10 (sequence is synthesized)
atgcaaaaattttttctcattacatatgttctcagatttgttcttgatgttgctaattatatttttatatgtatatttattaacatgtttataatgatttctatgcctttatctttcaaa

SEQ ID NO: 586669 - DNA, 120 bp, Artificial Sequence
  ENSG00000172687_11 (sequence is synthesized)
ttttggggaataattaaaaatttcttctgtgccattatgataatgctaagaaatgtatttttgtgtatgtgcgtatctttcccagaaaataatgtgttttaatatgattttgtgttgctt

SEQ ID NO: 586670 - DNA, 120 bp, Artificial Sequence
  ENSG00000172687_12 (sequence is synthesized)
tgttaaatcatcttattttcattggaagcaactgttttcagcaccttttatatgtaaggaagtaccaatatactttttaaaatttggttatttttgaagtttgttttctttttatttagc

SEQ ID NO: 586671 - DNA, 120 bp, Artificial Sequence
  ENSG00000172687_13 (sequence is synthesized)
aggacagatttggtgatggtattatactcacttgataactattttcttcagatttcactatatcacacagttttcttctgtcctgaaaaatttttgttgagaatccactggctatctcat

SEQ ID NO: 586672 - DNA, 77 bp, Artificial Sequence
  ENSG00000172687_14 (sequence is synthesized)
ataatatcccccaggccggagtgaaatggcgcgatttcacctcgctgtgtcccaggttcaagcagttctcctacctc

SEQ ID NO: 586673 - DNA, 67 bp, Artificial Sequence
  ENSG00000172687_15 (sequence is synthesized)
tcccgagtagctgggattacgggcatatgccaccacacccagctaagtctcctgacctcaggtgatt

SEQ ID NO: 586674 - DNA, 120 bp, Artificial Sequence
  ENSG00000172687_16 (sequence is synthesized)
ctgacctcaggtgattcacccacctcagcttcccaaagtgccgggattacaagcttgagctaccgcgcccagccaacacatcacttttatcttgcagctcccgagattctcttttctgtg

SEQ ID NO: 586675 - DNA, 120 bp, Artificial Sequence
  ENSG00000172687_17 (sequence is synthesized)
tgtgacttttaaaattgtgcttacatatgtgtttgatataaatatctttgtattctagtttgtttgttcagcttcttcatttttacatcactttttaaaagatttctgttattttttata

SEQ ID NO: 586676 - DNA, 120 bp, Artificial Sequence
  ENSG00000172687_18 (sequence is synthesized)
tttttttacctccataatttctgtttttccaatattttaaatatttctgttcttatttccagttttctgattttctgtagttctctgtgttcatattttactcattgagtattcaattta

SEQ ID NO: 586677 - DNA, 120 bp, Artificial Sequence
  ENSG00000172687_19 (sequence is synthesized)
ctgtgttcatattttactcattgagtattcaatttattttgtttttaaaattaatgtatacattttttatttctttctgaaaaatttataataattttgttggtactacattgccctgtt

SEQ ID NO: 586678 - DNA, 120 bp, Artificial Sequence
  ENSG00000172687_20 (sequence is synthesized)
caatggcgcgatctcggctcacctcaacctccgcctcccggttttaaacaattctcccacttcagcctccttagtagctgggattacaggacgacctgaggtatggagtgtatcctgtca

SEQ ID NO: 586679 - DNA, 120 bp, Artificial Sequence
  ENSG00000172687_21 (sequence is synthesized)
tatggtagccacacccccaggtaggtgagagtgaataaaacagttgacatagatgaaaggttggaagattacaaaaaaaaaaaagcagtccctataatgtgatttgggaagctgtgttcc

SEQ ID NO: 586680 - DNA, 120 bp, Artificial Sequence
  ENSG00000172687_22 (sequence is synthesized)
aaagcaaatagattctgggaagcctgaggtgtgtggtttttttgtttgttttctttttgttgttgttactgtcacatagggccatcttctgtcttaggcttttaaattctctaaggattc

SEQ ID NO: 586681 - DNA, 120 bp, Artificial Sequence
  ENSG00000172687_23 (sequence is synthesized)
tactttcccttcattgattttccttcaagttcacagtgagagccagagtcctcttcatggcatataaaagactgcacaatctgactgcatttccattgttttgggggacacacaaatatc

SEQ ID NO: 586682 - DNA, 120 bp, Artificial Sequence
  ENSG00000172687_24 (sequence is synthesized)
tgcatgattttgagaaactttatgttaaactatttttttagttctcttttgcatcatgtctaaaatgtgtgagagtagtggtcactgttctattggtttttatgttaattttctgcacat

SEQ ID NO: 586683 - DNA, 67 bp, Artificial Sequence
  ENSG00000172687_25 (sequence is synthesized)
gtcttgaactcccgacctcaggtgacctacctgggatttaagtttttcttaggtaaacttaggaaaa

SEQ ID NO: 586684 - DNA, 120 bp, Artificial Sequence
  ENSG00000172687_26 (sequence is synthesized)
ggatttaagtttttcttaggtaaacttaggaaaaacagaactggaaatactccagtgacatagaaaacaaattctacctaggttcttttccctgccccagttctgatcagattcaccatt

SEQ ID NO: 586685 - DNA, 120 bp, Artificial Sequence
  ENSG00000172687_27 (sequence is synthesized)
tttggaggccttatttaggtctggcctcactctggagtgttcccttacaaaactgatttataaagattcaagtttttgggggtaaatcctgctgactttctagagctgctgctcacagta

SEQ ID NO: 586686 - DNA, 120 bp, Artificial Sequence
  ENSG00000172687_28 (sequence is synthesized)
tcctgaaacccaaaagcagatacataagaaaaataaactatacattttaagatcttaatttttaaattttgtagtaaaaccagtgcttacagaaacgttccatttagcagattttctgtt

SEQ ID NO: 586687 - DNA, 120 bp, Artificial Sequence
  ENSG00000172687_29 (sequence is synthesized)
cctgcagatccagtagctgctctacaagtcataaacaagtaaacataaacacaaaaaaatttctctaaactacattctaaatcctgagaattattgaacacttagtatgaactttcaagg

SEQ ID NO: 586688 - DNA, 120 bp, Artificial Sequence
  ENSG00000172687_30 (sequence is synthesized)
tgttagtaggacataataacaaataataacacataatgtgttattcccagcacagtgctctgcaacatactattgagcacatagtacctgcttaataaacattgcattagttcatgtgta

SEQ ID NO: 586689 - DNA, 120 bp, Artificial Sequence
  ENSG00000172689_0 (sequence is synthesized)
gatttcccagcgctgtctctggggagctccggcagcgcaagagggcaaagcacagctggaagctcagagctgcagtcccaggtcctgggccagggcccccatccagcatcaatgaaagca

SEQ ID NO: 586690 - DNA, 120 bp, Artificial Sequence
  ENSG00000172689_1 (sequence is synthesized)
gaagccacagttattcccagccgttgtgctagggggctcccatcatggcaagtcctcagcccagtccagccctggcagacaagtgcaccccagaacacgacccagcccaagctcctggct

SEQ ID NO: 586691 - DNA, 120 bp, Artificial Sequence
  ENSG00000172689_2 (sequence is synthesized)
ccacaccagcacgagaagtcccagaagaagagcagccttcttaaggagctgggggccttccacatcaccatcgctctgctgcacctggtctttgggggctacctggcctctatagtcaag

SEQ ID NO: 586692 - DNA, 120 bp, Artificial Sequence
  ENSG00000172689_3 (sequence is synthesized)
aaccttcacctggtggtgctgaagtcttggtatccattctggggggctgcctcttttctcatttcagggatcttggcgataacaatgaagaccttttctaaaacttacctgaagatgttg

SEQ ID NO: 586693 - DNA, 120 bp, Artificial Sequence
  ENSG00000172689_4 (sequence is synthesized)
tgcctgatgacaaacctcatcagcctcttttgcgtgctgtctggcctcttcgtcatctccaaggatctctttctggagagcccatttgagtccccgatctggagaatgtaccccaactcc

SEQ ID NO: 586694 - DNA, 120 bp, Artificial Sequence
  ENSG00000172689_5 (sequence is synthesized)
acggtccacatccagaggctggagctggccttgctctgcttcactgtcctagagctcttcctgccagtgcccacagctgtcacagcctggagaggggactgcccatctgcaaagaatgat

SEQ ID NO: 586695 - DNA, 120 bp, Artificial Sequence
  ENSG00000172689_6 (sequence is synthesized)
gatgcatgccttgttccgaatacaccattgcatctcaaaggcctgccggtggagcccccgccatcctaccagagtgtgattcaaggcgacgcacaacacaagcaacatcagaggctcaga

SEQ ID NO: 586696 - DNA, 120 bp, Artificial Sequence
  ENSG00000172689_7 (sequence is synthesized)
gaagttaagcaagttgccccggacacatggatagtcactgacggagctgcgatctggacccagactgcaaactgaagagccactgcctgacaatgcccaaacttggttggagcatagccc

SEQ ID NO: 586697 - DNA, 120 bp, Artificial Sequence
  ENSG00000172689_8 (sequence is synthesized)
ctgctctcccaaagttgcactttcactgggaagatgagatttgcacatacaaaaggctagagcgatggtctatacagcaaagtcagccctcacagctcctgggaacgctgtcctctcaga

SEQ ID NO: 586698 - DNA, 120 bp, Artificial Sequence
  ENSG00000172689_9 (sequence is synthesized)
tcagataagccatttcttacatagttgatggctcgatatctgtggtggcccagattgttttgttttgtttcgctttgttttgttttcttttgttttgttgagatggagtctcgctctgtt

SEQ ID NO: 586699 - DNA, 120 bp, Artificial Sequence
  ENSG00000172689_10 (sequence is synthesized)
tccgagatagcagtctgctctctactgccttataaaatccctgtgtgaagggatgctctcagtatcatttgcccttgcacagaatatccctggggtttgaggttctttgaattctccctc

SEQ ID NO: 586700 - DNA, 120 bp, Artificial Sequence
  ENSG00000172689_11 (sequence is synthesized)
tttgtcatctctttcgctgccacttctggctgtggtcactagcttggccatagcacctctcttctccacttctgatctgctgcttctaaccttctatagattgcagctggctttaaaata

SEQ ID NO: 586701 - DNA, 120 bp, Artificial Sequence
  ENSG00000172689_12 (sequence is synthesized)
tagattgcagctggctttaaaatagattgtaaagtgtaaggcattaggttctgagacagcggcagagagagccatgcaaatgtttaggacaacccagtctttcttttttttttttttttt

SEQ ID NO: 586702 - DNA, 120 bp, Artificial Sequence
  ENSG00000172689_13 (sequence is synthesized)
acaggcatgagccaccacccctggctgaaacccaatctttcaaaacatgaaagggggtgatggagaaaaccttagcttggttgtctaaagacatgggtgcaaactctaggctagctctgc

SEQ ID NO: 586703 - DNA, 120 bp, Artificial Sequence
  ENSG00000172689_14 (sequence is synthesized)
caatcacttactgtgcgggtttgactcagtcccttcccctcactaggtcccagtttctccatttgtaaaacaagcaattgtgctacattgatggtttacatcaataaaggttgaaacggc

SEQ ID NO: 586704 - DNA, 120 bp, Artificial Sequence
  ENSG00000172716_0 (sequence is synthesized)
gcttcggaagcgctggagcttgagaggtcagagagggtccttgcccccagcctgggactccggagttgcgtttctacccgtgcttcagggtctagcccagccgaatccgcgtcgggctgt

SEQ ID NO: 586705 - DNA, 120 bp, Artificial Sequence
  ENSG00000172716_1 (sequence is synthesized)
aactcgagtgccagtttcagctgtgagttcaacatggaggcaaatcagtgccccctggttgtggaaccatcttacccagacctggtcatcaatgtaggagaagtgactcttggagaagaa

SEQ ID NO: 586706 - DNA, 120 bp, Artificial Sequence
  ENSG00000172716_2 (sequence is synthesized)
aacagaaaaaagctgcagaaaattcagagagaccaagagaaggagagagttatgcgggctgcatgtgctttattaaactcaggaggaggagtgattcgaatggccaagaaggttgagcat

SEQ ID NO: 586707 - DNA, 120 bp, Artificial Sequence
  ENSG00000172716_3 (sequence is synthesized)
cccgtggagatgggactggatttagaacagtctttgagagagcttattcagtcttcagatctgcaggctttctttgagaccaagcaacaaggaaggtgtttttacatttttgttaaatct

SEQ ID NO: 586708 - DNA, 120 bp, Artificial Sequence
  ENSG00000172716_4 (sequence is synthesized)
tggagcagtggccctttccctgaagatcgctctgtcaagccccgcctttgcagcctcagttcttcattataccgtagatctgagacctctgtgcgttccatggactcaagagaggcattc

SEQ ID NO: 586709 - DNA, 120 bp, Artificial Sequence
  ENSG00000172716_5 (sequence is synthesized)
tgtttcctgaagaccaaaaggaagccaaaaatcttggaagaaggaccttttcacaaaattcacaagggtgtataccaagagctccctaactcggatcctgctgacccaaactcggatcct

SEQ ID NO: 586710 - DNA, 120 bp, Artificial Sequence
  ENSG00000172716_6 (sequence is synthesized)
gctgacctaattttccaaaaagactatcttgaatatggtgaaatcctgccttttcctgagtctcagttagtagagtttaaacagttctctacaaaacacttccaagaatatgtaaaaagg

SEQ ID NO: 586711 - DNA, 120 bp, Artificial Sequence
  ENSG00000172716_7 (sequence is synthesized)
acaattccagaatacgtccctgcatttgcaaacactggaggaggctatctttttattggagtggatgataagagtagggaagtcctgggatgtgcaaaagaaaatgttgaccctgactct

SEQ ID NO: 586712 - DNA, 120 bp, Artificial Sequence
  ENSG00000172716_8 (sequence is synthesized)
ttgagaaggaaaatagaacaagccatatacaaactaccttgtgttcatttttgccaaccccaacgcccgataaccttcacactcaaaattgtgaatgtgttaaaaaggggagagctctat

SEQ ID NO: 586713 - DNA, 120 bp, Artificial Sequence
  ENSG00000172716_9 (sequence is synthesized)
ggctatgcttgcatgatcagagtaaatcccttctgctgtgcagtgttctcagaagctcccaattcatggatagtggaggacaagtacgtctgcagcctgacaaccgagaaatgggtaggc

SEQ ID NO: 586714 - DNA, 120 bp, Artificial Sequence
  ENSG00000172716_10 (sequence is synthesized)
atgatgacagacacagatccagatcttctacagttgtctgaagattttgaatgtcagctgagtctatctagtgggcctccccttagcagaccagtgtactccaagaaaggcctggaacat

SEQ ID NO: 586715 - DNA, 120 bp, Artificial Sequence
  ENSG00000172716_11 (sequence is synthesized)
aaaaaggaactccagcaacttttattttcagtcccaccaggatatttgcgatatactccagagtcactctggagggacctgatctcagagcacagaggactagaggagttaataaataag

SEQ ID NO: 586716 - DNA, 120 bp, Artificial Sequence
  ENSG00000172716_12 (sequence is synthesized)
caaatgcaacctttctttcggggaattttgatcttctctagaagttgggctgtggacctgaacttgcaggagaagccaggagtcatctgtgatgctctgctgatagcacagaacagcacc

SEQ ID NO: 586717 - DNA, 120 bp, Artificial Sequence
  ENSG00000172716_13 (sequence is synthesized)
cccattctctacaccattctcagggagcaagatgcagagggccaggactactgcactcgcaccgcctttactttgaagcagaagctagtgaacatggggggctacaccgggaaggtgtgt

SEQ ID NO: 586718 - DNA, 120 bp, Artificial Sequence
  ENSG00000172716_14 (sequence is synthesized)
gtcagggccaaggtcctctgcctgagtcctgagagcagcgcagaggccttggaggctgcagtgtctccgatggattaccctgcgtcctatagccttgcaggcacccagcacatggaagcc

SEQ ID NO: 586719 - DNA, 120 bp, Artificial Sequence
  ENSG00000172716_15 (sequence is synthesized)
ctgctgcagtccctcgtgattgtcttactcggcttcaggtctctcttgagtgaccagctcggctgtgaggttttaaatctgctcacagcccagcagtatgagatattctccagaagcctc

SEQ ID NO: 586720 - DNA, 120 bp, Artificial Sequence
  ENSG00000172716_16 (sequence is synthesized)
cgcaagaacagagagttgtttgtccacggcttacctggctcagggaagaccatcatggccatgaagatcatggagaagatcaggaatgtgtttcactgtgaggcacacagaattctctac

SEQ ID NO: 586721 - DNA, 120 bp, Artificial Sequence
  ENSG00000172716_17 (sequence is synthesized)
gtttgtgaaaaccagcctctgaggaactttatcagtgatagaaatatctgccgagcagagacccggaaaactttcctaagagaaaactttgaacacattcaacacatcgtcattgacgaa

SEQ ID NO: 586722 - DNA, 120 bp, Artificial Sequence
  ENSG00000172716_18 (sequence is synthesized)
gctcagaatttccgtactgaagatggggactggtatgggaaggcaaaaagcatcactcggagagcaaagggtggcccaggaattctctggatctttctggattactttcagaccagccac

SEQ ID NO: 586723 - DNA, 120 bp, Artificial Sequence
  ENSG00000172716_19 (sequence is synthesized)
ttggattgcagtggcctccctcctctctcagaccaatatccaagagaagagctcaccagaatagttcgcaatgcagatccaatagccaagtacttacaaaaagaaatgcaagtaattaga

SEQ ID NO: 586724 - DNA, 120 bp, Artificial Sequence
  ENSG00000172716_20 (sequence is synthesized)
gcaaataatgacctgtgtggcagacacgtgcaggcgcttctttgataggggctattctccaaaggatgttgctgtgcttgtcagcaccgcaaaagaagtggagcactataagtatgagct

SEQ ID NO: 586725 - DNA, 120 bp, Artificial Sequence
  ENSG00000172716_21 (sequence is synthesized)
cttgaaagcaatgaggaagaaaagggtggtgcagctcagtgatgcatgtgatatgttgggtgatcacattgtgttggacagtgttcggcgattctcaggcctggaaaggagcatagtgtt

SEQ ID NO: 586726 - DNA, 120 bp, Artificial Sequence
  ENSG00000172716_22 (sequence is synthesized)
tgggatccatccaaggacagctgacccagctatcttacccaatgttctgatctgtctggcttccagggcaaaacaacacctgtatatttttccgtggggtggccattaggaagaactcca

SEQ ID NO: 586727 - DNA, 120 bp, Artificial Sequence
  ENSG00000172716_23 (sequence is synthesized)
aatcaaaatgctatgtaaatgtctatgggtgacagtctgctgatggtagaaacctttctttttagttcacaagtcagagatttggacggagctgacacaaagagtttggagctcccccat

SEQ ID NO: 586728 - DNA, 120 bp, Artificial Sequence
  ENSG00000172716_24 (sequence is synthesized)
ttctggctctcctttcaggggttccttccccaaccctttcagcagcggtggctgccccccattctgacccctgactcttccagccagaaagatggtggttttctaaaggaactttagctg

SEQ ID NO: 586729 - DNA, 120 bp, Artificial Sequence
  ENSG00000172716_25 (sequence is synthesized)
tcctgcacaatgccgatctgtgtcttgcattttgggtaaaagccataaaaataagaaactcagcctgtggcctttctttcttccaaggctgggcttctttttttaagtgacttcatgcag

SEQ ID NO: 586730 - DNA, 120 bp, Artificial Sequence
  ENSG00000172716_26 (sequence is synthesized)
tttgttgcttttaaaaatttgtccagaatcgttttctgcagaagcatggtctgttaggagcttactggccgtagcagaagcaattgtttcctgaattcttgacatttatctttgctgtat

SEQ ID NO: 586731 - DNA, 120 bp, Artificial Sequence
  ENSG00000172716_27 (sequence is synthesized)
tcatttagggcttgggagagtccgaagataattcagtcactgtcagattaataattttgtcaggacaaagaataccgttatgattatttaatcctttaaaattgtggtctccagagcttg

SEQ ID NO: 586732 - DNA, 120 bp, Artificial Sequence
  ENSG00000172716_28 (sequence is synthesized)
ttctcagaatggcccagaccaagccttaattgtgatagtgaatattaatggtcactttaaggagaaattataggccaagatgaaatgaacataaacctgtttgccctggctttcagtgga

SEQ ID NO: 586733 - DNA, 120 bp, Artificial Sequence
  ENSG00000172716_29 (sequence is synthesized)
agatgatattagagaccaaaatctggttctgaaggtgtgtatcagccctaaggtgaaccagacttgggaaagattgtctttaaaaatcaatgagtttatgttttaacttctcagcttagt

SEQ ID NO: 586734 - DNA, 120 bp, Artificial Sequence
  ENSG00000172716_30 (sequence is synthesized)
tctatgcattgctctataacacacctagttaagttttatgttattcttgaactgtgattttttttctatttactttcatggtttggtgggccattgttatggactgaatgtttgtgtccc

SEQ ID NO: 586735 - DNA, 120 bp, Artificial Sequence
  ENSG00000172716_31 (sequence is synthesized)
acccttcacccccaaattcccgtgttgaagccccaacctgcactgtggagctggggctgctaaggaagtaattaaggttacatgaagtcatggtggggctctgatctgctaaggttggtg

SEQ ID NO: 586736 - DNA, 120 bp, Artificial Sequence
  ENSG00000172716_32 (sequence is synthesized)
tccttatagggagagaccccagagagcttgttccctccctccctgtgcatgcaaacaagagggcatgggagcacacagagagatggcagccacctacaagccaagaggagaagcctcaca

SEQ ID NO: 586737 - DNA, 120 bp, Artificial Sequence
  ENSG00000172716_33 (sequence is synthesized)
atcaaactctcgctgctggcgagagtcttggactctgtcttggacttccagcctccagactgtgagaaacaaatttctgttgtttcagcttctcagtctctggtgttttgttattgcagc

SEQ ID NO: 586738 - DNA, 120 bp, Artificial Sequence
  ENSG00000172716_34 (sequence is synthesized)
ctgagaacacagctgtacgattatttgtcaaacagaaaacactgatacttaacaatgctaatgcaattatttatttgcttttcagtctctacaaaacgttctaaaacactaatctaaata

SEQ ID NO: 586739 - DNA, 120 bp, Artificial Sequence
  ENSG00000172716_35 (sequence is synthesized)
ttaacagtaaaatatttgcataactaatggaaactaagaaatcatatgaccaatatttcacttattggtaatcttactctactgatttccccccagactgtgatttttgaacttccttgc

SEQ ID NO: 586740 - DNA, 120 bp, Artificial Sequence
  ENSG00000172716_36 (sequence is synthesized)
ctttctcctgtctttctgtgtttattcatggaattccagttatctgggcttgaaattgcaggctctcctaacttaagcaaaatctgacagatcagcaaaatgagataaatgtttcttttt

SEQ ID NO: 586741 - DNA, 120 bp, Artificial Sequence
  ENSG00000172716_37 (sequence is synthesized)
tctttctgactgcattaaatcagatacaactcagcattaaaaagctatctttgtaaatgttgttactaataaattagtcttataagatccctggactttggagttgttgcaatgtctttg

SEQ ID NO: 586742 - DNA, 120 bp, Artificial Sequence
  ENSG00000172716_38 (sequence is synthesized)
agagtaattctttaaaagtctaatttcgactggttgtatctctttatgatttattgccccactaacaatatttgaaacaatataatattttaaaatgtataaataattatgaatttttgt

SEQ ID NO: 586743 - DNA, 120 bp, Artificial Sequence
  ENSG00000172716_39 (sequence is synthesized)
ttagaacaaagaggattactgatatttgtttccctatgaatggcaaaaggtttagcttactactgcatttctgttttaaataaaaagttgagagtttgtgtctcattaaactgaaaaaaa

SEQ ID NO: 586744 - DNA, 120 bp, Artificial Sequence
  ENSG00000172716_40 (sequence is synthesized)
aaacgctaagggggcttcggaagcgctggagcttgagaggtttctgtatacatagccttcaggactgcttttggtggaaagagatagcaggtggtgctaattcactgtgttggtgggaac

SEQ ID NO: 586745 - DNA, 120 bp, Artificial Sequence
  ENSG00000172716_41 (sequence is synthesized)
ggagtgcagtggcacgatcttggttcaccacaatctcgtctcgaaggctcaggtgattctctcacctcagccgcctgagtagctgggaccacagtttcagctgtgagttcaacatggagg

SEQ ID NO: 586746 - DNA, 120 bp, Artificial Sequence
  ENSG00000172716_42 (sequence is synthesized)
ttcttattgacttagtttaattttatttaggatttcaaatttatatgggacaatatctctaccttacaaaaaatgtgcaagtgatgctgattataattcctttaatcctaaggaaagagc

SEQ ID NO: 586747 - DNA, 120 bp, Artificial Sequence
  ENSG00000172716_43 (sequence is synthesized)
ttgagatagagctccctaagccttttttgcctgcaaaagaatctaagcagatggtggggttgctgtttaaatacaattgccaaccaaaaactataatctattggctttgacaataaagtt

SEQ ID NO: 586748 - DNA, 120 bp, Artificial Sequence
  ENSG00000172716_44 (sequence is synthesized)
tataatctattggctttgacaataaagtttatggggcagagaaaatatttaactttgaaatccctgtacatcgaaaggaatattttacaaataacttgacaaagatgtttcaatggtctt

SEQ ID NO: 586749 - DNA, 120 bp, Artificial Sequence
  ENSG00000172716_45 (sequence is synthesized)
ggaatgcagaatggaattttgagaaatagaaatttgtaggcaagggtctaaactaggcaaggtggtaagaatgtggatgtgccagccttcttttttttttttttgagacagattcttact

SEQ ID NO: 586750 - DNA, 120 bp, Artificial Sequence
  ENSG00000172716_46 (sequence is synthesized)
caacttttattttcaggtaattatggtttgtcttctcaacaccagccagtttctatattaggataaagggagattaaactataatatttgttttgtaaaatcctgaaagtgctctgcaaa

SEQ ID NO: 586751 - DNA, 120 bp, Artificial Sequence
  ENSG00000172716_47 (sequence is synthesized)
cccatttgtaagacgtgatgatgttacaatcctattggtgataagtggtttagaaatgaacccttactgaccccactggctaaggcaggaccacacatagaatccaggaacattatttcc

SEQ ID NO: 586752 - DNA, 120 bp, Artificial Sequence
  ENSG00000172717_0 (sequence is synthesized)
aacaatgcccagagcagcctggcctgtgcttcttttactaagtggttagttgcctgctgagtagacataaacacctgctaaagaaatgtgaaaagagtggaaacgtgctatttggaggtt

SEQ ID NO: 586753 - DNA, 120 bp, Artificial Sequence
  ENSG00000172717_1 (sequence is synthesized)
attttcctagtcgacatccaggagatctccagagatctatttcagccccacctgttgatttcatcatgaaaaggaggaagctcaaactgaagtgagttaaaaacttcatctcctagagag

SEQ ID NO: 586754 - DNA, 120 bp, Artificial Sequence
  ENSG00000172717_2 (sequence is synthesized)
gactgtggctcggcctgagttgagtttttttatgtttatgtgcaagcgcaatgaagaagaacaccagcaagactaccatgaggatcaataagcaagatgctctctgcaccccacactccc

SEQ ID NO: 586755 - DNA, 120 bp, Artificial Sequence
  ENSG00000172717_3 (sequence is synthesized)
atgatccgagagatcttcaaaatatgttggatggaggagagtatgccccttttgtatctcctcccatgttagagagcaattttatccaggtcaacagaagaggtgaatccatttaccttc

SEQ ID NO: 586756 - DNA, 120 bp, Artificial Sequence
  ENSG00000172717_4 (sequence is synthesized)
ataaccgagccaactgggtgaccgtaggcatctgtttttccagctccacccacaagatccccaatgtgatgctactggcccatctgacacctggtgcccaaaaagatacagaaaccctgt

SEQ ID NO: 586757 - DNA, 120 bp, Artificial Sequence
  ENSG00000172717_5 (sequence is synthesized)
ttaaaagtctcctgacatctcctcctgcagagaaactagtgctcaccaggtttctccctctgcagtttgtgactctttctgtgcatgatgcggagaacatgagcctgaaagtaaagctgg

SEQ ID NO: 586758 - DNA, 120 bp, Artificial Sequence
  ENSG00000172717_6 (sequence is synthesized)
tgagtggtcgagcctactacttacagctctgcacctctgcatataaacaggacaccttgttttctcaatgggtggccctcatctccctcttgaatcaggagaaagccaaagtttccaaag

SEQ ID NO: 586759 - DNA, 120 bp, Artificial Sequence
  ENSG00000172717_7 (sequence is synthesized)
gcaggtacaggccctgaacatgtcagggacagcatagatttcccagaattcacagacatcaccgacatcacagatgtcacagatcttccagaaaatgaggtcccagaggtcccggatgta

SEQ ID NO: 586760 - DNA, 120 bp, Artificial Sequence
  ENSG00000172717_8 (sequence is synthesized)
agaattgtcacagaagtcatagaagtcagagaagccacggaagtcacagacagctctgatattacaaactgctcgggagtcacagtggtgtttgaaaacaatgacttaatcagggccaag

SEQ ID NO: 586761 - DNA, 120 bp, Artificial Sequence
  ENSG00000172717_9 (sequence is synthesized)
caagaggagaaggaaaaattgaaaaacattctgaagcctgggtgtttacaagatacaaaaagtaagagtgagttgaaagaatcctcaaaacatgtcaccatctcaaacataacactgact

SEQ ID NO: 586762 - DNA, 120 bp, Artificial Sequence
  ENSG00000172717_10 (sequence is synthesized)
tttgaaggtaaaagatattttcaaactaccttgaccccagtagaaagtgaggcaaatacatccaaggagatgaaggataagacctctgaagaaaagatgcctgattttcagagcacagct

SEQ ID NO: 586763 - DNA, 120 bp, Artificial Sequence
  ENSG00000172717_11 (sequence is synthesized)
ctcaaggctgaagaatccaggagcttgagaactgaatcaaacacttcagttctctcccctcatatcaaatctccttctaatttcctcaaacttgtgcctcatctgtctgcccctttctca

SEQ ID NO: 586764 - DNA, 120 bp, Artificial Sequence
  ENSG00000172717_12 (sequence is synthesized)
agggaatgaatgtgaggaaagaaaagtaaaacagaaaaagacaaagttgatggaaaaacatgtaagacaaactaaagacatttgaattaaatgaactgacttctccacctttttttaaaa

SEQ ID NO: 586765 - DNA, 120 bp, Artificial Sequence
  ENSG00000172717_13 (sequence is synthesized)
tcagatacaaactactaaactaaaaagcaaacacagctcagggaaagacaatcagtgcaagaggaaaaccaagcagtgtcttctacgtggcagaaataaagcctatgactaatcattacg

SEQ ID NO: 586766 - DNA, 120 bp, Artificial Sequence
  ENSG00000172717_14 (sequence is synthesized)
tttgctcccaaatccttatattttgaattgctgatatatgggaaaaggtagattttttttaatggtagaaaaagttagttactaatacagacttcatattattacaaataatgtgaaaga

SEQ ID NO: 586767 - DNA, 120 bp, Artificial Sequence
  ENSG00000172717_15 (sequence is synthesized)
attatgatgtttgtaggtcttatgaccaaatcttaggactcagtacagcacagattaagaacttgcaaataattcaatagcagacatttgaattaaatgaactgacttctccaccttttt

SEQ ID NO: 586768 - DNA, 120 bp, Artificial Sequence
  ENSG00000172717_16 (sequence is synthesized)
attttcctagtcgacatccaggagatctccagagatctatttcagccccacctgttgtttcatttcttctacctcaaccagaacaagctgaaaagccgagagacttaacacctgatttca

SEQ ID NO: 586769 - DNA, 120 bp, Artificial Sequence
  ENSG00000172717_17 (sequence is synthesized)
aacagctcagctcagacatagacagcagcctcggactccgcttcacctacccagtatacttacaagaactctaactctttctgaggccttgacctcacacttgaaataacaatttcatca

SEQ ID NO: 586770 - DNA, 120 bp, Artificial Sequence
  ENSG00000172717_18 (sequence is synthesized)
tgttagagagcaattttatccagccagctcccctcagggcctcacatctaaacaggacaatgatagctgccagcagtagaagatattcatctcatcctggtggctctgtctcctggtggc

SEQ ID NO: 586771 - DNA, 120 bp, Artificial Sequence
  ENSG00000172717_19 (sequence is synthesized)
tctgagaaacgttttccagggttggaggatacctcctgtatgtcttgctggtcacatgccactgctgaaaccagtcactggcaaggggtgtggagtggaaccaccactacccatttaagt

SEQ ID NO: 586772 - DNA, 120 bp, Artificial Sequence
  ENSG00000172717_20 (sequence is synthesized)
taatcaggatttaatccctgagctgggtcatcatccctgagccatgatattggacaaaaccaggattctgttaatccagaagaagaggggcacagtttgggtcaacagaagaggtgaatc

SEQ ID NO: 586773 - DNA, 120 bp, Artificial Sequence
  ENSG00000172717_21 (sequence is synthesized)
cagtagtcatctctggttcctagaagagtagtgtggctaagagcaaaggaattcagctagactttttgatgcatttcctttcttcactatgctccattctgagaatcctatactgaagaa

SEQ ID NO: 586774 - DNA, 120 bp, Artificial Sequence
  ENSG00000172717_22 (sequence is synthesized)
actctttctcaaagccgatcctcaggctatctttcaagtggaaaacattatggcttgtatagtttttcagtttttcccctgattagcatttctttccccattttcactctcctctaaatc

SEQ ID NO: 586775 - DNA, 120 bp, Artificial Sequence
  ENSG00000172717_23 (sequence is synthesized)
acctgttccccttccatacacttttactctcacttaacaccctgtaccccaagaaaagcaaagactggctgaatcttaatacctcattttattaaatgtaattggagtacaaattaaaaa

SEQ ID NO: 586776 - DNA, 120 bp, Artificial Sequence
  ENSG00000172717_24 (sequence is synthesized)
cgacatccaggagatctccagagatctatttcagccccacctgttggctctcgctctgatgcccaggctggagtgcagtgacaagatcatagctcactgtagcctcaacctcccaggctc

SEQ ID NO: 586777 - DNA, 120 bp, Artificial Sequence
  ENSG00000172717_25 (sequence is synthesized)
tttgccatggctaccaggccgatctccgagcggaaccaggatgccactgtgtacgtggggggcctgaatgagaagttgcagcaattgaagccatgaatgggcagtacctctgtaaccacc

SEQ ID NO: 586778 - DNA, 120 bp, Artificial Sequence
  ENSG00000172717_26 (sequence is synthesized)
ctatcaccgtatcttatgccttcgagaaggactccaagggtgagcgccatggcttagcagctggacgacttctggcagctcagaacccgctctcccagcctgaccgccctcatcagctgt

SEQ ID NO: 586779 - DNA, 120 bp, Artificial Sequence
  ENSG00000172717_27 (sequence is synthesized)
cccaatcctgtggtatcatcattggggtctgggcttcctccaccaggcatgcctcctcctggctccttcccacccccagtgctgcctcctggagccctcccacctgggatacccccagcc

SEQ ID NO: 586780 - DNA, 120 bp, Artificial Sequence
  ENSG00000172717_28 (sequence is synthesized)
atgccccaccacctatgcctcctggggctgcaggacatggccccccatcggcaggaaccccaggggcaggacatcctggtcatggacactcccaagctcacccattcccaccaggaggag

SEQ ID NO: 586781 - DNA, 120 bp, Artificial Sequence
  ENSG00000172717_29 (sequence is synthesized)
tgccccatccagggatgtctcagatgcagctggcacaccatggacctcatggtttaggacatccccattctggacacccaggctctgggggacagccaccaccccaaccaccacctggaa

SEQ ID NO: 586782 - DNA, 120 bp, Artificial Sequence
  ENSG00000172717_30 (sequence is synthesized)
tgccttatcctggacctcctccaatgggcatgcccccccgaaggcctccattctgatctcccatgggtcacccaggtcctatgcctccacatggtatgcgtggacttcctccactgatgc

SEQ ID NO: 586783 - DNA, 120 bp, Artificial Sequence
  ENSG00000172717_31 (sequence is synthesized)
cccccatggatacactggccctccacaacccacaccctatggctaccagcctctccctccaaccaggcccactccccagccaccagttgcccctcgaggcccgctttggagccctctccc

SEQ ID NO: 586784 - DNA, 120 bp, Artificial Sequence
  ENSG00000172717_32 (sequence is synthesized)
tcagtaaattcacattttccttcctcctattacatcttcccaatatcttttcgataccttggaccaatcagagatgctgtagctccttggggctaaggcactaatccctttcagcacccc

SEQ ID NO: 586785 - DNA, 120 bp, Artificial Sequence
  ENSG00000172717_33 (sequence is synthesized)
caccccattcccctttttaatgtaactttttccacaggaggtatttcttttttatgttggtcctgagtattttgcaaatgcacagagaaaataaaactaaactccttgtttaaaaaaaaa

SEQ ID NO: 586786 - DNA, 120 bp, Artificial Sequence
  ENSG00000172717_34 (sequence is synthesized)
gatgaaaagagacaaaggatagagattcaagaaaagaagagaaagaaaaatcacataaaatattgggagtttccttcctacccttacccatctttcttttccatgttcctcttaaatatt

SEQ ID NO: 586787 - DNA, 120 bp, Artificial Sequence
  ENSG00000172717_35 (sequence is synthesized)
acaaaccaaattccttggaatcctaagcagccaggttcattctttgtttataaaacccaggcttaataaaaaaggagggagccctctaaaagggaacctgcttgtgaaattcaacaataa

SEQ ID NO: 586788 - DNA, 120 bp, Artificial Sequence
  ENSG00000172724_0 (sequence is synthesized)
attcccagcctcacatcactcacaccttgcatttcacccctgcatcccagtcgccctgcagcctcacacagatcctgcacacacccagacagctggcgctcacacattcaccgttggcct

SEQ ID NO: 586789 - DNA, 120 bp, Artificial Sequence
  ENSG00000172724_1 (sequence is synthesized)
gcctctgttcaccctccatggccctgctactggccctcagcctgctggttctctggacttccccagccccaactctgagtggcaccaatgatgctgaagactgctgcctgtctgtgaccc

SEQ ID NO: 586790 - DNA, 120 bp, Artificial Sequence
  ENSG00000172724_2 (sequence is synthesized)
accacactgaggggccgccagctctgtgcacccccagaccagccctgggtagaacgcatcatccagagactgcagaggacctcagccaagatgaagcgccgcagcagttaacctatgacc

SEQ ID NO: 586791 - DNA, 120 bp, Artificial Sequence
  ENSG00000172724_3 (sequence is synthesized)
gtgcagagggagcccggagtccgagtcaagcattgtgaattattacctaacctggggaaccgaggaccagaaggaaggaccaggcttccagctcctctgcaccagacctgaccagccagg

SEQ ID NO: 586792 - DNA, 120 bp, Artificial Sequence
  ENSG00000172724_4 (sequence is synthesized)
acagggcctggggtgtgtgtgagtgtgagtgtgagcgagagggtgagtgtggtcagagtaaagctgctccacccccagattgcaatgctaccaataaagccgcctggtgtttacaactaa

SEQ ID NO: 586793 - DNA, 120 bp, Artificial Sequence
  ENSG00000172724_5 (sequence is synthesized)
aaggcaagcctggccctccctggccctgtctcctccctctgagctcctgtctaagattccagcccatgatccttcctctccttcctcctctagatgaagcgccgcagcagttaacctatg

SEQ ID NO: 586794 - DNA, 120 bp, Artificial Sequence
  ENSG00000172725_0 (sequence is synthesized)
ctgcttcccagaggccgggatccggagccgcccgaagccggtgccgcagccccctgcgcccccggtgcccccgacatgtccttccgcaaagtggtccggcagagcaaattccggcatgtg

SEQ ID NO: 586795 - DNA, 120 bp, Artificial Sequence
  ENSG00000172725_1 (sequence is synthesized)
ttcgggcagccggtcaagaacgaccagtgctatgaggacattcgcgtgtcccgtgttacctgggacagcaccttctgcgccgtcaaccccaagttcctggcggtgattgtggaggccagt

SEQ ID NO: 586796 - DNA, 120 bp, Artificial Sequence
  ENSG00000172725_2 (sequence is synthesized)
ggagggggtgcctttctggtgctccccctaagcaagacgggccgcattgacaaggcctacccgacggtgtgtgggcacacgggacctgtcctggacatcgactggtgtcctcacaacgac

SEQ ID NO: 586797 - DNA, 120 bp, Artificial Sequence
  ENSG00000172725_3 (sequence is synthesized)
gaagtcatagccagcggctcggaggactgcacggtcatggtgtggcagatcccagagaacgggctgacctccccgctgacagagccggtggtggtactggaggggcacaccaagcgagtg

SEQ ID NO: 586798 - DNA, 120 bp, Artificial Sequence
  ENSG00000172725_4 (sequence is synthesized)
ggcatcatcgcctggcaccccacggcccgaaacgtgctgctcagtgcaggctgcgacaacgtggtactcatctggaatgtgggcacagcggaggagctgtaccgcctggacagcctgcac

SEQ ID NO: 586799 - DNA, 120 bp, Artificial Sequence
  ENSG00000172725_5 (sequence is synthesized)
cctgacctcatctacaatgtcagctggaaccacaatggcagcctgttttgctcagcatgcaaggacaagagcgtgcgcatcatcgacccccgtcggggcaccctggtggcagagcgggag

SEQ ID NO: 586800 - DNA, 120 bp, Artificial Sequence
  ENSG00000172725_6 (sequence is synthesized)
aaggctcatgagggggcccggcccatgcgggccatcttcctggcagatggcaaggtgttcaccacaggcttcagccgaatgagcgagcggcagctggcgctctgggacccagaaaacctc

SEQ ID NO: 586801 - DNA, 120 bp, Artificial Sequence
  ENSG00000172725_7 (sequence is synthesized)
gaggaacccatggccctgcaggaactggactcgagcaacggggccctgctgcccttctacgaccccgacaccagtgtggtctacgtctgcggcaagggtgactccagcatccggtacttt

SEQ ID NO: 586802 - DNA, 120 bp, Artificial Sequence
  ENSG00000172725_8 (sequence is synthesized)
gagatcacagaggagcctccctacatccacttcctgaacacgttcaccagcaaggagccgcagcggggtatgggcagcatgcccaagcggggcctggaggtcagcaagtgcgagatcgcc

SEQ ID NO: 586803 - DNA, 120 bp, Artificial Sequence
  ENSG00000172725_9 (sequence is synthesized)
cggttctacaaactgcatgagcgcaagtgtgagcccatcgtcatgactgtgccaagaaagtcggacctcttccaggatgatctgtaccccgacacagccgggcccgaggcagccctggag

SEQ ID NO: 586804 - DNA, 120 bp, Artificial Sequence
  ENSG00000172725_10 (sequence is synthesized)
gctgaggagtgggtgagcgggcgggatgccgacccgatcctcatctcactgcgggaggcctacgtgcccagcaagcagcgggacctgaagatcagccggcgcaacgtgttgtctgacagc

SEQ ID NO: 586805 - DNA, 120 bp, Artificial Sequence
  ENSG00000172725_11 (sequence is synthesized)
cggcccgccatggccccgggctcctcccacctaggggcccccgcctccaccaccactgctgctgatgccacccccagcggcagcctggccagagccggggaggctgggaagctggaggag

SEQ ID NO: 586806 - DNA, 120 bp, Artificial Sequence
  ENSG00000172725_12 (sequence is synthesized)
gtgatgcaggagctgcgggccctgagggcgctggtcaaggagcagggcgaccgcatctgccgcctggaggagcagctgggccgcatggagaacggggatgcgtagggccacagccacacg

SEQ ID NO: 586807 - DNA, 120 bp, Artificial Sequence
  ENSG00000172725_13 (sequence is synthesized)
ccaccttcatctcctccgccgcccccttcccactcagcttctgccagcgggtcgcaccgggctagctggctgcccagagcctctgaggcagcgcaggggtcagttcccacccccacccgt

SEQ ID NO: 586808 - DNA, 120 bp, Artificial Sequence
  ENSG00000172725_14 (sequence is synthesized)
cccaggcccaggccgaagccagcgcccagctttcctcactgttcctgtggaggatgtctacgcccaggcgagctcctcgacctctgagggaccatctccccgaccactgcccagccctct

SEQ ID NO: 586809 - DNA, 120 bp, Artificial Sequence
  ENSG00000172725_15 (sequence is synthesized)
gctccctccccagaggaggcgggagggtgggctctatattttcattccaaataaaattctctttctaaaagccaggctgacctgctgctgcaagggtggggctgagaagtctggaaacct

SEQ ID NO: 586810 - DNA, 120 bp, Artificial Sequence
  ENSG00000172725_16 (sequence is synthesized)
ggagacagaggatgtcacaggagtcacacatgtgcagaaggtctgggggcagtgagcagccccacaggcattgctcccctggattgtcaggcagggaaactgaggcagaagacctgagaa

SEQ ID NO: 586811 - DNA, 120 bp, Artificial Sequence
  ENSG00000172725_17 (sequence is synthesized)
cacatgcaaggctgcatccagcttcaagttggtgctgcttcttccttggaggacaggcccggcagcccagcctcctccagagagactggggagggtctggtgtggaccaggggtcctgca

SEQ ID NO: 586812 - DNA, 120 bp, Artificial Sequence
  ENSG00000172725_18 (sequence is synthesized)
cacagccagagctggaggtgggtgcccggcacggaggggcctgcggaccaatggtaagcctcggagccccccgggttcttgggatgggggccacaggcggtcggggctagaatgtctggg

SEQ ID NO: 586813 - DNA, 120 bp, Artificial Sequence
  ENSG00000172725_19 (sequence is synthesized)
cctgtggagctaaggagggccccacattggccccagggaagaggtgagacctaagaggagtatggcagaggctgaacctttctctcacctgagctgggctccctgggactccaggcctgg

SEQ ID NO: 586814 - DNA, 120 bp, Artificial Sequence
  ENSG00000172725_20 (sequence is synthesized)
cccccagcaccccataccggaccaggcccctgtcaggagccctgggaaggcccttacctggtcttcctgtgagcgggaacttgcattcctggagcctgggcggacagcctggggtggtgg

SEQ ID NO: 586815 - DNA, 120 bp, Artificial Sequence
  ENSG00000172725_21 (sequence is synthesized)
gggaggctggctgcacctcagcacccctcccccgacaccccccacctagcctgttccgaccgcagacttcctctggcagctgcgcccgcctcccccagccccccccagcccccggccctg

SEQ ID NO: 586816 - DNA, 120 bp, Artificial Sequence
  ENSG00000172725_22 (sequence is synthesized)
cacgcctgtggccctcagggactgggagtggaacggaaaccctgccgctggggcagccccgtggtggggagggaggaagaggggcctcacggacccccgtttggggacctggccaagcag

SEQ ID NO: 586817 - DNA, 120 bp, Artificial Sequence
  ENSG00000172725_23 (sequence is synthesized)
aagatgagcagttgcctctgggtgcatccaggcccctccatcccccatcccaggcctcagggagagccagccctgacaccagctagcaacctccttccctccctcccatctcctctccca

SEQ ID NO: 586818 - DNA, 120 bp, Artificial Sequence
  ENSG00000172725_24 (sequence is synthesized)
cccacccaggcagcctagacacatttaatccatacttattgagcacctactaacatgcttgacccaaaaagcccccgtttcctagcagcttattgtggggggtagataagacaatagaca

SEQ ID NO: 586819 - DNA, 120 bp, Artificial Sequence
  ENSG00000172725_25 (sequence is synthesized)
taaaaaatgagtacagttatctcctgcgttaggtgacatggaaggaaaaaggcactgagtgctggggggtgctggggtgggctgcagtgatagacatcagggtagaggttaaggtcaggt

SEQ ID NO: 586820 - DNA, 120 bp, Artificial Sequence
  ENSG00000172725_26 (sequence is synthesized)
tcagcctcactggggtgaagtttgagcacggtgagcaggccatgcagcccgggggaggggaggatgggaggaggtggagctttccgggcagagggaacagccagtgcgaaggccccaggc

SEQ ID NO: 586821 - DNA, 120 bp, Artificial Sequence
  ENSG00000172725_27 (sequence is synthesized)
aggtggcttaatgcagctgttgggggaggtgagtggtagggaggaggctggagggatgggggctgatctcacagggccagagcctggttgaccaaataaggccttggccttttctgcttg

SEQ ID NO: 586822 - DNA, 120 bp, Artificial Sequence
  ENSG00000172725_28 (sequence is synthesized)
gctgtcccaagaggatcccaaagagaaaaaaacgaaagtggtcttggtcacccagcctgccccacaccaggccccaccccaggtgctgagccctctgagcccctgcctgtctcccacagg

SEQ ID NO: 586823 - DNA, 120 bp, Artificial Sequence
  ENSG00000172725_29 (sequence is synthesized)
ctctgccctgcaccttagggctcgggatgctgctggccctgccaggggccttgggctcgggtggcagcgcggaggacagcgtgggctccagctctgtcaccgttgtcctgctgctgctgc

SEQ ID NO: 586824 - DNA, 120 bp, Artificial Sequence
  ENSG00000172725_30 (sequence is synthesized)
tgctcctactgctggccactggcctagcactggcctggcgccgcctcagccgtgactcagggggctactaccacccggcccgcctaggtgccgcgctgtggggccgcacgcggcgcctgc

SEQ ID NO: 586825 - DNA, 120 bp, Artificial Sequence
  ENSG00000172725_31 (sequence is synthesized)
tctgggccagccccccaggtcgctggctgcaggcccgagctgagctggggtccacagacaatgaccttgagcgacaggaggatgagcaggacacagactatgaccacgtcgcggatggtg

SEQ ID NO: 586826 - DNA, 120 bp, Artificial Sequence
  ENSG00000172725_32 (sequence is synthesized)
gcctgcaggctgaccctggggaaggcgagcagcaatgtggagaggcgtccagcccagagcaggtccccgtgcgggctgaggaagccagagacagtgacacggagggcgacctggtcctcg

SEQ ID NO: 586827 - DNA, 120 bp, Artificial Sequence
  ENSG00000172725_33 (sequence is synthesized)
gctccccaggaccagcgagcgcagggggcagtgctgaggccctgctgagtgacctgcacgcctttgctggcagcgcagcctgggatgacagcgccagggcagctgggggccagggcctcc

SEQ ID NO: 586828 - DNA, 120 bp, Artificial Sequence
  ENSG00000172725_34 (sequence is synthesized)
atgtcaccgcactgtagaggccggtcttggtgtcccatccctgtcacagccgctcactccccgtgcctctgcttcccaagatgccatggctggactggacccccagcccacatgaccatg

SEQ ID NO: 586829 - DNA, 120 bp, Artificial Sequence
  ENSG00000172725_35 (sequence is synthesized)
cctcagactgtcaccccctaccagttcccaagtccatgtgtaccccgctcaccacgggaacggccccccccaaccacaggcatcaggcaaccatttgaaataaaactccttcagcctgtg

SEQ ID NO: 586830 - DNA, 120 bp, Artificial Sequence
  ENSG00000172725_36 (sequence is synthesized)
ttttgtgctccccccccccacggacccctccatacatcccagcagcccctccagggcccacatgacaaatgggaaagctgaggccctcagagttggagagacccgtctgtcccagggtgg

SEQ ID NO: 586831 - DNA, 120 bp, Artificial Sequence
  ENSG00000172725_37 (sequence is synthesized)
tgggcagagtgggcctcagcctggtgagctaatggcctcctgccacccacccggcccgagctgacaaccctcacctgccaggctgcgacaacgtggtactcatctggaatgtgggcacag

SEQ ID NO: 586832 - DNA, 120 bp, Artificial Sequence
  ENSG00000172725_38 (sequence is synthesized)
cttctctgcctggaacttgaggctctcagggcctaggactctgtcagactttcctctcctgccccctgctcgcccgactgccccaccactcccccatggcctcccactgcctctgtgtct

SEQ ID NO: 586833 - DNA, 120 bp, Artificial Sequence
  ENSG00000172725_39 (sequence is synthesized)
ttgcccatgttgttcatgccaacggaagggcccttctctcccttgcttgcctgtaccacccactgcctgcacagggctccccgctcctccagaaagcctcctcctccagcaagcctcctg

SEQ ID NO: 586834 - DNA, 120 bp, Artificial Sequence
  ENSG00000172728_0 (sequence is synthesized)
gtcttcccggcgcccaggcttgggctcatagggagaaaggaagctgcgctgcattctgcgggacgaaccctgctccgcgcgagaatttttttgattccttcttatttggagaaatctcca

SEQ ID NO: 586835 - DNA, 120 bp, Artificial Sequence
  ENSG00000172728_1 (sequence is synthesized)
gctgctctgatgatagcctaagaagactgcatgctgcttcctctcgatgccaagccagaccctctcacaacctcggatctcagtccttcatggagacctggtcccagcaggaatggcagt

SEQ ID NO: 586836 - DNA, 120 bp, Artificial Sequence
  ENSG00000172728_2 (sequence is synthesized)
gcaggaaattggcgcccagatggttcttccatgtgaagttgtctcgggctctgggctgacgagagaacacctggtaaccaggttagccctctgtcagtcacccagggcagggcagcatgg

SEQ ID NO: 586837 - DNA, 120 bp, Artificial Sequence
  ENSG00000172728_3 (sequence is synthesized)
tgcggattcagaggaggaagcttttggcatcttgcctgtgcgtcacagccaccgtctttctgcttgtcacactccaggtcatggttgagctggggaagtttgaaaggaaggagtttaaaa

SEQ ID NO: 586838 - DNA, 120 bp, Artificial Sequence
  ENSG00000172728_4 (sequence is synthesized)
gttccagtttgcaagatggacatacaaaaatggaggaagcacctacgcatcttaattcatttcttaagaaagaaggattgaccttcaacaggaaaagaaaatgggaattggacagctacc

SEQ ID NO: 586839 - DNA, 120 bp, Artificial Sequence
  ENSG00000172728_5 (sequence is synthesized)
ccattatgctctggtggtccccgctgacgggggagactgggaggttaggccaatgtggagcagatgcttgtttcttcaccatcaaccggacctacctccatcatcacatgaccaaagcat

SEQ ID NO: 586840 - DNA, 120 bp, Artificial Sequence
  ENSG00000172728_6 (sequence is synthesized)
tcctcttctatggtactgactttaacatagatagcttacctctgcctcggaaagcccatcatgactgggctgtttttcatgaagagtccccgaaaaacaattataagctctttcataaac

SEQ ID NO: 586841 - DNA, 120 bp, Artificial Sequence
  ENSG00000172728_7 (sequence is synthesized)
cagtgatcaccttgttcaactacactgccacgttcagcaggcattcccacttgccactaactacccaatacttggagagcattgaagtcctgaagtcactccgatacctagttcctttgc

SEQ ID NO: 586842 - DNA, 120 bp, Artificial Sequence
  ENSG00000172728_8 (sequence is synthesized)
agtccaaaaacaagcttagaaaaagacttgctccgctggtgtatgtacagtcagactgtgacccaccatcagacagggacagctatgttcgcgagctgatgacttacatcgaggtcgatt

SEQ ID NO: 586843 - DNA, 120 bp, Artificial Sequence
  ENSG00000172728_9 (sequence is synthesized)
cctatggtgaatgtttacgaaacaaagacctccctcagcagctgaaaaatccagcctctatggatgccgatggcttttataggatcattgcacagtataagtttatcctagcttttgaga

SEQ ID NO: 586844 - DNA, 120 bp, Artificial Sequence
  ENSG00000172728_10 (sequence is synthesized)
atgcagtttgtgatgactacatcactgagaagttctggaggccactgaaactgggggtagtccctgtatattacggatcccccagcatcacagactggcttccaagtaacaaaagtgcta

SEQ ID NO: 586845 - DNA, 120 bp, Artificial Sequence
  ENSG00000172728_11 (sequence is synthesized)
ttcttgtatcagaattttctcaccccagggaactggcaagttacatcagacgactggattctgatgacagattgtatgaggcctatgtagaatggaagctgaagggtgagatctctaacc

SEQ ID NO: 586846 - DNA, 120 bp, Artificial Sequence
  ENSG00000172728_12 (sequence is synthesized)
agcgacttctgacagctctcagggaacggaaatggggagtgcaagacgtcaaccaggacaattacatcgatgcatttgagtgtatggtgtgcaccaaggtgtgggctaatatcaggcttc

SEQ ID NO: 586847 - DNA, 120 bp, Artificial Sequence
  ENSG00000172728_13 (sequence is synthesized)
aggaaaagggcttaccacccaaaagatgggaggcagaagatacccacctgagttgcccagagcccacagtgtttgctttctcaccactccggactccacctttgagctctttgcgagaga

SEQ ID NO: 586848 - DNA, 120 bp, Artificial Sequence
  ENSG00000172728_14 (sequence is synthesized)
aaaacttttcatctcaagagttttggggcctagtattcaaggactgatttcaaaaatgatcagaatgaaacagactagagccttcttgaggtttattttctaggttgccttaatatttga

SEQ ID NO: 586849 - DNA, 120 bp, Artificial Sequence
  ENSG00000172728_15 (sequence is synthesized)
acataatagctattctgttgactatccatcaggataataattagttgctgcagtactcataatgagccctttcaaggaatagatgtaaattacccttaggggtagccactatatttttta

SEQ ID NO: 586850 - DNA, 120 bp, Artificial Sequence
  ENSG00000172728_16 (sequence is synthesized)
tactaaaaaaggaaatatttcttatggacactggttatcttccatgtccgtgtctgtggacccacatacttactgccttttgtggaaattcacctagagtgagtactttccttgtgcaat

SEQ ID NO: 586851 - DNA, 120 bp, Artificial Sequence
  ENSG00000172728_17 (sequence is synthesized)
ggagggagacgatctagctatagattcttgatactcacctcactctcaacagcttattggtatttggcaaacctggtatcctgcagccgagcatgaacatgaaatacattagaacttggc

SEQ ID NO: 586852 - DNA, 120 bp, Artificial Sequence
  ENSG00000172728_18 (sequence is synthesized)
aatgagagatcccatctgttggtttccagggatgtaagtgagtaataaaagctgtttcaagtttatccactatccactcttcaagtgaaaagaacttatgtgtgtctaccttcttctcca

SEQ ID NO: 586853 - DNA, 120 bp, Artificial Sequence
  ENSG00000172728_19 (sequence is synthesized)
taccctgagccacctctctcactttctttagttgtgccttgccctatcgcctcccattttcccttcaaagtagaatgtcttgtaaagacacagtaactcctgtgtgttttgattagtgag

SEQ ID NO: 586854 - DNA, 120 bp, Artificial Sequence
  ENSG00000172728_20 (sequence is synthesized)
atgttaccacttaccccttctgctgcgcagaataatattaagaattgctatgcttatgattcaggctggacagcctggacattttgagcagcgcgagagtagaagtgaatacccccagga

SEQ ID NO: 586855 - DNA, 120 bp, Artificial Sequence
  ENSG00000172728_21 (sequence is synthesized)
actccaattgtgctgaagctgatttgtctgttcgtaggatgatgtgcagcctgtcacagtggcagccacaggcattcagtttgtgggcatttcctgtcatttcggatcctgctataggga

SEQ ID NO: 586856 - DNA, 120 bp, Artificial Sequence
  ENSG00000172728_22 (sequence is synthesized)
aggttcagctctcctgtctggggcatctactggagcacctcagaagacaaggaggaaaacactggctcatgttttctttccatgtgagggaggggaggtttctagatgatactaaaagcc

SEQ ID NO: 586857 - DNA, 120 bp, Artificial Sequence
  ENSG00000172728_23 (sequence is synthesized)
tgttgccactgttgtgtcatgatttccattcttcatcatggaaagccacaagcctcagaaggcagccagaggacaggaagagtctgtgatgctcatgtctgtgtcatggcatgaggggga

SEQ ID NO: 586858 - DNA, 120 bp, Artificial Sequence
  ENSG00000172728_24 (sequence is synthesized)
attgacgagtgcttgcttagcatcagctctcattgtattgaaggctgtgcccttggtgtgcttagcagtgagcagcgtcttcattaggtagctctggctgggctttgtcagccagcgtgt

SEQ ID NO: 586859 - DNA, 120 bp, Artificial Sequence
  ENSG00000172728_25 (sequence is synthesized)
gagaaaggagaaccaaaaccaatacctccttatagaagccagaaggatcacattggatgagagaaggtgtctataactgggttcttcccaatcccagctctttcattaactaaatatgat

SEQ ID NO: 586860 - DNA, 120 bp, Artificial Sequence
  ENSG00000172728_26 (sequence is synthesized)
cttggacatatctcttaacctccatcggccttagtttttgcatccaaaaagaagtgattgggctggtcttggaaggtttttttcttttttttcccctgtgtaacattcttcattgttcat

SEQ ID NO: 586861 - DNA, 120 bp, Artificial Sequence
  ENSG00000172728_27 (sequence is synthesized)
caacatttaagaaatttaattttgtagatgtttttactaaagagggtaacaaactattttggaactgctgtatgttattcaagggaagcacgctgtttggaggaaggagcatacttaatg

SEQ ID NO: 586862 - DNA, 120 bp, Artificial Sequence
  ENSG00000172728_28 (sequence is synthesized)
ggtagtattgaggatgaaagggaatttctctctctgccattttatttgataatattaaagaaataaagactggaaagggggattccttgttaaaggtcagattttaaattgcatataaaa

SEQ ID NO: 586863 - DNA, 120 bp, Artificial Sequence
  ENSG00000172728_29 (sequence is synthesized)
ctcccttgtttgctgtggtcttcctccaaagctgagttacagtttacctctgaaaagtgatggtggagctccccttgaaaacactttgacacccctgatttcctttgcatttgctctgtg

SEQ ID NO: 586864 - DNA, 120 bp, Artificial Sequence
  ENSG00000172728_30 (sequence is synthesized)
gaaggcctgagcatttagcagacacaaaaaagaaacaagcctggccgggcgtggtggcttctgaattctctaacacctgtatctctgaagggttggataagggattatgatcttctagtt

SEQ ID NO: 586865 - DNA, 120 bp, Artificial Sequence
  ENSG00000172728_31 (sequence is synthesized)
gtgctttgagatgaagcaaagttaaatgttgagtttaatttcccaaattgtagcagaagcttctagaaagatttccattacattcacaaaaaatatagataatataatgggcatttatgt

SEQ ID NO: 586866 - DNA, 120 bp, Artificial Sequence
  ENSG00000172728_32 (sequence is synthesized)
taaggcataaaatattacatgtataattgaaaatctgtatgagtccctccctgaccgatcccatttccctccctgatactctagagggaatcatgattgtgtgtgtgtgtgtgtgtgtgt

SEQ ID NO: 586867 - DNA, 120 bp, Artificial Sequence
  ENSG00000172728_33 (sequence is synthesized)
gtgtgtgtgtgtttgtgtaacaatctaagtatgttatttagacaaataggagttatatatacatgtgtgttaaagttttttaaatgtttaaaacttttaaaaaagttttttaaatgttta

SEQ ID NO: 586868 - DNA, 120 bp, Artificial Sequence
  ENSG00000172728_34 (sequence is synthesized)
gttgaccgtggtacaaccactttagatattggtttggcaatatctagtaaatgtgaattcatacttagtaattccactactaaatttataaccgcatgaaatgtcacatatatacatgga

SEQ ID NO: 586869 - DNA, 120 bp, Artificial Sequence
  ENSG00000172728_35 (sequence is synthesized)
ttgttcattatagcattgttcatcataagtaaagcttttaaagtaacctaaaggtccaataacagaaaaatgattaaataagtgtaatatagaaattcagtggaatactatgcaatgatg

SEQ ID NO: 586870 - DNA, 120 bp, Artificial Sequence
  ENSG00000172728_36 (sequence is synthesized)
aaaatgactagagctgtgagcatgtaactttgataaacctcaaaactaagttacagatagaaagttacatataacactactctacattgtttatgttattgttagaaatctgtagtagaa

SEQ ID NO: 586871 - DNA, 120 bp, Artificial Sequence
  ENSG00000172728_37 (sequence is synthesized)
tctgtagtagaaatttatttaagaatatgtgatgctactctagggaaaacaagttgtacacacgtatacatacataaacacatgcctacacatacacatatatatacacacacacatata

SEQ ID NO: 586872 - DNA, 68 bp, Artificial Sequence
  ENSG00000172728_38 (sequence is synthesized)
tgttctcatgatagtgagtgagtctctccatcctgctgccctgtgaagaaagtgcctgtttctccgtt

SEQ ID NO: 586873 - DNA, 81 bp, Artificial Sequence
  ENSG00000172728_39 (sequence is synthesized)
gcatctggcatttcccctgctggcactcactccatcctgctgccctgtgaagaaagtgcctgtttctccgaagcaatgcag

SEQ ID NO: 586874 - DNA, 120 bp, Artificial Sequence
  ENSG00000172731_0 (sequence is synthesized)
ggaggctcagtccgaggatgcctagatgttagcgagggagcacgcgctgagcttcccgaaccccatgccacaaaaacaaggcgccagcaggtcccgctcacgtcccagcgggcttctttc

SEQ ID NO: 586875 - DNA, 120 bp, Artificial Sequence
  ENSG00000172731_1 (sequence is synthesized)
cctggggtggggaagtgggtcaacttcgttctgatctgaaggggggtttgggactatttgggtcgctcctcacctccccacccgctccccggcttggcatggtccagagcccgggctgga

SEQ ID NO: 586876 - DNA, 120 bp, Artificial Sequence
  ENSG00000172731_2 (sequence is synthesized)
gccagcggtagggccagcttgcacacatggctccggaggctccggttgcccatccgagcccctgccaggctctaacgttcccaactgacaacaccagtaactaaatataggagcagatgg

SEQ ID NO: 586877 - DNA, 120 bp, Artificial Sequence
  ENSG00000172731_3 (sequence is synthesized)
tggggacgggctgtcgcagcggctcctttgcagaggtctccggactgcagataaggctcaggcccttttgtgagaagcagaccagcctgggggctggcggcaggacacctgtgtctgcat

SEQ ID NO: 586878 - DNA, 120 bp, Artificial Sequence
  ENSG00000172731_4 (sequence is synthesized)
gctgaagaagatgggtgaggccgtggccagagtagcaaggaaggtcaacgagacggtggagagcggctctgacactctggacctggccgagtgcaagctggtctcctttcccattggcat

SEQ ID NO: 586879 - DNA, 120 bp, Artificial Sequence
  ENSG00000172731_5 (sequence is synthesized)
ctacaaggtcctgcggaatgtctctggccagatccacctcatcaccctggctaacaacgagcttaagtccctcaccagcaagttcatgaccacattcagtcagctccgagagctccacct

SEQ ID NO: 586880 - DNA, 120 bp, Artificial Sequence
  ENSG00000172731_6 (sequence is synthesized)
ggaggggaacttcctacaccgcctccccagcgaggtcagtgccctgcagcacctcaaggccattgacctgtcccggaaccagttccaggacttccctgagcagcttaccgccctgccggc

SEQ ID NO: 586881 - DNA, 120 bp, Artificial Sequence
  ENSG00000172731_7 (sequence is synthesized)
gctggagaccatcaacctggaggagaacgagatcgtagatgtgcccgtggagaagctggccgccatgccagccttgcgcagcatcaacctccgcttcaacccactcaacgccgaggtgcg

SEQ ID NO: 586882 - DNA, 120 bp, Artificial Sequence
  ENSG00000172731_8 (sequence is synthesized)
cgtgatcgccccgccgctcatcaagtttgacatgctcatgtctccggaaggcgcaagagcccccctaccttaggccaccctcctcatgcccacccagcaaggggcagaggccacaggcct

SEQ ID NO: 586883 - DNA, 120 bp, Artificial Sequence
  ENSG00000172731_9 (sequence is synthesized)
ggaaccctggaagggagggaggcccatgggaggccaagcctgggggctgggggcgggtgggccgagcagcacgtggtgggtggggtgcagctggtctggatagatagcttacagcagtag

SEQ ID NO: 586884 - DNA, 120 bp, Artificial Sequence
  ENSG00000172731_10 (sequence is synthesized)
tgggctctggaatgcccaagggaagaggcaaggtggggcctgcagcctggactcggcactcacagctgctgtgcaaactcaggcagatctcctgccctctctgagccttgtcacttgaaa

SEQ ID NO: 586885 - DNA, 120 bp, Artificial Sequence
  ENSG00000172731_11 (sequence is synthesized)
aaaacaggaccctttccctcctttgggctccctggaggtttttaagcagtacgtgcctccaagttacctccagatcagcaggcacaggtgggcattgccaggtattttctgagcccctgc

SEQ ID NO: 586886 - DNA, 120 bp, Artificial Sequence
  ENSG00000172731_12 (sequence is synthesized)
gggtttgaggccttgtttttagtgctgagagccagttgctgccctgagaagagaagacaacctccatctatttattgcttcctgagaactgacctggatgcggccctctgcagggcccag

SEQ ID NO: 586887 - DNA, 120 bp, Artificial Sequence
  ENSG00000172731_13 (sequence is synthesized)
tcttcagtcctgtggtccctggactggtgggaacctgaactaggagtcctgggagagctgtggtgggaatatgggctggcactgctgcagggcaagaacattcatgtaggagcccgagga

SEQ ID NO: 586888 - DNA, 120 bp, Artificial Sequence
  ENSG00000172731_14 (sequence is synthesized)
taacaaattggcggggtgggaagtcctgagtgctccgtccctctagcatcactcctgagctgcgggagaggtggcccagagaacagcagagtcagttacacctgcagctcttgtctaaag

SEQ ID NO: 586889 - DNA, 120 bp, Artificial Sequence
  ENSG00000172731_15 (sequence is synthesized)
tgattagatggccaccctcaccactgtccagtccagcagcagcctggctgccttgtcatggcctcctgggggcagaaggcgatgtggaccacgggatttgtagccagccagctcccaggc

SEQ ID NO: 586890 - DNA, 120 bp, Artificial Sequence
  ENSG00000172731_16 (sequence is synthesized)
caacgcccaaagccctgatgacctggttcttctgaggccctcaacctggcatcttagggtatggtcaggcaacagggtgaccagctgtcctggtttcccaggacatggaactttcaatgc

SEQ ID NO: 586891 - DNA, 120 bp, Artificial Sequence
  ENSG00000172731_17 (sequence is synthesized)
taaaactgggacagtacccagcaagtggggatggttggtcccctaccaggagagggcctggggctcttgcttcccgagaacgcctgtggcttgaagaaccttgactgcttggtcctcagg

SEQ ID NO: 586892 - DNA, 120 bp, Artificial Sequence
  ENSG00000172731_18 (sequence is synthesized)
tatctacctcccaccttctcctcatctgtggagcaagccaactcagtgccccagaccccacctgatctgcatctttgtttgcatctccagagacacctgaggccccagagcttgaggcaa

SEQ ID NO: 586893 - DNA, 120 bp, Artificial Sequence
  ENSG00000172731_19 (sequence is synthesized)
agccaggccgtccaaatcctgtgtgccgtggacgagtggccactttactactcctaaggctaagatgttgagagctcagaccactgctcagagcagtaatccctgctcagaatgctccca

SEQ ID NO: 586894 - DNA, 120 bp, Artificial Sequence
  ENSG00000172731_20 (sequence is synthesized)
gttccctcgtccctgcccaggtctcttgtctcttgggaaggaactgataggtcgggccattgttgggccatcactgagcgctcagtatctcaagagactctgttcattctgctcgtatcc

SEQ ID NO: 586895 - DNA, 120 bp, Artificial Sequence
  ENSG00000172731_21 (sequence is synthesized)
caaggcctggttggtcaaactctgggcaaagggttttcaggatgaggaggtcaagacaggatctccagagctaccgagttcatctgtgggtgttgggggcaagtgggggctgaagtcctg

SEQ ID NO: 586896 - DNA, 120 bp, Artificial Sequence
  ENSG00000172731_22 (sequence is synthesized)
tgcaggctgcgctggccccacctgccttgtgccctggagtggggtttctccttgttgaagaagaggcatccttctctgatgtgcacaaacacaatgtatgaccagagccttgcaactcaa

SEQ ID NO: 586897 - DNA, 120 bp, Artificial Sequence
  ENSG00000172731_23 (sequence is synthesized)
agtgtggtctgtggaccagcagcggcagtgacacctgggagcttgttaggaatgcagagtctaggcctcaccctatacctcccgactcagaccctgcattttagcaagacccccagctga

SEQ ID NO: 586898 - DNA, 120 bp, Artificial Sequence
  ENSG00000172731_24 (sequence is synthesized)
ttcctataagcactttagagtttgagaagcaaggacctaggctggggatgtcctccgagcagagggtgaagtttctctcagttctctccctgccacttccagggatctgagcctgtgctc

SEQ ID NO: 586899 - DNA, 120 bp, Artificial Sequence
  ENSG00000172731_25 (sequence is synthesized)
agcctcctccctaacccaccctgggagacacttggcctgttagattgttccagagtctgcatggcactcctgaagaagggagtgtgacctgcagtcaccaggagatgagggttaggtgtg

SEQ ID NO: 586900 - DNA, 120 bp, Artificial Sequence
  ENSG00000172731_26 (sequence is synthesized)
cccagccctccagacccggcctttctggttaacccctgcatgccaagctgcctgctgccccaggtcctcacctcaggcctttgaaggggcagcttctggaagttgttttctcctctgctt

SEQ ID NO: 586901 - DNA, 120 bp, Artificial Sequence
  ENSG00000172731_27 (sequence is synthesized)
ggagagtttgcccttgtctgtcttggaaagtgtgggcagccacagatgcccccaaatcagagctcacagtgagtgagcccctaagcttcagtctgcaataaagaatgcattggtttcatc

SEQ ID NO: 586902 - DNA, 120 bp, Artificial Sequence
  ENSG00000172731_28 (sequence is synthesized)
gcgtgactgcgctgcgcagggcgctaggaggcattgtcgccgtaagtggagccaaaagcggcccggagcgggaccacacgcttcttgccccgcaaagctcaggcccttttgtgagaagca

SEQ ID NO: 586903 - DNA, 120 bp, Artificial Sequence
  ENSG00000172731_29 (sequence is synthesized)
tcggaactcgcctggggcgccgccggcggcggagggagcgtgactgcgctgcgcagggcgctaggaggcattgtcgccgctcaggcccttttgtgagaagcagaccagcctgggggctgg

SEQ ID NO: 586904 - DNA, 120 bp, Artificial Sequence
  ENSG00000172731_30 (sequence is synthesized)
gccccgccccgccggctcggaactcgcctggggcgccgccggcggcggagggagcgtgactgcgctgcgcagggcgctaggaggcattgtcgccacctggccgagtgcaagctggtctcc

SEQ ID NO: 586905 - DNA, 120 bp, Artificial Sequence
  ENSG00000172732_0 (sequence is synthesized)
gacaggaaggagccggtccaggctccgggggctgggaaagggcgcgtctcaaaggctggctggagtggagccaagggaaaagatcgttagagacagcgcccctgaccaaccacttagagc

SEQ ID NO: 586906 - DNA, 120 bp, Artificial Sequence
  ENSG00000172732_1 (sequence is synthesized)
agcgcaggggtgggagggcggccgcaggctctcctctcgttagtgccccctgtgtttggggccccgtgatctcaacggtcctgccctcggtctccctcttcccccgccccgccctgggcc

SEQ ID NO: 586907 - DNA, 120 bp, Artificial Sequence
  ENSG00000172732_2 (sequence is synthesized)
aggtgttcgaatcccgactccagaactggcggcgtcccagtcccgcgggcgtggagcgccggaggacccgccctcgggctcatggcggccccggtccgcctgggccggaagcgcccgctg

SEQ ID NO: 586908 - DNA, 120 bp, Artificial Sequence
  ENSG00000172732_3 (sequence is synthesized)
cctgcctgtcccaacccgctcttcgttcgctggctgaccgagtggcgggacgaggcgacccgcagcaggcgccgcacgcgcttcgtatttcagaaggcgctgcgttccctccgacggtac

SEQ ID NO: 586909 - DNA, 120 bp, Artificial Sequence
  ENSG00000172732_4 (sequence is synthesized)
ccactgccgctgcgcagcgggaaggaagctaagatcctacagcacttcggagacgggctctgccggatgctggacgagcggctgcagcggcaccgaacatcgggcggtgaccatgccccg

SEQ ID NO: 586910 - DNA, 120 bp, Artificial Sequence
  ENSG00000172732_5 (sequence is synthesized)
gactcaccatctggagagaacagtccagccccgcaggggcgacttgcggaagtccaggactcttccatgccagttcctgcccagcccaaagcgggaggctctggcagctactggccagct

SEQ ID NO: 586911 - DNA, 120 bp, Artificial Sequence
  ENSG00000172732_6 (sequence is synthesized)
cggcactcaggagcccgagtgatactgctggtgctctaccgggagcacctgaatcctaatggtcaccacttcttaaccaaggaggagctgctgcagaggtgtgctcagaagtcccccagg

SEQ ID NO: 586912 - DNA, 120 bp, Artificial Sequence
  ENSG00000172732_7 (sequence is synthesized)
gtagcccctgggagtgctcgaccctggccagccctccgctccctccttcacaggaacctggtcctcaggacacaccagccagccaggtactcattgaccccagagggcctggagctggcc

SEQ ID NO: 586913 - DNA, 120 bp, Artificial Sequence
  ENSG00000172732_8 (sequence is synthesized)
cagaagttggccgagtcagaaggcctgagcttgctgaatgtgggcatcgggcccaaggagccccctggggaggagacagcagtgccaggagcagcttcagcagagcttgccagtgaagca

SEQ ID NO: 586914 - DNA, 120 bp, Artificial Sequence
  ENSG00000172732_9 (sequence is synthesized)
gggcacaggccggagctgctccgagagctacagcggctgcacgtgacccacacggtgcgcaagctgcacgttggagattttgtgtgggtggcccaggagaccaatcctagagacccagca

SEQ ID NO: 586915 - DNA, 120 bp, Artificial Sequence
  ENSG00000172732_10 (sequence is synthesized)
aaccctggggagttggtactggatcacattgtggagcgcaagcgactggatgacctttgcagcagcatcatcgacggccgcttccgggagcagaagttccggctgaagcgctgtggtctg

SEQ ID NO: 586916 - DNA, 120 bp, Artificial Sequence
  ENSG00000172732_11 (sequence is synthesized)
gagcgccgggtatacctggtggaagagcatggttccgtccacaacctcagccttcctgagagcacactgctgcaggctgtcaccaacactcaggtcattgatggcttttttgtgaagcgc

SEQ ID NO: 586917 - DNA, 120 bp, Artificial Sequence
  ENSG00000172732_12 (sequence is synthesized)
acagcagacattaaggagtcagccgcctacctggccctcttgacgcggggcctgcagagactctaccagggccacaccctacgcagccgcccctggggaacccctgggaaccctgaatca

SEQ ID NO: 586918 - DNA, 120 bp, Artificial Sequence
  ENSG00000172732_13 (sequence is synthesized)
ggggccatgacctctccaaaccctctctgctcactcctcaccttcagtgacttcaacgcaggagccatcaagaataaggcccagtcggtgcgagaagtgtttgcccggcagctgatgcag

SEQ ID NO: 586919 - DNA, 120 bp, Artificial Sequence
  ENSG00000172732_14 (sequence is synthesized)
gtgcgcggagtgagtggggagaaggcagcagccctggtggatcgatacagcacccctgccagcctcctggccgcctatgatgcctgtgccacccccaaggaacaagagacactgctgagc

SEQ ID NO: 586920 - DNA, 120 bp, Artificial Sequence
  ENSG00000172732_15 (sequence is synthesized)
accattaagtgtgggcgtctacagaggaatctggggcctgctctgagcaggaccttatcccagctctactgcagctacggccccttgacctgagcttatgccgtgaaacagcccccagcc

SEQ ID NO: 586921 - DNA, 120 bp, Artificial Sequence
  ENSG00000172732_16 (sequence is synthesized)
cccgtctgtcccccaacccaggctagccagccttttaacaacatcttttggggtacaattagaatctaagtgtttgcagccatatgtgtcatgtagaagatgcctagccctggggacctt

SEQ ID NO: 586922 - DNA, 120 bp, Artificial Sequence
  ENSG00000172732_17 (sequence is synthesized)
gtgaaatacgcaggaaccagggataccatctggtccagtggtttttaaacaaagctgcttagcacctggaattccctggtcagggagatggagtcagtggggcattgcagcttggaatct

SEQ ID NO: 586923 - DNA, 120 bp, Artificial Sequence
  ENSG00000172732_18 (sequence is synthesized)
attttatgtcaccagttggtcctcatcaaataaaatttccttaggagtgcagagggctcattgggaaaataaaaataataaaaataaataaaacttcctaaaagaaaagattgaaaacca

SEQ ID NO: 586924 - DNA, 120 bp, Artificial Sequence
  ENSG00000172732_19 (sequence is synthesized)
ttcctctccaccacacactctttgccctgtatcccggggatgaggatcaccatttcctccaagggtcctgcagctcctcctgccttacctttgtgtcctcatccccggcacccatttctg

SEQ ID NO: 586925 - DNA, 120 bp, Artificial Sequence
  ENSG00000172732_20 (sequence is synthesized)
ggtgtccctcccaccaatacgtttgcacccgtttgtctcctagcccccgcctctcctggactcttttcaagaccagtctccatctccagcctccttcaagcttgaggctgaagctgacaa

SEQ ID NO: 586926 - DNA, 120 bp, Artificial Sequence
  ENSG00000172732_21 (sequence is synthesized)
gccccggactcaccatctggagagaacagtccagccccgcaggggcgacttgcggaagtccaggactcttccatgccagtgaggaaggggcaaggggagtggaaggcaaagtgggagtgc

SEQ ID NO: 586927 - DNA, 120 bp, Artificial Sequence
  ENSG00000172732_22 (sequence is synthesized)
gggagtatgattttctggcttgggggatttggcaagcctgagtccaaatctcaccagtgatgcctggccttgagcaaatgacttatcctcttttcgacttagtattttaacctgtgaata

SEQ ID NO: 586928 - DNA, 120 bp, Artificial Sequence
  ENSG00000172732_23 (sequence is synthesized)
gaaatattggtaacagccaatgagagaattccatgatcaagctacttaaggatcccagctcagttagttacggggtcaccattattgagttttcctgtctaattacacctgtcctgcagc

SEQ ID NO: 586929 - DNA, 120 bp, Artificial Sequence
  ENSG00000172732_24 (sequence is synthesized)
gcatggtagaagtgaggccaggctgggcagacacccccacccactgccccgaaactgcctgctgttttatcccagatttgcagcggatcatcccatcacctggcccattttacagagaag

SEQ ID NO: 586930 - DNA, 120 bp, Artificial Sequence
  ENSG00000172732_25 (sequence is synthesized)
gaaactgagagacaactgagtgacttacccagggccacaaagcctgctggggacttattcaaagatgactggctggctttcatgttcagaactcctctgtacctttcaggttcctgccca

SEQ ID NO: 586931 - DNA, 120 bp, Artificial Sequence
  ENSG00000172732_26 (sequence is synthesized)
gcctccttgaggcagagccctttggaatccagccacacccaccctgtggctgctccaggatcagacccccacaggcccatccaggcgcacagtaggaagccaggtacctgcattcttggg

SEQ ID NO: 586932 - DNA, 120 bp, Artificial Sequence
  ENSG00000172732_27 (sequence is synthesized)
caaggcataaacctccaggagtggaaatacagaggctgtaccttggtacttgctgctgggtggacccctagtcacagaggccatgtgccggcccaggggaggcttgaaggatgggcagtg

SEQ ID NO: 586933 - DNA, 120 bp, Artificial Sequence
  ENSG00000172732_28 (sequence is synthesized)
ttgagagatggagaaaaggctttctagacaagagtgtcagcatgagcaaagctgcggaggcccctgtgaggcaggtggagaggctagggaggatgcagaggctaactggtgggaacaggg

SEQ ID NO: 586934 - DNA, 120 bp, Artificial Sequence
  ENSG00000172732_29 (sequence is synthesized)
cctgggccctgtgcatccccaaaagaagcaaggtgggtgagatccccatttctcaggctggccccccaaggctgaggactgggcaggggctggctggagttgttccttcgagctccagcc

SEQ ID NO: 586935 - DNA, 120 bp, Artificial Sequence
  ENSG00000172732_30 (sequence is synthesized)
cagtgacttcaacgcaggagccatcaagaataaggtactgtctctgcctagcttctcagacatggcctggcccagacccccactgatccagccctttcccgaacccaggcccagtcggtg

SEQ ID NO: 586936 - DNA, 120 bp, Artificial Sequence
  ENSG00000172732_31 (sequence is synthesized)
ggcagcagccctggtggatcgatacagcacccctgccaggtaggccctaaagggcccttaggtgtcctcagcccctgccctccatgcatggaattcaccttaatccatgcttcgtggagg

SEQ ID NO: 586937 - DNA, 120 bp, Artificial Sequence
  ENSG00000172732_32 (sequence is synthesized)
gggcctggccttgtgtgggctctgcagaccagagatagacagatcccagggtgctcgtggaggtcaagtggggaggaagccagcaggcccacatagtgtcccaggtagtggaggccacag

SEQ ID NO: 586938 - DNA, 120 bp, Artificial Sequence
  ENSG00000172732_33 (sequence is synthesized)
gagggagggagacgtcccacctggtggagaagaggcttcctggagaaggggttgggccattaaggggagtgagggtgaaggtttggagcctttgctggttttgccccagagttcccacag

SEQ ID NO: 586939 - DNA, 120 bp, Artificial Sequence
  ENSG00000172732_34 (sequence is synthesized)
atctccaggtccctaaccctgtggaatcgccctaaaacaacgggtgtatcagacccatctcctgcaggcaggagcctgggcaagctacataaccttcggttttctcagccctcgggccgt

SEQ ID NO: 586940 - DNA, 120 bp, Artificial Sequence
  ENSG00000172732_35 (sequence is synthesized)
atacagggggcggggtggtttccgggcggtgcccgcctgggtcacttccctaaactcggctccaccctcactcaggcccatccgggaaggcctcgctggcccagggcttcggcaccggcg

SEQ ID NO: 586941 - DNA, 120 bp, Artificial Sequence
  ENSG00000172732_36 (sequence is synthesized)
gccgggcctgagcgtgcgcgcacgcgccgacagacagcgccgttccagccctcgcccgatgcacggcccccgcctctcctggactcttttcaagaccagtctccatctccagcctccttc

SEQ ID NO: 586942 - DNA, 120 bp, Artificial Sequence
  ENSG00000172732_37 (sequence is synthesized)
agcagcagccactggagctgaggcctggagagtacagggtgctgttgtgtgtggacattggcgagacccgggggcttccctccttgccactccaggggcgggcacaggccggagctgctc

SEQ ID NO: 586943 - DNA, 120 bp, Artificial Sequence
  ENSG00000172732_38 (sequence is synthesized)
cgagagctacagcggctgcacgtgacccacacgcaaaccctggggagttggtactggatcacattgtggagcgcaagcgactggatgacctttgcagcagcatcatcgacggccgcttcc

SEQ ID NO: 586944 - DNA, 120 bp, Artificial Sequence
  ENSG00000172732_39 (sequence is synthesized)
cactgctgagcaccattaagtgtgggcgtctacagaggctcctgccctcagaaatctcctgctggggctcttctcaccctctccagcctgctctgtctgacccaggctaactgacgattc

SEQ ID NO: 586945 - DNA, 120 bp, Artificial Sequence
  ENSG00000172732_40 (sequence is synthesized)
aatttcaaaaagaaagagaagggctggtactagacaaaccccttctcctgctgagacccatgcatgcggctgccagtcactgtgagcagctcactgtgagccgcccctggccccctccca

SEQ ID NO: 586946 - DNA, 120 bp, Artificial Sequence
  ENSG00000172732_41 (sequence is synthesized)
cctaacagatccactagcaaggagtggactttctgaccccagggccctgcacacgccattcccttggtttgtgggtgaagaaactgagatcaatatggaaaaccagtaccaggactcaaa

SEQ ID NO: 586947 - DNA, 120 bp, Artificial Sequence
  ENSG00000172733_0 (sequence is synthesized)
ctttctcgcggcgctgcaaccctcccaccacagcccatccagccccgcccagcgcgccgcggtgcgcatgcgtggaggccctcgctgccgctgagcacctcgggaagtgtagtctcttcg

SEQ ID NO: 586948 - DNA, 120 bp, Artificial Sequence
  ENSG00000172733_1 (sequence is synthesized)
caggtgcggctgggcagctagagtcctgcatcccggtggaatccggagaagtgagaacattcccgccgcccggtcctcattcccatcttcccacctgtccagtcccctcgcactcccgct

SEQ ID NO: 586949 - DNA, 120 bp, Artificial Sequence
  ENSG00000172733_2 (sequence is synthesized)
gcaccccacgcgccgggcttcagtcagagagtgcactgaggaagagcggagaccccctcttcccctcagcaggctgtgccgggggaggcggggtccaccgcccgccccccgccgtcgctc

SEQ ID NO: 586950 - DNA, 80 bp, Artificial Sequence
  ENSG00000172733_3 (sequence is synthesized)
gctctccccgcctccccttccctcccctcctggcgggtgcggggccggtgtccgaagtcaggcggcggcccccgcagcgg

SEQ ID NO: 586951 - DNA, 120 bp, Artificial Sequence
  ENSG00000172733_4 (sequence is synthesized)
cgggggaggaggcggggggcggcggctgcggcggctgcagcagaggggccgagagctggcggtggcggcggcggtggtcgtgaagggcatcggcggcggcggtgatggcagagatgatgt

SEQ ID NO: 586952 - DNA, 120 bp, Artificial Sequence
  ENSG00000172733_5 (sequence is synthesized)
ggtggtcgtgaagggcatcggcggcggcggtgatggcagagatgatgtgagtgcccgccggctggagacctggggccgcggagcgcgggacgggcggcggcggcgtgcgggagcggcccc

SEQ ID NO: 586953 - DNA, 120 bp, Artificial Sequence
  ENSG00000172733_6 (sequence is synthesized)
ggcggggcggtcaggccgaggggcgtctgcgattgttctcaacacccctcccccaccccatcccgtgtgtctgtttgttacttgcagctgaagatggaaagagccaggcgaaggggaggc

SEQ ID NO: 586954 - DNA, 120 bp, Artificial Sequence
  ENSG00000172733_7 (sequence is synthesized)
ggcggcggccgcggccgcggaggcaagaatgtagggggctctggcctaagcaagagtagactctatccccaggcccagcactcccactacccccactacgcggcctcagccacccctaat

SEQ ID NO: 586955 - DNA, 120 bp, Artificial Sequence
  ENSG00000172733_8 (sequence is synthesized)
caggccgggggcgcagccgaaatccaggagctggcctccaaacgagtggacatccagaaaaagaggttttacctagacgtgaagcaaagctcccggggccgcttcctaaagatagccgaa

SEQ ID NO: 586956 - DNA, 120 bp, Artificial Sequence
  ENSG00000172733_9 (sequence is synthesized)
gtctggatagggagaggccggcaggacaacatcagaaagagtaaactgaccctctccctgtctgtggcagcggagctgaaggactgtctaggggacttcatcgagcactatgcccacctg

SEQ ID NO: 586957 - DNA, 120 bp, Artificial Sequence
  ENSG00000172733_10 (sequence is synthesized)
acagtgtcctgaaaacagactatatcgagagggacaataggaaatattacctagacctaaaggaaaatcagcggggtcgcttcctacggattagacaaaccatgatgcgggggactggca

SEQ ID NO: 586958 - DNA, 120 bp, Artificial Sequence
  ENSG00000172733_11 (sequence is synthesized)
tgataggttattttggccacagtttgggccaagaacagactattgtcctcccagcacaaggaatgattgagtttcgtgatgccttggttcagctgattgaagactatggcgaaggagaca

SEQ ID NO: 586959 - DNA, 120 bp, Artificial Sequence
  ENSG00000172733_12 (sequence is synthesized)
tagaagaacgaagaggtggagacgatgacccgcttgaactcccagaggggacttctttcagagtggacaataaaaggttctactttgatgtgggctctaataaatatggaattttcctga

SEQ ID NO: 586960 - DNA, 120 bp, Artificial Sequence
  ENSG00000172733_13 (sequence is synthesized)
aggtaagtgaggtgagaccaccttaccgtaatactattactgttccattcaaagcttggacaaggtttggggagaattttatcaagtatgaagaagagatgaggaaaatttgcaacagcc

SEQ ID NO: 586961 - DNA, 120 bp, Artificial Sequence
  ENSG00000172733_14 (sequence is synthesized)
ataaagaaaagagaatggatggcagaaaggccagtggtgaagaacaagaatgcctcgactagagtgaaattgaactccatcaggcaaaatttaaaatcacaaattggctaaaagtactga

SEQ ID NO: 586962 - DNA, 120 bp, Artificial Sequence
  ENSG00000172733_15 (sequence is synthesized)
tccattatcctttgaagaagtttttcctcttttttggcccgttgttattagtaatacctctagtagttgatacttcaggaagtctgattctcatgttatgttacacatagatcactataa

SEQ ID NO: 586963 - DNA, 120 bp, Artificial Sequence
  ENSG00000172733_16 (sequence is synthesized)
ttcttacgggaattccaaccttcccagagctaaatagtttagctgcttcaactgctccagactattgaagtatgcaaatcagcacaaaatgtgacattctgacattctaaataccataac

SEQ ID NO: 586964 - DNA, 120 bp, Artificial Sequence
  ENSG00000172733_17 (sequence is synthesized)
taagatttacattgcactatgacataatcccgaaaaaagatacatatacttaaatagaagtgtgactttcccccaaaagtatttcaattctacttcattaaaagctgctaagcttacctg

SEQ ID NO: 586965 - DNA, 120 bp, Artificial Sequence
  ENSG00000172733_18 (sequence is synthesized)
tagggcagttaccacagaaacagaaattgacctccggtatatataaatatttacttataaaagtacaagtagacgtatattgtccgttgaataactgaatataccatcaaaggatcaaat

SEQ ID NO: 586966 - DNA, 120 bp, Artificial Sequence
  ENSG00000172733_19 (sequence is synthesized)
cttattacctaattaaaccttaaaaatataatgtcataatatttcttaagaatactatagtattctataatttcaaactttgtggtaaccctacattttatagttgccatatcaaagcca

SEQ ID NO: 586967 - DNA, 120 bp, Artificial Sequence
  ENSG00000172733_20 (sequence is synthesized)
tgggagagttttaattcgttattctaagtttagttacaatcccttctttacctctacttaatgttccatatatttttattgactttccaaagtttcaggaattacttttatgtcacattg

SEQ ID NO: 586968 - DNA, 120 bp, Artificial Sequence
  ENSG00000172733_21 (sequence is synthesized)
agtgggaggcttcatccaatggctttgctatggaaatcttggtggtgtagcttttcatgctaatttaaagattgcaagaggtttcttccccaaaatatatcatggactcaaggtgttata

SEQ ID NO: 586969 - DNA, 120 bp, Artificial Sequence
  ENSG00000172733_22 (sequence is synthesized)
gggggaggaggcggggggcggcggctgcggcggctgcagcagaggggccgagagctggcggtggcggcggcggtggtcgtgaagggcatcggcggcggcggtgatggcagagatgatctg

SEQ ID NO: 586970 - DNA, 120 bp, Artificial Sequence
  ENSG00000172733_23 (sequence is synthesized)
caagcataaggaacagccccatgatactacaaaaacagttgaggaataaggaataaatctcttatgttacacctcagaataaaggcattcggtgaaagaaatgaactgaagttcatcatg

SEQ ID NO: 586971 - DNA, 120 bp, Artificial Sequence
  ENSG00000172733_24 (sequence is synthesized)
aatgtaaggcctcagtacttgacattcctccacggaagggaagacaagtatcaacaccactggcatcatttccaaactgatcttatgttgaataatttccaccacattgaagtacctttc

SEQ ID NO: 586972 - DNA, 120 bp, Artificial Sequence
  ENSG00000172733_25 (sequence is synthesized)
gactctatccagtttttgggttttgttttttttaattcatcaagcctttcgttttcaaaccaccatttgtcagccttgaggtagagagacatatagatttgaaaatactttcttaagaga

SEQ ID NO: 586973 - DNA, 120 bp, Artificial Sequence
  ENSG00000172733_26 (sequence is synthesized)
tcatgtaactatataactctgaatttaaaaattgaggggggagggataatttcaacccactgcctcttaccagaaacatttttttaaatctgtaactgctttagtgttaacagggtgcaa

SEQ ID NO: 586974 - DNA, 120 bp, Artificial Sequence
  ENSG00000172733_27 (sequence is synthesized)
ggtggtttttgtcccgtattgttcttaaaaggttctcatttattgtgattgtattgtactgtatgagaacaaatcataaattgccttgtattgtttataatagaccataccacgtactac

SEQ ID NO: 586975 - DNA, 120 bp, Artificial Sequence
  ENSG00000172733_28 (sequence is synthesized)
ttcagtttttatgttccaagtttttcagtgatgcatgttaacagttaggtcctaaaattctgtggtgctaattctcccatacccaatggtgcttttgtggatgctaactgcacacatgct

SEQ ID NO: 586976 - DNA, 120 bp, Artificial Sequence
  ENSG00000172733_29 (sequence is synthesized)
gaacaaagcttgaagtttaaaactttcctcccttcctctgtttatatgaagtaaaatgaaataacttgaatttgtctcaaagtatcactgacaatctaataaacttgtttatatgtgtga

SEQ ID NO: 586977 - DNA, 120 bp, Artificial Sequence
  ENSG00000172738_0 (sequence is synthesized)
caaagttcctacccgcgagagggaagaagcaggaggtctcagcatgaaacagcagcagtggtgtgggatgactgccaaaatgggcaccgtgttgtcaggggtcttcaccatcatggccgt

SEQ ID NO: 586978 - DNA, 120 bp, Artificial Sequence
  ENSG00000172738_1 (sequence is synthesized)
agacatgtatctcatctttgaacagaagcacctagggaatggcagttgcactgagatcacaccaaagtacaggggtgcaagtaacatcataaataacttcatcatctgctggagttttaa

SEQ ID NO: 586979 - DNA, 120 bp, Artificial Sequence
  ENSG00000172738_2 (sequence is synthesized)
aatcgtcctcttcctgtctttcatcaccatcctcatcagctgcttcctcctgtactcagtgtatgcccagatcttcaggggcctggtcatctacattgtctggatttttttctatgaaac

SEQ ID NO: 586980 - DNA, 120 bp, Artificial Sequence
  ENSG00000172738_3 (sequence is synthesized)
tgcaaacgtcgtaatacaaatcctcaccaacaatgactttgacattaaagaggtcagaatcatgcgctggtttggcttggtgtctcgtacagtcatgcactgtttctggatgttctttgt

SEQ ID NO: 586981 - DNA, 120 bp, Artificial Sequence
  ENSG00000172738_4 (sequence is synthesized)
catcaactatgcccacataacctacaaaaaccggagccagggcaatataatttcctacaagagacgaatttctacagcggagattctccacagcagaaataaaagattatcaatttcgag

SEQ ID NO: 586982 - DNA, 120 bp, Artificial Sequence
  ENSG00000172738_5 (sequence is synthesized)
tgggttcagtggctcacacctggaatcccagtactttgagaggcagagcttccacactagcatatttacctgtctgtctccagtgccaagctcagcccccagcacctgtagatacacaat

SEQ ID NO: 586983 - DNA, 120 bp, Artificial Sequence
  ENSG00000172738_6 (sequence is synthesized)
tttgacctgaaccagaagacacacatttgctatgaggccaagttcagcatctacgtggactcaaagtcggagctagtcacttggaccctgttccacagggctaatatcagcactggcctc

SEQ ID NO: 586984 - DNA, 120 bp, Artificial Sequence
  ENSG00000172738_7 (sequence is synthesized)
tccctcaccaccatcatcatcggctgcttcctcttttattgtatccacaagaatatctacatggggctgctgatctatgccatgtggatcatcacttacgagctcatcaacttctccata

SEQ ID NO: 586985 - DNA, 120 bp, Artificial Sequence
  ENSG00000172738_8 (sequence is synthesized)
gtcctgctcctcaacgggatcatcaaagatcacttcaagacgctgagttatttgcactggatcttccaaatctcacacatgctcctgcactttttctgtctgcccttcatcgtcaagcat

SEQ ID NO: 586986 - DNA, 120 bp, Artificial Sequence
  ENSG00000172738_9 (sequence is synthesized)
gcatacaacctttacaaggaatcccagactgtgggcaggaaacgccgccacaggctctgctccaccattgcagtgaactcatgactacctgtccgtctgggaatgttgtaccggaagtta

SEQ ID NO: 586987 - DNA, 120 bp, Artificial Sequence
  ENSG00000172738_10 (sequence is synthesized)
aactgaaccatgccagatgccaggaaaggtgggagggaatggtgttcctcaacaatggaaccctccctaccctgcctgtcttctgttgatgctgcttggtttgtcagggcttttgagttt

SEQ ID NO: 586988 - DNA, 120 bp, Artificial Sequence
  ENSG00000172738_11 (sequence is synthesized)
tacgcactgaggaatgattctcgggagagggcaggttgtgcggatcaattattttacagatgtgttgtgtgacttgttttagcagttaatgatatgtggccttgtgcttacttaaccatc

SEQ ID NO: 586989 - DNA, 120 bp, Artificial Sequence
  ENSG00000172738_12 (sequence is synthesized)
ctgacagctgccctgccgccaccaggcagtcccagcttccccaaaccagtcttctggcctctgtggcgccccaggcccgcgggattcagggattaggatctggaagggtttggtccaatc

SEQ ID NO: 586990 - DNA, 120 bp, Artificial Sequence
  ENSG00000172738_13 (sequence is synthesized)
ccctatccctctcagcgtcctgggctcacctccccggcagcttagcgctcctcttccaaaactgcttgctgttctcagcggccattgctctggccgggggaagtccttgtaggcgggcca

SEQ ID NO: 586991 - DNA, 120 bp, Artificial Sequence
  ENSG00000172738_14 (sequence is synthesized)
agggtttgcccggcgagatgcccccagaccccgcaatctgagggccaacccaggccgcttccccgccgccggtcacccgctcccagctcctggggacgccatcttggatgtgggcacccc

SEQ ID NO: 586992 - DNA, 120 bp, Artificial Sequence
  ENSG00000172738_15 (sequence is synthesized)
tccacccagcaccgctgccattggtgagctgcgcaagccgtggacgggccgaccaattgggagccggaatcctgcaggccgctgaagccgaccggtaacgtcaggggctgggcacacagg

SEQ ID NO: 586993 - DNA, 120 bp, Artificial Sequence
  ENSG00000172738_16 (sequence is synthesized)
ccgtctctactaaaaaaaatagaaaattagccaggcgtggcggcacacacctgtaatcccagccacttgagaggctgagactggagaatcacttgacctgggaggtggaggttgcagtga

SEQ ID NO: 586994 - DNA, 120 bp, Artificial Sequence
  ENSG00000172738_17 (sequence is synthesized)
gccgagattgcgccagtgcacttcagcctgagtgacagagtaagactctgtcccccaaaaaaaaaaaaaaaagttagcagctttatccaccactataagcaatcatgttggcccttttct

SEQ ID NO: 586995 - DNA, 120 bp, Artificial Sequence
  ENSG00000172738_18 (sequence is synthesized)
ttcccataagaggtaggtctctcagattcccagggtagttctatttccttttttccccccacttttgcttagcagttctgcaagtagagaccctactgccactctttcaggagaacatga

SEQ ID NO: 586996 - DNA, 120 bp, Artificial Sequence
  ENSG00000172738_19 (sequence is synthesized)
agagaaaatgtgattataatcacaaccggaacatcctgctcattgagggtatttagttaaaggatattgtgatttatcaaaacttctgtgaactcacctttctaccacctgattggtcaa

SEQ ID NO: 586997 - DNA, 120 bp, Artificial Sequence
  ENSG00000172738_20 (sequence is synthesized)
aatgaatggaataagatgaagctgaattgcagtagggcaatccttttttcttggcatcttcattagccttcaacccacaactctttaatttaaccctgggataagcaaatctgtatttat

SEQ ID NO: 586998 - DNA, 120 bp, Artificial Sequence
  ENSG00000172738_21 (sequence is synthesized)
accagatttttgcagcacaaaggatactgttggccctggggtgggtttgtgctatgatttccccactgtgtcttctgttttattccagataagaaaaagaataaaaatagagaaaattca

SEQ ID NO: 586999 - DNA, 120 bp, Artificial Sequence
  ENSG00000172738_22 (sequence is synthesized)
atatatgttaaacatacttctgtatctgttgctgtgctgtactctgtagtgtgaacactgtactgaacattgtgtatatactgtatacaaaaatgtgtaagatatgaatgactatgagaa

SEQ ID NO: 587000 - DNA, 120 bp, Artificial Sequence
  ENSG00000172738_23 (sequence is synthesized)
ttttgtagtttagtggaagaaagtaaattattgtttatgaatcaattagccaatcatataagacagtatatgattacatactatcacaaataaacagacatcactttgcattcaggtcca

SEQ ID NO: 587001 - DNA, 120 bp, Artificial Sequence
  ENSG00000172738_24 (sequence is synthesized)
acctggaatcccagtactttgagaggcagagagaaacatccacatggctggtagcaggaggtgctctggtaaaacaagtataaaatgaatgtcaggatgttctccctcatggtgggcatc

SEQ ID NO: 587002 - DNA, 120 bp, Artificial Sequence
  ENSG00000172742_0 (sequence is synthesized)
atggatcagagaaattacaccagagtgaaagaatttaccttcctgggaattactcagtcccgagaactgagccaggtcttatttaccttcctgtttttggtgtacatgacaactctaatg

SEQ ID NO: 587003 - DNA, 120 bp, Artificial Sequence
  ENSG00000172742_1 (sequence is synthesized)
ggaaacttcctcatcatggttacagttacctgtgaatctcaccttcatacgcccatgtacttcctgctccgcaacctgtctattcttgacatctgcttttcctccatcacagctcctaag

SEQ ID NO: 587004 - DNA, 120 bp, Artificial Sequence
  ENSG00000172742_2 (sequence is synthesized)
gtcctgatagatcttctatcagagacaaaaaccatctccttcagtggctgtgtcactcaaatgttcttcttccaccttctggggggagcagacgttttttctctctctgtgatggcgttt

SEQ ID NO: 587005 - DNA, 120 bp, Artificial Sequence
  ENSG00000172742_3 (sequence is synthesized)
tccatagcgcagatttctctattgctcccactccctttctgtggacccaatgttcttgacactttctactgcgatgtcccccaggtcctcaaacttgcctgcactgacaccttcactctg

SEQ ID NO: 587006 - DNA, 120 bp, Artificial Sequence
  ENSG00000172742_4 (sequence is synthesized)
gagctcctgatgatttcaaataatgggttagtcagttggtttgtattcttctttctcctcatatcttacacggtcatcttgatgatgctgaggtctcacactggggaaggcaggaggaaa

SEQ ID NO: 587007 - DNA, 120 bp, Artificial Sequence
  ENSG00000172742_5 (sequence is synthesized)
gccatctccacctgcacctcccacatcaccgtggtgaccctgcatttcgtgccctgcatctatgtctatgcccggcccttcactgccctccccacagacactgccatctctgtcaccttc

SEQ ID NO: 587008 - DNA, 120 bp, Artificial Sequence
  ENSG00000172742_6 (sequence is synthesized)
actgtcatctcccctttgctcaatcctataatttacacgctgaggaatcaggaaatgaagttggccatgaggaaactgaagagacggctaggacaatcagaaaggattttaattcaataa

SEQ ID NO: 587009 - DNA, 120 bp, Artificial Sequence
  ENSG00000172742_7 (sequence is synthesized)
tccctttgctaattcctatattgggctgtggctggagactaatacaggtggccaaaatgtagtaaagtagaaaagagtcagaatactgtaattacctgaggttgctttttcccatctgag

SEQ ID NO: 587010 - DNA, 120 bp, Artificial Sequence
  ENSG00000172742_8 (sequence is synthesized)
gaaagaagataataaaatcactcactttgagcagcagtgagagaactttgtctcctgggatgactgaatcaaaaacctgggtaatctttcatccagtggtggcatactgacttgcagaca

SEQ ID NO: 587011 - DNA, 120 bp, Artificial Sequence
  ENSG00000172742_9 (sequence is synthesized)
catcgagtcctaaaagaagttattccatcatatatgttggggaccacgtggatgatactgctctaagacaaaatccactcaagtctttccctactcactttcaattattcattccacaaa

SEQ ID NO: 587012 - DNA, 120 bp, Artificial Sequence
  ENSG00000172742_10 (sequence is synthesized)
tttttatagagcatacactatatgtctgaaagtactgggattcagattgctgcaaaaagattaaatgtagtcaccttcctggaggcataacccaaaatacttattaaaaaatataaacag

SEQ ID NO: 587013 - DNA, 84 bp, Artificial Sequence
  ENSG00000172742_11 (sequence is synthesized)
catctgtgctaggggaactgtagccacaatattacttgagagtttccaaagacatttaacagccagtagacattttcaagggga

SEQ ID NO: 587014 - DNA, 120 bp, Artificial Sequence
  ENSG00000172742_12 (sequence is synthesized)
tccaaagacatttaacagccagtagacattttcaaggggaaaaagatcagaaaagaacaatccaagcaaggaaaacaacatgtacttgtccacatgaggtgtcttatgcctgtaatctta

SEQ ID NO: 587015 - DNA, 78 bp, Artificial Sequence
  ENSG00000172742_13 (sequence is synthesized)
ggaggctgaggtggattagtgaaacctcatctctacaaaaaatcatgataataggccgggcgcggtggcttatgcctg

SEQ ID NO: 587016 - DNA, 120 bp, Artificial Sequence
  ENSG00000172742_14 (sequence is synthesized)
cctgggcaacagagcaagactctgtccaaaaataataataataattaataaataaataaaaattaaccagacatgatgatgcacacctgtagtcccagctacttgagagactgaggcagg

SEQ ID NO: 587017 - DNA, 120 bp, Artificial Sequence
  ENSG00000172742_15 (sequence is synthesized)
acttgagagactgaggcaggagaggttgaggctgcagtgagccatgttcacttcactgcactccagcctgagcaacagatcaagacacttgtcaaaaaaaaaaaagaaaagaaaagacaa

SEQ ID NO: 587018 - DNA, 120 bp, Artificial Sequence
  ENSG00000172742_16 (sequence is synthesized)
agaaagaaaatgaggtgagattgtgccacatttgtgtaacagtgaactcagtgcagccatggcgtaatacactcttggggtgaatactggtactggacctttaaaagaaaagttgggaag

SEQ ID NO: 587019 - DNA, 120 bp, Artificial Sequence
  ENSG00000172742_17 (sequence is synthesized)
aataactccatttatgaccacctgaacaatgcaagcccatgatttctgttgaggagagaggatccccaattcacttcaaggacataatttcctcctaggagaaggaaataatgctgttag

SEQ ID NO: 587020 - DNA, 67 bp, Artificial Sequence
  ENSG00000172742_18 (sequence is synthesized)
gacataatttcctcctaggagaaggaaataatgctgttagtgagagtgttcataaagaagaatcact

SEQ ID NO: 587021 - DNA, 120 bp, Artificial Sequence
  ENSG00000172742_19 (sequence is synthesized)
ccaactcaaaaaaaaaaaaggagaagaatcactgttgaggctgtggacagctcctttgattttgagaaaaaaatgagcaaaggcagatgccaagctctcaaatgggaagcaactgactcc

SEQ ID NO: 587022 - DNA, 120 bp, Artificial Sequence
  ENSG00000172742_20 (sequence is synthesized)
cccttatatagcaggattagccagatccaaatttcctgttgtttctatacacagtgatctcaccactcctttacctgtgccactcaatctattagaaggtaaagaaagggtataaaaagc

SEQ ID NO: 587023 - DNA, 120 bp, Artificial Sequence
  ENSG00000172742_21 (sequence is synthesized)
atgatagtttaattagtgaacctgagaatttgccagtctctgttgtgaaagagacagggatagtgctaggagaagatttatctgacaatccagctgatactctgctaagatctattgact

SEQ ID NO: 587024 - DNA, 120 bp, Artificial Sequence
  ENSG00000172742_22 (sequence is synthesized)
tcaccatactgtgttccccactatgataaagctcaagccatagcagctggcacacatttatcaatcagagtaggccaaccactgcaacaaaaatgtccacggtctaagtagttagccaca

SEQ ID NO: 587025 - DNA, 120 bp, Artificial Sequence
  ENSG00000172742_23 (sequence is synthesized)
acaaaagtttacttcttgctcatgtcacaggccaatgctggtctgcagaaagagggcacagtgccacactgtcattcagaaatgcaggcttctcccgtcttgggctccacattctctaga

SEQ ID NO: 587026 - DNA, 120 bp, Artificial Sequence
  ENSG00000172742_24 (sequence is synthesized)
caggcttctcccgtcttgggctccacattctctagatcctcagaatcctgtccatgatccagcagatggagaaagggagagagaattaagaataagtgattctcctgcctcagcctcttg

SEQ ID NO: 587027 - DNA, 120 bp, Artificial Sequence
  ENSG00000172742_25 (sequence is synthesized)
gctaattttgtatatttttattttcatagagatgaggtctcactaagttgcccaggctggttgaaattcttggactcaaatgatccctccacttcagcctcccaaaatgctagaattaca

SEQ ID NO: 587028 - DNA, 120 bp, Artificial Sequence
  ENSG00000172742_26 (sequence is synthesized)
ggcatgagacacctcacctgaacatgctcatgctgtcttatgctccacagtctctagatcctcataatcctgttcatgcatccagcagatagagaaagggagagaaattaagaattatgg

SEQ ID NO: 587029 - DNA, 120 bp, Artificial Sequence
  ENSG00000172742_27 (sequence is synthesized)
ggaagggaggggtgtgtctttatgggacagtcctggaagtggtgtgaactacttatgaccactttcattggccagcccttggtcacatagcctcacctgacagcaagggagcctggagaa

SEQ ID NO: 587030 - DNA, 120 bp, Artificial Sequence
  ENSG00000172742_28 (sequence is synthesized)
tgaaatcaaactctgctctcagaaagaagaaaatatgaagaatgaactctagtgatctcttccacatgtaagattcactgctaagaaatcacagttgggttacattacaaagattaagac

SEQ ID NO: 587031 - DNA, 120 bp, Artificial Sequence
  ENSG00000172742_29 (sequence is synthesized)
ctaagaaatcacagttgggttacattacaaagattaagactttgtctataaaaggattctcttaatacataaaaatgtttgctacagggctggctgcggtggctcatgcctgtaatctca

SEQ ID NO: 587032 - DNA, 80 bp, Artificial Sequence
  ENSG00000172742_30 (sequence is synthesized)
ctctacaaaaaatataaaaattagcagactgagctgggaggatcacttgagcctggggaagtcaagggtgcagcgagcca

SEQ ID NO: 587033 - DNA, 120 bp, Artificial Sequence
  ENSG00000172742_31 (sequence is synthesized)
agtcctagctactcaggagactgagctgggaggatcacttgagcctggggaagtcaagggtgcagcgagccatgaatgccccaccgtactcccacctgggcaaaagagtgagaccctgtc

SEQ ID NO: 587034 - DNA, 120 bp, Artificial Sequence
  ENSG00000172742_32 (sequence is synthesized)
aggcaactagacccttagaacacacagagagccaaaccgaaatgaaggagatgggggaaaatttttcttaacttaaaggaagagggaaatgatcaaggtaaaccctgggattaggatgac

SEQ ID NO: 587035 - DNA, 120 bp, Artificial Sequence
  ENSG00000172742_33 (sequence is synthesized)
agtagactagaagggcagggttccatgagatagaacattagggtagagtgccccaagaagataggccaagaagacaatcctcatagaaagcaactctcacttattcccaaacttttcatg

SEQ ID NO: 587036 - DNA, 120 bp, Artificial Sequence
  ENSG00000172742_34 (sequence is synthesized)
ggcttgttgtaaacaagttcgattaatgcagaagctcctttagcaatgaatgttctccaaaactaccatttgacgcagcaatcccattgctgggtatatacccaaaagaaaataaattat

SEQ ID NO: 587037 - DNA, 120 bp, Artificial Sequence
  ENSG00000172742_35 (sequence is synthesized)
tctaccaaaaagacacatgcacctgtatgttcacagtagcaaagacaaggaatcagcctaggtgcccatcaatggtggactagatgaagaaaatgtgatacattatacaccatggggtac

SEQ ID NO: 587038 - DNA, 120 bp, Artificial Sequence
  ENSG00000172742_36 (sequence is synthesized)
tatgcagacatttttaaaaatgaattcatgtgctttacagtaacatggatgcagctggaggccgtgatcctaagcaaattaatgcaggaacaaaaaatcgaataccacatgttctcactt

SEQ ID NO: 587039 - DNA, 120 bp, Artificial Sequence
  ENSG00000172742_37 (sequence is synthesized)
atgggtgagagctaaccatcgatttacacatggacacaaagatgggaacaaaagacactgaggcctacttgaggggaggagggtgggaagagtgtgaggtcagaaaactacctattaggt

SEQ ID NO: 587040 - DNA, 120 bp, Artificial Sequence
  ENSG00000172742_38 (sequence is synthesized)
actatgctcactaccaagattgtcttcttggccaatcttctttgggcactctaccctaatgttctatctcatggaaccctgcccttctagtcactacctgggtgacaaaatcatttgtac

SEQ ID NO: 587041 - DNA, 120 bp, Artificial Sequence
  ENSG00000172742_39 (sequence is synthesized)
accaaaccccagcaacacacaatttactcatgtaacaagcctacacatgcacccgttgaacctaaaataaaagttaaacaaaaatgaaatcaatgttatcttctttgctgattgacattt

SEQ ID NO: 587042 - DNA, 78 bp, Artificial Sequence
  ENSG00000172742_40 (sequence is synthesized)
aaaatgaaatcaatgttatcttctttgctgattgacatttcctgtgttctatttctaccactcaaaaatgttctgaat

SEQ ID NO: 587043 - DNA, 81 bp, Artificial Sequence
  ENSG00000172742_41 (sequence is synthesized)
aagaaaagataaatgaagtcaattgaggagataatagggttttattttttcttttccttgcaatgattgttacaatgtgct

SEQ ID NO: 587044 - DNA, 120 bp, Artificial Sequence
  ENSG00000172742_42 (sequence is synthesized)
agaatttccccagtacctacttcttctaaaatgcagctgaggcatcataagaggatcaatttcccacttaaagattaaaccagcagttagtattagtgcctatgaacttctgaaactgaa

SEQ ID NO: 587045 - DNA, 68 bp, Artificial Sequence
  ENSG00000172742_43 (sequence is synthesized)
gccaaggcaggcaagtctctactaaaaatacaaagaaaaataggccaggcatggtggcgcatgcctgt

SEQ ID NO: 587046 - DNA, 120 bp, Artificial Sequence
  ENSG00000172748_0 (sequence is synthesized)
gacacgcgctttcaaccggcggagacactggcagggccagaaacgcgcgcagcgggggcgggaggtcggtaagctccccgcccctgcccgagaccccgccccggcccggccccgcctttt

SEQ ID NO: 587047 - DNA, 120 bp, Artificial Sequence
  ENSG00000172748_1 (sequence is synthesized)
tctctgcctcccctccctgcacgtacgggccccgcccctcgcgcgacgttttttgttgacccggaaacggattctccggagccgaggtccgctcggatttgtcttcttagtgcttggatg

SEQ ID NO: 587048 - DNA, 120 bp, Artificial Sequence
  ENSG00000172748_2 (sequence is synthesized)
gtgtgagtgaaaacccagaggaatacatttggtggctgagctagtacaatgccatcaccggattccatgaccttcgaggatatcattgtagacttcactcaagaagagtgggccctgctg

SEQ ID NO: 587049 - DNA, 120 bp, Artificial Sequence
  ENSG00000172748_3 (sequence is synthesized)
gacacatcccagagaaagctgtttcaagatgtgatgttggagaacatcagtcatctggtctctattggcaaacagctctgcaaatcagttgtgctttcccaattggagcaagtagagaaa

SEQ ID NO: 587050 - DNA, 120 bp, Artificial Sequence
  ENSG00000172748_4 (sequence is synthesized)
ctttcaacacaaagaataagcttactgcaaggtagagaagttggcattaaacatcaagagataccattcattcaacatatctatcagaagggcacgtccaccatcagcacaatgagatct

SEQ ID NO: 587051 - DNA, 120 bp, Artificial Sequence
  ENSG00000172748_5 (sequence is synthesized)
catactcaagaggatccttttctatgcaatgacttaggagaagatttcactcaacatatagcattgactcaaaatgtgattacctacatgagaacgaaacactttgtaagcaaaaagttt

SEQ ID NO: 587052 - DNA, 120 bp, Artificial Sequence
  ENSG00000172748_6 (sequence is synthesized)
gggaaaatcttcagtgactggttatcctttaatcaacacaaggaaattcacaccaaatgtaaatcatatggaagtcatctatttgattatgcctttatccaaaactctgcccttagacca

SEQ ID NO: 587053 - DNA, 120 bp, Artificial Sequence
  ENSG00000172748_7 (sequence is synthesized)
cacagtgtgactcacactagagagataacattggaatgtcgtgtgtgtgggaaaacctttagcaaaaattctaatcttaggcgacatgagatgattcacactggagagaaaccacacgga

SEQ ID NO: 587054 - DNA, 120 bp, Artificial Sequence
  ENSG00000172748_8 (sequence is synthesized)
tgtcatctatgtgggaaagcctttactcattgctctgatcttcgaaaacatgagagaactcacactggagagaagccatatggatgtcatctatgtgggaaagccttcagtaaaagttct

SEQ ID NO: 587055 - DNA, 120 bp, Artificial Sequence
  ENSG00000172748_9 (sequence is synthesized)
aaccttagacgacatgagatgattcacactagagaaaaagcacagatatgccatctatgtgggaaagccttcactcattgctctgaccttagaaaacatgagagaactcacttaggagat

SEQ ID NO: 587056 - DNA, 120 bp, Artificial Sequence
  ENSG00000172748_10 (sequence is synthesized)
aaaccatatggatgtctcctatgtgggaaggctttcagtaaatgttcttaccttagacaacatgaaagaactcacaatggagagaaaccatatgaatgtcatctatgtggaaaagccttc

SEQ ID NO: 587057 - DNA, 120 bp, Artificial Sequence
  ENSG00000172748_11 (sequence is synthesized)
acatgagcgaagtcacaatggagagaaaccacatggatgtcatctatgtgggaaagcattcactgaatcttctgtgcttaaacgacatgagagaattcacactggagagaaaccatatga

SEQ ID NO: 587058 - DNA, 120 bp, Artificial Sequence
  ENSG00000172748_12 (sequence is synthesized)
gtgccatgtatgtgggaaagccttcactgaatcttctgacctcagacgacatgagagaactcacactggagaaaaaccatatgaatgccatctatgcggaaaagccttcaatcactcttc

SEQ ID NO: 587059 - DNA, 120 bp, Artificial Sequence
  ENSG00000172748_13 (sequence is synthesized)
tgtccttagacgacatgagagaactcacactggagagaaaccatatgaatgcaatatatgtggtaaagccttcaatagaagttacaactttagacttcatagaagagttcacactggaga

SEQ ID NO: 587060 - DNA, 120 bp, Artificial Sequence
  ENSG00000172748_14 (sequence is synthesized)
gaaaccatatgtatgtcctctatgtgggaaagcctttagtaaattttttaaccttagacaacatgagagaactcacactaaaaaagcaatgaatatgtaagaatcatcagctgtagcgtt

SEQ ID NO: 587061 - DNA, 120 bp, Artificial Sequence
  ENSG00000172748_15 (sequence is synthesized)
aacactaaatacaccaaggacaaacatactacaggaatattatgtctgtaatcagtgtggaaaagcctttatttatatttaccactttgctcaacctaaatgaattcaaggtagagagaa

SEQ ID NO: 587062 - DNA, 120 bp, Artificial Sequence
  ENSG00000172748_16 (sequence is synthesized)
tccagatgtatttaatgtttatggcacaaacttcagactctaggctgaccatatacaacgtgagagaatgaaactatagatcaaaggaatgtggaggagtcttcatccacagctctgtta

SEQ ID NO: 587063 - DNA, 120 bp, Artificial Sequence
  ENSG00000172748_17 (sequence is synthesized)
aataaatgggagaaatcacatcacgaaaattctgtgcctgtcgtcagtgtgaaaatgcctttgctgataatttatcctctaaacaaatgagtaaaatccacaggcaagcaaccatatgtc

SEQ ID NO: 587064 - DNA, 120 bp, Artificial Sequence
  ENSG00000172748_18 (sequence is synthesized)
tgtaattgctgtgcactctcattcagctaagcaccaattttggtgtgtgcaagaaaattcattataaggtaactgataaaaacaggaaatatgtgaaaatattttttattaggtggatga

SEQ ID NO: 587065 - DNA, 120 bp, Artificial Sequence
  ENSG00000172748_19 (sequence is synthesized)
ggcctcttgaacaattccagacattcatagtggagaagttattcaatgaaaactcatgagaaatccttttcttaatacagcagcacttctataatagatcagaattcacatggtgtagaa

SEQ ID NO: 587066 - DNA, 120 bp, Artificial Sequence
  ENSG00000172748_20 (sequence is synthesized)
ctctcaatgacatgaatggagggtagtcctcagtaaattactcattccttagtcaataccagcatttttccagtgagaaaactatcttgacaggatagtggaaaaaccttcaggcagctt

SEQ ID NO: 587067 - DNA, 120 bp, Artificial Sequence
  ENSG00000172748_21 (sequence is synthesized)
ttatgtcaaaaaagtgagacagggatgaaaactctaaaaagccattgatgagatgtatagctgggggacaaaacataaagccatcaagcacgtgcttgagaaaaaaattataattttgaa

SEQ ID NO: 587068 - DNA, 120 bp, Artificial Sequence
  ENSG00000172748_22 (sequence is synthesized)
taaagactttctacttaaaatatgtgggttgaaatgtacaattctgaaataacctgggaatattgaatgcagaattatgtaagaagtaataagattaaattagtactgtcaaaaatacaa

SEQ ID NO: 587069 - DNA, 120 bp, Artificial Sequence
  ENSG00000172748_23 (sequence is synthesized)
aagttgggtggaagcagcgcggacccacggcacaccgaacgcactccaacagaacccgacgcagacacgcgctttcaaccggcggagacactggcagggccagaaacgcgcgcagcgggg

SEQ ID NO: 587070 - DNA, 120 bp, Artificial Sequence
  ENSG00000172748_24 (sequence is synthesized)
agttcccttcctgcggcgtcctccacacccggggtctgctggtctccgcggatgtcacaggctcggcaaccgccctcctgtcggcggggagtcccgcgacgcccggaaatgctccgaagc

SEQ ID NO: 587071 - DNA, 120 bp, Artificial Sequence
  ENSG00000172748_25 (sequence is synthesized)
ctgtcgcccagctgccagatctgcgtctgtgtccggttccgtcactgaggtcgcccctgtccggcccttccaccctagttctcttcaccgtccgcccatcctatcgcgcgcggcctcaga

SEQ ID NO: 587072 - DNA, 120 bp, Artificial Sequence
  ENSG00000172748_26 (sequence is synthesized)
tatttatatctttattagcagcaatagtcatttcttctgaccctgggagaggagagccaccaacccaacccaccccctacccactgcatgtccttgttggttggactggggctaatagct

SEQ ID NO: 587073 - DNA, 120 bp, Artificial Sequence
  ENSG00000172748_27 (sequence is synthesized)
ccggagtgtggtgacagcgacctccataaagacctggctccattggattttcctgtttggtttctggtgaaagcagtgagttaaggctacgttgagaactctgtcagagagtgcattgat

SEQ ID NO: 587074 - DNA, 120 bp, Artificial Sequence
  ENSG00000172748_28 (sequence is synthesized)
cacccacctgcacctacaaagatgggaaactgcctgagacgccccacctcagatgacactattgtgcaaccgtcgacagggcaggatcttaggcccctactgccacatatggaacaagct

SEQ ID NO: 587075 - DNA, 120 bp, Artificial Sequence
  ENSG00000172748_29 (sequence is synthesized)
ccagttccagtctatcacccagcacctggccagcctctgttagcaatactgctgactgaagaagaacaagttagaacagctcaaagactaagccttctacagtgtctgcctgaagaagtt

SEQ ID NO: 587076 - DNA, 120 bp, Artificial Sequence
  ENSG00000172748_30 (sequence is synthesized)
tatgaccctggaagagataaatcagaagaggagatgccagagtgtgtgatctgtttactggaatttgtttgtggggaccccattcgatgtctgccatgcaaacacttctttcaccttgac

SEQ ID NO: 587077 - DNA, 120 bp, Artificial Sequence
  ENSG00000172748_31 (sequence is synthesized)
tgcatagacacatggctgctgcgatctttcacatgtccctactgccgggggccagtggatgcagcgctgtctacatccttgggacaaactgggtgacttcaagataaacataatttttga

SEQ ID NO: 587078 - DNA, 120 bp, Artificial Sequence
  ENSG00000172748_32 (sequence is synthesized)
attcattcactcactcatttttcactgattcattctttcattctacacgtgcttagaacagctttctcatctatcacttcaacttctgctttgatcctttcataactctcacaattacct

SEQ ID NO: 587079 - DNA, 120 bp, Artificial Sequence
  ENSG00000172748_33 (sequence is synthesized)
gacagccatttctttccttttcacttatattgatttgtcctctctctagaaagtcatctttctgaccacagtttcacatccttcttgctctttaatctcccaaactcagaaaagttatgg

SEQ ID NO: 587080 - DNA, 120 bp, Artificial Sequence
  ENSG00000172748_34 (sequence is synthesized)
taattcactgctttggtatgcataaataaatgtattgatttctttaaagtaattattctatcatagggactgttctgcacagaacctagattgttctggtggagctaatatttattgcat

SEQ ID NO: 587081 - DNA, 120 bp, Artificial Sequence
  ENSG00000172748_35 (sequence is synthesized)
agttttttaatataatgtcaaatactatgacaatttgtaatttctcactaagtgaaaacactgaggattctgaaatcagtatttgaagtgaggcatggccatcagcaattataggtcttt

SEQ ID NO: 587082 - DNA, 120 bp, Artificial Sequence
  ENSG00000172748_36 (sequence is synthesized)
tatgtctgggaacaagttcaagagttttcattttgctcgtgaaggactgtcaatgttgtcttcaaggtactcttcccaggctgaccttcagtggctaacttatccttcccagtaggctgc

SEQ ID NO: 587083 - DNA, 120 bp, Artificial Sequence
  ENSG00000172748_37 (sequence is synthesized)
cctgtatctgataaccttgtacatttgtcagcacagaactcaaaatccatgtatctttttccccaaaacaggcaaacagctctgcaaatcagttgtgctttcccaattggagcaagtaga

SEQ ID NO: 587084 - DNA, 120 bp, Artificial Sequence
  ENSG00000172748_38 (sequence is synthesized)
aaagaataagcttactgcaaggtgagctctaagaagcagtgcttcaataggaggaggagaaacatggccagtgagtgagtaggacccaacagttgccaaaggaagatttcttttgttttt

SEQ ID NO: 587085 - DNA, 120 bp, Artificial Sequence
  ENSG00000172748_39 (sequence is synthesized)
ctcccagagtgctgggattacagtcatgaaccaccacgcccagccggaaggtttcttaaatttgcagtgtttctgaaatgtaggcaaaaacctgagggaaacatttctcagatattgtca

SEQ ID NO: 587086 - DNA, 120 bp, Artificial Sequence
  ENSG00000172748_40 (sequence is synthesized)
ttatactttgtaggtatcaatttttattcaagtatctctctgtcattgtctttgtcttttgtaaaggggatatttgtgtacttatttgagttaaactattacatactagccctttataat

SEQ ID NO: 587087 - DNA, 120 bp, Artificial Sequence
  ENSG00000172748_41 (sequence is synthesized)
ggtcctcttctttgaaaatttttctttccttcctcgacttgcctttatttttttatatgctgaaaatgtcagtagtcaatgtgctataatactcttctccttaaagtatggttaatttaa

SEQ ID NO: 587088 - DNA, 120 bp, Artificial Sequence
  ENSG00000172748_42 (sequence is synthesized)
cattctttccctgtctgtgtgtatttgaaacacactcaaatgggctttggagctatttaacatttttattcccctaatgcctatatagcatcttttttttttcatttatttcaggtagag

SEQ ID NO: 587089 - DNA, 120 bp, Artificial Sequence
  ENSG00000172748_43 (sequence is synthesized)
gctgccagatctgcgtctgtgtccggttccgtcactgaggtcgcccctgtccggcccttccaccctagttctcttcaccgtccgcccatcctatcgcgcgcggcctcaggtcccgattcg

SEQ ID NO: 587090 - DNA, 120 bp, Artificial Sequence
  ENSG00000172748_44 (sequence is synthesized)
gcatgtggcttgtcttccatcgtccccaccctcgcccctcttggcccctcagggcagccctgggattcggcagacgccagtcctccctgagatgcttccccatccttccctccgccaggc

SEQ ID NO: 587091 - DNA, 120 bp, Artificial Sequence
  ENSG00000172748_45 (sequence is synthesized)
cgatcctgtaacaaccctcgtgcttctgcacaatcgcctcccactagcggtgactgttgggtgtttaccttcccggtgtcccactgagaagcgggctcttccttggcaggggcttcttca

SEQ ID NO: 587092 - DNA, 120 bp, Artificial Sequence
  ENSG00000172748_46 (sequence is synthesized)
ttgcctcgctgtggatgtcgagatttgtcttcttagtgcttggatggtgtgagtgaaaacccagaggaatacatttggtggctgagctagtacaatgccatcaccggattccatgacctt

SEQ ID NO: 587093 - DNA, 120 bp, Artificial Sequence
  ENSG00000172752_0 (sequence is synthesized)
aaatggcgattcctctgtctaagtagtagaagtgaccgcagctcggctgctagtaaagattgcccttggtttctgagaaattctgactccctaagttcatttggcagccggcggcttctc

SEQ ID NO: 587094 - DNA, 120 bp, Artificial Sequence
  ENSG00000172752_1 (sequence is synthesized)
tgaaacaaagccagcaaacagctggagcgtctctggacactcacattaaaacttgtgaagagttaaaagccccagggaagagccaggccaagggcacgggtcagcgccggcttaaaagac

SEQ ID NO: 587095 - DNA, 120 bp, Artificial Sequence
  ENSG00000172752_2 (sequence is synthesized)
cctctcagggcacgaggcgttcgctgcgggaatccacctgcagctgtgcggcgcggaccagggcgtgcggcgcggaccagggcttccggcgcgcgctctatccaactgcgccgcgggcgc

SEQ ID NO: 587096 - DNA, 120 bp, Artificial Sequence
  ENSG00000172752_3 (sequence is synthesized)
ccgagaggcgcgcgtttactgcgctcaggagctcggtgcagcctcttctggagagttgggggcggtttccagggtccggagtgtcccctgaccccgggaaagctggaacaaaagtaaaaa

SEQ ID NO: 587097 - DNA, 120 bp, Artificial Sequence
  ENSG00000172752_4 (sequence is synthesized)
tcttcactaacaaaatgaagatcttgctaattatatttgtcctaatcatttggactgaaacattggcagaccagagcccagggccaggccctgtgtatgcagatgtcgtgtttctggtgg

SEQ ID NO: 587098 - DNA, 120 bp, Artificial Sequence
  ENSG00000172752_5 (sequence is synthesized)
acagctccgatcacctgggacctaagtcattcccattcgtgaaaacgttcatcaacaaaatgatcaacagtctccccatagaggccaacaaataccgtgtagccctggcccagtacagcg

SEQ ID NO: 587099 - DNA, 120 bp, Artificial Sequence
  ENSG00000172752_6 (sequence is synthesized)
acgagtttcacagtgaattccatctgagcaccttcaaaggcagaagccccatgctgaaccacctcaagaagaactttcagttcattggcgggtccctgcagataggaaaggctcttcagg

SEQ ID NO: 587100 - DNA, 120 bp, Artificial Sequence
  ENSG00000172752_7 (sequence is synthesized)
aggctcataggacctacttctctgcacccataaatgggagagacaggaaacagtttcccccaattttggtggtcctggcttcggctgagtctgaggatgaagtggaagaggcttcgaaag

SEQ ID NO: 587101 - DNA, 120 bp, Artificial Sequence
  ENSG00000172752_8 (sequence is synthesized)
ccctgcagaaagacggggtgaaaattatctccgtgggggtgcagaaagcttctgaggaaaatctgaaggccatggccacatcccatttccatttcaaccttcggacaatcagagacctca

SEQ ID NO: 587102 - DNA, 120 bp, Artificial Sequence
  ENSG00000172752_9 (sequence is synthesized)
gcacattttcccaaaacatgacacagatcatcaaggatgtaaccaagtataaggagggagccgtcgatgctgatatgcaagttcacttccccatatcctgtcagaaagattcactcgctg

SEQ ID NO: 587103 - DNA, 120 bp, Artificial Sequence
  ENSG00000172752_10 (sequence is synthesized)
acctcgtgttcctggtggatgagtcacttgggaccggaggaaatttaaggcatcttcagaccttccttgagaacattaccagctccatggatgtgaaggaaaattgcatgcgacttggac

SEQ ID NO: 587104 - DNA, 120 bp, Artificial Sequence
  ENSG00000172752_11 (sequence is synthesized)
tgatgagttacagcaatagtgccaagactatttcttttcttaaatcaagcacaacccaatctgaatttcagcagcaaatcaagaatctttctatccaagttgggaaatccaatacagggg

SEQ ID NO: 587105 - DNA, 120 bp, Artificial Sequence
  ENSG00000172752_12 (sequence is synthesized)
ctgccattgatcagatgagaagagacggcttctcagagtcatatggcagcagaagagcacaaggagtgcctcagattgcagttctggtcacccacagaccatcagatgatgaggtgcatg

SEQ ID NO: 587106 - DNA, 120 bp, Artificial Sequence
  ENSG00000172752_13 (sequence is synthesized)
atgctgcgctgaaccttcgactggaggatgtaaacgtgtttgccttgagcatccaaggggctaacaatacccagttagaagaaatagtgtcttatcctccagaacagacaatttccacgc

SEQ ID NO: 587107 - DNA, 120 bp, Artificial Sequence
  ENSG00000172752_14 (sequence is synthesized)
tgaagtcctatgcagacttagaaacttacagtacaaagttcctgaaaaagctccagaatgaaatatggtcccaaatttctacttatgctgaacaaaggaatcttgataaaactggctgtg

SEQ ID NO: 587108 - DNA, 120 bp, Artificial Sequence
  ENSG00000172752_15 (sequence is synthesized)
tggatacaaaagaggctgatatccacttcctcattgatggctcaagcagcatccaggagaaacagtttgagcaaatcaagagatttatgttggaagtgacagaaatgtttagcattggcc

SEQ ID NO: 587109 - DNA, 120 bp, Artificial Sequence
  ENSG00000172752_16 (sequence is synthesized)
cagacaaagtccgagttggagttgtgcagtattcagatgacacagaagtggaattttatatcactgactattctaatgatattgacttaagaaaggctatttttaacattaagcaactaa

SEQ ID NO: 587110 - DNA, 120 bp, Artificial Sequence
  ENSG00000172752_17 (sequence is synthesized)
ctggtggaacttatactgggaaagctctggattacatactgcaaataataaaaaatggaatgaaggatagaatgagcaaggttccctgttacctcattgtgttgactgatgggatgtcca

SEQ ID NO: 587111 - DNA, 120 bp, Artificial Sequence
  ENSG00000172752_18 (sequence is synthesized)
cagacagagtcgtggaacctgctaagagactaagggctgagcaaatcactgttcatgcagttggcattggggcagctaataaaatagaactgcaagaaattgctgggaaagaagaaaggg

SEQ ID NO: 587112 - DNA, 120 bp, Artificial Sequence
  ENSG00000172752_19 (sequence is synthesized)
ttagctttgggcagaactttgatgctttgaaaagcataaaaaatgaagtcgttcgtgaaatctgcgctgaaaaaggatgtgaagacatgaaggccgacatcatgtttctggtggacagtt

SEQ ID NO: 587113 - DNA, 120 bp, Artificial Sequence
  ENSG00000172752_20 (sequence is synthesized)
cttggagtataggaaatgaaaattttaggaaaatgaaaatcttcatgaaaaacctgttaactaaaattcaaattggtgcagacaaaacccagattggtgttgttcagttcagtgataaaa

SEQ ID NO: 587114 - DNA, 120 bp, Artificial Sequence
  ENSG00000172752_21 (sequence is synthesized)
ctaaggaagagttccagcttaatagatattttacacagcaagaaatttctgatgcaatagatagaatgtctctcatcaatgaaggcactttaactggaaaggcactaaattttgtaggtc

SEQ ID NO: 587115 - DNA, 120 bp, Artificial Sequence
  ENSG00000172752_22 (sequence is synthesized)
aatacttcacccactccaagggggcccgtttgggggccaaaaaatttctcatcctcatcacagatggagtagcgcaggatgatgtgagagatcctgctagaattcttcggggcaaagatg

SEQ ID NO: 587116 - DNA, 120 bp, Artificial Sequence
  ENSG00000172752_23 (sequence is synthesized)
tgaccatcttctctgtaggagtatacaatgccaatagatctcagctagaagagatcagtggggatagcagcctagtttttcatgttgagaacttcgatcatctaaaggcactagaaagga

SEQ ID NO: 587117 - DNA, 120 bp, Artificial Sequence
  ENSG00000172752_24 (sequence is synthesized)
aacttatctttcgtgtgtgtgctctccatgattgtaaaaggattacactactagacgttgtgtttgtgctggatcattcaggtagcataaaaaaacaatatcaagatcacatgattaacc

SEQ ID NO: 587118 - DNA, 120 bp, Artificial Sequence
  ENSG00000172752_25 (sequence is synthesized)
taactatccatttggtgaagaaagcagatgttggcagggaccgagttcagtttggagccctcaaatactctgaccaacctaacatccttttctaccttaatacatactcgaacagatcag

SEQ ID NO: 587119 - DNA, 120 bp, Artificial Sequence
  ENSG00000172752_26 (sequence is synthesized)
caataattgagaatctgcggaagcgcagggacactggagggaacacctacactgccaaggctctcaagcacgcaaatgccctgtttacagaggaacatggcagccgcatcaagcaaaatg

SEQ ID NO: 587120 - DNA, 120 bp, Artificial Sequence
  ENSG00000172752_27 (sequence is synthesized)
tgaagcagatgctgattgtcatcaccgatggggaatcccatgaccatgatcagctcaatgacacagcattggaactgagaaacaaaggcatcaccatctttgcagtgggtgtaggaaagg

SEQ ID NO: 587121 - DNA, 120 bp, Artificial Sequence
  ENSG00000172752_28 (sequence is synthesized)
ccaaccaaaaggaacttgagggtatggcagggaataaaaacaatactatctatgtagataattttgacaaactgaaagatgttttcacacttgttcaagaacgtatgtgtactgaagcac

SEQ ID NO: 587122 - DNA, 120 bp, Artificial Sequence
  ENSG00000172752_29 (sequence is synthesized)
cagaggtctgtcatcttcaggaagctgacgtgattttcctttgcgatggctctgacagggtatctaattcagattttgtaaccatgacaactttcttgtcagacttaatcgataattttg

SEQ ID NO: 587123 - DNA, 120 bp, Artificial Sequence
  ENSG00000172752_30 (sequence is synthesized)
acattcagtctcaaagaatgaaaattggtatggctcaatttggaagcaactaccagagtattattgagttgaaaaactctctgactaaaacccagtggaagactcaaattcagaatgtct

SEQ ID NO: 587124 - DNA, 120 bp, Artificial Sequence
  ENSG00000172752_31 (sequence is synthesized)
ccaagagcggtggatttccaagaattgactttgcccttaaaaaagtgagcaatatgtttaatctacatgctggtgggagaagaaatgctggtgtcccccaaactttggttgttatcacat

SEQ ID NO: 587125 - DNA, 120 bp, Artificial Sequence
  ENSG00000172752_32 (sequence is synthesized)
ctggagatcctcgctatgatgtggcagatgcagtaaaaaccctgaaggaccttggaatttgtgtcctggttttgggcataggagatgtttataaggaacatctcctgccaataacaggca

SEQ ID NO: 587126 - DNA, 120 bp, Artificial Sequence
  ENSG00000172752_33 (sequence is synthesized)
attctgaaaaaataatcacttttcaagactttgataaattaaagaatgtggatgtgaaaaaaagaatcatccgtgaaatctgccagagctgtgggaaaaccaattgctttatggacatag

SEQ ID NO: 587127 - DNA, 120 bp, Artificial Sequence
  ENSG00000172752_34 (sequence is synthesized)
tggttgggtttgacatctccactcatgtgcaggggcagcctttgttccagggccacccccagctggaatcctacctcccaggcatcttagaagacatcagctctatcaagggggtgagct

SEQ ID NO: 587128 - DNA, 120 bp, Artificial Sequence
  ENSG00000172752_35 (sequence is synthesized)
gtggggctggcacagaggcacaggtgagcttggcgtttaaggtgaacagtgaccaaggattccctgccaagttccaaatctatcagaaagcagtgtttgacagcttgctgcaagtcaacg

SEQ ID NO: 587129 - DNA, 120 bp, Artificial Sequence
  ENSG00000172752_36 (sequence is synthesized)
tcagtgggccaactcatctgaacgcacagttcttgcggtctctttgggacacatttaaggataaatctgcatcccggggccaggtgctgcttattttttcagacggtctccagagtgaaa

SEQ ID NO: 587130 - DNA, 120 bp, Artificial Sequence
  ENSG00000172752_37 (sequence is synthesized)
gcaacataatgcttgaaaatcaatcagacaggctcagagaagcaggacttgatgctctgctggtagtgtcccttaacacaactgctcatcatgagttttctagctttgaatttggaaaaa

SEQ ID NO: 587131 - DNA, 120 bp, Artificial Sequence
  ENSG00000172752_38 (sequence is synthesized)
ctgtacattctgcaaatgtccaggaattccaggacctcatgggacccgaggactacaagccatgaagggttctcaaggtctgaaaggcagcagaggacacaggggagaggatggaaaccc

SEQ ID NO: 587132 - DNA, 120 bp, Artificial Sequence
  ENSG00000172752_39 (sequence is synthesized)
tggagtacgaggagacacaggaccccaaggagacaaagggattgcaggatgtccaggggcgtggggtcagaagggactcaaaggattttctggacctaagggaggtcatggagacgatgg

SEQ ID NO: 587133 - DNA, 120 bp, Artificial Sequence
  ENSG00000172752_40 (sequence is synthesized)
gattgatggacttgatggggaagagggctgtcatggatttcctggaataaaaggagaaaaaggtgatccaggatctcagggcagcccaggttccagaggtgcccctgggcagtatggaga

SEQ ID NO: 587134 - DNA, 120 bp, Artificial Sequence
  ENSG00000172752_41 (sequence is synthesized)
gaagggcttcccaggggatccgggtaatccaggacaaaacaataacatcaaaggacaaaagggctccaaaggagaacaaggaagacaaggtagaagtggacagaaaggggtgcaaggcag

SEQ ID NO: 587135 - DNA, 120 bp, Artificial Sequence
  ENSG00000172752_42 (sequence is synthesized)
tcctagttccagaggcagcaggggaagagaaggtcaaaggggactccgaggtgtctcaggagaaccaggaaatcctggacctacaggcacattgggagctgaaggattacaaggcccaca

SEQ ID NO: 587136 - DNA, 120 bp, Artificial Sequence
  ENSG00000172752_43 (sequence is synthesized)
ggggtcacagggaaatcctggcagaaaaggagaaaaaggaagccaggggcagaaaggacctcagggttctcctgggctaatgggagctaaagggagcactggaagacctggacttttggg

SEQ ID NO: 587137 - DNA, 120 bp, Artificial Sequence
  ENSG00000172752_44 (sequence is synthesized)
gaaaaaaggagagcctggacttcctggagatctagggccagtggggcaaactgggcagcgaggaagacagggagattctggcatcccaggctacggtcagatgggacgaaaaggagtaaa

SEQ ID NO: 587138 - DNA, 120 bp, Artificial Sequence
  ENSG00000172752_45 (sequence is synthesized)
gggcccaagaggattccctggagatgcggggcagaagggtgatattggtaatcctggaattcctgggggacctggacccaaaggatttaggggactagcactcactgtaggcttgaaagg

SEQ ID NO: 587139 - DNA, 120 bp, Artificial Sequence
  ENSG00000172752_46 (sequence is synthesized)
tgaagagggatctcgaggactcccaggccctcctggacagagaggcattaaaggcatggcagggcagcctgtatattctcaatgtgatctgatccggtttttgcgggaacatagtctttt

SEQ ID NO: 587140 - DNA, 120 bp, Artificial Sequence
  ENSG00000172752_47 (sequence is synthesized)
caaaaatgcatatccaacagagctagtatttgctctggacaattcctacgatgtcacagaagagagctttaataaaacacgggacatcatcacttccattgtcaatgaccttaacatcag

SEQ ID NO: 587141 - DNA, 120 bp, Artificial Sequence
  ENSG00000172752_48 (sequence is synthesized)
ggaaaataactgtcctgtgggagcaagagttgccatggtttcctataactcaggcaccagctatctcatccgctggtctgactacaataggaagaagcagctcctccagcagctttccca

SEQ ID NO: 587142 - DNA, 120 bp, Artificial Sequence
  ENSG00000172752_49 (sequence is synthesized)
aataaaatatcaagacaccacagagccccgagatgttggtaatgcaatgaggtttgtgacccgcaacgtgttcaagcggacgtatgcaggagccaacgtgaggagagttgctgtgttttt

SEQ ID NO: 587143 - DNA, 120 bp, Artificial Sequence
  ENSG00000172752_50 (sequence is synthesized)
tagcaatggtcaaacagccagtaggtcatccatcatcacggccaccatggagtttagtgccctggatatcagtccaacagtctttgcttttgatgagagagttttccttgaagcttttgg

SEQ ID NO: 587144 - DNA, 120 bp, Artificial Sequence
  ENSG00000172752_51 (sequence is synthesized)
gtttgacaacactggaacatttcaggtgattccagttcctccaaatggggaaaatcaaacattagaaagacttcggcgctgtgcactttgctatgataaatgttttccaaatgcttgcat

SEQ ID NO: 587145 - DNA, 120 bp, Artificial Sequence
  ENSG00000172752_52 (sequence is synthesized)
tcgagaggctttcttacctgaagattcatacatggatgtagtcttcctcatagacaattctcggaatatagcaaaggatgagtttaaggctgtgaaagccttggtgagctcagtgattga

SEQ ID NO: 587146 - DNA, 120 bp, Artificial Sequence
  ENSG00000172752_53 (sequence is synthesized)
caacttcaacattgcttcagaccctttaatctcagactctggtgataggattgctttgttgagctattctccttgggaaagttccaggagaaagatgggtacagtaaaaacagagtttga

SEQ ID NO: 587147 - DNA, 120 bp, Artificial Sequence
  ENSG00000172752_54 (sequence is synthesized)
tttcatcacttatgacaaccaactcctaatgaagaatcacatccagacttccttccaacagctaaatggagaagcaacaattggtcgtgccctactgtggaccactgaaaatctttttcc

SEQ ID NO: 587148 - DNA, 120 bp, Artificial Sequence
  ENSG00000172752_55 (sequence is synthesized)
agaaacaccctatctaagaaaacacaaggtcatctttgtggtctcagctggagaaaattatgagagaaaagaatttgtaaaaatgatggctttgagggctaagtgtcaaggctacgtcat

SEQ ID NO: 587149 - DNA, 120 bp, Artificial Sequence
  ENSG00000172752_56 (sequence is synthesized)
atttgtgatttctctgggctctacacgtaaggatgacatggaggagttagccagctacccacttgatcaacacctgatacagcttgggagaatacataaaccagatctgaattatattgc

SEQ ID NO: 587150 - DNA, 120 bp, Artificial Sequence
  ENSG00000172752_57 (sequence is synthesized)
gaagttcttaaagccatttttatactcggtcaggcggggattcaatcagtacccaccaccgatgcttgaggatgcctgtagactcatcaatttaggaggagagaatattcaaaatgatgg

SEQ ID NO: 587151 - DNA, 120 bp, Artificial Sequence
  ENSG00000172752_58 (sequence is synthesized)
tttccaatttgttactgagctacaagaggattttttgggaggtaatggcttcattggccaagaattaaattctgggagagaatcaccttttgtaaagacggaagacaatggaagtgacta

SEQ ID NO: 587152 - DNA, 120 bp, Artificial Sequence
  ENSG00000172752_59 (sequence is synthesized)
tttggtttaccttccaagccaaatgtttgagccacaaaaattaatgatcaattatgaaaaagatcaaaaatctgcagaaattgcaagtctcacttctggacatgaaaattatggcagaaa

SEQ ID NO: 587153 - DNA, 120 bp, Artificial Sequence
  ENSG00000172752_60 (sequence is synthesized)
agaagaaccagatcatacttatgaacctggagatgtctctcttcaagaatattacatggatgtggctttcctcatagatgcttcccaaagagtaggaagtgatgagtttaaggaagtaaa

SEQ ID NO: 587154 - DNA, 120 bp, Artificial Sequence
  ENSG00000172752_61 (sequence is synthesized)
agcttttataacctcagtgcttgattactttcacattgcccccactccactgacctccaccttaggagacagggttgctgtcctgagctactctcctccaggctatatgcctaacactga

SEQ ID NO: 587155 - DNA, 120 bp, Artificial Sequence
  ENSG00000172752_62 (sequence is synthesized)
agaatgccctgtctacctggaatttgatttggttacttataacagtatacaccaaatgaaacatcatctccaagactctcaacagctcaatggagatgtttttattggccatgccttgca

SEQ ID NO: 587156 - DNA, 120 bp, Artificial Sequence
  ENSG00000172752_63 (sequence is synthesized)
gtggacaattgacaatgtctttgtaggaacccccaatctgaggaaaaacaaagttatctttgtaatatctgctggcgaaaccaactctttagacaaagacgtcttaaggaatgtgtctct

SEQ ID NO: 587157 - DNA, 120 bp, Artificial Sequence
  ENSG00000172752_64 (sequence is synthesized)
gagagccaagtgtcaaggctactccatatttgtgttttcctttggccctaaacacaatgacaaagaattagaagaattagccagccaccctctggatcatcacttggtccaacttggccg

SEQ ID NO: 587158 - DNA, 120 bp, Artificial Sequence
  ENSG00000172752_65 (sequence is synthesized)
aacccacaagccagattggaactatatcatcaagtttgtcaagccatttgtccatttaatcagacgtgccatcaacaaatatcccaccgaagatatgaaagccacatgtgttaacatgac

SEQ ID NO: 587159 - DNA, 120 bp, Artificial Sequence
  ENSG00000172752_66 (sequence is synthesized)
ctctcccaacccagagaacggtggcacagaaaacactgtattacttcttcctgggatatatgaaataaagacagaaaatggtgatctgtttgatgaatttgattcccaggcacaacatct

SEQ ID NO: 587160 - DNA, 120 bp, Artificial Sequence
  ENSG00000172752_67 (sequence is synthesized)
ccttgtattagggaacaatcatagtagtggttctgagacagctactgatttgatgcagaagttatatctgctcttttcaactgagaaactggcaatgaaagacaaggaaaaagcacattt

SEQ ID NO: 587161 - DNA, 120 bp, Artificial Sequence
  ENSG00000172752_68 (sequence is synthesized)
agaagaaatttcagctctagtggttgataaacagcaagaaaaagaagataaggaaatggaagctacagacatctgaagcatcttacctaagaattcagtaattaatccaatactttcgtc

SEQ ID NO: 587162 - DNA, 120 bp, Artificial Sequence
  ENSG00000172752_69 (sequence is synthesized)
atagtgattcatactctatgtttatagaacatggtgaagatacaaggtcatcataggagaaaagaagatagctccactgacatgtataatcccatgtggttctaaccagaatgtataatc

SEQ ID NO: 587163 - DNA, 120 bp, Artificial Sequence
  ENSG00000172752_70 (sequence is synthesized)
atctgttagaggtactgtggtaaatgacagggacttttcacaaaaacaattggctaatagcatgctaaatttgttctccatctcaaatcttgaggagaagaattttcggagtgaagacat

SEQ ID NO: 587164 - DNA, 120 bp, Artificial Sequence
  ENSG00000172752_71 (sequence is synthesized)
cagtaagaagacctgacaaaccaggaatgatttcatttctcctgagaactggggaaaccgacctataagagttaacttttctttgaaagctctgcacagttcaggcatcaattttgatga

SEQ ID NO: 587165 - DNA, 120 bp, Artificial Sequence
  ENSG00000172752_72 (sequence is synthesized)
tgtatctgcctgtaaaagattgtcattattttcaacacatctgtatctcagattggactcctctaaaagcatttggaattggaatttcctaggaatatcttctactaattcttaaaactg

SEQ ID NO: 587166 - DNA, 120 bp, Artificial Sequence
  ENSG00000172752_73 (sequence is synthesized)
gaaagccatgcccatgtcatcggttctggggtgaccctaacatttcatctagcagtgattgtcttctaaaacccacctgtcaggctgctatgacccatagttaatgctttctcttcacca

SEQ ID NO: 587167 - DNA, 120 bp, Artificial Sequence
  ENSG00000172752_74 (sequence is synthesized)
ggacattgacaaaagaatggaattggtgaaaaagaaaaaagtgataagaggctaattttatgaaccatattttttgctgtaatcttttgtttaaattttagcagctttgctttgtgtata

SEQ ID NO: 587168 - DNA, 120 bp, Artificial Sequence
  ENSG00000172752_75 (sequence is synthesized)
ctgaatttttgcagcaaaagaattacggaaaagcacagatactctatatgaccagagatgttcttgggaattacaatgtagcaagagataatttctaaaataaaaacaagtctgacttgg

SEQ ID NO: 587169 - DNA, 120 bp, Artificial Sequence
  ENSG00000172752_76 (sequence is synthesized)
ttgataaacagcaagaaaaagaagatctctagccagcagcttgggttagttatatttggccagccctgctccctgaagccaatctgagtctcttcagaaaatatcagcttgtctttttct

SEQ ID NO: 587170 - DNA, 120 bp, Artificial Sequence
  ENSG00000172752_77 (sequence is synthesized)
tgcactcatgaaagcttaatgactgagaatcactgagttgtactttgtctttttgcagataaggaaatggaagctacagacatctgaagcatcttacctaagaattcagtaattaatcca

SEQ ID NO: 587171 - DNA, 120 bp, Artificial Sequence
  ENSG00000172752_78 (sequence is synthesized)
atactttcgtcatagtgattcatactctatgtttatagaacgtaagtttaccttaaagttaggccatgaaacagaaataatacaatctatctctgagttgttgaaaagttgaagatgatg

SEQ ID NO: 587172 - DNA, 120 bp, Artificial Sequence
  ENSG00000172752_79 (sequence is synthesized)
catataaagctcaaagtacacactatgcgtggaatataatcaactagtattatccctatttgaattatctaagtttgatcatctatttgacaattaaaaatataaatccattatatcaaa

SEQ ID NO: 587173 - DNA, 120 bp, Artificial Sequence
  ENSG00000172757_0 (sequence is synthesized)
gttcagtcgggtcccggcagcggctgcagcgctctcgtcttctgcggctctcggtgccctctccttttcgtttccggaaacatggcctccggtgtggctgtctctgatggtgtcatcaag

SEQ ID NO: 587174 - DNA, 120 bp, Artificial Sequence
  ENSG00000172757_1 (sequence is synthesized)
gtgttcaacgacatgaaggtgcgtaagtcttcaacgccagaggaggtgaagaagcgcaagaaggcggtgctcttctgcctgagtgaggacaagaagaacatcatcctggaggagggcaag

SEQ ID NO: 587175 - DNA, 120 bp, Artificial Sequence
  ENSG00000172757_2 (sequence is synthesized)
gagatcctggtgggcgatgtgggccagactgtcgacgacccctacgccacctttgtcaagatgctgccagataaggactgccgctatgccctctatgatgcaacctatgagaccaaggag

SEQ ID NO: 587176 - DNA, 120 bp, Artificial Sequence
  ENSG00000172757_3 (sequence is synthesized)
agcaagaaggaggatctggtgtttatcttctgggcccccgagtctgcgccccttaagagcaaaatgatttatgccagctccaaggacgccatcaagaagaagctgacagggatcaagcat

SEQ ID NO: 587177 - DNA, 120 bp, Artificial Sequence
  ENSG00000172757_4 (sequence is synthesized)
gaattgcaagcaaactgctacgaggaggtcaaggaccgctgcaccctggcagagaagctggggggcagtgccgtcatctccctggagggcaagcctttgtgagccccttctggccccctg

SEQ ID NO: 587178 - DNA, 120 bp, Artificial Sequence
  ENSG00000172757_5 (sequence is synthesized)
ctgcccccttcctgccagaccggaggggctggggggatcccagcagggggagggcaatcccttcaccccagttgccaaacagaccccccaccccctggattttccttctccctccatccc

SEQ ID NO: 587179 - DNA, 120 bp, Artificial Sequence
  ENSG00000172757_6 (sequence is synthesized)
ttgacggttctggccttcccaaactgcttttgatcttttgattcctcttgggctgaagcagaccaagttccccccaggcaccccagttgtgggggagcctgtattttttttaacaacatc

SEQ ID NO: 587180 - DNA, 120 bp, Artificial Sequence
  ENSG00000172757_7 (sequence is synthesized)
cccattccccacctggtcctcccccttcccatgctgccaacttctaaccgcaatagtgactctgtgcttgtctgtttagttctgtgtataaatggaatgttgtggagatgacccctccct

SEQ ID NO: 587181 - DNA, 120 bp, Artificial Sequence
  ENSG00000172757_8 (sequence is synthesized)
gtgccggctggttcctctcccttttcccctggtcacggctactcatggaagcaggaccagtaagggaccttcgattaaaaaaaaaaaagacaataataaaaaggctcattaatgggatgt

SEQ ID NO: 587182 - DNA, 120 bp, Artificial Sequence
  ENSG00000172757_9 (sequence is synthesized)
gtttttcaaggttgggacacaggagacttcaggattgggggtgcactgggataatggtgctatctctctcctctgtactccacacccaaccagcccctgcacacccttatctggctccaa

SEQ ID NO: 587183 - DNA, 120 bp, Artificial Sequence
  ENSG00000172757_10 (sequence is synthesized)
aactgcgaagcccccctctctctccccgttgctcttggaaactctaaggctcagaaaagggggcgctagcctcatattcatgtagggtcgctcgcgggaggcggggtcaagctgctgtct

SEQ ID NO: 587184 - DNA, 120 bp, Artificial Sequence
  ENSG00000172757_11 (sequence is synthesized)
ccacctggagcgccgggagtccgggcgggggcggtgctgtggaatgtccccgactacaacccccggtcgggattccaggctaatcaatagttgcttcgattcagaaatgcaaaaccctaa

SEQ ID NO: 587185 - DNA, 120 bp, Artificial Sequence
  ENSG00000172757_12 (sequence is synthesized)
cctcactcaaaaatttcaggccaagggatccagataataccagatgggtcttaagaaagccgttttgctgtgggataaagagccgcttagtcggggatcgttttcgggtcattttactga

SEQ ID NO: 587186 - DNA, 120 bp, Artificial Sequence
  ENSG00000172757_13 (sequence is synthesized)
gcgccgcctcgccgggctcagagcggttcctgggaaattggaccaatgggctcgcgctgcgcgctgcggtgccgcccaggacctgggcctacatttccctacatgcactgcagctcggag

SEQ ID NO: 587187 - DNA, 120 bp, Artificial Sequence
  ENSG00000172757_14 (sequence is synthesized)
ccggccggcgggaagactccgttacccagcgagcgaggcggcggcgcagggccagcggactccatttcccgtcggctcgcggtgggagcgccggaagcccgccccacccctcattgtgcg

SEQ ID NO: 587188 - DNA, 120 bp, Artificial Sequence
  ENSG00000172757_15 (sequence is synthesized)
cccggttggggcgtgggtgcctgcgattaaggccttgcaccgcaaggcttggagggggcatcgcagagaccgcggcccgttcgggagcgcatctaacgagctgcgttctcacccgtgcat

SEQ ID NO: 587189 - DNA, 120 bp, Artificial Sequence
  ENSG00000172757_16 (sequence is synthesized)
cgggcgagggctggaacggcgctgtctgtcggcgcgtgcgcgcacgctcaggcccggccgccggtgccgaagccctgggccagcgaggccttcccggatgggcctgagtgagggtggagc

SEQ ID NO: 587190 - DNA, 120 bp, Artificial Sequence
  ENSG00000172757_17 (sequence is synthesized)
cgagtttagggaagtgacccaggcgggcaccgcccggaaaccaccccgccccctgtatacggcccgagggctgagaaaaccgaaggttatgtagcttgcccaggctcctgcctgcaggag

SEQ ID NO: 587191 - DNA, 120 bp, Artificial Sequence
  ENSG00000172757_18 (sequence is synthesized)
acgtggccggcttcttctgcagttccggggagtttgggggaccagatttaccttggattgcccctccctctcctggctcgggcaccccgaagcacgacgcagagcctccggtgtggctgt

SEQ ID NO: 587192 - DNA, 120 bp, Artificial Sequence
  ENSG00000172757_19 (sequence is synthesized)
gtgcgcccgcgcggacaccggccgcggggggaggggttcggggcgcgcgctggggcgcccctcgcggaacggccggcgtcgcgcctttcttcttaggggcgcgctctcgactggagcatg

SEQ ID NO: 587193 - DNA, 120 bp, Artificial Sequence
  ENSG00000172757_20 (sequence is synthesized)
catgcggcgtccaaacccggcccgggggcggcgaggaaaaagcgcgcgagaggtctcggcgcgcgcgccccacccaaggctgttcctgtctgcgcgtcaccctccctcggcagccgggcc

SEQ ID NO: 587194 - DNA, 120 bp, Artificial Sequence
  ENSG00000172757_21 (sequence is synthesized)
acccagatgtgtgggtttggagggggagggggttgtaacaaaagactcctcactgccagcccaagggtttctcaaagtcacctgtggctttgctgttgctgggagttgcctgacgcgtgt

SEQ ID NO: 587195 - DNA, 120 bp, Artificial Sequence
  ENSG00000172757_22 (sequence is synthesized)
ttctgtccagggcccccgagtctgcgccccttaagagcaaaatgatttatgccagctccaaggacgccatcaagaagaagctgacaggtaagggccagcattggtgctgagtgcccttct

SEQ ID NO: 587196 - DNA, 120 bp, Artificial Sequence
  ENSG00000172757_23 (sequence is synthesized)
gacttgagagagtattaaaagtcccatttaacagaattggctgattaatgtgaatggatggtgaggaatgaggcgccaggcgcatggatagcagtagctgacgtgaaatgcttactctgc

SEQ ID NO: 587197 - DNA, 120 bp, Artificial Sequence
  ENSG00000172757_24 (sequence is synthesized)
attaggcgtgttacacacattatctcacttaatcccacaaccgcaattgtattactatccacattttataggtggcattgaagcccgtcagagtggtcaatcgaaacgacatagctagta

SEQ ID NO: 587198 - DNA, 120 bp, Artificial Sequence
  ENSG00000172757_25 (sequence is synthesized)
tgtgttggtagtaagtggtggtgtgaggaggttttggacctatgtggtagctctaccagctggctgggtcttcagtgccatgtgattgggaggtgaagcgaccaccctagtcagcagtga

SEQ ID NO: 587199 - DNA, 120 bp, Artificial Sequence
  ENSG00000172757_26 (sequence is synthesized)
atgaatggcggattcgggccagaagcctgctggaaccatcttctgctccggagagctcacagttaggtggctctgatgccacatcggccatagatgtgttatgtttgccccaaagaatat

SEQ ID NO: 587200 - DNA, 120 bp, Artificial Sequence
  ENSG00000172757_27 (sequence is synthesized)
taagaccatgtttagaattaattggtacctttttaaaatgcagagattcacattaaagagtgagtttctggcttttcttggaaaatgagaagatctggccacactgggcccatataggaa

SEQ ID NO: 587201 - DNA, 120 bp, Artificial Sequence
  ENSG00000172757_28 (sequence is synthesized)
ctggagttgcctctctctgtttccttcagctggggcctgtgcccccctgttggccaggccccactggcctgcctggggtccctgccacctccgcaggcacctgggtctgcctttctgctg

SEQ ID NO: 587202 - DNA, 120 bp, Artificial Sequence
  ENSG00000172757_29 (sequence is synthesized)
ttctgtcacgaggtgtgccactcagcttggctttgaagccaggctgtgtttgtgcattgaatgcacgccaagcccaggcctccactgatggctaaataccttttctgaattgtaggcaat

SEQ ID NO: 587203 - DNA, 120 bp, Artificial Sequence
  ENSG00000172757_30 (sequence is synthesized)
ataagataaaaacgtgctgcgggaagtgagaaaaactacatgcccccccatgctgagtgcccacaggaggcgcacgggtagtgcaggaaaaaggcaaatggccatagttcctgaaaccag

SEQ ID NO: 587204 - DNA, 120 bp, Artificial Sequence
  ENSG00000172757_31 (sequence is synthesized)
cataaattaaaacaaaatacaaatcataccctggcaaatggcaagtaacagcctattgccagtatgcgaatcacgttgtgattttttaaaatttgttttgtaataaataatttgtttgaa

SEQ ID NO: 587205 - DNA, 120 bp, Artificial Sequence
  ENSG00000172757_32 (sequence is synthesized)
cctggacttccgcaagtcgcccctgcggggctggactgttctctccagatggtgagtccggggcatggtcacctgcgggagagaaaagagttaactccacactccacgaatccggcagct

SEQ ID NO: 587206 - DNA, 120 bp, Artificial Sequence
  ENSG00000172757_33 (sequence is synthesized)
ctgcagcgctctcgtcttctgcggctctcggtgccctctccttttcgtttccggaaacatgatctctgccatcccgagatcatcactcctagcctcctctggaaactctctgagagttgg

SEQ ID NO: 587207 - DNA, 120 bp, Artificial Sequence
  ENSG00000172757_34 (sequence is synthesized)
ggaattgtctcttttataagaggcctacacaggcacgaggtcatacttgggcagttttcggctttgtgaaaatctctcagattgcaccgcacagtatacaactgatgaaccagacaacca

SEQ ID NO: 587208 - DNA, 120 bp, Artificial Sequence
  ENSG00000172757_35 (sequence is synthesized)
caatcgttctttggattgcattttctcctgagatatcagacgcatttcaccagggccacagaaagaaaaatgaagaccaagataccgtgacaaatgccaactacctcataagtgcagata

SEQ ID NO: 587209 - DNA, 120 bp, Artificial Sequence
  ENSG00000172757_36 (sequence is synthesized)
gatgatgccatcagatctgtgcttcacatagagaagtccggcttcgagatggagtcaccggagcatggtgtgcgggcactcagtaaagtggagatgtgattactagatcattatggcaat

SEQ ID NO: 587210 - DNA, 120 bp, Artificial Sequence
  ENSG00000172757_37 (sequence is synthesized)
accagcagtatcactcgggctcctgagtgccgagctggccagtagctgccagagcctcccgctttgggctgggcaggaacctgaaaggtacagaggagttctgaacatgaaagccagcca

SEQ ID NO: 587211 - DNA, 120 bp, Artificial Sequence
  ENSG00000172757_38 (sequence is synthesized)
gtcatctttgaataagtccccagcaggctttgtggccctgggttaaaatactaagtcgaaaagaggataagtcatttgctcaaggccaggcatcactggtgagatttggactcaggcttg

SEQ ID NO: 587212 - DNA, 120 bp, Artificial Sequence
  ENSG00000172757_39 (sequence is synthesized)
ccaaatcccccaagccagaaaatcatactcccgcactcccactttgccttccactccccttgccccttcctcactggcatggaagagtcctggacttccgcaagtcgcccctgcggggct

SEQ ID NO: 587213 - DNA, 120 bp, Artificial Sequence
  ENSG00000172757_40 (sequence is synthesized)
atcctgtaaaatgagggaaggggttgttgaactaggtgatcagaggccatggctgccattctgaggttgtgtcccatctggttctttgacagtgacttgggtgggaaaactagtgacttg

SEQ ID NO: 587214 - DNA, 120 bp, Artificial Sequence
  ENSG00000172757_41 (sequence is synthesized)
ccttgggaagggcactagtgaccactcgggacgtggactgagatcttctgaaaaaacaaggggcagttccctagaatccttttcttgacgtatacgtggcatgtctcctaggcctccggt

SEQ ID NO: 587215 - DNA, 120 bp, Artificial Sequence
  ENSG00000172757_42 (sequence is synthesized)
ggagagagtctgagcctaaaataaaagagagtggaagtgaggaaaagagcttctggggctgaaggcggaggccaggatcaaaggaagcaaagaggagtctctggttcagagggaagtggg

SEQ ID NO: 587216 - DNA, 120 bp, Artificial Sequence
  ENSG00000172757_43 (sequence is synthesized)
aacatatggaggagaaagagaagacttggtaatgtgttgacagaggacacttggatattgggagaaaaggtgtgactgggagctcatagggaaatgtttgagaaaaggatggaggatggg

SEQ ID NO: 587217 - DNA, 120 bp, Artificial Sequence
  ENSG00000172757_44 (sequence is synthesized)
ctagaaggatttagtctgacactaaatggggtctatgagatggagaattgcagcaggataaagggtagattttgagagttgtggaagaaggtgcagactgaagtgggcaaaatttctgaa

SEQ ID NO: 587218 - DNA, 120 bp, Artificial Sequence
  ENSG00000172757_45 (sequence is synthesized)
aagagaggagataagaaagaagtgagaaaaaacataagaagccacgtgccataatggtgattgtgtttgttgatctctgccatcccgagatcatcactcctagcctcctctggaaactct

SEQ ID NO: 587219 - DNA, 120 bp, Artificial Sequence
  ENSG00000172765_0 (sequence is synthesized)
gacacagtgtccatcctcccagattggatctctttttcatatggatcttctgtttctatgtctttttaaaaaataactttttgggaaaccttttggattacaactgttcatcctcaccta

SEQ ID NO: 587220 - DNA, 120 bp, Artificial Sequence
  ENSG00000172765_1 (sequence is synthesized)
tgcaaagaaagggaagctattgctgggattttgaggagcttttcctaaaaggattgtacaccttagaagtgcttaaggaagagtgatgaagataggcatgaagccttcgtctcacagctg

SEQ ID NO: 587221 - DNA, 120 bp, Artificial Sequence
  ENSG00000172765_2 (sequence is synthesized)
catgcgtagtcactgttgaagcaaatgcctacctaatttgacactcttggtgtgtttaaaaaatttttttgagtttgcaaataagcatattaagtctactgatggagccttcgggcagtg

SEQ ID NO: 587222 - DNA, 120 bp, Artificial Sequence
  ENSG00000172765_3 (sequence is synthesized)
aacagttatttgaggaccctgatcctggaggcaaatcccaagatgcagaggccagaaagcagacagaatcagaacaaaaattgtctaaaatgacccacaatgctttggagaacattaacg

SEQ ID NO: 587223 - DNA, 120 bp, Artificial Sequence
  ENSG00000172765_4 (sequence is synthesized)
tgattggccaaggcttgaagcatctcttccagcaccagcgcaggaggtcatcagtgtctccacatgatgtgcagcaaattcaggcagatccagaacctgaaatggatctggaaagccaga

SEQ ID NO: 587224 - DNA, 120 bp, Artificial Sequence
  ENSG00000172765_5 (sequence is synthesized)
acgcatgtgctgagattgatggtgtccccacccaccccacagctctgaatcgtgtcctgcagcagattcgagtgccacccaagatgaagagagggacaagcttgcatagtaggcggggca

SEQ ID NO: 587225 - DNA, 120 bp, Artificial Sequence
  ENSG00000172765_6 (sequence is synthesized)
agccagaggccccaaagggaagtccccaaatcaacaggaagtctggtcaggagatgacagctgttatgcagtcaggccgacccaggtcttcatccacaactgatgcacctaccagctctg

SEQ ID NO: 587226 - DNA, 120 bp, Artificial Sequence
  ENSG00000172765_7 (sequence is synthesized)
ctatgatggaaatagcttgtgctgctgctgctgctgctgctgcatgtctaccaggagaggagggaactgcggagcggatcgaacggttggaagtaagcagccttgcccaaacatccagtg

SEQ ID NO: 587227 - DNA, 120 bp, Artificial Sequence
  ENSG00000172765_8 (sequence is synthesized)
cagtggcctccagtaccgatggcagcatccacacagactctgtggatggaacaccagaccctcagcgcacaaaggctgccattgctcacctgcagcagaagatcctgaagctcacagaac

SEQ ID NO: 587228 - DNA, 120 bp, Artificial Sequence
  ENSG00000172765_9 (sequence is synthesized)
aaatcaagattgcacaaacagcccgggacgacaacgttgctgaatacttgaagcttgccaacagtgcagacaaacagcaggctgcccgcatcaagcaagtctttgagaagaagaaccaga

SEQ ID NO: 587229 - DNA, 120 bp, Artificial Sequence
  ENSG00000172765_10 (sequence is synthesized)
aatctgcccaaactatcctccagctgcaaaagaaacttgagcactaccacaggaagctcagagaggtagagcagaatgggatcccccggcagccaaaggatgtcttcagggacatgcacc

SEQ ID NO: 587230 - DNA, 120 bp, Artificial Sequence
  ENSG00000172765_11 (sequence is synthesized)
agggtctgaaggatgtaggagcaaaggtgactggcttcagtgaaggtgtggtggatagtgtcaaaggtgggttttccagcttctcccaggccacccattcagcagcaggcgctgtagtct

SEQ ID NO: 587231 - DNA, 120 bp, Artificial Sequence
  ENSG00000172765_12 (sequence is synthesized)
caaagcccagagagattgcctcactcattcggaacaaatttggcagtgcagacaacatccccaacctgaaggactctttagaggaagggcaagtggatgatgcggggaaggctttgggag

SEQ ID NO: 587232 - DNA, 120 bp, Artificial Sequence
  ENSG00000172765_13 (sequence is synthesized)
tgatttcaaactttcagtctagcccaaaatatggtagtgaagaagattgttctagtgccacttcaggctcagtgggagccaacagcaccacagggggcatcgctgtaggagcatccagct

SEQ ID NO: 587233 - DNA, 120 bp, Artificial Sequence
  ENSG00000172765_14 (sequence is synthesized)
ccaaaacaaacaccctggacatgcagagctcaggatttgatgcactactacatgagatccaggagatccgggaaacccaggccagactagaggaatcctttgagactctcaaggaacatt

SEQ ID NO: 587234 - DNA, 120 bp, Artificial Sequence
  ENSG00000172765_15 (sequence is synthesized)
atcagagggactattccttaataatgcagaccttacaggaggagcgatatagatgtgaacgattggaagaacagctaaatgacctaacagagctccaccagaatgaaatcttgaacttga

SEQ ID NO: 587235 - DNA, 120 bp, Artificial Sequence
  ENSG00000172765_16 (sequence is synthesized)
agcaggaactggcaagcatggaagaaaaaatcgcgtatcagtcctatgaacgggcccgggacatccaggaggccctggaggcatgccagacgcgcatctccaagatggagctgcagcagc

SEQ ID NO: 587236 - DNA, 120 bp, Artificial Sequence
  ENSG00000172765_17 (sequence is synthesized)
agcagcagcaggtggtgcagctagaagggctggagaatgccactgcccggaaccttctgggcaaactcatcaacatcctcctggctgtcatggcagtccttttggtctttgtctccactg

SEQ ID NO: 587237 - DNA, 120 bp, Artificial Sequence
  ENSG00000172765_18 (sequence is synthesized)
tagccaactgtgtggtccccctcatgaagactcgcaacaggacgttcagcactttattccttgtggtttttattgcctttctctggaagcactgggacgccctcttcagctatgtggaac

SEQ ID NO: 587238 - DNA, 120 bp, Artificial Sequence
  ENSG00000172765_19 (sequence is synthesized)
ggttcttttcatcccctagatgatgctggcacagaaggcattgttccctaccctctggcgagtgcatgcagcagagagttagacagcaacttacctactctgaagttttctacaacaaaa

SEQ ID NO: 587239 - DNA, 120 bp, Artificial Sequence
  ENSG00000172765_20 (sequence is synthesized)
aaagagttgagtgaatctgtttacatttagaataatgtttttttcttcaagagacgcaattgcaatagtattttttagattttatccaagaagttttttgggcgaaaatcttggatcatt

SEQ ID NO: 587240 - DNA, 120 bp, Artificial Sequence
  ENSG00000172765_21 (sequence is synthesized)
tttatgtagcatgattttccttgggatgcaaatcttaaaacagtcctttaatatgaaccaacaatctggagcacaccgaagggcaatctaaattgtggcttgaaggactgcactaaaacc

SEQ ID NO: 587241 - DNA, 120 bp, Artificial Sequence
  ENSG00000172765_22 (sequence is synthesized)
cactaaaaagatgcgaaaacctgatgagggcaaaccagttaaacctaacaccctgccttgtctgggctcatcacctctccctatcccagactaactttactgtgaaatcctaccacattc

SEQ ID NO: 587242 - DNA, 120 bp, Artificial Sequence
  ENSG00000172765_23 (sequence is synthesized)
catgtctgaatttttggattcggggtggattttcgttgtccgtggaagaacacatggatctctctggctttctcacccaagttggccacttacgctaatcctggaagtatgatcactttt

SEQ ID NO: 587243 - DNA, 120 bp, Artificial Sequence
  ENSG00000172765_24 (sequence is synthesized)
taagcaaaatcccttggccgcacttttaaggtttttttatatgtgtatagttaccaacctaaaaataaaaaatccgaacagcatacttgaagaatgtaatactcaaactctcagtgcttc

SEQ ID NO: 587244 - DNA, 120 bp, Artificial Sequence
  ENSG00000172765_25 (sequence is synthesized)
cttatggtttctaataggattttttattattgttattattattattgggtttttttggacagggttgggagggtcttttatttttcctttgaaataaagaagtgatgtttttaaatgaag

SEQ ID NO: 587245 - DNA, 120 bp, Artificial Sequence
  ENSG00000172765_26 (sequence is synthesized)
aaatgtgtggatatttaagtgtgctgctccctcttgtcttgaaacagtttgagtaagaaagtcttgctgtaaatgctgccctctgccgcctttgttttgagatgcagtttaaactccctc

SEQ ID NO: 587246 - DNA, 120 bp, Artificial Sequence
  ENSG00000172765_27 (sequence is synthesized)
tggctgctgctgctgctttttggtgtcccgacatacctacgcccccgttttatgggtttggcttagttgaagaggaaagggttgtgcaaggagagcaggaggctgtttccaaaaaccagt

SEQ ID NO: 587247 - DNA, 120 bp, Artificial Sequence
  ENSG00000172765_28 (sequence is synthesized)
gtagtaggatagggattttttttttttttttttgccccaagaaaacgttcacccagtgatcttgggctggggttgtctttaggaaaagttgagactataagagtcataaataagtccttg

SEQ ID NO: 587248 - DNA, 120 bp, Artificial Sequence
  ENSG00000172765_29 (sequence is synthesized)
tgtttccttaatttattttgttaacacccctaattacaaccaaagtgatgatgtggagtcttctgtcttcattttggccccagcattcttaatttcaaagctttattctgtctgcctaag

SEQ ID NO: 587249 - DNA, 120 bp, Artificial Sequence
  ENSG00000172765_30 (sequence is synthesized)
agaatcaaccaaaggtgattctcctaaagagcagtgaaggaaatgtcaggttagcaggacccaagttttgggtgtgaaatgttgccagcttcctataatgtaaacggacttgttaaccta

SEQ ID NO: 587250 - DNA, 120 bp, Artificial Sequence
  ENSG00000172765_31 (sequence is synthesized)
acctaattatgctcagtggacttctatagatggttttgaaaaatgaactgagctgccttcccccgtcgcataaccagttccatcatcctggtggaacttgaacatttagagtttatctag

SEQ ID NO: 587251 - DNA, 120 bp, Artificial Sequence
  ENSG00000172765_32 (sequence is synthesized)
agagcttggttaatctttccatattatttgtagtattggtcacaaatgctgttccctcttagcctcattctgtgcaaccaagtgcatataagatgccctgaaaagagtaacaaagtatgc

SEQ ID NO: 587252 - DNA, 120 bp, Artificial Sequence
  ENSG00000172765_33 (sequence is synthesized)
tttgcctgtttccacttaccaggaaattccttcagaactagattagcattgccctgcctgtctgaaaggacagtttacctaatggtgccagcctccttttgctttggcaagctggatttc

SEQ ID NO: 587253 - DNA, 120 bp, Artificial Sequence
  ENSG00000172765_34 (sequence is synthesized)
tcagagccagcatgttgtttccataactactttgatattttaactcaggtactccagtcttcaccccaacctcagctgattgtagtacacctgctagctctgttgccccctcaaaactgc

SEQ ID NO: 587254 - DNA, 120 bp, Artificial Sequence
  ENSG00000172765_35 (sequence is synthesized)
acccagagcagggccacaagggtgctttttttctttaaaaaaaaaaaaattagaaccaattcatgttcatgccaaaaacaaattgtccccaagcctatatgtattaaaatgttaactttg

SEQ ID NO: 587255 - DNA, 120 bp, Artificial Sequence
  ENSG00000172765_36 (sequence is synthesized)
cctaaaaatattgcagtgactttttaggcaggagtgccaaaggacactatgaactttttgaactgacagtttctcctaactttctgctttagcgtaattgctcagagtagagagccccca

SEQ ID NO: 587256 - DNA, 120 bp, Artificial Sequence
  ENSG00000172765_37 (sequence is synthesized)
caaagttatttaaaagatgccctagcagcaatccaccagtttttctaagctagaacctttgagtcccccaaactgcctgaagacttaagttttgtgggcactggaagtcactttgataga

SEQ ID NO: 587257 - DNA, 120 bp, Artificial Sequence
  ENSG00000172765_38 (sequence is synthesized)
tggattgaaactgttcctatttgccctgggacggtttctatctatcaaaggaaggttttcacctgtagaaagccccctgcctccagccaaatagtcccatgctgactttctatcttcctt

SEQ ID NO: 587258 - DNA, 120 bp, Artificial Sequence
  ENSG00000172765_39 (sequence is synthesized)
tctcaaactgtcttaggaaggaccttcagtgcagatcaggtgcagtaatggctttcttgtcccttaattattcaccagacccagaagttgtacgcatttaatgctgtttgtaaccatgca

SEQ ID NO: 587259 - DNA, 120 bp, Artificial Sequence
  ENSG00000172765_40 (sequence is synthesized)
tctgttttcattctttgctgtaccttttgctgcccatcctgttacttttgagtttctttcattgtggttgttcttgggttcttttgtcttgtcagagctcttctataacctcgctctaat

SEQ ID NO: 587260 - DNA, 120 bp, Artificial Sequence
  ENSG00000172765_41 (sequence is synthesized)
ggcttaacagttgttctgggtggaaacgtcccctcatttgaatgctcctctaaaaaaaaaagaaaagaaaactgtattcattccctttaaaatgaaacattcctggtttatttgtccatg

SEQ ID NO: 587261 - DNA, 120 bp, Artificial Sequence
  ENSG00000172765_42 (sequence is synthesized)
cctctagcctgggtgagtgaagctggctgtgttggcctgggtgattgttcaggttgtagaatgcgcattttacattgtttatgataattgaagggtacttctgtctgctccaatttccat

SEQ ID NO: 587262 - DNA, 120 bp, Artificial Sequence
  ENSG00000172765_43 (sequence is synthesized)
tccttggtatactcagtatgtcctagtaaggaaggctttccactctactggctccttaagaagcaaaagtaggttaaattttatacttcactgactagggtcttctctctcccctgttct

SEQ ID NO: 587263 - DNA, 120 bp, Artificial Sequence
  ENSG00000172765_44 (sequence is synthesized)
gaatggagtaaaagtctgatgccaagacaaatattgggagcgagccttcctcactagccatgtccaaataatgagcgtattttcatgtggtcttcactgcatttggttttgtttctgatt

SEQ ID NO: 587264 - DNA, 120 bp, Artificial Sequence
  ENSG00000172765_45 (sequence is synthesized)
tcatgttcctttgaggtacagtcagatgaaaatgctgagttctgagagagttccaatgaggagctgcctttcagctttggaaaatatgcaactaaaacaaaaccaaacattattgtaatc

SEQ ID NO: 587265 - DNA, 120 bp, Artificial Sequence
  ENSG00000172765_46 (sequence is synthesized)
tgacacaggcaaaattatggttcccacaccccaaccccaaatgaaacctgggattttgaatgtggctctaagagttaacattgctgtctgtatgtcgtgtatgctaggtgatatcctcag

SEQ ID NO: 587266 - DNA, 120 bp, Artificial Sequence
  ENSG00000172765_47 (sequence is synthesized)
tagggattgactactagactgtgtgttttatcaaagtgtgtaagaataaaaactcacttgcacgaattgaaacgtaaagaaatgacacttgtgaacgtgtgaacgttaacactgtagttg

SEQ ID NO: 587267 - DNA, 120 bp, Artificial Sequence
  ENSG00000172765_48 (sequence is synthesized)
atagatcttaagctgctaattgttgagagagatttaaatttatgttctgtctggtcgctgcagattctcagcagcacttttactgtatatagaaattgaaataaagacctcagctattaa

SEQ ID NO: 587268 - DNA, 120 bp, Artificial Sequence
  ENSG00000172765_49 (sequence is synthesized)
gcggccgcagtggaaggagcaggcgcttgagctcgagcgacggcgctggcggagacgccggctgctcctcccctccccgccggtattaatctctggagaagacacatccacagttagcac

SEQ ID NO: 587269 - DNA, 120 bp, Artificial Sequence
  ENSG00000172765_50 (sequence is synthesized)
gtgaaacagcttttcctaaaaggattgtacaccttagaagtgcttaaggaagagtgatgaagataggcatgaagccttcgtctcacagctgcatgcgtagtcactgttgaagcaaatgcc

SEQ ID NO: 587270 - DNA, 120 bp, Artificial Sequence
  ENSG00000172765_51 (sequence is synthesized)
ggcggccgcagtggaaggagcaggcgcttgagctcgagcgacggcgctggcggagacgccggctgctcctcccctccccgccgcttttcctaaaaggattgtacaccttagaagtgctta

SEQ ID NO: 587271 - DNA, 120 bp, Artificial Sequence
  ENSG00000172765_52 (sequence is synthesized)
tttgcattagctgctctagcaaactgcgtgcgcgcgcacacacacggatgcttgtttggcagaagctttctgtttattcagcacagagttctcctaggctcccagatatagaaagctcta

SEQ ID NO: 587272 - DNA, 120 bp, Artificial Sequence
  ENSG00000172765_53 (sequence is synthesized)
agagttgctacaggagatagaattgaaactatacataggctgaggtgggcactgcggaggattggctatgcgagggtattaatgtggtgcggctgtacctgcctgttttgtgaaagtcac

SEQ ID NO: 587273 - DNA, 120 bp, Artificial Sequence
  ENSG00000172765_54 (sequence is synthesized)
ttctctgagactgtgaaggtgagaagcccagggatccactagaagcttcactgcggctctttggtgggggaaagcattcccagtggtagctgtcctcatttgcagcgttattctcggaaa

SEQ ID NO: 587274 - DNA, 120 bp, Artificial Sequence
  ENSG00000172765_55 (sequence is synthesized)
ccaagtatgtgcagcagtgacagactatgccacagctcctctgcagtttggaagctggaacaaatggaaagagcttatagccaagagaggttgtgatttttttttttttaccatccaagc

SEQ ID NO: 587275 - DNA, 120 bp, Artificial Sequence
  ENSG00000172765_56 (sequence is synthesized)
gaagctatctagaggcccaccaagagtcacctaattagtataaactcaggtgtggttgaaaggaatacattatgaataacaaaaagcgcttctgttattgaggaaaacctaagggtttta

SEQ ID NO: 587276 - DNA, 120 bp, Artificial Sequence
  ENSG00000172765_57 (sequence is synthesized)
gttaggtgaaacaggcagtccgttgccactgggcagtatagatatgttgtccagcctgccatcactggactgtagttaaggtggatgtcttgtccagtctgctgccactgggctgtatgt

SEQ ID NO: 587277 - DNA, 120 bp, Artificial Sequence
  ENSG00000172765_58 (sequence is synthesized)
aaggaggttcttctgtccaccccaccgctactggactctcttccctgtagatggtcctagaacaattggagattcatacgcacacaaagaacctcaacccttacctcacaccagacacaa

SEQ ID NO: 587278 - DNA, 120 bp, Artificial Sequence
  ENSG00000172765_59 (sequence is synthesized)
cattcttggtgaggaatccccaggtgaatctgccacggagtgaagcagcccacttgagctgttggctacccccggcccccgcaacgcccgttggcttttgtgacacgttacacgttagtg

SEQ ID NO: 587279 - DNA, 120 bp, Artificial Sequence
  ENSG00000172765_60 (sequence is synthesized)
ttggtagagcctagccgtcagaggtacctgtaccataagcatctctacgaaaggtattaatctctggagaagacacatccacagttagcactttcttcagatgctgacgctcggtgaaca

SEQ ID NO: 587280 - DNA, 120 bp, Artificial Sequence
  ENSG00000172765_61 (sequence is synthesized)
agtcgtgagggagcgtggcctggcggcgcagcggacgcgggcctggcctcccgctcgcggcctgtcggggctgggacctgccgtcgcccccgttcgaggttgaagccccgggcctaggac

SEQ ID NO: 587281 - DNA, 120 bp, Artificial Sequence
  ENSG00000172765_62 (sequence is synthesized)
tcgacccccagcatcccacggggcctctttcctttcccggctcattccgctgtcattttgacctggggttcccctccagcccctcgcctcgttcccttcccagcatcccagggccgaggt

SEQ ID NO: 587282 - DNA, 120 bp, Artificial Sequence
  ENSG00000172765_63 (sequence is synthesized)
gggggtggttgtgggggatggaccgggtgcggcggccgcagtggaaggagcaggcgcttgagctcgagcgacggcgctggcggagacgccggctgctcctcccctccccgccgagatggg

SEQ ID NO: 587283 - DNA, 120 bp, Artificial Sequence
  ENSG00000172765_64 (sequence is synthesized)
ccggctgctcctcccctccccgccgagatggggtttcaccatggtgcccaggctggtctcgaactcctagaaccaagcaatccaccctcctcagcttcctaaagtgctgggattacaggc

SEQ ID NO: 587284 - DNA, 120 bp, Artificial Sequence
  ENSG00000172765_65 (sequence is synthesized)
atgggtctcctggcagtgaattctctatttttgcttgtctggaggaaagcctttattttgtacgtatgaaggatattttcactggatgtagaatactggatgggcagttttcttttcagc

SEQ ID NO: 587285 - DNA, 120 bp, Artificial Sequence
  ENSG00000172765_66 (sequence is synthesized)
actttaaagttgtcactccactgtcttacgaagtttctgatgcttttcctaaaaggattgtacaccttagaagtgcttaaggaagagtgatgaagctctgaatcgtgtcctgcagcagat

SEQ ID NO: 587286 - DNA, 120 bp, Artificial Sequence
  ENSG00000172766_0 (sequence is synthesized)
gcagtgcgcgggaaccgccgccgccgccgctggccaaaaagcggagcccaggggaagcgtgtcctgctcagaccgccttccttctccattgccacccgtgccgaacagccaggctgccca

SEQ ID NO: 587287 - DNA, 120 bp, Artificial Sequence
  ENSG00000172766_1 (sequence is synthesized)
attgcaactgtagaccaatgaactaatccatcgcccgcagcccgactctcagcagcggttcgtcccggtgcccacccccgcgaagcggagcgcccgggcacctagcctccctgccggcca

SEQ ID NO: 587288 - DNA, 120 bp, Artificial Sequence
  ENSG00000172766_2 (sequence is synthesized)
cctagcctccctgccggccacgatgccgaacgtgctgctgccgcccaaggagagcaacctcttcaaacgcatcttgaaatgttatgaacagaagcagtacaaaaatggcctcaagttttg

SEQ ID NO: 587289 - DNA, 120 bp, Artificial Sequence
  ENSG00000172766_3 (sequence is synthesized)
caagatgattctgtcgaacccaaaatttgctgaacatggagagactttggctatgaaaggattaacactgaactgtttaggaaaaaaagaagaagcttatgagtttgttcgtaaaggact

SEQ ID NO: 587290 - DNA, 120 bp, Artificial Sequence
  ENSG00000172766_4 (sequence is synthesized)
tcgtaatgatgtcaagagtcatgtctgttggcatgtatatggactcttgcagcgttctgataaaaaatatgatgaagctataaaatgttaccgaaatgccctcaaattagataaagataa

SEQ ID NO: 587291 - DNA, 120 bp, Artificial Sequence
  ENSG00000172766_5 (sequence is synthesized)
cctgcaaattttgagggatctctcactgttgcagatccaaatgagagaccttgaaggttaccgagagacaagataccagcttcttcagttgcgccccacacagcgtgcctcctggattgg

SEQ ID NO: 587292 - DNA, 120 bp, Artificial Sequence
  ENSG00000172766_6 (sequence is synthesized)
atatgctattgcataccatttgctgaaagattatgatatggccctaaaactgttggaagaatttagacaaactcagcaagttcctccaaacaaaatagattatgaatatagtgaattgat

SEQ ID NO: 587293 - DNA, 120 bp, Artificial Sequence
  ENSG00000172766_7 (sequence is synthesized)
attataccagaatcaagtgatgagagaggcagatctgttgcaggaatctttggaacatatagaaatgtatgagaaacaaatatgtgataaacttttggtggaagaaattaaaggggaaat

SEQ ID NO: 587294 - DNA, 120 bp, Artificial Sequence
  ENSG00000172766_8 (sequence is synthesized)
actgttgaaattgggaagattaaaagaagccagtgaagtgttcaaaaacttgattgatcgaaatgcagaaaattggtgttattatgaaggcttggaaaaagctctacaaattagcacttt

SEQ ID NO: 587295 - DNA, 120 bp, Artificial Sequence
  ENSG00000172766_9 (sequence is synthesized)
agaagagaggcttcaaatttatgaagaaattagtaagcagcaccccaaagcaattacacccagaagattacctttgactcttgtcccaggtgaaagatttagagaactaatggataagtt

SEQ ID NO: 587296 - DNA, 120 bp, Artificial Sequence
  ENSG00000172766_10 (sequence is synthesized)
cctgagggttaacttcagtaaaggctgcccacccttgtttactactttgaaatctttatattacaatacagaaaaggtttctataatccaggaacttgttactaattatgaagcctctct

SEQ ID NO: 587297 - DNA, 120 bp, Artificial Sequence
  ENSG00000172766_11 (sequence is synthesized)
taaaacgtgtgacttttttagcccatatgagaatggggagaaggaacccccgacaacactactctgggttcagtatttcctggcacagcactttgataaacttggacagtattctttggc

SEQ ID NO: 587298 - DNA, 120 bp, Artificial Sequence
  ENSG00000172766_12 (sequence is synthesized)
tttggattatattaatgctgcaattgctagtactccaactctaatagaattattctatatgaaagcaaaaatttacaagcatataggtaatctcaaagaagctgcaaagtggatggatga

SEQ ID NO: 587299 - DNA, 120 bp, Artificial Sequence
  ENSG00000172766_13 (sequence is synthesized)
agcacagtctttggacacagctgatagattcatcaattccaaatgtgcaaaatacatgcttcgagcaaatatgataaaagaagcagaggaaatgtgctccaagttcacaagggaaggaac

SEQ ID NO: 587300 - DNA, 120 bp, Artificial Sequence
  ENSG00000172766_14 (sequence is synthesized)
atctgccatggaaaatctaaatgaaatgcagtgtatgtggtttcagacagaatgcatttcagcttatcagcgtctggggagatacggggatgccttgaaaaaatgtcatgaagtagaaag

SEQ ID NO: 587301 - DNA, 120 bp, Artificial Sequence
  ENSG00000172766_15 (sequence is synthesized)
gcatttttttgagataactgatgaccaattcgacttccatacatactgcatgagaaagatgacccttcgtgcctatgttgaccttttgagattagaagatatactcagaagacatgcctt

SEQ ID NO: 587302 - DNA, 120 bp, Artificial Sequence
  ENSG00000172766_16 (sequence is synthesized)
ttatttcaaggctgctagatcagcgattgaaatatacttgaaattgtatgataatcccttaaccaatgaaagcaaacaacaagaaataaactcagaaaacttgtcagccaaagaattgaa

SEQ ID NO: 587303 - DNA, 120 bp, Artificial Sequence
  ENSG00000172766_17 (sequence is synthesized)
aaaaatcaaaagaaaaaaagagatgaagaagaagaagaagccagtggccttaaggaagaacttatacctgaaaaattagaaagggtagaaaatccattagaggaagccgttaagttcctt

SEQ ID NO: 587304 - DNA, 120 bp, Artificial Sequence
  ENSG00000172766_18 (sequence is synthesized)
atacctcttaagaaccttgttgctgataacattgacactcatctgttagcatttgaaatatattttagaaaaggaaagtttctgttaatgctgcagtctgtcaaacgagcttttgccatt

SEQ ID NO: 587305 - DNA, 120 bp, Artificial Sequence
  ENSG00000172766_19 (sequence is synthesized)
aacagtaataacccatggttacatgaatgtttaattagattttctaaatctgtgtctaatcatagtaatcttccagacattgtgagcaaagttctatctcaagaaatgcagaaaatattt

SEQ ID NO: 587306 - DNA, 120 bp, Artificial Sequence
  ENSG00000172766_20 (sequence is synthesized)
gtcaaaaaggatttggaaagttttaatgaggattttctgaaacgtaacgctacctctcttcagcatctactttcaggtgctaaaatgatgtattttctggacaagtcaaggcaggagaaa

SEQ ID NO: 587307 - DNA, 120 bp, Artificial Sequence
  ENSG00000172766_21 (sequence is synthesized)
gcaattgctatagccactagactagatgaaactataaaagataaagatgtaaagacattaataaaggtttctgaagcactgcttgatggcagctttgggaactgtagttcccaatatgaa

SEQ ID NO: 587308 - DNA, 120 bp, Artificial Sequence
  ENSG00000172766_22 (sequence is synthesized)
gaatataggatggcctgtcataacctgcttccttttacatctgccttcttgcctgctgtgaatgaagtcgacaatcctaatgtggcactgaaccatacagctaattatgatgtcttggca

SEQ ID NO: 587309 - DNA, 120 bp, Artificial Sequence
  ENSG00000172766_23 (sequence is synthesized)
aatgaaatttgaaatcttctagaaagtagactcctatagactcaaagctgaattgagatcagggtttcttttccagggtgcattttaatatacgtatgaaatgaaatatttggttaggat

SEQ ID NO: 587310 - DNA, 120 bp, Artificial Sequence
  ENSG00000172766_24 (sequence is synthesized)
ttttaaatggcatattctgtaagcttattttgttctttacccgacctgccaatttacataaccatctgttaaaattacctgtttattcttacacagttttgtggtagctccgatcgcttc

SEQ ID NO: 587311 - DNA, 120 bp, Artificial Sequence
  ENSG00000172766_25 (sequence is synthesized)
tgtataattataatttcttactaagctaagttgtatacaaccccactgtattattttctttagattctgatttcaggatctgtgctttgattccttgtctgttttatcgtatatttgctt

SEQ ID NO: 587312 - DNA, 120 bp, Artificial Sequence
  ENSG00000172766_26 (sequence is synthesized)
tgtgctttgattccttgtctgttttatcgtatatttgcttgctttttaattaaagcacatcagttttaaagtgttaactatatgttaacaatatggaggctgggcgtggtggctcacacc

SEQ ID NO: 587313 - DNA, 66 bp, Artificial Sequence
  ENSG00000172766_27 (sequence is synthesized)
acgtgatggcacatacctgtaatccaagctgcccaggagctgaggccggagaatcgcttgaacctg

SEQ ID NO: 587314 - DNA, 120 bp, Artificial Sequence
  ENSG00000172766_28 (sequence is synthesized)
cagatattgaagtttatttgaaaatttaattcgtccttttttcattgtaatatttcatggtttactatttccttttagtattcatgaaaatggtattttctggttgaataagggtactct

SEQ ID NO: 587315 - DNA, 120 bp, Artificial Sequence
  ENSG00000172766_29 (sequence is synthesized)
agttttatgtagatgatttcagaatgtgaaggctggtttgcctgtcagtcatggaaattcactggtaaaattgttgaatatttctctctcccagtcttaaaagcccacaggcaagaatta

SEQ ID NO: 587316 - DNA, 120 bp, Artificial Sequence
  ENSG00000172766_30 (sequence is synthesized)
atgctttcttaactaagttactttgagtattaacaagtagcttatactgaggtgtgcttcaagggagcattatagggcagaaaacaaattaaaatgaaatgttgttgttatagccatgca

SEQ ID NO: 587317 - DNA, 120 bp, Artificial Sequence
  ENSG00000172766_31 (sequence is synthesized)
ttgaccattaaatgcattttaatatctcggcaaaatgagatttgaaactcattagtttaactcttaaaacatagtgttgttaaacagtattttttgggggcgggtggatagctttttgtt

SEQ ID NO: 587318 - DNA, 120 bp, Artificial Sequence
  ENSG00000172766_32 (sequence is synthesized)
ctatcttgtacagaaaacagtaatggaatcactcatgttcagaaccttgtaaatatgtctgtaatattaatgcttccctttattaagacaaatatacattcaaaaagggagattttattt

SEQ ID NO: 587319 - DNA, 120 bp, Artificial Sequence
  ENSG00000172766_33 (sequence is synthesized)
agacacacattttcttttcaccctaatctatttagattcatacttattgagacgggaaaaactcgctgtaaaataatgccaacctagataatgctataataaattattttgtacacagtt

SEQ ID NO: 587320 - DNA, 120 bp, Artificial Sequence
  ENSG00000172766_34 (sequence is synthesized)
agattttctaaatctgcatctactttcaggtttgtttgtagcccccagggttaaaatacttatggaaaaagcgaacaaagagaaagctttgacacccccaaaatgtaaagcaaatgaaca

SEQ ID NO: 587321 - DNA, 120 bp, Artificial Sequence
  ENSG00000172766_35 (sequence is synthesized)
tttgatattcatcaccaccctaagaggacacacagctgatggcaacctctttcccctttaaaacatcaggatctggtccgcagtcagcctctctccagtttgtcttcccaggatatttgc

SEQ ID NO: 587322 - DNA, 120 bp, Artificial Sequence
  ENSG00000172766_36 (sequence is synthesized)
tctcacattcagtattctgtataacaatctatggccagtttgcaggcttattttattgcttgcttttaggattatttgtgtgatgtgccttagtgaggggacttttcttttcctttgtgt

SEQ ID NO: 587323 - DNA, 120 bp, Artificial Sequence
  ENSG00000172766_37 (sequence is synthesized)
gaatttttgttttcctgttctttgtcatctctgaagcactctccttccacatggaccacaggaggaaaagagccgcaaatgcacccctgaggcagtcctcagcagccctcagttgtgggg

SEQ ID NO: 587324 - DNA, 120 bp, Artificial Sequence
  ENSG00000172766_38 (sequence is synthesized)
atctgaatcctgttttttgagtagttgaagaattcagctactttaagaatccttggagttttttctttgtggaaacaagttctagggcaccctgataatctttttctaataatcctgtgt

SEQ ID NO: 587325 - DNA, 120 bp, Artificial Sequence
  ENSG00000172766_39 (sequence is synthesized)
agtttcatgttatattaattgtataatcaatgtgtaattagatgtgtaatcatttgagctcttagtaaatgtgaactgtaattttgatttctaaataaatttgacagaaatggtgacaga

SEQ ID NO: 587326 - DNA, 120 bp, Artificial Sequence
  ENSG00000172766_40 (sequence is synthesized)
ataaccatcattttgtgaaggaagaagctctgatttgtagtgtattttcatgatataaatactctgatcatggcctatcaatgggatgctactgaataggaggtagggaagaaatgtcac

SEQ ID NO: 587327 - DNA, 120 bp, Artificial Sequence
  ENSG00000172766_41 (sequence is synthesized)
acttggctctcttgagctggtaggagccagctccagcttaccactgattaaacacttaaaaccatatttgaagtcactggccagttgatatcacataaaatgtaaagtataggtgtttat

SEQ ID NO: 587328 - DNA, 120 bp, Artificial Sequence
  ENSG00000172766_42 (sequence is synthesized)
agttcagtcttattctagagtttgagtgatatatgatataaaaatagtaaaaaaaatagtacataagacctgctataatatactgcctcctccaacatgatgaaagcagaaatagtatga

SEQ ID NO: 587329 - DNA, 120 bp, Artificial Sequence
  ENSG00000172766_43 (sequence is synthesized)
tctaacttctctgggagcttcattgtgaaaaaaattcttgatctttaacctttacattcagaagttgtaaacaatggattgctttactgatcctcaagtgattatgcttttgacatgtct

SEQ ID NO: 587330 - DNA, 120 bp, Artificial Sequence
  ENSG00000172769_0 (sequence is synthesized)
atggaaaataagacagaagtaacacaattcattcttctaggactaaccaatgactcagaactgcaggttcccctctttataacgttccccttcatctatattatcactctggttggaaac

SEQ ID NO: 587331 - DNA, 120 bp, Artificial Sequence
  ENSG00000172769_1 (sequence is synthesized)
ctgggaattattgtattgatattctgggattcctgtctccacaatcccatgtacttttttctcagtaacttgtctctagtggacttttgctactcttcagctgtcactcccatcgtcatg

SEQ ID NO: 587332 - DNA, 120 bp, Artificial Sequence
  ENSG00000172769_2 (sequence is synthesized)
gctggattccttatagaagacaaggtcatctcttacaatgcatgtgctgctcaaatgtatatctttgtagcttttgccactgtggaaaattacctcttggcctcaatggcctatgaccgc

SEQ ID NO: 587333 - DNA, 120 bp, Artificial Sequence
  ENSG00000172769_3 (sequence is synthesized)
atccacactggggacacatttagtctctctttctgtaagtccaatgaagtccatcactttttctgtgatattccagcagtcatggttctctcttgctctgatagacatattagcgagctt

SEQ ID NO: 587334 - DNA, 120 bp, Artificial Sequence
  ENSG00000172769_4 (sequence is synthesized)
gttcttatttatgttgtgagcttcaatatctttatagctctcctggttatcttgatatcctacacattcatttttatcaccatcctaaagatgcactcagcttcagtataccagaagcct

SEQ ID NO: 587335 - DNA, 120 bp, Artificial Sequence
  ENSG00000172769_5 (sequence is synthesized)
ttgtccacctgtgcctctcatttcattgcagtcggcatcttctatgggactattatcttcatgtacttacaacccagctccagtcactccatggacacagacaaaatggcacctgtgttc

SEQ ID NO: 587336 - DNA, 120 bp, Artificial Sequence
  ENSG00000172769_6 (sequence is synthesized)
tatacaatggtcatccccatgctgaaccctctggtctatagtctgaggaacaaggaagtgaagagtgcattcaagaaagttgttgagaaggcaaaattgtctgtaggatggtcagtttaa

SEQ ID NO: 587337 - DNA, 120 bp, Artificial Sequence
  ENSG00000172771_0 (sequence is synthesized)
gtccgtagccacggcaacaggttgcttctgcagtctgagctgagcgcctttcgcacgacttggagttacggtttatctgataccccggtacccctacgcaagcaagcccacatcgacaca

SEQ ID NO: 587338 - DNA, 120 bp, Artificial Sequence
  ENSG00000172771_1 (sequence is synthesized)
cattcacacacgcccttcagcaccccctcccagcaccacgaccatggacgacgactatgaagcgtaccacagtctgttcttgtcgctgctcggactctgcccgtctaagactcccatcaa

SEQ ID NO: 587339 - DNA, 120 bp, Artificial Sequence
  ENSG00000172771_2 (sequence is synthesized)
tgaaaatgctcccgtctttgatcctgaaccggtcattgcccactgcttcaagcagttccagcagaaggacttccgcctgcctcagacccgccggcgaatcatcatggtgcctcgcaagga

SEQ ID NO: 587340 - DNA, 120 bp, Artificial Sequence
  ENSG00000172771_3 (sequence is synthesized)
ggatcagacaccccttaatcctgcatcccaacctcaggctcccccaaagcccatccccagcttcaaagttctggaagctagagatatccaagagcagccagaggacaggaagacctggct

SEQ ID NO: 587341 - DNA, 120 bp, Artificial Sequence
  ENSG00000172771_4 (sequence is synthesized)
gagccagaggtcgaagctgcggcaggagctagagtcctttggtgatgtaaagaggtggctggagaacaagcccagcatcacgccttcagaggccaaggtcttacacatgatccacgagga

SEQ ID NO: 587342 - DNA, 120 bp, Artificial Sequence
  ENSG00000172771_5 (sequence is synthesized)
gcagagtgcccagccaaatgcctcccaggcaactaccaggaccaccaggaagaaagcccccaggctctcccggctgtcccgccagatggtgccccagctccagctgcccgagccccctgc

SEQ ID NO: 587343 - DNA, 120 bp, Artificial Sequence
  ENSG00000172771_6 (sequence is synthesized)
cctgtcggtcatgtactcctacctgcatagccgcaagatcaagatcctggagatatttcacaaggtgggccagggtgagaaccagagaatcaccagggaggagttcatcgcggctgtaaa

SEQ ID NO: 587344 - DNA, 120 bp, Artificial Sequence
  ENSG00000172771_7 (sequence is synthesized)
ggcagtcggagtccctctgaagaaccaagaggtggaggatatagtgatctacctcagctctcttgggaagcacaacaccatcaccatggatatcctggccaatacctacaagcagtggtc

SEQ ID NO: 587345 - DNA, 120 bp, Artificial Sequence
  ENSG00000172771_8 (sequence is synthesized)
agcttcccaaagtggacctactgacggtgcctgcagtcgacacgcagatggagacgcggcccatgaccctggaggagatggaggaagtgggcaagcggtaccgcgagcggcagcgacagc

SEQ ID NO: 587346 - DNA, 120 bp, Artificial Sequence
  ENSG00000172771_9 (sequence is synthesized)
acaagctcacgatcccctccatccagtacacggagcaatgtcacctggtgcgctgtgggaatcggcactttgatgagcactgcctcccgtccaccatccacggggatatgagggagctca

SEQ ID NO: 587347 - DNA, 120 bp, Artificial Sequence
  ENSG00000172771_10 (sequence is synthesized)
ttgactcggcccgcaggcacaactttctggtctacctgcaatgctggaagctctgtaagtcctatggcctcccgctgacagaggacatcctcatgaaagccttgctgtacccaggagaca

SEQ ID NO: 587348 - DNA, 120 bp, Artificial Sequence
  ENSG00000172771_11 (sequence is synthesized)
agatcattttccagatggacaaagtgtgccccatccggcagccgggaggctactactctgactggaaggtcttttctccgaatctggctctgctccggtcccagggccctggcaagtcta

SEQ ID NO: 587349 - DNA, 120 bp, Artificial Sequence
  ENSG00000172771_12 (sequence is synthesized)
agaggactgacaagaaaacgccaaagaaaagcaagaaaatgcgctttaaggagtttgaggaatttaccaggaagctgaaggtgaagaggtccagtggtctgcagcaaacacaccccaatt

SEQ ID NO: 587350 - DNA, 120 bp, Artificial Sequence
  ENSG00000172771_13 (sequence is synthesized)
ccttctggccgggtcatcttctggataagctgcagctctacctgcccactgtggccacagaccggagcctggcgctcttcagttgtgttcaacaccagccccatgtctacccagccacct

SEQ ID NO: 587351 - DNA, 120 bp, Artificial Sequence
  ENSG00000172771_14 (sequence is synthesized)
accaccctgaccactggtggccccttaggaacaagaactacatgacccacgcccattatgatgccgccaaggtgtactacatcaactagagctagccaggtgttgccggacccagccttc

SEQ ID NO: 587352 - DNA, 120 bp, Artificial Sequence
  ENSG00000172771_15 (sequence is synthesized)
ctgggccaggggccagtgcagccagcggcccagagcccagacacaagaggagtgtcaaagagtcaaactaaagaaatcctttcaaagagggatggaccgggggccagttccctctggact

SEQ ID NO: 587353 - DNA, 120 bp, Artificial Sequence
  ENSG00000172771_16 (sequence is synthesized)
caaagtgtccagtgtctcagagggtagatgtgtccaaggaatgacgtgcagtttttgactatttccctcccctgacctctgccctttctacataaagcaggttggagtttttctcatttc

SEQ ID NO: 587354 - DNA, 120 bp, Artificial Sequence
  ENSG00000172771_17 (sequence is synthesized)
aactctggggactgcatccgcctggcctgtctcctttgaactctctcctctgccctaccctctcacctcttccagaagaaagcccccaggctctcccggctgtcccgccagatggtgccc

SEQ ID NO: 587355 - DNA, 120 bp, Artificial Sequence
  ENSG00000172771_18 (sequence is synthesized)
gggcgccatgctgtgcttgcgtctgcatcctagggcaacatcccccaacctgactgctcactgcagactggccagtcccgggtcacccttggcgcatgtctcaggatcatggcctgctgg

SEQ ID NO: 587356 - DNA, 120 bp, Artificial Sequence
  ENSG00000172771_19 (sequence is synthesized)
cctcagctcccacacagctaccctcctgaccccagtcctgcacaatcataaggtttctggaaaagatgaaaaggagagcctccttagagaacagggctggagcgagggccttcacaaatc

SEQ ID NO: 587357 - DNA, 120 bp, Artificial Sequence
  ENSG00000172771_20 (sequence is synthesized)
cccagccaggtgtcagggccctgcagagaacagggggcagccctttctctgccctgccaccttgcagcggccacaccccttctctggcaagaggtgggcttgcagctcataggaggataa

SEQ ID NO: 587358 - DNA, 120 bp, Artificial Sequence
  ENSG00000172771_21 (sequence is synthesized)
aagaacatttccccgggacctgcctccagccctttcgagaggccaacctgagtcttctctaagaaaatggcctcctttggtactccaaagcctgagctacccagatttgagtcaagcagc

SEQ ID NO: 587359 - DNA, 120 bp, Artificial Sequence
  ENSG00000172771_22 (sequence is synthesized)
cccgtgggcagcatccgtgggtgactgcagaggaacaaggcagcatccctgcagaggcaggggcgcggcatgggaggaggagagcccagctggccggataccatgaggtgggaggggcct

SEQ ID NO: 587360 - DNA, 120 bp, Artificial Sequence
  ENSG00000172771_23 (sequence is synthesized)
ggacctgcccctgcttctagacccctgccagctgcccactgggtgtgtggccagaatgcctgcagtgggacacagcagggccctgtagagatcagacaggccttcggttaaatggacaag

SEQ ID NO: 587361 - DNA, 120 bp, Artificial Sequence
  ENSG00000172771_24 (sequence is synthesized)
gcacttctctgagtcttagcatcttcatatgtaaaggggcctagtagctcctaccatacactatgaggatcagatgagaaagagtgtcaacatcttagcagggacagcactcaatcaatg

SEQ ID NO: 587362 - DNA, 120 bp, Artificial Sequence
  ENSG00000172771_25 (sequence is synthesized)
attgtcgttgttttaccttgctctggttggggcatcttcaagtgcaggagtaggcccaggcctgcaggtgggtcctggccatgacacgggctgtgacttccttccagccccggggtgggc

SEQ ID NO: 587363 - DNA, 120 bp, Artificial Sequence
  ENSG00000172771_26 (sequence is synthesized)
caggaagtggctgggaacccaggaaggggattttggtccatgcttaggtaggccatagctaataaaggataaagagagttctcttaggtcaaggagagacgttgactgtatcttgctact

SEQ ID NO: 587364 - DNA, 120 bp, Artificial Sequence
  ENSG00000172771_27 (sequence is synthesized)
tatggttgatggaggctgggtgggaaagagtgccgtgaacgattagtgatgtctgtcaggctcagggttggaggggaagggggttagatttcaccacctttgtcctcagggctgggttaa

SEQ ID NO: 587365 - DNA, 120 bp, Artificial Sequence
  ENSG00000172771_28 (sequence is synthesized)
gctctggagtggggagtaggagccagggaccccaaaaggatttggcagtgacttactgagcctccctcgtaactaccctgagaggtctctattctggaccatgagaaaaccaaggatgag

SEQ ID NO: 587366 - DNA, 120 bp, Artificial Sequence
  ENSG00000172771_29 (sequence is synthesized)
aaaggggaagtgacttgcccaggtcacctggccagattctgagggtaggtccagctgacccaagcccactgtgttcccctggagcatggaggcacagagtcagggtccaccccaggtgga

SEQ ID NO: 587367 - DNA, 120 bp, Artificial Sequence
  ENSG00000172771_30 (sequence is synthesized)
agacatttttctttcagagctctcgtttgagacttagaaacgggtccacccctgcggccctgacctactccctaaagccccattggcctggatttccactctcctcacaaaatgcctctc

SEQ ID NO: 587368 - DNA, 120 bp, Artificial Sequence
  ENSG00000172771_31 (sequence is synthesized)
ctccccgtcctgggagcaagcatggtgcaggcagccttggcctctcctccaaactcacttcctcagtgtgttccccagttttggccgactgtggtttggccaagcctctggaaattttca

SEQ ID NO: 587369 - DNA, 120 bp, Artificial Sequence
  ENSG00000172771_32 (sequence is synthesized)
ggcccagagattaactaaggagtagatattcccttgagtgcccagctaccactgtgtccattcaaagacaaatgagtcccagcccttgttcttagaggaggatactcagcccaccagagc

SEQ ID NO: 587370 - DNA, 120 bp, Artificial Sequence
  ENSG00000172771_33 (sequence is synthesized)
ccacctgagaggctgagaactgacccaaatggcaagcctttccagagacatttatgtgtgtgtgggtccaaggcctcctcactattaatccatagcttattgataaaattcttgttcaga

SEQ ID NO: 587371 - DNA, 120 bp, Artificial Sequence
  ENSG00000172771_34 (sequence is synthesized)
accagaattagcacatgtttacagtttactggaaagtgtattttggtattctgctatcaggggtattatggcagggttgctgtcaacagttgtaaaggttgtacatggctcaagttccat

SEQ ID NO: 587372 - DNA, 120 bp, Artificial Sequence
  ENSG00000172771_35 (sequence is synthesized)
ctgccaagcaatacatttgtggggccacatctgtccagacaaggcacagaggcaaattagaaatggacttgctaaagctctggctgtgaatttactctacaacacaaaggtgcattgtat

SEQ ID NO: 587373 - DNA, 120 bp, Artificial Sequence
  ENSG00000172771_36 (sequence is synthesized)
aatatttctttatatcttagtaccattcttgtagtaaacaaacaaacaaaaaagaaccattacaaccacccacccattctagcacccttcccaaacatagccacagctttgtttttctaa

SEQ ID NO: 587374 - DNA, 120 bp, Artificial Sequence
  ENSG00000172771_37 (sequence is synthesized)
atgaaacaaatcttgctctgttcccatctaccaggttggcaggaacttaatctcatgcatgtttggggcttccttgtcctccctgagtcacacaggagccctggaggaggcagtggaggg

SEQ ID NO: 587375 - DNA, 120 bp, Artificial Sequence
  ENSG00000172771_38 (sequence is synthesized)
gtttcctaacaatggtaaagatctggggtgaggccgttggagtttacagtcacaccaagaggagttactcagcatcctcactggagtggctcatttggggacagcaggcagctcagagca

SEQ ID NO: 587376 - DNA, 120 bp, Artificial Sequence
  ENSG00000172771_39 (sequence is synthesized)
tccattcctcagtcctccaggagattttcaatgtccagtctcaaccagctgccctgcagagaaactatcacctcccaagcagggtctctgcctctctcagagctcagggaagctcagcac

SEQ ID NO: 587377 - DNA, 120 bp, Artificial Sequence
  ENSG00000172771_40 (sequence is synthesized)
cccaacagtcgctcctgcatgtgtcaccaccccaacagtagtaatctcctttatgtccagcacatttttaaggtcacctcaagttgggctgctttccctctgatactctttgtgcctttt

SEQ ID NO: 587378 - DNA, 120 bp, Artificial Sequence
  ENSG00000172771_41 (sequence is synthesized)
tgttataaattaccaagcttatcattatctgtgtagctggctgtgagtcatttcaatgaccacagtgtgctgtgatgcatattcgcagcagagatattttgggtcctgttatttcccagt

SEQ ID NO: 587379 - DNA, 120 bp, Artificial Sequence
  ENSG00000172771_42 (sequence is synthesized)
aagtaaacacaaagccaagcagcagacctttgctctcatggtgctactttggcgtcatcactgagttctttttccctggtgagcaatagtgggtaagataggtagactggggtgtgtaag

SEQ ID NO: 587380 - DNA, 120 bp, Artificial Sequence
  ENSG00000172771_43 (sequence is synthesized)
aattaaagaaagaggaaagaaacaggaaaggtggctcaatagtcaaagacaggtttattttagagaaaacaaacctgagaggggctgctggctgagttaggtcagagccacattctctta

SEQ ID NO: 587381 - DNA, 120 bp, Artificial Sequence
  ENSG00000172771_44 (sequence is synthesized)
cagactaagagtttttaaggattcacagtggaagagtttatcagaggcttggactgcttctctgtctctttgttgtgtttatctgggaggcagagttgcgtgtctgtttccatacatctt

SEQ ID NO: 587382 - DNA, 64 bp, Artificial Sequence
  ENSG00000172771_45 (sequence is synthesized)
atctgggaggcagagttgcgtgtctgtttccatacatctttctgcagctgcaggcatatccccc

SEQ ID NO: 587383 - DNA, 120 bp, Artificial Sequence
  ENSG00000172771_46 (sequence is synthesized)
gaagtttggcagtcacccaagagactttcccccgacctccctctgtgcctgagctgtcttgtctgtgttttactgtctgctctttctggctgcttatagttagaagagaagtgatttcct

SEQ ID NO: 587384 - DNA, 120 bp, Artificial Sequence
  ENSG00000172771_47 (sequence is synthesized)
agaaagggagctggaacttaaagtggcggtgtttgtcccagatgacggtgctcctgctctgtccgggtgtctctcactttgtctaaagaggcaagagtttgagcgtcttggcaggggtgc

SEQ ID NO: 587385 - DNA, 120 bp, Artificial Sequence
  ENSG00000172771_48 (sequence is synthesized)
gtcttggcaggggtgccttcttccagtagttcttcttgcagtagctcttcttcattcttgcagaatgatctcagtttatcctttatgtccgcagaggtcaggattgctattcctgcttta

SEQ ID NO: 587386 - DNA, 120 bp, Artificial Sequence
  ENSG00000172771_49 (sequence is synthesized)
gagacgatgaaggtctgaaccagggcagggacaatgggattctttcattcattggaatctttgttgagcaactactatgtgccacttctagaaactgggaacacagcagtgggccagcca

SEQ ID NO: 587387 - DNA, 120 bp, Artificial Sequence
  ENSG00000172771_50 (sequence is synthesized)
aagccccagctttcgatgagcttgcacctaaagggctggtggtcagggacggcctctctgagaagcagacattggagctgacatctgagtgattgacaggaactagtcttgggggaagca

SEQ ID NO: 587388 - DNA, 120 bp, Artificial Sequence
  ENSG00000172771_51 (sequence is synthesized)
caatctaggcagatagaactgtgaaggcaaaggccctggggtaggatagcttgcaagagacagaaggtggtcagggtggctgggtggaatgggtgaagggtgaatggtatgccatggacc

SEQ ID NO: 587389 - DNA, 120 bp, Artificial Sequence
  ENSG00000172771_52 (sequence is synthesized)
aggtgggaaggcagctgaggccagatggtacagcagggccttgtagcccagggagaggactctgggttttggtctaaatgctgtgggaagccaagggaatgaggcgatctggtcggtcgg

SEQ ID NO: 587390 - DNA, 120 bp, Artificial Sequence
  ENSG00000172771_53 (sequence is synthesized)
tctatctatctatctatccatccatctacacatatccaacataaggagactcatgcaatggggtctccttatgttgcctaggctggagtgaagtggctattcacaggtgtgatcatagct

SEQ ID NO: 587391 - DNA, 120 bp, Artificial Sequence
  ENSG00000172771_54 (sequence is synthesized)
ggctggagtgaagtggctattcacaggtgtgatcatagcttactgcagcctcaaattcctgggcataagcaatcctcccacttcagcttcctgagtagctagaaccacaggcgtgccact

SEQ ID NO: 587392 - DNA, 120 bp, Artificial Sequence
  ENSG00000172771_55 (sequence is synthesized)
gcaccctgctttatatatgtgtatatatatttttggggggggatggagtcttgctctgccatccaggtttgagtgcagtggtgtgatctcttctcactgcaacctccacctcccgggttc

SEQ ID NO: 587393 - DNA, 120 bp, Artificial Sequence
  ENSG00000172771_56 (sequence is synthesized)
actactgacctcagctgatccactcgcctcagcctcccaaagtaccctgctctatattttttgtttgtttgtttttgagagggagtctcaccgtgtcacccaggctggagtgcagtggca

SEQ ID NO: 587394 - DNA, 120 bp, Artificial Sequence
  ENSG00000172771_57 (sequence is synthesized)
tatattttttaaagatcctatttgctgcttggtgagacagggtgacaggacgagaatggcaaccagagggctggggttggtgcagtaagggacgccattagtggagatggagaggagggc

SEQ ID NO: 587395 - DNA, 120 bp, Artificial Sequence
  ENSG00000172771_58 (sequence is synthesized)
cacatctaaggtacagcttaggtggcttaggtgggcactgcccagacgtgtgggaagggagcggaggggtggcctggtgcctgctgggtgacactggataactgcttggcaggttccgtg

SEQ ID NO: 587396 - DNA, 120 bp, Artificial Sequence
  ENSG00000172771_59 (sequence is synthesized)
gctgggcaccctcttagtccctccttccttcatctcttccctctgactccagattatatcttggccaagcacagagattccctgaagggtccgctcaagaagcaggaggtggattcagcc

SEQ ID NO: 587397 - DNA, 120 bp, Artificial Sequence
  ENSG00000172772_0 (sequence is synthesized)
tcccttaccttaatgatttctagccccaagaattccttgacactttcttgtgaatttgctgaaagaattgaattttcattccactctttctgaaaatagctcctgaatcccacccacttc

SEQ ID NO: 587398 - DNA, 120 bp, Artificial Sequence
  ENSG00000172772_1 (sequence is synthesized)
ctctgccatttttcttcaatagtatcttacatagtttggcccaactcttggcaggtagaaattgaggtgtagatattaatgtggagaaacttggtaaaagtggagaaaagaaaaagaact

SEQ ID NO: 587399 - DNA, 120 bp, Artificial Sequence
  ENSG00000172772_2 (sequence is synthesized)
agtcttgatccttccagtttctaactccagtgctgattacattagattcatggctcagagtgtaacttaatttatcttcagtctgattcttccttctgtacttgtagctctccacagaga

SEQ ID NO: 587400 - DNA, 120 bp, Artificial Sequence
  ENSG00000172772_3 (sequence is synthesized)
aatactgttagctcaattacctgggaaaatcactcagtgttgatggaatttgtgttcctggcctatccctcctgcccagaactgcatattctgtccttccttggggtcagcctggtttat

SEQ ID NO: 587401 - DNA, 120 bp, Artificial Sequence
  ENSG00000172772_4 (sequence is synthesized)
ggtttgatcatcactgggaacattctcattgtggtgtccattcacacagaaacctgtctatgcacatccatgtactatttcctgggcagcctttctgggattgaaatatgctacactgca

SEQ ID NO: 587402 - DNA, 120 bp, Artificial Sequence
  ENSG00000172772_5 (sequence is synthesized)
gtggtggtgccccatatcctggccaacaccctacagtcagagaagaccatcactctcctgggctgtgccacccagatggctttcttcattgcactgggcagtgctgattgcttcctcttg

SEQ ID NO: 587403 - DNA, 120 bp, Artificial Sequence
  ENSG00000172772_6 (sequence is synthesized)
catttgccacccgttgcagtaccctctcctcatgacattgactctttgtgtccacttggttgtggcatcagtcatcagtggtctgttcctgtccttacaactggtggccttcatcttctc

SEQ ID NO: 587404 - DNA, 120 bp, Artificial Sequence
  ENSG00000172772_7 (sequence is synthesized)
tctgccattctgccaggctcagggcattgagcacttcttttgtgatgtgccaccagtcatgcatgttgtttgtgctcagagtcacattcatgagcagtcagtgctggtggcagccatact

SEQ ID NO: 587405 - DNA, 120 bp, Artificial Sequence
  ENSG00000172772_8 (sequence is synthesized)
agccattgctgtgcctttcttcctcatcaccacctcctacaccttcatagtggctgctctgctcaagatccactcggctgctggccgccaccgggccttctccacctgctcttcccacct

SEQ ID NO: 587406 - DNA, 120 bp, Artificial Sequence
  ENSG00000172772_9 (sequence is synthesized)
cactgtggtgctgctgcagtatggctgctgtgccttcatgtacctgtgccccagctccagctacaaccccaagcaagatcggttcatctcactggtgtacacattgggaaccccactgct

SEQ ID NO: 587407 - DNA, 120 bp, Artificial Sequence
  ENSG00000172772_10 (sequence is synthesized)
caacccacttatctatgccctgaggaacagtgagatgaaaggggccgtagggagagttcttaccaggaactgcctttcccagaacagctaggaaagacgaggggacagcctatcaggcaa

SEQ ID NO: 587408 - DNA, 120 bp, Artificial Sequence
  ENSG00000172772_11 (sequence is synthesized)
gtatttggttccagcccaccaaatctgtatgaaactgagatttctatcatttggtgttaaaactcatctaaaagatggtataaattatatggatactgtttatgtgtgccaaagattttt

SEQ ID NO: 587409 - DNA, 120 bp, Artificial Sequence
  ENSG00000172775_0 (sequence is synthesized)
attgtggcggtgaggaacaggaagccctgaagggtcaaaagaaatacaaaagcaaaggctattttctttttttttttctttctttcattcattccttcctctgtttctttctttcttcct

SEQ ID NO: 587410 - DNA, 120 bp, Artificial Sequence
  ENSG00000172775_1 (sequence is synthesized)
ttcatttttttttcttttttaagagcgagcggctctgcggtggcggtttggggtgggcgccgccgaggtgaggtcgtctcgcctcccgcgcgccggtagattggttgtttcattatggat

SEQ ID NO: 587411 - DNA, 120 bp, Artificial Sequence
  ENSG00000172775_2 (sequence is synthesized)
ggaggggatgatggtaaccttattatcaaaaagaggtttgtgtctgaggcagaactagatgaacggcgcaaaaggaggcaagaagaatgggagaaagttcgaaaacctgaagatccagaa

SEQ ID NO: 587412 - DNA, 120 bp, Artificial Sequence
  ENSG00000172775_3 (sequence is synthesized)
gaatgtccagaggaggtttatgaccctcgatctctatatgaaaggctacaggaacagaaggacaggaagcagcaggagtacgaggaacagttcaaattcaaaaacatggtaagaggctta

SEQ ID NO: 587413 - DNA, 120 bp, Artificial Sequence
  ENSG00000172775_4 (sequence is synthesized)
gatgaagatgagaccaacttccttgatgaggtttctcgacagcaggaactaatagaaaagcaacgaagagaagaagaactgaaagaactgaaggaatacagaaataacctcaagaaggtt

SEQ ID NO: 587414 - DNA, 120 bp, Artificial Sequence
  ENSG00000172775_5 (sequence is synthesized)
ggaatttctcaagagaacaagaaggaagtggaaaagaaactgactgtgaagcctatagaaaccaagaacaagttctcccaggcgaagctgttggcaggagctgtgaagcataagagctca

SEQ ID NO: 587415 - DNA, 120 bp, Artificial Sequence
  ENSG00000172775_6 (sequence is synthesized)
gagagtggcaacagtgtgaaaagactgaaaccggaccctgagccagatgacaagaatcaagagccctcatcctgcaagtctctcggaaacacctccctgagtggcccctccatccactgc

SEQ ID NO: 587416 - DNA, 120 bp, Artificial Sequence
  ENSG00000172775_7 (sequence is synthesized)
ccctctgctgcagtatgtatcggcatcctcccaggcctgggtgcctactctgggagcagcgactccgagtccagctcagacagcgaaggcaccatcaatgccaccggaaagattgtctcc

SEQ ID NO: 587417 - DNA, 120 bp, Artificial Sequence
  ENSG00000172775_8 (sequence is synthesized)
tccatcttccgaaccaacaccttcctcgaggccccctagtttctccgtccctacacagggagctcctccccaagggtagatcggaccgttcatgctgcctataggcattatgtccctcaa

SEQ ID NO: 587418 - DNA, 120 bp, Artificial Sequence
  ENSG00000172775_9 (sequence is synthesized)
aaaaaaactcctttgcctgcatcctgtgtacaacatgacatttttaaccaatccaatctaaaaatgtgccagaatccacctgtggcccgaatcgtgtttggttcctctttctactccact

SEQ ID NO: 587419 - DNA, 120 bp, Artificial Sequence
  ENSG00000172775_10 (sequence is synthesized)
gcagatgaccaaacctgtcccgctgccactttcctcactgatattgggaggagggcaaggcccagccgaagttccactaaaaatgccccaggagaataggcaccggctggcttgccaaag

SEQ ID NO: 587420 - DNA, 120 bp, Artificial Sequence
  ENSG00000172775_11 (sequence is synthesized)
attggacaggtgttatttaaacattctattgtaaatgaatgtgttgtttggttctactgcattgtggagcatgcgggggaagagaactgacccaggtagtgaaatggagcccttccctgg

SEQ ID NO: 587421 - DNA, 120 bp, Artificial Sequence
  ENSG00000172775_12 (sequence is synthesized)
aactaaccagtccttgatgttgtgtgactaagtaaagatgataaaccccatctgctgggggtgtcacttcacactcggcatgcattgtgaaagctttccatacccttggccattccctct

SEQ ID NO: 587422 - DNA, 120 bp, Artificial Sequence
  ENSG00000172775_13 (sequence is synthesized)
ctcctctctctccaaccccatttatgcaggaagggactgctaacaagaacgcttccatctcaaaccttttctctgcctgggaaattattttatgtttgtttttgaaataaaggatttagt

SEQ ID NO: 587423 - DNA, 120 bp, Artificial Sequence
  ENSG00000172775_14 (sequence is synthesized)
ttaagattctaaattttagagaaacaaacgtaggccttgtttactaatagccagacatcagaactgcaggtaggtatgttaatgagatgacttatttctggcagctcctggaatcctaat

SEQ ID NO: 587424 - DNA, 120 bp, Artificial Sequence
  ENSG00000172775_15 (sequence is synthesized)
attgtaaatgagtgggacacacttgcatattgtgaccattctattgaggcccttctctgtttaatgcatattatacttgtgcttttaactgtggaatctatttctaacctaaaggtgctg

SEQ ID NO: 587425 - DNA, 120 bp, Artificial Sequence
  ENSG00000172775_16 (sequence is synthesized)
ccctagtacttttctttgctgcctctgctgctctttttcctttccaaacagcaactctgaggccatgagcagccaaaaactagaggtactgctccacctcgtctcataaagggaaacggg

SEQ ID NO: 587426 - DNA, 120 bp, Artificial Sequence
  ENSG00000172775_17 (sequence is synthesized)
ctcatcccttggattctggaggagggagagggagatggtgtggaggcctcgaggacagagatagacatgagctttgacaacaatctgtaggctctcctgctttagaataagcatgtacca

SEQ ID NO: 587427 - DNA, 120 bp, Artificial Sequence
  ENSG00000172775_18 (sequence is synthesized)
ttctttatccattccccttattcctacatcaattgtttttactttcttgggtgtgagactgagtgagacacacacaaaatgtgttgacactgtgatgccggcaggcagagcagctactga

SEQ ID NO: 587428 - DNA, 120 bp, Artificial Sequence
  ENSG00000172775_19 (sequence is synthesized)
ctttgaacatgggcagagaggcccctggatctcatccagcccactccttttccccttccagtacagtgacactctggtgcccattggcagatggcgacttccctgcacccataactgatg

SEQ ID NO: 587429 - DNA, 120 bp, Artificial Sequence
  ENSG00000172775_20 (sequence is synthesized)
ctttgtgaattcttcctccttttcagaactactctgtgctaattgttctgccagtatgggcgcatcagctccatcctgacaaacaagacatttaggtaaaactttgtaggcaccttctgc

SEQ ID NO: 587430 - DNA, 120 bp, Artificial Sequence
  ENSG00000172775_21 (sequence is synthesized)
ttctctgcttcattgttcctgtgatagtcctgttgttattacagcatgtacccaaaacagcctcacattgttacaggaggcaggccaggacatcaaagtcatcatctttatgtggcatga

SEQ ID NO: 587431 - DNA, 120 bp, Artificial Sequence
  ENSG00000172775_22 (sequence is synthesized)
ctcttaagaggccattactgtatctcatggcctcttgatgtggaaagaagttgacagagggttgcagggtttaaaaacatccattaacatgaaagctaataaacctgtcagagaacaaga

SEQ ID NO: 587432 - DNA, 120 bp, Artificial Sequence
  ENSG00000172775_23 (sequence is synthesized)
atcaagtactgctttcgcaggataagtgaccatttttaatcagttgaaattaacggaaagtagcagttatttttgaaagatgacatcaattatataatatagcctggatttggttctcag

SEQ ID NO: 587433 - DNA, 120 bp, Artificial Sequence
  ENSG00000172775_24 (sequence is synthesized)
ctctaccattcaccacctgtatcaccttagacaaataatctaactcctctggacctcaacttcatctgtaaacagataatatttctcatagggtcaatgatcatgtaaattagataatat

SEQ ID NO: 587434 - DNA, 120 bp, Artificial Sequence
  ENSG00000172775_25 (sequence is synthesized)
ttttataataaaccagtatatgtaagtaaagtgttcctctaagttcctctaagttctgtgaattggtctagcaaattaatagaacctaaggagggggtcatgggaaccctgattaatagc

SEQ ID NO: 587435 - DNA, 120 bp, Artificial Sequence
  ENSG00000172775_26 (sequence is synthesized)
cagttggttagaactacaggtaaaacaacctgattcttgtggttggtatctaaaatggaggctagtcttgtgggactcacccctcaacctatgggatctgacgcggtctccatccagaat

SEQ ID NO: 587436 - DNA, 120 bp, Artificial Sequence
  ENSG00000172775_27 (sequence is synthesized)
attcccatgatactgacacttcagcaaatacttgcttgatggctaccaatctctataacttacattgcacagtacctaggaatattcatgtgagttcattcctccctgctcagattcttc

SEQ ID NO: 587437 - DNA, 120 bp, Artificial Sequence
  ENSG00000172775_28 (sequence is synthesized)
agtgcggcctcggtcctggcctggcggcgacacctgggttccagcttccttacggaagagatgagctgcggctgctgttagggttagggccaggcctgttctcagtccgcgcacccgctc

SEQ ID NO: 587438 - DNA, 120 bp, Artificial Sequence
  ENSG00000172775_29 (sequence is synthesized)
cttgtccggagtagccgaagcctggggcttgcgggcccagcctgaggggagctgagggtgcccgcgggaaggcatctgggtcgcggcgaggaccctttcaggcgggcccaacactgccgg

SEQ ID NO: 587439 - DNA, 120 bp, Artificial Sequence
  ENSG00000172775_30 (sequence is synthesized)
gggagtgagaaaagagaaggattgaagttcaaatcttaaatggcacagacaaggggtttacagggaggaaggtcagaagagatataaatgaagagtcagattagtattcaggaaagtacg

SEQ ID NO: 587440 - DNA, 80 bp, Artificial Sequence
  ENSG00000172780_0 (sequence is synthesized)
cggagctgaggaccggccggagctttgcggagggcccggcttggcgggtccgggggggagccgaacccgcggggcaccgg

SEQ ID NO: 587441 - DNA, 120 bp, Artificial Sequence
  ENSG00000172780_1 (sequence is synthesized)
ggccgaggccgaggcaggcggtcggcagtgctgggggttcaggtgttgcggcggctccacgtagccaggcggcccgtgggctggagcgggcggagctcggcccgcggcttgcgtgagctc

SEQ ID NO: 587442 - DNA, 120 bp, Artificial Sequence
  ENSG00000172780_2 (sequence is synthesized)
ttgcgtgagctcaggccggtcccagcgtccagagcgccggcccttcggcttcttctaggccatggcagggccgggcccaggcccgggggacccggacgagcagtacgatttcctgttcaa

SEQ ID NO: 587443 - DNA, 120 bp, Artificial Sequence
  ENSG00000172780_3 (sequence is synthesized)
gctggtgctggtgggcgacgcaagcgtgggcaagacgtgcgtggtgcagcgcttcaagaccggcgccttctcggagcgccagggaagcaccatcggcgtcgacttcaccatgaagacgct

SEQ ID NO: 587444 - DNA, 120 bp, Artificial Sequence
  ENSG00000172780_4 (sequence is synthesized)
ggagatccagggcaagcgggtcaagctgcagatctgggacacggccggccaggagcggttccgcaccatcacccagagctactaccgcagtgccaatggggccatccttgcctacgacat

SEQ ID NO: 587445 - DNA, 120 bp, Artificial Sequence
  ENSG00000172780_5 (sequence is synthesized)
caccaagaggagctccttcctgtcggtgcctcactggattgaggatgtgaggaagtatgcgggctccaacattgtgcagctgctgatcgggaacaagtcagacctcagcgagcttcggga

SEQ ID NO: 587446 - DNA, 120 bp, Artificial Sequence
  ENSG00000172780_6 (sequence is synthesized)
ggtctccttggctgaggcacagagcctggctgagcactatgacatcctgtgtgccattgagacgtctgccaaggactcgagcaacgtggaggaggccttcctgagggtggccacggagct

SEQ ID NO: 587447 - DNA, 120 bp, Artificial Sequence
  ENSG00000172780_7 (sequence is synthesized)
catcatgcggcacgggggccccttgttcagcgagaagagccccgaccacatccagctgaacagcaaggacatcggagaaggctggggctgcgggtgctgaccaggggccgggccggcaga

SEQ ID NO: 587448 - DNA, 120 bp, Artificial Sequence
  ENSG00000172780_8 (sequence is synthesized)
ctgggggttccccacctccttgctctccccagcctgccaagcccagccctccagagccagccctcctgggtaccggcaactacagcagccgggtgaagctctggagctctgcatcctgtg

SEQ ID NO: 587449 - DNA, 120 bp, Artificial Sequence
  ENSG00000172780_9 (sequence is synthesized)
gcctggctgcgggatggaggctctccttgaggaaggggaagcaggataccctggcgggccaccctgccagccagcagctggccctccaccatcttcacattccaagactggcctgaaccc

SEQ ID NO: 587450 - DNA, 120 bp, Artificial Sequence
  ENSG00000172780_10 (sequence is synthesized)
gccggtgtgggccacagtaggaggggccagcagtcctccctgtcccatgcctgctggctctgaccgtttcctctcatgggtttgctttacctgtggcagcaggttgctgctttccaggga

SEQ ID NO: 587451 - DNA, 120 bp, Artificial Sequence
  ENSG00000172780_11 (sequence is synthesized)
tgtgtccagtgccctgggttcttcccggtcatcctggggctctgcacagagcagcagagctagagccatgagacccacagacttggtgcctgagcgcagctccagggaagccccagcccc

SEQ ID NO: 587452 - DNA, 120 bp, Artificial Sequence
  ENSG00000172780_12 (sequence is synthesized)
ttccaggcggggaacctgcttcctgccttcactgcccccgcagcactcacagacatctccctggggtctggctcactgccttatcaggacctctgagttttctgactttctgtgtagctt

SEQ ID NO: 587453 - DNA, 120 bp, Artificial Sequence
  ENSG00000172780_13 (sequence is synthesized)
ctcattttcatcagcacagcatggggtcacggcccacagctaggtggggtcacggcccacagctaggtggggactgtctgctggctcagggcccagtgttttgccactcaggttgcaaaa

SEQ ID NO: 587454 - DNA, 120 bp, Artificial Sequence
  ENSG00000172780_14 (sequence is synthesized)
ttagctaatccttcagtgccagcactcagaagtctggcaggtgggggaatgagatgagaaagtggacatttaaggtccaagtagaagcttgcatccttgaggctcagggatgagagggca

SEQ ID NO: 587455 - DNA, 120 bp, Artificial Sequence
  ENSG00000172780_15 (sequence is synthesized)
ccgcaaggcacccagccttaccccacaagcaggaatcctgccagccgagcgtgggtcccagtctatggaatcgagtctcccagacaaaaaaggagaggccctggcggtccttggcctggc

SEQ ID NO: 587456 - DNA, 120 bp, Artificial Sequence
  ENSG00000172780_16 (sequence is synthesized)
ccattttattccctggacccttaactgcctcaccctgagctgggcaccaaggttagaaggcaaaagtggggtagggggatgtgggaagcagcattgtcctctgggcatgtggctcagagg

SEQ ID NO: 587457 - DNA, 120 bp, Artificial Sequence
  ENSG00000172780_17 (sequence is synthesized)
tatcacagtgacaaaagagccagggctagggctggaggggccaggtgatcttccttagccaatcccagtccgtctgtgtcagcccagctctgcctcgcagccccctcagcatgggtgccc

SEQ ID NO: 587458 - DNA, 120 bp, Artificial Sequence
  ENSG00000172780_18 (sequence is synthesized)
gagcagggctgcgtcggtttgtggtctagctcccaggggcaggccaggcatggctcagtgcagtccctgggccagtgagaggcctcccccatgcctccctgccctctgcactaagcactt

SEQ ID NO: 587459 - DNA, 120 bp, Artificial Sequence
  ENSG00000172780_19 (sequence is synthesized)
tccaggcaggcctggccatagggcaagagcaggccttacagcagtgccacggtgacccaagaggcagggttggggcctggacagggtttcctctgctgagactgagacaagcagggcttg

SEQ ID NO: 587460 - DNA, 120 bp, Artificial Sequence
  ENSG00000172780_20 (sequence is synthesized)
atgctggtggtggagccagcatctcacctgccaggcttccttttgggcagggaggctacctgtggaatggctgagcctggttctgcaggggaggaaggctgccaggagctgaggggctag

SEQ ID NO: 587461 - DNA, 120 bp, Artificial Sequence
  ENSG00000172780_21 (sequence is synthesized)
cacctgcattgaggggagtctgggtgcatcagattggggggcgccagaggcgaggctgcctggctccctttctcagcagctttgcttgtggcaggggtgagagtggagctgagtggggtc

SEQ ID NO: 587462 - DNA, 120 bp, Artificial Sequence
  ENSG00000172780_22 (sequence is synthesized)
tgggctctgcccctgcgcctccactgcagtgcctgggctccccttgcagggcagacagtgcctggcactgaggggtgcccccagaccccgctgggactggatgtgccgtgggcagtgcct

SEQ ID NO: 587463 - DNA, 120 bp, Artificial Sequence
  ENSG00000172780_23 (sequence is synthesized)
tcctccagcctcacaacctttctgctggggctgaagtttctggggtcacatggtcagaaggggctgagctggtctttcactgcaggcccactctgaaagagaaatcccatgaagcctgtc

SEQ ID NO: 587464 - DNA, 120 bp, Artificial Sequence
  ENSG00000172780_24 (sequence is synthesized)
cttgcagagcccctctgtttttgggggaacagggagcattcacagggtcttgggaacaaaggcctgggcctccccgtttgaatttcagccccagttccagggcaagtcccagccacccaa

SEQ ID NO: 587465 - DNA, 120 bp, Artificial Sequence
  ENSG00000172780_25 (sequence is synthesized)
gcatacttaccagtactgcccaccaccacccactgcccacctctaagaagcccggctctcctactctgcttccaggctggggcctcacaggtggggctgttaccttcctcagggcttagg

SEQ ID NO: 587466 - DNA, 120 bp, Artificial Sequence
  ENSG00000172780_26 (sequence is synthesized)
gagggagggaggacatggacagggccttccaccctggctccttcacagggatggtagctgaccggtgatgggttcatttgtcaccttggactgtgagccacttccacttctcgcccccca

SEQ ID NO: 587467 - DNA, 120 bp, Artificial Sequence
  ENSG00000172780_27 (sequence is synthesized)
ggcaggagcaccctcactccaagggcttggcctggaaaggcaggctcacctgggactcaacgttccttcccccgccgccactgtgccccccgtccctccaccccagaagccctgacctca

SEQ ID NO: 587468 - DNA, 120 bp, Artificial Sequence
  ENSG00000172780_28 (sequence is synthesized)
tttgggcaccttgctgtcctctgggcttctcctctgcccaggtcaccctgtggcaggcctgggccctcaggatgtttcaaaggctccacagctccaccgctccacctggcttcactccag

SEQ ID NO: 587469 - DNA, 120 bp, Artificial Sequence
  ENSG00000172780_29 (sequence is synthesized)
caccctgtccctggagcacctctgtcctgtctgggccaacctggtctccctgccccatgccctcccctggctcttagcaacctgcccttttattcatgccatttggggtcacagatgcct

SEQ ID NO: 587470 - DNA, 120 bp, Artificial Sequence
  ENSG00000172780_30 (sequence is synthesized)
agctggacacagctcccagaactggctccaccctggggccttgcccctagtaccccctggcaggagcaacccaccccatggtcgaggttcccctacccctggatcctggactgaagccat

SEQ ID NO: 587471 - DNA, 120 bp, Artificial Sequence
  ENSG00000172780_31 (sequence is synthesized)
ttcctacagagaagcgttcccaccccctctcaggcacaaaagccggtgtccagggactcaagacctgtacctggggttgcaggggctcctgccctgctgtatcccaccaggagggggccc

SEQ ID NO: 587472 - DNA, 120 bp, Artificial Sequence
  ENSG00000172780_32 (sequence is synthesized)
cactgcccttccggcccttaaaactgggctgggagagaagacggggaagtgtgtgagacaaaacaaagccggcttgtttcctccccttggcaggctaagctctcccggcagcccgggctc

SEQ ID NO: 587473 - DNA, 120 bp, Artificial Sequence
  ENSG00000172780_33 (sequence is synthesized)
tggggcggaaggagaacagtgtcatctcttcctttgttgataaattgccaaagagtgggaacaggtggggtcaggggccagagtgcaggggagggggcaatggtggaggtggcgggggga

SEQ ID NO: 587474 - DNA, 120 bp, Artificial Sequence
  ENSG00000172780_34 (sequence is synthesized)
agcagagggaggtgggctgaggcctcggtggggccagtgcgacgctggcttaaggagctggaggggttcctaatacacatttaattcagtttctcttccctaagaggctgccggagttgg

SEQ ID NO: 587475 - DNA, 120 bp, Artificial Sequence
  ENSG00000172780_35 (sequence is synthesized)
ggcctcctccagcagagaccctcggacccctgcagggcctggacttggggtgaacagggcttcagtcagcgcaagtattccatttgcatttggtaatttttcatgccacctatttatgaa

SEQ ID NO: 587476 - DNA, 120 bp, Artificial Sequence
  ENSG00000172780_36 (sequence is synthesized)
tatataaatctttataccaaatctattttttaaaacatggaaaagttgcctttatggaaacttggcagagccagagtgtacacattcctaaaccattaaacagatttctataacaagcca

SEQ ID NO: 587477 - DNA, 120 bp, Artificial Sequence
  ENSG00000172780_37 (sequence is synthesized)
ccatcaaatggggccctgggtcctctcctcacaaggattttgggctcctccgcagttttgtagccagcctggattctggccttctgcagcctgctccctcccttcccttccgcccctggg

SEQ ID NO: 587478 - DNA, 120 bp, Artificial Sequence
  ENSG00000172780_38 (sequence is synthesized)
aagagcgacccccaccactctcggagactgcactgcccgcctgtcagagtgggcactcaggtgacactgctgtggtcgtccccttcctccgtgatccattccggagggggtcattcttag

SEQ ID NO: 587479 - DNA, 120 bp, Artificial Sequence
  ENSG00000172782_0 (sequence is synthesized)
agtcctccgtgcgcgtcgggcccgagcccacagagtccatggaacccacggagccgatggaacctacggagcccatggaacctacggagcccatggaacctacggagcccatggaaccta

SEQ ID NO: 587480 - DNA, 120 bp, Artificial Sequence
  ENSG00000172782_1 (sequence is synthesized)
cggagcccatggaaccggcgcggagcgcgcaccgtgggggcgaggcgctgctgcgggagctggaggtgctggtgcaggacgtggtgaggacgagctcctggtgggagcgccacggcgtgg

SEQ ID NO: 587481 - DNA, 120 bp, Artificial Sequence
  ENSG00000172782_2 (sequence is synthesized)
actgcgccatcctcgcgctcagcctcttcgccttgccggcaggcttcctgtgcctgcgctgggagaatgccctggtctttgcatccggcatcaccatcttgggtgtgtgccactacacac

SEQ ID NO: 587482 - DNA, 120 bp, Artificial Sequence
  ENSG00000172782_3 (sequence is synthesized)
tcactgtcaagggcagccacctggccactcatggggccctcaccgagtccaaacgctggagcaagatctggctgcttttctttgtggaggtgtgcacagccttcactgcagagcacgcca

SEQ ID NO: 587483 - DNA, 120 bp, Artificial Sequence
  ENSG00000172782_4 (sequence is synthesized)
cgcatgggcacgtcaagatgcaccatgcctacaccaacgtggtgggcctgggggactccagcacgtggaggctgccttgcctcaaccgctatgtctacatgttccttgctcctttcctcc

SEQ ID NO: 587484 - DNA, 120 bp, Artificial Sequence
  ENSG00000172782_5 (sequence is synthesized)
tccccatcgccactccactggtggctgtcgagcggctgaggaaggtggagctcgggacagccctgcggacgctggccctgatttctctgggcctttattctcactactggctgctcctga

SEQ ID NO: 587485 - DNA, 120 bp, Artificial Sequence
  ENSG00000172782_6 (sequence is synthesized)
acgtgtcaggcttcaagaaccccagctcagccctgggctgcatgttcctcaccagatccctgttggcccacccctacctccacgtcaacatcttccagcacatcggactgcccatgttct

SEQ ID NO: 587486 - DNA, 120 bp, Artificial Sequence
  ENSG00000172782_7 (sequence is synthesized)
cccgggacaacaagccccgtcggattcacatgatgagcctgggggtgcttaacctggcccggctgcccgtgctggactgggcgttcggccactcgatcatcagctgccatgtggaacacc

SEQ ID NO: 587487 - DNA, 120 bp, Artificial Sequence
  ENSG00000172782_8 (sequence is synthesized)
atctattccccaggctctctgataacatgtgcctgaaggtgaagcccgtggtgtcccagttcctacgtgagaagcagctaccgtacaacgaggactcatacctggctcgcttccagctgt

SEQ ID NO: 587488 - DNA, 120 bp, Artificial Sequence
  ENSG00000172782_9 (sequence is synthesized)
gaggaattcatggtgcaggccccacccatcactgagcttgtggggctgtaatgaggccgggccggtgcagccaccctgcccctccctggcctggccctggccctcctgctgctgctggtc

SEQ ID NO: 587489 - DNA, 120 bp, Artificial Sequence
  ENSG00000172782_10 (sequence is synthesized)
cagggggtgtggctcagtggctggtggtggacctggagagtggaggcaccggccaggcaggggggcaggggagctcaggcctggggtctgggggccacctgccttgcgtgcttttctggg

SEQ ID NO: 587490 - DNA, 120 bp, Artificial Sequence
  ENSG00000172782_11 (sequence is synthesized)
ttttgaggggtgtctgggtgaagcggtaatggtggctgtgcattctggtcagtctggacctcagcaacttcatctcaggactaaagagctgggtccttccccctgctccatctgagcctt

SEQ ID NO: 587491 - DNA, 120 bp, Artificial Sequence
  ENSG00000172782_12 (sequence is synthesized)
ggtagggttaaagggaggtgacagggtgaagagggatcctgtgcaggggccacctgggagatagcagggggcacagagagaacagggtcagctccctcggctgggacctccctggcattg

SEQ ID NO: 587492 - DNA, 120 bp, Artificial Sequence
  ENSG00000172782_13 (sequence is synthesized)
ggagagccccacacggccttggctattgcttccttcaggctctgcccaccaaggtgccctctccccggggaccttagggtgagcttgcttttggcaggccttcctcgatcctcagccaaa

SEQ ID NO: 587493 - DNA, 120 bp, Artificial Sequence
  ENSG00000172782_14 (sequence is synthesized)
ggaacctgtgcaagacactggctcagcagttccccaggccacagtatcagcaagataaaagtgagtgtgttttgtcgggagggaactccaggggaagtgaggggagaaggttccccaggg

SEQ ID NO: 587494 - DNA, 69 bp, Artificial Sequence
  ENSG00000172782_15 (sequence is synthesized)
gggaactccaggggaagtgaggggagaaggttccccagggacagagttagggaaagagtataaatagcc

SEQ ID NO: 587495 - DNA, 120 bp, Artificial Sequence
  ENSG00000172782_16 (sequence is synthesized)
catagatacctgagagttgatggtcaaagcggattagctggggctgtaaggcaggacggccctggacatgcagggtttgaggaggtgggggtgttctccgggctctcaaaggtcctgcat

SEQ ID NO: 587496 - DNA, 120 bp, Artificial Sequence
  ENSG00000172782_17 (sequence is synthesized)
agtcgagggctgggctgggggcgctggaataaagggactgttagaggatggaaaggaagattcttcggcctgggggcgttgctcacactataatcctggcacttgcggaggctgaggtgg

SEQ ID NO: 587497 - DNA, 88 bp, Artificial Sequence
  ENSG00000172782_18 (sequence is synthesized)
caaaaattagcggggtgtggtggcacatgcttgtggtcccagctgcttggaagctgaggtgaggaccacctgagtctgcagaggttga

SEQ ID NO: 587498 - DNA, 120 bp, Artificial Sequence
  ENSG00000172782_19 (sequence is synthesized)
gggtgtggtggcacatgcttgtggtcccagctgcttggaagctgaggtgaggaccacctgagtctgcagaggttgaggctgcaatgaaccataatcgtgccactgcactccagcctggtg

SEQ ID NO: 587499 - DNA, 120 bp, Artificial Sequence
  ENSG00000172782_20 (sequence is synthesized)
ccgcagcagaggagccagggtgtctcgcaccttgaccccgggggcgggtgtccccaggcggcgcgtgactccgccccggcccgccccgcctcgcctgcaccgcagacacacgccccagtc

SEQ ID NO: 587500 - DNA, 120 bp, Artificial Sequence
  ENSG00000172785_0 (sequence is synthesized)
ccgggagtggcgtgctgggcgtgcgcggctgcggtacggcgtgttggtcccagcggttcagctgaggtagggacgtgctgtaggccggaatgttaccggctgttggatctgcggatgagg

SEQ ID NO: 587501 - DNA, 120 bp, Artificial Sequence
  ENSG00000172785_1 (sequence is synthesized)
aggaggatcctgcggaggaggattgtcctgaattggttcccattgagacgacgcaaagcgaggaggaggaaaagtctggcctcggcgccaagatcccagtcacaattatcaccgggtatt

SEQ ID NO: 587502 - DNA, 120 bp, Artificial Sequence
  ENSG00000172785_2 (sequence is synthesized)
agacaacacttctgaactatattttgacagagcaacatagtaaaagagtagcggtcattttaaatgaatttggggaaggaagtgcgctggagaaatccttagctgtcagccaaggtggag

SEQ ID NO: 587503 - DNA, 120 bp, Artificial Sequence
  ENSG00000172785_3 (sequence is synthesized)
gccaaggtggagagctctatgaagagtggctggaacttagaaacggttgcctctgctgttcagtgaaggacagtggccttagagctattgagaatttgatgcaaaagaaggggaaatttg

SEQ ID NO: 587504 - DNA, 120 bp, Artificial Sequence
  ENSG00000172785_4 (sequence is synthesized)
attacatactgttagagaccactggattagcagaccctggtgcagtggcttctatgttttgggttgatgctgaattagggagtgatatttatcttgatggtatcataactattgtggatt

SEQ ID NO: 587505 - DNA, 120 bp, Artificial Sequence
  ENSG00000172785_5 (sequence is synthesized)
caaaatatggattaaaacatttaacagaagagaaacctgatggccttatcaatgaagctactagacaagttgctttggcagatgccattctcattaataaaacagacctggttccagaag

SEQ ID NO: 587506 - DNA, 80 bp, Artificial Sequence
  ENSG00000172785_6 (sequence is synthesized)
gatgccattctcattaataaaacagacctggttccagaagaagatgtaaagaaattaagaacgacaatagatcaagagtt

SEQ ID NO: 587507 - DNA, 120 bp, Artificial Sequence
  ENSG00000172785_7 (sequence is synthesized)
cttcagcatgtgccaggaacacaacctcaccttgatcagagtattgttacaatcacatttgaagtaccaggaaatgcaaaggaagaacatcttaatatgtttattcagaatctcctgtgg

SEQ ID NO: 587508 - DNA, 120 bp, Artificial Sequence; identical to SEQ ID NO: 408643
  ENSG00000172785_8 (sequence is synthesized)

SEQ ID NO: 587509 - DNA, 120 bp, Artificial Sequence
  ENSG00000172785_9 (sequence is synthesized)
ctggaggagactccagtgagctggaaggatgacactgagagaacaaatcgattggtcctccttggcagaaatttagataaggatatccttaaacagctgtttatagctactgtgacagaa

SEQ ID NO: 587510 - DNA, 120 bp, Artificial Sequence
  ENSG00000172785_10 (sequence is synthesized)
acagaaaagcagtggacaacacgtttccaagaagatcaagtttgtacataacactagaggcatttcttatcaaaaggattggataataaaaataagtttctactgggtatatttcaagca

SEQ ID NO: 587511 - DNA, 120 bp, Artificial Sequence
  ENSG00000172785_11 (sequence is synthesized)
agcatttatttattactttagttacgaattccaatatactttaaaatggtatttgttttacagcatacataaaatgtagcaaatcagtactgtaaaacatttaacattcatacagttata

SEQ ID NO: 587512 - DNA, 120 bp, Artificial Sequence
  ENSG00000172785_12 (sequence is synthesized)
atatccttttttttaaagaatggtatttcacaaaaatatcttttgaaattggctttggagtttacatatactgaacatgaaagtttataataatgatgatacaactttcaacattgtcat

SEQ ID NO: 587513 - DNA, 120 bp, Artificial Sequence
  ENSG00000172785_13 (sequence is synthesized)
tttttcttagaacttcagctgattgcagagatataatgattacattgttattaaatttttttaacacaagtaagtgtcaccattttatgacatgaaataaaaggttatgactgttattga

SEQ ID NO: 587514 - DNA, 120 bp, Artificial Sequence
  ENSG00000172785_14 (sequence is synthesized)
tcttagaaacacaaagatcaaggctcagcagctaatagactcagcaacaggcagccaggagctctgaggctcacagctggcagtctagttccactcagtctctactggagaaattctttc

SEQ ID NO: 587515 - DNA, 120 bp, Artificial Sequence
  ENSG00000172785_15 (sequence is synthesized)
tttggaagtacagcagaggccttagacagaatctcactctggtttgagacagaatctcactctgtcccccaagttggagtgcggtggtgcgacctcggctcactgaaacctctgcctcct

SEQ ID NO: 587516 - DNA, 120 bp, Artificial Sequence
  ENSG00000172785_16 (sequence is synthesized)
cacccactgacccgttcccaatctgagcatatggatagggcccaaagcacatttaacagaagagaaacctgatggccttatcaatgaagctactagatccataaatggactaggacaaat

SEQ ID NO: 587517 - DNA, 86 bp, Artificial Sequence
  ENSG00000172785_17 (sequence is synthesized)
aaacacaaagatcaagaatctcactctggtttgagacagaatctcactctgtcccccaagttggagtgcggtggtgcgacggcgat

SEQ ID NO: 587518 - DNA, 120 bp, Artificial Sequence
  ENSG00000172785_18 (sequence is synthesized)
caaagaattggacaacttaaaatgacagctctctattctgaggacttgacacccaggctactgacattgttcttttcagttccacaaatgtgacagcatttaatgcaatagaagcaatga

SEQ ID NO: 587519 - DNA, 120 bp, Artificial Sequence
  ENSG00000172785_19 (sequence is synthesized)
tgcagactttcggacaaagtccttttcttggctgttataaaaactatatttggttttaaacagaaacacttgttttagtacaaatcatctttgtctactttcatttttctttattatttt

SEQ ID NO: 587520 - DNA, 120 bp, Artificial Sequence
  ENSG00000172785_20 (sequence is synthesized)
cgtgactgaaaaggagctttggaaatcactgcataaggcttgatttatttgcacaactttctttagggttgcagctagaacaaacctgtgtgctttgaaatgttaccttctgctctctgt

SEQ ID NO: 587521 - DNA, 120 bp, Artificial Sequence; identical to SEQ ID NO: 408678
  ENSG00000172785_21 (sequence is synthesized)

SEQ ID NO: 587522 - DNA, 120 bp, Artificial Sequence
  ENSG00000172785_22 (sequence is synthesized)
ttttacagatggagtagggtagggataactttccaggtataaggaagattttgtattccagggacctttgaattttttagaatggctagaaaacttggtattatgtagcacagaaaaagt

SEQ ID NO: 587523 - DNA, 120 bp, Artificial Sequence
  ENSG00000172785_23 (sequence is synthesized)
ggtatgactgaagagatagagaacttaccacaaagggtcttgaatgccatgatacatagtttggattttcttctgtagggagcaaggagttagtgaaggattttaaaagcaacatgcctc

SEQ ID NO: 587524 - DNA, 120 bp, Artificial Sequence
  ENSG00000172785_24 (sequence is synthesized)
ttgggaggtagattcaatgtgaggctaatctccgaggtataggaaatacaggaaggaggagcaacaggtcgggtagtggtggaagcaggtttggaaaatgtgattagttttgtaagcgtt

SEQ ID NO: 587525 - DNA, 120 bp, Artificial Sequence
  ENSG00000172785_25 (sequence is synthesized)
tttgagtttgaagtgccactggggaaggcttttggaaatttatttccagagttcaagactgagctatcattgcagtttgctcagctatttactgagctatctactgtcaatttggatagt

SEQ ID NO: 587526 - DNA, 120 bp, Artificial Sequence
  ENSG00000172785_26 (sequence is synthesized)
atctacagtttgcattgtagatactggatacttggattggctggtgcaccctgtttgtgagactcactggagtttgaagagatgaccactggaaaatatccctaagcagtagctgcaatt

SEQ ID NO: 587527 - DNA, 120 bp, Artificial Sequence
  ENSG00000172785_27 (sequence is synthesized)
ccacccccaccttggagagccaaaaccctcttcattttcactctcctgtccttggtcttaggctacttaaagcagcctttagacatagggaaaaattgaaagcctctcttttaagaaaaa

SEQ ID NO: 587528 - DNA, 120 bp, Artificial Sequence
  ENSG00000172785_28 (sequence is synthesized)
cattaggtacttctggaatagagagttcaagaaattaggagaaaaatgaacttttgaagctttttctttcccttttttgtttacttcattctcttactcagttttaaaatgctggtaatg

SEQ ID NO: 587529 - DNA, 120 bp, Artificial Sequence
  ENSG00000172785_29 (sequence is synthesized)
gtcttttttttctttttttttttttcttggcgattttaatgctttggaaaagatctcatggttttatctccaaaggaggaaattaatttgatgccatggaaattagttttctagtcgtat

SEQ ID NO: 587530 - DNA, 120 bp, Artificial Sequence
  ENSG00000172785_30 (sequence is synthesized)
gccttgaatgagtgaagaatttgtttttcatggtggtactaaatttggggaaagctatagaaactttcatctggaagcttacacttttcctcttttttgaaaatttggtgagagacttgg

SEQ ID NO: 587531 - DNA, 120 bp, Artificial Sequence
  ENSG00000172785_31 (sequence is synthesized)
atattttattgttttctgtaaaagagtgtaatttgttgtacaggtctaatattgatccttttttggaagtatggaaagaatctgagtataaagcagaattacctctggatggcatgtatt

SEQ ID NO: 587532 - DNA, 120 bp, Artificial Sequence
  ENSG00000172785_32 (sequence is synthesized)
ctcaaggacactgtcacagtgaaacagtttatttagaagcttgtgtttccaaagtgttgaatttgatattcacaaaattggcatgtgtaaactttattaaactttaagctatttcctaag

SEQ ID NO: 587533 - DNA, 87 bp, Artificial Sequence
  ENSG00000172785_33 (sequence is synthesized)
tatttttagtagagacggtttcgccacattggcccggttggtgtcaaactcctggcctcaagccgccgtgccccttgtctgtgacct

SEQ ID NO: 587534 - DNA, 120 bp, Artificial Sequence
  ENSG00000172785_34 (sequence is synthesized)
cccttgtctgtgacctgtcaatataaatatgctcagtagcggggggagggggaggtgaaaaaggaaatatgtttaatattaagactttggccttttagtgtaaactgatactcagaaatt

SEQ ID NO: 587535 - DNA, 120 bp, Artificial Sequence
  ENSG00000172785_35 (sequence is synthesized)
tcttcatagaacatttgcttctttgcttgatcatttttctaattctgtacatctaaaatgcccagaatttgagttgctgttatagtctactaacatagaactttggagtaataagatggg

SEQ ID NO: 587536 - DNA, 120 bp, Artificial Sequence
  ENSG00000172785_36 (sequence is synthesized)
aatttgtctctcttttgccaagacaagcattcgtaatctaacacagtattgttgccacgagtacgagtatgtgatagactgttgagaataaagaaagcaggcacagttggtcagtcctaa

SEQ ID NO: 587537 - DNA, 120 bp, Artificial Sequence
  ENSG00000172785_37 (sequence is synthesized)
gataaaggagatgtttttcttatatgtttgtgcattaaagaaaaaaaaatcttgaatctgaccaatgatgttttttttccttgtaagaaaatttaacaaatgtttggcaagcttctggaa

SEQ ID NO: 587538 - DNA, 120 bp, Artificial Sequence
  ENSG00000172785_38 (sequence is synthesized)
ggattgcaggcatgagccaccgcgcccggcctgtcctctgtggttttctgggcttatgttaaaattataactcaatcaccagtctttataaatttgcttttttatatttaaaccaaacct

SEQ ID NO: 587539 - DNA, 120 bp, Artificial Sequence
  ENSG00000172785_39 (sequence is synthesized)
tttgcttttttatatttaaaccaaacctaatgctaattgtgatatgttatttattctcacctgatttgaatcattggattcaattaaatgagtaattatcattaaataattctaagagaa

SEQ ID NO: 587540 - DNA, 120 bp, Artificial Sequence
  ENSG00000172785_40 (sequence is synthesized)
ataatgtctattcggatggtgggaattttcttcctacatgcagccccattctgaatgaatgaaatcaaatcacgtgaagatcagggtcctagagtaacttaatattttgtacattggtta

SEQ ID NO: 587541 - DNA, 120 bp, Artificial Sequence
  ENSG00000172785_41 (sequence is synthesized)
tttgactcctcatttttatattacatgttatatcaagggagggggtataaaagaaatacaaaaattgcagaggtatctggaatgtacctatttgttaattctatttgtcatttcttttgt

SEQ ID NO: 587542 - DNA, 120 bp, Artificial Sequence
  ENSG00000172785_42 (sequence is synthesized)
ttcatcttttgagtaataagctgcttggaaaagtttctgttctttagctgattttttagctataaaaatgtatttgaaaagctcataaatttcaggattgaaaagataattgaaagtttt

SEQ ID NO: 587543 - DNA, 120 bp, Artificial Sequence
  ENSG00000172785_43 (sequence is synthesized)
aaagaaacctaattcattgaagtaataaacaaataattttcaatcttgattcaactgtgattcaaatcttacaccatttgcccacttctatgaattttatgtataaaattttttaagtca

SEQ ID NO: 587544 - DNA, 120 bp, Artificial Sequence
  ENSG00000172785_44 (sequence is synthesized)
ttatgtataaaattttttaagtcagagttttttttcttgattaactggatgtatttcacagaatttccaactgctcacgttagttttcttccttttagagttgatctctctaatgtatta

SEQ ID NO: 587545 - DNA, 120 bp, Artificial Sequence
  ENSG00000172785_45 (sequence is synthesized)
aagtgaaaaatatatttgaaagggatatcatgtgccacttaaacagattaaccattcaggtcctcttttaaaactaaataagcttgtggtcaatgtttcatctttatcacgttacaacgt

SEQ ID NO: 587546 - DNA, 120 bp, Artificial Sequence; identical to SEQ ID NO: 330320
  ENSG00000172785_46 (sequence is synthesized)

SEQ ID NO: 587547 - DNA, 120 bp, Artificial Sequence; identical to SEQ ID NO: 330321
  ENSG00000172785_47 (sequence is synthesized)

SEQ ID NO: 587548 - DNA, 120 bp, Artificial Sequence
  ENSG00000172785_48 (sequence is synthesized)
attttcttgagtaatttaactgaatttacacagtttgcttcattgtattttcaaacaaatagaaaataaacttattaggaagcattttcttaaagtgtttcttgctgtcttttctatctg

SEQ ID NO: 587549 - DNA, 120 bp, Artificial Sequence
  ENSG00000172785_49 (sequence is synthesized)
ctctaatgttttggtccttttattgagtttttattgcttttgatgtcagggcttatttaatctctagtgcatgaaagtctcatatgtaaaaaatgattattctgaatttaatctgtcatt

SEQ ID NO: 587550 - DNA, 120 bp, Artificial Sequence
  ENSG00000172785_50 (sequence is synthesized)
ggtcatacttctaagtgttcaatcttataaaaaaaataaatgactatcaaaaaagagaaaaaccttacgttatgttctactagttaagttttcaaggacagtgttcactagtctaccata

SEQ ID NO: 587551 - DNA, 120 bp, Artificial Sequence
  ENSG00000172785_51 (sequence is synthesized)
gaattataaaaatgactacttgtactgttaattttgtgtattctagtgaattaaatctcttcggcatcatttactcccttaggtatttgactttgtgtcaaatgttttggcaaggataaa

SEQ ID NO: 587552 - DNA, 120 bp, Artificial Sequence
  ENSG00000172785_52 (sequence is synthesized)
attataacagactttcttgaacaaccaaaatataatctattaaggattttccttcacttttgataaaataagaaaaaaggaaattaaaaccttgcatcctaatgtaaaatagaattatat

SEQ ID NO: 587553 - DNA, 120 bp, Artificial Sequence
  ENSG00000172785_53 (sequence is synthesized)
ctttagctattatattaaactactatagttaatacattttatcattattttgtatgttggtttttaaaaatttcataaagctataaaaagatacttggtcagataaagtttcctctgctt

SEQ ID NO: 587554 - DNA, 120 bp, Artificial Sequence
  ENSG00000172785_54 (sequence is synthesized)
agataaagtttcctctgcttttaattttgataaagtattatgtatatgatttctttttacctattatatatatgcatctattgttttctcactggtaaatatgggacggacattttgtta

SEQ ID NO: 587555 - DNA, 120 bp, Artificial Sequence
  ENSG00000172785_55 (sequence is synthesized)
gaaggttagaagtgagttaaattttcacattcccaagggtacttttgtctcgggttgttgaatatattttaaagtgtttataataatcacttcaaaatatttaggtaattaactgtaaat

SEQ ID NO: 587556 - DNA, 120 bp, Artificial Sequence
  ENSG00000172785_56 (sequence is synthesized)
tgagattattaataaccagaatatagttctgtgatatattgtaaatagatgtattagaggaatatctaaaatgaggattaaagcttttgttagtattaaaccaaaaactttttttggttt

SEQ ID NO: 587557 - DNA, 120 bp, Artificial Sequence
  ENSG00000172785_57 (sequence is synthesized)
gttgagaattttctttagtttttattgggttatgtatccttccagaatgggttctttgccacttgtgtgccctattcatttcttcattttgtgttctttcttgctttttattccctgtat

SEQ ID NO: 587558 - DNA, 120 bp, Artificial Sequence
  ENSG00000172785_58 (sequence is synthesized)
gtgcgtgtttctttttgtcaggctgtaatacatatgcatacatgtttcttcttgatgtgggagaacttctatgtggtgctgatgggaaatatttttaatactccactctccttacccaag

SEQ ID NO: 587559 - DNA, 120 bp, Artificial Sequence
  ENSG00000172785_59 (sequence is synthesized)
tttgtttttctcctgagccctagtttgaaagctgtatattgttggagtggagggaaagagaagggaaaagtggtgattcagagagccaaatggggcaatgtggcttttaggctctgctct

SEQ ID NO: 587560 - DNA, 120 bp, Artificial Sequence
  ENSG00000172785_60 (sequence is synthesized)
cttgaagtaccaagtatttcactcttgggtctgcccaactgcttatgaataaaattcctttgccttgtatggggacatcattcgacctcagagctctcatttctctttgttctgagccct

SEQ ID NO: 587561 - DNA, 120 bp, Artificial Sequence
  ENSG00000172785_61 (sequence is synthesized)
agaatgtgacctgaccttctccttcccaaagcaaagagatggttaaaactcactcttgaaatttttttgttgacttttccttgtgttgcttattcattcctcggctctactttttgtcat

SEQ ID NO: 587562 - DNA, 120 bp, Artificial Sequence
  ENSG00000172785_62 (sequence is synthesized)
caagtggatgagtgagcaagtgactaaaatcttctgtgaattattcagtgtatggtgcttgccagtgcatctgagaatctagggactttctgaaatagtacttccttgctatgaggactg

SEQ ID NO: 587563 - DNA, 120 bp, Artificial Sequence
  ENSG00000172785_63 (sequence is synthesized)
tctgaaatagtacttccttgctatgaggactgaagttgcattagaatccttttcaatgaagatcagatgtcctgagtacaattcttactattggagttgatctctctaatgtattagatc

SEQ ID NO: 587564 - DNA, 120 bp, Artificial Sequence
  ENSG00000172785_64 (sequence is synthesized)
acgaaatgataagtgtgttaagtgcctacagatccatgttgtatacacagaatattttttactctgattgttgccctgtagaaacttaaggtataaggttgagctgcttcaagaacgtta

SEQ ID NO: 587565 - DNA, 120 bp, Artificial Sequence
  ENSG00000172785_65 (sequence is synthesized)
gggaatcacatatattgttgatggctaattgttatataaatggtaatacataaaattagtccccagtgcttgcagaatatagttcacagttaatagactgatattcagggtcttcgcact

SEQ ID NO: 587566 - DNA, 120 bp, Artificial Sequence
  ENSG00000172785_66 (sequence is synthesized)
ccatctttcttttcctgtcttctctttgactctttcctaatgtcagtcttccctaactttacccaggatggttaattcactttcccatggatgcatcctgtcagttcctgtctttactcg

SEQ ID NO: 587567 - DNA, 120 bp, Artificial Sequence
  ENSG00000172785_67 (sequence is synthesized)
taatgtattctcactctgccaatccctgagttctttcttgttctgctttttttttttttaatttattctatagagcctattctgtctctccccccttcctatgtgaagtcttccctgact

SEQ ID NO: 587568 - DNA, 120 bp, Artificial Sequence
  ENSG00000172785_68 (sequence is synthesized)
cagcataggacaatcaggacaatatgaatgatgctcaaatatgtgctaacagtcattttgctgactgttctggagactcccattccttttgaaaacaaagatgggcttttcaaatgaggt

SEQ ID NO: 587569 - DNA, 120 bp, Artificial Sequence
  ENSG00000172785_69 (sequence is synthesized)
tatagttcaggggctttgttttgaattattttgtaagacctgaactaataaaagccctatacagagagacattcggtagctattagtattggttatctttaatgtgtacaatgctttgag

SEQ ID NO: 587570 - DNA, 120 bp, Artificial Sequence
  ENSG00000172785_70 (sequence is synthesized)
cgtgatggctcaaaattactattcttagtatttataagttctactgacattagattttgaatctgtcatctcagttcatatagtatatattatcaattgaatcaataaaggtaaggctca

SEQ ID NO: 587571 - DNA, 120 bp, Artificial Sequence
  ENSG00000172785_71 (sequence is synthesized)
ttaggagattatttgccatgattaatgattgtggaagaaagaaattcatattttttccacatatttcatcttattttaatagtaatgtccttaaactttactataaaaaaatataatgtc

SEQ ID NO: 587572 - DNA, 120 bp, Artificial Sequence
  ENSG00000172785_72 (sequence is synthesized)
tccacgtggagggtaggtattgttgcgtagtgttgaagatcacagaccttggaatctgcttgggttctaatccttggtctgtttctcattgtcttcttagggagcttatttaccctttta

SEQ ID NO: 587573 - DNA, 120 bp, Artificial Sequence
  ENSG00000172785_73 (sequence is synthesized)
aagcctcctctgtaaaaggcataatgcctatcataagtttgctttgagtattacatgagacaatgttggtaaactttgcacagtgctgacacatagtaagtgctctgttagctattatta

SEQ ID NO: 587574 - DNA, 120 bp, Artificial Sequence
  ENSG00000172785_74 (sequence is synthesized)
tgtaatttttttcttagcttacatagtaagttcaaggtatagtaaaaaagggaagaaagaaaaagatggctgattttgaaaaggagaaagtgatgaatgaagattgcttttacatttttt

SEQ ID NO: 587575 - DNA, 120 bp, Artificial Sequence
  ENSG00000172785_75 (sequence is synthesized)
gacactggtcttctaatcttgtttctcttcataaatcttgtgcaccattgtgattgctaagaagaacacaatctatttagcaaatgtttttggcataaaaggaatgataattattacttg

SEQ ID NO: 587576 - DNA, 120 bp, Artificial Sequence
  ENSG00000172785_76 (sequence is synthesized)
acttttatatccttatagagacctaagctaaatctctgacactgacaatattgactattagccagcttgttaacagtactagaaatgaatttggaagaagcaatttgataaattacacac

SEQ ID NO: 587577 - DNA, 120 bp, Artificial Sequence
  ENSG00000172785_77 (sequence is synthesized)
ccttttggcttttaccctccctttatatcagacttgtgactgactcagaatgatatttggggaggtgaaaaaaggtaaacatgtttgagaggaattagccatcagactagagtgtattca

SEQ ID NO: 587578 - DNA, 120 bp, Artificial Sequence
  ENSG00000172785_78 (sequence is synthesized)
ataataaacattaaataattgacaaatatgcttgattctaatataagaaagatctaagtgcatttaaaaagaattggatccaaaatgttgtttggaatgctcttaataagttagtttggc

SEQ ID NO: 587579 - DNA, 120 bp, Artificial Sequence
  ENSG00000172785_79 (sequence is synthesized)
atatttggctagtacatttgcctgtcttcaaaactaagaatacaaagccatgataacactgtgtaagtgtttgcttaatgaggaagaaaagacttccaaacactcgagagggtaactcag

SEQ ID NO: 587580 - DNA, 120 bp, Artificial Sequence
  ENSG00000172785_80 (sequence is synthesized)
ttagagaccactggattagcagaccctgagtgataattcactatttatgattgaatgattatcatattaaagaggtatcataactattgtggattcaaaatatggattaaaagtgaaata

SEQ ID NO: 587581 - DNA, 120 bp, Artificial Sequence
  ENSG00000172785_81 (sequence is synthesized)
tatttgtaagaacagaagttgttaaaaataaggacatgtaggaagagcagagacgttctacctctaagtacagttgtcccttggcatccatggggtattagttccggaatctctgaggat

SEQ ID NO: 587582 - DNA, 120 bp, Artificial Sequence
  ENSG00000172785_82 (sequence is synthesized)
catggggtattagttccggaatctctgaggataccaaaatctattaatgttcaagtcccttacataaaatggtgtagtatttgcctataagctatgcacatcctcccatatactttaaat

SEQ ID NO: 587583 - DNA, 120 bp, Artificial Sequence
  ENSG00000172785_83 (sequence is synthesized)
gttacttgatatttgggtatttaagtcatgaaaggtatttcttctaggaagcagtgattctaaagtgtatgcttaaccagtcagttgagtgtctactcttgtgtgttcacaagtgtgcac

SEQ ID NO: 587584 - DNA, 120 bp, Artificial Sequence
  ENSG00000172785_84 (sequence is synthesized)
tggctttttaatatttaaaaagccttcttagtgttttatagttgccaaaaaatacatggagtctttaccttgaagttcctgacaaattcttttattaaattttgactttcattttctcta

SEQ ID NO: 587585 - DNA, 120 bp, Artificial Sequence
  ENSG00000172785_85 (sequence is synthesized)
gaacagctggggaattaatttggtatgcattctcaggagccactcatctgctggcagaggtagcagaagaatgcccttagtgtaagtcctctacaaccatacaccaaatgtgctccctgc

SEQ ID NO: 587586 - DNA, 120 bp, Artificial Sequence
  ENSG00000172785_86 (sequence is synthesized)
atttcaaattccattgtagaaagtctctgataatctcacttatactatgagccattcctcagtatctgtcctcttcctgttagtgttctacaattcctttctccttaatttttctccgct

SEQ ID NO: 587587 - DNA, 120 bp, Artificial Sequence
  ENSG00000172785_87 (sequence is synthesized)
ttacaaaatgtcacacagacaagtgcataatacttaaacaagcttttaaaaataatgctcataaatagctttggttctgtcataatattcgtatttataaacattttaagtcaattctct

SEQ ID NO: 587588 - DNA, 120 bp, Artificial Sequence
  ENSG00000172785_88 (sequence is synthesized)
tcttttgttttcatttcagaaatatccatgtcctgaataaaagttgtgtcttgattagtttattatgtaacaatttagtgtgtttgacatttctaacttttatttctaacatttgcttta

SEQ ID NO: 587589 - DNA, 120 bp, Artificial Sequence
  ENSG00000172785_89 (sequence is synthesized)
aattcttactattgggtcctgaatcttacattaaatattctctcaaattccttgaggcatagcaacttgagcttaccagtttagaaactggagatttgggctgggcgcggtggctcacgc

SEQ ID NO: 587590 - DNA, 120 bp, Artificial Sequence
  ENSG00000172785_90 (sequence is synthesized)
agaatgaattaaataatgaggaccccttcatcagggtttttgagtgagttttttaaaatacaaggtagtagtttgtgtaaatactaaatccattggtacctgtgcagaatgtaggaaatg

SEQ ID NO: 587591 - DNA, 120 bp, Artificial Sequence
  ENSG00000172785_91 (sequence is synthesized)
gagttgctaattccaaaaaaacagcacatatgctgaggaaagtataatacctaatatatatggtttaagcaatgtaaaattccatgaatatgttccttttcatcttaaaatttgtgattt

SEQ ID NO: 587592 - DNA, 120 bp, Artificial Sequence
  ENSG00000172785_92 (sequence is synthesized)
tctgcaaatcaatacacaatgagctcatattcagataaatataatagtttttctttatttcatcattgttcattgattgcaacccatttctaaaacaaattatttaatataaccaaactc

SEQ ID NO: 587593 - DNA, 120 bp, Artificial Sequence
  ENSG00000172785_93 (sequence is synthesized)
ctttaacttctcaacttttcccacgaaaactgtgaaacattatataaaatctttaatcaataggatatgatacatatttcatcattttgtttcaggttttggttgtgataaataacactg

SEQ ID NO: 587594 - DNA, 120 bp, Artificial Sequence
  ENSG00000172785_94 (sequence is synthesized)
ttgtaattcacaaataattggaattaagtaattttctcagcttaagagtttgtattttttaagtgaatatcagtaattaatccattaacattgatgctctatttctgcttttaagtttga

SEQ ID NO: 587595 - DNA, 120 bp, Artificial Sequence
  ENSG00000172785_95 (sequence is synthesized)
agtactgttgcttctccattcccgagttagtccatctcctgattgaatttcattgtcaggcagtcttttcaagttacaggtactgcatgcattctttgggttcttatacacttcattgat

SEQ ID NO: 587596 - DNA, 120 bp, Artificial Sequence
  ENSG00000172785_96 (sequence is synthesized)
tcaaaatatttgtcttttgtttttatattacttgaaggattacttggctaggtataaaatttatcagtcacactttattccccctcaactttgtaaatgttgttccataatctcctagtg

SEQ ID NO: 587597 - DNA, 120 bp, Artificial Sequence
  ENSG00000172785_97 (sequence is synthesized)
tttgattggctggatttctttgtccaatgttttctctttttattaggaagaatttgtgagtattatagtctctgagtttcaatgcttgctgttttctttaatgcttgagaatgtctgtct

SEQ ID NO: 587598 - DNA, 120 bp, Artificial Sequence
  ENSG00000172785_98 (sequence is synthesized)
attgctttcgttcctgaaaaataacttgtttgggaacactttcattagaactttgtggtccctgttttattattttgggacatctagtgttactgtagaaaagtctgatttttctcccta

SEQ ID NO: 587599 - DNA, 120 bp, Artificial Sequence
  ENSG00000172785_99 (sequence is synthesized)
cctccttgaaggcaatttttttttttaatctaaaatgcctgagagttttcttctttatttttgaaattcagtaatataaacaaggtatatctaagtgtcacttataatcatttttcccta

SEQ ID NO: 587600 - DNA, 120 bp, Artificial Sequence
  ENSG00000172785_100 (sequence is synthesized)
aattatagtatgcccttagttcttctaagaacattttccttgtttattaccatgaatacttttttttggtcaaattattagatcctctacttcatgacaccagtttttttaatactgaat

SEQ ID NO: 587601 - DNA, 120 bp, Artificial Sequence
  ENSG00000172785_101 (sequence is synthesized)
tttcttttgttgttcgtatgtattctaattgctttgatttgtcttttacctttgcatttactgtgatcatctgaagcctttctttttgtcaataattctgttttctccagtgtctgtcct

SEQ ID NO: 587602 - DNA, 120 bp, Artificial Sequence
  ENSG00000172785_102 (sequence is synthesized)
gtttttgatattttaaatgaattaattggttaagtcattgtgttatataggctctaagtttctttagcgctacaaacgcattttcatcttattctgcttcttcttgcttttgagcttgtt

SEQ ID NO: 587603 - DNA, 120 bp, Artificial Sequence
  ENSG00000172789_0 (sequence is synthesized)
ggttgggctttgccaacatatcgagatgcttttcgccggcttccatcactaacctcccggaggtcatcaagccaaatttatgagtggccgctcgagtcacgtgactctatttaaggctcc

SEQ ID NO: 587604 - DNA, 120 bp, Artificial Sequence
  ENSG00000172789_1 (sequence is synthesized)
cttatttgggaagagcgcataggataaagaaagagatatctccacctataaattgtccactttggagaacaaaaaacccctcaacttcaaagagtcacaaatcacccttaatcaaaaagg

SEQ ID NO: 587605 - DNA, 120 bp, Artificial Sequence
  ENSG00000172789_2 (sequence is synthesized)
gtgcagaaatttttttgggccctccccgccatgagctcctacgtagccaattcattctataagcagagccccaatatccctgcctataacatgcaaacttgtgggaactatggatcggcc

SEQ ID NO: 587606 - DNA, 120 bp, Artificial Sequence
  ENSG00000172789_3 (sequence is synthesized)
tcagaggtgcaggcatccaggtactgctacggcggattggacttaagcatcactttcccaccgcctgcgccttccaactctctccacggggtagacatggctgccaacccccgggctcac

SEQ ID NO: 587607 - DNA, 120 bp, Artificial Sequence
  ENSG00000172789_4 (sequence is synthesized)
cccgaccgccccgcctgcagcgccgcggccgctccgggacacgctccgggcagagacgaagcggctcctctgaaccccgggatgtacagtcagaaggcggctcgcccggcgctggaggag

SEQ ID NO: 587608 - DNA, 120 bp, Artificial Sequence
  ENSG00000172789_5 (sequence is synthesized)
cgagctaagagcagtggggagatcaaagaggagcaggcgcagacagggcagcccgccggactgagccagccaccggccccgccacagatttacccgtggatgaccaaactgcacatgagc

SEQ ID NO: 587609 - DNA, 120 bp, Artificial Sequence
  ENSG00000172789_6 (sequence is synthesized)
cacgagacggacggcaagcggtcccgaaccagttacacgcgctaccagactctggaactcgagaaagaattccactttaaccgctacctcactcgccgcaggcgcatagagatcgccaac

SEQ ID NO: 587610 - DNA, 120 bp, Artificial Sequence
  ENSG00000172789_7 (sequence is synthesized)
gtgtctcaatgagagacagatcaagatctggttccagaaccgcaggatgaagtggaagaaagattccaaaatgaaaagcaaagaggctctttagaggcagcgggggaggcccgcagagcg

SEQ ID NO: 587611 - DNA, 120 bp, Artificial Sequence
  ENSG00000172789_8 (sequence is synthesized)
cgcccctagccggttcctgtccctgcgcctttccttttcgcctttcctctctatatttcgggtcgggggcaggtgctggagcactgggctcccgggccccacagacaaaagcgcttttcc

SEQ ID NO: 587612 - DNA, 120 bp, Artificial Sequence
  ENSG00000172789_9 (sequence is synthesized)
ttggcattccgcatccctaccgacccagggttcccgcggggctgtcggcgctgccccatctcccctcagctcggctcagctcggtacccggggcccagggcaagctccgcaggacttccc

SEQ ID NO: 587613 - DNA, 120 bp, Artificial Sequence
  ENSG00000172789_10 (sequence is synthesized)
cggagggctgcggcgtacaggctggcgcagaacgaaccttggcctgggccgtatctccggctcccagcctcagcgcggccctcccgagttaaggtgggcccggcccgcgccacaggaccc

SEQ ID NO: 587614 - DNA, 120 bp, Artificial Sequence
  ENSG00000172789_11 (sequence is synthesized)
tcgccggaccctctaacctcgccctctcctttgttcccggctggacgggttagacagccaaaggctggcgagagtctggccctagactcggggtgcttccttgtagcgactaaactagat

SEQ ID NO: 587615 - DNA, 120 bp, Artificial Sequence
  ENSG00000172789_12 (sequence is synthesized)
tttcacttatgaatgatttgcatatgaaaggagagcatcggcctagggcccccacagttgctctatgctttccaaaccttatctccacaacctcttccccccaaaacccgggaacctccc

SEQ ID NO: 587616 - DNA, 120 bp, Artificial Sequence
  ENSG00000172789_13 (sequence is synthesized)
cagcctgcgcctgctgcatgccctctcaggccggcagccccagcctgctagctagctcaactagtggggtttcctggcactggaccccagcaagtggtcctagaggccctttgctgtccc

SEQ ID NO: 587617 - DNA, 120 bp, Artificial Sequence
  ENSG00000172789_14 (sequence is synthesized)
atagtccctgccacgaatttctgtgccctcctgacccattgctgttgtccaactatttattgactctgggtccttcctgaaactatattttgtcatatcaaataaagagagaacaggact

SEQ ID NO: 587618 - DNA, 120 bp, Artificial Sequence
  ENSG00000172794_0 (sequence is synthesized)
gttcgctcgggatcaggaacggtgagctcctgggaccgcaatgccctgagaacgcagccgggtgctgagcctccggagtccggtagctgaatgaaatacgcagggatcaccagccggacc

SEQ ID NO: 587619 - DNA, 120 bp, Artificial Sequence
  ENSG00000172794_1 (sequence is synthesized)
caaatcttgcgtccctgccagcatcctggagtcctaagaggcagggattggagcggacaggatctcagaactctggtcccgggcgcacaacggcggagtcgctgttcctggtgctgaaac

SEQ ID NO: 587620 - DNA, 120 bp, Artificial Sequence
  ENSG00000172794_2 (sequence is synthesized)
gctcagtcctggaagaacgtggccgcctgcccgcctggtaccgcgccgcggccgctgcggggaactgtccagtgctgaaaacggatgcggcccggcccgcagagctcagacccaagcctg

SEQ ID NO: 587621 - DNA, 120 bp, Artificial Sequence
  ENSG00000172794_3 (sequence is synthesized)
ccgcacccagcggagctcgaaccgagctcctggaagcgctgacgcagagcgcagggagagccggagcggcgagctccaagcctggcatggacctgcagagacccgattcctaccagggag

SEQ ID NO: 587622 - DNA, 120 bp, Artificial Sequence
  ENSG00000172794_4 (sequence is synthesized)
gagctggccctgacttcaacgaccacgtcctgcataagaccatcctggtgggtgacagtggtgtgggaaagacgtctctgctggttcagttcgatcagggcaagttcatccccggctcct

SEQ ID NO: 587623 - DNA, 120 bp, Artificial Sequence
  ENSG00000172794_5 (sequence is synthesized)
tctcggccactgtgggcatcggattcacgaacaaggtggtgactgtggatggcgtgagagtgaagctgcagatctgggacaccgctgggcaggaacggttccgaagcgtcacccatgctt

SEQ ID NO: 587624 - DNA, 120 bp, Artificial Sequence
  ENSG00000172794_6 (sequence is synthesized)
attacagagatgctcaggccttgcttctgctgtatgacatcaccaacaaatcttctttcgacaacatcagggcctggctcactgagattcatgagtatgcccagagggacgtggtgatca

SEQ ID NO: 587625 - DNA, 120 bp, Artificial Sequence
  ENSG00000172794_7 (sequence is synthesized)
tgctgctaggcaacaaggcggatatgagcagcgaaagagtgatccgttccgaagacggagagaccttggccagggagtacggtgttcccttcctggagaccagcgccaagactggcatga

SEQ ID NO: 587626 - DNA, 120 bp, Artificial Sequence
  ENSG00000172794_8 (sequence is synthesized)
atgtggagttagcctttctggccatcgccaaggaactgaaataccgggccgggcatcaggcggatgagcccagcttccagatccgagactatgtagagtcccagaagaagcgctccagct

SEQ ID NO: 587627 - DNA, 120 bp, Artificial Sequence
  ENSG00000172794_9 (sequence is synthesized)
gctgctccttcatgtgaatcccagggggcagagaggaggctctggaggcacacaggatgcagccttccccctcccaggcctggcttattccaagaggctgagccaatggggagaaagatg

SEQ ID NO: 587628 - DNA, 120 bp, Artificial Sequence
  ENSG00000172794_10 (sequence is synthesized)
gaggactcactgcacagccgcttcctagcagggagctatactccaactcctacttgagttcctgcggtctccccgcatccacagggagggtaaaacacttagcttttattttaatagtac

SEQ ID NO: 587629 - DNA, 120 bp, Artificial Sequence
  ENSG00000172794_11 (sequence is synthesized)
ataatttaataccaaaaaaggcgcctggatccccaaaaaaccgaggctgggagctagtggcccttttgctttctaggacttggggggccggccctccctcctaagcataacaaaggtggt

SEQ ID NO: 587630 - DNA, 120 bp, Artificial Sequence
  ENSG00000172794_12 (sequence is synthesized)
gttgctccagctcagccccaggggacacagatgcactttgggggtgagggcaggtaatgactccatcgcaccctcagttcagctggacagaggctcaggtgaccccagccttcactgtct

SEQ ID NO: 587631 - DNA, 120 bp, Artificial Sequence
  ENSG00000172794_13 (sequence is synthesized)
acctctcgtccagggacatgacgggcacgccaggcgccgttgccacccgggatggcgaggcccccgagcgctccccgccctgcagtccgagctacgacctcacgggcaaggtgatgcttc

SEQ ID NO: 587632 - DNA, 120 bp, Artificial Sequence
  ENSG00000172794_14 (sequence is synthesized)
tgggagacacaggcgtcggcaaaacatgtttcctgatccaattcaaagacggggccttcctgtccggaaccttcatagccaccgtcggcatagacttcaggaacaaggtggtgactgtgg

SEQ ID NO: 587633 - DNA, 120 bp, Artificial Sequence
  ENSG00000172794_15 (sequence is synthesized)
gctatctctggccttactaacacccccctggaggcatgccccttttctccagcacacaagcacattggggcacctggaaatattggttccaggctcctgttctctggacttcagatcctg

SEQ ID NO: 587634 - DNA, 120 bp, Artificial Sequence
  ENSG00000172794_16 (sequence is synthesized)
ggggagcccctcccccccctgaatccctggcttagctaccttcctgcctgtgcacctaaaaacctcaggtcagaactaggaaaagagttttgtttttatttttttgaaatggagtctcgt

SEQ ID NO: 587635 - DNA, 120 bp, Artificial Sequence
  ENSG00000172794_17 (sequence is synthesized)
tctgtcgcccaggctgaggtgcagtagtgcaatctccgctcactacaacctccactccctggggctcaagcgatcctcccacctcagccgccgaagtagctgggactataggtgtgtacc

SEQ ID NO: 587636 - DNA, 120 bp, Artificial Sequence
  ENSG00000172794_18 (sequence is synthesized)
ttacacgcagaaggcaccatgcccaggctagatgtgtcttatcccaatcctttggcaggcatgcagctccacaggcgatttcttcaagcagctgaagtgtttagccctcctgggttaaga

SEQ ID NO: 587637 - DNA, 120 bp, Artificial Sequence
  ENSG00000172794_19 (sequence is synthesized)
gccagataaggagaaatccctttcctaggtttggaatgtgttgtgaaaaaaaagagaaatccctggctcctggagctggtgggagacaagattaagcaaacctcccctgacatgtatccc

SEQ ID NO: 587638 - DNA, 120 bp, Artificial Sequence
  ENSG00000172794_20 (sequence is synthesized)
tttgaccccaagctctgcctcctccctgaccacccatgccctttcctttaacttctcaaacagataccagggcctaaactgctttacctcccctcctactgagtcaggttaggtggtggg

SEQ ID NO: 587639 - DNA, 120 bp, Artificial Sequence
  ENSG00000172794_21 (sequence is synthesized)
aggtcacccatttccgagttaaaccaatgcaatatgagtaaaacaaagtcatgtgggtatgtctggggtagagagaggggtagcaagttcatgtgtcctccttggtcacatatctcccaa

SEQ ID NO: 587640 - DNA, 120 bp, Artificial Sequence
  ENSG00000172794_22 (sequence is synthesized)
agctccgatccctgccatgggaagtggacaggaaacatgaggtcatgacctgcaggcatctttactgcagctctgccggcctggagggggagagggggaggaagaagtatgcgctgcaca

SEQ ID NO: 587641 - DNA, 120 bp, Artificial Sequence
  ENSG00000172794_23 (sequence is synthesized)
tttctgaggctactgcatttgctttcaaggcagaaatcttgctctgagcagtcagcggctccagtttgggcccgataaggaagttctccgtggcctccctcaggcagagcagggaggagg

SEQ ID NO: 587642 - DNA, 120 bp, Artificial Sequence
  ENSG00000172794_24 (sequence is synthesized)
ctgacattgccagtctcttctggggcccaaggcaggttgcaggagatccaatcccatagacagctctgggcctcttgcatttgagtttttcagaattaaactgcagtattttggaaagca

SEQ ID NO: 587643 - DNA, 120 bp, Artificial Sequence
  ENSG00000172794_25 (sequence is synthesized)
gactacgggaactcttccgcagcagacggggtccccgcggcccgctcccccaggggcaagcaagcgaccacaggggaccggtcccggggctggatgtggctcatgtccgaagcgcacgga

SEQ ID NO: 587644 - DNA, 120 bp, Artificial Sequence
  ENSG00000172794_26 (sequence is synthesized)
cagcccagccctgcacttcctcagccctagccggccccataaccacccaagaacagttatctaggcatccttcctgaaaaggactctgcagcctccagctcaggggtcagacatatctgg

SEQ ID NO: 587645 - DNA, 120 bp, Artificial Sequence
  ENSG00000172794_27 (sequence is synthesized)
aggcttctgcccatcccatctgccccttccagggaaagtccaagttgttgcctgagaaatcaaggggtgcccagttctcagcccccattagagcagagtgaacagggtcccaggtcaggg

SEQ ID NO: 587646 - DNA, 120 bp, Artificial Sequence
  ENSG00000172794_28 (sequence is synthesized)
gctaagagtgcaaagggttagccccaactgctgtcctattccaagaccctttaccaaaggtgagatcccagagctgggagctacactgggcagaaaccctggccccaggccaatcacacc

SEQ ID NO: 587647 - DNA, 120 bp, Artificial Sequence
  ENSG00000172794_29 (sequence is synthesized)
tgcctgcagtcccttgggccaccagcagagggcaggcaacgcctgcttctggggcaaaatatgggcccgctggggcggaggcctccttccccagagtgacccatttgggcttgacaggcg

SEQ ID NO: 587648 - DNA, 120 bp, Artificial Sequence
  ENSG00000172794_30 (sequence is synthesized)
gatatgagcagcgaaagagtgatccgttccgaagacggagagaccttggccagggtaagtgattgtctgtgggacagggtgaagggtgggggcaacccgacgctggccctgaggacactc

SEQ ID NO: 587649 - DNA, 120 bp, Artificial Sequence
  ENSG00000172794_31 (sequence is synthesized)
gggcagggcggcacactccaggaatccagtagggcccggcccctggcccagcccctggacacacctgcattctgcaggctgaggtccatttgctctgggagcactgggccactgggagag

SEQ ID NO: 587650 - DNA, 120 bp, Artificial Sequence
  ENSG00000172794_32 (sequence is synthesized)
ttcgccccatctcccaaataagtgggcccttgtgctgtgaggaagaccaaagcctcagggaagataagagatatggagatgggagggggaggacaaggggcagagagtagggtctagctg

SEQ ID NO: 587651 - DNA, 120 bp, Artificial Sequence
  ENSG00000172794_33 (sequence is synthesized)
aaagctctcccctggtgggacattctgggcacaaccaacaggccgggggaaatgagaggtgatccatactaaagggtcaaagtccccgcaccaggcagaggccccaaaacaccgcagcgt

SEQ ID NO: 587652 - DNA, 120 bp, Artificial Sequence
  ENSG00000172794_34 (sequence is synthesized)
ttcatcccctgccaggagagcatagtagctcacatttattgagttcttagtacacgctgggcactgttctaggctttttacatgaattaactcattaaatactcagaacaaaaccatgag

SEQ ID NO: 587653 - DNA, 120 bp, Artificial Sequence
  ENSG00000172794_35 (sequence is synthesized)
gcaggtactattataatattatctccattttgtggacacttaggaaagattaatttgcccgagtttgcacgactaataattttcagaatcgagatttgaatcctggagcctgtgctccta

SEQ ID NO: 587654 - DNA, 120 bp, Artificial Sequence
  ENSG00000172794_36 (sequence is synthesized)
accaaaccaccatctgcctctcctgagcccattgtccttaacttcttgcggtcatgtgtgctggagagaatgtgatcaaagccctggaccttctccctaggaaaacgcaggtaaacagaa

SEQ ID NO: 587655 - DNA, 120 bp, Artificial Sequence
  ENSG00000172794_37 (sequence is synthesized)
ttttgcatatttcagggactttggggacacctaagacccatctactgtcgacctcagacttagaagctctatttatctcatacatcctggagagaattgtccagggacaaaaacagaagc

SEQ ID NO: 587656 - DNA, 120 bp, Artificial Sequence
  ENSG00000172795_0 (sequence is synthesized)
ctcgtctccgttggagtcgtctctgccgcggcttcctcggctgccagctctccggcgagccggagtcctagtgccgtaccgtcagtccccggccgcgcggagccgggatgcactgttcct

SEQ ID NO: 587657 - DNA, 120 bp, Artificial Sequence
  ENSG00000172795_1 (sequence is synthesized)
gctgtgggtcctcatcatggagaccaaacgggtggagattcccggcagcgtcctggacgatctctgcagccgatttattttgcatattcccagcgaggaaagagacaatgcaatccgagt

SEQ ID NO: 587658 - DNA, 120 bp, Artificial Sequence
  ENSG00000172795_2 (sequence is synthesized)
gtgttttcagattgaacttgcccattggttttacttggatttctacatgcagaacacaccaggattacctcagtgtgggataagagactttgctaaagctgtcttcagtcattgtccgtt

SEQ ID NO: 587659 - DNA, 120 bp, Artificial Sequence
  ENSG00000172795_3 (sequence is synthesized)
tttgctgcctcaaggtgaagatgtggaaaaagttttggatgaatggaaggaatataaaatgggagtaccaacatatggtgcaattattcttgatgagacacttgaaaatgtactactagt

SEQ ID NO: 587660 - DNA, 120 bp, Artificial Sequence
  ENSG00000172795_4 (sequence is synthesized)
tcaggggtacctagcaaaatcaggctggggatttccaaaaggaaaagtaaataaagaagaagctcctcatgattgtgctgctagagaggtctttgaagaaactggttttgatatcaaaga

SEQ ID NO: 587661 - DNA, 120 bp, Artificial Sequence
  ENSG00000172795_5 (sequence is synthesized)
ctatatttgtaaggatgattacattgaacttcgaatcaatgaccagcttgctcgtttgtacatcattccaggaattccaaaagacacaaaatttaacccaaaaactagaagagaaattcg

SEQ ID NO: 587662 - DNA, 120 bp, Artificial Sequence
  ENSG00000172795_6 (sequence is synthesized)
gaacattgagtggttctctattgagaaattgccttgtcatagaaatgatatgacccccaaatccaaacttggtttggcacctaacaaattttttatggccattccctttatcagaccatt

SEQ ID NO: 587663 - DNA, 120 bp, Artificial Sequence
  ENSG00000172795_7 (sequence is synthesized)
aagggactggctttctcgaagatttggcgattcctcagacagtgacaatggattttcctcaactggtagcacgccggctaaacccactgtggaaaaattgagtcgaaccaaattccgcca

SEQ ID NO: 587664 - DNA, 120 bp, Artificial Sequence
  ENSG00000172795_8 (sequence is synthesized)
cagtcagcagttatttcctgacggttctcctggtgaccagtgggtaaagcacaggcaaccactgcagcaaaagccatataataatcattctgaaatgtctgaccttttaaaaggaaagaa

SEQ ID NO: 587665 - DNA, 120 bp, Artificial Sequence
  ENSG00000172795_9 (sequence is synthesized)
tcaaagtatgaggggaaatggcagaaaacagtatcaagattcacctaatcaaaagaaaagaacaaatgggcttcagccagcaaagcagcagaattctttgatgaagtgtgaaaagaaact

SEQ ID NO: 587666 - DNA, 120 bp, Artificial Sequence
  ENSG00000172795_10 (sequence is synthesized)
tcatccacggaaacttcaggataattttgaaacagatgctgtatatgacttgcctagctccagtgaagaccagttgctagaacatgctgagggacagcccgtggcatgtaatggacattg

SEQ ID NO: 587667 - DNA, 120 bp, Artificial Sequence
  ENSG00000172795_11 (sequence is synthesized)
caagttccccttttcatccagagcctttttgagtttcaagtttgaccataatgctataatgaaaatcttggacctttgatagcagcacatgtattgtaaatgtcccaggatcagagacct

SEQ ID NO: 587668 - DNA, 120 bp, Artificial Sequence
  ENSG00000172795_12 (sequence is synthesized)
gttgaatttgagtgggtgtctcctcaagccttacctttctcaggtgttttaaagaaatgcagggaggcaatgtttctgaagacattttctgtttataagagagtagaaagaaacacgagt

SEQ ID NO: 587669 - DNA, 120 bp, Artificial Sequence
  ENSG00000172795_13 (sequence is synthesized)
ttgcactgtaaatgcagttataaccttttatacagatttaccttttcagtgttcagtacaagtttaagttgctttctttgagggcatttattctgtgtgactgtgggttttattttgtat

SEQ ID NO: 587670 - DNA, 120 bp, Artificial Sequence
  ENSG00000172795_14 (sequence is synthesized)
tctggttaagaaaataatgtattgagttactgtcaagtagccaagttaatgggaatgctccatctacctgttacagtgattgcaataatagtatattggagtttttcaaagaaacttaaa

SEQ ID NO: 587671 - DNA, 120 bp, Artificial Sequence
  ENSG00000172795_15 (sequence is synthesized)
gtaatgcccaattattaaatgaacacaagagctgagatgtcacattcgtcagcattacaggtgatctattttggtggcattttgtacttctctctgcttctaaccactgaggctctctaa

SEQ ID NO: 587672 - DNA, 120 bp, Artificial Sequence
  ENSG00000172795_16 (sequence is synthesized)
tcttcctctggagttttagtgaaaggatttattgagcagcttctggaatataatgtgcatgtccaaaatgaactcagcgcttcaaaaggacaaagtctgtagcctggaggggcttgagtg

SEQ ID NO: 587673 - DNA, 120 bp, Artificial Sequence
  ENSG00000172795_17 (sequence is synthesized)
gatgggagctgatgctgtgattttgagctgtggttacatgcagtcagtaaacctgtgagactgctggaggaaatgtagcagacagcatggaggctgggacccagcagctactttgggtca

SEQ ID NO: 587674 - DNA, 120 bp, Artificial Sequence
  ENSG00000172795_18 (sequence is synthesized)
tgtctttactgtcctgcctccaaccctttagtctcgtagacttttgttcttgtggaaatttcttctgtattccagttgtgtaaatatgtatggaaaactgatattactaggttttacgtt

SEQ ID NO: 587675 - DNA, 120 bp, Artificial Sequence
  ENSG00000172795_19 (sequence is synthesized)
gcatctccagtattgatctttggaaactgatgttacattaggttccaattcgcaatagtagcagagactgacatgcttttattgacctgctaagcccctggatgatggagcgagaaggga

SEQ ID NO: 587676 - DNA, 120 bp, Artificial Sequence
  ENSG00000172795_20 (sequence is synthesized)
aggggtatgcagtttacccaagtccaaataaagcatttcactaggttacacgttatgtatatgtgttacataacagtaacatacataactcactcctaggaatgtattttgcttcaggat

SEQ ID NO: 587677 - DNA, 120 bp, Artificial Sequence
  ENSG00000172795_21 (sequence is synthesized)
ttttaaattcaaataaggatggcagtgcccattttaaggaggatttcagctataactgaggacaatcaccagggcgttaagggggctttagtgttttggctgcatctgacctcattgaag

SEQ ID NO: 587678 - DNA, 120 bp, Artificial Sequence
  ENSG00000172795_22 (sequence is synthesized)
gaatttcttgggagtcgggggtgtttgagtatatgtgtgtgtgtgtaactatcatgtgggttttaaaaatccttttttacagtggtatccacaaaatacttctctgcttataaatgttat

SEQ ID NO: 587679 - DNA, 120 bp, Artificial Sequence
  ENSG00000172795_23 (sequence is synthesized)
tgtagaaatctttattctgtgtaggtagcctatttaattgggttccactgaacctcatgggacttttaaaagaagggctatttaaggaattcacttggtagtactttgctttagctttta

SEQ ID NO: 587680 - DNA, 120 bp, Artificial Sequence
  ENSG00000172795_24 (sequence is synthesized)
aatggcttgattttaaaggagaaattctatttattaatgaaagtgtcacccttttggtgctaagcaggagaattcacaattaaagcagtgtgtatagaattatgatattcagaatcctgc

SEQ ID NO: 587681 - DNA, 120 bp, Artificial Sequence
  ENSG00000172795_25 (sequence is synthesized)
atcttttaatgtgacaaatttttgaatcctgtgacttttgctttttaatgcattatatgattgtgtttggaagcttttactgttcttttcagaaatacggctgctttgcttgggtctctt

SEQ ID NO: 587682 - DNA, 120 bp, Artificial Sequence
  ENSG00000172795_26 (sequence is synthesized)
cgagccatatttatagttggtcccagcattccagacttctggtaaattgttaaaggagtgaaaatgtagtttgcctggcagatgaataattttcactcatttattgtcttctggaaacca

SEQ ID NO: 587683 - DNA, 120 bp, Artificial Sequence
  ENSG00000172795_27 (sequence is synthesized)
tttaacttttactgttttttatttttttggtatgtgtttttttttttctttttaagtgcatactttggccagtcttcctggtgcctgtagagttggatttttcagctctcaatactgaag

SEQ ID NO: 587684 - DNA, 120 bp, Artificial Sequence
  ENSG00000172795_28 (sequence is synthesized)
caaaagagattatagttaccagaagtatggcctctaatggtgttgagccttttcaagaaccaacaaattatctttgtgattacagtagtttaactatggttaaatgttactgctgttgcg

SEQ ID NO: 587685 - DNA, 120 bp, Artificial Sequence
  ENSG00000172795_29 (sequence is synthesized)
ctgctttatttaatgcactgtggaacaaaatataagggtactgttggggtgtgattatgataacttcaggcttttagctctcctcaaagtttgaggttaaaaaaatgttaaaagatgtga

SEQ ID NO: 587686 - DNA, 120 bp, Artificial Sequence
  ENSG00000172795_30 (sequence is synthesized)
gttaaagtttatgtgtgtgatgtgacttaactatgcagaaaatatttaagttggatgtacttgttttaggtacatctactatacttattctctcaaacctgggtaatagtttctcagtgt

SEQ ID NO: 587687 - DNA, 120 bp, Artificial Sequence
  ENSG00000172795_31 (sequence is synthesized)
tcaggttaccttgagaaaggccatgcttagcgaactggatttctcctttgagaaattttagtatggtttgaggaaatcaagtgataaaggagtatgctgaatatgcaatcatttacttct

SEQ ID NO: 587688 - DNA, 120 bp, Artificial Sequence
  ENSG00000172795_32 (sequence is synthesized)
actgagtgctgcattttaagatgctagatgagaagagtagttggttttgcttcattatgttttatgtctttgagagagatacaggtcttggaattcactttttaaatgttacgttccaac

SEQ ID NO: 587689 - DNA, 120 bp, Artificial Sequence
  ENSG00000172795_33 (sequence is synthesized)
cttatatgttccaaggtgcagtgcactgtgaatcttttatttttaaaaaaatttgtaggtgcttttatgtataactttaatgatttataagatgctaaatgaattgtttttgtacctaac

SEQ ID NO: 587690 - DNA, 120 bp, Artificial Sequence
  ENSG00000172795_34 (sequence is synthesized)
cattgtaatccaaaagataagggtgtggtttacatgcttttcaaaaatttttgttaagaagtagcaaatgaatggtttaggatttcaaatagtgataccctcctgagacatgagcatttg

SEQ ID NO: 587691 - DNA, 120 bp, Artificial Sequence
  ENSG00000172795_35 (sequence is synthesized)
gagaggcctgagaacctaatagaactcatatagtgtgagtgaaatttgattaaagatgttggaaaatgaagttggatttttgtattcatgtataaaggaaagtctcccagtgctgtcaaa

SEQ ID NO: 587692 - DNA, 120 bp, Artificial Sequence
  ENSG00000172795_36 (sequence is synthesized)
ggaattgtggttactacttgctgttctgagctttgaatatcgttatttttctattaaatatcaattagtaagtatagctaatgaagacatataatgaaagtaattttatgctgtaagatt

SEQ ID NO: 587693 - DNA, 120 bp, Artificial Sequence
  ENSG00000172795_37 (sequence is synthesized)
gaattggtacttttccttattaaggctttagtaatttgtatgtaatgtcaaataaaaggaattcaaatctgagtaaataacagcctcctactataggaattagattcttctataaaagtc

SEQ ID NO: 587694 - DNA, 120 bp, Artificial Sequence
  ENSG00000172795_38 (sequence is synthesized)
accatattgtatcctatagaaaagttaaggtctgagtgcatgtgtgcattaaaaacatttcactacctattctctcatggacttctcatcctttcttttttcatctccaacagttaaatg

SEQ ID NO: 587695 - DNA, 120 bp, Artificial Sequence
  ENSG00000172795_39 (sequence is synthesized)
tcatctccaacagttaaatggtaaggagagcaaagttaattataaaaattagacattttgccaagttagttttcttaccacaataccctcttggcttttttttttttttttttgagatgg

SEQ ID NO: 587696 - DNA, 120 bp, Artificial Sequence
  ENSG00000172795_40 (sequence is synthesized)
tttctccatgttggtcagggtggtctctcttggctttttatctttatttttgtaccagtggaccttcctgctccctgagactgttttgattgacatcttttgtgtttctatattttccga

SEQ ID NO: 587697 - DNA, 120 bp, Artificial Sequence
  ENSG00000172795_41 (sequence is synthesized)
cagtattttctttgtatgttaatcatagttatagtaaagtcagactcattaacttttcttcctagtaattttgacttggattattttctagcctgggggatggggttcatatgtgttgtt

SEQ ID NO: 587698 - DNA, 120 bp, Artificial Sequence
  ENSG00000172795_42 (sequence is synthesized)
gtaactttagattactaaacaaaacaaactgtttttttgtttgaaggtatcctttacatacctgtctgtaggtaagcaagtgttagtaaaaacaattttgtcaaacagtactcctgacag

SEQ ID NO: 587699 - DNA, 120 bp, Artificial Sequence
  ENSG00000172795_43 (sequence is synthesized)
cttggtaaagtctaggtagagtttctgattttgtattatgtcctaagacttgaaagtgcatttgtctagttgccaaaagttctaaaaatgagatggtgggctttctcagcatctttttgc

SEQ ID NO: 587700 - DNA, 120 bp, Artificial Sequence
  ENSG00000172795_44 (sequence is synthesized)
ttcctagaattgagttgctcttgaagtctgtactcctgtgtcagaaagatggcagactgcaaatgggcagtacaggctttgccccatgctttcaaagtaggattctggattgcagtttca

SEQ ID NO: 587701 - DNA, 120 bp, Artificial Sequence
  ENSG00000172795_45 (sequence is synthesized)
aaaaaatatgatagattattgttatagaatcaaagtgtcctgaagggagaagaatagctatagttgctgggcaaagagtgtaagaaagaaactttagagcatttatcaatacttgagtgc

SEQ ID NO: 587702 - DNA, 120 bp, Artificial Sequence
  ENSG00000172795_46 (sequence is synthesized)
tttattatgttccaggctagaaatgtgatcattgcatggcctaagtgtagtcattcatatatatatgaatatctatatctatatctatacatatatatgtatcgccattatcgagtgttt

SEQ ID NO: 587703 - DNA, 120 bp, Artificial Sequence
  ENSG00000172795_47 (sequence is synthesized)
tctagccctggataaagttaatttttttgaagtttgattgccaagcaatccagtgaatctaaagtaatttttctcactttaaagaccagtgatgaggagtctggtccttcctgtactgat

SEQ ID NO: 587704 - DNA, 120 bp, Artificial Sequence
  ENSG00000172795_48 (sequence is synthesized)
actgtagaactccagtcaaacttcagtgcactgctttcttacaggaagacaactcagaacacacagccataatctgctttggtgtcagtcacatcacagtggttatacatttgtcctgaa

SEQ ID NO: 587705 - DNA, 120 bp, Artificial Sequence
  ENSG00000172795_49 (sequence is synthesized)
tggtgattcattcctttccatctaacttccttgtgacaaatagcatttactattgaaatagtcttaaaatagggaaaagagtgaaagttactcttatgcatgggagtgggcttaaagggt

SEQ ID NO: 587706 - DNA, 120 bp, Artificial Sequence
  ENSG00000172795_50 (sequence is synthesized)
tgacttccaccagctgagtacaaacaagtgtaaagaaaaactatgataaagtatggaggtcttgagaattgttcataatgaaatctttaatctgggttatcagagtaatgaaatcaccaa

SEQ ID NO: 587707 - DNA, 120 bp, Artificial Sequence
  ENSG00000172795_51 (sequence is synthesized)
taaaaacattccatttatcttggatcttctgtggttagcagaggagtatggtctagctatgttagcagcttgaaggcacaacgtaaaaggaatgagctttcacaaggtgcttacgttagc

SEQ ID NO: 587708 - DNA, 120 bp, Artificial Sequence
  ENSG00000172795_52 (sequence is synthesized)
tgggtagtattggtcaaaggtactctgaagagtgaatgcagaaatcagttggctgtgtttgtaatcttgtcccacatggaccctaacctttagtagacttcagtcttttagtccagtaga

SEQ ID NO: 587709 - DNA, 120 bp, Artificial Sequence
  ENSG00000172795_53 (sequence is synthesized)
agacaatggccctgaatatgtgttttctgctttttggtggaaggtttcctgcaggtggttgggtggtttttgggttattggctactgttcgttcagtgccatttgaagacctgttgtttc

SEQ ID NO: 587710 - DNA, 120 bp, Artificial Sequence
  ENSG00000172795_54 (sequence is synthesized)
ttaatcctttttcttggtgtgactggccaggaaaaagtccattgagtcctttttttctccctggtgtcttaccccttctgtagaataatccatattttaaaatttgtttcacatctttat

SEQ ID NO: 587711 - DNA, 120 bp, Artificial Sequence
  ENSG00000172795_55 (sequence is synthesized)
agcaaacctgccacagacttgcaagcagtgattttatctttccttcctgagaaggtgatctcacttttgatgtttgggtcacctgtggacacctgtgctcttttgagtctcaaggcttat

SEQ ID NO: 587712 - DNA, 120 bp, Artificial Sequence
  ENSG00000172795_56 (sequence is synthesized)
agctttcacattggcttgggaacaacagacttgtgtgtggttctagagtgaaatgggcagtgttctgctggtcctcagtctttgagaggtcttaggcaacatccttagtatagtggaatt

SEQ ID NO: 587713 - DNA, 120 bp, Artificial Sequence
  ENSG00000172795_57 (sequence is synthesized)
tctgaggtcaaatttaacatttaatatattctccttttagttcattgaatctgaggttctaaatctgtagcttcattttgagcacaagtctgcattgtcattttttaagagattggcagg

SEQ ID NO: 587714 - DNA, 120 bp, Artificial Sequence
  ENSG00000172795_58 (sequence is synthesized)
catatccttttgtgatacttaggaaaagactatggatggcagcaaatgaaagtaaaggttctcaactgtgaatgaaatttagaaagataattcttcagcagttggttgattagatgggtt

SEQ ID NO: 587715 - DNA, 120 bp, Artificial Sequence
  ENSG00000172795_59 (sequence is synthesized)
agtgcttttggaatatataacagtagacttgtattctttatgcactatacatatgatacgcactgacagaaaagcacagaagacatactgctaagagtttctttgtgcatttcactactg

SEQ ID NO: 587716 - DNA, 120 bp, Artificial Sequence
  ENSG00000172795_60 (sequence is synthesized)
ttctaggggactgctgtctctttggttccttttaggtttgtgttaggatgttgcacaagtaatcatttaatgttaaatgcaagtgtccaaagaaatgagtcttaaagttctttggtcata

SEQ ID NO: 587717 - DNA, 120 bp, Artificial Sequence
  ENSG00000172795_61 (sequence is synthesized)
tttcactttagagttaggacaggagacagctaacctgacttccattttacaaatattagaaactttttcttcagtaacaaaaacagggaaggacaataaaaccatgaactattttgcttt

SEQ ID NO: 587718 - DNA, 120 bp, Artificial Sequence
  ENSG00000172795_62 (sequence is synthesized)
atgtctgtttttaaaaaataattgttttgaagtttgcttattagcttaataccttatagtacttttaaaaaatcatccttggtaattattgacttatcctagatccatgtacaattcaga

SEQ ID NO: 587719 - DNA, 120 bp, Artificial Sequence
  ENSG00000172795_63 (sequence is synthesized)
cttttatctgttagctttaataaaaatttaaaaccatctcatttcagaataaaataaacggaattacagttcatgcattagcatttttaagtgaagttctcttaataagattgccttttg

SEQ ID NO: 587720 - DNA, 120 bp, Artificial Sequence
  ENSG00000172795_64 (sequence is synthesized)
tctaaccgaaatagggcatacagattagtttggatgggaaagtggtaagacttgactttttaatactgtgcctatttccaaaagaagacttgatgtggctttttacattatgctttaaag

SEQ ID NO: 587721 - DNA, 120 bp, Artificial Sequence
  ENSG00000172795_65 (sequence is synthesized)
atgttaatggaggatacatagtcttaaaacaatttgtttgggagtaagttttagtcggaaaaaggtgaagatatttatgctgagttatgttaagcaaattattttgagaccttttgctgg

SEQ ID NO: 587722 - DNA, 120 bp, Artificial Sequence
  ENSG00000172795_66 (sequence is synthesized)
tagacaaaaactgaggaaatgtttcactaaatatattatggtcaatgaaaaaaccagactttagagtaaatgtgataaccaagtagatttgtgaactttatttctttagtaattattttt

SEQ ID NO: 587723 - DNA, 120 bp, Artificial Sequence
  ENSG00000172795_67 (sequence is synthesized)
atcttatgtgaaatgattcaacctttaatttttgcctagattatagcaatgttttgttttaccttatagggcattttaatgcttggagaaagactataagtgaatctacttcaagggatt

SEQ ID NO: 587724 - DNA, 120 bp, Artificial Sequence
  ENSG00000172795_68 (sequence is synthesized)
ctgttcatggtggtatacagttcttggtgctcttttggaaattgtcaaacatttactgatagcagaaaaggaaccccaaaacacctgtagtgttcaccttgttataagaacagaaacatt

SEQ ID NO: 587725 - DNA, 120 bp, Artificial Sequence
  ENSG00000172795_69 (sequence is synthesized)
tggaacaggtttcattctgtttctagatttatgttgttgtagttgaacagcaactgtttttttccctcagtgttaacgaaaggataaagactacctgtattgttgggtatgactatcaaa

SEQ ID NO: 587726 - DNA, 120 bp, Artificial Sequence
  ENSG00000172795_70 (sequence is synthesized)
ggatttccggtgattcatgtttgtgaattggagtttaaatgtttgcaggattactgtacttccaaagacccactagaatgtcagctgtactctgtactctccactgagaaaatgaacaaa

SEQ ID NO: 587727 - DNA, 120 bp, Artificial Sequence
  ENSG00000172795_71 (sequence is synthesized)
atcctatgtcttaacagttatgctctaactttttgaaagctttttgatgtaaataataggttagaaactaaaagccttttaatcttacaaaatacaatttgaacgatggaaggttgttca

SEQ ID NO: 587728 - DNA, 120 bp, Artificial Sequence
  ENSG00000172795_72 (sequence is synthesized)
gatactggctttctgtaaaaacatcattgtgttagattgtttgtaatgtactatcaataaaattggctgcttgggcggttttagttaccaccttagcctggttttctgctactgttattt

SEQ ID NO: 587729 - DNA, 120 bp, Artificial Sequence
  ENSG00000172795_73 (sequence is synthesized)
atcatcgtaggttctgagttgctcattgtggttgctctttggaccaataaaaatggcaagtatgagatgaacatgataaaagtatgtttatataacaggaagaagctgggcgcggtgctc

SEQ ID NO: 587730 - DNA, 63 bp, Artificial Sequence
  ENSG00000172795_74 (sequence is synthesized)
agaatctcttgacccccagagcaagactctgtctggaaaaaacaaaaaacaaccaaaaaaaaa

SEQ ID NO: 587731 - DNA, 120 bp, Artificial Sequence
  ENSG00000172795_75 (sequence is synthesized)
aacaaccaaaaaaaaaaaaaaaaaacccccaggaagaaatattgtcgagagtctctgcaaaaatgaaaatacctcaaacaattaagtttgttgctttaaagcaagattatagtgtagggc

SEQ ID NO: 587732 - DNA, 120 bp, Artificial Sequence
  ENSG00000172795_76 (sequence is synthesized)
taaagcaagattatagtgtagggcttgagatgtgaattcattagatatttaaaatccagcaattcttaagtttgtgctagaatcaggttttgcaataggaatacttaactttggatctca

SEQ ID NO: 587733 - DNA, 120 bp, Artificial Sequence
  ENSG00000172795_77 (sequence is synthesized)
agggggaaagaaatacattcttttccattagagacctcagctatatgatagtaacttttattttaaattctcaaaaggagagtgactaaggtgttatacttactgtcaaagttactttgc

SEQ ID NO: 587734 - DNA, 120 bp, Artificial Sequence
  ENSG00000172795_78 (sequence is synthesized)
ttccatagtgaaaacttgagaacattgtaatctttctctaacagatgtgttgcaaagctgcttgccatcttgttgtcctatatgacttccttgcatttccagtccttgattacattccat

SEQ ID NO: 587735 - DNA, 120 bp, Artificial Sequence
  ENSG00000172795_79 (sequence is synthesized)
tttaatgatctttctttaagaggggaaaagactctcttcaatagataacttcctatttatgccaaattttaaaaagccaactaaaaatgggctataaatgagggttctttggccattttg

SEQ ID NO: 587736 - DNA, 120 bp, Artificial Sequence
  ENSG00000172795_80 (sequence is synthesized)
atctaataatagtcttacttctagacccctgctttgactagggctcttgatttcatgtaagcatcatggatttgatatttgcctgcatgtatatcacagttctacagaaggatagcctta

SEQ ID NO: 587737 - DNA, 120 bp, Artificial Sequence
  ENSG00000172795_81 (sequence is synthesized)
ccctttaaataacacagttaaggtacactgtggaattagaaatatttattcagaatataagaatgtttgtaaaatattataaatgtctctgtataaataaatggagtttttaaaaaacaa

SEQ ID NO: 587738 - DNA, 120 bp, Artificial Sequence
  ENSG00000172795_82 (sequence is synthesized)
gtaggcagttcatcctctgaagagtgaaacaagggcattgccaaagcacaggaatgttacttgttttgttcttattttaattgatatactagtaggatttttgtgtagctgacttgtgca

SEQ ID NO: 587739 - DNA, 120 bp, Artificial Sequence
  ENSG00000172795_83 (sequence is synthesized)
ctattcacactaaaaatctctggctgctcttaattacaaatgtataatgttgatgcaattgtacatctaattttttatgtggctgtttattttaatatcaatgtgtactcaaacctgttc

SEQ ID NO: 587740 - DNA, 120 bp, Artificial Sequence
  ENSG00000172795_84 (sequence is synthesized)
acacatgacctctgtgggataaaggcacagggaactataggatgcttgtgaaagggcagtgtagagttgacagatgtgtaccaggtgtagaggacagctgatccagactagaacagatca

SEQ ID NO: 587741 - DNA, 120 bp, Artificial Sequence
  ENSG00000172795_85 (sequence is synthesized)
tcttaaagatgaaactgatgaatctgaattgtggggaaaaaaaatccaaaatgaaactgatggatctgaaaagaaaattcacaatggagatgattatgtcagaatatccaaaaaggagcc

SEQ ID NO: 587742 - DNA, 120 bp, Artificial Sequence
  ENSG00000172795_86 (sequence is synthesized)
aggagggcataaggagttggatcctggtcacatacacatctagatggagtttcacctgctgaactgggccaaagtgtaaaactagctgcatttgacttgagttgtatatactgggcctga

SEQ ID NO: 587743 - DNA, 120 bp, Artificial Sequence
  ENSG00000172795_87 (sequence is synthesized)
tcaaccgcctggagagataaccatacccaactatattgatcattgactagagacatcctgagctgacaaccagccatcatttatcatggactgtgctaaaaccttccagatacgtaaatt

SEQ ID NO: 587744 - DNA, 120 bp, Artificial Sequence
  ENSG00000172795_88 (sequence is synthesized)
tacagtagcccttaaaagctctgcctaaccttgcctgaatgcaacatgatttagctgcttgctagacttgtgtctcccaaattgcaatctctaaaaacctgattaaaatgccttttgcta

SEQ ID NO: 587745 - DNA, 120 bp, Artificial Sequence
  ENSG00000172803_0 (sequence is synthesized)
gtcagctgagagcatcctcactcggtcagttcctcgggcgagttacggggacgacctgcgggagcacgcgggcagtggccggacgctgaagcccaggagagcgatggagacgtatgcgga

SEQ ID NO: 587746 - DNA, 120 bp, Artificial Sequence
  ENSG00000172803_1 (sequence is synthesized)
ggttgggaaggagggcaagccttcctgtgcatcggtggatctgcagggagacagctccttacaggtggagatttctgacgcagtgagtgagcgggacaaggtgaaattcactgttcaaac

SEQ ID NO: 587747 - DNA, 120 bp, Artificial Sequence
  ENSG00000172803_2 (sequence is synthesized)
aaagagctgcctccctcacttcgcccagaccgagttctcagtcgtgcggcagcacgaggagttcatctggctgcatgatgcctacgtggagaatgaggagtacgccggcctcatcatccc

SEQ ID NO: 587748 - DNA, 120 bp, Artificial Sequence
  ENSG00000172803_3 (sequence is synthesized)
cccagcccctccgaggccagactttgaggcttcgagggaaaagctacagaaattgggcgagggggacagctctgtcactcgggaagagtttgccaagatgaagcaggagctggaagcgga

SEQ ID NO: 587749 - DNA, 120 bp, Artificial Sequence
  ENSG00000172803_4 (sequence is synthesized)
gtacctggccatctttaagaagacagttgcgatgcacgaagtctttctgcagcgcctggcggcccaccccaccctgcgtcgagaccacaacttctttgtgtttttggaatatggacagga

SEQ ID NO: 587750 - DNA, 120 bp, Artificial Sequence
  ENSG00000172803_5 (sequence is synthesized)
tctgagtgtccgggggaagaacaggaaggagctcctcggagggtttctgaggaatattgtgaagtccgcggatgaagccctcatcacgggcatgtcagggctcaaggaggtggatgactt

SEQ ID NO: 587751 - DNA, 120 bp, Artificial Sequence
  ENSG00000172803_6 (sequence is synthesized)
ctttgagcatgagaggaccttcctgttggagtatcacacccgtatccgagatgcctgcctgcgggccgaccgcgtcatgcgcgcccacaagtgcctggcagacgattatatccctatctc

SEQ ID NO: 587752 - DNA, 120 bp, Artificial Sequence
  ENSG00000172803_7 (sequence is synthesized)
gctgcgctgagcagtctgggaacacaggaagtcaaccagctaaggacgagcttcctcaaattggcagagctctttgaacggctgaggaagctggagggccgggtggcttccgatgaggac

SEQ ID NO: 587753 - DNA, 120 bp, Artificial Sequence
  ENSG00000172803_8 (sequence is synthesized)
ctgaagctgtcagacatgctgaggtactacatgcgtgactcacaggcagccaaggacctgctgtaccggcggctgcgggcactggccgactacgagaatgccaacaaggcgctggacaag

SEQ ID NO: 587754 - DNA, 120 bp, Artificial Sequence
  ENSG00000172803_9 (sequence is synthesized)
gcgcgcaccaggaaccgggaggtgcggcccgccgagagccaccagcagctgtgctgccaacgcttcgagcgcctctccgactccgccaagcaagagctcatggacttcaagtcccgccgg

SEQ ID NO: 587755 - DNA, 120 bp, Artificial Sequence
  ENSG00000172803_10 (sequence is synthesized)
gtctcctcttttcgaaagaatctcattgagctggcagagctggagctcaaacacgccaaggccagcaccctgattctccggaacacccttgttgccctaaagggggagccttagagtagc

SEQ ID NO: 587756 - DNA, 120 bp, Artificial Sequence
  ENSG00000172803_11 (sequence is synthesized)
cagagctcagccagaccctaatctgggatctccagtgaccagggtatcccagacccctctctccggcaagatgtctccttccctagcagtgccactagccacaccctcactctgccccac

SEQ ID NO: 587757 - DNA, 120 bp, Artificial Sequence
  ENSG00000172803_12 (sequence is synthesized)
atcctctcagggaaagcccaaaccccctatcaccaccaccacaggtgccaggccctgcaagacacagggcagcatgggcatcataactggccacagtcagcagagccccagggaccctga

SEQ ID NO: 587758 - DNA, 120 bp, Artificial Sequence
  ENSG00000172803_13 (sequence is synthesized)
cacctctccccaggaagctgaggaacagcctctaccctcacccatagccctgaaggaatcatagctcacttgatcccggcctgttctccttcgcaaataaaaaccctggttttgtagcaa

SEQ ID NO: 587759 - DNA, 120 bp, Artificial Sequence
  ENSG00000172803_14 (sequence is synthesized)
actccttgggggagagaagagagcagggcgtgccttgttgtttgtctgtggccacaagcaccaaggcttgacatgcagatgtaggggctctgatgggggctgttccccaacaggcctggc

SEQ ID NO: 587760 - DNA, 120 bp, Artificial Sequence
  ENSG00000172803_15 (sequence is synthesized)
agacgattatatccctatctcagctgcgctgagcagtctgggaacacaggaagtcaaccagctaaggacgtgaggactccccccacccctaccctctccctgtgcctgtaataccatgtc

SEQ ID NO: 587761 - DNA, 120 bp, Artificial Sequence
  ENSG00000172803_16 (sequence is synthesized)
cagtgcggggcacgaggaaaggtcctggtggctgcccgcaggaggcctcccccagggggtggtaggcatgtgccaacacagcctgtgggcactcttcctccacctggcacttgccctcag

SEQ ID NO: 587762 - DNA, 120 bp, Artificial Sequence
  ENSG00000172803_17 (sequence is synthesized)
aaatgaaatcatgcacacctgagctctaactttgtcctccctgggatgtgggatgaggggggcccaaaagtgcatgcccagacttgctgaggcagggcttggggcagagagaggacctca

SEQ ID NO: 587763 - DNA, 120 bp, Artificial Sequence
  ENSG00000172803_18 (sequence is synthesized)
agacttacgcaccttcatgtcgttgaacaccttgatgacaccatcagagacagccacaccggaggcctaggagacatgccacgtatacgtcaagaaaaggattctagggaactgcccctt

SEQ ID NO: 587764 - DNA, 120 bp, Artificial Sequence
  ENSG00000172803_19 (sequence is synthesized)
gttttttcagaagatctcagtccacgtcccgagtggtcactagtgcccttcccaaggcaagtcactagttttcccacccaagtcactgtcaaagaaccagatgggacacaacctcagaat

SEQ ID NO: 587765 - DNA, 120 bp, Artificial Sequence
  ENSG00000172803_20 (sequence is synthesized)
ggcagccatggcctctgatcacctagttcaacaaccccttccctcattttacaggatagaaatgcaaaactcgtgaaaagcagaaccttgaccaaaatgtgaacccagaattaaaagatc

SEQ ID NO: 587766 - DNA, 120 bp, Artificial Sequence
  ENSG00000172803_21 (sequence is synthesized)
caccggctactgactcatttgctactcacagtacttgctctcagcctttggataaaactggtgatttagaacttcggatatggaggacccaaacacctgagccaagactcctcttcagaa

SEQ ID NO: 587767 - DNA, 120 bp, Artificial Sequence
  ENSG00000172803_22 (sequence is synthesized)
agagccaagaccccacaatgctagatgggaccccaaggacaccgaacagttacaacaaacccaccagaactgcttaatacagttactacacaaacgacccctgttcccagctaggctctt

SEQ ID NO: 587768 - DNA, 120 bp, Artificial Sequence
  ENSG00000172803_23 (sequence is synthesized)
tcccaaccaagacaagaattgcaacccccattaaggaccctgcccgacaactcccttcttccgggaatggtgctaggccccagaagtcgctgataaaaattaacatgccaaactcaagtg

SEQ ID NO: 587769 - DNA, 120 bp, Artificial Sequence
  ENSG00000172803_24 (sequence is synthesized)
agacaatgcagccaatggcgtcacgcgcggtgccccgctacccaatcgaaaggcgtggctgagggaaacgcggtgggaaccgcccccgactccaggcgactccttggccgggcgggggag

SEQ ID NO: 587770 - DNA, 120 bp, Artificial Sequence
  ENSG00000172803_25 (sequence is synthesized)
gctgagagcatcctcactcggtcagttcctcgggcgagttacggggacgacctgcgggagcacgcgggcagtggccggacgctgaagcccaggagagcgatggagacccttcctgtgcat

SEQ ID NO: 587771 - DNA, 120 bp, Artificial Sequence
  ENSG00000172803_26 (sequence is synthesized)
gttagagcatggagaggtgcacccttttgggagatggaggcatatgcatagtgggccgtggctgaggatgaggatggagcagctgtggtccacctttgaggcccatctccctcaagcagc

SEQ ID NO: 587772 - DNA, 120 bp, Artificial Sequence
  ENSG00000172809_0 (sequence is synthesized)
ctttttcgtccttttccccggttgctgcttgctgtgagtgtctctagggtgatacgtgggtgagaaaggtcctggtccgcgccagagcccagcgcgcctcgtcgccatgcctcggaaaat

SEQ ID NO: 587773 - DNA, 120 bp, Artificial Sequence
  ENSG00000172809_1 (sequence is synthesized)
tgaggaaatcaaggacttcctgctcacagcccgacgaaaggatgccaaatctgtcaagatcaagaaaaataaggacaacgtgaagtttaaagttcgatgcagcagatacctttacaccct

SEQ ID NO: 587774 - DNA, 120 bp, Artificial Sequence
  ENSG00000172809_2 (sequence is synthesized)
ggtcatcactgacaaagagaaggcagagaaactgaagcagtccctgccccccggtttggcagtgaaggaactgaaatgaaccagacacactgattggaactgtattatattaaaatacta

SEQ ID NO: 587775 - DNA, 120 bp, Artificial Sequence
  ENSG00000172809_3 (sequence is synthesized)
aaaatcctaagtgtctttcgtctttgcggatgggaaagggaaaaatgctacctcgtagtggcttctgatgggaacaggacgcgggttctgttgctgccttcctgtgtctttttttttttt

SEQ ID NO: 587776 - DNA, 78 bp, Artificial Sequence
  ENSG00000172809_4 (sequence is synthesized)
cttgctctgtggctcatcctggagcacagtggtgcgatatcagctcactaccacctccgcctcctgggttcaagcgac

SEQ ID NO: 587777 - DNA, 120 bp, Artificial Sequence
  ENSG00000172809_5 (sequence is synthesized)
catagtgctgggattacaggcatgagcctccgtgcccggtgcatccctaatcttgagcatgatctcagtcggcaaatgaggccatctgttttcagcctgtttgaaaataagatgtgggga

SEQ ID NO: 587778 - DNA, 120 bp, Artificial Sequence
  ENSG00000172809_6 (sequence is synthesized)
cagcctgtttgaaaataagatgtggggaggccatgatggaaatagcacgtggggttaaacataactggcagatgtgggagcgatggtggggcatgccattcaaacaggtcccaaaatggg

SEQ ID NO: 587779 - DNA, 120 bp, Artificial Sequence
  ENSG00000172809_7 (sequence is synthesized)
tgcaacaaggtatagcacatctaccactcgctaacttgactgacttggagaaatgactacacttttgcctgtttcctcagttggaaaatagccatattaacacctctttcattggcttgc

SEQ ID NO: 587780 - DNA, 120 bp, Artificial Sequence
  ENSG00000172809_8 (sequence is synthesized)
tgtcagggtactgggatggggggaggtgcatgggttggggtggccaccaggtggtgctgtgccacagcgggcagcccctctggaaatgactggcatcataaaatctgtcttcatacccga

SEQ ID NO: 587781 - DNA, 120 bp, Artificial Sequence
  ENSG00000172809_9 (sequence is synthesized)
agtgcgaacgcctacatgagtcttgatcctcggcaggcaccgtacccagtttcctccgttgggagggtttaactgcccggaaacggaagtctcgttctttttcgtccttttccccggttg

SEQ ID NO: 587782 - DNA, 120 bp, Artificial Sequence
  ENSG00000172809_10 (sequence is synthesized)
gcttgctgtgagtgtctctagggtgatacgtgggtgagaaaggtaatctggggcaatccactgccaggtgaaatctggggaccccaggtccgcgtggagggtgtcggggaggagaagggg

SEQ ID NO: 587783 - DNA, 120 bp, Artificial Sequence
  ENSG00000172809_11 (sequence is synthesized)
agtgcgatggggccgatatttcgggggagagcgggaaaacggggttcgctgccagcccccgcgccgtgttaacgccgaggactgtttcccgcaggtcctggtccgcgccagagcccagcg

SEQ ID NO: 587784 - DNA, 120 bp, Artificial Sequence
  ENSG00000172809_12 (sequence is synthesized)
tggggggcacgttgaggccctggaatttctaggaccatctttagctaatcgcgatcatctcagaggccgccctgagttcagttttctttcgtataatatagtaaattgtcggaacggaat

SEQ ID NO: 587785 - DNA, 120 bp, Artificial Sequence
  ENSG00000172809_13 (sequence is synthesized)
ctccactccgcgaaagcctcaaaacacacgtcccataaacactgtttaggttctctgcagttgtgcaaaatcttaacacaaaatccattttgtaataaagtgctggatatttgcatgtaa

SEQ ID NO: 587786 - DNA, 120 bp, Artificial Sequence
  ENSG00000172809_14 (sequence is synthesized)
tggggtttggaaggttgctgtgtgtggccatgttgtatcttgttttgaatccctctcagatttcagagcccattttatggtctaagaatctgctcttgctgttgggagtgtgaggaatag

SEQ ID NO: 587787 - DNA, 120 bp, Artificial Sequence
  ENSG00000172809_15 (sequence is synthesized)
ggggcaatccactgccaggtcctggtccgcgccagagcccagcgcgcctcgtcgccatgcctcggaaaattgaggaaatcaaggacttcctgctcacagcccgacgaaaggatgccaaat

SEQ ID NO: 587788 - DNA, 120 bp, Artificial Sequence
  ENSG00000172809_16 (sequence is synthesized)
aaacggaagtctcgttctttttcgtccttttccccggttgctgcttgctgtgagtgtctctagggtgatacgtgggtgagaaaggtcctggtccgcgccagagcccagcgcgcctcgtcg

SEQ ID NO: 587789 - DNA, 120 bp, Artificial Sequence
  ENSG00000172809_17 (sequence is synthesized)
ccatggtgagtacagtccctgcctggcgccttcccggggtgggctcgtggggccccggggcgagggcgagagagcctcccaaggatctcctgaggccgggagaagctggtggactgggcc

SEQ ID NO: 587790 - DNA, 120 bp, Artificial Sequence
  ENSG00000172809_18 (sequence is synthesized)
atcgccgggagacgtgtctctttcctctctgttcacccgcttcctttgtgttgcagcctcggaaaattgaggaaatcaaggacttcctgctcacagcccgacgaaaggatgccaaatgta

SEQ ID NO: 587791 - DNA, 120 bp, Artificial Sequence
  ENSG00000172809_19 (sequence is synthesized)
agtggttgctccgaaggttcaagaagagcggtgcctagcctggcaccgctccgggagcgtcttccccggaatgtcaggcaggagacggttaggccgtctgggtgtgtgcctggccctctg

SEQ ID NO: 587792 - DNA, 86 bp, Artificial Sequence
  ENSG00000172809_20 (sequence is synthesized)
tcgtgatcctgtggtcgctggccagtgtcagaaggtatcatacctatctaatccagaaaaatatttaaaaaaatttttttttttct

SEQ ID NO: 587793 - DNA, 120 bp, Artificial Sequence
  ENSG00000172809_21 (sequence is synthesized)
atcttggctcactgcaattaccgcctcccaggttcaagcgatccccctgcctcaaagtagctgggcgcgccaccatgcctagctgatttttgtgtttttggtagagacagagtttcacca

SEQ ID NO: 587794 - DNA, 89 bp, Artificial Sequence
  ENSG00000172809_22 (sequence is synthesized)
aagatcaaaatttgaagcagggcttctactgaatgtatatcgcattaccaccattgtaaagtcacagagtttaagttggactgtcatag

SEQ ID NO: 587795 - DNA, 120 bp, Artificial Sequence
  ENSG00000172809_23 (sequence is synthesized)
cagcttgtacatacaggggaaagaaggtgattaatgaaaaaccttaaacagcaggttttcgatggataggtgccaatctctgctgcccacttacttaaatttttacaccaagtgtgagag

SEQ ID NO: 587796 - DNA, 120 bp, Artificial Sequence
  ENSG00000172809_24 (sequence is synthesized)
gtagttgtgttactcctttgtgatacttgaaggagattgggggggcttgtgtttgatacaagctaggtcttgagttatgttgttactttaacccagtcatcttttttcagctgactgaga

SEQ ID NO: 587797 - DNA, 120 bp, Artificial Sequence
  ENSG00000172809_25 (sequence is synthesized)
atcaggtcacatgtggaagtgaggttgcatgggacaggcctgttaaggtgggctaagacaccagccgtctctaatgctctgccagccgtggtgccagacggtggttggtgtacagggaga

SEQ ID NO: 587798 - DNA, 120 bp, Artificial Sequence
  ENSG00000172809_26 (sequence is synthesized)
gtctttcaatgagttgggggtaggcagagatgggggtcatatttgtgtccccattacccaaaacaggctgtcacctttgaggtagtgaccacctgtggggacaaatagcatctggtggga

SEQ ID NO: 587799 - DNA, 120 bp, Artificial Sequence
  ENSG00000172809_27 (sequence is synthesized)
atgatgactgttggctagtgttttgtgtaaagagatgaggttatcaggtcagttttatttcagaccatatggggtcactgcctagtttgaagcccaactctacctgcaggtaacttaccc

SEQ ID NO: 587800 - DNA, 120 bp, Artificial Sequence
  ENSG00000172809_28 (sequence is synthesized)
gaagcccaactctacctgcaggtaacttacccttctcagcaagttaaacacgacaccaccgtttgattgtgttttaaaagggtggtggtccgggcgtggtggctcatgcctataattcca

SEQ ID NO: 587801 - DNA, 70 bp, Artificial Sequence
  ENSG00000172809_29 (sequence is synthesized)
taattccagcactttgggaggccaaagcggacagatcgcttgaaccaggagttcaagaccaacctgggcg

SEQ ID NO: 587802 - DNA, 79 bp, Artificial Sequence
  ENSG00000172809_30 (sequence is synthesized)
gagctgagattgtccaaaaaaaattgggaaccttcattttagatgatgtggctttaaaggtagtggtcacagtcccctg

SEQ ID NO: 587803 - DNA, 120 bp, Artificial Sequence
  ENSG00000172809_31 (sequence is synthesized)
tagatgatgtggctttaaaggtagtggtcacagtcccctggggacagtaaagtgtcagtagctgtttgttgaaaaaactttttaaaatggttgtattaatttttaacgtgtaataggcat

SEQ ID NO: 587804 - DNA, 81 bp, Artificial Sequence
  ENSG00000172809_32 (sequence is synthesized)
tttaaaatggttgtattaatttttaacgtgtaataggcatagcgtaaaagttaccatttacactgggtatggtggttccca

SEQ ID NO: 587805 - DNA, 120 bp, Artificial Sequence
  ENSG00000172817_0 (sequence is synthesized)
gacattcctgtctgcgctgcgggcaggccagcctctccggccctggactagggggcgccgccgagagaagccgccgcaggctgcagagtcgccgaccgcgctgttcgcaggcagaccccg

SEQ ID NO: 587806 - DNA, 120 bp, Artificial Sequence
  ENSG00000172817_1 (sequence is synthesized)
ggctgcccaccgcggcctagcgcgcgccggatggcaggagaagtgtccgcggccacgggccgcttttcgctggagcggttgggcctcccgggcctggccctcgccgcggccctgctgctc

SEQ ID NO: 587807 - DNA, 120 bp, Artificial Sequence
  ENSG00000172817_2 (sequence is synthesized)
ctggccctctgcttgcttgtccggcgcaccaggagacccggtgagcctccattgataaaaggttggcttccttatcttggagtggtcctgaacttacgaaaagaccccttaaggttcatg

SEQ ID NO: 587808 - DNA, 120 bp, Artificial Sequence
  ENSG00000172817_3 (sequence is synthesized)
aaaacacttcaaaagcaacatggtgacactttcacagttcttcttggtggaaagtacataacatttatcctggaccccttccagtaccagctagtgataaaaaatcataaacaattaagc

SEQ ID NO: 587809 - DNA, 120 bp, Artificial Sequence
  ENSG00000172817_4 (sequence is synthesized)
tttcgagtattttctaataaattattagagaaagcatttagcatcagtcagttgcaaaaaaatcatgacatgaatgatgagcttcacctctgctatcaatttttgcaaggcaaatctttg

SEQ ID NO: 587810 - DNA, 120 bp, Artificial Sequence
  ENSG00000172817_5 (sequence is synthesized)
gacatactcttggaaagcatgatgcagaatctaaaacaagtttttgaaccccagctgttaaaaaccacaagttgggacacggcagaactgtatccattctgcagctcaataatatttgag

SEQ ID NO: 587811 - DNA, 120 bp, Artificial Sequence
  ENSG00000172817_6 (sequence is synthesized)
atcacatttacaactatatatggaaaagttattgtttgtgacaacaacaaatttattagtgagctaagagatgattttttaaaatttgatgacaagtttgcatatttagtatccaacata

SEQ ID NO: 587812 - DNA, 120 bp, Artificial Sequence
  ENSG00000172817_7 (sequence is synthesized)
cccattgagcttctaggaaatgtcaagtctattagagagaaaattataaaatgcttctcatcagaaaagttagccaagatgcaaggatggtcagaagtttttcaaagcaggcaagatgtc

SEQ ID NO: 587813 - DNA, 120 bp, Artificial Sequence
  ENSG00000172817_8 (sequence is synthesized)
ctggagaaatattatgtgcacgaggaccttgaaataggagcacatcatttaggctttctctgggcctctgtggcaaacactattccaactatgttctgggcaatgtattatcttctgcgg

SEQ ID NO: 587814 - DNA, 120 bp, Artificial Sequence
  ENSG00000172817_9 (sequence is synthesized)
cacccagaagctatggcagcagtgcgtgacgaaattgaccgtttgctgcagtcaacaggtcaaaagaaagggtctggatttcccatccacctcaccagagaacaattggacagcctaatc

SEQ ID NO: 587815 - DNA, 120 bp, Artificial Sequence
  ENSG00000172817_10 (sequence is synthesized)
tgcctagaaagcagcatttttgaagctttacgactgtcctcatattcaaccaccattcgttttgttgaggaggatttgactctcagttcagagaccggggactactgtgtgcgaaaggga

SEQ ID NO: 587816 - DNA, 120 bp, Artificial Sequence
  ENSG00000172817_11 (sequence is synthesized)
gacttggtagccatctttcctccagtcctacatggtgaccctgaaatctttgaagctccagaggagtttagatatgatcgttttatagaagatggtaagaagaaaaccacctttttcaaa

SEQ ID NO: 587817 - DNA, 120 bp, Artificial Sequence
  ENSG00000172817_12 (sequence is synthesized)
agagggaaaaagctgaagtgttacctaatgccgtttggaactggaaccagcaaatgtccaggccgattttttgcacttatggaaataaaacaattgttggttatacttttaacttatttt

SEQ ID NO: 587818 - DNA, 120 bp, Artificial Sequence
  ENSG00000172817_13 (sequence is synthesized)
gatttagaaataattgatgataagcccataggactaaactacagccgcttgttgtttggtattcagtatccagattctgatgttttatttagatacaaagtgaaatcttagagaagctaa

SEQ ID NO: 587819 - DNA, 120 bp, Artificial Sequence
  ENSG00000172817_14 (sequence is synthesized)
aaggaaagaaaataaatctatcaaaattaccctaaacatcctaagctcatctatttctttttaatttctgcaaatgtaattgatttatttgtttaaaaagcgctaatttctatttgatct

SEQ ID NO: 587820 - DNA, 120 bp, Artificial Sequence
  ENSG00000172817_15 (sequence is synthesized)
gatatcagtccagtttgtccttagtcacaaagcccatcataatataaaacaggatggtggcaggaaaatggacatcaaaatcaacttaagggtaggctcaaaacagggttgttgttgttt

SEQ ID NO: 587821 - DNA, 120 bp, Artificial Sequence
  ENSG00000172817_16 (sequence is synthesized)
ttttagtttctccttgttgtgattttcacctgttataataaatgtaccttcacaccaatagattgggcactgtggaatttaaatcactcaaattgttctctaatatgtaaaattacactt

SEQ ID NO: 587822 - DNA, 120 bp, Artificial Sequence
  ENSG00000172817_17 (sequence is synthesized)
tgaactactagaaaattgtgctggaaatggacacagtctaacaaattccaaattctcacagaagaaggaaattgaatttccatgagttacactggatgaaaatgttcccttcaagtataa

SEQ ID NO: 587823 - DNA, 120 bp, Artificial Sequence
  ENSG00000172817_18 (sequence is synthesized)
tattaataatacctatatttccagggtatgtgtgcattaaatgagtttcacagtagattgaatgcttcaacttcacttcaatatttaatcatgcataaatgttccttattactttgtata

SEQ ID NO: 587824 - DNA, 120 bp, Artificial Sequence
  ENSG00000172817_19 (sequence is synthesized)
ctatggctcaatagaacaaaatttctggttacataagacctttcatgttcaagttagatactgataagatttaatgtataagaaaacacagaacctattatatattcagaaattgcccta

SEQ ID NO: 587825 - DNA, 120 bp, Artificial Sequence
  ENSG00000172817_20 (sequence is synthesized)
gacattagtattaggtttattatgggagcaaatgttgaaataattacagcattgattatatcatttggctttagtataaactatacaggttatgcaaatattgcaattaaccctttccta

SEQ ID NO: 587826 - DNA, 120 bp, Artificial Sequence
  ENSG00000172817_21 (sequence is synthesized)
aatgctttcatatatataaactgagaagctagatatagtatttggttttgatgtctcaccttttggatttggagttcatgtgttctattttgaattacaacatcatgtaatgcagtgtaa

SEQ ID NO: 587827 - DNA, 120 bp, Artificial Sequence
  ENSG00000172817_22 (sequence is synthesized)
tttcatatgacacatgcagcattgtgtcaataattcaaagattttttttcaattgagagagtatctggctgtgttgcccaggctggtctcaaatcctgacctcaagtgatcctcccgctt

SEQ ID NO: 587828 - DNA, 120 bp, Artificial Sequence
  ENSG00000172817_23 (sequence is synthesized)
tggtcccttgggaacctggactacaggcatgtaccaccaagcccagtgattcaaagattctaatatcagagtaccacatgattggcatctgatataaatgatgatgcaatatataagcag

SEQ ID NO: 587829 - DNA, 120 bp, Artificial Sequence
  ENSG00000172817_24 (sequence is synthesized)
gcaaggcaggtaataaagtccagttaattcatgcttcgttaattggaacttctaatatttcagaaatctgctactgttttgagaaaaggaaactgactttaaaaataacattacaaaata

SEQ ID NO: 587830 - DNA, 120 bp, Artificial Sequence
  ENSG00000172817_25 (sequence is synthesized)
tttacattcttagtaagtaaataagacagtctagcatttattttatccttcctgaagtacatgttctgaatgttccttcagtgaaggtctgctggtgcaaattctatttttgcttgattt

SEQ ID NO: 587831 - DNA, 120 bp, Artificial Sequence
  ENSG00000172817_26 (sequence is synthesized)
agggtgtctttatttttactctccttcttgaaagatggttttgctggatgcacaaatctagattgacagttatttcctcacagcactttgaagatattgcccgttcttaaggtatccatt

SEQ ID NO: 587832 - DNA, 120 bp, Artificial Sequence
  ENSG00000172817_27 (sequence is synthesized)
gttgttattgggcggatagccgttagtgagtttaattactcaataggtagtctgtctcttctctctgactactttaacgtgtcctctttgtctttgatgttcttagtttctttctgtttc

SEQ ID NO: 587833 - DNA, 120 bp, Artificial Sequence
  ENSG00000172817_28 (sequence is synthesized)
tcatgcttgcatgtcctgctgcttcttgaatctgagcacaggtgtctcccatcaagtatggaatcttctcagccattctctctgtgaatattactgttctcacactctacattagatcct

SEQ ID NO: 587834 - DNA, 120 bp, Artificial Sequence
  ENSG00000172817_29 (sequence is synthesized)
ctcactctacatacatcctttgatcttttctcaccacactttgtatctctaacttacactccatgtaatttctttagatgtctcttccagtttcttctttgaacagtatatctaatctct

SEQ ID NO: 587835 - DNA, 120 bp, Artificial Sequence
  ENSG00000172817_30 (sequence is synthesized)
ccaactcatccactgagtttgttttttccttctttttgttttaactctaggttcatcgagttgagtgatcactctccttacactctttagttcatgatacacaattataattggttctaa

SEQ ID NO: 587836 - DNA, 120 bp, Artificial Sequence
  ENSG00000172817_31 (sequence is synthesized)
acttattctgttttgtccctaatacccactttcataccccttcctaatatcataggcaaatattctaatgtgtttgatgcatatcttggtatgtatatgttttcatgtaacatatattat

SEQ ID NO: 587837 - DNA, 120 bp, Artificial Sequence
  ENSG00000172817_32 (sequence is synthesized)
ctgtaagttatattcttcctaattttcttatgaagctctgtgattttaaagatatattcatatttctgtagtatatacatagtatactactatatttaatctattgcttctaactgctgc

SEQ ID NO: 587838 - DNA, 120 bp, Artificial Sequence
  ENSG00000172817_33 (sequence is synthesized)
tgcttctaactgctgcacagcaatccataatgtgcacacattatgttttaatgatctagttacccagtgatggacactgtcagcaggacagttattgtgggacagaggccaaagcagaac

SEQ ID NO: 587839 - DNA, 120 bp, Artificial Sequence
  ENSG00000172817_34 (sequence is synthesized)
ttaaaagcttttccatcacctatcctcacactactgtgcctaaccatctcagcccagggctgctaaatgccttgtccccaagccccaccacccaccccccacatacacacatttagtcca

SEQ ID NO: 587840 - DNA, 120 bp, Artificial Sequence
  ENSG00000172817_35 (sequence is synthesized)
tgataactttaattcttcctaagatgttctaaatttgttatgtcccatcctcagatccatccaatcctctccattctgtagggtctccaaggttgattttgagtcagagtgtcagtctcc

SEQ ID NO: 587841 - DNA, 120 bp, Artificial Sequence
  ENSG00000172817_36 (sequence is synthesized)
agcttgttaaccttcaggttttccattccactgagtttgctaagttcaatcattacatttttcagttttacgattcccttttgttcttcatatatgctgcttattttttataatatcttg

SEQ ID NO: 587842 - DNA, 120 bp, Artificial Sequence
  ENSG00000172817_37 (sequence is synthesized)
tacctttattataaactcaacatcctttttcatttcttcaactgtatgaagcaaacattttagattctgtatctgatatttccaaatcattggtgttttgtggatctaattctgtagttt

SEQ ID NO: 587843 - DNA, 120 bp, Artificial Sequence
  ENSG00000172817_38 (sequence is synthesized)
atgtgttttgctgtcactgttaccaggaatggcttgtttactgagcccatgttccttggatttttatctctgaaaaatctttagacctagatttaaagttcattcctcaagagagaattt

SEQ ID NO: 587844 - DNA, 120 bp, Artificial Sequence
  ENSG00000172817_39 (sequence is synthesized)
gtatttgcatttttcagactgctgatactactaccaaactcagatcaccttaaaatttcagcttgattatctgggagtggggagggaacgctacataggtattgtggtttctagccctaa

SEQ ID NO: 587845 - DNA, 120 bp, Artificial Sequence
  ENSG00000172817_40 (sequence is synthesized)
atcaggtagaatgcaaccattttattaggaatagacaggggacacatttgggggttcatttttttgtttatttttacccggagctaagactgagataggcaaatatactgacagttttgc

SEQ ID NO: 587846 - DNA, 120 bp, Artificial Sequence
  ENSG00000172817_41 (sequence is synthesized)
atactgacagttttgctctgtggagcacagtttctttctagttcacctattgagtatgttgtctttgcaagttcttggctttatgcaaaggccttggattacacacacacacacacacac

SEQ ID NO: 587847 - DNA, 120 bp, Artificial Sequence
  ENSG00000172817_42 (sequence is synthesized)
acacacacacacacacaccctgggccctagcctttagtccaccacaaagcatactctgtccttttcgtacttggacgtctagttcgccatgttgcctaaagtggaagttccatagcttta

SEQ ID NO: 587848 - DNA, 120 bp, Artificial Sequence
  ENSG00000172817_43 (sequence is synthesized)
aattcaacttagtggtacacttttgtgatgttaaggcacagagaacacaggaaattattccattccaatttcggcttattttataactggaaatgtgtacaggaatttagaaatggaaag

SEQ ID NO: 587849 - DNA, 120 bp, Artificial Sequence
  ENSG00000172817_44 (sequence is synthesized)
taaggataaatgaaatggttgagaaaagatgacataaaaggaatgaatagtagaaccaaaacaaaacattgagaatcttgtgacagtcttaaatccagtaactaaatagtatttacaaat

SEQ ID NO: 587850 - DNA, 120 bp, Artificial Sequence
  ENSG00000172817_45 (sequence is synthesized)
agaaaaacatgtcctggacaaatcagttaaaagatgcagattctggctgtgacataactggcttattattaaacaatttccgtctcagagcttcaacgtcctcatttgaaaaataaaata

SEQ ID NO: 587851 - DNA, 120 bp, Artificial Sequence
  ENSG00000172817_46 (sequence is synthesized)
ataaggccctttgacatcagagttcattgtaacgattaaacacagtaacgtgtatggatttatggtataatgcaatataccaatgcaaagtttaatgaagatacttcaacagtgttgtgc

SEQ ID NO: 587852 - DNA, 120 bp, Artificial Sequence
  ENSG00000172817_47 (sequence is synthesized)
ctttaaaaaattgctcttgtgtattgttcaagggaatcgttttttatagtcatttgttaattcattgttcatttattcaaccaaacattcattgagcattttctctgttctagatatgat

SEQ ID NO: 587853 - DNA, 120 bp, Artificial Sequence
  ENSG00000172817_48 (sequence is synthesized)
tgatgctagacactggattccccttccccttcaagaacatactatttgttagggaaaacaatacgtaggcaactaatttattataaatgcagttgtaagtgataaattcatctctttaaa

SEQ ID NO: 587854 - DNA, 120 bp, Artificial Sequence
  ENSG00000172817_49 (sequence is synthesized)
actattttaaaattctgatttatcactagttctaactagccttccatcagtcattccaaagtaatggtctgtaatgagaaatcactatgtataattatacacaataaaaatatatacaac

SEQ ID NO: 587855 - DNA, 120 bp, Artificial Sequence
  ENSG00000172817_50 (sequence is synthesized)
aggtattttgataatatgataattaaaaccaaatatagtcattgaggcttagaatttttaaaaactgtattatatattgtaaaatcccatccttttttttttttagatggagtcttgctc

SEQ ID NO: 587856 - DNA, 61 bp, Artificial Sequence
  ENSG00000172817_51 (sequence is synthesized)
actccctaagtgctggggttgcagacatgagccaccgtgcccgcccccatcttttcatttt

SEQ ID NO: 587857 - DNA, 120 bp, Artificial Sequence
  ENSG00000172817_52 (sequence is synthesized)
cagacatgagccaccgtgcccgcccccatcttttcatttttatagcttcacctaagttttgaattaaaagaaataaataattaatacccaaaatattgttttatatcaatgaccaacgta

SEQ ID NO: 587858 - DNA, 120 bp, Artificial Sequence
  ENSG00000172817_53 (sequence is synthesized)
atgaaacactcagcagaaactaaagccctgaagtggttaagaaaaagctacctatcactaaatcaggcatgcttataagcaacctagaagaaaacttttatctgccttgttttggctttc

SEQ ID NO: 587859 - DNA, 120 bp, Artificial Sequence
  ENSG00000172817_54 (sequence is synthesized)
ctggcatacttccttacttcatctccattttataattaagttttgggtcacaagtctaaggcaaaggagcttccatactgaaaatctacatttttaatgcttattttatcataaaaataa

SEQ ID NO: 587860 - DNA, 120 bp, Artificial Sequence
  ENSG00000172817_55 (sequence is synthesized)
tttgggtaattttctgcaagtgacttctaacttaacagtagaagtttaaaactgttcaaagaccaaagcacaacatttatctagtgtttgatcctagtataaaagaatggcaataattat

SEQ ID NO: 587861 - DNA, 120 bp, Artificial Sequence
  ENSG00000172817_56 (sequence is synthesized)
gtgaacaggaattacatgcccttagaatgtgcattttttaacctattaaatttgccaatcttgcaaactattgtttacttgtattgcataattagatactcatattaacatattgaattc

SEQ ID NO: 587862 - DNA, 120 bp, Artificial Sequence
  ENSG00000172817_57 (sequence is synthesized)
agaaaaagttagcaagccaagatgacattctctgtagcactattttaaattataatgaatgatcacataaaactctttagtatttatctaaagtaattattactctacttcatttgttta

SEQ ID NO: 587863 - DNA, 120 bp, Artificial Sequence
  ENSG00000172817_58 (sequence is synthesized)
tctaaatcagtgatcattgatgtttgaactttttggcttaaatgtttattttgtttatactacttgctagagtaaaataaatttaatacatgaaaaactctacacaatttaaaataggtt

SEQ ID NO: 587864 - DNA, 120 bp, Artificial Sequence
  ENSG00000172817_59 (sequence is synthesized)
aaaatatttttagaaggaggagtgctgtatattattaaaacaattttctgaaattgtttaatattatctttgattttaaaatgacatatatgtggatttacaatgaatcaaattgtccta

SEQ ID NO: 587865 - DNA, 120 bp, Artificial Sequence
  ENSG00000172817_60 (sequence is synthesized)
tttacaatgaatcaaattgtcctaaaagatgtcagataagaaatgcaagtgctttgcaagtctaatacttaatgttcttttatgtacaacaaaaatttaataaattaactttaaagcaca

SEQ ID NO: 587866 - DNA, 120 bp, Artificial Sequence
  ENSG00000172817_61 (sequence is synthesized)
agtcctacatggtgaccctgaaatctttgaagctccagagcaaactgtgctcacaggagaaactagaggaatggaaataacagagctctcaaatctgtacttctgtactgcctacagtag

SEQ ID NO: 587867 - DNA, 120 bp, Artificial Sequence
  ENSG00000172818_0 (sequence is synthesized)
gcactttaagacttcccgagcggcggcggggacgccagtcgagccgggagacgcttacctgccgcttccccgcgccgcccggtgcacctggccgcaagggacctcgttctcagggaagac

SEQ ID NO: 587868 - DNA, 120 bp, Artificial Sequence
  ENSG00000172818_1 (sequence is synthesized)
ggcgacattccgcggaggtggaaccgccgcgcgccgtccgggctcggaccttccccggaacgtgggggcgccttagcgactccttccctgttgtgcccccgttcccggcgttcagcccgg

SEQ ID NO: 587869 - DNA, 120 bp, Artificial Sequence
  ENSG00000172818_2 (sequence is synthesized)
ccccgcaaaggtgggacggctcccggcttcagttacggaagcggcccgtgtccagcgacgagggttcgaaaatgccccgcgcgttcctggtgaagaagccgtgcgtctccacgtgcaaga

SEQ ID NO: 587870 - DNA, 120 bp, Artificial Sequence
  ENSG00000172818_3 (sequence is synthesized)
ggaactggagcgagctccccgacgaggagcgcggcgagatctacgtgccagtcagcctgggcttctgcccaccacagccctaccgggagccggaaccctctgtggccgaacccccttcct

SEQ ID NO: 587871 - DNA, 120 bp, Artificial Sequence
  ENSG00000172818_4 (sequence is synthesized)
gcccgctggctttgaacatgagccttcgagactctagctacagcatggcccccgggccctgtgtggtggcccagctgccctctgaagacatgggccacttgacagacccccagagcagag

SEQ ID NO: 587872 - DNA, 120 bp, Artificial Sequence
  ENSG00000172818_5 (sequence is synthesized)
accatggcttcctgcgcaccaagatgaaggtgacccttggggacagtcccagtggagacctgttcacctgccgtgtctgccagaaggccttcacctaccagcgcatgctgaaccgccaca

SEQ ID NO: 587873 - DNA, 120 bp, Artificial Sequence
  ENSG00000172818_6 (sequence is synthesized)
tgaagtgtcacaacgacgtcaagaggcacctctgcacgtactgcgggaagggcttcaatgacaccttcgacctcaagagacacgtccgaactcacactggcgtgcggccctacaagtgca

SEQ ID NO: 587874 - DNA, 120 bp, Artificial Sequence
  ENSG00000172818_7 (sequence is synthesized)
gcctgtgtgacaaggccttcacgcagcgctgctctctggagtctcacctcaagaagatccatggtgtgcagcagaagtacgcgtacaaggagcggcgggccaagctgtacgtgtgtgagg

SEQ ID NO: 587875 - DNA, 120 bp, Artificial Sequence
  ENSG00000172818_8 (sequence is synthesized)
agtgcggctgcacatctgagagccaggagggccacgtcctgcacctgaaggagcaccaccctgacagcccgctgctgcgcaagacctccaagaaggtggccgtggcactacagaacactg

SEQ ID NO: 587876 - DNA, 120 bp, Artificial Sequence
  ENSG00000172818_9 (sequence is synthesized)
tcacttccctgctgcagggcagcccccacctgtgagtggctcgagccctgggggtgctcctggaagccccaagagcatccaggattgcctcccagctgcctggccagcccaccctcctgc

SEQ ID NO: 587877 - DNA, 120 bp, Artificial Sequence
  ENSG00000172818_10 (sequence is synthesized)
aacctctcacccgaacaccagtgatcaggactggagcccccgtgccttggtctcccccctgggcacacgtgctcactcaggcccagcaatgacctctgctcatttttgcatttttgactt

SEQ ID NO: 587878 - DNA, 120 bp, Artificial Sequence
  ENSG00000172818_11 (sequence is synthesized)
atgggccgaggctgttctgagcctgggaagatgtacctatgtcaagagaagggatgaggccaaggctgccttcaattagaagcagccgcccacagagacaggcactgtgtgcctggcagc

SEQ ID NO: 587879 - DNA, 120 bp, Artificial Sequence
  ENSG00000172818_12 (sequence is synthesized)
caaagggtacccctgcaaacaactgtggtgggggctggcagcagaccccccacctggcagggcttctaatgctcagggttctggagggctctgtccttccggcaaggagaggcacacatg

SEQ ID NO: 587880 - DNA, 120 bp, Artificial Sequence
  ENSG00000172818_13 (sequence is synthesized)
tgtgcccagccgtgtgtgtgcgtgtgcttgtgtgtgtgcactgctgtgtgtgtgtgcacgcacaggaagcctttccacatatcacctcatttctaagaaataaactacaaggtgccaaga

SEQ ID NO: 587881 - DNA, 120 bp, Artificial Sequence
  ENSG00000172818_14 (sequence is synthesized)
aggttttatttccttttattttttaaagatgacaaatgtacagatgttaatatatttttggtgccaatggcgatgtttttaagagtgggatggagctggcttttctccattcccgtgcgc

SEQ ID NO: 587882 - DNA, 120 bp, Artificial Sequence
  ENSG00000172818_15 (sequence is synthesized)
ttctatttatcctggacatttcaaacctcctctgtgccttggctctgggcgggggctgccccaacccacccccgttctttgtacgtgctgagacagccactagaagatcttcctccagcg

SEQ ID NO: 587883 - DNA, 120 bp, Artificial Sequence
  ENSG00000172818_16 (sequence is synthesized)
gcgccctggacggctgctcctgcgaacagcccatggcatcttctgctcttccctcccggctctgccctgcacatcctgttgagccaagccccagtgacccggagagctggcctgatgctg

SEQ ID NO: 587884 - DNA, 120 bp, Artificial Sequence
  ENSG00000172818_17 (sequence is synthesized)
agagtgtgtcctcctggggctttagggggcaggaaggtgggacgaatgacgatgcccatccactacctgaagcactaggacactcttgcagggccaggctggaagaccggcccttttctt

SEQ ID NO: 587885 - DNA, 120 bp, Artificial Sequence
  ENSG00000172818_18 (sequence is synthesized)
ggttgagtcaaaagccttagcacagtggcaaaaaatgggacagaatgatgaccagcacctcagaaacttccagagggaggagaggatttgatggctaccaaattgtatctgttgcctttt

SEQ ID NO: 587886 - DNA, 120 bp, Artificial Sequence
  ENSG00000172818_19 (sequence is synthesized)
ttctgactttttcacctgaccaggctggggtttggagtggctgtggggagacccgtcctggctggctggctggctcccttgctcccttgctgcagctgggaaaggggttctgggtgtaaa

SEQ ID NO: 587887 - DNA, 120 bp, Artificial Sequence
  ENSG00000172818_20 (sequence is synthesized)
gaggtgtgcgtcttgtgggccaaagggaaaaacaggcaggggtcagagccagcctgccagaggcaaatgcaaaagaggtccccagaacacagccagctgggcagccccttaaagccaaac

SEQ ID NO: 587888 - DNA, 120 bp, Artificial Sequence
  ENSG00000172818_21 (sequence is synthesized)
cccacctgaagcagaaccactttggcctcccctgcccaaaatgggtagtgtctacacgtccccgggctcaggctcaggcccagccctgggctgacctgagaggaaggctccttcctggac

SEQ ID NO: 587889 - DNA, 120 bp, Artificial Sequence
  ENSG00000172818_22 (sequence is synthesized)
tgccctctgaaatgtgtatagattgattctaaaatctcttgtttcacttgactttagagtgtctgggacgctgctgtattctgaaagtcacatagcacacagtaatgttatctggaagct

SEQ ID NO: 587890 - DNA, 120 bp, Artificial Sequence
  ENSG00000172818_23 (sequence is synthesized)
ctgtttttgtttacatttctgtatccctgggttgactgccaatccgaggccgtcatgaagctctgtgttgtctgttttattttataaccttcctctcaactattaaaattagagatctaa

SEQ ID NO: 587891 - DNA, 120 bp, Artificial Sequence
  ENSG00000172818_24 (sequence is synthesized)
gaattcagagggaccagcccaggtggggcaggcagaaaactccggagggataattggcagggcagttcggtcctcccagttccgctaagacacaaattactcagcgggcagtggcgcttg

SEQ ID NO: 587892 - DNA, 120 bp, Artificial Sequence
  ENSG00000172818_25 (sequence is synthesized)
gctggcatcacctgcaattaccttaatagggcgggaaggcggtgcagcagtggtggtcggggcagccccgctctgctgcatgcctgcgatgggagggacggagtctccaggttccagccg

SEQ ID NO: 587893 - DNA, 120 bp, Artificial Sequence
  ENSG00000172818_26 (sequence is synthesized)
tctcatggctagggaagtttccagaaacccgctggaccctctcttctccaccaagcctctcacctgtctgttctctccccagtcagcctgggcttctgcccaccacagccctaccgggag

SEQ ID NO: 587894 - DNA, 120 bp, Artificial Sequence
  ENSG00000172818_27 (sequence is synthesized)
gataaacctaggcacctgtacccagggggtaaattctacctcctggacccaccagggaagggctccaggaacagggttgaagctggttcccccgagccccaccccatgctgagtgaaatc

SEQ ID NO: 587895 - DNA, 120 bp, Artificial Sequence
  ENSG00000172818_28 (sequence is synthesized)
tccaggccaggaaaggacctgaggacagactgaggctggaagctggagtcaaggagcatcccagggcctctcccaggcctcccaccactgcttcccagcctcccctctgtcactgggctg

SEQ ID NO: 587896 - DNA, 120 bp, Artificial Sequence
  ENSG00000172818_29 (sequence is synthesized)
gcttccttcaaggaatgtggtccagcctggctctaccactagctgggggacctcgctcacaccatccagtactaacaggcagaggagggtagaggttcctgtttgtctccacctggattg

SEQ ID NO: 587897 - DNA, 120 bp, Artificial Sequence
  ENSG00000172818_30 (sequence is synthesized)
agaaatgaaaactgtcatccagctttgaattctcagccaaggtctccaatagctgtcagcctgggcttctgcccaccacagccctaccgggagccggaaccctctgtggccgaaccccct

SEQ ID NO: 587898 - DNA, 120 bp, Artificial Sequence
  ENSG00000172819_0 (sequence is synthesized)
cgtgtccccgcctgcagagtcagtgtgcggtttgggagaaaatgtgtcggatattttggggcggtcacgtgggcgggcgggctccgagaggccccgggacagtcccagcctagagccgtg

SEQ ID NO: 587899 - DNA, 120 bp, Artificial Sequence
  ENSG00000172819_1 (sequence is synthesized)
cccccccaggagccccccagtacggcgagccccggacattgcgacgctccatccaagagactgcccgacgccgggacctcggggctccgccgcctcccttccccctcccactccagcagc

SEQ ID NO: 587900 - DNA, 120 bp, Artificial Sequence
  ENSG00000172819_2 (sequence is synthesized)
tacggcccagttccctcaacctgacccagtatgtagaagccagtctctgcaggcggccagcgggacttttggaggcccagtgggcaggccaggcagggcgggtacggagcctcccaggct

SEQ ID NO: 587901 - DNA, 120 bp, Artificial Sequence
  ENSG00000172819_3 (sequence is synthesized)
ggggcagtgggcatgggcaggggctgtggctgaagacctcgcccgcccactgcagaccccaggggactctcacaccgcagctgccatggccaccaataaggagcgactctttgcggctgg

SEQ ID NO: 587902 - DNA, 120 bp, Artificial Sequence
  ENSG00000172819_4 (sequence is synthesized)
tgccctggggcctggatctggctacccaggggcaggtttccccttcgccttcccaggggcactcagggggtctccgcctttcgagatgctgagccctagcttccggggcctgggccagcc

SEQ ID NO: 587903 - DNA, 120 bp, Artificial Sequence
  ENSG00000172819_5 (sequence is synthesized)
tgacctccccaaggagatggcctctctgtcggtggagacacagagcaccagctcagaggagatggtgcccagctcgccctcgccccctccgcctcctcgggtctacaagccatgcttcgt

SEQ ID NO: 587904 - DNA, 120 bp, Artificial Sequence
  ENSG00000172819_6 (sequence is synthesized)
gtgcaatgacaagtcctctggctaccactatggggtcagctcttgtgaaggctgcaagggcttctttcgccgaagcatccagaagaacatggtgtacacgtgtcaccgcgacaaaaactg

SEQ ID NO: 587905 - DNA, 120 bp, Artificial Sequence
  ENSG00000172819_7 (sequence is synthesized)
tatcatcaacaaggtgaccaggaatcgctgccagtactgccggctacagaagtgcttcgaagtgggcatgtccaaggaagctgtgcgaaatgaccggaacaagaagaagaaagaggtgaa

SEQ ID NO: 587906 - DNA, 120 bp, Artificial Sequence
  ENSG00000172819_8 (sequence is synthesized)
ggaagaagggtcacctgacagctatgagctgagccctcagttagaagagctcatcaccaaggtcagcaaagcccatcaggagactttcccctcgctctgccagctgggcaagtataccac

SEQ ID NO: 587907 - DNA, 120 bp, Artificial Sequence
  ENSG00000172819_9 (sequence is synthesized)
gaactccagtgcagaccaccgcgtgcagctggatctggggctgtgggacaagttcagtgagctggctaccaagtgcatcatcaagatcgtggagtttgccaagcggttgcctggctttac

SEQ ID NO: 587908 - DNA, 120 bp, Artificial Sequence
  ENSG00000172819_10 (sequence is synthesized)
agggctcagcattgctgaccagatcactctgctcaaagctgcctgcctagatatcctgatgctgcgtatctgcacaaggtacaccccagagcaggacaccatgaccttctccgacgggct

SEQ ID NO: 587909 - DNA, 120 bp, Artificial Sequence
  ENSG00000172819_11 (sequence is synthesized)
gaccctgaaccggacccagatgcacaatgccggcttcgggcccctcacagaccttgtctttgcctttgctgggcagctcctgcccctggagatggatgacaccgagacagggctgctcag

SEQ ID NO: 587910 - DNA, 120 bp, Artificial Sequence
  ENSG00000172819_12 (sequence is synthesized)
gaggagcccgaaaaagtggacaagctgcaggagccactgctggaagccctgaggctgtacgcccggcgccggcggcccagccagccctacatgttcccaaggatgctaatgaaaatcacc

SEQ ID NO: 587911 - DNA, 120 bp, Artificial Sequence
  ENSG00000172819_13 (sequence is synthesized)
gacctccggggcatcagcactaagggagctgaaagggccattactctgaagatggagattccaggcccgatgcctcccttaatccgagagatgctggagaaccctgaaatgtttgaggat

SEQ ID NO: 587912 - DNA, 120 bp, Artificial Sequence
  ENSG00000172819_14 (sequence is synthesized)
gactcctcgcagcctggtccccaccccaatgcctctagcgaggatgaggttcctgggggccagggcaaagggggcctgaagtccccagcctgaccagggcccctgacctccccgctgtgg

SEQ ID NO: 587913 - DNA, 120 bp, Artificial Sequence
  ENSG00000172819_15 (sequence is synthesized)
gggttggggcttcaggcagcagactgaccatctcccagaccgccagtgactgggggaggacctgctctgccctctccccaccccttccaatgagctccttgtttttgccaaagtttctag

SEQ ID NO: 587914 - DNA, 120 bp, Artificial Sequence
  ENSG00000172819_16 (sequence is synthesized)
gggtgcctctgtgttcatccccttcctgatctaaccggctccctcgccagtcccgggggcctgccctgctcccaccaggagagagggcaaagggatgagcctgggtttggactctaaaat

SEQ ID NO: 587915 - DNA, 120 bp, Artificial Sequence
  ENSG00000172819_17 (sequence is synthesized)
ctcagcactgccccatgggtcctagacttcccagggcaagaggaagaccctgccattccacagccccttcctctgccaggtgcttggctctctgagagcaaacaggaacactagagacca

SEQ ID NO: 587916 - DNA, 120 bp, Artificial Sequence
  ENSG00000172819_18 (sequence is synthesized)
aaaaggggacaaaggagaagggctgagcccaccttcttgctcctacccttggtgcctaatgctgtgtgatgcacctgcagggtgtgtgctagcctctgtgccccgtccttgtgccaggtc

SEQ ID NO: 587917 - DNA, 120 bp, Artificial Sequence
  ENSG00000172819_19 (sequence is synthesized)
aaggtgggggcaggctgggccctgcatttctggggcaggaacagagggtgaaagggacagatagatgcaggtccattctgcacctcttggctcgggtgcagagttcaccctgtgccctcc

SEQ ID NO: 587918 - DNA, 120 bp, Artificial Sequence
  ENSG00000172819_20 (sequence is synthesized)
gttataagtccctcccccagccctgtcatgtgccttgggctcctcctgccctccatctcagccattggggcagggaccctcctacactacagaggggccaggggatccctctctccctag

SEQ ID NO: 587919 - DNA, 120 bp, Artificial Sequence
  ENSG00000172819_21 (sequence is synthesized)
tgccttccaccctttactccccagagcagcttggcccagggaggggggatgctgcttagctgatcccgccctgacccagaggaagcctctatttatttattagcttttgtttacaccgtg

SEQ ID NO: 587920 - DNA, 120 bp, Artificial Sequence
  ENSG00000172819_22 (sequence is synthesized)
gaattgaccccttcctccaggggtcttgggtgggggagcccagggcccctgtgacccctcctttcttcctccaatccccagtttgtatttagctgccaaataagattcccattggctccc

SEQ ID NO: 587921 - DNA, 120 bp, Artificial Sequence
  ENSG00000172819_23 (sequence is synthesized)
tgtgttctcttggggggtcagggtgctgtcccctcccctctgtttacatctcccctctaccccgctgtatcgcatattgctgagttttctatttttgcaaaataaagtgatggaaactca

SEQ ID NO: 587922 - DNA, 120 bp, Artificial Sequence
  ENSG00000172819_24 (sequence is synthesized)
ctcttccccgcccaccccttacccgcatgcagcccagcgccctatgctagccctccccctccccccctgctggagcggggcgccgccgggggaggagggggaatcggctgcgggtccttg

SEQ ID NO: 587923 - DNA, 120 bp, Artificial Sequence
  ENSG00000172819_25 (sequence is synthesized)
gtgtttccagcacccagtttcccttcaagccgggtcgcgatgtacgactgtatggaaacgtttgccccgggtccgcgacggctgtacggggcggccgggcccggggccggcttgctgcgc

SEQ ID NO: 587924 - DNA, 120 bp, Artificial Sequence
  ENSG00000172819_26 (sequence is synthesized)
ccagcggccacgacagaaccaaggctcagaaatgggaggaatctctacccccttcctctcttcactcaactcccaagtcccttctctgaggcaaaataagaggaaggccaaggacaactc

SEQ ID NO: 587925 - DNA, 120 bp, Artificial Sequence
  ENSG00000172819_27 (sequence is synthesized)
gaggatcaggagctgagcatccctctgtggggacccccactgccctacctgcctgtgtttcccattggacttttggaggcccagtgggcaggccaggcagggcgggtacggagcctccca

SEQ ID NO: 587926 - DNA, 120 bp, Artificial Sequence
  ENSG00000172819_28 (sequence is synthesized)
gtgacaggaaggacaggatggagccgaatggcctggggaaggagcaggggctgcaggccctgggtggggctggggagaaccagcctgggaataggagctattataggtgatagggaaact

SEQ ID NO: 587927 - DNA, 120 bp, Artificial Sequence
  ENSG00000172819_29 (sequence is synthesized)
gaggcagtaattacagtgccagagaatagatattcatgataaggactgagcatattaaattagggtgagagaggacacccaaagggaggctctgagggtcctgaccctctccttgcgcct

SEQ ID NO: 587928 - DNA, 120 bp, Artificial Sequence
  ENSG00000172819_30 (sequence is synthesized)
aaaggtgggggacaactggcagccagggacccaggcgccctaactcctggagcttactccaggcaagatgacagggaagatgtctgtgagccctggcctcagcacccccagcaacagcca

SEQ ID NO: 587929 - DNA, 120 bp, Artificial Sequence
  ENSG00000172819_31 (sequence is synthesized)
ggtaagttaggccctgtgggtcctgccacagcccgacccacatatgggaccctcaacaattccttgatccatgcaaagatttccttaccctgcaccccctgccacacatgtgggactcct

SEQ ID NO: 587930 - DNA, 120 bp, Artificial Sequence
  ENSG00000172819_32 (sequence is synthesized)
cgtctgctcagtgctcagtctcctttcccaccactccatgcggaatctgtctgggagggggcgtggaggacccagtggtctcttctgctggtaattcttgcacctggccccatccagaga

SEQ ID NO: 587931 - DNA, 120 bp, Artificial Sequence
  ENSG00000172819_33 (sequence is synthesized)
gttctgaaaccctgtacaggcttcccaaaacgccggttggtgatcagccatctgtcactgtgtcttccccatctcttccttcccctctcactccagtatacttgtccccatagaccgcat

SEQ ID NO: 587932 - DNA, 120 bp, Artificial Sequence
  ENSG00000172819_34 (sequence is synthesized)
caagccccaccccccacccctccaggcttcgcttttaaaaaaggtctccccagtgctagctgccgaagcacccagataagagctggacggaggctaaagcggcagccccagcttcgcgcc

SEQ ID NO: 587933 - DNA, 120 bp, Artificial Sequence
  ENSG00000172819_35 (sequence is synthesized)
tacttggatctgcaggtgaaggctgagcaaagagtaagggcaggagcatctattctagatctggcatactcctgcccggccaatccagcactgggagggagtgggtaccgccccattgcc

SEQ ID NO: 587934 - DNA, 120 bp, Artificial Sequence
  ENSG00000172819_36 (sequence is synthesized)
atccagttaccctagtaagatgagagaccaggcacacagatgctgtgtctgagcagcactgctttgcacataggtggttaatagattaggtcaggcttggggcaacctgcaaggccagtg

SEQ ID NO: 587935 - DNA, 120 bp, Artificial Sequence
  ENSG00000172819_37 (sequence is synthesized)
agaggctggtactcccagcattgtgcttcagaggccctctctctttccctcaactccagggcttctttcgccgaagcatccagaagaacatggtgtacacgtgtcaccgcgacaaaaact

SEQ ID NO: 587936 - DNA, 120 bp, Artificial Sequence
  ENSG00000172819_38 (sequence is synthesized)
ctgtgaactttccttgaagcgctggattccctcccacacgttcccagcccagcagctacggcccagttccctcaacctgacccagtatgtagaagccagtctctgcaggcggccagcggg

SEQ ID NO: 587937 - DNA, 120 bp, Artificial Sequence
  ENSG00000172824_0 (sequence is synthesized)
caaggctgtgggctggtcagaagctggttacaattcctcccgccccagtacttgctggcagggattaagagcagataaaagtgtgctcacacactgtagacacggctaccatgccatcca

SEQ ID NO: 587938 - DNA, 120 bp, Artificial Sequence
  ENSG00000172824_1 (sequence is synthesized)
cagtgttgccatccacagtgttgccatcactcctgcccacagcaggagctggctggagcatgaggtggattctgtgctggagcctcaccctctgcctgatggcgcagacggccttgggtg

SEQ ID NO: 587939 - DNA, 120 bp, Artificial Sequence
  ENSG00000172824_2 (sequence is synthesized)
ccttgcacaccaagaggcctcaagtggtcaccaaatatggaaccctgcaaggaaaacagatgcatgtggggaagacacccatccaagtctttttaggagtccccttctccagacctcctc

SEQ ID NO: 587940 - DNA, 120 bp, Artificial Sequence
  ENSG00000172824_3 (sequence is synthesized)
taggtatcctcaggtttgcacctccagaacccccggagccctggaaaggaatcagagatgctaccacctacccgcctgggtgcctgcaggagtcctggggccagctggcctcgatgtacg

SEQ ID NO: 587941 - DNA, 120 bp, Artificial Sequence
  ENSG00000172824_4 (sequence is synthesized)
tcagcacgcgggaacggtacaagtggctgcgcttcagcgaggactgtctgtacctgaacgtgtacgcgccggcgcgcgcgcccggggatccccagctgccagtgatggtctggttcccgg

SEQ ID NO: 587942 - DNA, 120 bp, Artificial Sequence
  ENSG00000172824_5 (sequence is synthesized)
gaggcgccttcatcgtgggcgctgcttcttcgtacgagggctctgacttggccgcccgcgagaaagtggtgctggtgtttctgcagcacaggctcggcatcttcggcttcctgagcacgg

SEQ ID NO: 587943 - DNA, 120 bp, Artificial Sequence
  ENSG00000172824_6 (sequence is synthesized)
acgacagccacgcgcgcgggaactgggggctgctggaccagatggcggctctgcgctgggtgcaggagaacatcgcagccttcgggggagacccaggaaatgtgaccctgttcggccagt

SEQ ID NO: 587944 - DNA, 120 bp, Artificial Sequence
  ENSG00000172824_7 (sequence is synthesized)
cggcgggggccatgagcatctcaggactgatgatgtcacccctagcctcgggtctcttccatcgggccatttcccagagtggcaccgcgttattcagacttttcatcactagtaacccac

SEQ ID NO: 587945 - DNA, 120 bp, Artificial Sequence
  ENSG00000172824_8 (sequence is synthesized)
tgaaagtggccaagaaggttgcccacctggctggatgcaaccacaacagcacacagatcctggtaaactgcctgagggcactatcagggaccaaggtgatgcgtgtgtccaacaagatga

SEQ ID NO: 587946 - DNA, 120 bp, Artificial Sequence
  ENSG00000172824_9 (sequence is synthesized)
gattcctccaactgaacttccagagagacccggaagagattatctggtccatgagccctgtggtggatggtgtggtgatcccagatgaccctttggtgctcctgacccaggggaaggttt

SEQ ID NO: 587947 - DNA, 120 bp, Artificial Sequence
  ENSG00000172824_10 (sequence is synthesized)
aaaccggcaggcgatgagaaaggaaaccatcactaagatgctctggagtacccgcaccctgttgaatatcaccaaggagcaggtaccacttgtggtggaggagtacctggacaatgtcaa

SEQ ID NO: 587948 - DNA, 120 bp, Artificial Sequence
  ENSG00000172824_11 (sequence is synthesized)
tgagcatgactggaagatgctacgaaaccgtatgatggacatagttcaagatgccactttcgtgtatgccacactgcagactgctcactaccaccgagatgccggcctccctgtctacct

SEQ ID NO: 587949 - DNA, 120 bp, Artificial Sequence
  ENSG00000172824_12 (sequence is synthesized)
gtatgaatttgagcaccacgctcgtggaataatcgtcaaaccccgcactgatggggcagaccatggggatgagatgtacttcctctttgggggccccttcgccacaggcctttccatggg

SEQ ID NO: 587950 - DNA, 120 bp, Artificial Sequence
  ENSG00000172824_13 (sequence is synthesized)
taaggagaaggcacttagcctccagatgatgaaatactgggccaactttgcccgcacaggaaaccccaatgatgggaatctgccctgctggccacgctacaacaaggatgaaaagtacct

SEQ ID NO: 587951 - DNA, 120 bp, Artificial Sequence
  ENSG00000172824_14 (sequence is synthesized)
gcagctggattttaccacaagagtgggcatgaagctcaaggagaagaagatggctttttggatgagtctgtaccagtctcaaagacctgagaagcagaggcaattctaagggtggctatg

SEQ ID NO: 587952 - DNA, 120 bp, Artificial Sequence
  ENSG00000172824_15 (sequence is synthesized)
caggaaggagccaaagaggggtttgcccccaccatccaggccctggggagactagccatggacatacctggggacaagagttctacccaccccagtttagaactgcaggagctccctgct

SEQ ID NO: 587953 - DNA, 120 bp, Artificial Sequence
  ENSG00000172824_16 (sequence is synthesized)
gcctccaggccaaagctagagcttttgcctgttgtgtgggacctgcactgccctttccagcctgacatcccatgatgcccctctacttcactgttgacatccagttaggccaggccctgt

SEQ ID NO: 587954 - DNA, 120 bp, Artificial Sequence
  ENSG00000172824_17 (sequence is synthesized)
caacaccacactgtgctcagctctccagcctcaggacaacctctttttttcccttcttcaaatcctcccacccttcaatgtctccttgtgactccttcttatgggaggtcgacccagact

SEQ ID NO: 587955 - DNA, 120 bp, Artificial Sequence
  ENSG00000172824_18 (sequence is synthesized)
gccactgcccctgtcactgcacccagcttggcatttaccatccatcctgctcaaccttgtgcctgtctgttcacattggcctggaggcctagggcaggttgtgacatggagcaaactttt

SEQ ID NO: 587956 - DNA, 120 bp, Artificial Sequence
  ENSG00000172824_19 (sequence is synthesized)
ggtagtttgggatcttctctcccacccacacttatctcccccagggccactccaaagtctatacacaggggtggtctcttcaataaagaagtgttgattagacctgaatttctccaccta

SEQ ID NO: 587957 - DNA, 120 bp, Artificial Sequence
  ENSG00000172824_20 (sequence is synthesized)
ttcaagcgagtctcctgcctcagcctctgagtatctggggctacaggtgcctgcaggagtcctggggccagctggcctcgatgtacgtcagcacgcgggaacggtacaagtggctgcgct

SEQ ID NO: 587958 - DNA, 120 bp, Artificial Sequence
  ENSG00000172824_21 (sequence is synthesized)
gtgctcagttcggacagggttgacccccctgttttttttaacctagtagctgctctttgcaaaggggctcccagccagggtaaggatctttcttggagggtctggggtttgctgtgggat

SEQ ID NO: 587959 - DNA, 120 bp, Artificial Sequence
  ENSG00000172824_22 (sequence is synthesized)
cagatgactgcttacaggtaaggtgctcagggtcacaggggcagttatgcagcaaaatcaggggttacaatcagcagagacagaaactttcccaggaagctccctttctccccctcccag

SEQ ID NO: 587960 - DNA, 120 bp, Artificial Sequence
  ENSG00000172824_23 (sequence is synthesized)
gccaaaaactcctggggggctgagcatggatccaagtcactggtgggcccacctctggcccagctggcacccaggcctcaggtaagtgtggcctcctcactcagaatatcaccaaggagc

SEQ ID NO: 587961 - DNA, 120 bp, Artificial Sequence
  ENSG00000172824_24 (sequence is synthesized)
ctgctcactaccaccgaggtatgcagggtccccaagagtggccacactggccccgtccactctccaggtgtgctgtttaccaactgggcttatcgactgctcccctaccctctctgtact

SEQ ID NO: 587962 - DNA, 120 bp, Artificial Sequence
  ENSG00000172824_25 (sequence is synthesized)
tcgactgctcccctaccctctctgtacttctgggctagtataggattctaagatatcacagaggaggcagcatgctatcaactacaagagaggaaggggccaggcacggtggctcacacc

SEQ ID NO: 587963 - DNA, 66 bp, Artificial Sequence
  ENSG00000172824_26 (sequence is synthesized)
tctactaaaagtacaaaaaaattagccagctgtagtggcgcatgcctatagtcccagctactcagt

SEQ ID NO: 587964 - DNA, 120 bp, Artificial Sequence
  ENSG00000172824_27 (sequence is synthesized)
cgagactccatctcaaaaaaaaaacaaaaaaagtataagagaggaactgttcttccttaggaacaagggcaggacctcaaacagtccagaggagaagcctggggtggtcagggaaggctt

SEQ ID NO: 587965 - DNA, 120 bp, Artificial Sequence
  ENSG00000172824_28 (sequence is synthesized)
acagtccagaggagaagcctggggtggtcagggaaggcttcctggctgagaggacaggcttaggggcaccttgaaagttcaggctgactggggctaggggaacatgtgggtaacaggtta

SEQ ID NO: 587966 - DNA, 120 bp, Artificial Sequence
  ENSG00000172824_29 (sequence is synthesized)
aaggggggggggctggaaaatgcagacaccaaagacccttcaatatgaggccaagaaaggaaggttcagaacagggaaaaggaaggcttccatgatcctggccacaatcctgtgaattag

SEQ ID NO: 587967 - DNA, 120 bp, Artificial Sequence
  ENSG00000172824_30 (sequence is synthesized)
gttttagtattctcagtctgaagataaggaattattgatacaattcagaaaggtagagcaacttgctttaggtcacacagtgaatgagtagtgcagacaggattcaagtctgcccccttg

SEQ ID NO: 587968 - DNA, 120 bp, Artificial Sequence
  ENSG00000172824_31 (sequence is synthesized)
attctgaagccaaagctctttttcctgcttggtgcaggtgagtgggaggcatggggtggatgagaagcctaggcagaggcttttcctgcatccctcctcagtttccctattcacagatgc

SEQ ID NO: 587969 - DNA, 120 bp, Artificial Sequence
  ENSG00000172824_32 (sequence is synthesized)
cagacccacccctccattggctggccacagggagctcaccagttcctaatctgttatgctctcccaaatgaaagtcttctgctccggaagcagcagaagcagcaggagtagggtgggagg

SEQ ID NO: 587970 - DNA, 120 bp, Artificial Sequence
  ENSG00000172824_33 (sequence is synthesized)
agacgctgcctggattttgctttgggttccgtcttctcactgcggaccctggattgaaacgatctccccgcggccgccgccgctacctggtgcccgcaggtgcctgcaggagtcctgggg

SEQ ID NO: 587971 - DNA, 120 bp, Artificial Sequence
  ENSG00000172828_0 (sequence is synthesized)
attccaccttctgaagcttctgtcgaaccagttgtaaggagaatggagagagcagtgagagtggagtccggggtcctggtcggggtggtctgtctgctcctggcatgccctgccacagcc

SEQ ID NO: 587972 - DNA, 120 bp, Artificial Sequence
  ENSG00000172828_1 (sequence is synthesized)
actgggcccgaagttgctcagcctgaagtagacaccaccctgggtcgtgtgcgaggccggcaggtgggcgtgaagggcacagaccgccttgtgaatgtctttctgggcattccatttgcc

SEQ ID NO: 587973 - DNA, 120 bp, Artificial Sequence
  ENSG00000172828_2 (sequence is synthesized)
cagccgccactgggccctgaccggttctcagccccacacccagcacagccctgggagggtgtgcgggatgccagcactgcgcccccaatgtgcctacaagacgtggagagcatgaacagc

SEQ ID NO: 587974 - DNA, 120 bp, Artificial Sequence
  ENSG00000172828_3 (sequence is synthesized)
agcagatttgtcctcaacggaaaacagcagatcttctccgtttcagaggactgcctggtcctcaacgtctatagcccagctgaggtccccgcagggtccggtaggccggtcatggtatgg

SEQ ID NO: 587975 - DNA, 120 bp, Artificial Sequence
  ENSG00000172828_4 (sequence is synthesized)
gtccatggaggcgctctgataactggcgctgccacctcctacgatggatcagctctggctgcctatggggatgtggtcgtggttacagtccagtaccgccttggggtccttggcttcttc

SEQ ID NO: 587976 - DNA, 120 bp, Artificial Sequence
  ENSG00000172828_5 (sequence is synthesized)
agcactggagatgagcatgcacctggcaaccagggcttcctagatgtggtagctgctttgcgctgggtgcaagaaaacatcgcccccttcgggggtgacctcaactgtgtcactgtcttt

SEQ ID NO: 587977 - DNA, 120 bp, Artificial Sequence
  ENSG00000172828_6 (sequence is synthesized)
ggtggatctgccggtgggagcatcatctctggcctggtcctgtccccagtggctgcagggctgttccacagagccatcacacagagtggggtcatcaccaccccagggatcatcgactct

SEQ ID NO: 587978 - DNA, 120 bp, Artificial Sequence
  ENSG00000172828_7 (sequence is synthesized)
cacccttggcccctagctcagaaaatcgcaaacaccttggcctgcagctccagctccccggctgagatggtgcagtgccttcagcagaaagaaggagaagagctggtccttagcaagaag

SEQ ID NO: 587979 - DNA, 120 bp, Artificial Sequence
  ENSG00000172828_8 (sequence is synthesized)
ctgaaaaatactatctatcctctcaccgttgatggcactgtcttccccaaaagccccaaggaactcctgaaggagaagcccttccactctgtgcccttcctcatgggtgtcaacaaccat

SEQ ID NO: 587980 - DNA, 120 bp, Artificial Sequence
  ENSG00000172828_9 (sequence is synthesized)
gagttcagctggctcatccccaggggctggggtctcctggatacaatggagcagatgagccgggaggacatgctggccatctcaacacccgtcttgaccagtctggatgtgccccctgag

SEQ ID NO: 587981 - DNA, 120 bp, Artificial Sequence
  ENSG00000172828_10 (sequence is synthesized)
atgatgcccaccgtcatagatgaatacctaggaagcaactcggacgcacaagccaaatgccaggcgttccaggaattcatgggtgacgtattcatcaatgttcccaccgtcagtttttca

SEQ ID NO: 587982 - DNA, 120 bp, Artificial Sequence
  ENSG00000172828_11 (sequence is synthesized)
agataccttcgagattctggaagccctgtctttttctatgagttccagcatcgacccagttcttttgcgaagatcaaacctgcctgggtgaaggctgatcatggggccgagggtgctttt

SEQ ID NO: 587983 - DNA, 120 bp, Artificial Sequence
  ENSG00000172828_12 (sequence is synthesized)
gtgttcggaggtcccttcctcatggacgagagctcccgcctggcctttccagaggccacagaggaggagaagcagctaagcctcaccatgatggcccagtggacccactttgcccggaca

SEQ ID NO: 587984 - DNA, 120 bp, Artificial Sequence
  ENSG00000172828_13 (sequence is synthesized)
ggggaccccaatagcaaggctctgcctccttggccccaattcaaccaggcggaacaatatctggagatcaacccagtgccacgggccggacagaagttcagggaggcctggatgcagttc

SEQ ID NO: 587985 - DNA, 120 bp, Artificial Sequence
  ENSG00000172828_14 (sequence is synthesized)
tggtcagagacgctccccagcaagatacaacagtggcaccagaagcagaagaacaggaaggcccaggaggacctctgaggccaggcctgaaccttcttggctggggcaaaccactcttca

SEQ ID NO: 587986 - DNA, 120 bp, Artificial Sequence
  ENSG00000172828_15 (sequence is synthesized)
agtggtggcagagtcccagcacggcagcccgcctctccccctgctgagactttaatctccaccagcccttaaagtgtcggccgctctgtgactggagttatgctcttttgaaatgtcaca

SEQ ID NO: 587987 - DNA, 120 bp, Artificial Sequence
  ENSG00000172828_16 (sequence is synthesized)
ggggcattgtacaagttcttccctctccctgaagtgcctttcctgctttcttcgtggtaggttctagcacattcctctagcttcctggaggactcactcccccaggaagccttccctgcc

SEQ ID NO: 587988 - DNA, 120 bp, Artificial Sequence
  ENSG00000172828_17 (sequence is synthesized)
ttctctgggctgtgcggccccgagtctgcgtccattagagcacagtccacccgaggctagcaccgtgtctgtgtctgtctccccctcagaggagctctctcaaaatggggattagcctaa

SEQ ID NO: 587989 - DNA, 120 bp, Artificial Sequence
  ENSG00000172828_18 (sequence is synthesized)
ccccactctgtcacccacaccaggatcgggtgggacctggagctagggggtgtttgctgagtgagtgagtgaaacacagaatatgggaatggcagctgctgaacttgaacccagagcctt

SEQ ID NO: 587990 - DNA, 120 bp, Artificial Sequence
  ENSG00000172828_19 (sequence is synthesized)
caggtgccaaagccatactcaggcccccaccgacattgtccaccctggccagaagggtgcatgccaatggcagagacctgggatgggagaagtcctggggcgccaggggatccagcctag

SEQ ID NO: 587991 - DNA, 120 bp, Artificial Sequence
  ENSG00000172828_20 (sequence is synthesized)
agcagaccttagcccctgactaaggcctcagactagggcgggaggggtctcctcctctctgctgcccagtcctggcccctgcacaagacaacagaatccatcagggccatgagtgtcacc

SEQ ID NO: 587992 - DNA, 120 bp, Artificial Sequence
  ENSG00000172828_21 (sequence is synthesized)
cagacctgaccctcaccaattccagccctgaccctcaggacgctggatgccagctcccagccccagtgccgggtcctccctcccttcctggcttggggagaccagtttctggggagcttc

SEQ ID NO: 587993 - DNA, 120 bp, Artificial Sequence
  ENSG00000172828_22 (sequence is synthesized)
caagagcacccaccaagacacagcaggacaggccaggggagggcatctggaccagggcatccgtcgggctattgtcacagagaaaagaagagacccacccactcgggctgcaaaaggtga

SEQ ID NO: 587994 - DNA, 80 bp, Artificial Sequence
  ENSG00000172828_23 (sequence is synthesized)
agaaaagaagagacccacccactcgggctgcaaaaggtgaaaagcaccaagaggttttcagatggaacttgctctccctg

SEQ ID NO: 587995 - DNA, 75 bp, Artificial Sequence
  ENSG00000172828_24 (sequence is synthesized)
cggagggagaggggcgggcaggaaccggggctgcgcgcagcgcttgcgggccagagtgagttccgggtgggcgtg

SEQ ID NO: 587996 - DNA, 120 bp, Artificial Sequence
  ENSG00000172828_25 (sequence is synthesized)
cgcagcgcttgcgggccagagtgagttccgggtgggcgtgggctcggcggggccccactcagagcagctggccggccccaggcagtgagggccttagcacctgggccagcagctgctgtg

SEQ ID NO: 587997 - DNA, 80 bp, Artificial Sequence
  ENSG00000172828_26 (sequence is synthesized)
gggcagggctcgggacctgcagccctccatgcctgaccctccccccaccccccgtgggctcctgtgcggccggagcctcc

SEQ ID NO: 587998 - DNA, 70 bp, Artificial Sequence
  ENSG00000172828_27 (sequence is synthesized)
agcgcgggactggcaggcagctccacctgctgccccagtgctggatccactgggtgaagccagctgggct

SEQ ID NO: 587999 - DNA, 85 bp, Artificial Sequence
  ENSG00000172828_28 (sequence is synthesized)
accaatcagcaggatgtgggtggggcgagacacaacccccctcgggtcccctcccacgccgtggaagctttgttctttcgctctt

SEQ ID NO: 588000 - DNA, 120 bp, Artificial Sequence
  ENSG00000172828_29 (sequence is synthesized)
gcgcccccaatgtgagtagtgctggtggaggcgggcaaacaggcaggttgcaggagaatcctgctgctggggcttgtggggctgaacagctggacctcaggcccacccttggccacaggt

SEQ ID NO: 588001 - DNA, 120 bp, Artificial Sequence
  ENSG00000172828_30 (sequence is synthesized)
ccctgcaggagcagaggggcagtctacccccaggtggggctggggacagcagctcatgaggggaaggggctgagggcttggagacagaaatggagggccatctccatccccacagcaggc

SEQ ID NO: 588002 - DNA, 120 bp, Artificial Sequence
  ENSG00000172828_31 (sequence is synthesized)
ctgtcttctaggaaagaaactggacgcatctgttgccctgatctcctggttcccccgacccccttaaccctggtgatcttcatcccttcactttccctccaggctcagacactcaggcct

SEQ ID NO: 588003 - DNA, 120 bp, Artificial Sequence
  ENSG00000172828_32 (sequence is synthesized)
gcagctcagtggctgctggggtcctagcctttgaggcttggccctaacttgggagcctcctgcattgctttctcctgcagaaaaatactatctatcctctcaccgttgatggcactgtct

SEQ ID NO: 588004 - DNA, 120 bp, Artificial Sequence
  ENSG00000172828_33 (sequence is synthesized)
gtgtgactctgtgccagagcaattgactaaaactctcaggttttagatatcaagccaccggggacttcatgagccaagtcccttccattcctttccaggtgcatagaacttcccacaaga

SEQ ID NO: 588005 - DNA, 120 bp, Artificial Sequence
  ENSG00000172828_34 (sequence is synthesized)
agaacttcccacaagagtgtcagcactgtgctttcatcccgagcatcttgtttctgtcattcttattcttctacccatcttcacagcaatcattttcttcacttttcttttttttttttt

SEQ ID NO: 588006 - DNA, 120 bp, Artificial Sequence
  ENSG00000172828_35 (sequence is synthesized)
gcacaccctaagacaaagcaatccatttttgttgttgttgttgtttgtgtgtttgtttgttttttgagacagagcctcgatccatcatccaggctgcagtgcagcagcgccatcatgact

SEQ ID NO: 588007 - DNA, 120 bp, Artificial Sequence
  ENSG00000172828_36 (sequence is synthesized)
ggtaggcaccccagagggccctgtccacctgatccagctccactatgcctacctgtcccctccccgtccctgtttccaaagcaccctagcggtcctgagactgcctgggctggcaggtgg

SEQ ID NO: 588008 - DNA, 120 bp, Artificial Sequence
  ENSG00000172830_0 (sequence is synthesized)
gtccgtccttcctggtcctgcgggtccaggactgtccgcggggttgagggaaggggccgtgcccggtgccagcccaggtgctcgcggcctggctccatggccctggtcacagtgagccgt

SEQ ID NO: 588009 - DNA, 120 bp, Artificial Sequence
  ENSG00000172830_1 (sequence is synthesized)
tcgcccccgggcagcggcgcctccacgcccgtggggccctgggaccaggcggtccagcgaaggagtcgactccagcgaaggcagagctttgcggtgctccgtggggctgtcctgggactg

SEQ ID NO: 588010 - DNA, 120 bp, Artificial Sequence
  ENSG00000172830_2 (sequence is synthesized)
caggatggaggggacaatgatgatgcagcagaggccagttctgagccaacagagaaggccccgagtgaggaggagctccacggggaccagacagacttcgggcaaggatcccagagtccc

SEQ ID NO: 588011 - DNA, 120 bp, Artificial Sequence
  ENSG00000172830_3 (sequence is synthesized)
cagaagcaggaggagcagaggcagcacctgcacctcatggtacagctgctgaggccgcaggatgacatccgcctggcagcccagctggaggcaccccggcctccccggctccgctacctg

SEQ ID NO: 588012 - DNA, 120 bp, Artificial Sequence
  ENSG00000172830_4 (sequence is synthesized)
ctggtagtttctacacgagaaggagaaggtctgagccaggatgagacggtcctcctgggcgtggatttccctgacagcagctcccccagctgcaccctgggcctggtcttgcccctctgg

SEQ ID NO: 588013 - DNA, 120 bp, Artificial Sequence
  ENSG00000172830_5 (sequence is synthesized)
agtgacacccaggtgtacttagatggagacgggggcttcagcgtgacgtctggtgggcaaagccggatcttcaagcccatctccatccagaccatgtgggccacactccaggtattgcac

SEQ ID NO: 588014 - DNA, 120 bp, Artificial Sequence
  ENSG00000172830_6 (sequence is synthesized)
caagcatgtgaggcagctctaggcagcggccttgtaccgggtggcagtgccctcacctgggccagccactaccaggagagactgaactccgaacagagctgcctcaatgagtggacggct

SEQ ID NO: 588015 - DNA, 120 bp, Artificial Sequence
  ENSG00000172830_7 (sequence is synthesized)
atggccgacctggagtctctgcggcctcccagcgccgagcctggcgggtcctcagaacaggagcagatggagcaggcgatccgtgctgagctgtggaaagtgttggatgtcagtgacctg

SEQ ID NO: 588016 - DNA, 120 bp, Artificial Sequence
  ENSG00000172830_8 (sequence is synthesized)
gagagtgtcacttccaaagagatccgccaggctctggagctgcgcctggggctccccctccagcagtaccgtgacttcatcgacaaccagatgctgctgctggtggcacagcgggaccga

SEQ ID NO: 588017 - DNA, 120 bp, Artificial Sequence
  ENSG00000172830_9 (sequence is synthesized)
gcctcccgcatcttcccccacctctacctgggctcagagtggaacgcagcaaacctggaggagctgcagaggaacagggtcacccacatcttgaacatggcccgggagattgacaacttc

SEQ ID NO: 588018 - DNA, 120 bp, Artificial Sequence
  ENSG00000172830_10 (sequence is synthesized)
taccctgagcgcttcacctaccacaatgtgcgcctctgggatgaggagtcggcccagctgctgccgcactggaaggagacgcaccgcttcattgaggctgcaagagcacagggcacccac

SEQ ID NO: 588019 - DNA, 120 bp, Artificial Sequence
  ENSG00000172830_11 (sequence is synthesized)
ggcgtcagccgctcagcggccacagtgctggcctatgccatgaagcagtacgaatgcagcctggagcaggccctgcgccacgtgcaggagctccggcccatcgcccgccccaaccctggc

SEQ ID NO: 588020 - DNA, 120 bp, Artificial Sequence
  ENSG00000172830_12 (sequence is synthesized)
ttcctgcgccagctgcagatctaccagggcatcctgacggccagccgccagagccatgtctgggagcagaaagtgggtggggtctccccagaggagcacccagcccctgaagtctctaca

SEQ ID NO: 588021 - DNA, 120 bp, Artificial Sequence
  ENSG00000172830_13 (sequence is synthesized)
ccattcccacctcttccgccagaacctgagggtggtggggaggagaaggttgtaggcatggaagagagccaggcagccccgaaagaagagcctgggccacggccacgtataaacctccga

SEQ ID NO: 588022 - DNA, 120 bp, Artificial Sequence
  ENSG00000172830_14 (sequence is synthesized)
ggggtcatgaggtccatcagtcttctggagccctccttggagctggagagcacctcagagaccagtgacatgccagaggtcttctcttcccacgagtcttcacatgaagagcctctgcag

SEQ ID NO: 588023 - DNA, 120 bp, Artificial Sequence
  ENSG00000172830_15 (sequence is synthesized)
cccttcccacagcttgcaaggaccaagggaggccagcaggtggacagggggcctcagcctgccctgaagtcccgccagtcagtggttaccctccagggcagtgccgtggtggccaaccgg

SEQ ID NO: 588024 - DNA, 120 bp, Artificial Sequence
  ENSG00000172830_16 (sequence is synthesized)
acccaggccttccaggagcaggagcaggggcaggggcaggggcagggagagccctgcatttcctctacgcccaggttccggaaggtggtgagacaggccagcgtgcatgacagtggagag

SEQ ID NO: 588025 - DNA, 120 bp, Artificial Sequence
  ENSG00000172830_17 (sequence is synthesized)
gagggcgaggcctgagccctcacacatgcccacgctcccctgacactgaagaggatccacaactccttggagaaacaccctcacgtctgttgccgcacacattcctctcagctccgcccc

SEQ ID NO: 588026 - DNA, 120 bp, Artificial Sequence
  ENSG00000172830_18 (sequence is synthesized)
atacccgtcactacagcctcacctcccacccctgtcactacggcctcacctcccacccctgtcactacagcctcacctcctacagccttaagtcccaggcccatgtctgcctgtccaagg

SEQ ID NO: 588027 - DNA, 120 bp, Artificial Sequence
  ENSG00000172830_19 (sequence is synthesized)
gctcaagactttctaactgggatgtggtagagggactgaaggtacctttgggggcaacagcaccctagtttcattctcaactctagccctgcacactcacctgtggcacggaatgaaaac

SEQ ID NO: 588028 - DNA, 120 bp, Artificial Sequence
  ENSG00000172830_20 (sequence is synthesized)
agagcttcccgtgcaaaaagggtcacgcctcccacccccgccccctccctgcacctcctgtcctctcccagttcattcctggaaccagccaggccaggcaaccagtggcccccaaaggca

SEQ ID NO: 588029 - DNA, 120 bp, Artificial Sequence
  ENSG00000172830_21 (sequence is synthesized)
ggcaggatcctcaggccccagccgcgggaggctggaagggctggcagatcgcttccctcatccacctccaccggtccaggtctttgctgctgtccccagacctcctgtgacaccacgcca

SEQ ID NO: 588030 - DNA, 120 bp, Artificial Sequence
  ENSG00000172830_22 (sequence is synthesized)
gatcacagggcaccaggccagagatagtcttctttttgtcctttctggcctctggctagtcagtttttcatagccttacagtatctggctttgtactgagaaataaaacacattttcata

SEQ ID NO: 588031 - DNA, 120 bp, Artificial Sequence
  ENSG00000172830_23 (sequence is synthesized)
ggtcgcagccaggtgacagctgggtcacttctcctcccactgtcactgctgcctccatctgacttgaaactcagagctaaagcgaggcccaggggctgccaggtccgattgccagtgggc

SEQ ID NO: 588032 - DNA, 120 bp, Artificial Sequence
  ENSG00000172830_24 (sequence is synthesized)
gtggtgccgcccacgcagttgctgccccggcttgggagcgcgtcctgcccgccagcgggctcctctcgaacggggacatgaggagggggccccggggctcgggctggagggcgctggggg

SEQ ID NO: 588033 - DNA, 120 bp, Artificial Sequence
  ENSG00000172830_25 (sequence is synthesized)
cctcgagggtctctggtactggcgccggggcacaatccagagccctgcgcgccgcccgggctgcggaggccccgatctgagcgcgccccccgccacactcggcgcccacccagccgacct

SEQ ID NO: 588034 - DNA, 120 bp, Artificial Sequence
  ENSG00000172830_26 (sequence is synthesized)
gcatctggcgccttttctggcctcccccaactctagaattcctgagagaggggaggggacagccctccccgccctcaccctgccctggggctgctctctccgcaggaccaggcggtccag

SEQ ID NO: 588035 - DNA, 120 bp, Artificial Sequence
  ENSG00000172830_27 (sequence is synthesized)
ggccgacctggagtctctgcggcctcccagcgccgagcctggcgggtcagtgtgtggaggggagggactgggtggaggggaaggcaggataatgcagtggggggcatggtggagagggga

SEQ ID NO: 588036 - DNA, 120 bp, Artificial Sequence
  ENSG00000172831_0 (sequence is synthesized)
atgactgctcagtcccgctctcctaccacacccacctttcccggcccaagccagcgcaccccgctgactccctgcccagtccaaactccaaggctgggcaaggcactgatccactgctgg

SEQ ID NO: 588037 - DNA, 120 bp, Artificial Sequence
  ENSG00000172831_1 (sequence is synthesized)
acagacccggggcagcctctgggtgaacagcagcgtgtccgccggcagcgaaccgagaccagcgagccgaccatgcggctgcacagacttcgtgcgcggctgagcgcggtggcctgtggg

SEQ ID NO: 588038 - DNA, 120 bp, Artificial Sequence
  ENSG00000172831_2 (sequence is synthesized)
cttctgctgcttcttgtccggggccagggccaggactcagccagtcccatccggaccacacacacggggcaggtgctggggagtcttgtccatgtgaagggcgccaatgccggggtccaa

SEQ ID NO: 588039 - DNA, 120 bp, Artificial Sequence
  ENSG00000172831_3 (sequence is synthesized)
accttcctgggaattccatttgccaagccacctctaggtccgctgcgatttgcaccccctgagccccctgaatcttggagtggtgtgagggatggaaccacccatccggccatgtgtcta

SEQ ID NO: 588040 - DNA, 120 bp, Artificial Sequence
  ENSG00000172831_4 (sequence is synthesized)
caggacctcaccgcagtggagtcagagtttcttagccagttcaacatgaccttcccttccgactccatgtctgaggactgcctgtacctcagcatctacacgccggcccatagccatgaa

SEQ ID NO: 588041 - DNA, 120 bp, Artificial Sequence
  ENSG00000172831_5 (sequence is synthesized)
ggctctaacctgccggtgatggtgtggatccacggtggtgcgcttgtttttggcatggcttccttgtatgatggttccatgctggctgccttggagaacgtggtggtggtcatcatccag

SEQ ID NO: 588042 - DNA, 120 bp, Artificial Sequence
  ENSG00000172831_6 (sequence is synthesized)
taccgcctgggtgtcctgggcttcttcagcactggagacaagcacgcaaccggcaactggggctacctggaccaagtggctgcactacgctgggtccagcagaatatcgcccactttgga

SEQ ID NO: 588043 - DNA, 120 bp, Artificial Sequence
  ENSG00000172831_7 (sequence is synthesized)
cccatatcccaaggactcttccacggagccatcatggagagtggcgtggccctcctgcccggcctcattgccagctcagctgatgtcatctccacggtggtggccaacctgtctgcctgt

SEQ ID NO: 588044 - DNA, 120 bp, Artificial Sequence
  ENSG00000172831_8 (sequence is synthesized)
gaccaagttgactctgaggccctggtgggctgcctgcggggcaagagtaaagaggagattcttgcaattaacaagcctttcaagatgatccccggagtggtggatggggtcttcctgccc

SEQ ID NO: 588045 - DNA, 120 bp, Artificial Sequence
  ENSG00000172831_9 (sequence is synthesized)
aggcacccccaggagctgctggcctctgccgactttcagcctgtccctagcattgttggtgtcaacaacaatgaattcggctggctcatccccaaggtcatgaggatctatgatacccag

SEQ ID NO: 588046 - DNA, 120 bp, Artificial Sequence
  ENSG00000172831_10 (sequence is synthesized)
aaggaaatggacagagaggcctcccaggctgctctgcagaaaatgttaacgctgctgatgttgcctcctacatttggtgacctgctgagggaggagtacattggggacaatggggatccc

SEQ ID NO: 588047 - DNA, 120 bp, Artificial Sequence
  ENSG00000172831_11 (sequence is synthesized)
cagaccctccaagcgcagttccaggagatgatggcggactccatgtttgtgatccctgcactccaagtagcacattttcagtgttcccgggcccctgtgtacttctacgagttccagcat

SEQ ID NO: 588048 - DNA, 120 bp, Artificial Sequence
  ENSG00000172831_12 (sequence is synthesized)
cagcccagctggctcaagaacatcaggccaccgcacatgaaggcagaccatggtgatgagcttccttttgttttcagaagtttctttgggggcaactacattaaattcactgaggaagag

SEQ ID NO: 588049 - DNA, 120 bp, Artificial Sequence
  ENSG00000172831_13 (sequence is synthesized)
gagcagctaagcaggaagatgatgaagtactgggccaactttgcgagaaatgggaaccccaatggcgagggtctgccacactggccgctgttcgaccaggaggagcaatacctgcagctg

SEQ ID NO: 588050 - DNA, 120 bp, Artificial Sequence
  ENSG00000172831_14 (sequence is synthesized)
aacctacagcctgcggtgggccgggctctgaaggcccacaggctccagttctggaagaaggcgctgccccaaaagatccaggagctcgaggagcctgaagagagacacacagagctgtag

SEQ ID NO: 588051 - DNA, 120 bp, Artificial Sequence
  ENSG00000172831_15 (sequence is synthesized)
attcattcatacttccgtccatccattcagaaagcatttattaagaatttactcaggcatgatggcccatacttgtaatcccagctattgggaaggatgagatgggaggatggcttgagg

SEQ ID NO: 588052 - DNA, 120 bp, Artificial Sequence
  ENSG00000172831_16 (sequence is synthesized)
ccagaggtttgagaccgaccagccagggcaacacagtgagaccccttctcaaaaaaaaaaaaaaaaaagagagagtgtgtgattagaagctaaataggaaagttttgagcttcaagtcag

SEQ ID NO: 588053 - DNA, 120 bp, Artificial Sequence
  ENSG00000172831_17 (sequence is synthesized)
tgaggagtaaaaaagatttttaaaaagcaaagaaaacaaaatataagggaaaaatatgagaaaaataaaaataaaaagagaataataggccaggcactgtggctcatgcccctaatccca

SEQ ID NO: 588054 - DNA, 89 bp, Artificial Sequence
  ENSG00000172831_18 (sequence is synthesized)
aataataggccaggcactgtggctcatgcccctaatcccagcacttttgggaggtcaaggtgagcagaacccaacgtggtgaaacccca

SEQ ID NO: 588055 - DNA, 120 bp, Artificial Sequence
  ENSG00000172831_19 (sequence is synthesized)
cgagactccgtttccaaaaaaataagagagaatagaagaagctactgcatgatgttagttaccaagcctgccatgggtcctctcttgctagacacactccatagatccccccactgagct

SEQ ID NO: 588056 - DNA, 120 bp, Artificial Sequence
  ENSG00000172831_20 (sequence is synthesized)
gtggatgggcaaaccccggtggaatcccaccctccccaacaccccactgagccctgggccccctcctcccttcctcacctccaccttctccctgccttctctcttctctcgtctgagccc

SEQ ID NO: 588057 - DNA, 120 bp, Artificial Sequence
  ENSG00000172831_21 (sequence is synthesized)
ccaggccttttccactttgagggaggtgcttcgaagaatgttgcccacacctaagtgttagaagcctatgtccgttcatccctgagaggtctgaaagaataaaaataaattctaaaaaaa

SEQ ID NO: 588058 - DNA, 120 bp, Artificial Sequence
  ENSG00000172831_22 (sequence is synthesized)
gtggcgtggcgacggagtcgcgcgagggacacgccgcgttgtgggttctcggcctgaggtgcgagagaagcggtgaccgcggccctggctgctcggacccgggaacatgatggtcgctgg

SEQ ID NO: 588059 - DNA, 120 bp, Artificial Sequence
  ENSG00000172831_23 (sequence is synthesized)
agcagaaggcgctgagaagggaccacggcggcgctgggtcgtgcgagccagtagcgggctgaaacgtagaggccagaaccaggtctcagggggcactaaaggcggtcggaggtaatcccc

SEQ ID NO: 588060 - DNA, 120 bp, Artificial Sequence
  ENSG00000172831_24 (sequence is synthesized)
acaccgcttcctcctggaagtcaggctggccgggagctcccgtatccaggacggttggtcgcctctggcctggcagggatcctagtgtctcgggacctcccggtgacgcgcctgcctccc

SEQ ID NO: 588061 - DNA, 120 bp, Artificial Sequence
  ENSG00000172831_25 (sequence is synthesized)
ctgctgcaccataggcccgggagtacggcgtccccacagcttggaccggcaggggctcgtgaaatgtttgtcaagtggataaatgaccatggccgtggtctccgcgggaggtgaggaaac

SEQ ID NO: 588062 - DNA, 120 bp, Artificial Sequence
  ENSG00000172831_26 (sequence is synthesized)
tgaaagccaccgaggaaaaggggggcgctccttaagaagtgccgcggtcacgtgtacgtttcaaaagaatggcgtgactgagtagggaggggaccgcggagaccctcagaccctggactg

SEQ ID NO: 588063 - DNA, 120 bp, Artificial Sequence
  ENSG00000172831_27 (sequence is synthesized)
taaggagatgaggggccgtgaaggggaacccaggaaactgagtcctgaaagcaaggaggaacttccagaatgaagggcgccgacactccttcctgcctttgctcaagcggttccttcacc

SEQ ID NO: 588064 - DNA, 120 bp, Artificial Sequence
  ENSG00000172831_28 (sequence is synthesized)
ccgatcaagttccttcccatttctccatctgggggatcctgaacgtgcacatcctcagagaagccctcctggggtctccaattctagtttattgccccctcctatcgatcccccagcgcg

SEQ ID NO: 588065 - DNA, 120 bp, Artificial Sequence
  ENSG00000172831_29 (sequence is synthesized)
ctcatcgggcctgtggacaaggacaggtttgaagagaggattccctggatcgcggaagggctgcaggaatggcacagccccttccgaggatgccaaaggagcccgggcaaaggaaagtgg

SEQ ID NO: 588066 - DNA, 120 bp, Artificial Sequence
  ENSG00000172831_30 (sequence is synthesized)
agggcaggcgcctgggaggtaggagctggtggagatgacagcgtggaactcgtgagccccacgcaacgcctccccgccgcccaaggtgggctcctagaagcacagaaagggtcgggctgg

SEQ ID NO: 588067 - DNA, 120 bp, Artificial Sequence
  ENSG00000172831_31 (sequence is synthesized)
gtcacctcagagcctcgcctttgctcccccttcctgtgccatccccaagcccgagaccacctcctccctgcccctggcatccagtctaacctgcctcttcctgatccacctggggtagat

SEQ ID NO: 588068 - DNA, 120 bp, Artificial Sequence
  ENSG00000172831_32 (sequence is synthesized)
actccaagtagcacattttcagtgtgagtatatttggaccaaagcctggcgggcagggtacagctcagggctgtgggtcccaggtgagacctgctgctgtccgggtcagcactcatgttt

SEQ ID NO: 588069 - DNA, 120 bp, Artificial Sequence
  ENSG00000172831_33 (sequence is synthesized)
cagtgacttgcccaagatgacacagcaaagaatcgcaagtcctttcctctattcctgccccagcctggggctccacaccccattgtccagattccagccagctttggacctaggtatctt

SEQ ID NO: 588070 - DNA, 120 bp, Artificial Sequence
  ENSG00000172831_34 (sequence is synthesized)
atcaccatgggtgaggcaagaagtcttcagggggaggggccaccgtgtcatgggctgtccaccccacaggttcccgggcccctgtgtacttctacgagttccagcatcagcccagctggc

SEQ ID NO: 588071 - DNA, 120 bp, Artificial Sequence
  ENSG00000172831_35 (sequence is synthesized)
tccaggccctggggcaggggtgggggtgctctgagctcagctaggctgcagttatcatttcatctaaacccccacagccagttttccttctgagtttcgtggattcccacgtgcattttt

SEQ ID NO: 588072 - DNA, 120 bp, Artificial Sequence
  ENSG00000172831_36 (sequence is synthesized)
tcaacctccccgattgggggacttgtgcccatccagtgctctcctagtctggggtgacctcatgagcacacccgcatccttcatcacatgatggccccttccccagctccgggacccact

SEQ ID NO: 588073 - DNA, 120 bp, Artificial Sequence
  ENSG00000172831_37 (sequence is synthesized)
cagacagggtgggggtgcgtggggcagtggacacgctctatctctccagtctacctggagggtgggcgccagtgctgtgccaccgtcagggcctccctctcagagagagggacacaacag

SEQ ID NO: 588074 - DNA, 120 bp, Artificial Sequence
  ENSG00000172831_38 (sequence is synthesized)
catccccaaggtgagccccaacccaagcccacaagtgcctggggagcccatctggtagtggggggtgttcagggcttcatagctccaggctcatcccatccccagctacagactctctcc

SEQ ID NO: 588075 - DNA, 120 bp, Artificial Sequence
  ENSG00000172840_0 (sequence is synthesized)
cttctggagctgggtcctgactagggaccgcctgggtgaggtgaggacctggtggccgcagttgtggcactgtgcgcaggcgctgaactgaccggacggagcgggcggctgtggcctcgc

SEQ ID NO: 588076 - DNA, 120 bp, Artificial Sequence
  ENSG00000172840_1 (sequence is synthesized)
cagctggtttaaaaatatccttttttgctgaaggaacacatttgctggtatagtttcagaatgtcaagtactgtgtcctactggatcttaaattctacaaggaacagcattgccacattg

SEQ ID NO: 588077 - DNA, 120 bp, Artificial Sequence
  ENSG00000172840_2 (sequence is synthesized)
caagggggtagacgcttatactccaggtatgtctcaaataggaataaattaaaatggaggctcttttcccgggtgccacccaccctaaacagttccccatgtggtggctttactctgtgc

SEQ ID NO: 588078 - DNA, 120 bp, Artificial Sequence
  ENSG00000172840_3 (sequence is synthesized)
aaagcctacagacacacatcaacagaggaagatgattttcacttgcaactcagccctgagcagataaatgaagtgcttcgagctggcgagacaacccacaagattcttgaccttgaaagc

SEQ ID NO: 588079 - DNA, 120 bp, Artificial Sequence
  ENSG00000172840_4 (sequence is synthesized)
agagtcccaaattcagtgttgcggtttgagagcaaccagctggctgccaattccccagtggaggaccggcgaggtgtagcctcctgcctgcaaaccaatggactgatgtttggcatcttc

SEQ ID NO: 588080 - DNA, 120 bp, Artificial Sequence
  ENSG00000172840_5 (sequence is synthesized)
gatggacatggtggtcatgcatgtgcccaagcagtgagcgagaggctcttctactatgtggcagtgtccctgatgtcccaccagaccctggagcacatggagggagctatggaaagcatg

SEQ ID NO: 588081 - DNA, 120 bp, Artificial Sequence
  ENSG00000172840_6 (sequence is synthesized)
aaacccttgctgcccatcctgcattggctcaagcacccaggggacagtatctacaaggatgtcacatctgtgcatcttgaccacctccgtgtctattggcaggaactgcttgatttgcac

SEQ ID NO: 588082 - DNA, 120 bp, Artificial Sequence
  ENSG00000172840_7 (sequence is synthesized)
atggaaatgggactaagcattgaagaagcattaatgtactccttccagagactggattctgacatctcgctggaaatccaggcccccctggaagatgaggtgacaaggaacctgtcactc

SEQ ID NO: 588083 - DNA, 120 bp, Artificial Sequence
  ENSG00000172840_8 (sequence is synthesized)
caggttgctttctctggggcaacagcttgcatggcccatgttgatggaattcacttgcacgtggcaaatgctggtgactgccgagccatccttggtgtccaagaggacaatggcatgtgg

SEQ ID NO: 588084 - DNA, 120 bp, Artificial Sequence
  ENSG00000172840_9 (sequence is synthesized)
tcttgtctgccccttacacgtgaccacaatgcctggaaccaggccgagctgtcccggctaaagagggagcaccctgagtcagaggacaggacgatcatcatggaggacaggctactgggc

SEQ ID NO: 588085 - DNA, 120 bp, Artificial Sequence
  ENSG00000172840_10 (sequence is synthesized)
gtcctcatcccctgcagggcctttggggatgttcagctgaagtggagtaaagagttgcagcgcagcattctggagaggggcttcaataccgaggccctcaacatttaccagttcacaccc

SEQ ID NO: 588086 - DNA, 120 bp, Artificial Sequence
  ENSG00000172840_11 (sequence is synthesized)
ccacactactacactccaccctacctgactgctgagcctgaggtcacataccacaggctgaggccccaggataagttccttgtgctggcctcagatggcctgtgggacatgctgagcaat

SEQ ID NO: 588087 - DNA, 120 bp, Artificial Sequence
  ENSG00000172840_12 (sequence is synthesized)
gaggacgtggtaaggctggtggtggggcacctggctgaggcagattggcacaagacagacctggcccagagacccgccaacttggggctcatgcagagcctgctgctgcagaggaaagcc

SEQ ID NO: 588088 - DNA, 120 bp, Artificial Sequence
  ENSG00000172840_13 (sequence is synthesized)
agcgggctccacgaggctgaccaaaatgcagccacgcggctgatcagacatgccatcgggaacaatgagtatggggagatggaggcagagcggctggcggcgatgctgacattgccagag

SEQ ID NO: 588089 - DNA, 120 bp, Artificial Sequence
  ENSG00000172840_14 (sequence is synthesized)
gacttggcgaggatgtacagggatgatatcactgtcactgtggtgtattttaactcagaatcaatcggtgcatattacaaggggggttaagaatctcccatcctattgtcaaggttaaca

SEQ ID NO: 588090 - DNA, 120 bp, Artificial Sequence
  ENSG00000172840_15 (sequence is synthesized)
taaatgctcttctaaaatgtttcacttactcctaaactagctatccaaaccttactattaaaagcgcaggcagatttaatttgctaaatagactaacaggaggaaaaaaacaaacagcct

SEQ ID NO: 588091 - DNA, 120 bp, Artificial Sequence
  ENSG00000172840_16 (sequence is synthesized)
agctttaaaaaacagtgaaatagcagtgatttcatgtccctgtatgttctgattaagtcttatatgcagagaggacagagcataaagtctatagaattggcttgggcttgtgtagcccca

SEQ ID NO: 588092 - DNA, 120 bp, Artificial Sequence
  ENSG00000172840_17 (sequence is synthesized)
gtcatttgataaagatgttgttaaactgtgtcagcctgagccttcaaagggtaaatttaatcatgattctgagaataaagaacttcaggagcttcttaggtcttgccacaaaaatctgca

SEQ ID NO: 588093 - DNA, 120 bp, Artificial Sequence
  ENSG00000172840_18 (sequence is synthesized)
aatttgataattctcctgaattcacaatcatggacttgtagactatgaagagatattttatttgtttgtcttttatttaaattactaaggtctaggtttacaaagcatactacaggaccc

SEQ ID NO: 588094 - DNA, 120 bp, Artificial Sequence
  ENSG00000172840_19 (sequence is synthesized)
ttttctatgcaatatcctaacttttttttttgtgattatgcttgtgagaaattttgtaatactacattctagttctgttttcgtttattttaaaactgaatccttaaacttgcaaacacg

SEQ ID NO: 588095 - DNA, 120 bp, Artificial Sequence
  ENSG00000172840_20 (sequence is synthesized)
cctactgtaagcatgcttggaatgacttgttttggttttcagctgataggatctatgcctctggaccagctgaacttactggtgcagctttttgtgccctctactgagtcccattccaga

SEQ ID NO: 588096 - DNA, 120 bp, Artificial Sequence
  ENSG00000172840_21 (sequence is synthesized)
aactttgagccatgctaggaggtaactagtctatgccttaactcctgacctttcctgcattagtaaaatttcctcctgggctgagcctttgggggttgattcacagcatttaagctttct

SEQ ID NO: 588097 - DNA, 120 bp, Artificial Sequence
  ENSG00000172840_22 (sequence is synthesized)
gattatacctctcaaacattcttctgtcaattccacacaatccttctacctctgctatgctgaacccctcattcaccctgcacctgccaactgcaaaatattgtctgaaagaatctttca

SEQ ID NO: 588098 - DNA, 120 bp, Artificial Sequence
  ENSG00000172840_23 (sequence is synthesized)
catgttcctgcttcctatggctgcaggaaaggagaaaatgtgattgcatgtggtagttgtggtgatagacgtttagacaggacaggttaatttagcggattgtggacttaagattcaacc

SEQ ID NO: 588099 - DNA, 120 bp, Artificial Sequence
  ENSG00000172840_24 (sequence is synthesized)
tctatctggagaggtgaaaacacaaaggcttaaggacaacagtttctaaccaagtttctctgaatcctttcctgagaggtggtgggcaggagggaggagtgagacttatcagatgggacg

SEQ ID NO: 588100 - DNA, 120 bp, Artificial Sequence
  ENSG00000172840_25 (sequence is synthesized)
cttgccccaagactgtgggataaaccaccattgctagtcctcaggaattagaccatatttagtataggagttggggcaaaaataaaagtgtaatttgtaatggtttctgtgggctgtaga

SEQ ID NO: 588101 - DNA, 120 bp, Artificial Sequence
  ENSG00000172840_26 (sequence is synthesized)
ctctttgtatttacttggaaattcagttatgtggatccattttggagatgaatttcatctcatgagttgctgtggcatttaaacaacaggaaatgtgtccctaaatggaaacaaatataa

SEQ ID NO: 588102 - DNA, 120 bp, Artificial Sequence
  ENSG00000172840_27 (sequence is synthesized)
tcccacaaaaccaacaattttatttgcctctactacgtcaggcagaattcttcaattaagttgaactacatttgttgatcccttttctcatcttacccctttatgccacctactgaaaag

SEQ ID NO: 588103 - DNA, 120 bp, Artificial Sequence
  ENSG00000172840_28 (sequence is synthesized)
aaaaacaaatagctaggtttggtttcctgttttttgtctatgtcccagctgacattcagtcaaatgttgggatacttctaatttggtggtgtttctttgtacatttttcagtgcaactgt

SEQ ID NO: 588104 - DNA, 120 bp, Artificial Sequence
  ENSG00000172840_29 (sequence is synthesized)
ttcatctaagaaattatcttttgaatatttaagccttgatccttttattctgaaaccattaatattccttcttggctgggtgcagtagtttacgcctgtaatcccagcactgtgggaggc

SEQ ID NO: 588105 - DNA, 80 bp, Artificial Sequence
  ENSG00000172840_30 (sequence is synthesized)
actgcaacctctgcagcccaggctcaaacaccaccatgcctggctaatttttttaattttttgtagagacagggttttgc

SEQ ID NO: 588106 - DNA, 120 bp, Artificial Sequence
  ENSG00000172840_31 (sequence is synthesized)
catgagccaccgcacccagcctatctcctagatcttgaatcaaaaataaaatgtaaatcacttccattctgctagcatgagggtttgttgctaaaattgaggattctatctgacgtttac

SEQ ID NO: 588107 - DNA, 120 bp, Artificial Sequence
  ENSG00000172840_32 (sequence is synthesized)
tttttgttgttttttgagacaaggtcttgctttgtcgcccatgctggagtgcagtggcatcattataactcactgtcaaactcctggactccaatgttccctccccttttagcctcccaa

SEQ ID NO: 588108 - DNA, 120 bp, Artificial Sequence
  ENSG00000172840_33 (sequence is synthesized)
gtagctgggtctacaggcatgaaccatcaggcccagataattaaaaaaactttttttggtgaaaacatgatcttgctatgttgctcaggctggttgtctggcattttctttgtcctttat

SEQ ID NO: 588109 - DNA, 120 bp, Artificial Sequence
  ENSG00000172840_34 (sequence is synthesized)
tctttatactagctaaaccctggagtatccttgaagcctttactggcatacagagtacctgaatcttactttggagcctagcatgggtcataaatatatctgattcattaacctgtgaga

SEQ ID NO: 588110 - DNA, 120 bp, Artificial Sequence
  ENSG00000172840_35 (sequence is synthesized)
cagctgagagaacacagactccttacctgtatctccaggcatatctggtttttctctgcctaatagattttcctgctttctagttagtaatattgagaaagaagaaaggcttatttatca

SEQ ID NO: 588111 - DNA, 120 bp, Artificial Sequence
  ENSG00000172840_36 (sequence is synthesized)
tttgctttttttccactgtgaatcatctgttctttccatgaacattctggggagcacctcctgattaaactcctgtctccctgaccactatcctgctgtcattggacttcttgaagcaca

SEQ ID NO: 588112 - DNA, 120 bp, Artificial Sequence
  ENSG00000172840_37 (sequence is synthesized)
tgggctactgccccaggacactgggatttgagaggagtttagtggtaattgtcaggtctttcaaagcatttattattccttttatacggagatttcagtattgagacttaaaatgaactg

SEQ ID NO: 588113 - DNA, 120 bp, Artificial Sequence
  ENSG00000172840_38 (sequence is synthesized)
aaaaatgagattgaacatttaatattttggatgtaacttttgaagaaagtatgctttggtgcttaaaattgtatatgattttaggtaagaaactttgataatattggcataatttagatt

SEQ ID NO: 588114 - DNA, 120 bp, Artificial Sequence
  ENSG00000172840_39 (sequence is synthesized)
ctttgataatattggcataatttagatttattttctttcttttttttgagacagtctcactcagtcgcccaggctgaagtgcagtgacacagtctcagctcactgcaacgtctgcctccc

SEQ ID NO: 588115 - DNA, 120 bp, Artificial Sequence
  ENSG00000172840_40 (sequence is synthesized)
ccacctcagcttcccaaagtgctagcattacaggcatgagccaccacacctcaccagatttttaaaaaatatataactgcatctctcttgattctggggcttggtaaaaatggatagata

SEQ ID NO: 588116 - DNA, 89 bp, Artificial Sequence
  ENSG00000172840_41 (sequence is synthesized)
tccaagacagaagactcacttgagtacagtatgagaccagcctgggcaacatagatcttgcctctacaaaaaaaaaaaaaaatagccag

SEQ ID NO: 588117 - DNA, 120 bp, Artificial Sequence
  ENSG00000172840_42 (sequence is synthesized)
catagatcttgcctctacaaaaaaaaaaaaaaatagccaggtgtggcacatgcctgtagtctcagctgcttggaaggctgaaatgagaggatctcttgagcccaggaggtctaggccaga

SEQ ID NO: 588118 - DNA, 120 bp, Artificial Sequence
  ENSG00000172840_43 (sequence is synthesized)
gtgagctgtgatcgtgccattgcactccagactgagtgacagagtgagactgtgtctaaaaaaaaagtttgaattaaaaaaaaaaaaaaaaaagtcggctgtgcacggtggctcatgcct

SEQ ID NO: 588119 - DNA, 120 bp, Artificial Sequence
  ENSG00000172840_44 (sequence is synthesized)
ccatctcaaaaaaacaaaaacaaaaaacaaactcaaattagcatgatagatcaggctacttagattcagctttctgagatgttatttgttaacattaaggctaatttattataatgaaaa

SEQ ID NO: 588120 - DNA, 120 bp, Artificial Sequence
  ENSG00000172840_45 (sequence is synthesized)
ttataatgaaaatgtaaactttgaggtatgttaatatataaacatctttttcctttggcctaaaaggtctttagtattcagcacactgggtaaagttcagtttagacacaatcaaattgg

SEQ ID NO: 588121 - DNA, 120 bp, Artificial Sequence
  ENSG00000172840_46 (sequence is synthesized)
catcttttaaacataagtgaaatatagagagcttgaacttgagttacttaaagaagatacagtataattaattatacagaacaaaacaaagatgtgtttagagtgactctggcctgactc

SEQ ID NO: 588122 - DNA, 120 bp, Artificial Sequence
  ENSG00000172840_47 (sequence is synthesized)
ttgtccatcagcccctagtagcctatcttcagcctttgggaagtcttaacttcccaggttaaactagaatattctggaactgagctgtccaaatttcatcttaaagtggatcatttgact

SEQ ID NO: 588123 - DNA, 120 bp, Artificial Sequence
  ENSG00000172840_48 (sequence is synthesized)
ctgaaacacgattctcatggcagaaaaagccctggtgtttccttggagctggggataaaggccagtgagccagcctgtgatgagagctgcccctggcactatctgagtggaaagctcatt

SEQ ID NO: 588124 - DNA, 120 bp, Artificial Sequence
  ENSG00000172840_49 (sequence is synthesized)
gggacagccatgcagctatcagagccgactgaagccctgtcccttacccctcaggcacctgatgcttaacttgcctcctgggaaataatgatctagcatttacttggaacaatgattaat

SEQ ID NO: 588125 - DNA, 120 bp, Artificial Sequence
  ENSG00000172840_50 (sequence is synthesized)
catgttctttaataattgctgacatttgtattttaagctgtataccaatgttcgtatttgacattgattttctaaccattagagatatttaattaaaacttggaaatgaaagaaacaaaa

SEQ ID NO: 588126 - DNA, 79 bp, Artificial Sequence
  ENSG00000172840_51 (sequence is synthesized)
cactgtgcgcaggcgctgaactgaccggacggagcgggcggctgtggcctcgccagctggtctcccgggttcaagcgat

SEQ ID NO: 588127 - DNA, 120 bp, Artificial Sequence
  ENSG00000172840_52 (sequence is synthesized)
gcctcctgagtagctcggattacagggccctggacacaggatgatcccggatggtgaggcggaggtgaggacattgctgtatgagcggagagttggctgagctgctagaatcccttcctc

SEQ ID NO: 588128 - DNA, 120 bp, Artificial Sequence
  ENSG00000172840_53 (sequence is synthesized)
aatcccttcctctgaaacgaagcagtgaagggatggtgtggggaaggttgtcaaccagccagcatgctcctgggcctgtggaaggggagagtgtccacggttcacttggggtcccaggga

SEQ ID NO: 588129 - DNA, 120 bp, Artificial Sequence
  ENSG00000172840_54 (sequence is synthesized)
taaatcctgagggtggcatgatgagaacaccagtggggagcctttggctgtggggttctgtgagtgaggcagcatgaagcagaagttgcctctagatgtcgccatctgaccacactggca

SEQ ID NO: 588130 - DNA, 120 bp, Artificial Sequence
  ENSG00000172840_55 (sequence is synthesized)
tcagctgagtgccgttggaggaaaatgttcatgagatgcggcctgaggcctgtccccagcccaagctgggtctcctggcgactgcagcttggagcacctttggaaagcctcctgggactt

SEQ ID NO: 588131 - DNA, 120 bp, Artificial Sequence
  ENSG00000172840_56 (sequence is synthesized)
gggatgtctttggggctgggaacaagtgtgggtggaggaagggccggtcctgtggtcacccagccctgtcttgtagggaaggaactgctggggtcccaggagaagccagagccaggcagt

SEQ ID NO: 588132 - DNA, 120 bp, Artificial Sequence
  ENSG00000172840_57 (sequence is synthesized)
gagctccagatggtgggggagtggctgccaccttgaccatcttcccccgcatggctgttctcctctgtggaccaccccatgcctctgacccccatcctccctaccccattccctacagcc

SEQ ID NO: 588133 - DNA, 120 bp, Artificial Sequence
  ENSG00000172840_58 (sequence is synthesized)
ggtgaggtgaggacctggtggccgcagttgtggcactgtgcgcaggcgctgaactgaccggacggagcgggcggctgtggcctcgccagctggtgagaagcgggcgagggtccgaggttt

SEQ ID NO: 588134 - DNA, 79 bp, Artificial Sequence
  ENSG00000172840_59 (sequence is synthesized)
accagctgaacttactggtgcagctttttgtgccctctactgagtcccattccagaaactttgagccatgctaggaggt

SEQ ID NO: 588135 - DNA, 81 bp, Artificial Sequence
  ENSG00000172840_60 (sequence is synthesized)
cagcctcctgagtagctcggattacaggtttgtttgtttattcgttttttttgagataggaatcttcttactgcaacctct

SEQ ID NO: 588136 - DNA, 120 bp, Artificial Sequence
  ENSG00000172840_61 (sequence is synthesized)
ctgactagggaccgcctgggtgaggtgaggacctggtggccgcagttgtggcactgtgcgcaggcgctgaactgaccggacggagcgggcggctgtggcctcgccagctggtgagaagcg

SEQ ID NO: 588137 - DNA, 120 bp, Artificial Sequence
  ENSG00000172845_0 (sequence is synthesized)
gggacgaatttcctccccagctcagctcccctacagcttggctaggcctgctccgagcgcctgcaaggtggaggaggcctgcgcctcgggcctggcagcggcagccggcgagggaggcgg

SEQ ID NO: 588138 - DNA, 120 bp, Artificial Sequence
  ENSG00000172845_1 (sequence is synthesized)
gcacagcggggtaaccggcgagccgtagccgctctcgaaaacctacgctgccacggccgctcattgtctctccccttccacccgggggcaaacaggaagcgcgccgcctggcagaccgac

SEQ ID NO: 588139 - DNA, 120 bp, Artificial Sequence
  ENSG00000172845_2 (sequence is synthesized)
ggacaggcgcctggaccaatgagcacagccgacaaagagcacggcggcgaatgagagccaagaagaggggcgggagttccgggcgggctgtcaccctcttccccccttttgggctggagg

SEQ ID NO: 588140 - DNA, 120 bp, Artificial Sequence
  ENSG00000172845_3 (sequence is synthesized)
ctccaccttttgtgtttcccgcacagtcaatcaaaataggaaaaaaaaatccccggaccgctccggccgtgtccgccgccgcttcccgcatcctctcccgccgccgccgccttcgctcct

SEQ ID NO: 588141 - DNA, 120 bp, Artificial Sequence
  ENSG00000172845_4 (sequence is synthesized)
caccatgtgtaaggcggcggggagccccgcctgaggtgccctaaacacactatgaccgctcccgaaaagcccgtgaaacaagaggaaatggctgccttggacgtggatagcggcggcggc

SEQ ID NO: 588142 - DNA, 120 bp, Artificial Sequence
  ENSG00000172845_5 (sequence is synthesized)
ggtggcggcggcggcggccacggcgagtatctgcagcagcagcaacagcacggaaacggtgcggtggcggcggcagcggcggcccaggacactcagccgtcaccgctcgctctgctggcc

SEQ ID NO: 588143 - DNA, 120 bp, Artificial Sequence
  ENSG00000172845_6 (sequence is synthesized)
gctacctgcagcaagatagggccgccatcgccgggcgacgacgaggaggaggcggccgccgcagccggggcccccgccgccgccggagcgacaggtgatttggcttctgcacagttagga

SEQ ID NO: 588144 - DNA, 120 bp, Artificial Sequence
  ENSG00000172845_7 (sequence is synthesized)
ggagcaccaaaccgatgggaggttttgtcagccacacctacaactataaaagatgaagctggtaatctagtccagattccaagtgctgctacttcaagtgggcagtatgttcttcccctt

SEQ ID NO: 588145 - DNA, 120 bp, Artificial Sequence
  ENSG00000172845_8 (sequence is synthesized)
cagaatttgcagaatcaacaaatattttccgttgcaccaggatcagattcatcaaatggtacagtgtccagtgttcaatatcaagtgataccacagatccagtcagcagatggtcagcag

SEQ ID NO: 588146 - DNA, 120 bp, Artificial Sequence
  ENSG00000172845_9 (sequence is synthesized)
gttcaaattggtttcacaggctcttcagataatgggggtataaatcaagaaagcagtcaaattcagatcattcctggctctaatcaaaccttacttgcctctggaacaccttctgctaac

SEQ ID NO: 588147 - DNA, 120 bp, Artificial Sequence
  ENSG00000172845_10 (sequence is synthesized)
atccagaatctcataccacagactggtcaagtccaggttcagggagttgcaattggtggttcatcttttcctggtcaaacccaagtagttgctaatgtgcctcttggtctgccaggaaat

SEQ ID NO: 588148 - DNA, 120 bp, Artificial Sequence
  ENSG00000172845_11 (sequence is synthesized)
attacgtttgtaccaatcaatagtgtcgatctagattctttgggactctcgggcagttctcagacaatgactgcaggcattaatgccgacggacatttgataaacacaggacaagctatg

SEQ ID NO: 588149 - DNA, 120 bp, Artificial Sequence
  ENSG00000172845_12 (sequence is synthesized)
gatagttcagacaattcagaaaggactggtgagcgggtttctcctgatattaatgaaactaatactgatacagatttatttgtgccaacatcctcttcatcacagttgcctgttacgata

SEQ ID NO: 588150 - DNA, 120 bp, Artificial Sequence
  ENSG00000172845_13 (sequence is synthesized)
gatagtacaggtatattacaacaaaacacaaatagcttgactacatctagtgggcaggttcattcttcagatcttcagggaaattatatccagtcgcctgtttctgaagagacacaggca

SEQ ID NO: 588151 - DNA, 120 bp, Artificial Sequence
  ENSG00000172845_14 (sequence is synthesized)
cagaatattcaggtttctacagcacagcctgttgtacagcatctacaacttcaagagtctcagcagccaaccagtcaagcccaaattgtgcaaggtattacaccacagacaatccatggt

SEQ ID NO: 588152 - DNA, 120 bp, Artificial Sequence
  ENSG00000172845_15 (sequence is synthesized)
gtgcaagccagtggtcaaaatatatcacaacaggctttgcaaaatcttcagttgcagctgaatcctggaacctttttaattcaggcacagacagtgaccccttctggacaggtaacttgg

SEQ ID NO: 588153 - DNA, 120 bp, Artificial Sequence
  ENSG00000172845_16 (sequence is synthesized)
caaacgtttcaagtacaaggggtccagaacttgcagaatttgcaaatacagaatactgctgcccaacaaataactttgacgcctgttcaaaccctcacacttggtcaagttgcggcaggt

SEQ ID NO: 588154 - DNA, 120 bp, Artificial Sequence
  ENSG00000172845_17 (sequence is synthesized)
ggagccttcacttcaactccagttagtctaagcactggtcagttgccaaatctacaaacagttacagtgaactctatagattctgctggtatacagctacatccaggagagaatgctgac

SEQ ID NO: 588155 - DNA, 120 bp, Artificial Sequence
  ENSG00000172845_18 (sequence is synthesized)
agtcctgcagatattaggatcaaggaagaagaacctgatcctgaagagtggcagctcagtggtgattctaccttgaataccaatgacctaacacacttaagagtacaggtggtagatgaa

SEQ ID NO: 588156 - DNA, 120 bp, Artificial Sequence
  ENSG00000172845_19 (sequence is synthesized)
gaaggggaccaacaacatcaagaaggaaaaagacttcggagggtagcttgcacctgtcccaactgtaaagaaggtggtggaagaggtaccaatcttgggaaaaagaagcaacacatttgt

SEQ ID NO: 588157 - DNA, 120 bp, Artificial Sequence
  ENSG00000172845_20 (sequence is synthesized)
catataccaggatgtggtaaagtctatgggaagacctcacatctgagagctcatctgcgttggcattctggagaacgcccttttgtttgtaactggatgtactgtggtaaaagatttact

SEQ ID NO: 588158 - DNA, 120 bp, Artificial Sequence
  ENSG00000172845_21 (sequence is synthesized)
cgaagtgatgaattacagaggcacagaagaacacatacaggtgagaagaaatttgtttgtccagaatgttcaaaacgctttatgagaagtgaccaccttgccaaacatattaaaacacac

SEQ ID NO: 588159 - DNA, 120 bp, Artificial Sequence
  ENSG00000172845_22 (sequence is synthesized)
cagaataaaaaaggtattcactctagcagtacagtgctggcatctgtggaagctgcgcgagatgatactttgattactgcaggaggaacaacgcttatccttgcaaatattcaacaaggt

SEQ ID NO: 588160 - DNA, 120 bp, Artificial Sequence
  ENSG00000172845_23 (sequence is synthesized)
tctgtttcagggataggaactgttaatacttccgccaccagcaatcaagatatccttaccaacactgaaatacctttacagcttgtcacagtttctggaaatgagacaatggagtaaata

SEQ ID NO: 588161 - DNA, 120 bp, Artificial Sequence
  ENSG00000172845_24 (sequence is synthesized)
ttacacaaatacttattcattgtggttatttttatacagtagtgagaagaatattgttcctaagttcttagatatctttttattgatgtgcaaaaatttttggattgacagtaacttggt

SEQ ID NO: 588162 - DNA, 120 bp, Artificial Sequence
  ENSG00000172845_25 (sequence is synthesized)
tatacatgacactgaaatgccttactttgtatgatattccatagtatattaaaaatggtaaaattgcatgggttttgtaggtacttttggaatctagaagaaatgaaattttaccaagtt

SEQ ID NO: 588163 - DNA, 120 bp, Artificial Sequence
  ENSG00000172845_26 (sequence is synthesized)
atataaagagaaaattgaatttaacaatgcgaatggtagtctaaccaaatgcatcaatcctgtgtggtttagtgtaaaaatgagaacatgttggtatttatctattgtaagataaaaaag

SEQ ID NO: 588164 - DNA, 120 bp, Artificial Sequence
  ENSG00000172845_27 (sequence is synthesized)
ctggtgggtgaaagaaatcatgttatgataaaaaattttgtaattttcttgatgactggaatttttattatgcataactgacaaatcaagtttccaagcaaatgttacatagtgtaggct

SEQ ID NO: 588165 - DNA, 120 bp, Artificial Sequence
  ENSG00000172845_28 (sequence is synthesized)
ttacttagcttatcaatttgtcattttgaagctaattattttaattaggttaactatgtacaatattttaagcattactcttgtaagattttgaaaactacattttaacatggaactcta

SEQ ID NO: 588166 - DNA, 120 bp, Artificial Sequence
  ENSG00000172845_29 (sequence is synthesized)
gggatagtcaccttttaaatcctgttgaaaagccatgtttaagatttaatttgccaaaataatgtcttgttaatattctttcaataacgaagttgggcaatataaccaatgtttaaaaaa

SEQ ID NO: 588167 - DNA, 120 bp, Artificial Sequence
  ENSG00000172845_30 (sequence is synthesized)
gtttaaaatgtataagttgaggcatttgggtggtaagagaatgttatagtgaattatcccttttcttgactattggaggaccaaaaaaataaggtgtattgcgtcttagcagtgattttt

SEQ ID NO: 588168 - DNA, 120 bp, Artificial Sequence
  ENSG00000172845_31 (sequence is synthesized)
atccaatcttgtttccaaaaaccatgtctcccagggccttaaaagccatcatgtaaattaccagtaaagtgtaacatatgcaaacataacaaaatcacttccatagtgacgatactccaa

SEQ ID NO: 588169 - DNA, 120 bp, Artificial Sequence
  ENSG00000172845_32 (sequence is synthesized)
ccatatggatattagtcatagaagaactagaggttttatgatatttttttaagtcttttttttttttgtctaggtagtcagtctgcacttaaatatcaatcattttccttttttgcttct

SEQ ID NO: 588170 - DNA, 120 bp, Artificial Sequence
  ENSG00000172845_33 (sequence is synthesized)
ttgcttcttcccttaaaatttatatgtatccagtacatttaattgagaagcgtatgttttttattatgctgtattttctttttattttttaattattgtttatattttcaattcaaaaat

SEQ ID NO: 588171 - DNA, 120 bp, Artificial Sequence
  ENSG00000172845_34 (sequence is synthesized)
taaagttacattgctggtcttgtaagagctatacagttttcctaaatgtatacctgtaactgcagcagttcacctatttcaaaaatttggaattctgttcatttgttattcttaagacca

SEQ ID NO: 588172 - DNA, 120 bp, Artificial Sequence
  ENSG00000172845_35 (sequence is synthesized)
cctcaaatttaaaggctaccttattgtacgtttaaagtgtattataacagtgtggtagttaataaaacactatttttttttcttttgagtttgttgtattcctatgcataaaaaatattg

SEQ ID NO: 588173 - DNA, 120 bp, Artificial Sequence
  ENSG00000172845_36 (sequence is synthesized)
cagtggtatggggtaagaattggtggtttatttttcttcaacttggctttttatttttagattcttgattttagacactgaattgtaaacaggcatttatttgaagaagagatatataga

SEQ ID NO: 588174 - DNA, 120 bp, Artificial Sequence
  ENSG00000172845_37 (sequence is synthesized)
gacactggtcatttactaattttttacctagagtaaataagaatgagcttattaaataaaatttttgaaaaaaagtcttagcccttagcccacattgattcatatcagttttatcagtac

SEQ ID NO: 588175 - DNA, 120 bp, Artificial Sequence
  ENSG00000172845_38 (sequence is synthesized)
cattttgcaatttttttgttttccgttttaaagcaatgcagaatattttgatttatcgaaaacctgaatttacattaagactcctgaaaatgataagacaagcgttggtaaccatggcag

SEQ ID NO: 588176 - DNA, 120 bp, Artificial Sequence
  ENSG00000172845_39 (sequence is synthesized)
gagttacttgaaaaagttgcctttgaatttgcatgtgtttcatcattataaaggcagagtaggaggaaagagtattaatgtgattgtgtattgtagatgttttaaagtaaaaatcaagtt

SEQ ID NO: 588177 - DNA, 120 bp, Artificial Sequence
  ENSG00000172845_40 (sequence is synthesized)
tcttaacacatgtatacagtgggggtaaagatgtccattttctgttttccaggcccagtctgactctgtctgtaatacctgattgcattggagaactctagacacgcataaacatggaca

SEQ ID NO: 588178 - DNA, 120 bp, Artificial Sequence
  ENSG00000172845_41 (sequence is synthesized)
gtttttctaaatgtgagacttaagcctgtgatgtaaaataggaagttctacttggaataatataaaggaaccactagaatttacaattattttgaagttacagggattagattttgaatc

SEQ ID NO: 588179 - DNA, 120 bp, Artificial Sequence
  ENSG00000172845_42 (sequence is synthesized)
ttaaaatcctttaggtaatttttagaatttttaaattaagattaatgtgaagagaattaagtgagcagcaggtggttcacttgagcaaactgcccattaagtcagattaaaccatttgaa

SEQ ID NO: 588180 - DNA, 120 bp, Artificial Sequence
  ENSG00000172845_43 (sequence is synthesized)
tgatagtagagatgttttaagtaatactggatttttacagtaagtttatggtgtactttgaatcgataggtgtccatgcatattttatgaattcgtggagaatgaatgcaatgaagaaag

SEQ ID NO: 588181 - DNA, 120 bp, Artificial Sequence
  ENSG00000172845_44 (sequence is synthesized)
taagtagtcttgaaaattatttaaataaagttgtagatttttttagtgccccctaggaatatattagtgaactttggaacttttaccaaagttatgtaacctcagtgtagataattttaa

SEQ ID NO: 588182 - DNA, 120 bp, Artificial Sequence
  ENSG00000172845_45 (sequence is synthesized)
atatttctatttttatattttaaaatgttgaatatactctggaaacaacatttgaagatttgctctgatgtcaactttttctggttataaaacctattagtattgtgtataattctcagg

SEQ ID NO: 588183 - DNA, 120 bp, Artificial Sequence
  ENSG00000172845_46 (sequence is synthesized)
gtaggtatactctaataggtgttttgtcaattgctttatttttgtaaaggctagagttagtgcatattgaatatatttatgtacaaataattcctgttgtaacatttagtggacgcgatt

SEQ ID NO: 588184 - DNA, 120 bp, Artificial Sequence
  ENSG00000172845_47 (sequence is synthesized)
atctgtatacctcaaattttaatttaagaaagtatcacttaaagagcatctcattttctatagattgaggcttaattactgaaaagtgactcaaccaaaaagcacataaccttttaaagg

SEQ ID NO: 588185 - DNA, 120 bp, Artificial Sequence
  ENSG00000172845_48 (sequence is synthesized)
agctacacctaccgcagaaagtcagatgccctgtaaataactttggtctttcaaaatagtggcaatgcttaagatacttaaaaatacacatacatataagctgaaagcatgtcaagccta

SEQ ID NO: 588186 - DNA, 120 bp, Artificial Sequence
  ENSG00000172845_49 (sequence is synthesized)
tttcatagaaaatagttcttaaacagtattgttcattagaaattgctggggagcattttagagattccataggcctggtagccacctcagcttactaaatcaacatctctggagatggag

SEQ ID NO: 588187 - DNA, 120 bp, Artificial Sequence
  ENSG00000172845_50 (sequence is synthesized)
ctcctgcgttacaatcacttaaaatagagcaagcatccccttaggctcttaattgtagtttaaattccagtactgcctactcagacccaaaagttttgttttatgaaaaatttgtattgt

SEQ ID NO: 588188 - DNA, 120 bp, Artificial Sequence
  ENSG00000172845_51 (sequence is synthesized)
gttcaatattgtttgaaatttggggttgttgcataaatgattatggaataacatttggttttaaaataatataaactgacatgttatgctacctgttacacaatttggttttcagtttta

SEQ ID NO: 588189 - DNA, 120 bp, Artificial Sequence
  ENSG00000172845_52 (sequence is synthesized)
attatatgaagctggtaacaatcgtttttgttgtaaaagaattatttttcactaaacagtatgtttaaaactgactgccatgaatgagtactaagtcttttgttgtctgacaataagcac

SEQ ID NO: 588190 - DNA, 120 bp, Artificial Sequence
  ENSG00000172845_53 (sequence is synthesized)
aaaacaaattaattgatatctttggtacaaatttgatatttttgtgaaatcacctcataattttatttagtgttgaagaaacaacattggccccttgccttgttcagacagatttgcgta

SEQ ID NO: 588191 - DNA, 120 bp, Artificial Sequence
  ENSG00000172845_54 (sequence is synthesized)
taatgtaaatatatatattagtggcagaaacaaagtactgtagaaacctagaagagggagaattctgcatgaagtctgggaaactcagcagaaatggcgtttgcaaaggtacagtgtggt

SEQ ID NO: 588192 - DNA, 120 bp, Artificial Sequence
  ENSG00000172845_55 (sequence is synthesized)
atgttgggtgatgggggactttgtgagggacagagtggaaaaatttttaagaggggctgccaaattgcaaaagagaagaattttttttgtcagtgattcctagtctttttggaatcctac

SEQ ID NO: 588193 - DNA, 120 bp, Artificial Sequence
  ENSG00000172845_56 (sequence is synthesized)
aatcctacaccttctccccagaaaaattcattctagtccagggtttattgtttgttttttccctatatttgacagggtctgtctctgtcacacagtgcagtggtgcaatcatggcttact

SEQ ID NO: 588194 - DNA, 120 bp, Artificial Sequence
  ENSG00000172845_57 (sequence is synthesized)
cacttactggtctcaagcaatcctccccacttcggcctcttaagtagcttggaccacaggtgcacaccaccatgctcagttaattttaatttgttttgtagagatggggtctcactatat

SEQ ID NO: 588195 - DNA, 78 bp, Artificial Sequence
  ENSG00000172845_58 (sequence is synthesized)
tccacctcttggccaaatctggagtctaaagggtatacaaggtttttttttttcccatgttggcttttatttgatgtt

SEQ ID NO: 588196 - DNA, 120 bp, Artificial Sequence
  ENSG00000172845_59 (sequence is synthesized)
aaggtttttttttttcccatgttggcttttatttgatgttataaagtcttcatgatatgaatatattttttaaaaaggtgtcatgtatattgtcatgtaacatgattcatgccacttcat

SEQ ID NO: 588197 - DNA, 120 bp, Artificial Sequence
  ENSG00000172845_60 (sequence is synthesized)
tgtattaaatacgtttaagatacagtttttgatgttaagaatgatatcctgagaaggcctatctccttcagtccttttccccatttttcaccttttaactcttgcttctgaatctatgct

SEQ ID NO: 588198 - DNA, 120 bp, Artificial Sequence
  ENSG00000172845_61 (sequence is synthesized)
aagctacttactagatgtgtgatattggtagttttcttaccttaaaacctcattttcatcatccatgaagaggctaacaatagtactccctgttgataggattgttgtattaaaatataa

SEQ ID NO: 588199 - DNA, 120 bp, Artificial Sequence
  ENSG00000172845_62 (sequence is synthesized)
gcattcagcatagtgcctgacttaacggtagagattcaaatggtaacctccttccaatgccttcctccccccttaactctggagattccatttttctgtagtgaagtgttttagaatttt

SEQ ID NO: 588200 - DNA, 120 bp, Artificial Sequence
  ENSG00000172845_63 (sequence is synthesized)
cattgtttgactatggttcatacattgatttttccaaaatgagaagaagtcttatttctaatgcaaaaatgtgaaaagaacagttggaacctaaagtgatagtggatgaagtgtctgaag

SEQ ID NO: 588201 - DNA, 120 bp, Artificial Sequence
  ENSG00000172845_64 (sequence is synthesized)
tgactgccctatcagaaaaggatggaataagaagaaaagactgaagcacctaaatgtgtattttcttgaggaaattacacccctgtgtaagagtctatcctatttgaacatttctaaaaa

SEQ ID NO: 588202 - DNA, 120 bp, Artificial Sequence
  ENSG00000172845_65 (sequence is synthesized)
ccagccgaagaatcttcaggttcattgcgactgaaagataaagtctagcactgaagtggtttttaagattaggaaaggccatcagagaaatgcagttatttctcccctccatccttcccc

SEQ ID NO: 588203 - DNA, 120 bp, Artificial Sequence
  ENSG00000172845_66 (sequence is synthesized)
cacaaaaaaaagtctaagcctccgattaatcgacaacaacgaaatacaggaagtattggcttagtgaccttttaggatatctgtccgacttacatcccttctctgagcattactttctgc

SEQ ID NO: 588204 - DNA, 120 bp, Artificial Sequence
  ENSG00000172845_67 (sequence is synthesized)
caccttccgtgaggagctgttcagaaatcagacaaggagtggacatctggtcaaagttgagccaattagatgatttctcctgagaatttggaattggaaaactgatgtcttgggaggtca

SEQ ID NO: 588205 - DNA, 120 bp, Artificial Sequence
  ENSG00000172845_68 (sequence is synthesized)
catctggaacatacatgggaggcagagaaagcaaagatgacattcaaccccagaagaaaaagaaaatggctttcttgattcctgataacttggcagtgtttgttccagtgtcttgcattt

SEQ ID NO: 588206 - DNA, 120 bp, Artificial Sequence
  ENSG00000172845_69 (sequence is synthesized)
cactatctgcatttcatcctcctggggttccacaagatagccttaaaaccttacagagagactccccaacttagttttttcttaagtcagaaggctgttacttgctaccaaataatgcca

SEQ ID NO: 588207 - DNA, 120 bp, Artificial Sequence
  ENSG00000172845_70 (sequence is synthesized)
actaagacaactgaggtacagtatattctctcgtaaaacaccatagagttgatgacttgatcctatagaaaagggtccccaacccctgggccacagaccggtactggtccctggtctgtg

SEQ ID NO: 588208 - DNA, 120 bp, Artificial Sequence
  ENSG00000172845_71 (sequence is synthesized)
aggaaccacctgggccacagactggtcctggtccctggtctgtgaggaaccaggccatacagcaggaggtaagcgagcattcctgcctgagctctgcctcctgtcagatgagccacaaca

SEQ ID NO: 588209 - DNA, 120 bp, Artificial Sequence
  ENSG00000172845_72 (sequence is synthesized)
ttagattctcataggagtgcgaaccccgttgtgaaccccgcatgcgagggatctaggtagtgccctccttaagagaatctaatgtctgatgatctgaggtagagcagtttcatcctacaa

SEQ ID NO: 588210 - DNA, 120 bp, Artificial Sequence
  ENSG00000172845_73 (sequence is synthesized)
ccatccccaccccccgacccccatccatgaaaaaattgtcttcctcaaaactagtccctggtgccaaaaagtttggggaccgccgtcctaggaaataccaacaaaaagtcacgtttattg

SEQ ID NO: 588211 - DNA, 120 bp, Artificial Sequence
  ENSG00000172845_74 (sequence is synthesized)
cctgccaagtgagtcaggtttagacaaggcagaacttagtatatagcttggatgaatcagaaagggtgggccttgaaagactggtagaatgtgtccaagaaaactgattaaaagccttag

SEQ ID NO: 588212 - DNA, 120 bp, Artificial Sequence
  ENSG00000172845_75 (sequence is synthesized)
aagtccctctacagtttcaggacgccctcttaacagatggctgtatctttatctgtggttggtcttgtggaatactgactttctgccagcattagcctgtgtttctatgtcacaccaagt

SEQ ID NO: 588213 - DNA, 120 bp, Artificial Sequence
  ENSG00000172845_76 (sequence is synthesized)
cacgtatattttcattgtgtgttaggactcagaataggtttgggtctttcttttaattatgtatacccaattacttagtcctcctcacaccctgatcctttaaaaattcttaagttgtgt

SEQ ID NO: 588214 - DNA, 120 bp, Artificial Sequence
  ENSG00000172845_77 (sequence is synthesized)
taattgcatttttctcaattctactcctagtaactctgtgtgtttttttccatctttattcatttagtaaagttgaaacctttcatagcataatatagtgattaagtgcataggtttggg

SEQ ID NO: 588215 - DNA, 120 bp, Artificial Sequence
  ENSG00000172845_78 (sequence is synthesized)
acttagacacacatgggcttgcttgtctcccagttctgccgcttaccacctatgtgacctttcactctttacctttccactcttagcctgttctctaactataaaatgagaatgatgcta

SEQ ID NO: 588216 - DNA, 120 bp, Artificial Sequence
  ENSG00000172845_79 (sequence is synthesized)
gcgtcatcttcatagagtgattatggagataaataagttaatgcatgtaaaccactttccataatgcctggcacatattatattatgtattagtaaatgtaagcactggaagaatcagta

SEQ ID NO: 588217 - DNA, 120 bp, Artificial Sequence
  ENSG00000172845_80 (sequence is synthesized)
gtcttcctacacttgaaaatagttgtcttcaactattgttgtattaatgagttaattcaccttgttaagtcaccttgatccacctaattgtcagccaacatttattaacgaaactgctag

SEQ ID NO: 588218 - DNA, 120 bp, Artificial Sequence
  ENSG00000172845_81 (sequence is synthesized)
tattcgtattgtgccttttttattatgaaacatttcaagaatacagaaaaatgcagaaaacaatgtaacaaatacctaagtatctatcacccaacttttatagtcttatttttacctata

SEQ ID NO: 588219 - DNA, 120 bp, Artificial Sequence
  ENSG00000172845_82 (sequence is synthesized)
tattttttcttttagaaaggaatgatcacagttgtgcctgaaatctgtatagccctgtctcatttcatttgtctccctttacccacataagtaattgcagctctgaatttgatgtttatc

SEQ ID NO: 588220 - DNA, 120 bp, Artificial Sequence
  ENSG00000172845_83 (sequence is synthesized)
agaatgataccatgagtggttttatatccttattatatgtatgcatacctaggattgtttttctgattttgaaacttcatataaatggtatcattctgtacaaaaccttctgggacttgt

SEQ ID NO: 588221 - DNA, 120 bp, Artificial Sequence
  ENSG00000172845_84 (sequence is synthesized)
tttaccactcatgtttttgagatgtatccacactaccatctttctctaaatcattcatttaaatgctgtagttcattgaataagtttatcacaatgtatccattttcttcttgatgagca

SEQ ID NO: 588222 - DNA, 120 bp, Artificial Sequence
  ENSG00000172845_85 (sequence is synthesized)
tctcagttatttccaatttttgacttataaacaatgctgcaatgaaataattgacatatttccttgtgtacatgtgagcatttcttgagatatgtatctagaacttgaatcactggccaa

SEQ ID NO: 588223 - DNA, 120 bp, Artificial Sequence
  ENSG00000172845_86 (sequence is synthesized)
caggatattcttaatcttcagtttcaccagatacttccaaattgatctccataacatgcataccaaattatattcctaccagccatttataggagttcacattttttccataccctccca

SEQ ID NO: 588224 - DNA, 120 bp, Artificial Sequence
  ENSG00000172845_87 (sequence is synthesized)
atcctgccttggcagatatgttttttccaatgaataacaatgaaattttgttttgggatttgacaaaatgattctagattcatctggaagaaaagcaagtataagtaagaaatttaaaag

SEQ ID NO: 588225 - DNA, 120 bp, Artificial Sequence
  ENSG00000172845_88 (sequence is synthesized)
ggacctgaaaaactaagcaatggatatatttaaaaattggtaccagtagggataaccaaatatttgttaactgtagcagaaacaatgcatgtttttctcactggttccaccttctatctc

SEQ ID NO: 588226 - DNA, 120 bp, Artificial Sequence
  ENSG00000172845_89 (sequence is synthesized)
tcagtcaagccctgcccaggtgtggtagtcctcatagtctctcactgtaggggtcttctcacatagtagaccactctcttgagttgaatattgaaaagaaggcttggccgggggcagtgg

SEQ ID NO: 588227 - DNA, 120 bp, Artificial Sequence
  ENSG00000172845_90 (sequence is synthesized)
ctcatgcctgtggtcccagcactttgggaagctgagtcgagcggattgcttgaggtcagcagttcgagagcagcctgactaacatggtgatgaaaagtacaaaattagctgggggtggtg

SEQ ID NO: 588228 - DNA, 61 bp, Artificial Sequence
  ENSG00000172845_91 (sequence is synthesized)
gaggctgaggcacgagaatcgcttgaacgcaggaggcattcgtctcaaaaaaaaaaaaaaa

SEQ ID NO: 588229 - DNA, 120 bp, Artificial Sequence
  ENSG00000172845_92 (sequence is synthesized)
aaaaaaaaaaaaaaaaaaaaaggcttaagtccaactaactgtttccctgctgttcattttatccaacggctggggatataggctactgcacatgatgggttgatggatgtgaaatgataa

SEQ ID NO: 588230 - DNA, 120 bp, Artificial Sequence
  ENSG00000172845_93 (sequence is synthesized)
ggatgtgaaatgataactcatgactttaattctaatttttctatattctggtgaggttgagcatatttttacaagttcataatccattttcctctgatgggagttgcctgtttgaatcct

SEQ ID NO: 588231 - DNA, 120 bp, Artificial Sequence
  ENSG00000172845_94 (sequence is synthesized)
ttgcccacttgctttttggggttatttgcaattttttgcattgatcttcaaacattcttaattaatcccaggtacatattattttatatataagatatattttagagatatataggctga

SEQ ID NO: 588232 - DNA, 120 bp, Artificial Sequence
  ENSG00000172845_95 (sequence is synthesized)
tagtatcttttctcagtctaaggcttatcttttaattttgtttatggtgttttgtgtgtgttgttttgcagaagttttattgtatctgaattgtggcttttgtgtcttaagaaattcttt

SEQ ID NO: 588233 - DNA, 120 bp, Artificial Sequence
  ENSG00000172845_96 (sequence is synthesized)
acctactgtcataaaaatttttgtctaaaaattttatgattttgcctttctatttatcttgttaattcactttgaaattacttttgtttatggcataaagtccattattttccatatgga

SEQ ID NO: 588234 - DNA, 120 bp, Artificial Sequence
  ENSG00000172845_97 (sequence is synthesized)
taatcagttgtcttagcagtttattgaatggtccaacgtttccctgctgattataatgccctctctgttatttatcctaaattcttgacatccggtaaggaagtctcctctgcccaccct

SEQ ID NO: 588235 - DNA, 120 bp, Artificial Sequence
  ENSG00000172845_98 (sequence is synthesized)
tctctgtatttcaaaatggttttgactgttcttgaccccttgctctttctgtgaactttaggattaaatgattatgtagaattaaacaatcgggttaaggttttttattagaattacatt

SEQ ID NO: 588236 - DNA, 120 bp, Artificial Sequence
  ENSG00000172845_99 (sequence is synthesized)
gaatctatagattaatttggggaaagaatgttatctttctatccatgataattctgtatctctccattaattcaagtctttaatggtttttaaaaataaattattgtctctttgaaaatc

SEQ ID NO: 588237 - DNA, 80 bp, Artificial Sequence
  ENSG00000172845_100 (sequence is synthesized)
cctcgcccgcctgccgcctttttgtgcgcgtgtgagtgtgggccccagcgtgccctcccgggggtgggttccgggcggaa

SEQ ID NO: 588238 - DNA, 120 bp, Artificial Sequence
  ENSG00000172845_101 (sequence is synthesized)
gagccggggtgcttggagcgggggacgccaggcgtgggctggcggcgggaccaggaggaggaggaggaggaggaggagagcgcgggctggcgcttgcccgggcgcagtcggcggggaccg

SEQ ID NO: 588239 - DNA, 120 bp, Artificial Sequence
  ENSG00000172845_102 (sequence is synthesized)
ggggaccgagtcgtacttcctgtgcgaaaggcggcccgaccctaaccgccaccccctccccctgtctccctctctgaacccgcccattgggggtaggacactcagccgtcaccgctcgct

SEQ ID NO: 588240 - DNA, 120 bp, Artificial Sequence
  ENSG00000172845_103 (sequence is synthesized)
aattacagaggcacagaagaacacatacagggcctgctgtagacagagcatgacatgtgagttctctcctattctgttcgatcaagatcatgtcaaagaaaacccagcctctgtgtgaag

SEQ ID NO: 588241 - DNA, 120 bp, Artificial Sequence
  ENSG00000172845_104 (sequence is synthesized)
cacttttgctagagcagctgaaaagaatttaacccagtactgtcaggataatggcctcaatgtctcctctctacacgatttcagctgagagaccccgcaccccaagcatctgtgggcagc

SEQ ID NO: 588242 - DNA, 120 bp, Artificial Sequence
  ENSG00000172845_105 (sequence is synthesized)
ccactgttgtgcttgtcgtgtcacttgggtgcctctagacatctgtacgcttctccagctgcatgggagacacacttcaccttgtggctcctcctttcaaaggttgcctgtgctgcatgg

SEQ ID NO: 588243 - DNA, 120 bp, Artificial Sequence
  ENSG00000172845_106 (sequence is synthesized)
aagaacagttgactttgctgataggaaacgtctcattgcaccctctttccacaccatctgtctgacctggacccattccaaacactacggctttgctggcagaatggtcttcctgctaca

SEQ ID NO: 588244 - DNA, 120 bp, Artificial Sequence
  ENSG00000172845_107 (sequence is synthesized)
gaagttttgtaatctgctaattgacaggggacatcgtctcactatattgccccaggctggagcaaagtggggctattcacaggtgtgatcacagcgtactacagcctctaactcctgggc

SEQ ID NO: 588245 - DNA, 120 bp, Artificial Sequence
  ENSG00000172845_108 (sequence is synthesized)
tcaaacgattctctgcctcagcctcccgagtagtcaattatttttttctacaggtgggctgaggacagaaaaatcctaaagatggaagtatcattaaaatcgtgctgatccagttgacgt

SEQ ID NO: 588246 - DNA, 120 bp, Artificial Sequence
  ENSG00000172845_109 (sequence is synthesized)
attgtcataatcttacacgtatgtctttgcacatttgtctgattattttatttgtataagttggcagaagtgaaattgctgggttaaagggaattgtctgctagaaaggctagtttatac

SEQ ID NO: 588247 - DNA, 120 bp, Artificial Sequence
  ENSG00000172845_110 (sequence is synthesized)
tctaaccagcagtgtgtgagagtatctagtttcccacacctttgccaacaatgaattttacaattatttttaacctttgaaagtctgacagatgaaaaataccttaatattgtcttagta

SEQ ID NO: 588248 - DNA, 120 bp, Artificial Sequence
  ENSG00000172845_111 (sequence is synthesized)
tatttttaaattacttggtgaggttgaacatttttggggatgttattttgccattttaaaatttattttttgaattgtttctttttttttgtaaatctgttaatttatgtaactctgtca

SEQ ID NO: 588249 - DNA, 120 bp, Artificial Sequence
  ENSG00000172845_112 (sequence is synthesized)
cgtgcaaatgttttttcccagttttacattgcctttgtcagtggtttgtagaatgcattgttattacacaagtaaagaaacagttccatcacttacaccttgcaaacattttaagcacaa

SEQ ID NO: 588250 - DNA, 120 bp, Artificial Sequence
  ENSG00000172845_113 (sequence is synthesized)
aaaattaaagttggtcagcctttcctttattagatgccttgttaccatgctattacaagttttccgtattctgagaattataaaaatgttcatttatattttttctagaacttttgtgac

SEQ ID NO: 588251 - DNA, 120 bp, Artificial Sequence
  ENSG00000172845_114 (sequence is synthesized)
ttcattctttaatagctcacttattctaagcaataaaaattgagattcctaagaaaagaaactatattgtttcttagagcttgtttgaacaaaattcaagcagtatatgtgtgatagaca

SEQ ID NO: 588252 - DNA, 120 bp, Artificial Sequence
  ENSG00000172845_115 (sequence is synthesized)
cacttgtataaatgacaattgtacctaattgatagaagcataacataggtagtaaatccaaactattctaaagtattctgcaagttgatacagatagtaattaaaaaagttttttagaat

SEQ ID NO: 588253 - DNA, 120 bp, Artificial Sequence
  ENSG00000172845_116 (sequence is synthesized)
atttgtctttttttgcaaccattatttttttaaagaatatgggcaagatggcatttttagagaactgattttattcatctttagagaagtaaattttatttgtttaccttttaaagtaag

SEQ ID NO: 588254 - DNA, 120 bp, Artificial Sequence
  ENSG00000172845_117 (sequence is synthesized)
gtgtaaaatataaaatatttaaaagttgtaattatttagcaaatatttattgagcagaaccagctttcagagactgtttaaactagtgagagataacctagtgagagacaaataattgta

SEQ ID NO: 588255 - DNA, 120 bp, Artificial Sequence
  ENSG00000172845_118 (sequence is synthesized)
agtaaaatacattctagaggcatgattgttatataggttttgtatggattaaacatcagtccatatttttaaaattgtgcacaatctgttttctttgtcagcatttcagtttatgtcctg

SEQ ID NO: 588256 - DNA, 120 bp, Artificial Sequence
  ENSG00000172845_119 (sequence is synthesized)
tttttcccaccctgagcagaagagagtgtatttacttaacttttcttaactcctctacccacagtttagcttccactctatcttagcattattaaattattgggaacaagtttagacact

SEQ ID NO: 588257 - DNA, 120 bp, Artificial Sequence
  ENSG00000172845_120 (sequence is synthesized)
caagaataaaaacgtaaaattattagtttttcctatattataggcattagtggtgtggatattaatcaagaagaaaactttaaatcttttattcctgaactttgttgagaaattcacttc

SEQ ID NO: 588258 - DNA, 120 bp, Artificial Sequence
  ENSG00000172845_121 (sequence is synthesized)
agttctctcccttcaagccttggtatgacatgccgtaaatccacatctaccatatctatatcttactttgaatgaaattttctttttaaatagaattttgggcctggatgttgagctttt

SEQ ID NO: 588259 - DNA, 120 bp, Artificial Sequence
  ENSG00000172845_122 (sequence is synthesized)
tccttaaatatgtgtgcaaccccgcccctatgttttttctttcctagatgcctgtcccattttcaaataatatttcttatttcctaataattcagttaaaaataccttccctagcttctt

SEQ ID NO: 588260 - DNA, 120 bp, Artificial Sequence
  ENSG00000172845_123 (sequence is synthesized)
gcttctttgagaacccagatctgttgctgttaatttgttagtcttgtgctttgttagtgttcccatgctaaattttgctaagtttgtgaaatgcacttttgagtttgtaaaagcgcgttg

SEQ ID NO: 588261 - DNA, 120 bp, Artificial Sequence
  ENSG00000172845_124 (sequence is synthesized)
attattgacctgagtggtaggcttagaggagaggcatgaaataatgagtacacgagtgaactgaattgggttctctgtgaaattgctatggtgaacacgatatgtaaaattggtttgtac

SEQ ID NO: 588262 - DNA, 120 bp, Artificial Sequence
  ENSG00000172845_125 (sequence is synthesized)
accagtagccacaaacattgctgtttttcttagggatttttaaataataaaataaatttaaaaatctaaattaaatggaatcaatattggctttggttagtaagactttggcattgcaag

SEQ ID NO: 588263 - DNA, 120 bp, Artificial Sequence
  ENSG00000172845_126 (sequence is synthesized)
ggagccagaaaaacctgtttcacttaactcagctctttgaagagttgtagaaattgggggtggactggagcagaaactagaattgtgttagattatgacatccttgcccttgagacaaca

SEQ ID NO: 588264 - DNA, 120 bp, Artificial Sequence
  ENSG00000172845_127 (sequence is synthesized)
gcatgactcctccttgtctttacttatgctattcctctgcctggaatgccttccctcctttctatctaaatcctacccacctcctccacgaagccttctctaactactggagcccacatt

SEQ ID NO: 588265 - DNA, 120 bp, Artificial Sequence
  ENSG00000172845_128 (sequence is synthesized)
gatgtctccctgttcagaacacctatggcatctaacagccagcactgcaccgtttagcactgtttgtcctatggcaatttcacatgctactgagtgtgagtacattaaaatataaatgtg

SEQ ID NO: 588266 - DNA, 120 bp, Artificial Sequence
  ENSG00000172845_129 (sequence is synthesized)
gggaaatatgcatttttccagtaaatttgaaaaacgataggtgtattgtatacaggaggatttacaggctatagaaagttttacaggatatgcctaaactgtgagattgggggaggaggg

SEQ ID NO: 588267 - DNA, 120 bp, Artificial Sequence
  ENSG00000172845_130 (sequence is synthesized)
gagttggggagggggctaaatgtacttttttaaaaaaactcagaaacattgtaaagtttatacaaattgttttgtccaaagtgtcatgttttttaaaaactaatttatttttattcagta

SEQ ID NO: 588268 - DNA, 120 bp, Artificial Sequence
  ENSG00000172845_131 (sequence is synthesized)
caaaaaagttttcttcttgcttaggctaagatacctctgttcacccatctaatctcatatcttctaaaccctgctcttggtatcaaatactgaaatgtaataaatgtccaattttgtgat

SEQ ID NO: 588269 - DNA, 120 bp, Artificial Sequence
  ENSG00000172845_132 (sequence is synthesized)
gtggagaaaactgtattttattatatctcttgtgtctaattttgggtatcttttacatggttaatatgaagggaattttaaatgtaaagataattttgatttgtatttatctcatctaat

SEQ ID NO: 588270 - DNA, 120 bp, Artificial Sequence
  ENSG00000172845_133 (sequence is synthesized)
gctaagggagttcagaccattgctttaactagatttaaaaaaaagctttctccaagtcagtgtatattcagagtgtggccacacaaatatgaacaaatattcttaaatcatattaaagtc

SEQ ID NO: 588271 - DNA, 120 bp, Artificial Sequence
  ENSG00000172845_134 (sequence is synthesized)
tgctaaagctgcctatatcttttaattgtacctgtgatcagttacgtattcattctttggtttaaatatatttttgattatctgacgacttttgaatacagaccacatttagtttcctat

SEQ ID NO: 588272 - DNA, 120 bp, Artificial Sequence
  ENSG00000172845_135 (sequence is synthesized)
ataattaagtggatcaggcttatgcgtagaatttgtgaatggttctgatagaagaataaatagctttattgtacattctttacatatgaaatgtccttttaattacataattcttgagca

SEQ ID NO: 588273 - DNA, 120 bp, Artificial Sequence
  ENSG00000172845_136 (sequence is synthesized)
tatttacatttggacaacaatcacattaattctggagtaaggttaatatataaaatgtatatgcttgaaatacataaattttcatttaaactgattttaaatggttttggtttctgattg

SEQ ID NO: 588274 - DNA, 120 bp, Artificial Sequence
  ENSG00000172845_137 (sequence is synthesized)
actttgtaatgataatgtcttctatttaaaattcaacatggggatatatgatgtaaatggtaatgtccatttgaatattttcatataagtatatattattctatgtgtgttttttagagg

SEQ ID NO: 588275 - DNA, 120 bp, Artificial Sequence
  ENSG00000172845_138 (sequence is synthesized)
tttattatttttgaacctggagcattttctgttggacgttacaggatcttactgctttaaatcatacattattaaaaaaaatgagggtttattctttgaattacccttttgtatgcagga

SEQ ID NO: 588276 - DNA, 120 bp, Artificial Sequence
  ENSG00000172845_139 (sequence is synthesized)
gtgaagactgcttttttagttgaccattcaaaatcgttgaattttagtttttgcagactactaaaatttgcagtgactttttttttgtaaggggggtaaatgaaacatttagcagccttt

SEQ ID NO: 588277 - DNA, 120 bp, Artificial Sequence
  ENSG00000172867_0 (sequence is synthesized)
agcacagttgagtctccagccttgactcttctcaagagcctgtgactttcctccctggacaaaggcatcatgagttgtcagatctcttgcaaatctcgaggaagaggaggaggtggagga

SEQ ID NO: 588278 - DNA, 120 bp, Artificial Sequence
  ENSG00000172867_1 (sequence is synthesized)
ggattccggggcttcagcagcggctcagctgtggtgtctggtggaagccggagatcaacttccagcttctcctgcttgagccgccatggtggtggtggcgggggcttcggtggaggcggc

SEQ ID NO: 588279 - DNA, 120 bp, Artificial Sequence
  ENSG00000172867_2 (sequence is synthesized)
tttggcagtcggagtcttgttggccttggagggaccaagagcatctccattagtgtggctggaggaggtggtggctttggcgccgctggtggatttggtggcagaggaggtggttttgga

SEQ ID NO: 588280 - DNA, 120 bp, Artificial Sequence
  ENSG00000172867_3 (sequence is synthesized)
ggcggcagcagctttggaggtggcagcggcttcagtggtggtggtttcggtggaggcggctttggtggaggccgctttggaggttttgggggccctggtggtgttggaggtttagggggt

SEQ ID NO: 588281 - DNA, 120 bp, Artificial Sequence
  ENSG00000172867_4 (sequence is synthesized)
cctggtggctttgggcctggaggataccctggtggcatccacgaagtctctgtcaaccagagcctcctgcagcctctcaacgtgaaagttgacccagagatccagaatgtgaaggcccaa

SEQ ID NO: 588282 - DNA, 120 bp, Artificial Sequence
  ENSG00000172867_5 (sequence is synthesized)
gagcgtgagcagatcaaaactctcaacaacaaatttgcctccttcattgacaaggtgcggttcttggagcagcagaaccaggtgttacagaccaaatgggagctgctacaacaaatgaat

SEQ ID NO: 588283 - DNA, 120 bp, Artificial Sequence
  ENSG00000172867_6 (sequence is synthesized)
gttggcacccgccccatcaacctggagcccatcttccaggggtatatcgacagcctcaagagatatctggatgggctcactgcagaaagaacatcacagaattcagagctgaataacatg

SEQ ID NO: 588284 - DNA, 120 bp, Artificial Sequence
  ENSG00000172867_7 (sequence is synthesized)
caggatcttgtggaggattataagaagaagtatgaggatgaaatcaataagcgcacagctgctgagaatgattttgtgacgcttaaaaaggacgtggacaatgcctacatgataaaggtg

SEQ ID NO: 588285 - DNA, 120 bp, Artificial Sequence
  ENSG00000172867_8 (sequence is synthesized)
gagttgcagtccaaggtggacctgctgaaccaggaaattgagtttctgaaagttctctatgatgcggagatatcccagatacatcagagtgtcactgacaccaacgtcatcctctccatg

SEQ ID NO: 588286 - DNA, 120 bp, Artificial Sequence
  ENSG00000172867_9 (sequence is synthesized)
gacaacagccgcaacctggacttggatagcatcatcgccgaggtcaaggcccagtatgaggagatcgcccagaggagcaaggaagaagcggaggccctgtaccacagcaagtatgaggag

SEQ ID NO: 588287 - DNA, 120 bp, Artificial Sequence
  ENSG00000172867_10 (sequence is synthesized)
agagatcagcgagctgaaccgcgtgatccagaggctgcagggggagatcgcacatgtgaagaagcagtgtaagaatgtgcaagatgccatcgcagatgccgagcagcgtggggagcatgc

SEQ ID NO: 588288 - DNA, 120 bp, Artificial Sequence
  ENSG00000172867_11 (sequence is synthesized)
cctcaaggatgccaggaacaagttgaatgacctggaggaggccctgcagcaggccaaggaggacttggcgcggctgctgcgtgactaccaggagctgatgaacgtgaagctggccctaga

SEQ ID NO: 588289 - DNA, 120 bp, Artificial Sequence
  ENSG00000172867_12 (sequence is synthesized)
tgtggagatcgccacctaccgcaaactgctggagggcgaggagtgcaggatgtctggagacctcagcagcaatgtgactgtgtctgtgacaagcagcaccatttcatcaaatgtggcatc

SEQ ID NO: 588290 - DNA, 120 bp, Artificial Sequence
  ENSG00000172867_13 (sequence is synthesized)
caaggctgcctttggaggttctggaggtagagggtccagttccggaggaggatacagctctggaagcagcagttatggctctggaggccgacagtctggctccagaggcggtagtggagg

SEQ ID NO: 588291 - DNA, 120 bp, Artificial Sequence
  ENSG00000172867_14 (sequence is synthesized)
aggaggttctatctctggaggaggatatggctctggcggtggttctggaggaagatacggatctggtggtggctctaagggagggtccatctctggaggaggatatggctctggaggtgg

SEQ ID NO: 588292 - DNA, 120 bp, Artificial Sequence
  ENSG00000172867_15 (sequence is synthesized)
aaaacacagctctggaggtggctctagaggaggctccagctctggaggaggatatggctctggaggtgggggttctagctctgtaaagggtagctcaggtgaagcttttggttccagcgt

SEQ ID NO: 588293 - DNA, 120 bp, Artificial Sequence
  ENSG00000172867_16 (sequence is synthesized)
gaccttctcttttagataaagatgagcccccaccaccaccgactctcccaacccagactctcccactccagaatgtagaagcctgtctctgtacctctaactggcagcaagttaaatttt

SEQ ID NO: 588294 - DNA, 120 bp, Artificial Sequence
  ENSG00000172867_17 (sequence is synthesized)
tgtcatttatctctgatggcactttgagggaaaagaatgtccacatacagtttttgaaagatcttctctccaaaccagttagttagagccagtgacgcctctgtgttctggggcggaatc

SEQ ID NO: 588295 - DNA, 120 bp, Artificial Sequence
  ENSG00000172867_18 (sequence is synthesized)
tgtgctgtctaggtttgtgcttctagccatgcccattcccgcccccaccatgcctctttgcattgcccattttccagatgtgtattctgttgaggacccaggcccatccagggatttcat

SEQ ID NO: 588296 - DNA, 120 bp, Artificial Sequence
  ENSG00000172867_19 (sequence is synthesized)
ctctaagcctggcagtgctggggggaaatgtgtttctgtgtatatagctcctcttgtccactctgctttcggaagtgctgtggtctgggggtcttcataataaacctcatttgcaattca

SEQ ID NO: 588297 - DNA, 120 bp, Artificial Sequence
  ENSG00000172867_20 (sequence is synthesized)
tccagcctcagacacttctcgaggtcctgaagcagcacctgagctgcccctggccagcgtggcttgcttggtgtgaaggatgatctagaactcatgtgctctccttctggtcatggcagg

SEQ ID NO: 588298 - DNA, 120 bp, Artificial Sequence
  ENSG00000172869_0 (sequence is synthesized)
gagggaaggagggagggaagcagccgctgacccgtggcatgagctggatgcggtgtccgttgcaggactagggcgccgacatgaacctgcaccaggtgctgaccggggctgtgaaccctg

SEQ ID NO: 588299 - DNA, 120 bp, Artificial Sequence
  ENSG00000172869_1 (sequence is synthesized)
gcgaccactgcttctccgtgggcagcattggcgaccagcgcttcacggcttatgcatctggatgtgacattgtaatactgggaagcgattttgaaagattacagataatcccaggagcta

SEQ ID NO: 588300 - DNA, 120 bp, Artificial Sequence
  ENSG00000172869_2 (sequence is synthesized)
aacatggaaatattcaagtgggatgtgtagactgttcaatgcaacaaggcaagattgcagcgtcttatggaaatgttatctccatttttgaaccagttaacctaccaaaacaaaagaaaa

SEQ ID NO: 588301 - DNA, 120 bp, Artificial Sequence
  ENSG00000172869_3 (sequence is synthesized)
atttggaattatatagtcagtggcagaaaagtggccaattttttctggaatcaatagcacacaatataacctgggatcccacaggcagtcgtcttttaactggttccagctatttgcaac

SEQ ID NO: 588302 - DNA, 120 bp, Artificial Sequence
  ENSG00000172869_4 (sequence is synthesized)
tctggtccaatactaacttggagaagccaactgaagatgaaaatttaaataaaacagatcttaactttggagattggaaatgcatttggcattgcaaaactgcttcccaagttcatttaa

SEQ ID NO: 588303 - DNA, 120 bp, Artificial Sequence
  ENSG00000172869_5 (sequence is synthesized)
tgaaattttcaccagatggagaattttttgccactgctgggaaggatgactgtcttttgaaggtttggtataatgtagaaaactggcggacagctgttacttctccagatggaagttcag

SEQ ID NO: 588304 - DNA, 120 bp, Artificial Sequence
  ENSG00000172869_6 (sequence is synthesized)
aaaaacaatcccaaggagaaattgacttttcttttgtgtatctggcccatcctcgagcagtaaatggattttcctggcgtaaaacaagcaaatatatgcctagggcttctgtatgtaatg

SEQ ID NO: 588305 - DNA, 120 bp, Artificial Sequence
  ENSG00000172869_7 (sequence is synthesized)
tactgttgacttgctgcaaagataatgtgtgtcgtctttgggtagagacatttttaccaaatgattgtttgctatacggaggtgactgcagccattggactgaatcaattaatttaacaa

SEQ ID NO: 588306 - DNA, 120 bp, Artificial Sequence
  ENSG00000172869_8 (sequence is synthesized)
ataacttcaagagaaatgcttccagtaaagaacgagttcaaaatgctttagaagtaaatctgagacattttcgtagaggtcggaggagatcacttgctcttgtagcacatacgggatatc

SEQ ID NO: 588307 - DNA, 120 bp, Artificial Sequence
  ENSG00000172869_9 (sequence is synthesized)
taccacatcagcaggatcctcatcatgttcacaggaacactccactgcatgccaatgcactttgccactttcatattgcagccagcatcaacccagccacagacattccacttcttccat

SEQ ID NO: 588308 - DNA, 120 bp, Artificial Sequence
  ENSG00000172869_10 (sequence is synthesized)
ctattacatctctgagtctaaatgaaaatgaagagaagaccggaccttttgttgtacactggctaaacaataaagaactgcattttactttgtccatggaagtttttttacagcaactta

SEQ ID NO: 588309 - DNA, 120 bp, Artificial Sequence
  ENSG00000172869_11 (sequence is synthesized)
gaaaaagttttgaacaaccatcttctgaggccagtgtagaagattctaatcaggcagatgtaaaatctgatgaagaaactgatgatggtgttgatgatctgaaaataaatcccgaaaaga

SEQ ID NO: 588310 - DNA, 120 bp, Artificial Sequence
  ENSG00000172869_12 (sequence is synthesized)
aggaattaggctgtgataaaatggtaccaaactcaagttttacatcattatcgtcagctgccattgatcatcagattgaagtacttctgtctgaatggagtaaaaatgcagatatgctat

SEQ ID NO: 588311 - DNA, 120 bp, Artificial Sequence
  ENSG00000172869_13 (sequence is synthesized)
ttagtattcatcccatggatggttctttgctagtttggcatgtggattggctggatgaataccagcctggtatgtttcgtcaagtacaggtgtcctttgtttccagaattccagtagctt

SEQ ID NO: 588312 - DNA, 120 bp, Artificial Sequence
  ENSG00000172869_14 (sequence is synthesized)
tccccacaggtgatgcaaactctctctgtaaaagcataatgatgtatgcctgtaccaagaatgttgacttggctattcagcaggggaaacaaaaaccttctggcctcacccgttccacat

SEQ ID NO: 588313 - DNA, 120 bp, Artificial Sequence
  ENSG00000172869_15 (sequence is synthesized)
caatgcttatttcttctggtcacaataaatcatctaatagtttaaaattaagtatttttacgcctaatgttatgatgatatcaaaacatgctgatggttctctgaatcagtggctggtca

SEQ ID NO: 588314 - DNA, 120 bp, Artificial Sequence
  ENSG00000172869_16 (sequence is synthesized)
gttttgccgaggaatctgctttttctactgttctcagtatttcccacaaatccagatattgtggtcatcgttttcatcttaatgatttagcttgccactcagtattaccattattgctga

SEQ ID NO: 588315 - DNA, 120 bp, Artificial Sequence
  ENSG00000172869_17 (sequence is synthesized)
caacatcacaccataatgcattaaggacaccagatgttgataacccagagcaaccttttgatgctctaaatattgaagaatgctctttgacacaacaaaataaaagcactgttgacgtgg

SEQ ID NO: 588316 - DNA, 120 bp, Artificial Sequence
  ENSG00000172869_18 (sequence is synthesized)
catttcaggatcccagtgcagtttacagtgagcttattctgtggagggttgacccagttgggccattgtctttttctggaggagtttctgagcttgcccggattaattctcttcatgttt

SEQ ID NO: 588317 - DNA, 120 bp, Artificial Sequence
  ENSG00000172869_19 (sequence is synthesized)
ctgccttttccaatgtggcatggctgcccactcttatacccagttattgtctgggtgcatactgcaactctcctagtgcatgctttgtagccagtgatggacaatatctgagattatatg

SEQ ID NO: 588318 - DNA, 120 bp, Artificial Sequence
  ENSG00000172869_20 (sequence is synthesized)
aagcagttattgatgctaagaaacttttatctgagctttctaaccctgaaatttctaaatatgttggtgaagtctttaacatcgtcagtcaacaatcaacagccaggccaggatgcatta

SEQ ID NO: 588319 - DNA, 120 bp, Artificial Sequence
  ENSG00000172869_21 (sequence is synthesized)
ttgcattagatcccattaccaaacttcatggcagaaaaacccaactgcttcatgtttttgaagaagacttcattttgaataaccttgagaagaaaagccttggcaaagacagcattttat

SEQ ID NO: 588320 - DNA, 120 bp, Artificial Sequence
  ENSG00000172869_22 (sequence is synthesized)
ctaatgcaggcagctcacctaatggattttctgagaagttctacctaattgtaatagaatgcactcaagacaaccgttcactgttacacatgtggaatttacatctaaagtcaattcctg

SEQ ID NO: 588321 - DNA, 120 bp, Artificial Sequence
  ENSG00000172869_23 (sequence is synthesized)
tctcattagatgaaaaagtagatacaaaattatccgaagcggtttggcagccagaagaacattattcttcttctccagagaagatcctatctcctttttcacaaaagtatcaggcttgca

SEQ ID NO: 588322 - DNA, 120 bp, Artificial Sequence
  ENSG00000172869_24 (sequence is synthesized)
gagcaaatctccagagtaccagcaggttgactctgttttcagaaatggtttatagccaagaattgcatttaccagaaggagttgagataataagtattaagccatcagcaggacatctga

SEQ ID NO: 588323 - DNA, 120 bp, Artificial Sequence
  ENSG00000172869_25 (sequence is synthesized)
gttcatcttctatatatcctgcatgcagtgctccttatttattggcaacttcatgttcagatgagaaagtaagattctggagatgcagagtaacagatggagaatctgccacgtcaaaga

SEQ ID NO: 588324 - DNA, 120 bp, Artificial Sequence
  ENSG00000172869_26 (sequence is synthesized)
atggaaaaattgatcttgcatacatttgggaagaatggccattacttattgaagatggacttcagagcaatagtagtataactgtacctggtaggcctgtagaagttagctgtgcacata

SEQ ID NO: 588325 - DNA, 120 bp, Artificial Sequence
  ENSG00000172869_27 (sequence is synthesized)
caaatcgtttagcagtagcttataagcagcctgcatctaatagtagatcttcccaggactttgtgatgcatgtaagtatttttgaatgtgagtcaacaggaggttcatgttgggtccttg

SEQ ID NO: 588326 - DNA, 120 bp, Artificial Sequence
  ENSG00000172869_28 (sequence is synthesized)
agcagacaattcatttagatgagttaagcacagtattggattctggcattagtgttgatagcaatttagtggcctataataaacaagacatgtatttatctagtaaagagaatatcacat

SEQ ID NO: 588327 - DNA, 120 bp, Artificial Sequence
  ENSG00000172869_29 (sequence is synthesized)
caaacacaaagcatttagttcacttagattggatgtctagagaagacggttctcatatcctgactgtaggaattggatcaaaactttttatgtatggacccctggctggcaaggtacaag

SEQ ID NO: 588328 - DNA, 120 bp, Artificial Sequence
  ENSG00000172869_30 (sequence is synthesized)
accaaactggtaaggaaaccctggcatttcctctctgggagagtaccaaagttgtgcccctttctaaatttgtactattacgaagtgtggacctagtttcttctgtagatggctccccac

SEQ ID NO: 588329 - DNA, 120 bp, Artificial Sequence
  ENSG00000172869_31 (sequence is synthesized)
cttttcctgtttctttatcgtgggtccgggatggcatccttgtggtaggaatggactgtgaaatgcatgtgtattgccaatggcaaccatcttctaaacaagaacctgttataacagatt

SEQ ID NO: 588330 - DNA, 120 bp, Artificial Sequence
  ENSG00000172869_32 (sequence is synthesized)
cgtacagtgggagcactccatctataacaagtttaataaaacagagtaactccagttctgggttacatcctccaaagaaaactctgactcgatccatgaccagtcttgcacagaaaatct

SEQ ID NO: 588331 - DNA, 120 bp, Artificial Sequence
  ENSG00000172869_33 (sequence is synthesized)
gtggaaagaaaactgcattcgatccttcagtggatatggaagattcaggtctttttgaagcagctcatgtactttccccgactctacctcagtatcatcccttgcagcttttggaactca

SEQ ID NO: 588332 - DNA, 120 bp, Artificial Sequence
  ENSG00000172869_34 (sequence is synthesized)
tggatcttggtaaagttcggagagccaaggccatcttgtcccatcttgttaagtgcattgctggggaagttgtggctctgaatgaagctgaatctaatcatgaacgccgccttaggtctc

SEQ ID NO: 588333 - DNA, 120 bp, Artificial Sequence
  ENSG00000172869_35 (sequence is synthesized)
tcacaatcagtgctagtggaagcactaccagagacccccaggcattcaacaaggctgaaaatacagattacacagaaatagattctgttcctccacttcctttatatgccttacttgcag

SEQ ID NO: 588334 - DNA, 120 bp, Artificial Sequence
  ENSG00000172869_36 (sequence is synthesized)
cagatgatgatagctgttactcatctttggagaaatctagtaatgagagtacgttaagtaaatcaaaccaattatctaaagaaagttatgatgagctttttcagactcaacttctaatga

SEQ ID NO: 588335 - DNA, 120 bp, Artificial Sequence
  ENSG00000172869_37 (sequence is synthesized)
ctgatactcatatgttagagacagatgaagaaaatacaaagcctagagttattgacctttcacagtacagtccgacttactttggacctgagcatgctcaggttctttctggccacttac

SEQ ID NO: 588336 - DNA, 120 bp, Artificial Sequence
  ENSG00000172869_38 (sequence is synthesized)
ttcattctagtttaccaggactcagccggatggagcagatgtctttgatggccttagcagatacaattgcaactacaagcactgatattggagaaagccgagacagaagccaaggtggag

SEQ ID NO: 588337 - DNA, 120 bp, Artificial Sequence
  ENSG00000172869_39 (sequence is synthesized)
aaactcttgatgaatgtgggttaaaatttcttttggctgttcgactccatacctttcttacaacttcccttccagcctatcgagctcaactccttcaccaaggcctgtctacaagtcatt

SEQ ID NO: 588338 - DNA, 120 bp, Artificial Sequence
  ENSG00000172869_40 (sequence is synthesized)
ttgcttgggcatttcactcagtagcagaagaagaactgctgaacatgttgccagccatgcagaaagatgatcccacttggtctgaactaagagctatgggtgtggggtggtgggtccgga

SEQ ID NO: 588339 - DNA, 120 bp, Artificial Sequence
  ENSG00000172869_41 (sequence is synthesized)
atacccgcatcttacgcaaatgcatagaaaaagtagctaaagcagccttttatagaaagaatgatcctttagatgctgccattttttaccttgcaatgaaaaagaaagctgtgatttggg

SEQ ID NO: 588340 - DNA, 120 bp, Artificial Sequence
  ENSG00000172869_42 (sequence is synthesized)
gattatatagagctgaaaaaaacaccaggatgacacagttttttggacacaattttgaggatgagaggtggcgtaaagcagctttaaagaatgctttttctttgctaggcaaacaaagat

SEQ ID NO: 588341 - DNA, 120 bp, Artificial Sequence
  ENSG00000172869_43 (sequence is synthesized)
ttgaacattctgcagcattttttcttttagctggttgcctcagagatgcaattgaggtatgtcttgagaaattgaatgacattcagttggctcttgtaatagcaagactctatgagtctg

SEQ ID NO: 588342 - DNA, 120 bp, Artificial Sequence
  ENSG00000172869_44 (sequence is synthesized)
aatttgatacatctgcagcatataaatctattttacgtaaaaaagttttgggaatcgattctcctgtcagtgaactgtgttcattgaacataaatatgcatcatgatccttttcttcgga

SEQ ID NO: 588343 - DNA, 120 bp, Artificial Sequence
  ENSG00000172869_45 (sequence is synthesized)
gcatggcatattggattttggaagattatagtggtgctctggaaacattaataaagcaacctatcagagagaatgatgatcaagttttatcagccagtaatcctacagtttttaatttct

SEQ ID NO: 588344 - DNA, 120 bp, Artificial Sequence
  ENSG00000172869_46 (sequence is synthesized)
agacgtcattttggatcatctgatacattttccacacatatgagcctaacaggaaaaagtggactggcaggaacaattaatttaagtgaaagacgtttattttttaccactgccagtgct

SEQ ID NO: 588345 - DNA, 120 bp, Artificial Sequence
  ENSG00000172869_47 (sequence is synthesized)
catttaaaagctggctgcccaatgttggctttggaagtattatcaaagatgcctaaagtcatcaagaaaacaagacctttttatagggcttctagttttctggatactagtaaagactgt

SEQ ID NO: 588346 - DNA, 120 bp, Artificial Sequence
  ENSG00000172869_48 (sequence is synthesized)
tctccttcttctccattaaagttggatgcaagggaagataagtcttctgctgttgattggtcacagtcactgataaatggttttggatcttcttcagagggttcctcagagaagcaatca

SEQ ID NO: 588347 - DNA, 120 bp, Artificial Sequence
  ENSG00000172869_49 (sequence is synthesized)
aactccactctttcttttgactggagccaaccaagtgttgtgtttcaggatgactctttagagttaaaatgggacagtgataatgatgaagaaaatgaggatgtccctatttcaatgaaa

SEQ ID NO: 588348 - DNA, 120 bp, Artificial Sequence
  ENSG00000172869_50 (sequence is synthesized)
gaactaaaacctttacagagaaaaacagataaaaagttggatgacataagttctaactacacagaatctttcagcacactagatgaaaatgaccttttaaatccatcagaagatataatt

SEQ ID NO: 588349 - DNA, 120 bp, Artificial Sequence
  ENSG00000172869_51 (sequence is synthesized)
gcagttcagttaaaatttagagcatgtttaaagattctcacagtagaacttcgtactttatctactggctatgaaatagatggtggaaaattgcgttaccaactataccactggcttgaa

SEQ ID NO: 588350 - DNA, 120 bp, Artificial Sequence
  ENSG00000172869_52 (sequence is synthesized)
aaagaggtgatagctcttcagaggacttgtgacttttgctcagatgctgaagaactacagtctgcatttggcagaaatgaagatgaatttggattaaatgaggatgctgaagatttgcct

SEQ ID NO: 588351 - DNA, 120 bp, Artificial Sequence
  ENSG00000172869_53 (sequence is synthesized)
caccaaacaaaagtgaaacaactgagagaaaattttcaggaaaaaagacagtggctcttgaagtatcagtcacttttgagaatgtttcttagttactgcatacttcatggatcccatggt

SEQ ID NO: 588352 - DNA, 120 bp, Artificial Sequence
  ENSG00000172869_54 (sequence is synthesized)
gggggtcttgcatctgtaagaatggaattgattttgcttttgcaagaatctcagcaggaaacatcagaaccactattttctagccctctgtcagagcaaacctcagtgcctctcctcttt

SEQ ID NO: 588353 - DNA, 120 bp, Artificial Sequence
  ENSG00000172869_55 (sequence is synthesized)
gcttgtacagccaatgccaaaacagtagttgccaatccattattgcaccttagtaatctgacacatgatattctccatgccataataaactttgattcaccaccccaccctgatatccaa

SEQ ID NO: 588354 - DNA, 120 bp, Artificial Sequence
  ENSG00000172869_56 (sequence is synthesized)
agcaataaagtgtatgtaatgcatactttagcagcttcactttctgcttgtatttatcagtgcctttgtggtagtcataactacagttcatttcagacgaatcagtttactggaatggta

SEQ ID NO: 588355 - DNA, 120 bp, Artificial Sequence
  ENSG00000172869_57 (sequence is synthesized)
tatcagacagtactgcttcctcatcgaccttctttgaaaacaggaagcttagatgaagcattaactcccaatacgtcaccagctcaatggccaggaataacttgtctaattcgacttttg

SEQ ID NO: 588356 - DNA, 120 bp, Artificial Sequence
  ENSG00000172869_58 (sequence is synthesized)
aattcttctggcgaggaagcccagtcagggcttacagtcttgctctgtgagattctcacagcagtgtatcttagtctcttcatccatggcctggccacacattcaagtaatgagctattt

SEQ ID NO: 588357 - DNA, 120 bp, Artificial Sequence
  ENSG00000172869_59 (sequence is synthesized)
cggattgtggcccatcctctaaatgagaaaatgtggtctgctgtgtttggtggaggtgcacatgttcctagcaaagaacagacacattcaaaaactttacctgtttcttcactagttgaa

SEQ ID NO: 588358 - DNA, 120 bp, Artificial Sequence
  ENSG00000172869_60 (sequence is synthesized)
gaaggagaaaaacagaacaaacgttttaggccgtcaaaaatgtcttgcagagaatctgccccactgaccccttcctcggcaccagtaagccaggagtcactggcggttaaagaaaagttc

SEQ ID NO: 588359 - DNA, 120 bp, Artificial Sequence
  ENSG00000172869_61 (sequence is synthesized)
atcccacctgagctcagtatctgggactatttcatagctaagccttttctaccctcttctcaaagtagagccgaatatgattcagaggagagtctgggaagtgatgatgatgacaatgat

SEQ ID NO: 588360 - DNA, 120 bp, Artificial Sequence
  ENSG00000172869_62 (sequence is synthesized)
gatgatgatgatgttttagcatcagatttccatctccaggaacattctaattcaaattcatatagttggtccttgatgcggttggcgatggtgcaattggtgctcaacaatttgaagact

SEQ ID NO: 588361 - DNA, 120 bp, Artificial Sequence
  ENSG00000172869_63 (sequence is synthesized)
ttttatcccttcgcaggtcatgatcttgcagagcttccagttagttcacctctttgtcatgcggttctaaaaactcttcaatgttgggaacaagttcttctccgacgacttgaaatccat

SEQ ID NO: 588362 - DNA, 120 bp, Artificial Sequence
  ENSG00000172869_64 (sequence is synthesized)
ggtgggccacctcaaaattatatcgcaagtcataccgccgaagagagtttgtctgcaggtcctgcaattcttcgccacaaagctttactggaacctacaaacactcctttcaaatccaaa

SEQ ID NO: 588363 - DNA, 120 bp, Artificial Sequence
  ENSG00000172869_65 (sequence is synthesized)
caccatctggcactgtctgtgaagaggctttggcagtatttggtgaagcaggaagaaattcaggaaacctttatcaaaaatatattcacaaagaaacggtgtctaaatgagatagaagca

SEQ ID NO: 588364 - DNA, 120 bp, Artificial Sequence
  ENSG00000172869_66 (sequence is synthesized)
gatttgggatatcctggaggtaaagcaagaattattcataaggaatctgatatcattactgcgtttgctgttaataaggcaaatagaaactgcatagcaatcgcttccagtcatgatgtt

SEQ ID NO: 588365 - DNA, 120 bp, Artificial Sequence
  ENSG00000172869_67 (sequence is synthesized)
caagaactggatgtttctggaattctggccacacaggtctacacttgggtagatgatgatatagaagtggaaaccaaaggatcagaagatttcttggttatacatgctcgtgatgattta

SEQ ID NO: 588366 - DNA, 120 bp, Artificial Sequence
  ENSG00000172869_68 (sequence is synthesized)
acagctgttcaaggtacaactccatatacacatagcaatcctggcactccaatcaacatgccatggcttggtagtacacagactggcagaggagcatctgtgatgattaagaaagccatt

SEQ ID NO: 588367 - DNA, 120 bp, Artificial Sequence
  ENSG00000172869_69 (sequence is synthesized)
aataatgttagaagaatgacttctcatccaactcttccttactatctgacaggagctcaagatggaagtgtcagaatgtttgaatggggccattctcaacaaataacctgttttcgatct

SEQ ID NO: 588368 - DNA, 120 bp, Artificial Sequence
  ENSG00000172869_70 (sequence is synthesized)
ggtggcaattcaagagttacaagaatgagatttaactatcagggaaataagtttggaatagttgatgctgatggatatttaagtttgtatcaaacaaactggaaatgttgtccagttact

SEQ ID NO: 588369 - DNA, 120 bp, Artificial Sequence
  ENSG00000172869_71 (sequence is synthesized)
ggaagcatgcctaagccatacctgacttggcagtgtcataacaaaacagccaatgattttgtcttcgttagttcctcctctctgatagctacagctggtctttcaactgacaatagaaac

SEQ ID NO: 588370 - DNA, 120 bp, Artificial Sequence
  ENSG00000172869_72 (sequence is synthesized)
gtatgtttgtgggatactcttgtagcacctgccaatagtttagtccatgcatttacctgccatgacagtggagccacagttttagcatatgctccaaaacatcagctactaatatcaggt

SEQ ID NO: 588371 - DNA, 120 bp, Artificial Sequence
  ENSG00000172869_73 (sequence is synthesized)
ggcagaaaaggttttacatatgtatttgacctttgtcaacgacaacagaggcagcttttccagagccatgattctcctgttaaagccgttgctgttgatccaactgaagagtactttgtt

SEQ ID NO: 588372 - DNA, 120 bp, Artificial Sequence
  ENSG00000172869_74 (sequence is synthesized)
acaggatctgccgaaggcaatataaagatttggagtctctctacctttggtcttctccatacttttgtcagtgaacatgctcggcagtccatttttagaaatattggaactggagtgatg

SEQ ID NO: 588373 - DNA, 120 bp, Artificial Sequence
  ENSG00000172869_75 (sequence is synthesized)
caaattgagacagggcctgcaaatcacattttctcctgtggagctgatggaacaatgaaaatgagaatactgccagatcagtttagccctttaaatgaagtgttgaaaaatgatgtgaaa

SEQ ID NO: 588374 - DNA, 120 bp, Artificial Sequence
  ENSG00000172869_76 (sequence is synthesized)
tttatgctataacatttttacaataagatgtacaatttattacctatatggaagtggccaacagatataatatacagtgatcattctctatgccacaaattagctaatgctttcttgttt

SEQ ID NO: 588375 - DNA, 120 bp, Artificial Sequence
  ENSG00000172869_77 (sequence is synthesized)
ttatatttattttatggagctttgcccttgatgcactgatgccttaaaaattaacaaggtcattcagaagtagattacattgcctaaagtagaatgtgtaagtaatgctgtaataataca

SEQ ID NO: 588376 - DNA, 120 bp, Artificial Sequence
  ENSG00000172869_78 (sequence is synthesized)
tatcatagtatattataatcagtatgtcatagtgttaaaggtgttttgttttcttattgatacttttccacaggcatctctgcatgaatttcttccacagtaaaaatacgttttttgtaa

SEQ ID NO: 588377 - DNA, 120 bp, Artificial Sequence
  ENSG00000172869_79 (sequence is synthesized)
aggcaattgtacataatactcatcacttaattcaccacactctcacttcctttattagccttatacatctcaaactcttctcttaattaatgataggtatttgagtaagaatgaaaaaaa

SEQ ID NO: 588378 - DNA, 120 bp, Artificial Sequence
  ENSG00000172869_80 (sequence is synthesized)
taatgaacatcttcattaaaattgtcattgagacgtcagtgataaatgagctagatggctcaatatgtaaggttttcagtagtttaccctccggaacccaagttgtatgtatgtatacgt

SEQ ID NO: 588379 - DNA, 120 bp, Artificial Sequence
  ENSG00000172869_81 (sequence is synthesized)
gtgtgtgtgtgtgtgtgtgtgtatcttacacatcttatttgaacttagttgtatatattagcgaaaactggtttttcatgtgtttttgtgccataacaactattgccaccagaataactt

SEQ ID NO: 588380 - DNA, 120 bp, Artificial Sequence
  ENSG00000172869_82 (sequence is synthesized)
tttttttgcaactgtgcttttcatttttaaaaaatttttgaattcccatcctaattttcaaataagtttcaaggagactatcaggattattattttaaagattagatttagtcaaataag

SEQ ID NO: 588381 - DNA, 120 bp, Artificial Sequence
  ENSG00000172869_83 (sequence is synthesized)
tcttagcaggcaataaagtttctgtggtggcatatatcatgtaagacacttaaagtaagtttgtgaatttgtcaactttcgagcatcaaacaaatattttacttaaattttattttatct

SEQ ID NO: 588382 - DNA, 120 bp, Artificial Sequence
  ENSG00000172869_84 (sequence is synthesized)
tatttttaggtgcttttaatctcaaaattctgaaaagcgaatagcagtgttttcagaaacaaatgtgaaagcagtcaaattaagtagatactatttagaaatgtaaaatactctccagat

SEQ ID NO: 588383 - DNA, 120 bp, Artificial Sequence
  ENSG00000172869_85 (sequence is synthesized)
ctaccattaatagaaaataaactaaaccttatattttatttttgccaaaatattttattataaaatatgaccaaaatatttaaaatgcacaatgcttttaacttaaatgtgctaaccctg

SEQ ID NO: 588384 - DNA, 120 bp, Artificial Sequence
  ENSG00000172869_86 (sequence is synthesized)
tttctgtctgttttgtgctgtaccttttctgattcagaattatagaaaacttgataaatacttgattttaaccaatgagactacaggcagatgggactaagtgtttatgggacaattatg

SEQ ID NO: 588385 - DNA, 120 bp, Artificial Sequence
  ENSG00000172869_87 (sequence is synthesized)
tactatttaacttaaatatattttgtttaataggaaatatataataatagcattttatgtaataaaatatgggcaacgattatcttggaaattaaagagtcaaagcaaagaaatgaaggg

SEQ ID NO: 588386 - DNA, 120 bp, Artificial Sequence
  ENSG00000172869_88 (sequence is synthesized)
ctggtaaaatgaattttgtaatatcctcaggatacttttatcttaaaagtatgttgttaaagattttgtaaattgtatttcaacaattttaaatgtgttgagcaagttgcagtgcaaaca

SEQ ID NO: 588387 - DNA, 120 bp, Artificial Sequence
  ENSG00000172869_89 (sequence is synthesized)
ctgtcattatgtagagagtttatatgcacataataacctgtacctataaatcgtgcaataaccatatgcgactattttgccatggagaaatctgacagcattgcaaacaatagtattgtt

SEQ ID NO: 588388 - DNA, 120 bp, Artificial Sequence
  ENSG00000172869_90 (sequence is synthesized)
tgatgtagttaaccttaagttatttttcagtaatttcttcacaaatcaagattcaaacagctttaaacacttccaatgagataaaatatttactattatgcttattagaacaaaaggtgt

SEQ ID NO: 588389 - DNA, 120 bp, Artificial Sequence
  ENSG00000172869_91 (sequence is synthesized)
ttaaggatgaactaaatattttaattgagcatttatatggataatcatacattatgtaagcccatatgtatttacatccagagtcataatattttaaataaacaatcatgcagaaacttt

SEQ ID NO: 588390 - DNA, 120 bp, Artificial Sequence
  ENSG00000172869_92 (sequence is synthesized)
gacaccagtagctctgattattttaatataaagtattttggtttcaatcgtgctttaatgtcaacatttcgaaattgagtaaaaacttcttagggttagaataaaatttatagtggtagt

SEQ ID NO: 588391 - DNA, 120 bp, Artificial Sequence
  ENSG00000172869_93 (sequence is synthesized)
taatgagttctgagggattaagttttgctcatttcctaaccatgcaccctcacacatgcttcttataaggtgtatgaaattttgagaatagtaactccatataatgttcttttctagtaa

SEQ ID NO: 588392 - DNA, 120 bp, Artificial Sequence
  ENSG00000172869_94 (sequence is synthesized)
atttggtttaaaatatagcattgaaacaatccccagtattttgcatgttacatctcatctttactctttgtcatgtggttattctttcttgatgaagtcattagaggacaacagtgaaac

SEQ ID NO: 588393 - DNA, 120 bp, Artificial Sequence
  ENSG00000172869_95 (sequence is synthesized)
gcttcacggaggaataagaactcctaagtgttggatgcaagaagtgtagatgagaagttaatgtgaagaagatatagagccgcagaaacaaagattgaagaccaacttagactttaccaa

SEQ ID NO: 588394 - DNA, 120 bp, Artificial Sequence
  ENSG00000172869_96 (sequence is synthesized)
aaaaatgaaaaccttgttctttttagttagtacatgttctgttagtataaatttatagtgacagaactaataaaactctgggaccttgccctaagagtacatgtaacataatgtaagatg

SEQ ID NO: 588395 - DNA, 120 bp, Artificial Sequence
  ENSG00000172869_97 (sequence is synthesized)
gggaaacgaagacaaggacacatagtatcatggctgaccaaaaagcccatgtacttaccctgctgtacaaacttttgggattttagtgatgaagaggaacaaattggcttatgcatctgg

SEQ ID NO: 588396 - DNA, 120 bp, Artificial Sequence
  ENSG00000172869_98 (sequence is synthesized)
gcacatcacaactaccattggatacatgtgcccaaatcctgctctgggaatttctacatctgtagctgtgggattgtgtctatgcacttatatgtcttgttctagagagggttctggtat

SEQ ID NO: 588397 - DNA, 120 bp, Artificial Sequence
  ENSG00000172869_99 (sequence is synthesized)
tgacttctcatccaactcttccttacttttggaatagttgatgctgatggatatttaagtttgtatcaaacaaactggaaatgttgtccagttactggaagcatgcctaagccatacctg

SEQ ID NO: 588398 - DNA, 120 bp, Artificial Sequence
  ENSG00000172869_100 (sequence is synthesized)
aaaagttcaaattgttcaccttggtgtgaggccttttacaacctggctcagatctgcctttttagtctcagattgcagcgtcttatggaaatgttatctccatttttgaaccagttaacc

SEQ ID NO: 588399 - DNA, 120 bp, Artificial Sequence
  ENSG00000172869_101 (sequence is synthesized)
atcggtattacttatatactgtaattgaacctacatgttaaattccattttgatgttaaaaatatatttaaatttttcattggaatagaactaaaataaattgtgccaatgaattgttga

SEQ ID NO: 588400 - DNA, 120 bp, Artificial Sequence
  ENSG00000172869_102 (sequence is synthesized)
ttaagtgatgctctttaacaaaactttcccatttctagatgtctatcctacataattatgcaaaggtatatgtatatataggaatgttcaaagcagccctttttatattacagaaaattg

SEQ ID NO: 588401 - DNA, 120 bp, Artificial Sequence
  ENSG00000172869_103 (sequence is synthesized)
aaaacggtatggggaaagttttaaattgtaataccactgtacagtgtaatactacacacagcacaagaatgatctaaatttatgtgtaattacctgggaaagatagctataataaataaa

SEQ ID NO: 588402 - DNA, 120 bp, Artificial Sequence
  ENSG00000172869_104 (sequence is synthesized)
aaatgtaattgtgtagtggtattattatgatcccaattttttaaatgctatattgtgaatttttgaatactcatagaaacaaatctgaaaggaagcacatcaaattgttaatagatgtta

SEQ ID NO: 588403 - DNA, 120 bp, Artificial Sequence
  ENSG00000172869_105 (sequence is synthesized)
gatctagaggcagaggagggtgggagtacaaagcagacatttattttatatactttataataagctgcgttatttttataatcaaagggaaaaaatttagctgtcttactcatccttcaa

SEQ ID NO: 588404 - DNA, 120 bp, Artificial Sequence
  ENSG00000172869_106 (sequence is synthesized)
gatctgtatcaagaatacctcccttagtggattattttgacatcttaccagtcagacttgccctgagctcccatagcggaattattttactttgataatccttatatcattttactttgt

SEQ ID NO: 588405 - DNA, 120 bp, Artificial Sequence
  ENSG00000172869_107 (sequence is synthesized)
actcttgttcatgtgttttccttattgtttgtttctgaaaatccttattttatctttctggaaatgaacagttttctttcttatatatgataaagttctgtcacatagcataatctgtta

SEQ ID NO: 588406 - DNA, 120 bp, Artificial Sequence
  ENSG00000172869_108 (sequence is synthesized)
atccagtatcctgtttttgtaatacttacagagaatatatagactatgctagaggctactgtaataaaatgggtgtctgatgtttgttctctttatgttcaccctgggatttttaaagta

SEQ ID NO: 588407 - DNA, 120 bp, Artificial Sequence
  ENSG00000172869_109 (sequence is synthesized)
gtagctgaatgtttttctgaaatagatccatgtataggtgaagtgaaaaatcacatgacatacagtcaaatgtttacgagtcaaaatatgggtgtcacactgagggtaaggataaatata

SEQ ID NO: 588408 - DNA, 120 bp, Artificial Sequence
  ENSG00000172869_110 (sequence is synthesized)
gtatgtttcgtcaagtacaggtactactgttatttctggagagctacttccttgtttatgtgggtactattttctaatacctctttatataattttatatgttctaacacttgctttctt

SEQ ID NO: 588409 - DNA, 120 bp, Artificial Sequence
  ENSG00000172878_0 (sequence is synthesized)
acgtgaccgacgccaacatggcggcgcccagtggcgtccacctgctcgtccgcagaggttctcatagaattttctcttcaccactcaatcatatctacttacacaagcagtcaagcagtc

SEQ ID NO: 588410 - DNA, 120 bp, Artificial Sequence
  ENSG00000172878_1 (sequence is synthesized)
aacaaagaagaaatttcttttttcggagacaaagagatatttcacacagtatagttttgccggctgcagtttcttcagctcatccggttcctaagcacataaagaagccagactatgtga

SEQ ID NO: 588411 - DNA, 120 bp, Artificial Sequence
  ENSG00000172878_2 (sequence is synthesized)
cgacaggcattgtaccagactggggagacagcatagaagttaagaatgaagatcagattcaagggcttcatcaggcttgtcagctggcccgccacgtcctcctcttggctgggaagagtt

SEQ ID NO: 588412 - DNA, 120 bp, Artificial Sequence
  ENSG00000172878_3 (sequence is synthesized)
taaaggttgacatgacaactgaagagatagatgctcttgttcatcgggaaatcatcagtcataatgcctatccctcacctctaggctatggaggttttccaaaatctgtttgtacctctg

SEQ ID NO: 588413 - DNA, 120 bp, Artificial Sequence
  ENSG00000172878_4 (sequence is synthesized)
taaacaacgtgctctgtcatggtattcctgacagtcgacctcttcaggatggagatattatcaacattgatgtcacagtctattacaatggctaccatggagacacctctgaaacatttt

SEQ ID NO: 588414 - DNA, 120 bp, Artificial Sequence
  ENSG00000172878_5 (sequence is synthesized)
tggtgggcaatgtggacgaatgtggtaaaaagttagtggaggttgccaggaggtgtagagatgaagcaattgcagcttgcagagcaggggctcccttctctgtaattggaaacacaatca

SEQ ID NO: 588415 - DNA, 120 bp, Artificial Sequence
  ENSG00000172878_6 (sequence is synthesized)
gccacataactcatcagaatggttttcaagtctgtccacattttgtgggacatggaataggatcttactttcatggacatccagaaatttggcatcatgcaaacgacagtgatctaccca

SEQ ID NO: 588416 - DNA, 120 bp, Artificial Sequence
  ENSG00000172878_7 (sequence is synthesized)
tggaggagggcatggcattcactatagagccaatcatcacggagggatcccctgaatttaaagtcctggaggatgcatggactgtggtctccctagacaatcaaaggtcggcgcagttcg

SEQ ID NO: 588417 - DNA, 120 bp, Artificial Sequence
  ENSG00000172878_8 (sequence is synthesized)
agcacacggttctgatcacgtcgaggggcgcgcagatcctgaccaaactaccccatgaggcctgaggagccgcccgaaggtcgcggtgacctggtgcctttttaaataaattgctgaaat

SEQ ID NO: 588418 - DNA, 120 bp, Artificial Sequence
  ENSG00000172878_9 (sequence is synthesized)
ttggctggagaacttttagaagaaacagggaaatgaccggtggtgcggtaacctgcgtggctcctgatagcgtttggaagaacgcgggggagactgaagagcaactgggaactcggatct

SEQ ID NO: 588419 - DNA, 120 bp, Artificial Sequence
  ENSG00000172878_10 (sequence is synthesized)
gaagccctgctggggtcgcgcggctttggaaaaacaaatcctggccctggactcggtttcccagcgcggtcaacgcatctggaggggactggaggaaacccccttgttggaagagattcc

SEQ ID NO: 588420 - DNA, 120 bp, Artificial Sequence
  ENSG00000172878_11 (sequence is synthesized)
aagagaagcacggttttctctttcccttgccctgactgttggagtaaaaaacctcttaaatccattgtatcagaggtccttacctctctgacagttacagtgatctttgtatctgaactt

SEQ ID NO: 588421 - DNA, 120 bp, Artificial Sequence
  ENSG00000172878_12 (sequence is synthesized)
ccgtttctcccttttgtgtattccatattggccggccccaaggatgctcgcagaagccagcccccaaccccagcccttccgtatctttcccctccatcgcggctttgcgatgaaagatta

SEQ ID NO: 588422 - DNA, 120 bp, Artificial Sequence
  ENSG00000172878_13 (sequence is synthesized)
gcccgcgaacagaggcattgattacaaacatgtccttggcagtggactctgggcctggccattcttcaggtttctgtcaatccagaaacgcgactttcctggacccctgcggctcttcct

SEQ ID NO: 588423 - DNA, 120 bp, Artificial Sequence
  ENSG00000172878_14 (sequence is synthesized)
cccccgcccacatccagccctccaaggccagtccagaggtgaagtttgaggccctccccccacccaccccacacgcacgcacgcacgctagaccgtttgctgcactaggaattcgagctt

SEQ ID NO: 588424 - DNA, 120 bp, Artificial Sequence
  ENSG00000172878_15 (sequence is synthesized)
gggccccactcgcccaggtgtgaacagtggctgattagtgggcggtctagtctctaaaatgacccctccccagactggcccttctcgcatcgggacccgcgcttgcacgctgcaggagcc

SEQ ID NO: 588425 - DNA, 120 bp, Artificial Sequence
  ENSG00000172878_16 (sequence is synthesized)
gcaaacgtcagctgttctggaaaccgagagggtcccagagagaggagatacgggcgcatttgagagcaagggcctacttggccgggactgaagcttgcgagttgagctccagttcggccg

SEQ ID NO: 588426 - DNA, 120 bp, Artificial Sequence
  ENSG00000172878_17 (sequence is synthesized)
gcagttccatcccgcttcaggaacaggaatccaagggcccacgctctgtctgccaagggccattcctgcccggagcaccctcctttcccttgcgcttgctctccggtacctgttcctcac

SEQ ID NO: 588427 - DNA, 120 bp, Artificial Sequence
  ENSG00000172878_18 (sequence is synthesized)
ctgagctcaagggcagggagaggccgggcctctggcagtccacgaaggaagccgtctgccttcggttatgattttaggaacaagtccaacgagggtgttcaagcagttaatggttgtgct

SEQ ID NO: 588428 - DNA, 120 bp, Artificial Sequence
  ENSG00000172878_19 (sequence is synthesized)
aactcttgtttctactgaagcgggttttgcaaagctgacatcccttaaagataacttgggctttcggaagcggcaaggaaatggcacctgtagttgccaggacaggtggtgtcctcggcc

SEQ ID NO: 588429 - DNA, 120 bp, Artificial Sequence
  ENSG00000172878_20 (sequence is synthesized)
aggactaagagccagctcatctttgtaacattcataatacgggaaactgaggaccaggtggctcggaaaagagatgagttccagcttttacctaacacagggttctctcgtcgtccccca

SEQ ID NO: 588430 - DNA, 120 bp, Artificial Sequence
  ENSG00000172878_21 (sequence is synthesized)
acccctccagctcggcttctttgtgtccagggttgtagatttttggatagaggtgtttctgattctagtgagtctgagaactggaaaagaccaaggaggggttgatgatttacaaggtcc

SEQ ID NO: 588431 - DNA, 120 bp, Artificial Sequence
  ENSG00000172878_22 (sequence is synthesized)
atagaaaaactttttgtgtggtcggaagttggccaagcagaggcccacagcctgatgctactgccccccacccccccaaagatctgaattccctaaagatcaagagggttcagctggcct

SEQ ID NO: 588432 - DNA, 120 bp, Artificial Sequence
  ENSG00000172878_23 (sequence is synthesized)
tgggagatgtttgctggagaatgacttcagttttctcctaaggcaatcagattgcaaccattagcattgtatcttatctgcaaatcagtttactccgaggttccccaaggatagttttat

SEQ ID NO: 588433 - DNA, 120 bp, Artificial Sequence
  ENSG00000172878_24 (sequence is synthesized)
taggaccacaggactttactaaccactgaggtaacacgctgcttgtgcagcaattattttgaggtggaggtatttatgggacaagtttataattccatttattaaagggactaacctaaa

SEQ ID NO: 588434 - DNA, 120 bp, Artificial Sequence
  ENSG00000172878_25 (sequence is synthesized)
gggttttaattttcaaactaggtttgtgatctaaaactgtgatttgagaagttttaatatcctgcaattctatagcattaattttttaaaacaaagctctaagctttcaattgcttagag

SEQ ID NO: 588435 - DNA, 120 bp, Artificial Sequence
  ENSG00000172878_26 (sequence is synthesized)
aaagctctaagctttcaattgcttagagtatttagaattaaaatttttaacatgaaattttctatattaaatttctaacatgaagataaaactatacgtatgtagttttctaactgtttt

SEQ ID NO: 588436 - DNA, 120 bp, Artificial Sequence
  ENSG00000172878_27 (sequence is synthesized)
ctcttcttttaggttgacatctaatttgttttaaaaatttatttgttttaaattaatttgtttttaaaaattaagtaaagccttgggatggggaaaaggaattttattattttatgtgtt

SEQ ID NO: 588437 - DNA, 120 bp, Artificial Sequence
  ENSG00000172878_28 (sequence is synthesized)
tattcaagaagtaatttaaaatccaaattcaattttaactagcagaattctagagatactttggtctcagtcaacctatccaagttgatcaatggcagacagctttgatttttgcccccc

SEQ ID NO: 588438 - DNA, 120 bp, Artificial Sequence
  ENSG00000172878_29 (sequence is synthesized)
tactcctgcctgtagtttcagcttttactccccacattatttctgtgtgcttgaagatttgctctaccttgtcctttgtctcctattttcttgcatttgccctgcaaagaaagatcagat

SEQ ID NO: 588439 - DNA, 120 bp, Artificial Sequence
  ENSG00000172878_30 (sequence is synthesized)
cacatacacaaagctgtaggtaatatagcagtgtaattacatacaacttcctactacaagatttagttcttttaggccaggcgcagtgactcatggctgtggatcatttgaggtcaggag

SEQ ID NO: 588440 - DNA, 120 bp, Artificial Sequence
  ENSG00000172878_31 (sequence is synthesized)
atgcagaatgaggagaggggaaaggaggaagaggagagcaagttctgctggttcagtattgaactgcaagttctcatagaattttctcttcaccactcaatcatatctacttacacaagc

SEQ ID NO: 588441 - DNA, 120 bp, Artificial Sequence
  ENSG00000172878_32 (sequence is synthesized)
atgctgaaataaccatactagttaacatagttgtttttaaattttgcaatatcattgcatggcttcatcttttaaatttctgcaaggtttcaatatatctatttcttctttttttgatag

SEQ ID NO: 588442 - DNA, 120 bp, Artificial Sequence
  ENSG00000172878_33 (sequence is synthesized)
gcaaatgaataattctggaagggtaaaacatgagtctactaaatacataaatgaatacaatgtatactttaggaaagtagatttttaaacaaggacatatttttaaatttctgcttatgt

SEQ ID NO: 588443 - DNA, 120 bp, Artificial Sequence
  ENSG00000172888_0 (sequence is synthesized)
cttccggctcggcctttagttagtgaccagctcctcggcgttctgcagagcgtgggtttcagcgagttctacgtgccaggtccgcccggtgccggcttcctcgctgcccctggcggctcg

SEQ ID NO: 588444 - DNA, 120 bp, Artificial Sequence
  ENSG00000172888_1 (sequence is synthesized)
tcagcccccactacccctgaacttggtcccaatggcggcccgcccctccttcacccggaccgtgggcatctgggcctcgccgaagccgtcaaggtggctgctcgggcttctagagcccgt

SEQ ID NO: 588445 - DNA, 120 bp, Artificial Sequence
  ENSG00000172888_2 (sequence is synthesized)
gtccagccctttgccaccgaggcctgatcctcttttctgccctaaagaacttgccctgacagcctctggctcccgctcttgaggatcttgcttgtccaaacccagaagacagtgcatgaa

SEQ ID NO: 588446 - DNA, 120 bp, Artificial Sequence
  ENSG00000172888_3 (sequence is synthesized)
gccaggggacatccgccatgctccaaacaacttggcctcaggagtcagtgacctttgaggatgtggctgtttacttcacccagaatcaatgggccagcctcgaccctgcgcagagggccc

SEQ ID NO: 588447 - DNA, 120 bp, Artificial Sequence
  ENSG00000172888_4 (sequence is synthesized)
tgtacggggaggtgatgctggagaattatgcaaatgtggcttctctggtagcgtttccattccccaaacctgctctgatctcccacctggagagaggggaagcaccatggggcccagatc

SEQ ID NO: 588448 - DNA, 120 bp, Artificial Sequence
  ENSG00000172888_5 (sequence is synthesized)
cctgggacaccgagattctgagaggcatcagtcaaggtggtgagtcctggatcaaaaatgaagggctagttataaagcaggaagcctctgaagaaacagagttgcacagaatgccagtag

SEQ ID NO: 588449 - DNA, 120 bp, Artificial Sequence
  ENSG00000172888_6 (sequence is synthesized)
gaggacttctcaggaacgtttctcagcactttgattttaaaaggaaggcactgaagcagactttcaatctaaatccaaatctgatacttcgaggtggaatgaagttctatgaatgtaaag

SEQ ID NO: 588450 - DNA, 120 bp, Artificial Sequence
  ENSG00000172888_7 (sequence is synthesized)
aatgtgggaaaatcttccgatataactcaaagcttattcggcatcagatgagtcatactggggaaaagccctttaagtgtaaggagtgtggcaaagctttcaagtccagctatgattgta

SEQ ID NO: 588451 - DNA, 120 bp, Artificial Sequence
  ENSG00000172888_8 (sequence is synthesized)
ttgtacatgagaaaaaccacattggagaagggccctatgaatgtaaggagtgtggcaaaggtttgagttccaacacagccttgactcaacatcagaggatccacactggagagaaaccct

SEQ ID NO: 588452 - DNA, 120 bp, Artificial Sequence
  ENSG00000172888_9 (sequence is synthesized)
atgaatgtaaagagtgtggaaaggctttccgtaggagtgcggcatacctgcagcatcagagattacacacgggagagaaactctataaatgtaaggaatgttggaaagctttcggttgta

SEQ ID NO: 588453 - DNA, 120 bp, Artificial Sequence
  ENSG00000172888_10 (sequence is synthesized)
ggtcactttttattgtccatcagagaattcatactggggagaaaccttatcaatgtaaggagtgtggcaaagccttcacccagaaaatagcctccattcagcatcagagagttcacactg

SEQ ID NO: 588454 - DNA, 120 bp, Artificial Sequence
  ENSG00000172888_11 (sequence is synthesized)
gggagaagccttatgaatgtaaggtgtgtgggaaagccttcaaatggtatggaagttttgttcagcatcagaaattgcaccctgtggagaagaagccagtcaaggtccttgggccatccc

SEQ ID NO: 588455 - DNA, 120 bp, Artificial Sequence
  ENSG00000172888_12 (sequence is synthesized)
tggtcagtccccagtgctcctctccagccatacctcctgttcttctccagggatcctgttctgcttcagccgtagctgtgccttcactgacctttccacatgctgtgctcattcctacct

SEQ ID NO: 588456 - DNA, 120 bp, Artificial Sequence
  ENSG00000172888_13 (sequence is synthesized)
ctgggaattttttcatgctgctgcctacatctggaataccttcttcatctgcccaaatagtgcgtgtcttccagggtcttactcccactgtgaaaccttccccagttattctcacccctt

SEQ ID NO: 588457 - DNA, 120 bp, Artificial Sequence
  ENSG00000172888_14 (sequence is synthesized)
ccttcttctcactcctcatgagctttatcttggcagtcttacggctcttatgcctagcaaatctccagcctaattttatatatttttttgagaaagggtcttgctctgtcacccaggcta

SEQ ID NO: 588458 - DNA, 69 bp, Artificial Sequence
  ENSG00000172888_15 (sequence is synthesized)
cccctcctgggttcaagcgattctcctccttcagactctcgaatagctgggattacaggcacgcctctt

SEQ ID NO: 588459 - DNA, 120 bp, Artificial Sequence
  ENSG00000172888_16 (sequence is synthesized)
cccagcctccaacctaatttgagtttcatttgtatttttttcatcaccttacatgtgttaacagctgtttcaacataaactccattataatctatatacatttaaagaccgtgtttacat

SEQ ID NO: 588460 - DNA, 120 bp, Artificial Sequence
  ENSG00000172888_17 (sequence is synthesized)
aatctcttctgggtagaaaatggaaatacttaacctttgcattggtccctttcaggcttgaacaacagtggctgtatctgcatcgtggggttgctggtggtagaacactttggtgttagg

SEQ ID NO: 588461 - DNA, 120 bp, Artificial Sequence
  ENSG00000172888_18 (sequence is synthesized)
aaagtttggaaaagaggatatccctgtattaggccattatgattagagataagcagcctgggagaaacatacaagacctgtggctactggtagagaattggaataagcttccaacaatgg

SEQ ID NO: 588462 - DNA, 120 bp, Artificial Sequence
  ENSG00000172888_19 (sequence is synthesized)
actgtagagattaatggagattgtttagtgggcccatggctaggtggggtattaatacagttgaagttatgttgcccttggcacagatctttgagaatctcatacatctgtgaaaaagat

SEQ ID NO: 588463 - DNA, 120 bp, Artificial Sequence
  ENSG00000172888_20 (sequence is synthesized)
aatgtgaaataaacagtaaaaaaaaaaagtatgttgatggcagtgagagtaatcatgtctttaaacgtgaagtttttttttctttagttttgctcttgatagctagatgtttcttttaac

SEQ ID NO: 588464 - DNA, 120 bp, Artificial Sequence
  ENSG00000172888_21 (sequence is synthesized)
ttttatttcgtaagtaaatatacacaaaggcattcatctttgttgaatctgttgtgcagatttttcttgatgagcattctgtttttttttctttgtgagcactggcttctatattttatt

SEQ ID NO: 588465 - DNA, 120 bp, Artificial Sequence
  ENSG00000172888_22 (sequence is synthesized)
tcatatttatgaattataaatatgaatttaattactaaagaaataaaaataatggtgtaaagccaactcgaggggaatctgaataagcttccaaaatttttttttttaagaaataaaggg

SEQ ID NO: 588466 - DNA, 120 bp, Artificial Sequence
  ENSG00000172888_23 (sequence is synthesized)
agctgtgtagtgggtcagtggctaggtaggttagtgaagtggaatttggggttgctcttggaagtggccttgatgaggatcctttacaactattcagaggactgtgtgaagtagttactg

SEQ ID NO: 588467 - DNA, 120 bp, Artificial Sequence
  ENSG00000172888_24 (sequence is synthesized)
gaaaaagaacttgaattatgcatttattggcattaatgtaaacagtaagtcctaagctttgatggaagggtccatacattttttttttttttttgctgatgttgctatctagatgtttct

SEQ ID NO: 588468 - DNA, 120 bp, Artificial Sequence
  ENSG00000172888_25 (sequence is synthesized)
ctatagcaattaatagcaaaacctttacattcttggtttttaaactttaccatgtgtctgaattacatagtgtgcttgtaaaaagaagagttttctctcttgcacaaattctgattttgg

SEQ ID NO: 588469 - DNA, 120 bp, Artificial Sequence
  ENSG00000172888_26 (sequence is synthesized)
ctatctgtggtgatggccagatctttagcatggaccatactttgagagatatgcttcaaacagaaaatgcccacccctcctcctttacccagcataaactctatggttaattcttaaaat

SEQ ID NO: 588470 - DNA, 120 bp, Artificial Sequence
  ENSG00000172888_27 (sequence is synthesized)
aatgccttacagtctccattaactcccttgcccttctcttgctttgtcatgctcgcttggcaaaacctcatctctgactaaatgcagttctttgccttctctgttcctgcaccaaaaatg

SEQ ID NO: 588471 - DNA, 120 bp, Artificial Sequence
  ENSG00000172888_28 (sequence is synthesized)
atcaggagaaagcatattaccaggctgaactgtcactttaaattcatgaccagtaacttcatggaggcccttaacgtttcctgatggtcatactacaatttttggagtccacttaactcc

SEQ ID NO: 588472 - DNA, 120 bp, Artificial Sequence
  ENSG00000172888_29 (sequence is synthesized)
cctgctttcctaggccactactttatactttctctcttctgtaacttccaaagcatccctctcagttctcatgctcagctgatggttatgtttctgccttcggcgagagaacagcaagct

SEQ ID NO: 588473 - DNA, 120 bp, Artificial Sequence
  ENSG00000172888_30 (sequence is synthesized)
ccagaaagtggctgcgccttcagccccgtgctagaatgagaacatatggagccaacttgagttcggaagggctgtggccacctcgtttcgcccatctacttttcaccttgccgtatctga

SEQ ID NO: 588474 - DNA, 120 bp, Artificial Sequence
  ENSG00000172888_31 (sequence is synthesized)
ttcttcaccaccgtattctcagtcacttccactaaacagtgccagtgttttaaggttctgtcacactcagtaacccacttctggttcctcattccgtgtcagtgatcagcagtagactga

SEQ ID NO: 588475 - DNA, 120 bp, Artificial Sequence
  ENSG00000172888_32 (sequence is synthesized)
agaatctaccttagatttgctccatactattaattagcttacaaaatgtctaagaggagctaagctgggatgccacataggcagaagccaggaaaaatgaccaaccacagaaccaagtgg

SEQ ID NO: 588476 - DNA, 120 bp, Artificial Sequence
  ENSG00000172888_33 (sequence is synthesized)
ctacaatcattttggtagggtcttctgtcttcagccagggtgtacctgctcggtgggagttggttatatatgtatgtccaagttgcaggggcttctgggaaatacaggttttggattctg

SEQ ID NO: 588477 - DNA, 120 bp, Artificial Sequence
  ENSG00000172888_34 (sequence is synthesized)
cctgggaagagagtcatagtatgaagaagtctgaaaatggggaagggattttcagaatatgttgagcagctgtaaaatatcagatacccattataggcattgaaggttacctaaatgaca

SEQ ID NO: 588478 - DNA, 120 bp, Artificial Sequence
  ENSG00000172888_35 (sequence is synthesized)
gaaggatgcactatattcatgggtaggaaagattagtttcatcaagatttcaatttttatcaattcataaattaaaaacaatataaaaattccagaggggtgtgtgtatagagaggcaaa

SEQ ID NO: 588479 - DNA, 120 bp, Artificial Sequence
  ENSG00000172888_36 (sequence is synthesized)
ggacacagagtagctaacctagttttgaagaacaagatggggggttttatgctaccagatattatatacaatgatcatcaaacacagaacaaagcaaaaaacaaactccccaaacccaag

SEQ ID NO: 588480 - DNA, 120 bp, Artificial Sequence
  ENSG00000172888_37 (sequence is synthesized)
cagaacaaagcaaaaaacaaactccccaaacccaagttgaaacaaaaaaaacccccagactgtaatagtattattattattttttaagatggaatcttgctctgttgctcaggctggagt

SEQ ID NO: 588481 - DNA, 72 bp, Artificial Sequence
  ENSG00000172888_38 (sequence is synthesized)
tggtgcaatcttggctcactgcaacctgtgtgccaccacgcccagctaattttttaatttttagtagagaca

SEQ ID NO: 588482 - DNA, 120 bp, Artificial Sequence
  ENSG00000172888_39 (sequence is synthesized)
atgtactgtttagaaatatacatattttatacaaaattataaagaaagcatagagaggtaagcattagtggcacagctgagaaaatataaaaggtagttctgtctctatcctgtctcctt

SEQ ID NO: 588483 - DNA, 120 bp, Artificial Sequence
  ENSG00000172888_40 (sequence is synthesized)
tattctgctactgctctcattctgtctcatcccaggaatccagtcccaagtgctgcctgccaatcgtccagcaccctccacctttgccacctatttcttgttgtaaaacagatgtttgtt

SEQ ID NO: 588484 - DNA, 120 bp, Artificial Sequence
  ENSG00000172888_41 (sequence is synthesized)
tctaaaatataatgaattaatgattatcaaagtacaggcatacctcattttattgcagtttgttttattgtgtcttgcggatattgcattttttacaaactgaaggtttgtggcaggcct

SEQ ID NO: 588485 - DNA, 120 bp, Artificial Sequence
  ENSG00000172888_42 (sequence is synthesized)
gtgttgagcaagactatcagtgccattttttttcaacagcatgtgctcatttcatttttctgtgtcttacacagaaacttaaaatatttcaaacttttcattatatgtgttttggtgatt

SEQ ID NO: 588486 - DNA, 120 bp, Artificial Sequence
  ENSG00000172888_43 (sequence is synthesized)
agtgacttttatgtttctattgtaattgttttggggtgccacagactgcatccatctaagacagtgagcttagttgatgtgtgtgtgtgtgttctgattactccactaactgatggttcc

SEQ ID NO: 588487 - DNA, 120 bp, Artificial Sequence
  ENSG00000172888_44 (sequence is synthesized)
ccatctctctccctctcctcagacctcactattctctcagacacaacagtattgaaattagaccaattgataaccttacaaacacctttaagtgtttaagtgaaaaagtcacatgcctct

SEQ ID NO: 588488 - DNA, 120 bp, Artificial Sequence
  ENSG00000172888_45 (sequence is synthesized)
aaatgattaagcttagtgaggaaggctaatgtcaacagctgagataggccaaaagctagactgcttctgccaaacagtcaagttgtgaatgcaaaagaaaagttcttgaaggaaatgaaa

SEQ ID NO: 588489 - DNA, 120 bp, Artificial Sequence
  ENSG00000172888_46 (sequence is synthesized)
agttcttgaaggaaatgaaaagtacttctccagggaacacatgaacgataataaagtggccaggtgcagtggctgacacctagaatcccagcacttcggggagccaaagcgggaggatcc

SEQ ID NO: 588490 - DNA, 120 bp, Artificial Sequence
  ENSG00000172888_47 (sequence is synthesized)
cctgaagccaggagtccgagaccagcttgggccacaaagtgagacccctgtctctacaaaaaattaaaaatttagctgggtgtggttgtgcatgcctgtagtccgatctacttgggaggc

SEQ ID NO: 588491 - DNA, 84 bp, Artificial Sequence
  ENSG00000172888_48 (sequence is synthesized)
tgtgacagaatgaaaccaaaaaaagtgaaacagcattattactgatatggagaaagttttaggggtctggatcaaaccaaccac

SEQ ID NO: 588492 - DNA, 120 bp, Artificial Sequence
  ENSG00000172888_49 (sequence is synthesized)
atatggagaaagttttaggggtctggatcaaaccaaccacaaattcccttaagccaaaacctaatccagagcaaggccataactgccattgtatgaaggctgagagaagtgaggaagctg

SEQ ID NO: 588493 - DNA, 88 bp, Artificial Sequence
  ENSG00000172888_50 (sequence is synthesized)
taagaagtcatcttatgtgtagaagctgtagcaatttatccagatctagctaagttaattgatgaagttgctacaccacgagattttc

SEQ ID NO: 588494 - DNA, 120 bp, Artificial Sequence
  ENSG00000172888_51 (sequence is synthesized)
gctaagttaattgatgaagttgctacaccacgagattttcagtgtattccaaacagccttcttttggaagaagaaaccatctaggactttcatggagaagagaagttaatccctggctta

SEQ ID NO: 588495 - DNA, 120 bp, Artificial Sequence
  ENSG00000172888_52 (sequence is synthesized)
aaagcatcaaaggacagctcgtctctcttgttaggggttcatgcagctggtaactttaagttgaagccaatgctcatttaccattcagaaaatcctagggcccataagaattatgctaaa

SEQ ID NO: 588496 - DNA, 120 bp, Artificial Sequence
  ENSG00000172888_53 (sequence is synthesized)
ggatgacagcacatctgtttacagcatggattactgaatattttaagcccactgttgagacctactaaatattaggaaaaaagaattctgtcaggtgtggtggctcacacttgtaatccc

SEQ ID NO: 588497 - DNA, 120 bp, Artificial Sequence
  ENSG00000172888_54 (sequence is synthesized)
gagtgagactgtctcaaaaaaaaaaaaaatttagttccaaatattactgctcgttgataatgtgtctggtcacccaagagttctgatggagatgtacaaagagattaatgtttttatgtc

SEQ ID NO: 588498 - DNA, 120 bp, Artificial Sequence
  ENSG00000172888_55 (sequence is synthesized)
gagatgtacaaagagattaatgtttttatgtctgctaaacaacatccattctgcaggatccattactccatgggtcaaggagtaattttgactttcaagtattatttaaggaatacattt

SEQ ID NO: 588499 - DNA, 83 bp, Artificial Sequence
  ENSG00000172888_56 (sequence is synthesized)
agtaattttgactttcaagtattatttaaggaatacattttgtaaggctgtggctgccatagtggttgttctgtacaaagtaa

SEQ ID NO: 588500 - DNA, 120 bp, Artificial Sequence
  ENSG00000172888_57 (sequence is synthesized)
agaaggtcaaaatatcaacattaacaggagttcagaagacattgacctcaaccctgatggatgatcttgaggggttcaagacttcagtggacgaagtaactgcagatgtggtggaaatag

SEQ ID NO: 588501 - DNA, 120 bp, Artificial Sequence
  ENSG00000172888_58 (sequence is synthesized)
tgaattgctgcaatctcatgataaaacgtgaacaaatgaggagttgcttctaatataagagccacaaaagtggtttcttgagatggaaactactcctggtgaagatcctgtgaccattgt

SEQ ID NO: 588502 - DNA, 90 bp, Artificial Sequence
  ENSG00000172888_59 (sequence is synthesized)
atataagagccacaaaagtggtttcttgagatggaaactactcctggtgaagatcctgtgaccattgttgaaatgacaacaaaggacaca

SEQ ID NO: 588503 - DNA, 120 bp, Artificial Sequence
  ENSG00000172888_60 (sequence is synthesized)
gttccactgtgggtaaaaggctatccaacagcaacacatgctacagataaatctttcggaaaggaagagtcagttgatgttgcagccttccttgttgtctcatttaaagaaatctctaga

SEQ ID NO: 588504 - DNA, 120 bp, Artificial Sequence
  ENSG00000172888_61 (sequence is synthesized)
gccacactaaccttcagcaaccaccacaccgatcattcagcagccatcaacagtgaggcaagactgtcttccagcaacaaagactcactgaagacttagattatcgttaacatcttttag

SEQ ID NO: 588505 - DNA, 120 bp, Artificial Sequence
  ENSG00000172888_62 (sequence is synthesized)
tttaaattaaagtatgtacattgtcagatataatgctattgcaaacttaatagactataatatagattaaacataacttttataggtactggaaaataaaaataattgtgtgactccctt

SEQ ID NO: 588506 - DNA, 120 bp, Artificial Sequence
  ENSG00000172888_63 (sequence is synthesized)
tgtgactccctttattgtgttaaacattttattacagttgtctggaagcaaacctgcaatatctccaagatatgcctgtatttttcaaaatgtggtcttttaacattgctatgaagttta

SEQ ID NO: 588507 - DNA, 120 bp, Artificial Sequence
  ENSG00000172888_64 (sequence is synthesized)
tcagtaataatatcttatttcatggttgtccagaagttacataacttgtcttaatctaaaaatcatatcatttaaaaagcctgatgatttaatatttttcataaagaaaacttttgacaa

SEQ ID NO: 588508 - DNA, 120 bp, Artificial Sequence
  ENSG00000172888_65 (sequence is synthesized)
agagcgtgggtttcagcgagttctacgtgccagctcttgaggatcttgcttgtccaaacccagaagacagtgcatgaagccaggggacatccgccatgctccaaacaacttggcctcaga

SEQ ID NO: 588509 - DNA, 120 bp, Artificial Sequence
  ENSG00000172888_66 (sequence is synthesized)
tgttttggggattctagtagcccttgggtttgatgacttcagaggagagttttgcaatcagcagcctccagaaatactggtagcgtttccattccccaaacctgctctgatctcccacct

SEQ ID NO: 588510 - DNA, 120 bp, Artificial Sequence
  ENSG00000172888_67 (sequence is synthesized)
ttattatgcttaaagattcaactagcctgccttaaggtacgtaatatctctcaaccccaaataccctttcttctctttgtttaaaatgcatctttattcatatacccaatttttcttttt

SEQ ID NO: 588511 - DNA, 120 bp, Artificial Sequence
  ENSG00000172888_68 (sequence is synthesized)
attggtattagattttgactacaagagattggtctcattcccaggttaccatgaatatgcctgcatatcatcttttttgttcattaaaaacattttttccccattttagttttctattcc

SEQ ID NO: 588512 - DNA, 120 bp, Artificial Sequence
  ENSG00000172889_0 (sequence is synthesized)
ggagcctccctgcaccaagctggccctgcacggctgcaagggaggctcctgtggacaggccaggcaggtgggcctcaggaggtgcctccaggcggccagtgggcctgaggccccagcaag

SEQ ID NO: 588513 - DNA, 120 bp, Artificial Sequence
  ENSG00000172889_1 (sequence is synthesized)
ggctagggtccatctccagtcccaggacacagcagcggccaccatggccacgcctgggctccagcagcatcagagcagcccctgtggttggcagcaaagttcagcttggctgggcccgct

SEQ ID NO: 588514 - DNA, 120 bp, Artificial Sequence
  ENSG00000172889_2 (sequence is synthesized)
gtgaggggcttcgcgctacgccctgcggtgtcccgagggctgaggtctcctcatcttctccctagcagtggatgagcaacccaacgggggcccggggaggggaactggccccgagggaga

SEQ ID NO: 588515 - DNA, 120 bp, Artificial Sequence
  ENSG00000172889_3 (sequence is synthesized)
ggaaccccaaagccacatctgtagccaggatgagcagtgtgaatccaggcagcccccaggaccggggaggcacaggtggcccccaccacccggaggagcagctcctgcccctgtccgggg

SEQ ID NO: 588516 - DNA, 120 bp, Artificial Sequence
  ENSG00000172889_4 (sequence is synthesized)
gatgactgattctcctccgccaggccacccagaggagaaggccaccccgcctggaggcacaggccatgaggggctctcaggaggtgctgctgatgtggcttctggtgttggcagtgggcg

SEQ ID NO: 588517 - DNA, 120 bp, Artificial Sequence
  ENSG00000172889_5 (sequence is synthesized)
gcacagagcacgcctaccggcccggccgtagggtgtgtgctgtccgggctcacggggaccctgtctccgagtcgttcgtgcagcgtgtgtaccagcccttcctcaccacctgcgacgggc

SEQ ID NO: 588518 - DNA, 120 bp, Artificial Sequence
  ENSG00000172889_6 (sequence is synthesized)
accgggcctgcagcacctaccgaaccatctataggaccgcctaccgccgcagccctgggctggcccctgccaggcctcgctacgcgtgctgccccggctggaagaggaccagcgggcttc

SEQ ID NO: 588519 - DNA, 120 bp, Artificial Sequence
  ENSG00000172889_7 (sequence is synthesized)
ccctgcaggatggcggggtgacacttgccagtcagatgtggatgaatgcagtgctaggaggggcggctgtccccagcgctgcgtcaacaccgccggcagttactggtgccagtgttggga

SEQ ID NO: 588520 - DNA, 120 bp, Artificial Sequence
  ENSG00000172889_8 (sequence is synthesized)
ggggcacagcctgtctgcagacggtacactctgtgtgcccaagggagggccccccagggtggcccccaacccgacaggagtggacagtgcaatgaaggaagaagtgcagaggctgcagtc

SEQ ID NO: 588521 - DNA, 120 bp, Artificial Sequence
  ENSG00000172889_9 (sequence is synthesized)
cagggtggacctgctggaggagaagctgcagctggtgctggccccactgcacagcctggcctcgcaggcactggagcatgggctcccggaccccggcagcctcctggtgcactccttcca

SEQ ID NO: 588522 - DNA, 120 bp, Artificial Sequence
  ENSG00000172889_10 (sequence is synthesized)
gcagctcggccgcatcgactccctgagcgagcagatttccttcctggaggagcagctggggtcctgctcctgcaagaaagactcgtgactgcccagcgccccaggctggactgagcccct

SEQ ID NO: 588523 - DNA, 120 bp, Artificial Sequence
  ENSG00000172889_11 (sequence is synthesized)
cacgccgccctgcagcccccatgcccctgcccaacatgctgggggtccagaaaccacctcggggtgactgagcggaaggccaggcagggccttcctcctcttcctcctccccttcctcgg

SEQ ID NO: 588524 - DNA, 120 bp, Artificial Sequence
  ENSG00000172889_12 (sequence is synthesized)
gaggctccccagaccctggcatgggatgggctgggatcttctctgtgaatccacccctggctacccccaccctggctaccccaacggcatcccaaggccaggtgggccctcagctgaggg

SEQ ID NO: 588525 - DNA, 120 bp, Artificial Sequence
  ENSG00000172889_13 (sequence is synthesized)
aaggtacgagctccctgctggagcctgggacccatggcacaggccaggcagcccggaggctgggtggggcctcagtgggggctgctgcctgacccccagcacaataaaaatgaaacgtga

SEQ ID NO: 588526 - DNA, 120 bp, Artificial Sequence
  ENSG00000172889_14 (sequence is synthesized)
agatgcaaagccggtggggacctgccaagaagccagcccacaaggccatggactcctccacgccatcagctggagcagtgggcagccccaggaagggagacgggagcggccaggggaagg

SEQ ID NO: 588527 - DNA, 120 bp, Artificial Sequence
  ENSG00000172889_15 (sequence is synthesized)
gcgaggggtcccccgggcgacccccgaggctcaggcgcccggactccagtcctgggcctccgttttccacccttgaacaagcggcttccacctgtgagccagctgcctcctctgaaaatg

SEQ ID NO: 588528 - DNA, 120 bp, Artificial Sequence
  ENSG00000172889_16 (sequence is synthesized)
gaagcccctcaactcagagggtgtcgctctgggacgtgggtcaggggccggagcaggcagggagaggtgagaggaaaggctggggaccctcacttctccctgcccaaaccctcgctcggg

SEQ ID NO: 588529 - DNA, 120 bp, Artificial Sequence
  ENSG00000172889_17 (sequence is synthesized)
agcagacggctcctctgcccgcaggcacccctgcctggcagctccctccagcccccgtcgggtccgggacgtcctctgatgggaaggttccaccacatccgtggctgacagagccagccc

SEQ ID NO: 588530 - DNA, 120 bp, Artificial Sequence
  ENSG00000172889_18 (sequence is synthesized)
gtccgaggccggggggcgctcggggtaaacaggaagccccatccctcccgcactctgcttcactccctcctcctgcacctcctgcagcccggctcccgcggccgcgcctggtgcccctct

SEQ ID NO: 588531 - DNA, 120 bp, Artificial Sequence
  ENSG00000172889_19 (sequence is synthesized)
gtctcgcgccacctgagatgcccaggctggcctctgccaggggcttagtctgccctctcctggggcttcagaggccaaaagcaccctggtgaggggtccgggaggcccgggagggcccgg

SEQ ID NO: 588532 - DNA, 120 bp, Artificial Sequence
  ENSG00000172890_0 (sequence is synthesized)
aacccggaaggtccggcgtcccagccgcctacctcgctgggaccctggtcttgctgtcccccgctggcctcctgcccaagcgactgcggccaggatgggccggaaggtgaccgtggccac

SEQ ID NO: 588533 - DNA, 120 bp, Artificial Sequence
  ENSG00000172890_1 (sequence is synthesized)
ctgcgcactcaaccagtgggccctggacttcgagggcaatttgcaaagaattttaaagagtattgaaattgccaaaaacagaggagcaagatacaggcttggaccagagctggaaatatg

SEQ ID NO: 588534 - DNA, 120 bp, Artificial Sequence
  ENSG00000172890_2 (sequence is synthesized)
cggctacggatgttgggatcattattacgagtcggacaccctcttgcactcgtttcaagtcctagcggcccttgtggagtctcccgtcactcaggacatcatctgcgacgtggggatgcc

SEQ ID NO: 588535 - DNA, 120 bp, Artificial Sequence
  ENSG00000172890_3 (sequence is synthesized)
tgtaatgcaccgaaacgtccgctacaactgcagagtgatattcctcaacaggaagatcctgctcatcagacccaagatggccttggccaatgaaggcaactaccgcgagctgcgctggtt

SEQ ID NO: 588536 - DNA, 120 bp, Artificial Sequence
  ENSG00000172890_4 (sequence is synthesized)
caccccgtggtcgaggagtcggcacacagaggagtactttctgcctcggatgatacaggacctgacaaagcaggaaaccgtacccttcggagatgcggtgctggtgacatgggacacctg

SEQ ID NO: 588537 - DNA, 120 bp, Artificial Sequence
  ENSG00000172890_5 (sequence is synthesized)
cattggaagtgagatctgtgaggagctctggacaccccacagcccgcacatcgacatgggcctggatggcgtggagatcatcaccaacgcctcgggcagccaccaagtgctgcgcaaagc

SEQ ID NO: 588538 - DNA, 120 bp, Artificial Sequence
  ENSG00000172890_6 (sequence is synthesized)
caacaccagggtggatctcgtgactatggtcaccagcaagaacggtgggatttacttgctggccaaccagaagggttgtgacggggaccgcctgtactacgacggctgtgccatgattgc

SEQ ID NO: 588539 - DNA, 120 bp, Artificial Sequence
  ENSG00000172890_7 (sequence is synthesized)
catgaacggaagcgtctttgctcaaggatcccagttttctctggatgacgtggaagtcctgacggccacgctggatctggaggacgtccggagctacagggcggagatttcatctcgaaa

SEQ ID NO: 588540 - DNA, 120 bp, Artificial Sequence
  ENSG00000172890_8 (sequence is synthesized)
cctggcggccagcagggcgagcccctaccccagagtgaaggtggactttgccctctcgtgccacgaggacttgctggcacccatctctgagcccatcgagtggaaataccacagccctga

SEQ ID NO: 588541 - DNA, 120 bp, Artificial Sequence
  ENSG00000172890_9 (sequence is synthesized)
ggaggagataagccttggacctgcctgctggctctgggattttttaagacgaagtcaacaggcagggtttttgctgcccttgagtggcggggtggacagcgcagccaccgcctgcctcat

SEQ ID NO: 588542 - DNA, 120 bp, Artificial Sequence
  ENSG00000172890_10 (sequence is synthesized)
ctactccatgtgctgccaggtctgcgaggccgtgaggagtggaaatgaggaagtgctggctgatgtccgcaccatcgtgaaccagatcagctacaccccccaggatccccgagacctctg

SEQ ID NO: 588543 - DNA, 120 bp, Artificial Sequence
  ENSG00000172890_11 (sequence is synthesized)
ctcctcccaggagacgtgcacccgggccagagagttggcccagcagattggaagccaccacatcagtctcaacatcgatccagccgtgaaggccgtcatgggcatcttcagcctggtgac

SEQ ID NO: 588544 - DNA, 120 bp, Artificial Sequence
  ENSG00000172890_12 (sequence is synthesized)
ggggaagagccctctgtttgcagctcatggaggaagcagcagggaaaacctggcgctgcaaaatgtgcaggctcgaatacggatggtcctcgcctatctgtttgctcagttgagcctctg

SEQ ID NO: 588545 - DNA, 120 bp, Artificial Sequence
  ENSG00000172890_13 (sequence is synthesized)
gtctcggggtgtccacggtgggctcctcgtgctgggatccgccaacgtggatgagagtctcctgggctacctgaccaagtacgactgctccagtgcggacatcaaccccataggcgggat

SEQ ID NO: 588546 - DNA, 120 bp, Artificial Sequence
  ENSG00000172890_14 (sequence is synthesized)
cagcaagacggacctcagggccttcgtccagttctgcatccagcgcttccagcttcctgccctgcagagcatcctgttggcgccggccaccgcagagctggagcccttggctgatggaca

SEQ ID NO: 588547 - DNA, 120 bp, Artificial Sequence
  ENSG00000172890_15 (sequence is synthesized)
ggtgtcccagaccgacgaggaagatatggggatgacatatgcggagctctcggtctatgggaaactcaggaaggtggccaagatggggccctacagcatgttctgcaaactcctcggcat

SEQ ID NO: 588548 - DNA, 120 bp, Artificial Sequence
  ENSG00000172890_16 (sequence is synthesized)
gtggagacacatctgcaccccgagacaggtcgctgacaaagtgaagcggtttttctccaagtactccatgaacagacacaagatgaccacgctcacacccgcgtaccacgccgagaacta

SEQ ID NO: 588549 - DNA, 120 bp, Artificial Sequence
  ENSG00000172890_17 (sequence is synthesized)
cagccctgaggacaacaggtttgatctgcgaccatttctgtacaacacaagctggccttggcagtttcggtgcatagaaaatcaggtgctacagctcgagagggcagagccacagtccct

SEQ ID NO: 588550 - DNA, 120 bp, Artificial Sequence
  ENSG00000172890_18 (sequence is synthesized)
ggacggcgtggactgaggccggttccttcctggaggcctcctgtcctcggggaccccagcacctcatcatcagcattgctggagccaagggtaggagccctacactaggagcccaggatg

SEQ ID NO: 588551 - DNA, 120 bp, Artificial Sequence
  ENSG00000172890_19 (sequence is synthesized)
ggacggcgcatcagccgagagggagggaacttttcagtcaaattcctcaaaaagaggctggaataaagcctgggcttaaaaagaggctggaatccaatgcacatgattttgacctcccgc

SEQ ID NO: 588552 - DNA, 120 bp, Artificial Sequence
  ENSG00000172890_20 (sequence is synthesized)
cagcgtgcgcttccccgcgaagtctggcattctccgaaggaagccgcctgggtaggagggttccaaccgccgccccgtgtggcatctttgctgcaggaacaagaacagtagctcccggga

SEQ ID NO: 588553 - DNA, 120 bp, Artificial Sequence
  ENSG00000172890_21 (sequence is synthesized)
agggaggggtgtcatgagcagaaaatgaaggagagaagaccttctctcccacccacacacaccttcctgtcctgggttccagaaggttctggggagatggtccctgcagagctttcttcc

SEQ ID NO: 588554 - DNA, 120 bp, Artificial Sequence
  ENSG00000172890_22 (sequence is synthesized)
ccgacccccacgtctgttgtcgcagtcctcctctgaccctcccttttatggggacccttgctggctggcccagattgtccagaatcatctcccatctcaaggcctgtcacctcatcaccc

SEQ ID NO: 588555 - DNA, 120 bp, Artificial Sequence
  ENSG00000172890_23 (sequence is synthesized)
ctgcagcgcctcagcatttttctggattggaggctccattgaacaaaacaagagttttatcataatgtcattgataacttccatcctgcatcgtttcttcaaacggtcctcaaggaagag

SEQ ID NO: 588556 - DNA, 120 bp, Artificial Sequence
  ENSG00000172890_24 (sequence is synthesized)
ggtgctgagttgggtccccgccctctgtggttggtggtgcaccatccttagttctgctccacaagggtttgcctttataagcaaaataaagaaacagagtggtgaatagttttttaaaaa

SEQ ID NO: 588557 - DNA, 120 bp, Artificial Sequence
  ENSG00000172890_25 (sequence is synthesized)
gctggagccaagggtgaattacttggaaactgcacaacacacccgctgttttcaacagagttcagtcacctcttgagggctcttctgattcttatcttggtagagcatctcctcaaggat

SEQ ID NO: 588558 - DNA, 120 bp, Artificial Sequence
  ENSG00000172890_26 (sequence is synthesized)
ttctgcagctacctaggaggccaaggcgggaagattccttaagcccagaagtttgaaggtgcagtaagctgtggtcacgtcactgcaatccagcccaggtgacagaggaagacttcatct

SEQ ID NO: 588559 - DNA, 120 bp, Artificial Sequence
  ENSG00000172890_27 (sequence is synthesized)
tattgccacaaatggaaacaaatcccaagtgcacaaatacaacaaaaagtaacttttagttctgccccaagccggcgtgggtgggagcgtctccactctcgggctcagaccacacgcggg

SEQ ID NO: 588560 - DNA, 120 bp, Artificial Sequence
  ENSG00000172890_28 (sequence is synthesized)
tccacagcactgcctcccacacacagcattgcctgactcgtctttggacccgacggccttccactctgctcttgttgggaatgggcattaaagcagcggattcaccgaggcaggcggtag

SEQ ID NO: 588561 - DNA, 120 bp, Artificial Sequence
  ENSG00000172890_29 (sequence is synthesized)
caccggaggcgagttctgcagctggctttgcaggagcagggcgagcttgtgtcctggcgtcgccgactctgcgaggctgtctgagcagttcattgctttgctcccgctgcgttcccatcc

SEQ ID NO: 588562 - DNA, 120 bp, Artificial Sequence
  ENSG00000172890_30 (sequence is synthesized)
tcatgattctgtctggtgctttctgcacagcataggtgtggtcagcacggaggcggttacaaaaccaaaccagtttcatagtggaccaagtgaacttcaccctgaacaagaattccacgg

SEQ ID NO: 588563 - DNA, 120 bp, Artificial Sequence
  ENSG00000172890_31 (sequence is synthesized)
tcttttcaggggtttcttgcacgggggcaggcaagggtgtggccgtctcgactccaggccctgctttccacatgacagtgtccccagaggcctccttgcgcttcatcattaaccgcgaca

SEQ ID NO: 588564 - DNA, 120 bp, Artificial Sequence
  ENSG00000172890_32 (sequence is synthesized)
gagctggaagggctttgaagagaaggattaagttcctgctgatgggaagtgtggtcctctccccgttcacgtcagagccacaggcacattggtggtcgtgttgattggcaggtgtgttgg

SEQ ID NO: 588565 - DNA, 120 bp, Artificial Sequence
  ENSG00000172890_33 (sequence is synthesized)
caatcaatcacctgccccaggacccccgcaggttcccggccccacatcaagccaccaaatcggagtcctcgggggtctgtatatttagtgagcaccaggcagttgtttcgtgcattagaa

SEQ ID NO: 588566 - DNA, 120 bp, Artificial Sequence
  ENSG00000172890_34 (sequence is synthesized)
tccgggagccgttgccttacacgtctctagagttcctgatgttgcctgagagctccgtcgtaggctgtggccacaggcctgctgtattcagagtggccgcgctgtcctcaggctcgggcc

SEQ ID NO: 588567 - DNA, 120 bp, Artificial Sequence
  ENSG00000172890_35 (sequence is synthesized)
actgccctccaccaggtcctccgtggtgcacctgaaatggtcaacagaagtcttgtgacacgtggaatcatttcagagtcaccccttctgcctcctgctcaagcaacagacctgccgatc

SEQ ID NO: 588568 - DNA, 120 bp, Artificial Sequence
  ENSG00000172890_36 (sequence is synthesized)
cgtttctcagggtcttcctaatcccctgggctttccggcttgtcgtgtgcctggagtcaggccgccgtgcggcaggctgttaacctagcctcggggagagtgggatggagccaccttctc

SEQ ID NO: 588569 - DNA, 120 bp, Artificial Sequence
  ENSG00000172890_37 (sequence is synthesized)
atggaacgatcctcgccttccctcatctccattgttttatggcttcacacggaccgtggctttctgcatggaagcttggtggccagggtgctgtcactttgggaagcagccagagaacca

SEQ ID NO: 588570 - DNA, 120 bp, Artificial Sequence
  ENSG00000172890_38 (sequence is synthesized)
tctttgctcaaggatcccagttttctctggatgacgtggtaatgagcgggcctggacatgcctgggggagggttctctgtgcagagaccgagctcctggctctcccctgtaagccgggtg

SEQ ID NO: 588571 - DNA, 120 bp, Artificial Sequence
  ENSG00000172890_39 (sequence is synthesized)
cttagtgagggcccctgtggagaagcccccgggggtcccgcctgctcctggctctcccctgtaagccgggcgcttagtgagggcccctgtggagaagcccccgggggtcccgcctgctcc

SEQ ID NO: 588572 - DNA, 120 bp, Artificial Sequence
  ENSG00000172890_40 (sequence is synthesized)
tggctctcccctgtaagccgggtgcttagtgagggcccctgtggagaagcccccaggggtcccgcctgctctgatggcctcaaatttacctggttggtgaggggggacctcccgccctcg

SEQ ID NO: 588573 - DNA, 120 bp, Artificial Sequence
  ENSG00000172890_41 (sequence is synthesized)
ggtctggagacagctgaaccccgacacacagcacatagtagtggacggatgaggttgagggcagcttacgagtcctgcgttcccacagtgcgggaggagggctccgtgccacgcagggcc

SEQ ID NO: 588574 - DNA, 120 bp, Artificial Sequence
  ENSG00000172890_42 (sequence is synthesized)
aggtgggagtgtgctcaggaacagaggggacggcccccgctgtgggaggcgggctctgtggtgatgagaggatgggtgccgcctggcccctgcgggtgggtgtcgttggtttgtttgaat

SEQ ID NO: 588575 - DNA, 120 bp, Artificial Sequence
  ENSG00000172890_43 (sequence is synthesized)
tgggtgttgaggccacatatactcatctgaggccttatgccacgctgcccctgagtcctgggaagcagaagtggagaccccaggacactctggtcagggaggctttgttctgtggggatc

SEQ ID NO: 588576 - DNA, 120 bp, Artificial Sequence
  ENSG00000172890_44 (sequence is synthesized)
tctgagcacacagcggccagctgcgtgagggagggccctgggggagctgtgagttacaggtcggaagcgccattgctatcccgaagcgacacagatatgtgggtgctccgaggaaggaga

SEQ ID NO: 588577 - DNA, 120 bp, Artificial Sequence
  ENSG00000172890_45 (sequence is synthesized)
tgacagagaacaaagctaagaaccctgcttggcacattcctcaccagcaactgagctgccgcttggaatggggttcaggaccttgttggggccccagattcctttgggaagctgatgaaa

SEQ ID NO: 588578 - DNA, 120 bp, Artificial Sequence
  ENSG00000172890_46 (sequence is synthesized)
gttactgggctgtgtcccccaattacagggcaatgtcccctcatagtgtctcccagttatacagtattgtccccccattataaggtagtatccccagttactagatagtgtcccccagta

SEQ ID NO: 588579 - DNA, 120 bp, Artificial Sequence
  ENSG00000172890_47 (sequence is synthesized)
acaggataatgtcccccaattgcagggcaatgtcccccattatagtgtccccaagttataagctggagtcccccagtaacaggataataggatagtgttccccagtacagggcagtgtcc

SEQ ID NO: 588580 - DNA, 120 bp, Artificial Sequence
  ENSG00000172890_48 (sequence is synthesized)
ccagttactcactagtgtcccctagtaacagggcagtgtccacccagatacagcctagtgtccctcagttacacaatagtgtgtcccccagtggtaggacagtctactactgagtcctcc

SEQ ID NO: 588581 - DNA, 120 bp, Artificial Sequence
  ENSG00000172890_49 (sequence is synthesized)
tggcatgagtcgagctgagattaggatagggtaatgacccttcagttttggggaagggaccagagctcggccagtgagaagcttccagctccgtctggccatatccaggctgctgagggt

SEQ ID NO: 588582 - DNA, 120 bp, Artificial Sequence
  ENSG00000172890_50 (sequence is synthesized)
cctgggctctgtccttaaacctcatcactgacatgacccagcaaacctcctcaagaggaaaaagtccccttgggtcaaacacagcttgtgcagttctcggggacctcctcctgccatcct

SEQ ID NO: 588583 - DNA, 120 bp, Artificial Sequence
  ENSG00000172890_51 (sequence is synthesized)
ggggatgctgtggagaatggagatgcacagggggctttgtcctctcctctgccttttggagaaaatatttcactcaaggcaaacgcagcctgagggcagcacaggggaccccaaggctca

SEQ ID NO: 588584 - DNA, 120 bp, Artificial Sequence
  ENSG00000172890_52 (sequence is synthesized)
ctgcgcatttctagtcgcccccaaacgcgtgggttttcctcctgttctcctcgtgggtgcctttgctcattctcatcctcctgttctcatccagtctgcccagtctgaccggctcccagc

SEQ ID NO: 588585 - DNA, 120 bp, Artificial Sequence
  ENSG00000172890_53 (sequence is synthesized)
agcatccgcccaaaagtttctcccatgacagcaggaagcagcctcagacaatacatgatggacaggcctggctgtgttccaatagaaccccgagtcagtcagcccgagcctccctctcag

SEQ ID NO: 588586 - DNA, 120 bp, Artificial Sequence
  ENSG00000172890_54 (sequence is synthesized)
aaaacccctaagagcatttgcttatgtggcttttatctgttgatagttgctacctgagaaattaaaactgagaaatctaaaaatagatttattttaggaagtcactaaaaataataagcc

SEQ ID NO: 588587 - DNA, 120 bp, Artificial Sequence
  ENSG00000172890_55 (sequence is synthesized)
cattgcatgttaacatgaaatagcatatttttacaaaaaaataaattttctaaaaacaaaacatctaagtgagaagagtggcattgttgtacttgttttgcaaatcttttcagtgtccgg

SEQ ID NO: 588588 - DNA, 120 bp, Artificial Sequence
  ENSG00000172890_56 (sequence is synthesized)
tttatgagatgacagcactttggtttgttgccaaccattcacttataaagaaacccttttccaataattagctggggctggtgctagagcaataccagaagttcagcgatgtctgtagat

SEQ ID NO: 588589 - DNA, 120 bp, Artificial Sequence
  ENSG00000172890_57 (sequence is synthesized)
ttgtccaaatgtatgtgaagagactgtgtttactcagtttttatgtttgcagttaaatcttcaatttgatgagttattttatcattgcaaagtggcagtgtcagggtttcctttattgac

SEQ ID NO: 588590 - DNA, 120 bp, Artificial Sequence
  ENSG00000172890_58 (sequence is synthesized)
ttatccagcaggcattcagctatatcaactctacatatgaagtaaggagttgaattaagcagagtagttaataaaaagcttttttttttcatgttttaaaaatgtgacgttgtcaggcct

SEQ ID NO: 588591 - DNA, 82 bp, Artificial Sequence
  ENSG00000172890_59 (sequence is synthesized)
aatcctctactaccgtgcccagcctttttttcatagcagttttattaagttgtatttgccataccacccaatgtatccattt

SEQ ID NO: 588592 - DNA, 120 bp, Artificial Sequence
  ENSG00000172890_60 (sequence is synthesized)
tattaagttgtatttgccataccacccaatgtatccatttaagcacctgattcagtggtttttcatgtactcatggagttatgcagccacaatcttagcgcattttcattaccccaaaaa

SEQ ID NO: 588593 - DNA, 120 bp, Artificial Sequence
  ENSG00000172890_61 (sequence is synthesized)
gaaactgtacccattatgcaccccgttcccctcctccggtcctggcaaccacaagtctactgtctgtcttcatggatttgcctattctcgacgtttcattgggatgaaatcacacagtgt

SEQ ID NO: 588594 - DNA, 120 bp, Artificial Sequence
  ENSG00000172890_62 (sequence is synthesized)
atggcttccacactttactgtgctgttgtcaaggtttatctatgtgttgggtgcagccaccccttggtatccacagggattggacccaggagcctgcaccgatcccctgcagggatgcct

SEQ ID NO: 588595 - DNA, 120 bp, Artificial Sequence
  ENSG00000172890_63 (sequence is synthesized)
gtgtcccacagtgccccctgcaaaactcactgatatgaagagtcggccctctgtatccatgggcttcagatcctgtgattactgtatcttctgtctgtgtgcagttgaatctgcgggtgt

SEQ ID NO: 588596 - DNA, 120 bp, Artificial Sequence
  ENSG00000172890_64 (sequence is synthesized)
agaacccacagacacagggagtggctgtagcttatccctttgtatggtcagagagtgttccgtagcggggatggacacgtgttcattcactcttccactgatgggcatcgggaatgtttc

SEQ ID NO: 588597 - DNA, 120 bp, Artificial Sequence
  ENSG00000172890_65 (sequence is synthesized)
cactttctgtctatcattaacaattctgctacaaacatacatgtacttctgttggaggggacacatgttttcatttctcttgggtgtgtctatccaggagtggaattggctgggtcttat

SEQ ID NO: 588598 - DNA, 120 bp, Artificial Sequence
  ENSG00000172890_66 (sequence is synthesized)
ggtaactctgttaactgttttttgctttttggttttttgtttgttttttgagacggagtttcacccttgctgtgaactaccataggctggagtacaatggcgcaatcccagctcagcaca

SEQ ID NO: 588599 - DNA, 120 bp, Artificial Sequence
  ENSG00000172890_67 (sequence is synthesized)
cagttttccccagctgagaaggcaaggaaggagcagggacagtcctgagagctgtggacacgccacacccactgttgggcctggttaatgccattgaacacctgagcaagggcaggccca

SEQ ID NO: 588600 - DNA, 120 bp, Artificial Sequence
  ENSG00000172890_68 (sequence is synthesized)
gggaggctgaataagtctagattcccatgttgagtaattaaaagaactgacttttaccagatgaaggccagtttcaaagttgggctgcttctgtgttaccactgcccttttgctgtggtc

SEQ ID NO: 588601 - DNA, 120 bp, Artificial Sequence
  ENSG00000172890_69 (sequence is synthesized)
cgggtgcctgaccactcctgggatgtgcgttaagcacctccgctgtgtgtagccttgggtcctgatcatgggagtgttaccggtggagggtgtccaggtttttgacattttgaacaaaga

SEQ ID NO: 588602 - DNA, 120 bp, Artificial Sequence
  ENSG00000172890_70 (sequence is synthesized)
atgggacaaaaagcacaaagaaagccaaaaaagaatgaagcaaccaaaggagagagtgattgaaaatgaaagccccctccacagggtgggagcagccccggcaggggctcagggcgcggt

SEQ ID NO: 588603 - DNA, 120 bp, Artificial Sequence
  ENSG00000172890_71 (sequence is synthesized)
tacacaatgtcccggggtttaaatatcctctagaggcttcccatcggttacttggtgtgagccccatgtaaatgaagaggctgaagtggagttacaaagttatttacttggtgtacacac

SEQ ID NO: 588604 - DNA, 120 bp, Artificial Sequence
  ENSG00000172890_72 (sequence is synthesized)
ctgggacaaaggcaagctcaagggcatgacccacccaaccggcctccatccagggtgtggaacatccatgtgtccagggatacgaaaggccttatgcttgaaaagtgggttttgttccta

SEQ ID NO: 588605 - DNA, 120 bp, Artificial Sequence
  ENSG00000172890_73 (sequence is synthesized)
tctcagccccgtaagccacctcatttcccctgcaaggagggagctcctgaaagcaggatgtgtcagttcttccagaaagtcctgtgcacacatcagcagactctgcacaaaggggaatgc

SEQ ID NO: 588606 - DNA, 120 bp, Artificial Sequence
  ENSG00000172890_74 (sequence is synthesized)
agcattcaccccaccccgtgcagagagcttgactcacatcacagggagccctggggctcattccatgtccacatgttgccacacggttcccatgtcctaggctgcatatgtgtagctcca

SEQ ID NO: 588607 - DNA, 120 bp, Artificial Sequence
  ENSG00000172890_75 (sequence is synthesized)
caaggaaggcctctgcatgctccatgctggtgtctgtgctgtaccctgcatcgccggtccttatggaggcctctgcacacgctgtgctggtgtctgtgctgtaccctgcatagccggtcc

SEQ ID NO: 588608 - DNA, 120 bp, Artificial Sequence
  ENSG00000172890_76 (sequence is synthesized)
gaagtcctgacggccacgctggatctggaggacgtccggagctacagggcggagatttcatctcgaaacctggcggctggagtacaatggcgcaatcccagctcagcacaacctctgcct

SEQ ID NO: 588609 - DNA, 120 bp, Artificial Sequence
  ENSG00000172890_77 (sequence is synthesized)
agttcacaacagggctcgcgctcctatgagaatctgtgccaccgaggatctgacgggaggcggagttcaggcggtgatgctcactcgcccctcccctcacctcctgctctgggatccaga

SEQ ID NO: 588610 - DNA, 120 bp, Artificial Sequence
  ENSG00000172890_78 (sequence is synthesized)
tcctgacaggccagggaccagtacctatccatggcctgggggttggtgacccctgctctaggggatcctttcttgcctcttgcgtcttctggggactccaggtgttccttggcttgtggc

SEQ ID NO: 588611 - DNA, 120 bp, Artificial Sequence
  ENSG00000172890_79 (sequence is synthesized)
tgcatcactccatcctttgcttccttcttcccgcagtttcctccctttctccacgtgtcctcctccctttctccacgtgtcctcctggccctcgtaagagatgtcattggatgcagggcc

SEQ ID NO: 588612 - DNA, 120 bp, Artificial Sequence
  ENSG00000172890_80 (sequence is synthesized)
caccccacattcagagtcatctcaccttcagattctttacttaattacatctgcaaagacgttttatccttttctcttttcttcttcttcttttttttagagacagggtctggctctgtc

SEQ ID NO: 588613 - DNA, 120 bp, Artificial Sequence
  ENSG00000172890_81 (sequence is synthesized)
acccaggctggagtgcagagctgcaatctcggctcactgcagccttgatgtcccaggttcaggtgatcctcccacctgagcacccacaagtagctgggactgcaggtgcacacaccacca

SEQ ID NO: 588614 - DNA, 79 bp, Artificial Sequence
  ENSG00000172890_82 (sequence is synthesized)
cacccacaagtagctgggactgcaggtgcacacaccaccacacccagctagtttgttaccttaaacccctgggctcaag

SEQ ID NO: 588615 - DNA, 120 bp, Artificial Sequence
  ENSG00000172890_83 (sequence is synthesized)
agtgtgagccactatgcccagcctacactctttttccaaataaagtcacatccccaggaactgggccttcagacatgagcgctccttggtgagccaccgttcacccgttacggtcctcca

SEQ ID NO: 588616 - DNA, 120 bp, Artificial Sequence
  ENSG00000172890_84 (sequence is synthesized)
aaccaaatgcctggttcttcgttgctgttttccaaatgctacctccttactggctgactagcaatggggagtaaagcccacctctgctcctgcctctctgggaaagtattgcctccttgg

SEQ ID NO: 588617 - DNA, 120 bp, Artificial Sequence
  ENSG00000172890_85 (sequence is synthesized)
atgaaggattgaaaaactttcttatatacacagtaacttttttactgtcctcctttctgcaaagggacaagtatgtttaaagcgttttttaaatttacttttttcgtgttgacaaataaa

SEQ ID NO: 588618 - DNA, 120 bp, Artificial Sequence
  ENSG00000172890_86 (sequence is synthesized)
aattctatatattgatggtgtccaacatgacatttcgatatgtgtgtcacagtggaatggctaagtcaagctatttcacatgtgcgtgccttaccccacacgcctattatttgtgtgtgg

SEQ ID NO: 588619 - DNA, 120 bp, Artificial Sequence
  ENSG00000172890_87 (sequence is synthesized)
taagagcacttaaaatctactctcttagcaattttcctatattaactacagtcaccatgtcatgcactggagctgttgaacttacttcttttgtggcctttgaccaacaatctccccacc

SEQ ID NO: 588620 - DNA, 120 bp, Artificial Sequence
  ENSG00000172890_88 (sequence is synthesized)
caccagcccctggtagccaccgtcgcactctctgcttccacaagatcaccttttcaagattccacagacgaatcagaccatgcggtatttgtctttctctgcctggcttatttcccttta

SEQ ID NO: 588621 - DNA, 120 bp, Artificial Sequence
  ENSG00000172890_89 (sequence is synthesized)
agatgttcatgtaggttcatccgtattgttgcaaatggcagaatttccttctttcctaaggctgcatagttctccactgtgtgtgcaccgcactttctctatccactcatccatcggtgc

SEQ ID NO: 588622 - DNA, 120 bp, Artificial Sequence
  ENSG00000172890_90 (sequence is synthesized)
gcgctcaggctgattccacagctgtgctgttgggaatggcgctgtggtgaacgcgggcgtgcagatgtctcgtcggcagatgagttcatttcctgtcagttatacccggtaatggggtgg

SEQ ID NO: 588623 - DNA, 120 bp, Artificial Sequence
  ENSG00000172890_91 (sequence is synthesized)
ctggatcgcagggtagttctatttttaatctttggaggaatctctgcactgccttccacaatggctacactaattgctgagtgtgtttagagtctggcatgcactccttttggctaggct

SEQ ID NO: 588624 - DNA, 120 bp, Artificial Sequence
  ENSG00000172890_92 (sequence is synthesized)
ctatttgctggcattacataaactaaaattagcagctggacacccctctatgagtatggtgacaatcactgtcgtttctaagtagccagggtatccagatggcgtcatggcttccaaccc

SEQ ID NO: 588625 - DNA, 120 bp, Artificial Sequence
  ENSG00000172890_93 (sequence is synthesized)
accctgctttccttttctttttctaattaattattaatagaatcaagaaaggacaatacaatcaatgaaaaaggataggcccttcccttttccaaagccagtttgggagccatgacagag

SEQ ID NO: 588626 - DNA, 120 bp, Artificial Sequence
  ENSG00000172890_94 (sequence is synthesized)
cagcttggccatggcctccctagcgcaggggatcatctgacgagaggagagagccggccagtgagtcactgtcaacaatgataaatcagaggccggctgcaatggctcacgcctgccatc

SEQ ID NO: 588627 - DNA, 78 bp, Artificial Sequence
  ENSG00000172890_95 (sequence is synthesized)
ataaatcagaggccggctgcaatggctcacgcctgccatcccagcacttttgagaggatcacctgaccccaggagttg

SEQ ID NO: 588628 - DNA, 77 bp, Artificial Sequence
  ENSG00000172890_96 (sequence is synthesized)
aaatacaacaattagccaaacgtggtggtgcacactgagccaaggagatggaggctgcagtgagctgtgatcgtgcc

SEQ ID NO: 588629 - DNA, 120 bp, Artificial Sequence
  ENSG00000172890_97 (sequence is synthesized)
ggataggtctgagtgcactggggtggccggcaccccacaccttctcagggagcacccagcaggatacctgagattctccttaggccttggatgggagctggaggcttctggctgcctcct

SEQ ID NO: 588630 - DNA, 120 bp, Artificial Sequence
  ENSG00000172890_98 (sequence is synthesized)
taggccttggatgggagctggaggcttctggctgcctcctgcaccccagatgtgtggcaacggggtggggagtgtgtcacccgaaagatgatcagatggccggttcctgccttaactgat

SEQ ID NO: 588631 - DNA, 120 bp, Artificial Sequence
  ENSG00000172890_99 (sequence is synthesized)
cctggggtggggactcctggaggtcacgcagtgggttttcagaacctgcctgggtggggacttgcagaaggcaactgtgcatcccctgggttgagggcgtggatgctagagccagaaccc

SEQ ID NO: 588632 - DNA, 120 bp, Artificial Sequence
  ENSG00000172890_100 (sequence is synthesized)
ctgggtgtgacccccagccctgctgcttccccgtgctgtgaccttgggccccaaggtgctgtccgtccattctgtggttcagtgtccccattttaaaatgaggacgatgataatacccac

SEQ ID NO: 588633 - DNA, 120 bp, Artificial Sequence
  ENSG00000172890_101 (sequence is synthesized)
gtcctgggtctgtcttcagaatcacatgtgtcccttctcacgaggtgcctaaagcagagacgggcgtcctgagagcccagcgttgactctggcactgcagcctcctggggcctgcttggg

SEQ ID NO: 588634 - DNA, 120 bp, Artificial Sequence
  ENSG00000172890_102 (sequence is synthesized)
tgggttgttgggtgctgtgggcaggggccaccgcctccgggctccatgttctgattgccctgcagccttggacctgcctgctggctctgggattttttaagacgaagtcaacaggtaaga

SEQ ID NO: 588635 - DNA, 120 bp, Artificial Sequence
  ENSG00000172890_103 (sequence is synthesized)
cttccagtttctagtgagcccactttgcttgttctgctggttggtctggttttattctggggcagggtagggatttttttttttttttttagtgcaaacaacaaaaagcatttcatcact

SEQ ID NO: 588636 - DNA, 120 bp, Artificial Sequence
  ENSG00000172890_104 (sequence is synthesized)
ctgcctccatggggagcttagtctgtgctagccagaggcaaggtgggcacagtggctggtgggtcagctccacctttggaggctcagcggaacccagcccatcagcattcagggtcacgc

SEQ ID NO: 588637 - DNA, 120 bp, Artificial Sequence
  ENSG00000172890_105 (sequence is synthesized)
tcaccatcttgccagcattgtaatcatgcgtatctgcagttcgtcggtggagtcagcctctgacacgccccgcagtgaagtgtcttttttccctctgaaaaatccattcatcctgccacg

SEQ ID NO: 588638 - DNA, 120 bp, Artificial Sequence
  ENSG00000172890_106 (sequence is synthesized)
tgcgggtatttgtcctgaccccatggaaagtgctaacacccacgtgcatttctgtggacgcctccttgaggtctatgggtggagcttggctgatccatgggcatgctgcttctccgaggc

SEQ ID NO: 588639 - DNA, 120 bp, Artificial Sequence
  ENSG00000172890_107 (sequence is synthesized)
cagggagcactgggacaatcactacaggatgtgcaggtgcccccacctgggccatcgtctccatgaagctcatggcaccggttacctagggacagccagtgctggggtcacagcctgtat

SEQ ID NO: 588640 - DNA, 120 bp, Artificial Sequence
  ENSG00000172890_108 (sequence is synthesized)
agcatgtgatgtgtaagagcaagagcgggggtgtaaggatgtgcgtgctcgagtgtgtgcatgagcctgagtgcaagagcaagagggtgtgtctgagcctgagtgtgagcctgagcgtga

SEQ ID NO: 588641 - DNA, 120 bp, Artificial Sequence
  ENSG00000172890_109 (sequence is synthesized)
gaggttacatgagtgtatgagagtacaagtgtgtgaatgtatgcacaagtgtgggtgtgcttgtgagtgcttgtgcaaaagcaagtgtgagtgtggatgtgtgagtgtgcacaaacgtga

SEQ ID NO: 588642 - DNA, 120 bp, Artificial Sequence
  ENSG00000172890_110 (sequence is synthesized)
gtgcacagttgtgtgcatgagtgcgtctgcatgagtgcacgagcatgcctgtgagcatgtgggtgggtgggtgtgcatgagtgtgagagtgcacatgactgtgtgtgagtgtgtgtctct

SEQ ID NO: 588643 - DNA, 120 bp, Artificial Sequence
  ENSG00000172890_111 (sequence is synthesized)
ttaatcctcagggaacagcccagacgctgtctgcctcctgagctactgcacttgactgactgctccgtgatgggcagaggaaaagagaggccgggggctccagctgctgggatctgtcct

SEQ ID NO: 588644 - DNA, 120 bp, Artificial Sequence
  ENSG00000172890_112 (sequence is synthesized)
gtctctctctgtcccctttctgctgtgcctgggtggcctctcccctcctgccagtggtaaagggatggaaatgcagttgccaagctttctcccagggaccccacggctcagtcctgccac

SEQ ID NO: 588645 - DNA, 120 bp, Artificial Sequence
  ENSG00000172890_113 (sequence is synthesized)
cagtgctccctctgccctcccgggctctgggtgctcccatctttgaaggcaaggcaccactgagcttgtgtgagccctgtggaggtgggaccaccccgagaggaaggcctcgggacactg

SEQ ID NO: 588646 - DNA, 120 bp, Artificial Sequence
  ENSG00000172890_114 (sequence is synthesized)
tgggactctgagactctgatgttccccgaacgctagagagctcctaagctattttaattttcttgttttcaagagtttgtgggtgtgcgtctcccccgtgttcctttgcaagggaacccg

SEQ ID NO: 588647 - DNA, 120 bp, Artificial Sequence
  ENSG00000172890_115 (sequence is synthesized)
ccagtcatagcatagtgtatccccaagttacagggtagtgtccccagttataaggcaatgttcccccattatagtgtccccagttatgaggtaatgtctcccagttacagggtaatgtcc

SEQ ID NO: 588648 - DNA, 120 bp, Artificial Sequence
  ENSG00000172890_116 (sequence is synthesized)
ccagtagacacctgtgtgggatgctcatcaaagacgtggaaagtggccccattcgtgcgggcctggtggaggccgtgagggtgcagtgcctgaaaagtctgacagggaagttccggactt

SEQ ID NO: 588649 - DNA, 120 bp, Artificial Sequence
  ENSG00000172890_117 (sequence is synthesized)
agcgtggaaaggggctggtgccgcagacagaacctgcttccatctgttccccgtcatcctctgcttgggccaggccctgagctggggtgagctggggacaggcaggcagagaggctgacg

SEQ ID NO: 588650 - DNA, 120 bp, Artificial Sequence
  ENSG00000172890_118 (sequence is synthesized)
agacagtcagcgtgctaggggctgccacacaaggaagacccaagcagccttggagcccaggaaggcctcaaggtgaggggtggcaagcgtggtaggaacaggcacacagtgtgcagccga

SEQ ID NO: 588651 - DNA, 120 bp, Artificial Sequence
  ENSG00000172890_119 (sequence is synthesized)
ggctggtccccacttcggcagttggaggcaaggtccaaggcacaagtgagcctgtgtctgagaccctgggatgcaagtaacgcccctcctgcagcccgaggtcctgctgctggtaacctg

SEQ ID NO: 588652 - DNA, 120 bp, Artificial Sequence
  ENSG00000172890_120 (sequence is synthesized)
gagctctgcgtttctgcaggacatcgtcacaaataggatgtccaactgagcagctgtcatgagacagtgatttttgcaaacattgaagaagtgtgatgctcataacagagcggactcttc

SEQ ID NO: 588653 - DNA, 120 bp, Artificial Sequence
  ENSG00000172890_121 (sequence is synthesized)
aggcacctgggggtgtagaccggggtggagccgcatgggcacctgggggtgtagaccggggtggaactatgtaaacatcccacacactcaggtgacttccacccattctgtcctggtggt

SEQ ID NO: 588654 - DNA, 120 bp, Artificial Sequence
  ENSG00000172890_122 (sequence is synthesized)
cttccttggcatctgcctggcacatattctcctgccactcgcgtgcgaccctcaccgtgacatttgtggactggggcctcttctaagcagcacatggatgggaattttagtgccctgttc

SEQ ID NO: 588655 - DNA, 120 bp, Artificial Sequence
  ENSG00000172890_123 (sequence is synthesized)
acacggatgatgctaattggtcctgtggactctcttagtttccttttgccgctctgatgaatttccatggacacaaaacacacaagcaacaccagtcttttatctaatggttctgaaggt

SEQ ID NO: 588656 - DNA, 120 bp, Artificial Sequence
  ENSG00000172890_124 (sequence is synthesized)
cggaggtcaaggggtcaggggtcagcagcaagcctggttccttccggagacactccaggaggatctgcgtccctgccttctctagcttccctggcctgtggcccctcccagctgtgatgt

SEQ ID NO: 588657 - DNA, 120 bp, Artificial Sequence
  ENSG00000172893_0 (sequence is synthesized)
aggcaatcgctgacatcatccgggggcgggcgcccctgccctgcgggtgactccgacccctggctagagggtaggcggcgtggagcagcgcgcgcaagcgaggccaggggaaggtgggcg

SEQ ID NO: 588658 - DNA, 120 bp, Artificial Sequence
  ENSG00000172893_1 (sequence is synthesized)
caggtgaggggccgaggtgtgcgcaggactttagccggttgagaaggatcaagcaggcatttggagcacaggtgtctagaaacttttaaggggccggttcaagaaggaaaagttcccttc

SEQ ID NO: 588659 - DNA, 120 bp, Artificial Sequence
  ENSG00000172893_2 (sequence is synthesized)
tgctgtgaaactatttggcaagaggctggagggcccaatggctgcaaaatcgcaacccaacattcccaaagccaagagtctagatggcgtcaccaatgacagaaccgcatctcaagggca

SEQ ID NO: 588660 - DNA, 120 bp, Artificial Sequence
  ENSG00000172893_3 (sequence is synthesized)
gtggggccgtgcctgggaggtggactggttttcactggcgagcgtcatcttcctactgctgttcgcccccttcatcgtctactacttcatcatggcttgtgaccagtacagctgcgccct

SEQ ID NO: 588661 - DNA, 120 bp, Artificial Sequence
  ENSG00000172893_4 (sequence is synthesized)
gactggccctgtggtggacatcgtcaccggacatgctcggctctcggacatctgggccaagactccacctataacgaggaaagccgcccagctctataccttgtgggtcaccttccaggt

SEQ ID NO: 588662 - DNA, 120 bp, Artificial Sequence
  ENSG00000172893_5 (sequence is synthesized)
gcttctgtacacgtctctccctgacttctgccataagtttctacccggctacgtaggaggcatccaggagggggccgtgactcctgcaggggttgtgaacaagtatcagatcaatggcct

SEQ ID NO: 588663 - DNA, 120 bp, Artificial Sequence
  ENSG00000172893_6 (sequence is synthesized)
gcaagcctggctcctcacgcacctgctctggtttgcaaacgctcatctcctgtcctggttctcgcccaccatcatcttcgacaactggatcccactgctgtggtgcgccaacatccttgg

SEQ ID NO: 588664 - DNA, 120 bp, Artificial Sequence
  ENSG00000172893_7 (sequence is synthesized)
ctatgccgtctccaccttcgccatggtcaagggctacttcttccccaccagcgccagagactgcaaattcacaggcaatttcttttacaactacatgatgggcatcgagtttaaccctcg

SEQ ID NO: 588665 - DNA, 120 bp, Artificial Sequence
  ENSG00000172893_8 (sequence is synthesized)
gatcgggaagtggtttgacttcaagctgttcttcaatgggcgccccgggatcgtcgcctggaccctcatcaacctgtccttcgcagcgaagcagcgggagctccacagccatgtgaccaa

SEQ ID NO: 588666 - DNA, 120 bp, Artificial Sequence
  ENSG00000172893_9 (sequence is synthesized)
tgccatggtcctggtcaacgtcctgcaggccatctacgtgattgacttcttctggaacgaaacctggtacctgaagaccattgacatctgccatgaccacttcgggtggtacctgggctg

SEQ ID NO: 588667 - DNA, 120 bp, Artificial Sequence
  ENSG00000172893_10 (sequence is synthesized)
gggcgactgtgtctggctgccttatctttacacgctgcagggtctgtacttggtgtaccaccccgtgcagctgtccaccccgcacgccgtgggcgtcctgctgctgggcctggtgggcta

SEQ ID NO: 588668 - DNA, 120 bp, Artificial Sequence
  ENSG00000172893_11 (sequence is synthesized)
agaaggacctgttccgccgcacggatgggcgctgcctcatctggggcaggaagcccaaggtcatcgagtgctcctacacatccgccgatgggcagaggcaccacagcaagctgctggtgt

SEQ ID NO: 588669 - DNA, 120 bp, Artificial Sequence
  ENSG00000172893_12 (sequence is synthesized)
cgggcttctggggcgtggcccgccacttcaactacgtcggcgacctgatgggcagcctggcctactgcctggcctgtggcggcggccacctgctgccctacttctacatcatctacatgg

SEQ ID NO: 588670 - DNA, 120 bp, Artificial Sequence
  ENSG00000172893_13 (sequence is synthesized)
ccatcctgctgacccaccgctgcctccgggacgagcaccgctgcgccagcaagtacggccgggactgggagcgctacaccgccgcagtgccttaccgcctgctgcctggaatcttctaag

SEQ ID NO: 588671 - DNA, 120 bp, Artificial Sequence
  ENSG00000172893_14 (sequence is synthesized)
ggcacgccctagggagaagccctgtggggctgtcaagagcgtgttctgccaggtccatgggggctggcatcccagctccaactcgaggagcctcagtttcctcatctgtaaactggagag

SEQ ID NO: 588672 - DNA, 120 bp, Artificial Sequence
  ENSG00000172893_15 (sequence is synthesized)
agcccagcacttggcaggtgtccagtacctaatcacgctctgttccttgcttttgccttcaagggaattccgagtgtccagcactgccgtattgccagcacagacggattttctctaatc

SEQ ID NO: 588673 - DNA, 120 bp, Artificial Sequence
  ENSG00000172893_16 (sequence is synthesized)
agtgtccctggggcaggaggatgacccagtcacctttactagtcctttggagacaatttacctgtattaggagcccaggccacgctacactctgcccacactggtgagcaggaggtcttc

SEQ ID NO: 588674 - DNA, 120 bp, Artificial Sequence
  ENSG00000172893_17 (sequence is synthesized)
ccacgccctgtcattaggctgcatttactcttgctaaataaaagtgggagtggggcgtgcgcgttatccatgtattgcctttcagctctagatccccctcccctgcctgctctgcagtcg

SEQ ID NO: 588675 - DNA, 120 bp, Artificial Sequence
  ENSG00000172893_18 (sequence is synthesized)
tgggtggggcccgtgcgccgtttctccttggtagcgtgcacggtgttgaactgggacactggggagaaaggggctttcatgtcgtttccttcctgctcctgctgcacagctgccaggagt

SEQ ID NO: 588676 - DNA, 120 bp, Artificial Sequence
  ENSG00000172893_19 (sequence is synthesized)
gctctgcctggagtctgcagacctcagagaggtcccagcaccggctgtggcctttcaggtgtaggcaggtgggctctgcttcccgattccctgtgagcgcccaccctctcgaaagaattt

SEQ ID NO: 588677 - DNA, 120 bp, Artificial Sequence
  ENSG00000172893_20 (sequence is synthesized)
tctgcttgccctatgactgtgcagactctggctcgagcaacccggggaacttcaccctcaggggcctcccacaccttctccagcgaggaggtctcagtcccagcctcgggagggcacctc

SEQ ID NO: 588678 - DNA, 120 bp, Artificial Sequence
  ENSG00000172893_21 (sequence is synthesized)
cttttctgtgctttcttccctgaggcattcttcctcatccctagggtgttgtgtagaactctttttaaactctatgctccgagtagagttcatctttatattaaacttcccctgttcaaa

SEQ ID NO: 588679 - DNA, 120 bp, Artificial Sequence
  ENSG00000172893_22 (sequence is synthesized)
acgagccggcgtctgagggatgctctgtccccgcgctgtctggagcttccccgggcgaaggctgcctggctccggggtcggctcctggccccatgccgcgctccgcggcggctctttctc

SEQ ID NO: 588680 - DNA, 120 bp, Artificial Sequence
  ENSG00000172893_23 (sequence is synthesized)
ctgccccacctgttgttcgcctccctctttgtcagtgctgagccaggcacagcagctttgcgatgggactggcttgtccgccgtcctccctgacatgcggctgttgaagccctgagcact

SEQ ID NO: 588681 - DNA, 120 bp, Artificial Sequence
  ENSG00000172893_24 (sequence is synthesized)
ggaccttctgcctcttgcttgactcctactgtgggccttgagcttctgccctctcctgaaatgtcagctgcctgcggtcttattcatttttgtgttccttgcaggactttagccggttga

SEQ ID NO: 588682 - DNA, 120 bp, Artificial Sequence
  ENSG00000172893_25 (sequence is synthesized)
aggcagagctggggtttgaccccaggccgctgggcccccgagcccacactcctgtcctctccctgggcaaagcaccgcttgaccccttccccctcgccccccagggtctgtacttggtgt

SEQ ID NO: 588683 - DNA, 120 bp, Artificial Sequence
  ENSG00000172893_26 (sequence is synthesized)
atgaaacgttccaaatacaccaaaagtggagagtacggtaggagcgctccatcgtgcccgcgggacagcagacgatagcaatcgattctccgtgctgggaatcccgccaccctgggcgga

SEQ ID NO: 588684 - DNA, 120 bp, Artificial Sequence
  ENSG00000172893_27 (sequence is synthesized)
gctgccttccctttaagacttggagatgaccctggggagggcagcaaaggcgtctgcagaaccatctgggctgtttccccctggacaggactgcagggagctgcagggagctgcagggag

SEQ ID NO: 588685 - DNA, 120 bp, Artificial Sequence
  ENSG00000172893_28 (sequence is synthesized)
accttggaatacactaagatctccagggtgtggtggtcctatgcccacacatcccactgttaggagtgtcctcacagttatatcctgccatgtgcgaaatggctgcaagttcaaggctgt

SEQ ID NO: 588686 - DNA, 120 bp, Artificial Sequence
  ENSG00000172893_29 (sequence is synthesized)
gcattgcagtgtcctgtgcaaaaaaaccgtgaaaagatcgggaacaagttatgcaaatcaagaggtgactgtttaattaagtgcatccacatgatggaatgttataaagctctcaaaaag

SEQ ID NO: 588687 - DNA, 120 bp, Artificial Sequence
  ENSG00000172893_30 (sequence is synthesized)
aataggacagtcaactgatgatgaatcacattaacttaataaggaagaaaaaccactttattatatgaaatagatggagaaaaaaggacactaattcataataaaaacgcaaagacatcc

SEQ ID NO: 588688 - DNA, 120 bp, Artificial Sequence
  ENSG00000172893_31 (sequence is synthesized)
atagaaaacctacagctaacttcatatttaatgatgagatattggattctctcatcataagatcaagaacatggcaagaattttcactgccacttcttccaaattacattagagatccta

SEQ ID NO: 588689 - DNA, 120 bp, Artificial Sequence
  ENSG00000172893_32 (sequence is synthesized)
tggctggagagggtgaaacgccgatgccggcaggctctgggggaacccgcaagccagagcgtattcccatgaccttaatctactgcttgtaaaagagagtcagctgccctccccaggtgt

SEQ ID NO: 588690 - DNA, 120 bp, Artificial Sequence
  ENSG00000172901_0 (sequence is synthesized)
agtccgtccaggctcttccaggaggaagaggcacgatacaagagaggaggggcaggggtcgcagcactgaacaccctggccggggttttgacagctgccacagtctctgagctccagcct

SEQ ID NO: 588691 - DNA, 120 bp, Artificial Sequence
  ENSG00000172901_1 (sequence is synthesized)
cgcgcctgaacccggtccctgccatggggcccccttccagctcaggcttctatgtgagccgcgcagtggccctgctgctggctgggctggtagccgccctcctgctggcgctggccgtac

SEQ ID NO: 588692 - DNA, 120 bp, Artificial Sequence
  ENSG00000172901_2 (sequence is synthesized)
tcgccgccttgtacggccactgcgagcgcgtcccaccgtcggagctgcctggactcagggacttggaagccgagtcttcccctcccctcaggcagaagccgacgccaaccccgaaaccca

SEQ ID NO: 588693 - DNA, 120 bp, Artificial Sequence
  ENSG00000172901_3 (sequence is synthesized)
gcagtgcacgcgagctagcggtgacgaccaccccgagcaactggcgacccccggggccctgggaccagctacgcctgccgccctggctcgtgccgctgcactacgatctggagctgtggc

SEQ ID NO: 588694 - DNA, 120 bp, Artificial Sequence
  ENSG00000172901_4 (sequence is synthesized)
cgcagctgaggcccgacgagcttccggccgggtctttgcccttcactggccgcgtgaacatcacggtgcgctgcacggtggccacctctcgactgctgctgcatagcctcttccaggact

SEQ ID NO: 588695 - DNA, 120 bp, Artificial Sequence
  ENSG00000172901_5 (sequence is synthesized)
gcgagcgcgccgaggtgcggggacccctttccccgggcactgggaacgccacagtgggccgcgtgcccgtggacgacgtgtggttcgcgctggacacggaatacatggtgctggagctca

SEQ ID NO: 588696 - DNA, 120 bp, Artificial Sequence
  ENSG00000172901_6 (sequence is synthesized)
gtgagcccctgaaacctggtagcagctacgagctgcagcttagcttctcgggcctggtgaaggaagacctcagggagggactcttcctcaacgtctacaccgaccagggcgagcgcaggg

SEQ ID NO: 588697 - DNA, 120 bp, Artificial Sequence
  ENSG00000172901_7 (sequence is synthesized)
ccctgttagcgtcccagctggaaccaacatttgccaggtatgttttcccttgttttgatgagccagctctgaaggcaacttttaatattacaatgattcatcatccaagttatgtggccc

SEQ ID NO: 588698 - DNA, 120 bp, Artificial Sequence
  ENSG00000172901_8 (sequence is synthesized)
tttccaacatgccaaagctaggtcagtctgaaaaagaagatgtgaatggaagcaaatggactgttacaaccttttccactacgccccacatgccaacttacttagtcgcatttgttatat

SEQ ID NO: 588699 - DNA, 120 bp, Artificial Sequence
  ENSG00000172901_9 (sequence is synthesized)
gtgactatgaccacgtcaacagaacagaaaggggcaaggagatacgcatctgggcccggaaagatgcaattgcaaatggaagtgcagactttgctttgaacatcacaggtcccatcttct

SEQ ID NO: 588700 - DNA, 120 bp, Artificial Sequence
  ENSG00000172901_10 (sequence is synthesized)
cttttctggaggatttgtttaatatcagttactctcttccaaaaacagatataattgccttgcctagttttgacaaccatgcaatggaaaactggggactaatgatatttgatgaatcag

SEQ ID NO: 588701 - DNA, 120 bp, Artificial Sequence
  ENSG00000172901_11 (sequence is synthesized)
gattgttgttggaaccaaaagatcaactgacagaaaaaaagactctgatctcctatgttgtctcccacgagattggacaccagtggtttggaaacttggttaccatgaattggtggaaca

SEQ ID NO: 588702 - DNA, 120 bp, Artificial Sequence
  ENSG00000172901_12 (sequence is synthesized)
atatctggctcaacgagggttttgcatcttattttgagtttgaagtaattaactactttaatcctaaactcccaagaaatgagatctttttttctaacattttacataatatcctcagag

SEQ ID NO: 588703 - DNA, 120 bp, Artificial Sequence
  ENSG00000172901_13 (sequence is synthesized)
aagatcacgccctggtgactagagctgtggccatgaaggtggaaaatttcaaaacaagtgaaatacaggaactctttgacatatttacttacagcaagggagcgtctatggcccggatgc

SEQ ID NO: 588704 - DNA, 120 bp, Artificial Sequence
  ENSG00000172901_14 (sequence is synthesized)
tttcttgtttcttgaatgagcatttatttgtcagtgcactcaagtcatatttgaagacattttcctactcaaacgctgagcaagatgatctatggaggcattttcaaatggccatagatg

SEQ ID NO: 588705 - DNA, 120 bp, Artificial Sequence
  ENSG00000172901_15 (sequence is synthesized)
accagagtacagttattttgccagcaacaataaaaaacataatggacagttggacacaccagagtggttttccagtgatcactttaaatgtgtctactggcgtcatgaaacaggagccat

SEQ ID NO: 588706 - DNA, 120 bp, Artificial Sequence
  ENSG00000172901_16 (sequence is synthesized)
tttatcttgaaaacattaaaaatcggactcttctaaccagcaatgacacatggattgtccctattctttggataaaaaatggaactacacaacctttagtctggctagatcaaagcagca

SEQ ID NO: 588707 - DNA, 120 bp, Artificial Sequence
  ENSG00000172901_17 (sequence is synthesized)
aagtattcccagaaatgcaagtttcagattctgaccatgactgggtgattttgaatttgaatatgactggatattatagagttaattatgataaattaggttggaagaaactaaatcaac

SEQ ID NO: 588708 - DNA, 120 bp, Artificial Sequence
  ENSG00000172901_18 (sequence is synthesized)
aacttgaaaaggatcctaaggcgattcctgttattcacagactgcagttgattgatgatgccttttccttgtctaaaaacaattatattgagattgaaacagcacttgagttaaccaagt

SEQ ID NO: 588709 - DNA, 120 bp, Artificial Sequence
  ENSG00000172901_19 (sequence is synthesized)
gtaaacttggtaaccagggatcttgtttctgaggtgaacatctatgatatatactcattattaaagaggtacctattaaagagacttaatttaatatggaatatttattcaactataatt

SEQ ID NO: 588710 - DNA, 120 bp, Artificial Sequence
  ENSG00000172901_20 (sequence is synthesized)
cgtgaaaatgtgttggcattacaagatgactacttagctctaatatcactggaaaaactttttgtaactgcgtgttggttgggccttgaagactgccttcagctgtcaaaagaacttttc

SEQ ID NO: 588711 - DNA, 120 bp, Artificial Sequence
  ENSG00000172901_21 (sequence is synthesized)
gcaaaatgggtggatcatccagaaaatgaaataccttatccaattaaagatgtggttttatgttatggcattgccttgggaagtgataaagagtgggacatcttgttaaatacttacact

SEQ ID NO: 588712 - DNA, 120 bp, Artificial Sequence
  ENSG00000172901_22 (sequence is synthesized)
aatacaacaaacaaagaagaaaagattcaacttgcttatgcaatgagctgcagcaaagacccatggatacttaacagatatatggagtatgccatcagcacatctccattcacttctaat

SEQ ID NO: 588713 - DNA, 120 bp, Artificial Sequence
  ENSG00000172901_23 (sequence is synthesized)
gaaacaaatataattgaggttgtggcttcatctgaagttggccggtatgtcgcaaaagacttcttagtcaacaactggcaagctgtgagtaaaaggtatggaacacaatcattgattaat

SEQ ID NO: 588714 - DNA, 120 bp, Artificial Sequence
  ENSG00000172901_24 (sequence is synthesized)
ctaatatatacaatagggagaaccgtaactacagatttacagattgtggagctgcagcagtttttcagtaacatgttggaggaacaccagaggatcagagttcatgccaacttacagaca

SEQ ID NO: 588715 - DNA, 120 bp, Artificial Sequence
  ENSG00000172901_25 (sequence is synthesized)
ataaagaatgaaaatctgaaaaacaagaagctaagtgccaggatagctgcgtggctaaggagaaacacatagcttgtggctatctttcagcactcctcttgcatattataatgtagtttg

SEQ ID NO: 588716 - DNA, 120 bp, Artificial Sequence
  ENSG00000172901_26 (sequence is synthesized)
ttcacagttttgtcttccaatactttgtgagtctggaaaaccacacattttatttgtatttcagtcacatttattactcagagtgccattcttctcatattgtcatgtttggccctgagg

SEQ ID NO: 588717 - DNA, 120 bp, Artificial Sequence
  ENSG00000172901_27 (sequence is synthesized)
gtgggtgattgctgacaattttgccaatgctgctgtatttctgggaaagatgtcacttcatgttgggttataatcccacagaatttactttaaatgtcacgtaaaaacaaattcacctaa

SEQ ID NO: 588718 - DNA, 120 bp, Artificial Sequence
  ENSG00000172901_28 (sequence is synthesized)
gatagtcttgcttattttgttgcgaaggccagtggaatataaaaatcaatggcattaatgaggagcacattctttgctgagggaaataacagtttttccaggccctagggtttatttagt

SEQ ID NO: 588719 - DNA, 120 bp, Artificial Sequence
  ENSG00000172901_29 (sequence is synthesized)
tcaacattgaagattgaaaagactaatgagaagataacatgacaatataaaaagacagaaactcaaaaagtatattcactagaagacagtggagccaaagaaaagcaagttgaaaaagaa

SEQ ID NO: 588720 - DNA, 120 bp, Artificial Sequence
  ENSG00000172901_30 (sequence is synthesized)
agaggagacaatttaacgagccctaaaggcaagaagtgtgtcttctcctgcccatttctctctcccacagtacatcctgcattgaaccacgtgttgctggttactaaactttatggtgtc

SEQ ID NO: 588721 - DNA, 120 bp, Artificial Sequence
  ENSG00000172901_31 (sequence is synthesized)
acaaaaagacaaatgattgtaggatccatggaagtgcacttaggcttgctgtggtggaggccatagtggagatgaaggctctgctctgaagctcttaattgtgtattcaccagtgggatg

SEQ ID NO: 588722 - DNA, 120 bp, Artificial Sequence
  ENSG00000172901_32 (sequence is synthesized)
gacaccctttcagcctaagcgtacgagtgaaaacaatgatgtcaaaagacaatagcaagtataggctactatttagggcaaaaggaatcttgaaatgaaagaaacagaactaaaaggcta

SEQ ID NO: 588723 - DNA, 120 bp, Artificial Sequence
  ENSG00000172901_33 (sequence is synthesized)
actggagcataatccttacagttttgcactcaggggattaagtttgaaacatagtgtcttttggccaaattgaacctacttgtaatgtggaccaacttactttacacattttcatcagtc

SEQ ID NO: 588724 - DNA, 120 bp, Artificial Sequence
  ENSG00000172901_34 (sequence is synthesized)
ccaatgtatggaattagcttagttttctcatgcttgattaaaacaagacaactaaagctaatcattcctcttctagactttgtgtatatgatttaatcttttatttttatttttgtagaa

SEQ ID NO: 588725 - DNA, 120 bp, Artificial Sequence
  ENSG00000172901_35 (sequence is synthesized)
tgggggtaaaactacaaatctcctcctcagggtgatatttttaaagattaaggagtatgacatcaattaacagtctttaaagatgttacatacgctcaaagcaatgtgattaagactttt

SEQ ID NO: 588726 - DNA, 120 bp, Artificial Sequence
  ENSG00000172901_36 (sequence is synthesized)
tgcctatttcttgtataagttaaggcagccataaatgaaaatacaaaacaaacgtttgcttttgtatttgattcacaagaggattctccctgagtgtcaggggaggctgtgggacttcac

SEQ ID NO: 588727 - DNA, 120 bp, Artificial Sequence
  ENSG00000172901_37 (sequence is synthesized)
cacgtggacaaacgaaagcacaggctactcagacttggccacaggtcataggtcagagaattttttcttcaaatgtagaaatgtaaattttcagcaataaaatatctgcatgcctacaaa

SEQ ID NO: 588728 - DNA, 120 bp, Artificial Sequence
  ENSG00000172901_38 (sequence is synthesized)
tcgccaatagcagtgcaggaaccgctgctcctttcagccaggcccagaattcttcctagaaagcctaatctggaaatacattttggaatatttgattaaataaaacaacttttggcttgg

SEQ ID NO: 588729 - DNA, 120 bp, Artificial Sequence
  ENSG00000172901_39 (sequence is synthesized)
tgtgtaacacatataagtatttaacttccttagtgttaataggattctctattaaaagatgaagctaaactagttcatacatgtttttacttagatttgtgacataggaattaatagggg

SEQ ID NO: 588730 - DNA, 120 bp, Artificial Sequence
  ENSG00000172901_40 (sequence is synthesized)
gagttccatgccacctccccgccctttacagacatgctataaggtccccagcccagtcactccgcagtgcctctctcttcctccccatggactatacacaggccctgcttgtcctggagg

SEQ ID NO: 588731 - DNA, 120 bp, Artificial Sequence
  ENSG00000172901_41 (sequence is synthesized)
gatcctaagatgagataagtcacgtgaaggtgctttataggcagcagtaatctttaaattgttgttattttgaaaactttgcggaaaaatgttctcatcttcttctgggcatatttgggt

SEQ ID NO: 588732 - DNA, 120 bp, Artificial Sequence
  ENSG00000172901_42 (sequence is synthesized)
aactttgcttgggtttcatcctttctataagatgggacatttaccttctcgtttcttgacttattcacatgccttattgaagtcatgcattgaaacatggaacaaatatcgaacgtatgc

SEQ ID NO: 588733 - DNA, 120 bp, Artificial Sequence
  ENSG00000172901_43 (sequence is synthesized)
aaattacttagcaagtgaaggttttttgagtgtgtgtgtttttaaatcaaacagaaacaattatattgagattgaaacagcacttgagttaaccaagtaccttgctgaagaagatgaaat

SEQ ID NO: 588734 - DNA, 120 bp, Artificial Sequence
  ENSG00000172901_44 (sequence is synthesized)
atacaatagggagaaccgtaactacagatttacagattgtggaggctgaatttttattaggcagtctttttccttgtggagagaagcatagctccccacttatataatcctcagcactct

SEQ ID NO: 588735 - DNA, 120 bp, Artificial Sequence
  ENSG00000172901_45 (sequence is synthesized)
cagttgcagaaggaaggatactttctcacagcttcaagagttcctgccccgaaaaaaagcactttgattggtcctacttgggtcagatgtaccaatcactgtgtccagggaagatggaat

SEQ ID NO: 588736 - DNA, 120 bp, Artificial Sequence
  ENSG00000172901_46 (sequence is synthesized)
actctaattggtctaaccagggtcctgtggccacactaggagacagccccacccaagtcactggcactgggaaggggaaggggtagttctggaaggaaaaagggctgtaaccagaaagta

SEQ ID NO: 588737 - DNA, 120 bp, Artificial Sequence
  ENSG00000172901_47 (sequence is synthesized)
gataaatcatctctgtttcaaaaataacccctgttgaagttgacaagagcaggaagggatgaagtttgccaggtaatctaataggtgcttccatatacattttctcatttatgcaccaga

SEQ ID NO: 588738 - DNA, 120 bp, Artificial Sequence
  ENSG00000172901_48 (sequence is synthesized)
acaatgcttctaagtatctgttattctccatttttacaatttataaattgcccaaggtaatgtcaaatccagccctgcctcctcgggtaaactttctcctgtgtctggcagaaattcaca

SEQ ID NO: 588739 - DNA, 120 bp, Artificial Sequence
  ENSG00000172901_49 (sequence is synthesized)
catttagcaccataggtaggtttcctctgttttccatttttatttttaaggttggaatttgggttctttggaactcaaatttcttgagtcattttatagatttttgctgcctagctggcc

SEQ ID NO: 588740 - DNA, 120 bp, Artificial Sequence
  ENSG00000172901_50 (sequence is synthesized)
agttaaaatagagaactaagaaatgtttcttctttcttcatagaaacagtttcgcttgcctcaattatatgcagagttatattgtccttcacgttgctcaggtagacccagtgtaagtta

SEQ ID NO: 588741 - DNA, 120 bp, Artificial Sequence
  ENSG00000172901_51 (sequence is synthesized)
cagctagaaagttagaaaaacagcagcactattttccctcacctttattagtatattatgccagagttaactcttatcatttttaatttcaagtacatatttttgaagtaaatcaattgt

SEQ ID NO: 588742 - DNA, 120 bp, Artificial Sequence
  ENSG00000172901_52 (sequence is synthesized)
atatattaactattcaactgtctcttggtcagtccattataataaccctattttaatttttctttcctttttaatgcacccaaagtcttttatttacttttttaactacagccacacttt

SEQ ID NO: 588743 - DNA, 120 bp, Artificial Sequence
  ENSG00000172915_0 (sequence is synthesized)
aggcagggggcggcaacatggcggagtgagcggcggcgtcggggcttcacaacaacagtggtggccgtagcagcggcggcagcagcgtcaatagcatcggccacagcctgagcttcagca

SEQ ID NO: 588744 - DNA, 120 bp, Artificial Sequence
  ENSG00000172915_1 (sequence is synthesized)
ccggccagcgtcgtggccagctgctcgcgtcctcgggcttctcggagcggctgcagcatctccgcggggggcgggccgggccggacagaccgggagagggagagagcagaggcagcggcg

SEQ ID NO: 588745 - DNA, 120 bp, Artificial Sequence
  ENSG00000172915_2 (sequence is synthesized)
gcggcagcggcagcggcagcggcacacctgctgggcgggcacagccgcttgcccggcagcggttagcggtaccgccaccgccgagaataagcctgcggatcccccgccgcctccgcgggg

SEQ ID NO: 588746 - DNA, 80 bp, Artificial Sequence
  ENSG00000172915_3 (sequence is synthesized)
gcgggcccggcgccgcggcgctggtggatgctggggctccgaggcgacggccggggggcgggggccgaggcaggtataac

SEQ ID NO: 588747 - DNA, 120 bp, Artificial Sequence
  ENSG00000172915_4 (sequence is synthesized)
ggtaccggcggcggcagcgccgctgctcttcccttctcctcaggaggggggccaatggctagcgagaagccgggcccgggcccggggctcgagcctcagcccgtggggctcattgccgtc

SEQ ID NO: 588748 - DNA, 120 bp, Artificial Sequence
  ENSG00000172915_5 (sequence is synthesized)
ccgctggcggaggcggcgggggcagcggtggtggcggcaccgggggcagcgggatgggggagctaaggggggcgtccggctccggctcggtgatgctccccgcggggatgattaaccctt

SEQ ID NO: 588749 - DNA, 120 bp, Artificial Sequence
  ENSG00000172915_6 (sequence is synthesized)
ccttcggtgccgatccgcaacatccggatgaaattcgcagtgttgattggactcatacaggtcggagaggtcagcaacagggacatcgtggagacggtgctcaacctgctggttggtgga

SEQ ID NO: 588750 - DNA, 120 bp, Artificial Sequence
  ENSG00000172915_7 (sequence is synthesized)
gaatttgacttggagatgaactttattatccaggatgctgagagtataacatgtatgacagagcttttggagcactgtgatgtaacatgtcaagcagaaatatggagcatgtttacagcc

SEQ ID NO: 588751 - DNA, 120 bp, Artificial Sequence
  ENSG00000172915_8 (sequence is synthesized)
attctacgaaaaagtgttcggaatttacagactagcacagaagttgggctaattgaacaagtattgctgaaaatgagtgctgtagatgacatgatagcagatcttctagttgatatgttg

SEQ ID NO: 588752 - DNA, 120 bp, Artificial Sequence
  ENSG00000172915_9 (sequence is synthesized)
ggggttcttgccagctacagcatcactgtcaaggagttgaagcttttgttcagcatgcttcgaggagaaagtggaatctggccaagacatgcagtaaaattattatcagttcttaatcag

SEQ ID NO: 588753 - DNA, 120 bp, Artificial Sequence
  ENSG00000172915_10 (sequence is synthesized)
atgccacagagacacggtcctgatacttttttcaatttccctggttgtagcgctgcggcaattgccttgcctcctattgcaaagtggccttatcagaatggcttcaccttaaacacttgg

SEQ ID NO: 588754 - DNA, 120 bp, Artificial Sequence
  ENSG00000172915_11 (sequence is synthesized)
tttcgtatggatccattaaataatattaatgttgataaggataaaccttatctttattgttttcgtactagcaaaggagttggttactctgctcattttgttggcaactgtttaatagtc

SEQ ID NO: 588755 - DNA, 120 bp, Artificial Sequence
  ENSG00000172915_12 (sequence is synthesized)
acatcattgaagtccaaaggaaaaggttttcagcattgtgtgaaatatgattttcaaccacgcaagtggtacatgatcagcattgtccacatttacaatcgatggaggaacagtgaaatt

SEQ ID NO: 588756 - DNA, 120 bp, Artificial Sequence
  ENSG00000172915_13 (sequence is synthesized)
cggtgttatgttaatggacaactggtatcttatggtgatatggcttggcatgttaacacaaatgatagctatgacaagtgctttcttggatcatcagaaactgctgatgcaaatagggta

SEQ ID NO: 588757 - DNA, 120 bp, Artificial Sequence
  ENSG00000172915_14 (sequence is synthesized)
ttctgtggtcaacttggtgccgtgtatgtgttcagtgaagcactcaacccagcacagatatttgcaattcatcagttaggacctggatataagagtaccttcaagtttaaatctgagagt

SEQ ID NO: 588758 - DNA, 120 bp, Artificial Sequence
  ENSG00000172915_15 (sequence is synthesized)
gatattcatttggcagaacatcataaacaggtgttatatgatgggaaacttgcaagtagcattgcctttacatataatgctaaggccactgatgctcagctctgcctggaatcatcacca

SEQ ID NO: 588759 - DNA, 120 bp, Artificial Sequence
  ENSG00000172915_16 (sequence is synthesized)
aaagagaatgcatcaatttttgtgcattccccacatgctctaatgcttcaggatgtgaaagcgatagtaacacattcaattcatagtgcaattcattcaattggagggattcaagtgctt

SEQ ID NO: 588760 - DNA, 120 bp, Artificial Sequence
  ENSG00000172915_17 (sequence is synthesized)
tttccactttttgcccaattggataataggcagctcaatgacagtcaagtggaaacaactgtctgtgctactctgttggcattcctggttgaactacttaaaagttcagtagccatgcaa

SEQ ID NO: 588761 - DNA, 120 bp, Artificial Sequence
  ENSG00000172915_18 (sequence is synthesized)
gaacagatgctgggtggaaaaggctttttagtcattggctacttacttgaaaagtcatcaagagttcatataactagagctgtcctggagcaatttttatcttttgcaaaataccttgat

SEQ ID NO: 588762 - DNA, 120 bp, Artificial Sequence
  ENSG00000172915_19 (sequence is synthesized)
ggtttatctcatggagcacctttgctgaagcagctttgtgatcacattttatttaacccagccatctggatacatacacctgcaaaggttcagctttccctatacacatatttgtctgct

SEQ ID NO: 588763 - DNA, 120 bp, Artificial Sequence
  ENSG00000172915_20 (sequence is synthesized)
gaatttattggaactgctaccatctacaccaccatacgcagagtaggaacagtattacagctaatgcacaccttaaaatattactactgggttattaatcctgctgacagtagtggcatt

SEQ ID NO: 588764 - DNA, 120 bp, Artificial Sequence
  ENSG00000172915_21 (sequence is synthesized)
acacctaaaggattagatggtccccggccatcacaaaaagaaattatatcactgagggcatttatgctactttttctgaaacagctgatactaaaggatcgaggggtcaaggaagatgaa

SEQ ID NO: 588765 - DNA, 120 bp, Artificial Sequence
  ENSG00000172915_22 (sequence is synthesized)
cttcagagtatattaaattacctacttacgatgcatgaggatgaaaatattcatgatgtgctacagttactggtggctttaatgtcggaacacccagcctcaatgataccagcatttgat

SEQ ID NO: 588766 - DNA, 120 bp, Artificial Sequence
  ENSG00000172915_23 (sequence is synthesized)
caaagaaatggaataagggtgatctacaaattattggcttctaaaagtgaaagtatttgggttcaagctttgaaggttctgggatactttctgaagcatttaggtcacaagagaaaagtt

SEQ ID NO: 588767 - DNA, 120 bp, Artificial Sequence
  ENSG00000172915_24 (sequence is synthesized)
gaaattatgcacacccatagtcttttcactcttcttggagaaaggctgatgttgcatacaaacactgtgactgtcaccacatacaacacactttatgagatcttgacagaacaagtatgt

SEQ ID NO: 588768 - DNA, 120 bp, Artificial Sequence
  ENSG00000172915_25 (sequence is synthesized)
actcaggtcgtacacaaaccacatccagagccagattctacagtgaaaattcagaatccaatgattcttaaagtggtggcaactttgttaaaaaactctacaccaagtgcagagctgatg

SEQ ID NO: 588769 - DNA, 120 bp, Artificial Sequence
  ENSG00000172915_26 (sequence is synthesized)
gaagttcgtcgtttatttttatctgatatgataaaacttttcagtaacagccgtgaaaatagaagatgcttattgcagtgttcagtgtggcaggattggatgttttctcttggctatatc

SEQ ID NO: 588770 - DNA, 120 bp, Artificial Sequence
  ENSG00000172915_27 (sequence is synthesized)
aatcctaaaaattctgaggaacagaagattaccgaaatggtctacaatatcttccggattcttttgtatcatgcaataaaatatgaatggggaggctggagagtctgggtggataccctc

SEQ ID NO: 588771 - DNA, 120 bp, Artificial Sequence
  ENSG00000172915_28 (sequence is synthesized)
tcaatagcccattccaaggtcacttatgaagctcataaggaatacctagccaaaatgtatgaggaatatcaaagacaagaggaggaaaacattaaaaagggaaagaaagggaatgtgagc

SEQ ID NO: 588772 - DNA, 120 bp, Artificial Sequence
  ENSG00000172915_29 (sequence is synthesized)
accatctctggtctttcatcacagacaacaggagcaaaaggtggaatggaaattcgagagatagaagatctttcacaaagccagagcccagaaagtgagaccgattaccctgtcagcaca

SEQ ID NO: 588773 - DNA, 120 bp, Artificial Sequence
  ENSG00000172915_30 (sequence is synthesized)
gatactcgagacttactcatgtcaacaaaagtgtcagatgatattcttggaaattcagatagaccaggaagtggtgtacatgtggaagtacatgatcttttagtagatataaaagcagag

SEQ ID NO: 588774 - DNA, 120 bp, Artificial Sequence
  ENSG00000172915_31 (sequence is synthesized)
aaagtggaagcaacagaagtaaagctcgatgatatggatttatcaccggagactttagtaggtggagagaatggtgcccttgtggaggttgaatctctgttggataatgtatatagtgct

SEQ ID NO: 588775 - DNA, 120 bp, Artificial Sequence
  ENSG00000172915_32 (sequence is synthesized)
gctgttgagaaactccagaacaatgtacatggaagtgttggtatcattaaaaaaaatgaagaaaaggataatggtccattgataacattagcagatgagaaagaagaccttcccaatagt

SEQ ID NO: 588776 - DNA, 120 bp, Artificial Sequence
  ENSG00000172915_33 (sequence is synthesized)
agtacatcatttctctttgataaaatacccaaacaggaggaaaaactacttcctgaactttctagcaatcacattattccaaatattcaggacacacaagtacatcttggtgttagtgat

SEQ ID NO: 588777 - DNA, 120 bp, Artificial Sequence
  ENSG00000172915_34 (sequence is synthesized)
gatcttggattgcttgctcacatgaccggtagcgtagacttaacttgtacatccagtataatagaagaaaaagaattcaaaatccatacaacttcagatggaatgagcagtatttctgaa

SEQ ID NO: 588778 - DNA, 120 bp, Artificial Sequence
  ENSG00000172915_35 (sequence is synthesized)
agagacttagcgtcatcaactaaggggctggagtatgctgaaatgactgctacaactctggaaactgagtcttctagtagcaaaattgtaccaaatattgatgcaggaagtataatttca

SEQ ID NO: 588779 - DNA, 120 bp, Artificial Sequence
  ENSG00000172915_36 (sequence is synthesized)
gatactgaaaggtctgacgatggcaaagaatcaggaaaagaaatccgaaaaatccaaacaactactacgacacaagctgtgcagggtcggtctatcacccaacaagaccgagatctccga

SEQ ID NO: 588780 - DNA, 120 bp, Artificial Sequence
  ENSG00000172915_37 (sequence is synthesized)
gttgatttaggatttcgaggaatgccaatgactgaggaacagcgacgccagtttagcccaggtccacggactacaatgtttcgtattcctgagtttaaatggtctccaatgcaccagcgg

SEQ ID NO: 588781 - DNA, 120 bp, Artificial Sequence
  ENSG00000172915_38 (sequence is synthesized)
cttctcactgatttactatttgcattagaaactgatgtacatgtttggaggagccattctacaaagtctgtaatggattttgtcaatagcaatgaaaatattatttttgtacataacaca

SEQ ID NO: 588782 - DNA, 120 bp, Artificial Sequence
  ENSG00000172915_39 (sequence is synthesized)
attcacctcatttcccaaatggtagacaacatcatcattgcttgtggaggaattttacctttgctctctgctgctacatcaccaactggttctaagacggaattggaaaatattgaagtg

SEQ ID NO: 588783 - DNA, 120 bp, Artificial Sequence
  ENSG00000172915_40 (sequence is synthesized)
acacaaggcatgtcagctgagacagcagtaactttcctcagccggctgatggctatggttgatgtacttgtgtttgcaagctctctaaattttagtgagattgaagctgagaaaaacatg

SEQ ID NO: 588784 - DNA, 120 bp, Artificial Sequence
  ENSG00000172915_41 (sequence is synthesized)
tcttctggaggtttaatgcgacagtgcctaagattagtttgttgtgttgctgtgagaaactgtttagaatgtcggcaaagacagagagacaggggaaataaatcttcccatggaagcagt

SEQ ID NO: 588785 - DNA, 120 bp, Artificial Sequence
  ENSG00000172915_42 (sequence is synthesized)
aaacctcaggaagttcctcaaagtgtgactgctacagcagcttcgaagactccattggaaaatgttccaggtaacctttctcctattaaggatccggatagacttcttcaggatgttgat

SEQ ID NO: 588786 - DNA, 120 bp, Artificial Sequence
  ENSG00000172915_43 (sequence is synthesized)
atcaatcgccttcgtgctgttgtctttcgggatgtggatgatagcaaacaagcacagttcttagctctggctgttgtttacttcatttcggttctgatggtttccaagtatcgtgacata

SEQ ID NO: 588787 - DNA, 120 bp, Artificial Sequence
  ENSG00000172915_44 (sequence is synthesized)
ttagaaccccagagagagactacaagaactggaagccaaccaggtagaaacatcaggcaagaaataaattcaccaacaagtacagttgtggtcataccatctatccctcatccaagtttg

SEQ ID NO: 588788 - DNA, 120 bp, Artificial Sequence
  ENSG00000172915_45 (sequence is synthesized)
aaccatggattccttgccaagttaattcctgagcagagctttggccactcattttacaaagaaacacctgctgcatttccagacaccataaaagaaaaagaaacaccaactcctggtgaa

SEQ ID NO: 588789 - DNA, 120 bp, Artificial Sequence
  ENSG00000172915_46 (sequence is synthesized)
cagaattagaaacaagtacaggccctgatgccatgagtgaactcttatccactttgtcatccgaagtgaagaaatcacaagagagcttaactgaaaatcctagtgaaacgttgaagcctg

SEQ ID NO: 588790 - DNA, 120 bp, Artificial Sequence
  ENSG00000172915_47 (sequence is synthesized)
caacatccatatctagcattagtcaaaccaaaggcatcaatgtgaaggaaatactgaaaagtcttgtggctgctccagttgaaatagcagaatgtggccctgaacctatcccatacccag

SEQ ID NO: 588791 - DNA, 120 bp, Artificial Sequence
  ENSG00000172915_48 (sequence is synthesized)
atccagcattgaagagagaaacacaagctattcttcctatgcagtttcattcctttgacaggagtgttgtggtgcctgtaaagaaaccacctccaggtagtttagctgtaaccactgtgg

SEQ ID NO: 588792 - DNA, 120 bp, Artificial Sequence
  ENSG00000172915_49 (sequence is synthesized)
gagccactactgctggaagtgggctgccaacaggcagtacctctaatatatttgctgctactggagctacaccaaaaagtatgattaatacaacaggtgccgtggattcagggtcctcct

SEQ ID NO: 588793 - DNA, 120 bp, Artificial Sequence
  ENSG00000172915_50 (sequence is synthesized)
cctcttcctcctcttctagttttgtgaatggtgctactagcaaaaaccttccagctgtacaaactgttgctccaatgccagaagattcagctgaaaatatgagcatcactgcaaaacttg

SEQ ID NO: 588794 - DNA, 120 bp, Artificial Sequence
  ENSG00000172915_51 (sequence is synthesized)
aaagagcgttagaaaaagttgctcctcttcttcgtgaaatttttgtagactttgccccattcctatctcgtacacttcttggcagtcatggacaagagctattgatagaaggccttgttt

SEQ ID NO: 588795 - DNA, 120 bp, Artificial Sequence
  ENSG00000172915_52 (sequence is synthesized)
gtatgaagtccagcacatctgtggttgagcttgttatgctgctttgttctcaggaatggcaaaactctattcagaagaatgcaggacttgcatttattgagctcatcaatgaaggaagat

SEQ ID NO: 588796 - DNA, 120 bp, Artificial Sequence
  ENSG00000172915_53 (sequence is synthesized)
tactgtgccatgctatgaaggaccatatagtccgtgttgcaaatgaagctgagtttattttgaacagacaaagagccgaggatgtacataaacatgcagagtttgagtcacagtgtgccc

SEQ ID NO: 588797 - DNA, 120 bp, Artificial Sequence
  ENSG00000172915_54 (sequence is synthesized)
aatatgctgctgatagaagagaggaagaaaagatgtgtgaccatcttatcagtgctgctaaacatcgagatcatgtaacagcaaatcagctgaaacagaagattctcaatattctcacaa

SEQ ID NO: 588798 - DNA, 120 bp, Artificial Sequence
  ENSG00000172915_55 (sequence is synthesized)
ataaacatggtgcttggggagcagtttctcatagccaattgcatgatttctggcgtttggattactgggaagatgatcttcgtcgaaggagacgatttgttcgcaatgcatttggctcca

SEQ ID NO: 588799 - DNA, 120 bp, Artificial Sequence
  ENSG00000172915_56 (sequence is synthesized)
ctcatgctgaagcattgctgaaagctgcaatagaatatggcacggaagaagatgtagtaaagtcaaagaaaacattcagaagtcaagcaatagtgaaccaaaatgcagagacagaactta

SEQ ID NO: 588800 - DNA, 120 bp, Artificial Sequence
  ENSG00000172915_57 (sequence is synthesized)
tgctggaaggagacgatgatgcagtcagtctgctacaggagaaagaaattgacaaccttgcaggcccagtggttctcagcacccctgcccagctcatcgctcccgtggtggtggccaagg

SEQ ID NO: 588801 - DNA, 120 bp, Artificial Sequence
  ENSG00000172915_58 (sequence is synthesized)
ggactctctccatcaccacgacagaaatctacttcgaggtagatgaggatgattctgccttcaagaagatcgacacgaaagttcttgcatacactgagggacttcacggaaaatggatgt

SEQ ID NO: 588802 - DNA, 120 bp, Artificial Sequence
  ENSG00000172915_59 (sequence is synthesized)
tcagcgagatacgagctgtattttcaagacgttaccttctacaaaacactgctttggaagtatttatggcaaaccgaacctcagttatgtttaatttccctgatcaagcaacagtaaaaa

SEQ ID NO: 588803 - DNA, 120 bp, Artificial Sequence
  ENSG00000172915_60 (sequence is synthesized)
aagttgtctatagcttgcctcgggttggagtagggaccagctatggtctgccacaagccaggaggatatcattggccactcctcgacagctttataaatcttccaatatgactcagcgct

SEQ ID NO: 588804 - DNA, 120 bp, Artificial Sequence
  ENSG00000172915_61 (sequence is synthesized)
ggcaaagaagggaaatttcaaacttcgaatatttgatgttccttaatactattgcaggacggacatataatgatctgaaccaatatccagtgtttccgtgggtgttaaccaactatgaat

SEQ ID NO: 588805 - DNA, 120 bp, Artificial Sequence
  ENSG00000172915_62 (sequence is synthesized)
cagaagagttggacctgactcttccaggaaacttcagggatctatcaaagccaattggtgctttgaaccccaagagagctgtgttttatgcagagcgttatgagacatgggaagatgatc

SEQ ID NO: 588806 - DNA, 120 bp, Artificial Sequence
  ENSG00000172915_63 (sequence is synthesized)
aaagcccaccctaccattataatacccattattcaacagcaacatctactttatcctggcttgttcgaattgaacctttcacaaccttcttcctcaatgcaaatgatggaaaatttgatc

SEQ ID NO: 588807 - DNA, 120 bp, Artificial Sequence
  ENSG00000172915_64 (sequence is synthesized)
atccagatcgaaccttctcatccgttgcaaggtcttggagaactagtcagagagatacttctgatgtaaaggaactaattccagagttctactacctaccagagatgtttgtcaacagta

SEQ ID NO: 588808 - DNA, 120 bp, Artificial Sequence
  ENSG00000172915_65 (sequence is synthesized)
atggatataatcttggagtcagagaagatgaagtagtggtaaatgatgttgatcttcccccttgggcaaaaaaacctgaagactttgtgcggatcaacaggatggccctagaaagtgaat

SEQ ID NO: 588809 - DNA, 120 bp, Artificial Sequence
  ENSG00000172915_66 (sequence is synthesized)
ttgtttcttgccaacttcatcagtggatcgaccttatatttggctataagcagcgaggaccagaagcagttcgtgctctgaatgtttttcactacttgacttatgaaggctctgtgaacc

SEQ ID NO: 588810 - DNA, 120 bp, Artificial Sequence
  ENSG00000172915_67 (sequence is synthesized)
tggatagtatcactgatcctgtgctcagggaggccatggaggcacagatacagaactttggacagacgccatctcagttgcttattgagccacatccgcctcggagctctgccatgcacc

SEQ ID NO: 588811 - DNA, 120 bp, Artificial Sequence
  ENSG00000172915_68 (sequence is synthesized)
tgtgtttccttccacagagtccgctcatgtttaaagatcagatgcaacaggatgtgataatggtgctgaagtttccttcaaattctccagtaacccatgtggcagccaacactctgcccc

SEQ ID NO: 588812 - DNA, 120 bp, Artificial Sequence
  ENSG00000172915_69 (sequence is synthesized)
acttgaccatccccgcagtggtgacagtgacttgcagccgactctttgcagtgaatagatggcacaacacagtaggcctcagaggagctccaggatactccttggatcaagcccaccatc

SEQ ID NO: 588813 - DNA, 120 bp, Artificial Sequence
  ENSG00000172915_70 (sequence is synthesized)
ttcccattgaaatggatccattaatagccaataattcaggtgtaaacaaacggcagatcacagacctcgttgaccagagtatacaaatcaatgcacattgttttgtggtaacagcagata

SEQ ID NO: 588814 - DNA, 120 bp, Artificial Sequence
  ENSG00000172915_71 (sequence is synthesized)
atcgctatattcttatctgtggattctgggataagagcttcagagtttattctacagaaacagggaaattgactcagattgtatttggccattgggatgtggtcacttgcttggccaggt

SEQ ID NO: 588815 - DNA, 120 bp, Artificial Sequence
  ENSG00000172915_72 (sequence is synthesized)
ccgagtcatacattggtggggactgctacatcgtgtccggatctcgagatgccaccctgctgctctggtactggagtgggcggcaccatatcataggagacaaccctaacagcagtgact

SEQ ID NO: 588816 - DNA, 120 bp, Artificial Sequence
  ENSG00000172915_73 (sequence is synthesized)
atccggcaccaagagccgtcctcacaggccatgaccatgaagttgtctgtgtttctgtctgtgcagaacttgggcttgttatcagtggtgctaaagagggcccttgccttgtccacacca

SEQ ID NO: 588817 - DNA, 120 bp, Artificial Sequence
  ENSG00000172915_74 (sequence is synthesized)
tcactggagatttgctgagagcccttgaaggaccagaaaactgcttattcccacgcttgatatctgtctccagcgaaggccactgtatcatatactatgaacgagggcgattcagtaatt

SEQ ID NO: 588818 - DNA, 120 bp, Artificial Sequence
  ENSG00000172915_75 (sequence is synthesized)
tcagcattaatgggaaacttttggctcaaatggagatcaatgattcaacacgggccattctcctgagcagtgacggccagaacctggtcaccggaggggacaatggggtagtagaggtct

SEQ ID NO: 588819 - DNA, 120 bp, Artificial Sequence
  ENSG00000172915_76 (sequence is synthesized)
ggcaggcctgtgacttcaagcaactgtacatttaccctggatgtgatgctggcattagagcaatggacttgtcccatgaccagaggactctgatcactggcatggcttctggtagcattg

SEQ ID NO: 588820 - DNA, 120 bp, Artificial Sequence
  ENSG00000172915_77 (sequence is synthesized)
tagcttttaatatagattttaatcggtggcattatgagcatcagaacagatactgaagataaaggaagaaccaaaagccaagttaaagctgagagcacaagtgctgcatggaaaggcaat

SEQ ID NO: 588821 - DNA, 120 bp, Artificial Sequence
  ENSG00000172915_78 (sequence is synthesized)
atctctggtggaaaaaactcgtctacatcgacctccgtttgtacattccatcacacccagcaatagctgtacattgtagtcagcaaccattttactttgtgtgttttttcacgactgaac

SEQ ID NO: 588822 - DNA, 120 bp, Artificial Sequence
  ENSG00000172915_79 (sequence is synthesized)
accagctgctatcaagcaagcttatatcatgtaaattatatgaattaggagatgttttggtaattatttcatatattgttgtttattgagaaaaggttgtaggatgtgtcacaagagact

SEQ ID NO: 588823 - DNA, 120 bp, Artificial Sequence
  ENSG00000172915_80 (sequence is synthesized)
tttgacaattctgaggaaccttgtgtccagttgttacaaagtttaagctttgaacctaacctgcatcccatttccagcctcttttcaagctgagaaaaaaaaaaaaaaacacgtttgata

SEQ ID NO: 588824 - DNA, 120 bp, Artificial Sequence
  ENSG00000172915_81 (sequence is synthesized)
ctttgtacatcagatgcatcttatttaaaagggatacttttgtaaaagtaaaaccttgtataaagaacaaaatgtttcttaattttattgtggagttacaacttgcatgttccttactcc

SEQ ID NO: 588825 - DNA, 120 bp, Artificial Sequence
  ENSG00000172915_82 (sequence is synthesized)
tgttggcttgatggaacaggtgcattcacactatgaaacagaaagatctgtccaaggacacagcttgtatgaaagggttgaatttgggctccatcagtaatttttgacattttcaccaaa

SEQ ID NO: 588826 - DNA, 120 bp, Artificial Sequence
  ENSG00000172915_83 (sequence is synthesized)
atatagtttgcactttttaatctaaagtcatcccttctgagtgaaatttgctcataaagcatttggatactaagccattatttgccattttgggtactttatacaaagaaaattcagccc

SEQ ID NO: 588827 - DNA, 120 bp, Artificial Sequence
  ENSG00000172915_84 (sequence is synthesized)
taccctgcataatttgaagacacagcagaaagggggcttagggatgaggtcctggtttttcttgtataaataggagtcatgggcgttagttctgtagtaataacttcccagcacctggac

SEQ ID NO: 588828 - DNA, 120 bp, Artificial Sequence
  ENSG00000172915_85 (sequence is synthesized)
atctcttccagagttatcccactggcttggtgtgtatacattaggggaggataatctgatgctaactttttttttctctttggttcttgaatagcttagtttctttaataacaagtcaaa

SEQ ID NO: 588829 - DNA, 120 bp, Artificial Sequence
  ENSG00000172915_86 (sequence is synthesized)
ctttattacaacaataactgaagttattcttttaggttctcgtgaaattctcactgaaagccacattcttagcctaaggcatttcatcttttatgatataaaatgatggctatcaaatga

SEQ ID NO: 588830 - DNA, 120 bp, Artificial Sequence
  ENSG00000172915_87 (sequence is synthesized)
ttttccatacattgtactgatcaagttatacacccaggggtatatacactttcttcatgtttcttctttgtatatttggtgactgtatcgtcatagatgtacatattgtgtcggtagggc

SEQ ID NO: 588831 - DNA, 120 bp, Artificial Sequence
  ENSG00000172915_88 (sequence is synthesized)
tatgaggcatgttacaggaatgtaattttctcagaatttacactcactcgcagtcatttatttaaaaagataaaacaagataatgggttctttgtattggcactttgcaccagaaacata

SEQ ID NO: 588832 - DNA, 120 bp, Artificial Sequence
  ENSG00000172915_89 (sequence is synthesized)
tcattatttattgatgtgattacttatttgttatccaccttgtactagtaagttttagcactgaattccttcttcactgttgtttgtatttatgaaattctgaaattatggggaatcagc

SEQ ID NO: 588833 - DNA, 120 bp, Artificial Sequence
  ENSG00000172915_90 (sequence is synthesized)
gtaatgattaagttattcatcaccaggctgtaagcaatatcttgagtttgtagcttagaattgggaggatacttaacatctggaagacaagttcatttcatcttgagatcatggtgaaat

SEQ ID NO: 588834 - DNA, 120 bp, Artificial Sequence
  ENSG00000172915_91 (sequence is synthesized)
attttggatatataaattccttaagctattgtaaccatgttttattgcaaagatgtaaaatatgccagatgtgtgtgagttggaaatcaaaaaaagaaaaataaaatatgcaaagaattc

SEQ ID NO: 588835 - DNA, 120 bp, Artificial Sequence
  ENSG00000172915_92 (sequence is synthesized)
attcgaaagaaaaatccaacttatgaattgtcattaatgcaaaattatttatcagaaaatcgtagagcactggaaccccatcatttcacagatgagaagaccagaagcaaaatgacctgc

SEQ ID NO: 588836 - DNA, 120 bp, Artificial Sequence
  ENSG00000172915_93 (sequence is synthesized)
cagagttgcagactgacaactgctgccttggcctagtcaagcccagacaggcatctcctactgccttaatttgggggcatctttctaggaccctgatctgcctccacatcttgaaggatt

SEQ ID NO: 588837 - DNA, 120 bp, Artificial Sequence
  ENSG00000172915_94 (sequence is synthesized)
ttcaagatagccatgtttcacaaaggaacgagggcagctgtgtttagagtggtcaaatttctgattctgtttttttgcttaggaacctttcacaaccttcttcctcaatgcaaatgatgg

SEQ ID NO: 588838 - DNA, 120 bp, Artificial Sequence
  ENSG00000172915_95 (sequence is synthesized)
ttaggagatgttttggtttccgaagtcatcatcatctgatgtagagcctacagcatctaaaaacatgaaatcgagtcctaatgaggttctgcaatttgctgaaacctgagctgctctgcc

SEQ ID NO: 588839 - DNA, 120 bp, Artificial Sequence
  ENSG00000172915_96 (sequence is synthesized)
gagccatctggcagggatctggggcaacagcgaccatggggaaacggccctcattgtctattctgcataatccactttggggattgtctttattttatttaaaaggaactaagtagtgaa

SEQ ID NO: 588840 - DNA, 120 bp, Artificial Sequence
  ENSG00000172915_97 (sequence is synthesized)
ctgtctggtaagttttctttgcatgtacaattgctggtattttatacacacttaagactatgcatgatgtactcagtgctgtgtaaatgtattacagtatttgggttctgcccttaaagt

SEQ ID NO: 588841 - DNA, 120 bp, Artificial Sequence
  ENSG00000172915_98 (sequence is synthesized)
aatcgccactgggctcgtcacgacagcctccttcagctccaacccggctaattaatccccactcatggatataggcacacaaactaaaggttcttgcatacactgagggacttcacggaa

SEQ ID NO: 588842 - DNA, 120 bp, Artificial Sequence
  ENSG00000172922_0 (sequence is synthesized)
aaaacacaactggaaaaccctaggacttgaacccagggaaagcgttagggggtaaggggactacacttcccgtgaagctccgcggcggcttcccgtgaggccccgcggaggcttcctgag

SEQ ID NO: 588843 - DNA, 120 bp, Artificial Sequence
  ENSG00000172922_1 (sequence is synthesized)
aggtcctgcgcgctttccgcgccagcttcagtgtcagctcgcgagccctggcgtcgcgtaggagggaggatggagagcggcgacgaagcggccatcgagaggcaccgcgtccacttgcgc

SEQ ID NO: 588844 - DNA, 120 bp, Artificial Sequence
  ENSG00000172922_2 (sequence is synthesized)
tccgccacattgcgcgacgccgtacccgccacactgcatctgctgccctgcgaggttgcggtggacgggcccgccccggtggggcgcttcttcacgcccgccatccgccagggccccgag

SEQ ID NO: 588845 - DNA, 120 bp, Artificial Sequence
  ENSG00000172922_3 (sequence is synthesized)
ggactcgaagtgtcgtttcggggccgctgtctacggggagaggaggtggcggtgccgcctggcctcgtgggatacgtgatggtgacagaagagaagaaggtgtcgatggggaagccagac

SEQ ID NO: 588846 - DNA, 120 bp, Artificial Sequence
  ENSG00000172922_4 (sequence is synthesized)
cccttgcgggattccgggactgacgaccaagaggaggagccgctggagcgggacttcgaccgcttcattggagccactgccaacttcagccgcttcaccctgtggggtctggagaccatc

SEQ ID NO: 588847 - DNA, 120 bp, Artificial Sequence
  ENSG00000172922_5 (sequence is synthesized)
cctggcccggatgccaaagtgcgtggggccttaacttggcccagccttgcggcagcgattcacgcacaggtgcccgaggactgagaaccagagcttgaaattcaaagctgcgatcccttc

SEQ ID NO: 588848 - DNA, 120 bp, Artificial Sequence
  ENSG00000172922_6 (sequence is synthesized)
acagcagtaaaccagctctttggaaccgattccatcaccccaataaaggagctcttcacagcacctgtgagtctgggcgccttagagcccctaagccagcatgggccctttccccctccc

SEQ ID NO: 588849 - DNA, 120 bp, Artificial Sequence
  ENSG00000172922_7 (sequence is synthesized)
caccaagaactttgcatggctctggcatatagaaacaatttattgccgggggcaataggggtaagagaagccagaaatttttgcagccagcacccaccccacccccaacttctactttac

SEQ ID NO: 588850 - DNA, 120 bp, Artificial Sequence
  ENSG00000172922_8 (sequence is synthesized)
aaaagaaatttttacaatcaccagccctctgtacagagctcccccatccggatcccttctcactgtacacagctgcctggctccctctggtccctgcttcagaggaggcctgggcctgtg

SEQ ID NO: 588851 - DNA, 120 bp, Artificial Sequence
  ENSG00000172922_9 (sequence is synthesized)
gccagctgaccttggagttggtctgagcccggagctcgccttggtgctgggcaccagtgggcccctgccaggcctgtcctctcctttttgagctgtcctcagccccatctcccttagagt

SEQ ID NO: 588852 - DNA, 120 bp, Artificial Sequence
  ENSG00000172922_10 (sequence is synthesized)
gctttgtgggagctgcagtgggggcggggtgggctatcagccccagtcctgctgccgtcttggcactgcagtgggcagtgtctggtcaccacttccccctcttgctccagtccttgggag

SEQ ID NO: 588853 - DNA, 120 bp, Artificial Sequence
  ENSG00000172922_11 (sequence is synthesized)
ccgcttgagcatggcccgctcatggccatccacgatgtcctctgacagtgtgaggatgtactggccctgggcagaggagatgggttcagcaggtggtcagcccacagaggactgcactct

SEQ ID NO: 588854 - DNA, 120 bp, Artificial Sequence
  ENSG00000172922_12 (sequence is synthesized)
gcatcccacacacctgtctcccctgcctgcctccctaccttgtagtagttgatgagattgaggtactgcagagtggagatgacatcctccttcttgatgctggtgatttcactaatctca

SEQ ID NO: 588855 - DNA, 120 bp, Artificial Sequence
  ENSG00000172922_13 (sequence is synthesized)
ctgtgggagagcacaggtcaggttccctgaggacctttatctgtccccaggagccctgagagagaaagcccaggaacagacaagccatgccatgtacccccaggtagacagcgccaggct

SEQ ID NO: 588856 - DNA, 120 bp, Artificial Sequence
  ENSG00000172922_14 (sequence is synthesized)
cacttgatggtgatctgtggcctctccccgctctccgacttcagccccatcaggatctccaggatggtctgggaccagtagcttcgataggataggaggccaaggtctgagaggggcttc

SEQ ID NO: 588857 - DNA, 120 bp, Artificial Sequence
  ENSG00000172922_15 (sequence is synthesized)
tcaggggtccctgttttcccttccactttggagagttcatagcctaaagcaatggagcaggagagggtgagtaagaggtcacagatgaacataagcaacatttaaaaacacaggttgcca

SEQ ID NO: 588858 - DNA, 120 bp, Artificial Sequence
  ENSG00000172922_16 (sequence is synthesized)
aggcaggctgcctagttcctatcatggccctgccacttggcagttctatgccctccacttctctgtgcctcagttccctcaggaagaactgagtattcactctttccgtgcgctgagcac

SEQ ID NO: 588859 - DNA, 120 bp, Artificial Sequence
  ENSG00000172922_17 (sequence is synthesized)
agtggagggcatgagggcactgagaggagcagctgcagtcaaccatgagggtgatcagaggccagtgaaggcttatgggcaggggatgcagagaaaatggctcatgggaagaaggggcct

SEQ ID NO: 588860 - DNA, 120 bp, Artificial Sequence
  ENSG00000172922_18 (sequence is synthesized)
ccaattttcctttgccatcccgggctctgtgtctagccatgtaaggaagtggagacagattcctgtctctaatccagacctgagaatgcttgaattctcaaagtcctcctagctgggacc

SEQ ID NO: 588861 - DNA, 120 bp, Artificial Sequence
  ENSG00000172922_19 (sequence is synthesized)
ttgggagtgtcacctgctgtaagacttgagtggcctgactgggtggttgtgaggatgcaaggagaaaaggtgcaccaaggtgcttcctaagtcggggagaccattcctgggagccacgtg

SEQ ID NO: 588862 - DNA, 120 bp, Artificial Sequence
  ENSG00000172922_20 (sequence is synthesized)
actgacccccaccatggctctttccctccaactcgtgctgatagctggccgctgggaggccgtccccagtgagatcctcagaccctgcacagccctgagtggcttcacatctcttggtca

SEQ ID NO: 588863 - DNA, 120 bp, Artificial Sequence
  ENSG00000172922_21 (sequence is synthesized)
gtgtcttcattctccccagtcagggacctgggatgtttgttacttctagaagcccttcctcaccctcataatggaccttagccccttgctggtcccactcacatcccgtctccattgctg

SEQ ID NO: 588864 - DNA, 120 bp, Artificial Sequence
  ENSG00000172922_22 (sequence is synthesized)
tctgagttccaagactgagtttcttcaagcatccacttgtgctaccaggctgagaagttctgaggatgtgaccccatctgggcatcatttaaccaataaaatttctcgaatggaccataa

SEQ ID NO: 588865 - DNA, 120 bp, Artificial Sequence
  ENSG00000172922_23 (sequence is synthesized)
cgtggggccttaacttggcccagccttgcggcagcggtgagtagacgaggagttccgtcttgcccccgggtggatgggctggggagcacaattgcgcagacggagcctggaggattctac

SEQ ID NO: 588866 - DNA, 120 bp, Artificial Sequence
  ENSG00000172922_24 (sequence is synthesized)
tgggtagtgtgtgggaagcgtagctccctgaccactcttcctagcatgtctagaagcggttattctgaacagctgggtccttcctcgggtatgggggccagcttgccgccctgtcttaca

SEQ ID NO: 588867 - DNA, 120 bp, Artificial Sequence
  ENSG00000172922_25 (sequence is synthesized)
agtccaacagtagaggcgactcctgttgcagattcacgcacaggtgcccgaggactgagaaccagagcttgaaattcaaagctgcgatcccttcacagcagtaaaccagctctttggaac

SEQ ID NO: 588868 - DNA, 120 bp, Artificial Sequence
  ENSG00000172922_26 (sequence is synthesized)
tcttcacagcacctaatgatctctgcctttcacaaagaccacctttgtgcatccatgcctactcttcagaacaccactgcaagaaatcccctcagccactttgtcatccaccaaggctga

SEQ ID NO: 588869 - DNA, 120 bp, Artificial Sequence
  ENSG00000172922_27 (sequence is synthesized)
aaggtaaccctctatgaagctctgctgaccacctcctttgggtcctgctaacctaccctctgtttcatgacacttaggacactgggagctagaggtcattggtatgactgtctctcccat

SEQ ID NO: 588870 - DNA, 120 bp, Artificial Sequence
  ENSG00000172922_28 (sequence is synthesized)
ggactaagctgtcagagaacagagactgtctcattcctggctaccagcacctgccagacagcaggaactcaataaaaatgggctggactgatctgctggcttgactggtcagtgtttacc

SEQ ID NO: 588871 - DNA, 120 bp, Artificial Sequence
  ENSG00000172922_29 (sequence is synthesized)
gaagaagctgtcatttgattcaccccagcgcctcactgcctctcaagcactaaccttgttcttacgtccatcaatctcaaagaaggagatggtgcccttgcggtaaatctcattgcctgg

SEQ ID NO: 588872 - DNA, 120 bp, Artificial Sequence
  ENSG00000172922_30 (sequence is synthesized)
aggatgtcgtaggtcacacttggtctggggaagagaggaggatcaggaacaagggcaacgtggagggtgctgggaaggcagcctccctggacccctcataccaaatgacgctgaagacac

SEQ ID NO: 588873 - DNA, 120 bp, Artificial Sequence
  ENSG00000172922_31 (sequence is synthesized)
ttgagactacggccgtacttgaggcagaactcgcacaggtagaggacaggcaatgtggtgagttcctgtgggtacggggagaagtaccacggcttgaggcggtgccggcccagctcaatg

SEQ ID NO: 588874 - DNA, 120 bp, Artificial Sequence
  ENSG00000172922_32 (sequence is synthesized)
cactcaatgttcttcatccgggtgacgatgtcgtcgtggcttcgatcagacaccaggctgccagtcatgcgtggtgctgacggtattccatcagagctgtcctgggagtcctgcccaggg

SEQ ID NO: 588875 - DNA, 120 bp, Artificial Sequence
  ENSG00000172922_33 (sequence is synthesized)
ccagtggaaaataccaggttgtaagagacagctcagcaggacaccacagctcacagccctttgacaggtttccttcaagcctaacagcaaccctaagggggaggtaccatgatccccaat

SEQ ID NO: 588876 - DNA, 120 bp, Artificial Sequence
  ENSG00000172922_34 (sequence is synthesized)
ttccagataaaaaacctgaaaccctaaaggatcgatgatgtggaaaagatcacccaatgaccccattttttagatggagtctcagtctgtcgcccaggctggagggcagtagcgcgatct

SEQ ID NO: 588877 - DNA, 90 bp, Artificial Sequence
  ENSG00000172922_35 (sequence is synthesized)
gtcgcccaggctggagggcagtagcgggggttcaagcagttctcctgcctcagctttccgagctggattacaggcacccgccaccacgcc

SEQ ID NO: 588878 - DNA, 120 bp, Artificial Sequence
  ENSG00000172922_36 (sequence is synthesized)
gtgagccctgcggccggactacggctcccggcagcccccgcgccggcctgcgcgcttctcatcgcctgggctcctggggatcgtggtccgtccggaggtggcgggagggcagctccgggc

SEQ ID NO: 588879 - DNA, 120 bp, Artificial Sequence
  ENSG00000172922_37 (sequence is synthesized)
ggtcagagcttggttattccaagtgagtggtgagacagacagaatggggggtgatggggagtaagaggctgggaagaaggggcctcagggttggggagggcactgaagagcccatgtgtg

SEQ ID NO: 588880 - DNA, 120 bp, Artificial Sequence
  ENSG00000172922_38 (sequence is synthesized)
atgaagttcagagtcccttctggctttaagagactgacctcactggacacaaggagcgagggacaacatgcttatgtctatctgctgacagcattttggatacctgcctgcaaggctcag

SEQ ID NO: 588881 - DNA, 120 bp, Artificial Sequence
  ENSG00000172922_39 (sequence is synthesized)
gggacaactggggacattagccactggtccttgccccagtactcgtatcatggcacacgttaccagatacatcagcaccagcggctcactaaccttctgcccatggctccaggcaggagc

SEQ ID NO: 588882 - DNA, 120 bp, Artificial Sequence
  ENSG00000172922_40 (sequence is synthesized)
gcgggattccgggactgacgaccaagaggaggagccgctggagcgggacttcgtgagcaaagggatagggttgaaagggggtgcgggcgggagctgtagtcccgatgctgagccaggccc

SEQ ID NO: 588883 - DNA, 120 bp, Artificial Sequence
  ENSG00000172927_0 (sequence is synthesized)
gttactgtcccgcgaacccacatccctacaaagcaggaaagtatgcttgggagaggccaagtgagtggggaatcagcccaaagccaggcgtccagggtctccctcacctgaagctgactt

SEQ ID NO: 588884 - DNA, 120 bp, Artificial Sequence
  ENSG00000172927_1 (sequence is synthesized)
tttccccaccttggacagagggcgggagatgccatccccactgaacccagtgctttcaccagccatattagctcccactcaccccccgtcgtggaagcctcggccgtcacacctgcaggg

SEQ ID NO: 588885 - DNA, 120 bp, Artificial Sequence
  ENSG00000172927_2 (sequence is synthesized)
ccggggcgtgcatggcctcagggatggcctgttcagctgctgggtgactcgggtccaggtgcctcaccacctgctgagctctgtgtgatttctggacacttctgctcgttgcctttgggc

SEQ ID NO: 588886 - DNA, 120 bp, Artificial Sequence
  ENSG00000172927_3 (sequence is synthesized)
tcagtgaagagtctggagtttatctggagtgaggtggccggttcttggtgggatctgagcaggacagcgtctggctccttccctcggctcatggccctcagaatctgcgtcacatacacc

SEQ ID NO: 588887 - DNA, 120 bp, Artificial Sequence
  ENSG00000172927_4 (sequence is synthesized)
ccagctctcccgataggtctctgcactcgctgttgcctctgcctggaacagtctccctcctggtgtcattgtctccgtggtgtgtccttcctgaccttccacctccaccagtctgtcccc

SEQ ID NO: 588888 - DNA, 120 bp, Artificial Sequence
  ENSG00000172927_5 (sequence is synthesized)
cttggggacagggactcgttgctcatgttcacccggcaggctggacacttcgtggagggctccaaagccggcagatcccggggccgcctctgtctctcccaggccctgcgtgttgcggtg

SEQ ID NO: 588889 - DNA, 120 bp, Artificial Sequence
  ENSG00000172927_6 (sequence is synthesized)
agaggagcatttgtgtctctgtggtttgctgctggagctggtgaccgggagagaaacaagggagacaagggtgcccagacaggtgcggggctcagccaggaggcagaagacgtggacgtg

SEQ ID NO: 588890 - DNA, 120 bp, Artificial Sequence
  ENSG00000172927_7 (sequence is synthesized)
tcccgggccaggagggtcacagatgcaccacaaggcactctgtgtggcactgggaacaggaattctgggagtcagtctgcaagggtggtgggcgttgctcacctgggagaagcctttaga

SEQ ID NO: 588891 - DNA, 120 bp, Artificial Sequence
  ENSG00000172927_8 (sequence is synthesized)
gtgggcgttgagcaggccattagctcgtgccctgaggaggtgcatgggcggcatgggctctccatggaaattatgtgggcgcgaatggatgtggctctgcgctcacctgggcgaggactt

SEQ ID NO: 588892 - DNA, 120 bp, Artificial Sequence
  ENSG00000172927_9 (sequence is synthesized)
gtgccggggcactctgcatgaccctggcagaatcgagctgccctgactatgaaaggggaagaagagcatgcctgaccctccaccggcaccccacccctcactgctccacctggggcctgc

SEQ ID NO: 588893 - DNA, 120 bp, Artificial Sequence
  ENSG00000172927_10 (sequence is synthesized)
ctctgcgggtggctgggtcctggctgactgttgtgactgttgaggccctgggggggtggcgcatgggagttaggaggactggccaggtggggcccactatgcacccacccccagtgtcag

SEQ ID NO: 588894 - DNA, 120 bp, Artificial Sequence
  ENSG00000172927_11 (sequence is synthesized)
gtgcttctcctctcctcctccaccacctcctcctcctcctcctcatcatcatcctcacttgttgaggacgtcctgtgtgccaagtggtttatatgcccagcctcatttaatcctcagaat

SEQ ID NO: 588895 - DNA, 120 bp, Artificial Sequence
  ENSG00000172927_12 (sequence is synthesized)
gactccatgaggtagctactaaaaccccccacttaacagatgaggaaactgaggcctagagaagctcaacaagttgcctaagttccaagtttcctctcccaactctcctaccctctcctc

SEQ ID NO: 588896 - DNA, 120 bp, Artificial Sequence
  ENSG00000172927_13 (sequence is synthesized)
ttccttctcctttctcccattcttccctgcctcttccctaactagacaattttttattgagtgtctcccaggtgcaggcatgagccaggtgctgggaaaatcatgataacccagctcctt

SEQ ID NO: 588897 - DNA, 120 bp, Artificial Sequence
  ENSG00000172927_14 (sequence is synthesized)
ctggtcattttctcagctggttagaggctgggaggacacgcaagttcagctccagccgactggggcattggtggtagcccctggagacattgtgcaatggggctacgaggctgcatctgg

SEQ ID NO: 588898 - DNA, 120 bp, Artificial Sequence
  ENSG00000172927_15 (sequence is synthesized)
ctccagggaagcgtgttgcaatccatgagtgatgtctgccatgcgtacaggcatggagagtgaggcgcctgtactgtctttctgtagaccctagactggtggggcctctgaaatgcatcc

SEQ ID NO: 588899 - DNA, 120 bp, Artificial Sequence
  ENSG00000172927_16 (sequence is synthesized)
agacactgtgctgggtgtgttgcatggccctcccaaccaattcagtatttttctccccattttccagggagaaatctaaggcgtcagaatgtaaggttcttattggaacccaggctccag

SEQ ID NO: 588900 - DNA, 120 bp, Artificial Sequence
  ENSG00000172927_17 (sequence is synthesized)
ggtccctggttttctgtgacatcatgctgcaggaccctgtttctctctttgctttggctgctggggagctcagaagggagctttaggcttgctctcagtcaccacattagctcaggggtt

SEQ ID NO: 588901 - DNA, 120 bp, Artificial Sequence
  ENSG00000172927_18 (sequence is synthesized)
tgggcatttttgtcgccgtctcctttgggctctgtctcctccctgctgtgcttcctgaggagcaggccggatgtaagttatcaactataaataaaaccaagacttccgttctggctctca

SEQ ID NO: 588902 - DNA, 120 bp, Artificial Sequence
  ENSG00000172927_19 (sequence is synthesized)
tcatgctggcatcattcattctccacgcatcagatgatcctgtggcccctcagtgccaggccccactggccctctgcgcacatcagtgactctgatgttctcccccaccgcatgctgcca

SEQ ID NO: 588903 - DNA, 120 bp, Artificial Sequence
  ENSG00000172927_20 (sequence is synthesized)
atctgatggtggagacagaacagcagtcccggatggtggaggcaatgcccagagctgtggcagccaccttgcagccgtgaagcaccagtgggaatgacagtcaagagaaccacggagatg

SEQ ID NO: 588904 - DNA, 120 bp, Artificial Sequence
  ENSG00000172927_21 (sequence is synthesized)
tcactgcagccttgaactcctgggttccagcaatcctcccacctcagcctccttagtaggcgtggctacaggtgtgtaccaccatgtccagccctaaatttcattctttttaatttcaat

SEQ ID NO: 588905 - DNA, 120 bp, Artificial Sequence
  ENSG00000172927_22 (sequence is synthesized)
tgtccagccctaaatttcattctttttaatttcaatattgttatgtgttttctaatgttttataacttattggtatggtagatgtacatgtatacaaattaaaagaaaatttatatatat

SEQ ID NO: 588906 - DNA, 120 bp, Artificial Sequence
  ENSG00000172927_23 (sequence is synthesized)
agtctggagtttatctggagtgaggtggccggttcttggtgggatctgagcagagtccattcaggagcaggaaagttcatctcagaccctaaatccagccacgtcatgccacgcttaaca

SEQ ID NO: 588907 - DNA, 120 bp, Artificial Sequence
  ENSG00000172927_24 (sequence is synthesized)
aggtctctgtgttgtcacctggaaaatggaactttccacctcctcgggatgttatgatgatagatgtaacaagctcagcacagtgcctgtacaggtggaggcaatgcccagagctgtggc

SEQ ID NO: 588908 - DNA, 120 bp, Artificial Sequence
  ENSG00000172927_25 (sequence is synthesized)
ccaacaacttcactttccacactcagtgccacgaagtgcagctctaagctggggatttctgtgcagagatgatccactgagtgcaacccaccaccgtgcggacaccacccctgcagaatc

SEQ ID NO: 588909 - DNA, 120 bp, Artificial Sequence
  ENSG00000172927_26 (sequence is synthesized)
gccccctctggaccctcgagcccacagtccatccaccacagaggtgtctgctgctcatcagatagttcctaccaagaaaatgctgtgtgaacccatctgtgtggcaaaccggcacgggga

SEQ ID NO: 588910 - DNA, 120 bp, Artificial Sequence
  ENSG00000172927_27 (sequence is synthesized)
gaaagctgacttccaaggacgtctaccaactgtcacttgcaaaccagaacttgcctctttgtagatgaagactggcagggctgaagaaatgatctcatgttgaaattaatgatgagcttc

SEQ ID NO: 588911 - DNA, 120 bp, Artificial Sequence
  ENSG00000172932_0 (sequence is synthesized)
ccgaagccgaggcggggccgggatgcggcgctgaggcccagcatggccggcccgggccccaccttcccgctgcaccggctcgtctgggcgaaccggcatcgcgaactggaggccgcactg

SEQ ID NO: 588912 - DNA, 120 bp, Artificial Sequence
  ENSG00000172932_1 (sequence is synthesized)
ccgcactgcacagccaccagcacgacattgaacaggaggacccccgcgggcggaccccactggagctggccgtgtctctgggaaacctggagtctgtgagagtgctccttcgacacaatg

SEQ ID NO: 588913 - DNA, 120 bp, Artificial Sequence
  ENSG00000172932_2 (sequence is synthesized)
ccaacgtgggcaaagagaaccgccagggctgggcagtcctgcaggaggcagtcagcactggagaccccgagatggtgcagctggtgctccagtatcgggactaccagagggccacgcaga

SEQ ID NO: 588914 - DNA, 120 bp, Artificial Sequence
  ENSG00000172932_3 (sequence is synthesized)
ggctggcgggcattccggaactgctcaacaaacttcgccaggcccccgatttctacgttgagatgaagtgggagttcaccagctgggtgccccttgtgtctaagatgtgcccaagcgatg

SEQ ID NO: 588915 - DNA, 120 bp, Artificial Sequence
  ENSG00000172932_4 (sequence is synthesized)
tgtaccgcgtgtggaagcggggtgagagcctgcgagtagacaccagtctcctgggcttcgagcacatgacctggcagcggggccggaggagcttcatcttcaagggccaggaggcaggag

SEQ ID NO: 588916 - DNA, 120 bp, Artificial Sequence
  ENSG00000172932_5 (sequence is synthesized)
ccctggtgatggaagtggaccatgaccggcaggtggtgcatgtggagacactggggctcactctgcaggagcccgaaacactgctggccgccatgcggcccagcgaggagcatgtggcca

SEQ ID NO: 588917 - DNA, 120 bp, Artificial Sequence
  ENSG00000172932_6 (sequence is synthesized)
gtcgcctcacctctcctatcgtctccacccacctggacactcgtaatgtggcctttgagaggaacaaatgtggtatctggggctggcggtctgagaagatggaaactgttagcggctacg

SEQ ID NO: 588918 - DNA, 120 bp, Artificial Sequence
  ENSG00000172932_7 (sequence is synthesized)
ctccattccagtccttcctggggatggcgcagcagcattcctcccacaccggggcccccgtgcagcaggcagccagccccaccaaccccacagccatctcccctgaggagtacttcgacc

SEQ ID NO: 588919 - DNA, 120 bp, Artificial Sequence
  ENSG00000172932_8 (sequence is synthesized)
ccaacttcagcctggagtcacggaacattggccgccccatcgagatgtccagcaaagtacagaggttcaaggcaacactgtggctgagtgaagagcacccgctctccctgggtgaccagg

SEQ ID NO: 588920 - DNA, 120 bp, Artificial Sequence
  ENSG00000172932_9 (sequence is synthesized)
tgacccccatcatcgacctaatggccatcagcaacgctcactttgccaagctgcgcgacttcatcactctgcgccttccacctggcttccccgtcaaaattgagattccccttttccacg

SEQ ID NO: 588921 - DNA, 120 bp, Artificial Sequence
  ENSG00000172932_10 (sequence is synthesized)
tgctcaatgcccgcatcaccttcagcaacctgtgtggctgtgatgagcccctgagctccgtgtgggtgccggcccccagctctgctgttgccgcatcagggaaccctttcccgtgcgagg

SEQ ID NO: 588922 - DNA, 120 bp, Artificial Sequence
  ENSG00000172932_11 (sequence is synthesized)
tggaccccaccgtgtttgaagtgcccaacgggtacagcgtgctgggcatggagcgcaacgagcccctccgggacgaggacgatgacctcctgcagttcgccatccagcagagcctgcttg

SEQ ID NO: 588923 - DNA, 120 bp, Artificial Sequence
  ENSG00000172932_12 (sequence is synthesized)
aagcgggcactgaggcggagcaggtgaccgtctgggaagccctgaccaacacccggcccggtgcccgccctcctccccaggccacggtttatgaggaacagcttcagctggagcgggccc

SEQ ID NO: 588924 - DNA, 120 bp, Artificial Sequence
  ENSG00000172932_13 (sequence is synthesized)
tccaggaaagcctgcagctgtccacagagcccaggggcccaggatcccctcccaggacacccccagcccccggtccacccagctttgaagagcagctgcgcctggccctggagttgtctt

SEQ ID NO: 588925 - DNA, 120 bp, Artificial Sequence
  ENSG00000172932_14 (sequence is synthesized)
cacgggagcaggaggagcgggagcggcgcgggcagcaggaggaggaggacttacagcggatcctgcagctgtcactcactgagcactgagccatagccccgggagggctggccaggccac

SEQ ID NO: 588926 - DNA, 120 bp, Artificial Sequence
  ENSG00000172932_15 (sequence is synthesized)
tccctgcccgcttttgtaatttatttatttataaactctctgctgctgagcttggggcctggagccccaggaatgagcaggcaggggagactgagatggaaataaagagactgtcgcagc

SEQ ID NO: 588927 - DNA, 120 bp, Artificial Sequence
  ENSG00000172932_16 (sequence is synthesized)
tttattatttgagacgttggctatttaggagtgtgttgtttactttctacatatttgtgaatttccaaagttttttttttctgctattgacttctaatttcattccattgtggttggaaa

SEQ ID NO: 588928 - DNA, 75 bp, Artificial Sequence
  ENSG00000172932_17 (sequence is synthesized)
ctgctattgacttctaatttcattccattgtggttggaaaacatacattgtatgacttctatcctttcaatttta

SEQ ID NO: 588929 - DNA, 67 bp, Artificial Sequence
  ENSG00000172932_18 (sequence is synthesized)
tgtcgcccaggctggagtgcagtggtactgtctgctcactgcgagctctgcctccgtccaccaccgt

SEQ ID NO: 588930 - DNA, 68 bp, Artificial Sequence
  ENSG00000172932_19 (sequence is synthesized)
tgacctcatgatccaccccttattgaggttttcttaatggcctagtgtatggccttgaagagtgttcc

SEQ ID NO: 588931 - DNA, 120 bp, Artificial Sequence
  ENSG00000172932_20 (sequence is synthesized)
ttttcttaatggcctagtgtatggccttgaagagtgttccgtgtgcgcgtgagaagcgtgtgtgtggttgttattgggtagagtgttctagcctgcttatgaagtccagctgtagtgttg

SEQ ID NO: 588932 - DNA, 120 bp, Artificial Sequence
  ENSG00000172932_21 (sequence is synthesized)
ttcttatcttctggttctttgttgatcttctagttgttctatcccttattgaaagtggggtactggagtctccaactgacatacttttcttttagctttttattttggaaaatttcaaac

SEQ ID NO: 588933 - DNA, 120 bp, Artificial Sequence
  ENSG00000172932_22 (sequence is synthesized)
atatatgaaagaagagataatgtacttactcatcacccagcttcaacatttatcaacatcttgccaatcttactgaatctatccttccttaccttttttaaaaatgtttcctagagtgtg

SEQ ID NO: 588934 - DNA, 120 bp, Artificial Sequence
  ENSG00000172932_23 (sequence is synthesized)
tcaaagctcatcccagatgtcctaatgtttctagtaaatgcttctgcacaattctaaaagacaaggatgtttttaaacccagccccgacactatcatacctcacaagattcatgctaatt

SEQ ID NO: 588935 - DNA, 120 bp, Artificial Sequence
  ENSG00000172932_24 (sequence is synthesized)
aaggggccctgagagttgggcaccccgggcaggctggctggagggggctttggaaaggaaggctttggccagcgtgtgagggtgcaggtctcaccagctcctgtttggtctgtttcagga

SEQ ID NO: 588936 - DNA, 120 bp, Artificial Sequence
  ENSG00000172932_25 (sequence is synthesized)
gctcctctccacatccatcccagagtagcccctgggctctggaaaccctgagcatttgtgggaactcagcgggcctgagtgcccagcccctgcggagtacacagggctcacccacatcat

SEQ ID NO: 588937 - DNA, 120 bp, Artificial Sequence
  ENSG00000172932_26 (sequence is synthesized)
gggcccctacccagggtaccgagatcaaaagaggagtgtgttcctcttgaccctggggctgcatctcctcgttggtgacttcctggggttcagaccctgccacctcctccattttgggga

SEQ ID NO: 588938 - DNA, 120 bp, Artificial Sequence
  ENSG00000172932_27 (sequence is synthesized)
gcaagatctcatctgtctctgggacaggaggacctgggttctgcactggtgaggctgagtgtggggagcaggctctgagcccccagctccccgtgtcccctgctccccaggtgtacagtg

SEQ ID NO: 588939 - DNA, 120 bp, Artificial Sequence
  ENSG00000172932_28 (sequence is synthesized)
ccaccaacgtggagctggtgacacgcacacgcacggagcacctctctgatcaggacaagtcgaggagcaaaggtaaacccagctttgaagagcagctgcgcctggccctggagttgtctt

SEQ ID NO: 588940 - DNA, 120 bp, Artificial Sequence
  ENSG00000172932_29 (sequence is synthesized)
gacgctggcagccaaccgcagcctctgcaaaagggactcgtgcggcgggcgaaggcagccgttcgccgcgggcggtcctccgccgggacggctctgccgctgcctgggcctgcgcccctc

SEQ ID NO: 588941 - DNA, 120 bp, Artificial Sequence
  ENSG00000172932_30 (sequence is synthesized)
tctccccgaactcctatccctgacttcagggccccgggggccgcctccccgcatcgctgggcctgcagacaccggccaggtcccaggggaaggtgcttcccgctcagccggcaagcactt

SEQ ID NO: 588942 - DNA, 120 bp, Artificial Sequence
  ENSG00000172932_31 (sequence is synthesized)
agtggcgtctgctcgttgctcgtctccaggccgggtgaggggagccggggcgccccacttcacccgcacaccccagcagagtcggtgaccgcgggacctggggtaggaagaccggggcga

SEQ ID NO: 588943 - DNA, 120 bp, Artificial Sequence
  ENSG00000172932_32 (sequence is synthesized)
gcaaggggatccgcgggggaaacgcaggcatcacggctgcagcaggaccgcggcccgccgcgcacgcgcgtgcactaccgaggggcccagtgcccgccccctccggccccgccttcctct

SEQ ID NO: 588944 - DNA, 80 bp, Artificial Sequence
  ENSG00000172932_33 (sequence is synthesized)
cctcctgcgggccgcgggcggagctgtaaccgggcaccgccctccaggccgccccagcggacccgggcccgaccgaggtc

SEQ ID NO: 588945 - DNA, 80 bp, Artificial Sequence
  ENSG00000172932_34 (sequence is synthesized)
ggggcgcagacccaaggccgggcatctcctcgggcgctcgcggttgctctgccgcgcgctggcctggccgcggttgccat

SEQ ID NO: 588946 - DNA, 120 bp, Artificial Sequence
  ENSG00000172932_35 (sequence is synthesized)
gcattccggaactgctcaacaaacttcgccagcccagggtcacgtaggaaagagagacggccaggctcacgtgggagagactggaccctttggaagagaagccttgccagctttgggcct

SEQ ID NO: 588947 - DNA, 120 bp, Artificial Sequence
  ENSG00000172932_36 (sequence is synthesized)
cctgaagaatgcagattacctggagcagggacttcaggttgactcggtggattatggcctgaaaccctggaatacttgctactacgcacccttctggaagcacacggaggggcctggctg

SEQ ID NO: 588948 - DNA, 120 bp, Artificial Sequence
  ENSG00000172932_37 (sequence is synthesized)
ccactgtgccccctttacagagtaggactctgagacccagtggaaacaaaggctcccccagggctctgcacaggctcatggccaggttgaggctggccctccacctccaggtgcttacag

SEQ ID NO: 588949 - DNA, 120 bp, Artificial Sequence
  ENSG00000172932_38 (sequence is synthesized)
cctcattgtctgaagaccactgtagtgccccacttggcccaccctctccagggcagagtggttgggcgtagctgagccatagcagtgcgtcaagacttgatgaagggccaggcgttgtgg

SEQ ID NO: 588950 - DNA, 120 bp, Artificial Sequence
  ENSG00000172932_39 (sequence is synthesized)
cttactcctgtaatcccagcgctttctgaggccaaagtgggcggatcacttgagcccaggaggtggagaccagcctgggcaacatggtgaaagccgtctctacaaaaagtacaaaaatta

SEQ ID NO: 588951 - DNA, 120 bp, Artificial Sequence
  ENSG00000172932_40 (sequence is synthesized)
aaaaaaaaaaaaaaaaaaaaagacctgatgaagggctgggctggctgtggacaaggggctcccaggcctgctggagccagcagcaggcagggcgctgacaagcagctctggtttctctta

SEQ ID NO: 588952 - DNA, 120 bp, Artificial Sequence
  ENSG00000172932_41 (sequence is synthesized)
gacaagcagctctggtttctcttaggcccccgatttctacgttgagatgaagtgggagttcaccagctgggtgccccttgtgtctaagatgtgcccaagcgatgtgtaccgcgtgtggaa

SEQ ID NO: 588953 - DNA, 120 bp, Artificial Sequence
  ENSG00000172932_42 (sequence is synthesized)
cgggcattccggaactgctcaacaaacttcgccaggcccccgatttctacgttgagatgaagtgggagttcaccagctggggtgagtggggacctctgggctcccagggatttggggtgg

SEQ ID NO: 588954 - DNA, 120 bp, Artificial Sequence
  ENSG00000172932_43 (sequence is synthesized)
cggaactgctcaacaaacttcgccaggtacagcagggcacagttatggaggtggggtaccatggcagggcaccaccctggttactgtgccaggcctggccttggaaaggcacccagtttg

SEQ ID NO: 588955 - DNA, 120 bp, Artificial Sequence
  ENSG00000172932_44 (sequence is synthesized)
ggagccccagcctgggcccagggaggagggcagcttgggccacgtggccaggacaccagctcccgggggaggcgggcagcggcatctgagcagagcagggcactccaggccaggcagaag

SEQ ID NO: 588956 - DNA, 120 bp, Artificial Sequence
  ENSG00000172932_45 (sequence is synthesized)
gtgggtaaaggcagctgcccacgaaccagagggcagtcctcaatggaagggccaccagccgtgcctcacccatgtcctgtggtcggctgggcaggttcaaggcaacactgtggctgagtg

SEQ ID NO: 588957 - DNA, 120 bp, Artificial Sequence
  ENSG00000172932_46 (sequence is synthesized)
tctgggcctgtcatagttagggacccactccctcggctggcttctctctggactccactcctggagggcaggagtcatgtctgccttatccatggtcctcagcccttagcaaggggcttg

SEQ ID NO: 588958 - DNA, 120 bp, Artificial Sequence
  ENSG00000172932_47 (sequence is synthesized)
gcacagtgggaagggcccccagcgacgtggcctgggagtggagcgtctgccttggtggaacagaacagttacgctcttgcctcgtgaggagccttgagcaggttcaaggcaacactgtgg

SEQ ID NO: 588959 - DNA, 120 bp, Artificial Sequence
  ENSG00000172932_48 (sequence is synthesized)
ggacacgcaggccaccctctgccatctccctggtcagtccgccgtccttatttcccacagcgattcccaaccctgctcgccctggcagcctccctgccttgccctcttctctcctgccct

SEQ ID NO: 588960 - DNA, 120 bp, Artificial Sequence
  ENSG00000172935_0 (sequence is synthesized)
atctcttccagcaggagagggctctactctgagctcctattttccaaggctccgggccgcgctcggcgctggcctgctgccccggcgggtccgccggccggaggcgggagtcacaggaag

SEQ ID NO: 588961 - DNA, 120 bp, Artificial Sequence
  ENSG00000172935_1 (sequence is synthesized)
agccctccacaaaaggaggcctcggcggatcaggacagctgcaggtgggtgtgcagactggtgagctgccagcaggggcccagacgcgccaggcctggagatggctggaaactgctcctg

SEQ ID NO: 588962 - DNA, 120 bp, Artificial Sequence
  ENSG00000172935_2 (sequence is synthesized)
ggaggcccatcccggcaacaggaacaagatgtgccctggcctgagcgaggccccggaactctacagccggggcttcctgaccatcgagcagatcgcgatgctgccgcctccggccgtcat

SEQ ID NO: 588963 - DNA, 120 bp, Artificial Sequence
  ENSG00000172935_3 (sequence is synthesized)
gaactacatcttcctgctcctctgcctgtgtggcctggtgggcaacgggctggtcctctggtttttcggcttctccatcaagaggaaccccttctccatctacttcctgcacctggccag

SEQ ID NO: 588964 - DNA, 120 bp, Artificial Sequence
  ENSG00000172935_4 (sequence is synthesized)
cgccgatgtgggctacctcttcagcaaggcggtgttctccatcctgaacacggggggcttcctgggcacgtttgccgactacatccgcagcgtgtgccgggtcctggggctctgcatgtt

SEQ ID NO: 588965 - DNA, 120 bp, Artificial Sequence
  ENSG00000172935_5 (sequence is synthesized)
ccttaccggcgtgagcctcctgccggccgtcagcgccgagcgctgcgcctcggtcatcttccccgcctggtactggcgccggcggcccaagcgcctgtcggccgtggtgtgcgccctgct

SEQ ID NO: 588966 - DNA, 120 bp, Artificial Sequence
  ENSG00000172935_6 (sequence is synthesized)
gtgggtcctgtccctcctggtcacctgcctgcacaactacttctgcgtgttcctgggccgcggggcccccggcgcggcctgcaggcacatggacatcttcctgggcatcctcctgttcct

SEQ ID NO: 588967 - DNA, 120 bp, Artificial Sequence
  ENSG00000172935_7 (sequence is synthesized)
gctctgctgcccgctcatggtgctgccctgcctggccctcatcctgcacgtggagtgccgggcccgacggcgccagcgctctgccaagctcaaccacgtcatcctggccatggtctccgt

SEQ ID NO: 588968 - DNA, 120 bp, Artificial Sequence
  ENSG00000172935_8 (sequence is synthesized)
tgtgcatctgcatcaacagcagcgccaagcccatcgtctacttcctggccgggagggacaagtcgcagcggctgtgggagccgctcagggtggtcttccagcgggccctgcgggacggcg

SEQ ID NO: 588969 - DNA, 120 bp, Artificial Sequence
  ENSG00000172935_9 (sequence is synthesized)
ctgagctgggggaggccgggggcagcacgcccaacacagtcaccatggagatgcagtgtcccccggggaacgcctcctgagactccagcgcctggaggaggcaggggcaggaagcggcct

SEQ ID NO: 588970 - DNA, 120 bp, Artificial Sequence
  ENSG00000172935_10 (sequence is synthesized)
ccaagacccttcgccttgggacaggaatgggcacctgcttctgagtccatacaggagaagaaagatctgtttcctctcctcgggcctccttctccctgggctggggactccaggggtggc

SEQ ID NO: 588971 - DNA, 120 bp, Artificial Sequence
  ENSG00000172935_11 (sequence is synthesized)
tgggagactgggcagccaccagcaaacagaccctgtggcccctgcccggctcccccacccattctgctcccctagagacctcttgtacagaagttgcccccaggtggtggggcccctcct

SEQ ID NO: 588972 - DNA, 120 bp, Artificial Sequence
  ENSG00000172935_12 (sequence is synthesized)
tgccctaggctggttggtaaaagagaggaggtcaacacccagcctagccacctctgcctcttgggtcagccctccttgactgtgtcccagccagcaccaggccagcagcctcatccctgc

SEQ ID NO: 588973 - DNA, 120 bp, Artificial Sequence
  ENSG00000172935_13 (sequence is synthesized)
cattcagggctgttccagagattcgatcctcttaaggcattatcagtgagcaaatgtgaaggaaatggtgtctggaagaaagttctggttcacatgccttgtagctaagtctttctgcaa

SEQ ID NO: 588974 - DNA, 120 bp, Artificial Sequence
  ENSG00000172935_14 (sequence is synthesized)
acaacctcccttccccccgtcgagtcatttggtgactttgatggggggatttctggttatgtcaaggctctggagacaggaagggcctttggccgccttgggtagttgacctgccttttc

SEQ ID NO: 588975 - DNA, 120 bp, Artificial Sequence
  ENSG00000172935_15 (sequence is synthesized)
tgactccgggacgagccagtcctaggctgcctccgggagcacttgaggtatcccgcaggccatgaggacccactgggcagctcctggacagcctcttggctccagcccccacccgaaagt

SEQ ID NO: 588976 - DNA, 120 bp, Artificial Sequence
  ENSG00000172935_16 (sequence is synthesized)
ggacactggctccgccctggccacctggggactggcactgtggtgcacagtggcccaatgtggccaacggaagttttataaaagacaaaatgtatatcaataaacattttataacttgca

SEQ ID NO: 588977 - DNA, 120 bp, Artificial Sequence
  ENSG00000172935_17 (sequence is synthesized)
gggctcctgagcggggcattccttcctgaagcctcatccccgctcagccctgctcagcccctcctcctactcccctccccctccccctcctgccgggccaggaattgggtttggggcggg

SEQ ID NO: 588978 - DNA, 120 bp, Artificial Sequence
  ENSG00000172935_18 (sequence is synthesized)
ctcccccatcccccccttcctggccccactttccagctctggacccaccgtgggcagtgggctcctctgggctatgtggccgggcacaagttccctggaccctcctaccctcctgtcctc

SEQ ID NO: 588979 - DNA, 120 bp, Artificial Sequence
  ENSG00000172935_19 (sequence is synthesized)
atcagtgaggcaagcaccaggactggacctcaaggtccctcgctgtgctgacactgtggtcgccttgtagcatccttgcaaggtcttgtttcatctcttccctgcagaggtggggcagtc

SEQ ID NO: 588980 - DNA, 120 bp, Artificial Sequence
  ENSG00000172935_20 (sequence is synthesized)
agctacttactacagccaggcgggccaggaagccctgggacgctgactccaaggtggccctgatgtcatgtgctccatggagcctagggggtcctgggccaccccgagagtgttgcccca

SEQ ID NO: 588981 - DNA, 120 bp, Artificial Sequence
  ENSG00000172936_0 (sequence is synthesized)
agattcctacttcttacgccccccacatcacccgcctcgagacctcaagggtagaggtgggcacccccgcctccgcacttttgctcggggctccagattgtagggcagggcggcgcttct

SEQ ID NO: 588982 - DNA, 120 bp, Artificial Sequence
  ENSG00000172936_1 (sequence is synthesized)
cggaaagcgaaagccggcggggcggggcgggtgccgcaggagaaagaggaagcgctggcagacaatgcgacccgaccgcgctgaggctccaggaccgcccgccatggctgcaggaggtcc

SEQ ID NO: 588983 - DNA, 120 bp, Artificial Sequence
  ENSG00000172936_2 (sequence is synthesized)
cggcgcggggtctgcggccccggtctcctccacatcctcccttcccctggctgctctcaacatgcgagtgcggcgccgcctgtctctgttcttgaacgtgcggacacaggtggcggccga

SEQ ID NO: 588984 - DNA, 120 bp, Artificial Sequence
  ENSG00000172936_3 (sequence is synthesized)
ctggaccgcgctggcggaggagatggactttgagtacttggagatccggcaactggagacacaagcggaccccactggcaggctgctggacgcctggcagggacgccctggcgcctctgt

SEQ ID NO: 588985 - DNA, 120 bp, Artificial Sequence
  ENSG00000172936_4 (sequence is synthesized)
aggccgactgctcgagctgcttaccaagctgggccgcgacgacgtgctgctggagctgggacccagcattgaggaggattgccaaaagtatatcttgaagcagcagcaggaggaggctga

SEQ ID NO: 588986 - DNA, 120 bp, Artificial Sequence
  ENSG00000172936_5 (sequence is synthesized)
gaagcctttacaggtggccgctgtagacagcagtgtcccacggacagcagagctggcgggcatcaccacacttgatgaccccctggggcatatgcctgagcgtttcgatgccttcatctg

SEQ ID NO: 588987 - DNA, 120 bp, Artificial Sequence
  ENSG00000172936_6 (sequence is synthesized)
ctattgccccagcgacatccagtttgtgcaggagatgatccggcaactggaacagacaaactatcgactgaagttgtgtgtgtctgaccgcgatgtcctgcctggcacctgtgtctggtc

SEQ ID NO: 588988 - DNA, 120 bp, Artificial Sequence
  ENSG00000172936_7 (sequence is synthesized)
tattgctagtgagctcatcgaaaagaggtgccgccggatggtggtggttgtctctgatgattacctgcagagcaaggaatgtgacttccagaccaaatttgcactcagcctctctccagg

SEQ ID NO: 588989 - DNA, 120 bp, Artificial Sequence
  ENSG00000172936_8 (sequence is synthesized)
tgcccatcagaagcgactgatccccatcaagtacaaggcaatgaagaaagagttccccagcatcctgaggttcatcactgtctgcgactacaccaacccctgcaccaaatcttggttctg

SEQ ID NO: 588990 - DNA, 120 bp, Artificial Sequence
  ENSG00000172936_9 (sequence is synthesized)
gactcgccttgccaaggccttgtccctgccctgaagactgttctgaggccctgggtgtgtgtgtatctgtctgcctgtccatgtacttctgccctgcctcctcctttcgttgtaggagga

SEQ ID NO: 588991 - DNA, 120 bp, Artificial Sequence
  ENSG00000172936_10 (sequence is synthesized)
atctgtgctctacttacctctcaattcctggagatgccaacttcacagacacgtctgcagcagctggacatcacatttcatgtcctgcatggaaccagtggctgtgagtggcatgtccac

SEQ ID NO: 588992 - DNA, 120 bp, Artificial Sequence
  ENSG00000172936_11 (sequence is synthesized)
catcttcaccctcagtttcctcacttgaggagtgggatggggagaacagagagtagctgtgtttgaatccctgtaggaaatggtgaagcatagctctgggtctcctgggggagaccaggc

SEQ ID NO: 588993 - DNA, 120 bp, Artificial Sequence
  ENSG00000172936_12 (sequence is synthesized)
ttggctgcgggagagctggctgttgctggactacatgctggccactgctgtgaccacgacactgctggggcagcttcttccacagtgatgcctactgatgcttcagtgcctctgcacacc

SEQ ID NO: 588994 - DNA, 120 bp, Artificial Sequence
  ENSG00000172936_13 (sequence is synthesized)
gcccattccacttcctccttccccacagggcaggtggggaagcagtttggcccagcccaaggagaccccaccttgagccttatttcctaatgggtccacctctcatctgcatctttcaca

SEQ ID NO: 588995 - DNA, 120 bp, Artificial Sequence
  ENSG00000172936_14 (sequence is synthesized)
cctcccagcttctgcccaaccttcagcagtgacaagtccccaagagactcgcctgagcagcttgggctgcttttcatttccacctgtcaggatgcctgtggtcatgctctcagctccacc

SEQ ID NO: 588996 - DNA, 120 bp, Artificial Sequence
  ENSG00000172936_15 (sequence is synthesized)
tggcatgagaagggatcctggcctctggcatattcatcaagtatgagttctggggatgagtcactgtaatgatgtgagcagggagccttcctccctgggccacctgcagagagctttccc

SEQ ID NO: 588997 - DNA, 120 bp, Artificial Sequence
  ENSG00000172936_16 (sequence is synthesized)
accaactttgtaccttgattgccttacaaagttatttgtttacaaacagcgaccatataaaagcctcctgccccaaagcttgtgggcacatgggcacatacagactcacatacagacaca

SEQ ID NO: 588998 - DNA, 120 bp, Artificial Sequence
  ENSG00000172936_17 (sequence is synthesized)
cacatatatgtacagacatgtactctcacacacacaggcaccagcatacacacgtttttctaggtacagctcccaggaacagctaggtgggaaagtcccatcactgagggagcctaacca

SEQ ID NO: 588999 - DNA, 120 bp, Artificial Sequence
  ENSG00000172936_18 (sequence is synthesized)
tgtccctgaacaaaaattgggcactcatctattccttttctcttgtgtccctactcattgaaaccaaactctggaaaggacccaatgtaccagtatttatacctctaatgaagcacagag

SEQ ID NO: 589000 - DNA, 120 bp, Artificial Sequence
  ENSG00000172936_19 (sequence is synthesized)
agaggaagagagctgcttaaactcacacaacaatgaactgcagacacagctgttctctccctctctccttcccagagcaatttatactttaccctcaggctgtcctctggggagaaggtg

SEQ ID NO: 589001 - DNA, 120 bp, Artificial Sequence
  ENSG00000172936_20 (sequence is synthesized)
ccatggtcttaggtgtctgtgccccaggacagaccctaggaccctaaatccaatagaaaatgcatatctttgctccactttcagccaggctggagcaaggtaccttttcttaggatcttg

SEQ ID NO: 589002 - DNA, 120 bp, Artificial Sequence
  ENSG00000172936_21 (sequence is synthesized)
ggagggaatggatgcccctctctgcatgatcttgttgaggcatttagctgccatgcacctgtccccctttaatactgggcattttaaagccatctcaagaggcatcttctacatgttttg

SEQ ID NO: 589003 - DNA, 120 bp, Artificial Sequence
  ENSG00000172936_22 (sequence is synthesized)
tacgcattaaaataatttcaaagatatctgagaaaagccgatatttgccattcttcctatatcctggaatatatcttgcatcctgagtttataataataaataatattctaccttggaaa

SEQ ID NO: 589004 - DNA, 120 bp, Artificial Sequence
  ENSG00000172936_23 (sequence is synthesized)
acacttgatgaccccctgggtaagggtccaatactgttcccatgggacaggtggaataggacattgtggtgttaagagcatgggtgtttgaagcagatgggctgtgagaccttgggcaag

SEQ ID NO: 589005 - DNA, 120 bp, Artificial Sequence
  ENSG00000172936_24 (sequence is synthesized)
tcacttaatctttctgagcctcagtttcctcacctaagaaatggagataatagtcctacctctggattgctgtgagatgctcatgaaataatgtctgtctcgtggttaatccagagctta

SEQ ID NO: 589006 - DNA, 120 bp, Artificial Sequence
  ENSG00000172936_25 (sequence is synthesized)
gcccctgaggtactcatctttcctctcctggaaagggcactttctctgaggagtatcatcttgggaagggtgcagggcccagggttgcctaggcaggggactcttggctggatccctccc

SEQ ID NO: 589007 - DNA, 120 bp, Artificial Sequence
  ENSG00000172936_26 (sequence is synthesized)
gccctgccctggggtccagatactgggcatctcctcctagctgtgcactgtccagcctgggcacagtgggcccttcctgaagctattcccaggggatatgctgaactaagttgccacagg

SEQ ID NO: 589008 - DNA, 120 bp, Artificial Sequence
  ENSG00000172936_27 (sequence is synthesized)
agagggagaaccatgcgggtcccgttccttcttaataaccggtcgcggttattaagaaggactggagaaaggtccggataggcggagatgggaaggaagcagcttaggcagaggctttca

SEQ ID NO: 589009 - DNA, 120 bp, Artificial Sequence
  ENSG00000172936_28 (sequence is synthesized)
acataatatacatgcataggcgttggatacagccgcccacagacaggcacaccttgctgagttggaatcactgcaccataaccagtgggtctcctgagcctttctggcatgcccagcccc

SEQ ID NO: 589010 - DNA, 120 bp, Artificial Sequence
  ENSG00000172936_29 (sequence is synthesized)
ttgctcacatctgccctggatcccagaagaagcagacctaccttggtaccattcttaggatccctaggaagggacagagatacaaacctgactttgatggccttccagaaagccagaaca

SEQ ID NO: 589011 - DNA, 120 bp, Artificial Sequence
  ENSG00000172936_30 (sequence is synthesized)
ccactgacatccctttgggtcagttagagccagtgggagctcaacttctcagagccgttgagcttcgcgtggcaccagtgaactggggaagccctctagaacaacccagccagaggaggt

SEQ ID NO: 589012 - DNA, 120 bp, Artificial Sequence
  ENSG00000172936_31 (sequence is synthesized)
gggacagcggctggatcctgactgtgggtaaagaggtaggcactcccagggaggctgctttactctgtctcttccccacagaggaggattgccaaaagtatatcttgaagcagcagcagg

SEQ ID NO: 589013 - DNA, 120 bp, Artificial Sequence
  ENSG00000172938_0 (sequence is synthesized)
atgaaccagactttgaatagcagtgggaccgtggagtcagccctaaactattccagagggagcacagtgcacacggcctacctggtgctgagctccctggccatgttcacctgcctgtgc

SEQ ID NO: 589014 - DNA, 120 bp, Artificial Sequence
  ENSG00000172938_1 (sequence is synthesized)
gggatggcaggcaacagcatggtgatctggctgctgggctttcgaatgcacaggaaccccttctgcatctatatcctcaacctggcggcagccgacctcctcttcctcttcagcatggct

SEQ ID NO: 589015 - DNA, 120 bp, Artificial Sequence
  ENSG00000172938_2 (sequence is synthesized)
tccacgctcagcctggaaacccagcccctggtcaataccactgacaaggtccacgagctgatgaagagactgatgtactttgcctacacagtgggcctgagcctgctgacggccatcagc

SEQ ID NO: 589016 - DNA, 120 bp, Artificial Sequence
  ENSG00000172938_3 (sequence is synthesized)
acccagcgctgtctctctgtcctcttccctatctggttcaagtgtcaccggcccaggcacctgtcagcctgggtgtgtggcctgctgtggacactctgtctcctgatgaacgggttgacc

SEQ ID NO: 589017 - DNA, 120 bp, Artificial Sequence
  ENSG00000172938_4 (sequence is synthesized)
ttctgcagcaagttcttgaaattcaatgaagatcggtgcttcagggtggacatggtccaggccgccctcatcatgggggtcttaaccccagtgatgactctgtccagcctgaccctcttt

SEQ ID NO: 589018 - DNA, 120 bp, Artificial Sequence
  ENSG00000172938_5 (sequence is synthesized)
gtctgggtgcggaggagctcccagcagtggcggcggcagcccacacggctgttcgtggtggtcctggcctctgtcctggtgttcctcatctgttccctgcctctgagcatctactggttt

SEQ ID NO: 589019 - DNA, 120 bp, Artificial Sequence
  ENSG00000172938_6 (sequence is synthesized)
gtgctctactggttgagcctgccgcccgagatgcaggtcctgtgcttcagcttgtcacgcctctcctcgtccgtaagcagcagcgccaaccccgtcatctacttcctggtgggcagccgg

SEQ ID NO: 589020 - DNA, 120 bp, Artificial Sequence
  ENSG00000172938_7 (sequence is synthesized)
aggagccacaggctgcccaccaggtccctggggactgtgctccaacaggcgcttcgcgaggagcccgagctggaaggtggggagacgcccaccgtgggcaccaatgagatgggggcttga

SEQ ID NO: 589021 - DNA, 120 bp, Artificial Sequence
  ENSG00000172939_0 (sequence is synthesized)
ggcccgtgcgtggggctggggtggagggcgggacagaggggctgggcccaggcaaagcttctgtcgctgctgctgcggaggccgaggacaggacgtgggctgggccgggcagtgccggac

SEQ ID NO: 589022 - DNA, 120 bp, Artificial Sequence
  ENSG00000172939_1 (sequence is synthesized)
tcggaggagcaggaggcgaggtccgccggagctctgagcccccgctgctctgccgcgcggtgaccccgcgccccggcgccgtccgacccgtggctgttccgagacgattggtgggggcgc

SEQ ID NO: 589023 - DNA, 120 bp, Artificial Sequence
  ENSG00000172939_2 (sequence is synthesized)
ggcggcggcggcggcggctgttgggggtggggagacgcgcggcgaggagacgagcgaggtcagcgagtttgagggaggaccgcgagccgctgccgccgtcatgtccgaggactcgagcgc

SEQ ID NO: 589024 - DNA, 120 bp, Artificial Sequence
  ENSG00000172939_3 (sequence is synthesized)
cctgccctggtccatcaacagggacgattacgagctgcaggaggtgatcgggagtggagcaactgctgtagtccaagcagcttattgtgcccctaaaaaggagaaagtggcaatcaaacg

SEQ ID NO: 589025 - DNA, 120 bp, Artificial Sequence
  ENSG00000172939_4 (sequence is synthesized)
gataaaccttgagaaatgtcaaactagcatggatgaactcctgaaagaaattcaagccatgagtcaatgccatcatcctaatattgtatcttactacacatcttttgtggtaaaagatga

SEQ ID NO: 589026 - DNA, 120 bp, Artificial Sequence
  ENSG00000172939_5 (sequence is synthesized)
gctgtggcttgtcatgaagctgctaagtggaggttctgttctggatattattaagcacattgtggcaaaaggggaacacaaaagtggagtcctagatgaatctaccattgctacgatact

SEQ ID NO: 589027 - DNA, 120 bp, Artificial Sequence
  ENSG00000172939_6 (sequence is synthesized)
ccgagaagtactggaagggctggaatatctgcataaaaatggacagatccacagagatgtgaaagctggaaacattcttcttggagaagatggctcagtacagattgcagactttggggt

SEQ ID NO: 589028 - DNA, 120 bp, Artificial Sequence
  ENSG00000172939_7 (sequence is synthesized)
tagtgcttttttagcaactggtggtgatattacccgaaataaagtgagaaagacctttgttggcaccccttgttggatggcacctgaagttatggaacaggtccgtggttatgatttcaa

SEQ ID NO: 589029 - DNA, 120 bp, Artificial Sequence
  ENSG00000172939_8 (sequence is synthesized)
agctgatatttggagttttggaattacagcaattgaattggctacaggggcggctccttatcataaatatccaccaatgaaggttttaatgctgacactgcagaacgatcctccttcttt

SEQ ID NO: 589030 - DNA, 120 bp, Artificial Sequence
  ENSG00000172939_9 (sequence is synthesized)
ggaaactggtgttcaagataaagaaatgctgaaaaaatatggaaaatcatttagaaaaatgatttcattgtgccttcaaaaagatccagaaaaaagaccaacagcagcagaactattaag

SEQ ID NO: 589031 - DNA, 120 bp, Artificial Sequence
  ENSG00000172939_10 (sequence is synthesized)
gcacaaatttttccagaaagcaaagaataaagaatttcttcaagaaaaaacattgcagagagcaccaaccatttctgaaagagcaaaaaaggttcggagagtaccaggttccagtgggcg

SEQ ID NO: 589032 - DNA, 120 bp, Artificial Sequence
  ENSG00000172939_11 (sequence is synthesized)
tcttcataagacagaggatggaggctgggagtggagtgatgatgaatttgatgaagaaagtgaggaagggaaagcagcaatttcacaactcaggtctccccgagtgaaagaatcaatatc

SEQ ID NO: 589033 - DNA, 120 bp, Artificial Sequence
  ENSG00000172939_12 (sequence is synthesized)
aaattctgagctctttccaacaactgatcctgtgggtactttgctccaagttccagaacagatctctgctcatctacctcagccagctgggcagattgctacacagccaactcaagtctc

SEQ ID NO: 589034 - DNA, 120 bp, Artificial Sequence
  ENSG00000172939_13 (sequence is synthesized)
tctcccacccaccgcagagccagcaaaaacagctcaggctttgtcttcaggatcaggttcacaagaaaccaagatcccaatcagtctagtactaagattaaggaattccaaaaaagaact

SEQ ID NO: 589035 - DNA, 120 bp, Artificial Sequence
  ENSG00000172939_14 (sequence is synthesized)
aaatgatattcgatttgaatttactcctgggagagatacagcagagggtgtctctcaggaactcatttctgctggcctggtcgacggaagggatttagtaatagtggcagctaatttgca

SEQ ID NO: 589036 - DNA, 120 bp, Artificial Sequence
  ENSG00000172939_15 (sequence is synthesized)
gaaaattgtggaagaacctcagtcaaatcgatctgtcactttcaaactggcatctggtgtcgaaggctcagatattcctgatgatggtaaactgataggatttgcccagctcagcatcag

SEQ ID NO: 589037 - DNA, 120 bp, Artificial Sequence
  ENSG00000172939_16 (sequence is synthesized)
ctaaaccacaaccctggaagaggcggcctaaggagattccacacatgcgtatctctgttgcttctattggcctaaacccactactgccaaagaacccagcaacaaacctcccggctagga

SEQ ID NO: 589038 - DNA, 120 bp, Artificial Sequence
  ENSG00000172939_17 (sequence is synthesized)
gctttagaagtctttatgttcttcctgccatcattcctccttttcccacagggaaagaaaagttggatcactagtggccagcatccccagagttccgttagtaaacttacttcatatgtc

SEQ ID NO: 589039 - DNA, 120 bp, Artificial Sequence
  ENSG00000172939_18 (sequence is synthesized)
tactccaatgatggcccaggtggaaaagtagcagctgtatcgggcttcctcatcctgcctgttcccccacacctgccaggatatggacatcttgggatatctctttaccactgaagtaga

SEQ ID NO: 589040 - DNA, 120 bp, Artificial Sequence
  ENSG00000172939_19 (sequence is synthesized)
attgattgttcagctggagcccagagaatttaatttaatgttttttctttgtacctgatgtgaattctagcaacctttgttaggaaaaagcacagcctcagatggaggcagcctaaactg

SEQ ID NO: 589041 - DNA, 120 bp, Artificial Sequence
  ENSG00000172939_20 (sequence is synthesized)
tgttcttgttttgttcatggtgtttctaagcgttttgctgaagctgctctcaggcacccccttcttcattgctctctccagaaagggttgctagccttaacttcagctggtgcaaaacat

SEQ ID NO: 589042 - DNA, 120 bp, Artificial Sequence
  ENSG00000172939_21 (sequence is synthesized)
ctgactgtagccgaacttcagccatcagatccttcaaagtggaactttggattgtttttacagacaacatcgagtaatggcttgtaaatgtgaattttgccagaggtggtttttgaacag

SEQ ID NO: 589043 - DNA, 120 bp, Artificial Sequence
  ENSG00000172939_22 (sequence is synthesized)
gaaaatcataattcatatcattggagaagtatttattttcaaatatcaaattgaagaaaaactcaatcctcccatgaaaatcagttcgcctggcctccaagtcgtgaggaaatgggtatg

SEQ ID NO: 589044 - DNA, 120 bp, Artificial Sequence
  ENSG00000172939_23 (sequence is synthesized)
caaggctgagatttctacagcaataaaggagacacacactgggccagagaggcctgccttctgcctgctctcctgcactgaccctttggagggggtctctgtgtgctgaagctaactcaa

SEQ ID NO: 589045 - DNA, 120 bp, Artificial Sequence
  ENSG00000172939_24 (sequence is synthesized)
gatggaaagtgaaaccacatgtgccgtgacctttaggttttatgagtagacagtgttcatttgattttctacagaaataatataaattattctttaggtttaaaaaagagcactcataat

SEQ ID NO: 589046 - DNA, 120 bp, Artificial Sequence
  ENSG00000172939_25 (sequence is synthesized)
gcaatatgtgaataatcagtgaggttgatttttcttttttcctaccgtttcatagtctttgtctaactgctagtaaccctaccgagttttatatatgagtgggatactcaatctggcctt

SEQ ID NO: 589047 - DNA, 120 bp, Artificial Sequence
  ENSG00000172939_26 (sequence is synthesized)
aaaaagatacacaaagatgggctgtgggtccctggaaagggggagagttgccctttacagaatcactcgagccctttccagcactgttggtctgatgaacaaggttgttttaccttattt

SEQ ID NO: 589048 - DNA, 120 bp, Artificial Sequence
  ENSG00000172939_27 (sequence is synthesized)
tctcttggaacatatctgaaaaccttccccacaaataacttgtcacaccttttgtttcattctgagtctttagttttagtcatgggctttcttcacctgctctaggtgcaaaggcatgtt

SEQ ID NO: 589049 - DNA, 120 bp, Artificial Sequence
  ENSG00000172939_28 (sequence is synthesized)
gggaaagagatggatgttggggaggaagagaggagatggatttcagttgggagttaggaggagagtaggtgagatgatcagacaccggagttcaacgtcccagcagtcttggtaaaagga

SEQ ID NO: 589050 - DNA, 120 bp, Artificial Sequence
  ENSG00000172939_29 (sequence is synthesized)
gggagcctgctgagccaggagggagaaaagaagattgaccagcttgctagaaaaatacttagcttttctttttctttttttgtggaggggggacggagaggaacaaggatggggaggtag

SEQ ID NO: 589051 - DNA, 120 bp, Artificial Sequence
  ENSG00000172939_30 (sequence is synthesized)
gaatgaggtatagaaaagagatagcatcttctttggcacaagactagtggcttaccgcttaccttagagttttgttttttttttttcaaacccatcaaaatctacttatttatgaatcca

SEQ ID NO: 589052 - DNA, 120 bp, Artificial Sequence
  ENSG00000172939_31 (sequence is synthesized)
aggggtggcagcatcactctgttctagcattctttgtggagatggtctggtgcctagctgggagtgagcagcagcccatcccctgttcactttctctagcccatcattacctgtgaactg

SEQ ID NO: 589053 - DNA, 120 bp, Artificial Sequence
  ENSG00000172939_32 (sequence is synthesized)
cagtggggcagtcatggcaaatagaattgggctggggtttctccttcttttcagttcattgtttgccctgctaggaattagaagacagacaccatgtcccaggacagtgttacttcttct

SEQ ID NO: 589054 - DNA, 120 bp, Artificial Sequence
  ENSG00000172939_33 (sequence is synthesized)
gcatgatgtgtggtagactccctttgctggcttgtgcagtgatactgagaaaatacatgaacagaaactgcccaggtggaacagcacgtaacctagtgagtgactgtactcctttctagg

SEQ ID NO: 589055 - DNA, 120 bp, Artificial Sequence
  ENSG00000172939_34 (sequence is synthesized)
aatgctgattcagagtgcacctctttgactaggtcccaggatccccttgtccctggagtagggactaactatagcacaaagtaatatgtgccaatgctatttgtgaaatgtttggtcttt

SEQ ID NO: 589056 - DNA, 120 bp, Artificial Sequence
  ENSG00000172939_35 (sequence is synthesized)
ctaaacgactaaaggatttgttgggtttttgcttaagttttgaaccaaatcctagagccagctgataatatttaataatctggaggagagaataatgatgtaccaataagtggagattcc

SEQ ID NO: 589057 - DNA, 120 bp, Artificial Sequence
  ENSG00000172939_36 (sequence is synthesized)
tccttatgatgtatgctaggttatggaagatgtaaaatattcaactttttcctcctttttttggactttgtattttactgcatgttttcttcatttttaatcaataaagagtaaattgtc

SEQ ID NO: 589058 - DNA, 120 bp, Artificial Sequence
  ENSG00000172939_37 (sequence is synthesized)
tgtgattcaatgaaatgtgttgtgaagtttctgtcctttgtgaagttttgcttttaaaggataataaaaattttcctggttttggcgagtatatgagtgagataaaaatgcagttcgttg

SEQ ID NO: 589059 - DNA, 120 bp, Artificial Sequence
  ENSG00000172939_38 (sequence is synthesized)
ttcctgaagaatttactttatttttgcattttgaaaacatgttaagtaatacattgttaatagtatatgagaattactggttttctgtcgatcctttctaaagcattctttgatacattc

SEQ ID NO: 589060 - DNA, 120 bp, Artificial Sequence
  ENSG00000172939_39 (sequence is synthesized)
attcagcaaatatctttggtctaccatatgccttggtattactctgctatcttttaggatgaaaagggatgctagacagtaattggtaaattaattctaaactctgtttgataactgttt

SEQ ID NO: 589061 - DNA, 120 bp, Artificial Sequence
  ENSG00000172939_40 (sequence is synthesized)
gaagggctgcagccctaacacggagaagcgcgctaagagcctggaggcgggaccaatttatgactgacgtctacccacacccattgcttttctgattccttctcaaacaaaccaatgaat

SEQ ID NO: 589062 - DNA, 120 bp, Artificial Sequence
  ENSG00000172939_41 (sequence is synthesized)
aggctctcctacggcttttcgatgccttcgatgaacctctacctaagcacttcttccctttcaccgcgaactcctaccttctcgggtttctagcttgctcactttacatccagccacact

SEQ ID NO: 589063 - DNA, 120 bp, Artificial Sequence
  ENSG00000172939_42 (sequence is synthesized)
ggagatggcggccggaggcgggcccgaggtggggcgtgaccagcgcagtgacgtcagcgcgctgcgtgtcggcagggagtggagcaactgctgtagtccaagcagcttattgtgccccta

SEQ ID NO: 589064 - DNA, 120 bp, Artificial Sequence
  ENSG00000172939_43 (sequence is synthesized)
gagattgtcaacagagagcaggtgatggttggaggatatgaatttgtatgggaacatttatggggaaaatgattatctacttaatggattgaagtgatagaagaagagagaaatatggag

SEQ ID NO: 589065 - DNA, 120 bp, Artificial Sequence
  ENSG00000172939_44 (sequence is synthesized)
atatgagaaaaagtctacttttctctctaataaaacattgtgagaagtctaagaatcacatactcatatgtacaggaaattattttcaaaagaactaaatataaactttaaaaaagtata

SEQ ID NO: 589066 - DNA, 120 bp, Artificial Sequence
  ENSG00000172939_45 (sequence is synthesized)
cagagaccattatactggattggaaatgaattgatttctgccttctttgtagtatacagtgtaccctaaatagttcagctttttccttgttaatttcttacaaagttgtacattgtgaat

SEQ ID NO: 589067 - DNA, 120 bp, Artificial Sequence
  ENSG00000172939_46 (sequence is synthesized)
tctgtattaataaatgccaagttagtggagagatttgtttttaatttgcatttaaaatttataaatgaatgtcttaatgccatttacagtattaataaaggaaagacacatagaaaattt

SEQ ID NO: 589068 - DNA, 120 bp, Artificial Sequence
  ENSG00000172940_0 (sequence is synthesized)
acagagctaccctagtgtccccaggctgaggaggtagtgactggcatacatggctcagtttgtccaggtcctggctgaaataggtgactttggtcgcttccagatacagctattgatcct

SEQ ID NO: 589069 - DNA, 120 bp, Artificial Sequence
  ENSG00000172940_1 (sequence is synthesized)
gctgtgtgttctcaacttcctgtctcccttctacttttttgcccatgtcttcatggtcctagatgagccccaccactgtgcagtggcttgggtgaagaaccacactttcaacctgagtgc

SEQ ID NO: 589070 - DNA, 120 bp, Artificial Sequence
  ENSG00000172940_2 (sequence is synthesized)
tgctgaacagctggtactgagcgtgcccctggacactgcaggtcacccagagccctgcctcatgttccggccaccccccgccaatgccagcctgcaggacatcctcagccaccgcttcaa

SEQ ID NO: 589071 - DNA, 120 bp, Artificial Sequence
  ENSG00000172940_3 (sequence is synthesized)
tgagacgcagccttgtgatatgggctgggaatatcctgagaacaggctcccatccctgaagaatgagttcaacctggtttgtgatcggaagcacctgaaggacaccacacagtcagtgtt

SEQ ID NO: 589072 - DNA, 120 bp, Artificial Sequence
  ENSG00000172940_4 (sequence is synthesized)
catggctgggctccttgttggcaccctcatgtttgggcccctctgcgaccggattggccgcaaggccacaatcctggcgcagctgctcctcttcaccctcatcggcctggccacagcttt

SEQ ID NO: 589073 - DNA, 120 bp, Artificial Sequence
  ENSG00000172940_5 (sequence is synthesized)
tgtgcccagctttgagctctacatggccctgcgctttgctgtggctactgccgtcgctggacttagcttcagcaatgtcaccctactgacagaatgggtggggccctcatggaggacgca

SEQ ID NO: 589074 - DNA, 120 bp, Artificial Sequence
  ENSG00000172940_6 (sequence is synthesized)
ggccgtggtcctggcccagtgcaacttctccctcgggcagatggtgcttgcgggactcgcctacggtttccgcaactggaggctccttcagatcaccggcactgcgcctggcttactgct

SEQ ID NO: 589075 - DNA, 120 bp, Artificial Sequence
  ENSG00000172940_7 (sequence is synthesized)
cttcttctacttctgggctctgccagaatctgcacgttggctcctgacccgtgggaggatggacgaggcgatacaactgatccagaaggcggcctcggtcaataggcggaaactctcccc

SEQ ID NO: 589076 - DNA, 120 bp, Artificial Sequence
  ENSG00000172940_8 (sequence is synthesized)
ggagctcatgaaccagctggtcccagagaagacaggcccctcagggaatgccctggatctgttcagacacccccagctccggaaggtgaccctgattatcttctgtgtctggtttgtgga

SEQ ID NO: 589077 - DNA, 120 bp, Artificial Sequence
  ENSG00000172940_9 (sequence is synthesized)
cagtctggggtactacggcctgagcctccaagtgggggacttcggcctggacgtctatctgacgcagctcatctttggagctgttgaggtgcctgcccgctgttccagcatcttcatgat

SEQ ID NO: 589078 - DNA, 120 bp, Artificial Sequence
  ENSG00000172940_10 (sequence is synthesized)
gcagaggtttggccgcaagtggagccagttggggaccttggtcttgggtggcctgatgtgtatcatcatcatcttcatcccagcagatctgcccgtggtggtcaccatgctggctgtggt

SEQ ID NO: 589079 - DNA, 120 bp, Artificial Sequence
  ENSG00000172940_11 (sequence is synthesized)
ggggaagatggccacagctgctgcctttaccatctcctatgtgtactctgccgagcttttccccaccatcctccggcagacaggcatggggctggtgggcatcttctcacggatcggggg

SEQ ID NO: 589080 - DNA, 120 bp, Artificial Sequence
  ENSG00000172940_12 (sequence is synthesized)
tggccagggcctgaaagacaccctccaggacctggagctggggcctcacccacggtcccccaaatcagtgccctcagagaaggaaacagaggccaagggaagaacttccagcccgggagt

SEQ ID NO: 589081 - DNA, 120 bp, Artificial Sequence
  ENSG00000172940_13 (sequence is synthesized)
ggcctttgtgagcagcacatacttctgattgaggtctctaagagctggaccatcagcagcagggagctgcctaaacacctccttggatatggccaggacccacagggacacagggcaaga

SEQ ID NO: 589082 - DNA, 120 bp, Artificial Sequence
  ENSG00000172940_14 (sequence is synthesized)
ccagccttgcttatggaggcaggacaccacaatctggcccatggctgtcacctcctgccgagtccaatcccagactgggaaccaccatctgagacaggacctcccggcctccttcacctt

SEQ ID NO: 589083 - DNA, 120 bp, Artificial Sequence
  ENSG00000172940_15 (sequence is synthesized)
tctcatctccagagccctgcccccaatactctgtctgggttaggatcttgggtatgtcttggaattaacttgtcctctaacaatcttcatggggtatggctctcttgatctcctcaatct

SEQ ID NO: 589084 - DNA, 120 bp, Artificial Sequence
  ENSG00000172940_16 (sequence is synthesized)
ggagtcccctgccctcaaaacacagtgatgttcagaacagaacacaaggtaagccctttccaatttgtgggaacaggaggggagaggaaacaaatgtgaagttgtggactctacccaggc

SEQ ID NO: 589085 - DNA, 120 bp, Artificial Sequence
  ENSG00000172940_17 (sequence is synthesized)
aggtggatgaaaatgctgtggataaaaggaaggttatgattccttctagcggatggaccagattcctctggctaacgtatggccccataggtcactgggtcatacagagagaagattcag

SEQ ID NO: 589086 - DNA, 120 bp, Artificial Sequence
  ENSG00000172940_18 (sequence is synthesized)
ttcagcctaaatcaaaacttccaccttgtgttcacttcaaagatggcccaacccccgccctacactcagctcatgcctaacctatgtgtggctcagggaccagcttggggaaggaaagga

SEQ ID NO: 589087 - DNA, 120 bp, Artificial Sequence
  ENSG00000172940_19 (sequence is synthesized)
ggtttgttctgctccccgcctcaccccgcctcctcctgctcatgctcagctgcttctggaccttccagggcccatgcagggtgagggaaagggtagaggtcttttcaccgagctgctgct

SEQ ID NO: 589088 - DNA, 120 bp, Artificial Sequence
  ENSG00000172940_20 (sequence is synthesized)
ggttgcagttctttctggtgcacattggctaatgccagttggtgtgttttgtcaggcttctgaaagctgccttttccacgggccatcttcttgggcttctcagagatcttctcaggcctt

SEQ ID NO: 589089 - DNA, 120 bp, Artificial Sequence
  ENSG00000172940_21 (sequence is synthesized)
ggtattgttccttagaatgagcaatatgctcccaatgcactcccagctcctcttgggacccttctccagccccacccagcattgctcctacaacctgtcctacagctggcagcccctgac

SEQ ID NO: 589090 - DNA, 120 bp, Artificial Sequence
  ENSG00000172940_22 (sequence is synthesized)
gaggtttggccgcaagtggagccagttggggaccttggtcttgggtggcctgatgtgtatcatcatcatcttcatcccagcaggcagacaggcatggggctggtgggcatcttctcacgg

SEQ ID NO: 589091 - DNA, 120 bp, Artificial Sequence
  ENSG00000172943_0 (sequence is synthesized)
gcggccgccagactaggcccaagccgcggtctccagtaggcccgaacggccgggccgaggggaatgttgtggaggaggctgctctgaagcaccgttgagcggctggcgccgcgcgaccca

SEQ ID NO: 589092 - DNA, 120 bp, Artificial Sequence
  ENSG00000172943_1 (sequence is synthesized)
gcggggggctcgaggggaaggcgagcgaggttcccggcggtacggggactatcccagaattcgacgcgcgtcgccgtaggggccggaactaccggacgagcctccgctgaggcgcttcgc

SEQ ID NO: 589093 - DNA, 120 bp, Artificial Sequence
  ENSG00000172943_2 (sequence is synthesized)
agtcccggagctagcccggctgccggcgtgtcgctggggctgagctccgcgggcgtggagtccttgcagcccaaagcatgaggaggtccctgtaggattctggactgaagacgttcttgt

SEQ ID NO: 589094 - DNA, 120 bp, Artificial Sequence
  ENSG00000172943_3 (sequence is synthesized)
caggtttggggcgtgaggaggttcctgtcagttggggaagcgttaagattcctctatcgtccagagaggacgcgtgctgccgcctcccgcccctcttgacacgacgaacctggccggccg

SEQ ID NO: 589095 - DNA, 120 bp, Artificial Sequence
  ENSG00000172943_4 (sequence is synthesized)
cagaacgctccagggccgagcgaagatggcctcggtgccggtgtattgcctctgccggctgccttacgatgtgacccgcttcatgatcgagtgtgacatgtgccaggactggtttcatgg

SEQ ID NO: 589096 - DNA, 120 bp, Artificial Sequence
  ENSG00000172943_5 (sequence is synthesized)
cagttgtgttggtgttgaagaggagaaggctgctgacattgacctctaccactgccccaactgtgaagtcttgcatgggccctccattatgaaaaaacgccgtggatcttcaaaggggca

SEQ ID NO: 589097 - DNA, 120 bp, Artificial Sequence
  ENSG00000172943_6 (sequence is synthesized)
tgatacacacaaggggaaaccagtgaagaccgggagccctacgttcgtcagagagctccggagtaggacttttgacagctcagatgaagtgattctgaagcccactggaaatcaactgac

SEQ ID NO: 589098 - DNA, 120 bp, Artificial Sequence
  ENSG00000172943_7 (sequence is synthesized)
cgtggaattcctggaagaaaatagcttcagtgtgcccatcctggtcctgaagaaggatgggttgggcatgacgctgccctcgccatcattcactgtgagggatgttgaacactatgttgg

SEQ ID NO: 589099 - DNA, 120 bp, Artificial Sequence
  ENSG00000172943_8 (sequence is synthesized)
ttctgacaaagagattgatgtgattgatgtgacccgccaggctgactgcaagatgaagcttggtgattttgtgaaatactattacagcgggaagagggagaaagtcctcaatgtcattag

SEQ ID NO: 589100 - DNA, 120 bp, Artificial Sequence
  ENSG00000172943_9 (sequence is synthesized)
tttggaattctctgataccagactttctaaccttgtggagacaccgaagattgttcgaaagctgtcatgggtcgaaaacttgtggccagaggaatgtgtctttgagagacccaatgtaca

SEQ ID NO: 589101 - DNA, 120 bp, Artificial Sequence
  ENSG00000172943_10 (sequence is synthesized)
gaagtactgcctcatgagtgtgcgagatagctatacagactttcacattgactttggtggcacctctgtctggtaccatgtactcaagggtgaaaagatcttctacctgatccgcccaac

SEQ ID NO: 589102 - DNA, 120 bp, Artificial Sequence
  ENSG00000172943_11 (sequence is synthesized)
aaatgccaatctgactctctttgagtgctggagcagttcctctaatcagaatgagatgttctttggggaccaggtggacaagtgctacaagtgttccgtgaagcaaggacagacactttt

SEQ ID NO: 589103 - DNA, 120 bp, Artificial Sequence
  ENSG00000172943_12 (sequence is synthesized)
cattcccacagggtggatccatgctgtgctgacgcctgtggactgccttgcctttggagggaacttcttacacagccttaacatcgagatgcagctcaaagcctatgagattgagaagcg

SEQ ID NO: 589104 - DNA, 120 bp, Artificial Sequence
  ENSG00000172943_13 (sequence is synthesized)
gctgagcacagcagacctcttcagattccccaactttgagaccatctgttggtatgtgggaaagcacatcctggacatctttcgcggtttgcgagagaacaggagacaccctgcctccta

SEQ ID NO: 589105 - DNA, 120 bp, Artificial Sequence
  ENSG00000172943_14 (sequence is synthesized)
cctggtccatggtggcaaagccttgaacttggcctttagagcctggacaaggaaagaagctctgccagaccatgaggatgagatcccggagacagtgcgaaccgtacagctcattaaaga

SEQ ID NO: 589106 - DNA, 120 bp, Artificial Sequence
  ENSG00000172943_15 (sequence is synthesized)
tctggccagggagatccgcctggtggaagacatcttccaacagaacgttgggaagacgagcaatatctttgggctgcagaggatcttcccagccggctccattcccctaaccaggccagc

SEQ ID NO: 589107 - DNA, 120 bp, Artificial Sequence
  ENSG00000172943_16 (sequence is synthesized)
ccattccacttcagtgtccatgtccaggctgtcactgccctccaaaaatggttcaaagaagaaaggcctgaagcccaaggaactcttcaagaaggcagagcgaaagggcaaggagagttc

SEQ ID NO: 589108 - DNA, 120 bp, Artificial Sequence
  ENSG00000172943_17 (sequence is synthesized)
agccttggggcctgctggccagttgagctataatctcatggacacatacagtcatcaggcactgaagacaggctctttccagaaagcaaagttcaacatcactggtgcctgcttgaatga

SEQ ID NO: 589109 - DNA, 120 bp, Artificial Sequence
  ENSG00000172943_18 (sequence is synthesized)
ctcagatgacgactcaccagacttggaccttgatggaaatgagagcccattggccctattgatgtctaacggcagtacgaaaagggtgaagagtttatccaaatctcggcgaaccaagat

SEQ ID NO: 589110 - DNA, 120 bp, Artificial Sequence
  ENSG00000172943_19 (sequence is synthesized)
agcaaagaaggtagacaaggctaggctgatggcagaacaggtgatggaagacgaatttgacttggattcagatgatgagctgcagattgacgagagattgggaaaggagaaggcgaccct

SEQ ID NO: 589111 - DNA, 120 bp, Artificial Sequence
  ENSG00000172943_20 (sequence is synthesized)
gataataagaccaaaatttccccggaaattgccccgtgcgaagccttgctctgaccccaaccgagttcgtgaaccaggagaagttgagtttgacattgaggaggactatacaacagatga

SEQ ID NO: 589112 - DNA, 120 bp, Artificial Sequence
  ENSG00000172943_21 (sequence is synthesized)
ggacatggtggaaggggttgaaggcaagcttgggaatggtagtggcgctggtggcattcttgatctgctcaaggccagcaggcaggtggggggacctgactatgctgccctcaccgaggc

SEQ ID NO: 589113 - DNA, 120 bp, Artificial Sequence
  ENSG00000172943_22 (sequence is synthesized)
cccagcttctcccagcactcaggaggccatccagggcatgctgtgcatggccaacctgcagtcctcatcgtcctcaccggctacctctagcctgcaggcctggtggactgggggacagga

SEQ ID NO: 589114 - DNA, 120 bp, Artificial Sequence
  ENSG00000172943_23 (sequence is synthesized)
tcgaagcagtgggagctccagcagtgggctgggcacagtgtctaacagtcctgcttcccagcgcaccccagggaagcggcccatcaagcggccagcatactggagaaccgagagcgagga

SEQ ID NO: 589115 - DNA, 120 bp, Artificial Sequence
  ENSG00000172943_24 (sequence is synthesized)
ggaggaggagaacgccagtctggatgaacaggacagcttgggagcgtgcttcaaggatgcagagtatatctatccttcactggagtctgatgatgatgaccctgctttgaaatctcgacc

SEQ ID NO: 589116 - DNA, 120 bp, Artificial Sequence
  ENSG00000172943_25 (sequence is synthesized)
tgccgaagcaggaccgtcctgtgcgtgaggggacccgggtagcctctattgagacaggtttggctgcagcagctgcaaagctggcccagcaggagctacagaaggcccaaaagaagaaat

SEQ ID NO: 589117 - DNA, 120 bp, Artificial Sequence
  ENSG00000172943_26 (sequence is synthesized)
atatcaagaagaagcctttgctgaaggaggtagaacagcctcgccctcaagactccaatctcagtctgacagtaccagcccccactgtggctgccacaccacaacttgtcacctcctcct

SEQ ID NO: 589118 - DNA, 120 bp, Artificial Sequence
  ENSG00000172943_27 (sequence is synthesized)
cacccctgcctcctcctgagcctaaacaagaggccctgtcaggaagtctcgctgaccatgagtacaccgctcgtcccaatgcctttggcatggcccaggcaaaccgcagcaccacaccta

SEQ ID NO: 589119 - DNA, 120 bp, Artificial Sequence
  ENSG00000172943_28 (sequence is synthesized)
tggcccccggtgtcttcttgacccagcggcgcccttcagttggctcccagagcaatcaggcaggacaaggaaagcgtcccaaaaagggcctggccacagcaaagcagagactcggccgta

SEQ ID NO: 589120 - DNA, 120 bp, Artificial Sequence
  ENSG00000172943_29 (sequence is synthesized)
tcctgaaaatccacagaaatggcaaactacttctgtgagccctcctgtgtcccacccctcacccctttacccccattgccttctccattgtcaactcttggggcactcctggatcctatc

SEQ ID NO: 589121 - DNA, 120 bp, Artificial Sequence
  ENSG00000172943_30 (sequence is synthesized)
tgccctggacaaggtgctgaggtgcattgtcctgctttcttgggacttaccaaaggcacggacccctccaccgactccttctagttcccttccccactttcactagagcatcctgcctgc

SEQ ID NO: 589122 - DNA, 120 bp, Artificial Sequence
  ENSG00000172943_31 (sequence is synthesized)
cttctccactgaggagcaggtaaatgggagaggtttccagctgactagaaccctcttttctactcgtccaaaccactcccgtcacctgccttgtctgttctttattcttcatcccccgct

SEQ ID NO: 589123 - DNA, 120 bp, Artificial Sequence
  ENSG00000172943_32 (sequence is synthesized)
agagctggaaggcaggatgaggagaggtatgaaggagcctgagccatgaagtgggaagcccagtgcttgacactttctgcaactctagccctatatccagaagcctgcccacctccaccc

SEQ ID NO: 589124 - DNA, 120 bp, Artificial Sequence
  ENSG00000172943_33 (sequence is synthesized)
attctgtttgccccatttccccagtccagtggacatgccccacctccagacttgctcatgggagaaggctgtggtctctgccccctcttgccaaatgcttcatggaaatgaagaggaagg

SEQ ID NO: 589125 - DNA, 120 bp, Artificial Sequence
  ENSG00000172943_34 (sequence is synthesized)
cctagagcctccttcctgccccactgtgggccatttccagaagtggcctagaaatgccaacttcacttacctttcaaaagaaaggtgattcctatcacttgtcaaggtagggagaggtca

SEQ ID NO: 589126 - DNA, 120 bp, Artificial Sequence
  ENSG00000172943_35 (sequence is synthesized)
gatgcccaagcctttgaccacggttttgtagcctgttggaggaagctacttttagctggctacacatgaggccacttgttttagggtgagctccagggatttgcctggattttgaaatca

SEQ ID NO: 589127 - DNA, 120 bp, Artificial Sequence
  ENSG00000172943_36 (sequence is synthesized)
tgtagaacattatccacgtggctgtggctgtggctgtggctgggccctggcaggtggaaaaccatctcccagaaacctgaaagcacctgccaatgacgcagataaccctggccctacagc

SEQ ID NO: 589128 - DNA, 120 bp, Artificial Sequence
  ENSG00000172943_37 (sequence is synthesized)
ctgcttgctccgcctataccacagagcacagcctggacattatggagggtgtggcgggacggcccacacctgggtcctccatcgggaacttttcatgcttctttctccacctgaggtctt

SEQ ID NO: 589129 - DNA, 120 bp, Artificial Sequence
  ENSG00000172943_38 (sequence is synthesized)
ggtctgaagaagacctcaggactcacatcttcactcctgggcctttgcacttccagacgacaggtcatcgttcaagcagaatgcagacaggccattcacgagcccaagttgaagagaaga

SEQ ID NO: 589130 - DNA, 120 bp, Artificial Sequence
  ENSG00000172943_39 (sequence is synthesized)
gacgcccatccgtgaaggagcagaccatccatccgatcctccccttcccctgtccttccttcgtggattgtctccattgtccagacagtgcccccacctcccaccgccttgcctcactgg

SEQ ID NO: 589131 - DNA, 120 bp, Artificial Sequence
  ENSG00000172943_40 (sequence is synthesized)
caatctggactcgatggagaacatccccccacctccatttggcactacccaagtggagtgtacccttgccctttccacctgtaccacccactccaacctcaccccagcttgcccaatgct

SEQ ID NO: 589132 - DNA, 120 bp, Artificial Sequence
  ENSG00000172943_41 (sequence is synthesized)
tctggggaatttaatagctaccatgcaggccacagggaatttgtgaggcttcttttgtcatctttgtatctccagtttgtctttcttttctccatagccctgcctctactttccttcctt

SEQ ID NO: 589133 - DNA, 120 bp, Artificial Sequence
  ENSG00000172943_42 (sequence is synthesized)
ggaatcaggggttcctttagcccatttgctttctctaccttggggaccccaggggccaagcagttctccatctagtcacaccaaaggcaaaaagcctggctacctcccccctagcacgtg

SEQ ID NO: 589134 - DNA, 120 bp, Artificial Sequence
  ENSG00000172943_43 (sequence is synthesized)
agtccctactcccctcccctctgtttctgcccagctttgcttattttggggatttcaaggcagcagagggtagtgaggggagagcaggagaagcctctgtcctgtataggcaactgcctg

SEQ ID NO: 589135 - DNA, 120 bp, Artificial Sequence
  ENSG00000172943_44 (sequence is synthesized)
actatgcggtgactgctgtaaccaagatcaggtccccagcccttttgtccattaacaccccttcttgatctttcaaaggcagctaattgctagcaaatccccccgattccggccttttcc

SEQ ID NO: 589136 - DNA, 120 bp, Artificial Sequence
  ENSG00000172943_45 (sequence is synthesized)
ctctatttctttgttagaagttttctgtggagctgaaacccagcctctgtttgactgggtttcatttagcttagttgggttcttagagccccctgtttgttgttttgtgttgtttccaat

SEQ ID NO: 589137 - DNA, 120 bp, Artificial Sequence
  ENSG00000172943_46 (sequence is synthesized)
gaaaagcaagtttaccctcagagttatgcttttccaaagaggctgatgtctttgtttttgttttttttaatgtttcaggttctaagtgaagtgagttggggaggggttgggagtgttagt

SEQ ID NO: 589138 - DNA, 120 bp, Artificial Sequence
  ENSG00000172943_47 (sequence is synthesized)
aatcaaggtttagaacaccatgagatagttacccctgatctccagtccctagctgggggctggacagggggaagggagagaggatttctattcacctttaatatatttttacaaaaaaag

SEQ ID NO: 589139 - DNA, 120 bp, Artificial Sequence
  ENSG00000172943_48 (sequence is synthesized)
caaacaatttaaaaacaagcccaccgcttctgtacatgtctaaatatatttttagaagtgggtaggattgtgaatttctgatgcagggcctttttataaataggttagggtagcatcatt

SEQ ID NO: 589140 - DNA, 120 bp, Artificial Sequence
  ENSG00000172943_49 (sequence is synthesized)
cagacttctctgttgtttttgtccctgtctttttcttatgttgtgttactaatgtaatttatattttttttagatcctccctttcctatagagataaaagtgatttatcttggcaattgc

SEQ ID NO: 589141 - DNA, 120 bp, Artificial Sequence
  ENSG00000172943_50 (sequence is synthesized)
gtgtgaaagaaattctaagggccgggtggactttctctggttgccccctacagccgcaccagctgtgttgcatcccggcggcggtaactctattggagaactgagggttggtgcaagggg

SEQ ID NO: 589142 - DNA, 120 bp, Artificial Sequence
  ENSG00000172943_51 (sequence is synthesized)
tcaaactcatatcctctaacttcaaatttcatattactttctatttaaataaatgcttatgtagttcagtcattacatcctatttaaatagtgtttaaatctttggcaatcttctttgac

SEQ ID NO: 589143 - DNA, 120 bp, Artificial Sequence
  ENSG00000172943_52 (sequence is synthesized)
cagaacttctgtctcttatgtatatcccaatacagtgtaagctgtaatttgaaaaagggggttctactgttttatataaatataaattaagtaaagctgtgaaaattactcttagtgcct

SEQ ID NO: 589144 - DNA, 120 bp, Artificial Sequence
  ENSG00000172943_53 (sequence is synthesized)
tttaaggagctaaattctgtttgggatgatcagagataacctcaaagaagaggttttgaaattggggaggggctttgcaagctaagcttctggtaggggccagggaggcattctaaaaga

SEQ ID NO: 589145 - DNA, 120 bp, Artificial Sequence
  ENSG00000172943_54 (sequence is synthesized)
agggacttccttcgtatagcacacaaagccctcttaaagtcctcttgatttggtctctagtcatctccctgacctccttccagcccctcatgcacaccttttatacagccatagtgcact

SEQ ID NO: 589146 - DNA, 120 bp, Artificial Sequence
  ENSG00000172943_55 (sequence is synthesized)
gcaatactcatagtcccctcagtgagtatatcagattgtctcatgcttttgtgcctttacacaagatgttccttttacccattgagaatcataccctatcagatcccttacctaacagcc

SEQ ID NO: 589147 - DNA, 120 bp, Artificial Sequence
  ENSG00000172943_56 (sequence is synthesized)
cttcatactacctaccaccactttatttcagaggcctttttctatatgcttctacaacattcgtggtacttacaatcataaatgtatgttttggtgtttcttattaaactatgaatactt

SEQ ID NO: 589148 - DNA, 120 bp, Artificial Sequence
  ENSG00000172943_57 (sequence is synthesized)
agtgagagatgaaagaagcttcccgaaaaggcttcaggtattttcttgaaacccggaaagaagttatcactgacaacggggccgaagaagctatcgtccagagaggacgcgtgctgccgc

SEQ ID NO: 589149 - DNA, 120 bp, Artificial Sequence
  ENSG00000172943_58 (sequence is synthesized)
gaaagaaattctaagggccgggtggactttctctggttgccccctacagccgcaccagctgtgttgcatcccggcggcgtgttatttgtgcctagctatcgtccagagaggacgcgtgct

SEQ ID NO: 589150 - DNA, 120 bp, Artificial Sequence
  ENSG00000172943_59 (sequence is synthesized)
ccggtgtattgcctctgccggctgccttacgatgtgacccgcttcatgatcgagtgtgacatgtgccaggactggtttcatggcagtgagacctgcttgttgtagaaaacacagaaaaag

SEQ ID NO: 589151 - DNA, 120 bp, Artificial Sequence
  ENSG00000172943_60 (sequence is synthesized)
aataaagaaggaaatataactcacctaagtctactactgtctggcacaatccactgttaaatttgttgttgcattaactcccatcttttgacttagaatataaacatatttttacaagat

SEQ ID NO: 589152 - DNA, 120 bp, Artificial Sequence
  ENSG00000172943_61 (sequence is synthesized)
aatgttacaatgtaattgccagttcattaaatattcagctaaacttgatttctgatatcccacaatatatatgtgtcaccggttaatttggtaatttcctttatggttggacattgtact

SEQ ID NO: 589153 - DNA, 120 bp, Artificial Sequence
  ENSG00000172943_62 (sequence is synthesized)
tttttgaacattatttgtacttttttatattataaataatgtgaggaaactttgggcgttctggaaaggttttgcatcttgatatgagtgctgattaaaacaaaaacattatggaaagca

SEQ ID NO: 589154 - DNA, 120 bp, Artificial Sequence
  ENSG00000172943_63 (sequence is synthesized)
tcaacctcctgctcctgtgatcagtgggggtatggggggacagtatagcagaaggccttggctcaggtggttttgacagtgaactgaaccagtgaaaccagagggaacttgccatcgtga

SEQ ID NO: 589155 - DNA, 120 bp, Artificial Sequence
  ENSG00000172943_64 (sequence is synthesized)
aaaagatcctgctgaggttccctctagagagggggaagaaccaacaacgcagagaccgtgggaaagagcccagcctatcgaaggtgctcaatgaacaggagccgcgctatcgtccagaga

SEQ ID NO: 589156 - DNA, 120 bp, Artificial Sequence
  ENSG00000172943_65 (sequence is synthesized)
tcctctggagttttgccctttgtagggactggatttgggtagatgttttggagagacagaagagaccagagaagcttgtgggctcctgggtgtagagtggaggtgtgggctaggattcct

SEQ ID NO: 589157 - DNA, 120 bp, Artificial Sequence
  ENSG00000172943_66 (sequence is synthesized)
ttgattacattttaaaatctttctttctgatgataaaaagtaatacaacatcacactagagaattagaaaaatgaggaaaagcataaagaaggaaaattatcacctatgatttttacact

SEQ ID NO: 589158 - DNA, 120 bp, Artificial Sequence
  ENSG00000172943_67 (sequence is synthesized)
cagcgggaactgctattaacacttgtgtacatttccttctggtcttttttatgtgcattttaaaaacataattactgtcacactgtgtggttgacccttgaacaatgtggaggttggggt

SEQ ID NO: 589159 - DNA, 120 bp, Artificial Sequence
  ENSG00000172943_68 (sequence is synthesized)
ttaattttttgtagtgacagggtcccacctcaccctcccagagcaatgggattacaggcatgaaccatcatgcccagccaaaggaggttcacattttttttctttttccctctgggaggt

SEQ ID NO: 589160 - DNA, 120 bp, Artificial Sequence
  ENSG00000172943_69 (sequence is synthesized)
ttacctttatcctttaatcagtgtgtgctttgagcattggtgaattaggttcttatgtgatggcaagcaaaatctggcttcataaaaagctagaagcaggaagaccaatgagagtacctt

SEQ ID NO: 589161 - DNA, 120 bp, Artificial Sequence
  ENSG00000172943_70 (sequence is synthesized)
tttcctctcatcccccctcctctcccctcccctcaggctatagtcagaaaattgtgggacaggtgcaaacaaatccttgaactgtatttgaactgaagtgaaacagtagggtcaaagaag

SEQ ID NO: 589162 - DNA, 120 bp, Artificial Sequence
  ENSG00000172943_71 (sequence is synthesized)
agttcagagggagttgtggagttggcagcagctttacagaggaactacactgagggcctggggacagaacgcgggtagcacagggcacaaggttcaacgtccctgctccgggactcaagt

SEQ ID NO: 589163 - DNA, 120 bp, Artificial Sequence
  ENSG00000172943_72 (sequence is synthesized)
ataatagagggagccctgtgaaacaggggtcagctaggggagggttcagtgagagatgaaagaagcttcccgaaaaggcttcagctatcgtccagagaggacgcgtgctgccgcctcccg

SEQ ID NO: 589164 - DNA, 120 bp, Artificial Sequence
  ENSG00000172943_73 (sequence is synthesized)
tctctcggggtgaagatgattacaaagccatgtttcaacaggtggcatataccacgaggcagtaaggtatagtgttcaacatcactggtgcctgcttgaatgactcagatgacgactcac

SEQ ID NO: 589165 - DNA, 120 bp, Artificial Sequence
  ENSG00000172943_74 (sequence is synthesized)
atatatgtagagaaatgaattggaaaagatcctgctgaggttccctctagagagggggaagaaccaacaacgcagagaccgtgggaaagagcccagcctatcgaaggtgctcaatgaaca

SEQ ID NO: 589166 - DNA, 120 bp, Artificial Sequence
  ENSG00000172954_0 (sequence is synthesized)
gggacgcattactagggcgacggccggacgcctccgcgttacgggatgaattaacggcgggttccgcacggaggttgtgacccctacggagccccagcttgcccacgcaccccactcggc

SEQ ID NO: 589167 - DNA, 120 bp, Artificial Sequence
  ENSG00000172954_1 (sequence is synthesized)
gtcgcgcggcgtgccctgcttgtcacagaatcatggtgtcatggaaagggatttactttatactgactctgttttggggaagcttttttggaagcattttcatgctgagtccctttttac

SEQ ID NO: 589168 - DNA, 120 bp, Artificial Sequence
  ENSG00000172954_2 (sequence is synthesized)
ctttgatgtttgtaaacccatcttggtatcgctggatcaacaaccgccttgtggcaacatggctcaccctacctgtggcattattggagaccatgtttggtgtaaaagtgattataactg

SEQ ID NO: 589169 - DNA, 120 bp, Artificial Sequence
  ENSG00000172954_3 (sequence is synthesized)
gggatgcatttgttcctggagaaagaagtgtcattatcatgaaccatcggacaagaatggactggatgttcctgtggaattgcctgatgcgatatagctacctcagattggagaaaattt

SEQ ID NO: 589170 - DNA, 120 bp, Artificial Sequence
  ENSG00000172954_4 (sequence is synthesized)
gcctcaaagcgagtctcaaaggtgttcctggatttggttgggccatgcaggctgctgcctatatcttcattcataggaaatggaaggatgacaagagccatttcgaagacatgattgatt

SEQ ID NO: 589171 - DNA, 120 bp, Artificial Sequence
  ENSG00000172954_5 (sequence is synthesized)
acttttgtgatattcacgaaccacttcaactcctcatattcccagaagggactgatctcacagaaaacagcaagtctcgaagtaatgcatttgctgaaaaaaatggacttcagaaatatg

SEQ ID NO: 589172 - DNA, 120 bp, Artificial Sequence
  ENSG00000172954_6 (sequence is synthesized)
aatatgttttacatccaagaactacaggctttacttttgtggtagaccgtctaagagaaggtaagaaccttgatgctgtccatgatatcactgtggcgtatcctcacaacattcctcaat

SEQ ID NO: 589173 - DNA, 120 bp, Artificial Sequence
  ENSG00000172954_7 (sequence is synthesized)
cagagaagcacctcctccaaggagactttcccagggaaatccactttcacgtccaccggtatccaatagacaccctccccacatccaaggaggaccttcaactctggtgccacaaacggt

SEQ ID NO: 589174 - DNA, 120 bp, Artificial Sequence
  ENSG00000172954_8 (sequence is synthesized)
gggaagagaaagaagagaggctgcgttccttctatcaaggggagaagaatttttattttaccggacagagtgtcattccaccttgcaagtctgaactcagggtccttgtggtcaaattgc

SEQ ID NO: 589175 - DNA, 120 bp, Artificial Sequence
  ENSG00000172954_9 (sequence is synthesized)
tctctatactgtattggaccctgttcagccctgcaatgtgcctactcatatatttgtacagtcttgttaagtggtattttataatcaccattgtaatctttgtgctgcaagagagaatat

SEQ ID NO: 589176 - DNA, 120 bp, Artificial Sequence
  ENSG00000172954_10 (sequence is synthesized)
ttggtggactggagatcatagaacttgcatgttaccgacttttacacaaacagccacatttaaattcaaagaaaaatgagtaagattataaggtttgccatgtgaaaacctagagcatat

SEQ ID NO: 589177 - DNA, 120 bp, Artificial Sequence
  ENSG00000172954_11 (sequence is synthesized)
tttggaaatgttctaaacctttctaagctcagatgcatttttgcatgactatgtcgaatatttcttactgccatcattatttgttaaagatattttgcacttaattttgtgggaaaaata

SEQ ID NO: 589178 - DNA, 120 bp, Artificial Sequence
  ENSG00000172954_12 (sequence is synthesized)
ttgctacaattttttttaatctctgaatgtaatttcgatactgtgtacatagcagggagtgatcggggtgaaataacttgggccagaatattattaaacaatcatcaggcttttagcgac

SEQ ID NO: 589179 - DNA, 120 bp, Artificial Sequence
  ENSG00000172954_13 (sequence is synthesized)
aaggaacacacacatttttcttaaaggcccaatcctaacagactccccgtaccagaggcagatctggaactcgtcaacaacagcccggatcacatgctgttactggactgcccaggtcac

SEQ ID NO: 589180 - DNA, 120 bp, Artificial Sequence
  ENSG00000172954_14 (sequence is synthesized)
ctcattgaggtgagcgctgtccctccaggtactcaggcaggtggtgcccaggctccctcccttggcgtccttcttcctgcgccaaacccatctcatccttaagatcagaaaatggaaccc

SEQ ID NO: 589181 - DNA, 120 bp, Artificial Sequence
  ENSG00000172954_15 (sequence is synthesized)
cctttgtcgtgaaaccgatcaagcattttgacaggaagcccttcattattcataacattgtatgctgaccaagacgtcagaagaccacctgtgcccttttctctcgtggaagataaaacc

SEQ ID NO: 589182 - DNA, 120 bp, Artificial Sequence
  ENSG00000172954_16 (sequence is synthesized)
tggactcagggagcaaccacaggctctccactttgaaactttagtttgaattttaaaagataggaagtaatacagtttaagttcctttctcacactcagtattgcatgcttagtgctggt

SEQ ID NO: 589183 - DNA, 120 bp, Artificial Sequence
  ENSG00000172954_17 (sequence is synthesized)
tttcttacaacattttggcaggtgtagctttttctgttaaaaatggtatacatgaagtcacatacttttttaaaggaacactcagaacattctgtcattccagtcagaaactgtcttttg

SEQ ID NO: 589184 - DNA, 120 bp, Artificial Sequence
  ENSG00000172954_18 (sequence is synthesized)
aaatatttctttacaacctaccaaaaaaggaaggttgttttttctacatgtgcttgggtatctaacatctaccattaaaacaacaaatggcttgcagacagggcagtaatggtttatcct

SEQ ID NO: 589185 - DNA, 120 bp, Artificial Sequence
  ENSG00000172954_19 (sequence is synthesized)
aaattactcaaccccttgtagccttgacaaattttaccttaaaaccaaaatgaaacacaaaaattaatccttaataatgatagcaagtgatctttctttttagttttagccttccttttt

SEQ ID NO: 589186 - DNA, 120 bp, Artificial Sequence
  ENSG00000172954_20 (sequence is synthesized)
tttggagtcagtggaaaatccagcacaccaagcaccagtcttcttctgaggcaaaagaaaagtgttgtcattttcactctgttggagctgcacacttttttttctttttttttttctttt

SEQ ID NO: 589187 - DNA, 120 bp, Artificial Sequence
  ENSG00000172954_21 (sequence is synthesized)
agctgcagaaaatatgaggcaattaaaagtctttagctgttagcaaacctgttagttttacttctgcattgaaccagcctcagaagctacttactgctttatgtactctttgggcattaa

SEQ ID NO: 589188 - DNA, 120 bp, Artificial Sequence
  ENSG00000172954_22 (sequence is synthesized)
tgccttctctgtaattatatctcgtttttgcttgacagtgacctacccaataattgcatcgtgcattgccatgaaaggtaaacacattgtgaactgaacttaccaagcagattctgtgag

SEQ ID NO: 589189 - DNA, 120 bp, Artificial Sequence
  ENSG00000172954_23 (sequence is synthesized)
aaagcactggttgaggctgaacactgttgacacatcatttttattggaagagtattaactggtgcctcttctgaaacacaccaacccatattcctctgctcccccaaagctgtttctgat

SEQ ID NO: 589190 - DNA, 120 bp, Artificial Sequence
  ENSG00000172954_24 (sequence is synthesized)
cccccaaagctgtttctgatcctgctgggagcaactaactagttattatgcacatctgctccagacccagctctttaacttcatggttttacagcttgttttttctttttcttttctttt

SEQ ID NO: 589191 - DNA, 120 bp, Artificial Sequence
  ENSG00000172954_25 (sequence is synthesized)
agcacctttttttgttgtttccccttaataaaagaggtttctaatttatgtttctctaagatttcctttggttgtatttagaaacacaaatagttttataatcaggattgcatttgtgct

SEQ ID NO: 589192 - DNA, 120 bp, Artificial Sequence
  ENSG00000172954_26 (sequence is synthesized)
gggtaaaagaggagagctgtgctttctaccccaaagttgttggtaatggagccggtctgcccttcctacaaactcaagaggctcattgttcaaggtgtaacaacatttaattgcatgtcc

SEQ ID NO: 589193 - DNA, 120 bp, Artificial Sequence
  ENSG00000172954_27 (sequence is synthesized)
tctaacgctttgaaacctttagagggaagatcctcattttttacaattttgttccttttcatcatagaaaacatgtttaagataaaatacaaactttacctaccccaaattcataaagta

SEQ ID NO: 589194 - DNA, 120 bp, Artificial Sequence
  ENSG00000172954_28 (sequence is synthesized)
catttagtgctgtatagcactaaaacttagagatacagacactgtacttactttttaagaattagagacagtaactccaaaaataattgtccttttttctttctttctttttttacaata

SEQ ID NO: 589195 - DNA, 120 bp, Artificial Sequence
  ENSG00000172954_29 (sequence is synthesized)
aggctcttgaaaattgtcattacttgtgttttcctatacattcatctgtgtgaaagcctttttcttctttgatttaaaaaaattaactatacagttaatggtttagaacttagaactact

SEQ ID NO: 589196 - DNA, 120 bp, Artificial Sequence
  ENSG00000172954_30 (sequence is synthesized)
tagaattaatgctaaagtgtcaggaagaaattaatttagcttcaataattgtgactggcctcaggaattctcccttccacacctgcccacctcacctcactgcaccgcaccgcaccagag

SEQ ID NO: 589197 - DNA, 120 bp, Artificial Sequence
  ENSG00000172954_31 (sequence is synthesized)
ccagagcagctgcttgtctgcagcaggacacagttcctacatacgtttcagttctttcatggtaagctcaatggactttgaattgtttacagtgctgtatgtccaattgttaaatgtacc

SEQ ID NO: 589198 - DNA, 120 bp, Artificial Sequence
  ENSG00000172954_32 (sequence is synthesized)
attctgaacgatgttaaagcaagtgtggtttatttatggcatgaaccatgtaacttgaaatatgaacttacaaggaggggcactcattaggtaacaagttcttacaccaaacttccttga

SEQ ID NO: 589199 - DNA, 120 bp, Artificial Sequence
  ENSG00000172954_33 (sequence is synthesized)
tgaaataagccaaaataatcctaaaattcattagaagaacttgataaaagactcaaataaatgttagaaagagcccgtaattttaggactcctataaaattcttccttgtttgttaatgc

SEQ ID NO: 589200 - DNA, 120 bp, Artificial Sequence
  ENSG00000172954_34 (sequence is synthesized)
tattaaaactcagattcaagggaaataccagcttccacttgagtcactttgaaatagttaattcaacagcaccatgttagaaatatattggcagccaagactctgaactctgcagaaaca

SEQ ID NO: 589201 - DNA, 120 bp, Artificial Sequence
  ENSG00000172954_35 (sequence is synthesized)
tttgtttcacccagacttcaaactctagccctgactatgatgcccctgtgtgcatttacaataaagactccaacggagggagcctgttggtgttaaattgtttacatttctttatacaaa

SEQ ID NO: 589202 - DNA, 120 bp, Artificial Sequence
  ENSG00000172954_36 (sequence is synthesized)
taatgtgctttcagtgccttagttacagctccctttctgtttcttgttccaaggattctgtagtatgtagtgtgtttcttaggtaaagtctctttttgctactgaaagggaaatggtctc

SEQ ID NO: 589203 - DNA, 120 bp, Artificial Sequence
  ENSG00000172954_37 (sequence is synthesized)
taaacactggtcactgtagcaggtaaacactactctaacgtggagaaatgagcttcatgctgaggtagtggttgccttagagctgttatttatgctgtagaaaacgaaaatggttttgct

SEQ ID NO: 589204 - DNA, 120 bp, Artificial Sequence
  ENSG00000172954_38 (sequence is synthesized)
acctgataagcttcagattagatatagccctaaagttatcctgtacctgcattaaattttcattttagaagagaatcttggttttggtaattcatttttttttaagatcattatgtgcaa

SEQ ID NO: 589205 - DNA, 120 bp, Artificial Sequence
  ENSG00000172954_39 (sequence is synthesized)
aacaccaagttttaaaaataactcacagaatggccttagttttcaatgtctgatggtatatttgtgagttgtgttatctgtaatatacatcccagaataaaggagtgaattaaatagttt

SEQ ID NO: 589206 - DNA, 120 bp, Artificial Sequence
  ENSG00000172954_40 (sequence is synthesized)
gaggctggaactatcaggtggggttacggcgcgaggaaaatggcggcggccgggggatctcagaggtgcaggaaggggagctgcagcccgggcttttcctcctgagccatggaccttccc

SEQ ID NO: 589207 - DNA, 120 bp, Artificial Sequence
  ENSG00000172954_41 (sequence is synthesized)
cgggccgcgacctcgggctgaaaaacagagtgggtactctcttctgggaagctggcaacaaatggatgatgtgatatatgcattccaggggaagggaaattgtggtgcttctgaacccat

SEQ ID NO: 589208 - DNA, 120 bp, Artificial Sequence
  ENSG00000172954_42 (sequence is synthesized)
ccctgcttgtcacagatgtagttctgatagcagcattcccctctccaccattgtaccatacaagtgagtgggcttggagaatacagttctcaagataatcatggtgtcatggaaagggat

SEQ ID NO: 589209 - DNA, 120 bp, Artificial Sequence
  ENSG00000172954_43 (sequence is synthesized)
ttcctggatttgaaaacagcaagtctcgaagtaatgcatttgctgaaaaaaatggacttcagaaatatgaatatgttttacatccaagaactacaggctttacttttgtggtagaccgtc

SEQ ID NO: 589210 - DNA, 120 bp, Artificial Sequence
  ENSG00000172954_44 (sequence is synthesized)
ctactgcacgtacttcataaagcaggactctaaaagctttggccactccacatcacttgaattatctcctgatttccacctctgctcagatccgccactgcattcgattcttacaggaac

SEQ ID NO: 589211 - DNA, 89 bp, Artificial Sequence
  ENSG00000172954_45 (sequence is synthesized)
tctgctcagatccgccactgcattcgattcttacaggaacgcaggccctataactgtgcttgcaggggatctaggttgcatgttcctta

SEQ ID NO: 589212 - DNA, 120 bp, Artificial Sequence
  ENSG00000172954_46 (sequence is synthesized)
cagtcacatttgaaacctaatgatacaggcatactacaacaggattgttgctgcaaaaatgtcataaaattacctgtcatcagagtttttaaaagccttcgtggaaattaatcatcttag

SEQ ID NO: 589213 - DNA, 75 bp, Artificial Sequence
  ENSG00000172954_47 (sequence is synthesized)
ttgtggtagaccgtctaagagaaggcaggaggcagagcgagggaagtaaaggaccacttcaaggagaactacaaa

SEQ ID NO: 589214 - DNA, 120 bp, Artificial Sequence
  ENSG00000172954_48 (sequence is synthesized)
atttacagattcaatgctattcccattaaactgccgttgacattcttcatagaattagaaaaaactcttaaaattcatatggaaccaacaaaaagcccatatagccaagacaatcttaag

SEQ ID NO: 589215 - DNA, 80 bp, Artificial Sequence
  ENSG00000172954_49 (sequence is synthesized)
cattcaggacataagcatgggcaaagatttcatgatgaagatgacaaaagcaattgcaacggcttctgcacaggaaaaga

SEQ ID NO: 589216 - DNA, 63 bp, Artificial Sequence
  ENSG00000172954_50 (sequence is synthesized)
gtcaacaagaaactaaaacaaatttacaagaaaaaacaaccccattaaaaaagtgggcaaggg

SEQ ID NO: 589217 - DNA, 64 bp, Artificial Sequence
  ENSG00000172954_51 (sequence is synthesized)
aaggtctaatattcagagtcaacaagaaactaaaacaaatttacaagaaaaaacaaccccatta

SEQ ID NO: 589218 - DNA, 90 bp, Artificial Sequence
  ENSG00000172954_52 (sequence is synthesized)
caccagtccaaatggcaattatttaaaagtcatcgagaggaatgcttttacattgttggtgggaatgtatattagttcaaccattgtgta

SEQ ID NO: 589219 - DNA, 120 bp, Artificial Sequence
  ENSG00000172954_53 (sequence is synthesized)
ggcaaggctgtggagcgagaggaatgcttttacattgttggtgggaatgtatattagttcaaccattgtgtagctgggactacaggcgtccactaccacgcccggctaatttttttgtat

SEQ ID NO: 589220 - DNA, 66 bp, Artificial Sequence
  ENSG00000172954_54 (sequence is synthesized)
aaatatctttatagatgtcttcttgtgtacctgtgtaagaattcctttgggatatacagtcatgca

SEQ ID NO: 589221 - DNA, 120 bp, Artificial Sequence
  ENSG00000172954_55 (sequence is synthesized)
gtacctgtgtaagaattcctttgggatatacagtcatgcaacacataatgacgttctagttagtggcaaaccacatatatgatggcagtctcataagatcataatggagctagaaaattc

SEQ ID NO: 589222 - DNA, 120 bp, Artificial Sequence
  ENSG00000172954_56 (sequence is synthesized)
ctatcacctggtgacatcatcacatgtttgtgatgatgctgatgtaaaccactatgctaccagttgtgtaaaacagtagcacataaaattatataccgtaatgataatgactatgttact

SEQ ID NO: 589223 - DNA, 120 bp, Artificial Sequence
  ENSG00000172954_57 (sequence is synthesized)
gactatgttactgatttacatagttactgtactatactttttattgttacttgagtgtattccttctgcttatagtaaaagcagtaaaacagccccaggcaggtccttcaggaggtattc

SEQ ID NO: 589224 - DNA, 120 bp, Artificial Sequence
  ENSG00000172954_58 (sequence is synthesized)
attccagaagaaggcattgctgtcataggacatgacagctccatgcttgttattacctctgaagaccttgcagtgagacaagatgtggaggtgaagacagtgatattgatgatcctgacc

SEQ ID NO: 589225 - DNA, 120 bp, Artificial Sequence
  ENSG00000172955_0 (sequence is synthesized)
tgtattttgaaaacaacagaaaagaaatacttttgtacactctgttagaaattttaagtttggacatttaaaagtccaaatttaaaactcaaaaaaatggataataagaggggacctgtt

SEQ ID NO: 589226 - DNA, 120 bp, Artificial Sequence
  ENSG00000172955_1 (sequence is synthesized)
tgattaagggagaaaaaaatagtttgcattttcaccttttgtgctctttcactgagatgagcctatttcagattacacttaggaacttccatcaagcagcgggagagcctacttttcctg

SEQ ID NO: 589227 - DNA, 120 bp, Artificial Sequence
  ENSG00000172955_2 (sequence is synthesized)
tttaataattaccagactacagagaaagctcaggacccagccttctgatctaccagtcgcctgtgtacctttgtactttctacagtgaaagttgctacaggatctccctttctcaataaa

SEQ ID NO: 589228 - DNA, 120 bp, Artificial Sequence
  ENSG00000172955_3 (sequence is synthesized)
ttcatctgcggtggagaaaatcagcatgagtactacaggccaagtcatcagatgcaaagcagccatactctggaagcctggtgcaccattttctattgaagaggtagaagtggccccacc

SEQ ID NO: 589229 - DNA, 120 bp, Artificial Sequence
  ENSG00000172955_4 (sequence is synthesized)
aaaggcaaaggaagttcgcataaaggttgtggccaccggactgtgtggtacagagatgaaagtgttggggagtaaacacttggacctcttgtatcccaccatcttgggccatgaaggggc

SEQ ID NO: 589230 - DNA, 120 bp, Artificial Sequence
  ENSG00000172955_5 (sequence is synthesized)
tggaatcgttgagagtattggagaaggagtaagcacagtgaaaccaggtgacaaagttatcacactctttctgccacagtgtggagaatgtacctcttgcctgaattctgagggcaattt

SEQ ID NO: 589231 - DNA, 120 bp, Artificial Sequence
  ENSG00000172955_6 (sequence is synthesized)
ttgtatacaattcaaacagtcaaaaacccaactgatgtctgatggtaccagcaggtttacctgcaagggaaaatcaatatatcactttggtaataccagcaccttctgtgaatacacagt

SEQ ID NO: 589232 - DNA, 120 bp, Artificial Sequence
  ENSG00000172955_7 (sequence is synthesized)
tctcagttgccaagattgatgcagtcgctcctctagagaaagtatgcctaattagctgtggcttttccactgggtttggtgctgcaatcaatactgccaaggtgactccaggttctacct

SEQ ID NO: 589233 - DNA, 120 bp, Artificial Sequence
  ENSG00000172955_8 (sequence is synthesized)
gtgctgtgtttggcctgggaggagtcggcttgtctgttgtcatgggttgtaaagcagcaggagcagccaggatcattggagtggatgtcaacaaggagaaatttaagaaggcacaggaat

SEQ ID NO: 589234 - DNA, 120 bp, Artificial Sequence
  ENSG00000172955_9 (sequence is synthesized)
tgggtgctactgagtgcctcaaccctcaggacttaaagaaacccattcaagaagttttatttgatatgacagatgctggtatagacttctgctttgaggccattggaaatctggacgttc

SEQ ID NO: 589235 - DNA, 120 bp, Artificial Sequence
  ENSG00000172955_10 (sequence is synthesized)
tggcagctgccctcgcctcctgcaatgagagctatggggtctgtgtggttgttggggtgttgcctgccagtgttcaactcaaaatcagtggccagttgttcttctcaggacgttctttga

SEQ ID NO: 589236 - DNA, 120 bp, Artificial Sequence
  ENSG00000172955_11 (sequence is synthesized)
agggttctgtttttggaggctggaagagcagacagcacatccctaaactggttgctgattatatggcagagaagttgaatctagatccactaattactcatactctgaatcttgataaaa

SEQ ID NO: 589237 - DNA, 120 bp, Artificial Sequence
  ENSG00000172955_12 (sequence is synthesized)
tcaatgaagcagttgaattaatgaaaactggaaaatggtaaactgcccacataaattttatgtctgtgtgtttgagaccaagagaaagggtgtattggcttgggagtagaagaagggtcg

SEQ ID NO: 589238 - DNA, 120 bp, Artificial Sequence
  ENSG00000172955_13 (sequence is synthesized)
tccctgctgcagaagctgtatactgataattgaagaggctttcaggaatttgtaaagcatctccttcccctctgcattttgttttatttctagctaataaaatacataatcctgaaagta

SEQ ID NO: 589239 - DNA, 120 bp, Artificial Sequence
  ENSG00000172955_14 (sequence is synthesized)
ccgctgtatcctgttactttaagtacaatgtaatacatgcaagacccaaaggatatttcaccaactcaatggcatttgatgtaattttcatgatttagaagaattattcacccaatccca

SEQ ID NO: 589240 - DNA, 120 bp, Artificial Sequence
  ENSG00000172955_15 (sequence is synthesized)
atctggcttctgacctaaccatttcatcaaaattgttcttacgtaacccagtgtcaccaaggatcagcctccttttcagagctagattaaggttggcttgaatcactcaactccacatcc

SEQ ID NO: 589241 - DNA, 120 bp, Artificial Sequence
  ENSG00000172955_16 (sequence is synthesized)
ttcagacataaaaggtcaatgcaagatgctcccattttcatagttcctctacctgtggacctttatattcttgtacactatatgtctctctcacaggcctagacatgaaactctgccatt

SEQ ID NO: 589242 - DNA, 120 bp, Artificial Sequence
  ENSG00000172955_17 (sequence is synthesized)
ttactctaaagaaacaaaactccgcattaatgagtttattgaagattcaggttaacctgaatcaagttaacccagtctcaaatgctcacttatcctatctccttggcacaaatctctcct

SEQ ID NO: 589243 - DNA, 120 bp, Artificial Sequence
  ENSG00000172955_18 (sequence is synthesized)
ctcctggattgccaaagaaaattcaaattattcttcaattagtcaggatgatttgactatcagcagttcatagtacccatcttcataactaagccacctagggatccagcagaaaaaaaa

SEQ ID NO: 589244 - DNA, 120 bp, Artificial Sequence
  ENSG00000172955_19 (sequence is synthesized)
gggatgaggggagtcatcatacaggaggtggatcatttagcaggatccacacttcctacaaagcggttgtaatattaaataacaaaactgttttttattccaatcttcacataaaacagg

SEQ ID NO: 589245 - DNA, 120 bp, Artificial Sequence
  ENSG00000172955_20 (sequence is synthesized)
aataattgtatactttcttactaatgtgttccatggagtttttcctccaagaagtggcttaggggaaaatgagccccagtaatgctttgtggcatccaatccttctaccccgaccctttg

SEQ ID NO: 589246 - DNA, 120 bp, Artificial Sequence
  ENSG00000172955_21 (sequence is synthesized)
actttctgccccagcccctcttagttctcctagaattaggactaaggttaagtgccctcttgggatatgacttccttcccttcctcttgatacaaaaagagcctattaccaaccctcata

SEQ ID NO: 589247 - DNA, 120 bp, Artificial Sequence
  ENSG00000172955_22 (sequence is synthesized)
cacacaagagttcccttcctagttgcagactcttctgctccagctggactcccctagctctggactcccactagatcacacaggggtccctgcatgtcagtaaactttggatgaccttgg

SEQ ID NO: 589248 - DNA, 120 bp, Artificial Sequence
  ENSG00000172955_23 (sequence is synthesized)
gagaccaaaaaatggaatatcattttttgatctaaacaaaatagtttcctgatttaacactggccaggaaggtgggctgcaccctcagtctctctctcccatcatggttttcacatgata

SEQ ID NO: 589249 - DNA, 120 bp, Artificial Sequence
  ENSG00000172955_24 (sequence is synthesized)
tcaaaggactctcataacagtctgattcttatgagttgggcatcctgtgtttccctttaggggcctgcttccttcaaatagaggagatgggtgctatgaaacctattcactctggacttg

SEQ ID NO: 589250 - DNA, 120 bp, Artificial Sequence
  ENSG00000172955_25 (sequence is synthesized)
ggatggctcttctccatcttcccaagtctgagctggagcctccatgcccaactctgctctgctcttctatttcctgacagcagctaaggcatgttcctgttctgcccccaaattgacctt

SEQ ID NO: 589251 - DNA, 120 bp, Artificial Sequence
  ENSG00000172955_26 (sequence is synthesized)
actaacagtgagaacttggaggagtcttcgggtcttgggaaatccaagttttcccggaaacgttttgttgtaaacagtgtccacactctttgctccaataaagctcggttccttaagcca

SEQ ID NO: 589252 - DNA, 120 bp, Artificial Sequence
  ENSG00000172955_27 (sequence is synthesized)
aaaattaccaatacttttaccagtcatcgtttagattatagttgaatgagctttctaaaattccctccactttgctctatttaattttccttgtgttccatgacatctcagctggtgccg

SEQ ID NO: 589253 - DNA, 120 bp, Artificial Sequence
  ENSG00000172955_28 (sequence is synthesized)
tctgtgtactcttacaaatttgttcactatcccagatactaaatctagaactttcatataatttcaaagccagaagttttaagcaagataagattaaaatttgattaatgaccttataaa

SEQ ID NO: 589254 - DNA, 120 bp, Artificial Sequence
  ENSG00000172955_29 (sequence is synthesized)
atgacatattaatggaagtcagcttataaaattgtagctcaagtttaaaaacataagaaggtagttcacaaataggccattgttgtatttgttgttctactttgggggagaagaggaatt

SEQ ID NO: 589255 - DNA, 120 bp, Artificial Sequence
  ENSG00000172955_30 (sequence is synthesized)
attcataggattcctaattctgaatcctatctttgacccaaaaaacagaaaccagccataacccagaaactggcattccccacacgagtataagcttgcttacctactttttacccttgg

SEQ ID NO: 589256 - DNA, 120 bp, Artificial Sequence
  ENSG00000172955_31 (sequence is synthesized)
ggcaaaggaagttcgcataaaggtgacaaagttatcacactctttctgccacagtgtggagaatgtacctcttgcctgaattctgagggcaatttttgtatacaattcaagtgactccag

SEQ ID NO: 589257 - DNA, 120 bp, Artificial Sequence
  ENSG00000172955_32 (sequence is synthesized)
atttctttttcattaaacatttccatcaatttttaaatccagccagataaaaggttagggaggtaaagcataggctaactgcccaaaggataaaactcaggcttatttacagctattgta

SEQ ID NO: 589258 - DNA, 120 bp, Artificial Sequence
  ENSG00000172955_33 (sequence is synthesized)
ctaattattaatttaaaaaaattctaccttcaaaccctattttaatctgtacttgtaaatttttatggcatccttcataatacttgtcttgaaatattttgaataaaaattgattacaga

SEQ ID NO: 589259 - DNA, 120 bp, Artificial Sequence
  ENSG00000172967_0 (sequence is synthesized)
cttttgaaattctaaattctgatgcagaacgtatcagtgaaactccctcccactgtctcttgtattagcatcaaggaagcgagaaaaaataagcaccctgagaatggagacagtgtttga

SEQ ID NO: 589260 - DNA, 120 bp, Artificial Sequence
  ENSG00000172967_1 (sequence is synthesized)
agagatggatgaagaaagcacaggaggagtttcatcttcgaaagaagaaatagtccttggccagagactccatctaagctttccttttagcattatcttctcaactgttctctactgtgg

SEQ ID NO: 589261 - DNA, 120 bp, Artificial Sequence
  ENSG00000172967_2 (sequence is synthesized)
tgaggttgcctttggtttatacatgtttgaaatttatcgaaaagctaatgacacattctggatgtcatttaccatcagctttattattgtgggggcaattttggatcaaattatcctgat

SEQ ID NO: 589262 - DNA, 120 bp, Artificial Sequence
  ENSG00000172967_3 (sequence is synthesized)
gtttttcaacaaagacttgaggagaaataaggctgcattacttttttggcacattcttcttttaggacctattgtgaggtgtttgcacaccattagaaattaccacaaatggttgaaaaa

SEQ ID NO: 589263 - DNA, 120 bp, Artificial Sequence
  ENSG00000172967_4 (sequence is synthesized)
tcttaaacaggagaaggaagagactcaagttagcatcacaaagagaaacacgatgctggaaagggagattgcattctcaatccgggataatttcatgcagcagaaggctttcaagtacat

SEQ ID NO: 589264 - DNA, 120 bp, Artificial Sequence
  ENSG00000172967_5 (sequence is synthesized)
gtcagtgattcaggcttttctcggttctgttccacaattaattttgcagatgtatatcagtctcactatacgagaatggcctttgaatagagcattgctgatgacattttccctgttatc

SEQ ID NO: 589265 - DNA, 120 bp, Artificial Sequence
  ENSG00000172967_6 (sequence is synthesized)
agttacttatggggccattcgctgcaatatactggccatccagatcagcaatgatgatactaccattaagctaccgccgatagaattcttctgtgtcgtgatgtggcgttttttggaggt

SEQ ID NO: 589266 - DNA, 120 bp, Artificial Sequence
  ENSG00000172967_7 (sequence is synthesized)
gtagtgactctggcatttttcattgcatctctgaaactgaagagcctacccgttttgttaatcatatattttgtatcattgttggcaccgtggctggagttttggaaaagtggagctcat

SEQ ID NO: 589267 - DNA, 120 bp, Artificial Sequence
  ENSG00000172967_8 (sequence is synthesized)
cttcctggcaacaaagaaaataattccaatatggtgggtacagtactgatgcttttcttgatcacactgctatatgctgccatcaacttctcctgctggtcagcagtgaaactgcagttg

SEQ ID NO: 589268 - DNA, 120 bp, Artificial Sequence
  ENSG00000172967_9 (sequence is synthesized)
tcagatgacaaaataattgacgggagacagaggtggggccatagaatcctacactacagctttcagtttttagaaaatgtgataatgatattggtatttaggttctttggagggaaaact

SEQ ID NO: 589269 - DNA, 120 bp, Artificial Sequence
  ENSG00000172967_10 (sequence is synthesized)
ttgctgaattgttgtgactcattaattgccgtgcagctcatcataagctacctattggccactggctttatgctcctcttctatcagtatttgtacccatggcagtcaggcaaagtgttg

SEQ ID NO: 589270 - DNA, 120 bp, Artificial Sequence
  ENSG00000172967_11 (sequence is synthesized)
ccaggacgtactgaaaatcagccagaagcaccgtactattatgtaaacatcgagaaaactgaaaagaataaaaataagcagctgaggaattactgtcactcctgcaatagggttggatat

SEQ ID NO: 589271 - DNA, 120 bp, Artificial Sequence
  ENSG00000172967_12 (sequence is synthesized)
ttttcaatcagaaaaagtatgacatgttcataaaatatacatatatactttcacagaacaatgagtaaagatgctgaatgtgacttgttaagaggctcttaaatttaaaaaatatacaca

SEQ ID NO: 589272 - DNA, 120 bp, Artificial Sequence
  ENSG00000172967_13 (sequence is synthesized)
gcaaaatcttggaagtggtttctaataaaattcatttatgttctcctgtgaacgtgccttagtaatttttgttttcttaactataattatacaattcattaaataaaacaaaataaaaaa

SEQ ID NO: 589273 - DNA, 120 bp, Artificial Sequence
  ENSG00000172969_0 (sequence is synthesized)
actctgcctttggacatgtgagagagcgcacctttcacttgagcttcaacatgggaaagggaaatgaagaccccgatctccactgttcctccatccagtgctccactgaccagccccctt

SEQ ID NO: 589274 - DNA, 120 bp, Artificial Sequence
  ENSG00000172969_1 (sequence is synthesized)
tccaacagatctcctttacagaaaagggctcagatgagaagaaaccattcaaaggaaaaggcaagaccgccttctcccattccagtgagaagcacacacaaaggcaagcaggatcagatc

SEQ ID NO: 589275 - DNA, 120 bp, Artificial Sequence
  ENSG00000172969_2 (sequence is synthesized)
ccaatccaaacaaggagaattctgaggaaaccaagctcaaggccgggaacagcactgctggatcagaaccagagtccagctcatatcaggaaaactgcaggaaaagaaaaatcagttcca

SEQ ID NO: 589276 - DNA, 120 bp, Artificial Sequence
  ENSG00000172969_3 (sequence is synthesized)
aggatatctgccaagacagagcagggaactgtccagaagaggagtgcaacttgacgttgaataaaaaatcaagatcctccactgctgtgcacaacagtgaaatccaggagacctgtgatg

SEQ ID NO: 589277 - DNA, 120 bp, Artificial Sequence
  ENSG00000172969_4 (sequence is synthesized)
cccaccataggggaagttccagggcttgcactgggcgcagcaagcggcataggtctcgggccctagaagtccaaacaccgtcacttcgaaaaagcttggtgacctctgtgcgagctatgt

SEQ ID NO: 589278 - DNA, 120 bp, Artificial Sequence
  ENSG00000172969_5 (sequence is synthesized)
cggaggctgtttatcaagacctagcccaggtgtgggcacagcagatccattctccactgacctgtgagcagctgacactgctcactcggctccgggggcctctgtgtgcccaggtgcaga

SEQ ID NO: 589279 - DNA, 120 bp, Artificial Sequence
  ENSG00000172969_6 (sequence is synthesized)
ccttgtattccatggccactcaggcagcttatgtcttccctgctgagagctggcttgtcccagccacactgcctggtcctggggattcagccctggatagagaagcccatcccttccctg

SEQ ID NO: 589280 - DNA, 120 bp, Artificial Sequence
  ENSG00000172969_7 (sequence is synthesized)
ggcaggagataactgagcctgtcagtggatcagatgaggctaagctgggagcaccctgaccctattcagcagagatgcagctctgggaatgagaacaaggacctgcttcttctcagattc

SEQ ID NO: 589281 - DNA, 120 bp, Artificial Sequence
  ENSG00000172969_8 (sequence is synthesized)
gttaataaatgacagaacctgaagaagtcataggaaagaaacttgagcggtatactcagaatggtgagccctgaattttgcagaccgctaaggctatagacaaattttatatttcatgtt

SEQ ID NO: 589282 - DNA, 120 bp, Artificial Sequence
  ENSG00000172969_9 (sequence is synthesized)
agacatttgataccttttggatgtctgatgacagtcgtgcatttctatataatcagaaaaatattaggttgcaatcgtgaattttcatattttagattgtagaaaagtaaatataaaatt

SEQ ID NO: 589283 - DNA, 67 bp, Artificial Sequence
  ENSG00000172969_10 (sequence is synthesized)
ttgtagaaaagtaaatataaaattatatgctctttttttttttgagacagtcttgctattcctgggt

SEQ ID NO: 589284 - DNA, 120 bp, Artificial Sequence
  ENSG00000172969_11 (sequence is synthesized)
aagtagctgggactacaggcatgtaccgccatgcctggctaatgtttttttcttgtattgttagtagagttttgtcacgttggccaggttggcctcggactcaagtgatccaccagcctc

SEQ ID NO: 589285 - DNA, 120 bp, Artificial Sequence
  ENSG00000172969_12 (sequence is synthesized)
cctccacctcccgacgtggtggggttacaggcatgagccgctttaccaagaaattgcttctcttttaattcggaaaaggttgtaggctcttccagcctgaacccatggagtactaacatc

SEQ ID NO: 589286 - DNA, 120 bp, Artificial Sequence
  ENSG00000172969_13 (sequence is synthesized)
cacaaaccattaatagcactccctgtgggaaaatgtttatacatttttacagtttgcatagtaaaattactatgcaagctgtttacttttaatatttctacataaaatttaagtcaagat

SEQ ID NO: 589287 - DNA, 120 bp, Artificial Sequence
  ENSG00000172969_14 (sequence is synthesized)
atattaaatggtaaatgattgtacttatttattcatctgcctcatgttttatttcattttaaacatcctgaatttatattttattgtatttcatacatttcaattgattgtactgtattg

SEQ ID NO: 589288 - DNA, 120 bp, Artificial Sequence
  ENSG00000172969_15 (sequence is synthesized)
caggatatggagatttcatcacatactacaatacagtgtattttgttatatttgacgtatattctacttgtattttgtactgagatcatacaatctttcattatctaagtgtattaatga

SEQ ID NO: 589289 - DNA, 120 bp, Artificial Sequence
  ENSG00000172969_16 (sequence is synthesized)
cttgtttggttgctttataattttcattttatgtaataatgaaataaacattaatgttgtttggaattttaaatttctttcatatggaatttgtatttaataaagatgtgaaaaagagaa

SEQ ID NO: 589290 - DNA, 120 bp, Artificial Sequence
  ENSG00000172977_0 (sequence is synthesized)
agtggagggagggaagatggcggaggtggtgagtccggtgcccggggcggggcggagggagccaggggaggtgggtagagcccgaggccccccagtagccgaccctggcgtcgcgctgtc

SEQ ID NO: 589291 - DNA, 120 bp, Artificial Sequence
  ENSG00000172977_1 (sequence is synthesized)
tccccagggggagataatcgagggctgccgcctacccgtgctgcggcggaaccaggacaacgaagatgagtggcccctggccgagatcctgagcgtgaaggacatcagtggccggaagct

SEQ ID NO: 589292 - DNA, 120 bp, Artificial Sequence
  ENSG00000172977_2 (sequence is synthesized)
tttctacgtccattacattgacttcaacaaacgtctggatgaatgggtgacgcatgagcggctggacctaaagaagatccagttccccaagaaagaggccaagacccccactaagaacgg

SEQ ID NO: 589293 - DNA, 120 bp, Artificial Sequence
  ENSG00000172977_3 (sequence is synthesized)
acttcctgggtcccgtcctggctctccagagagagaggtgccggcctcggcgcaggccagcgggaagaccttgccaatcccggtccagatcacactccgcttcaacctgcccaaggagcg

SEQ ID NO: 589294 - DNA, 120 bp, Artificial Sequence
  ENSG00000172977_4 (sequence is synthesized)
ggaggccattcccggtggcgagcctgaccagccgctctcctccagctcctgcctgcagcccaaccaccgctcaacgaaacggaaggtggaggtggtttcaccagcaactccagtgcccag

SEQ ID NO: 589295 - DNA, 120 bp, Artificial Sequence
  ENSG00000172977_5 (sequence is synthesized)
cgagacagccccggcctcggtttttccccagaatggagccgcccgtagggcagtggcagcccagccaggacggaagcgaaaatcgaattgtttgggcactgatgaggactcccaggacag

SEQ ID NO: 589296 - DNA, 120 bp, Artificial Sequence
  ENSG00000172977_6 (sequence is synthesized)
ctctgatggaataccgtcagcaccacgcatgactggcagcctggtgtctgatcgaagccacgacgacatcgtcacccggatgaagaacattgagtgcattgagctgggccggcaccgcct

SEQ ID NO: 589297 - DNA, 120 bp, Artificial Sequence
  ENSG00000172977_7 (sequence is synthesized)
caagccgtggtacttctccccgtacccacaggaactcaccacattgcctgtcctctacctgtgcgagttctgcctcaagtacggccgtagtctcaagtgtcttcagcgtcatttgaccaa

SEQ ID NO: 589298 - DNA, 120 bp, Artificial Sequence
  ENSG00000172977_8 (sequence is synthesized)
aagggcaccatctccttctttgagattgatggacgtaagaacaagagttattcccagaacctgtgtcttttggccaagtgtttccttgaccataagacactgtactatgacacagaccct

SEQ ID NO: 589299 - DNA, 120 bp, Artificial Sequence
  ENSG00000172977_9 (sequence is synthesized)
ttcctcttctacgtcatgacagagtatgactgtaagggcttccacatcgtgggctacttctccaaggagaaagaatcaacggaagactacaatgtggcctgcatcctaaccctgcctccc

SEQ ID NO: 589300 - DNA, 120 bp, Artificial Sequence
  ENSG00000172977_10 (sequence is synthesized)
taccagcgccggggctacggcaagctgctgatcgagttcagctatgaactctccaaagtggaagggaaaacagggacccctgagaagcccctctcagaccttggcctcctatcctatcga

SEQ ID NO: 589301 - DNA, 120 bp, Artificial Sequence
  ENSG00000172977_11 (sequence is synthesized)
agctactggtcccagaccatcctggagatcctgatggggctgaagtcggagagcggggagaggccacagatcaccatcaatgagattagtgaaatcaccagcatcaagaaggaggatgtc

SEQ ID NO: 589302 - DNA, 120 bp, Artificial Sequence
  ENSG00000172977_12 (sequence is synthesized)
atctccactctgcagtacctcaatctcatcaactactacaagggccagtacatcctcacactgtcagaggacatcgtggatggccatgagcgggccatgctcaagcggctcctgcggatc

SEQ ID NO: 589303 - DNA, 120 bp, Artificial Sequence
  ENSG00000172977_13 (sequence is synthesized)
gactccaagtgtctgcacttcactcccaaggactggagcaagagggggaagtggtgaccagacactgcccactgcagtgccaagacggcagcaggactggggctgatagcccaccccgcc

SEQ ID NO: 589304 - DNA, 120 bp, Artificial Sequence
  ENSG00000172977_14 (sequence is synthesized)
cccactgcagctcccacaaagcactctaagggagatggggctgaggacagctcaaaaaggagaggacaggcctggcaggggcccactggtgcccagcaccaaggcgagctccgggctcag

SEQ ID NO: 589305 - DNA, 120 bp, Artificial Sequence
  ENSG00000172977_15 (sequence is synthesized)
accaactccaaggtcagctggccacaggcccaggcctcctctgaagcagggaccagagggagccaggcagctgtgtacagtgagaagggatccggatgggggagctctgtacagagggct

SEQ ID NO: 589306 - DNA, 120 bp, Artificial Sequence
  ENSG00000172977_16 (sequence is synthesized)
ggtgattgtaaaaatttcttttgtaaagtagaagttgggggtggggtgggtgctggctgcaaaaatttctggcttctcttacccctattgcccccggcaataaattgtttctatatgcca

SEQ ID NO: 589307 - DNA, 120 bp, Artificial Sequence
  ENSG00000172977_17 (sequence is synthesized)
acgtgacggactcagtagaccgccactggctgtgcacgttatggggtttccacctagggctcggcctgaggcttgtaacactccgttttcccccgagtcacaggggcagtcttgcccctc

SEQ ID NO: 589308 - DNA, 120 bp, Artificial Sequence
  ENSG00000172977_18 (sequence is synthesized)
gcagctgggtcgcggtgtctctcaaaggtccccctctacaggggcttcgtgaggcccgggcccacagggcgctcggtcccggaagtgacgtctcccagaggggccggaagtggcagtgga

SEQ ID NO: 589309 - DNA, 120 bp, Artificial Sequence
  ENSG00000172977_19 (sequence is synthesized)
ctcatggttgactgcagctgctcctctcagtgccctcatgccctccactgtgctcagcgcacggaaagagtgaatactcagttcttcctgagggaactgaggcacagagaagtggagggc

SEQ ID NO: 589310 - DNA, 120 bp, Artificial Sequence
  ENSG00000172977_20 (sequence is synthesized)
atagaactgccaagtggcagggccatgataggaactaggcagcctgccttggcaacctgtgtttttaaatgttgcttatgttcatctgtgacctcttactcaccctctcctgctccattg

SEQ ID NO: 589311 - DNA, 120 bp, Artificial Sequence
  ENSG00000172977_21 (sequence is synthesized)
aactgaaatcccgggatggggaggggcgtctggaattatggggcgggcgaggcgcagatactttgatgaaggggcgtggctcttagctgctccgagagccctggccgagatcctgagcgt

SEQ ID NO: 589312 - DNA, 120 bp, Artificial Sequence
  ENSG00000172977_22 (sequence is synthesized)
acttgtgactgaaggaggcttaggagagacctaagtgctggagcttagggatccggcctgggggtggagttcaggtcgtggaagggtggagtctcatagcctggcctgtctaaggcccct

SEQ ID NO: 589313 - DNA, 120 bp, Artificial Sequence
  ENSG00000172977_23 (sequence is synthesized)
gactcccaagactgttagatagggagtcagtggtcagagtctcactttggacacattagtttgaggagccgtggtcagagtctcactttggacacattagttcgttggctgctgttaaaa

SEQ ID NO: 589314 - DNA, 120 bp, Artificial Sequence
  ENSG00000172977_24 (sequence is synthesized)
aacattaaaaggcagtggtctctcctggtcaggcttagaatggaggtgtgcggagcaaggcgggaaacttgcctgactgagcagggaggcactcagacaccatcacacatctggcacaca

SEQ ID NO: 589315 - DNA, 120 bp, Artificial Sequence
  ENSG00000172977_25 (sequence is synthesized)
ggcttttcaacactgaggagcagccctgcctaagctgcgggctggtggagtgggtcaggcccagccagggaagaacactcatcacctagcagcctggggcatagcacgaacagtgaagct

SEQ ID NO: 589316 - DNA, 120 bp, Artificial Sequence
  ENSG00000172977_26 (sequence is synthesized)
ggaagcttttctacgtccattacattgactgtgagttctgggcctgaggtggggcatcagggtagggttgggggacagtctttggcattctgtcctgagccatccccactgctacagtca

SEQ ID NO: 589317 - DNA, 120 bp, Artificial Sequence
  ENSG00000172977_27 (sequence is synthesized)
ccttttctctcctgcctcctatttctcttgtctgttggcattaggagctcctggatgggcaggaggcggctccctctcaccctgacttcatcttgcaaaggatgggggccaaattgcaca

SEQ ID NO: 589318 - DNA, 120 bp, Artificial Sequence
  ENSG00000172977_28 (sequence is synthesized)
tgtagctcccagagtccagtagctagtcctgtgtccttcagaaggcgagggtggggtttgataattttgaggtgagggacccctcttccccttccccatcccactgccatccccgcccca

SEQ ID NO: 589319 - DNA, 120 bp, Artificial Sequence
  ENSG00000172985_0 (sequence is synthesized)
acagaacccgttgagcttcgtgcccggcagcacccccggtcccccgcgcggggcggacttgcggcgggacaggtgtagcccgcagccgcaggcgctgcgctcaggactgggcgggctcgg

SEQ ID NO: 589320 - DNA, 120 bp, Artificial Sequence
  ENSG00000172985_1 (sequence is synthesized)
ctggccggtccccgccacgcaggccggtccccgccacgcaggccggtcggtgagccacttcgcaccgccacagccctagcatcgggccaccagccggggtgaagaaagtcacggcggagc

SEQ ID NO: 589321 - DNA, 120 bp, Artificial Sequence
  ENSG00000172985_2 (sequence is synthesized)
ccggctccccagtcctgatgctggctgccggtggcgggctccacgccggccccgggacctaggcagccgcgcgagaccgctgcgggcgcctcccccatgctgctcggagcgtcctggctg

SEQ ID NO: 589322 - DNA, 120 bp, Artificial Sequence
  ENSG00000172985_3 (sequence is synthesized)
ccgccgctgctgcgcagagcgagggcgacgaggacaggccaggcgagcgacggcggcgtcgggcggcggccaccgccgcgggggcgggcgaggacatggacgagtcgtcgctgctggacc

SEQ ID NO: 589323 - DNA, 120 bp, Artificial Sequence
  ENSG00000172985_4 (sequence is synthesized)
tcgtcgctgctggacctgctggagtgctccgtgtgtctggagcgcctggacaccacggccaaggtgctgccatgccaacacactttctgccgccgctgcctggagagcatcgtgtgctcg

SEQ ID NO: 589324 - DNA, 120 bp, Artificial Sequence
  ENSG00000172985_5 (sequence is synthesized)
cgccacgagctgcgctgccccgagtgccgcatcctggtgggctgcggcgtggacgaactgcccgccaacatcttgctggtgcgactgctggacggcatccgtcagcggccccgcgcgggc

SEQ ID NO: 589325 - DNA, 80 bp, Artificial Sequence
  ENSG00000172985_6 (sequence is synthesized)
gccagagtgcggcccccacgctcgcgggcggcgggggcggcgcggcaggcagcaccccgggttccccggttttcctctcc

SEQ ID NO: 589326 - DNA, 120 bp, Artificial Sequence
  ENSG00000172985_7 (sequence is synthesized)
gcggccgcgggcagcaccgccggcagtctgcgggagctggcgaccagcaggaccgcgccggcggcaaagaatccctgcctgcttccctatggcaaggccctctacagctacgaggggaag

SEQ ID NO: 589327 - DNA, 120 bp, Artificial Sequence
  ENSG00000172985_8 (sequence is synthesized)
gaacctggtgacctcaagttcaacaagggggacatcatcgtcctgcggcgcaaggtggatgaacagtggtaccacggcgagctgcacggcacacagggcttcctcccagccagctatatc

SEQ ID NO: 589328 - DNA, 120 bp, Artificial Sequence
  ENSG00000172985_9 (sequence is synthesized)
cagtgcatccagcccttgccacacgccccgccccagggaaaagcactttatgatttcgagatgaaggacaaagaccaagacaaggactgtctgaccttcaccaaggacgagattctgacg

SEQ ID NO: 589329 - DNA, 120 bp, Artificial Sequence
  ENSG00000172985_10 (sequence is synthesized)
gtgctcaggagagtggatgagaactgggcggaaggcatgctgggagacaagatcgggatcttcccgctcctgtacgtggagctcaatgactccgccaagcagctcattgagatggacaag

SEQ ID NO: 589330 - DNA, 120 bp, Artificial Sequence
  ENSG00000172985_11 (sequence is synthesized)
ccatgcccagccgctgcatccagctgcaatgcctccctgccctctgactccggcgctgtggccagcgtggccccaagtcccactttaagcagctcaggggcggtcagtgcctttcagcgg

SEQ ID NO: 589331 - DNA, 120 bp, Artificial Sequence
  ENSG00000172985_12 (sequence is synthesized)
cgtgtggatggcaagaagaacaccaagaaacgccactccttcaccgcgctcagtgtgacgcacagatcctcccaggctgccagccacaggcattccatggaaattagtgctccagtgttg

SEQ ID NO: 589332 - DNA, 120 bp, Artificial Sequence
  ENSG00000172985_13 (sequence is synthesized)
atcagctccagcgatccccgagccgcggccaggattggagaccttgctcatctgtcgtgcgctgctcccacccaggatgtctcctcctcggcgggatctacccccacggctgtcccacgg

SEQ ID NO: 589333 - DNA, 120 bp, Artificial Sequence
  ENSG00000172985_14 (sequence is synthesized)
gctgcctcggtgtctggagagcagggcacgcctcccaaggtccagctgcccctcaacgtgtacctggcgctctacgcctacaagccccagaagagtgacgagctggagctgcacaaggga

SEQ ID NO: 589334 - DNA, 120 bp, Artificial Sequence
  ENSG00000172985_15 (sequence is synthesized)
gagatgtaccgggtcctcgagaagtgtcaggatggctggttcaagggggcgtctctgaggaccggggtctctggggtgttccccggaaactacgtgacacccgtttccagggtgcctgca

SEQ ID NO: 589335 - DNA, 120 bp, Artificial Sequence
  ENSG00000172985_16 (sequence is synthesized)
ggaggggcagggccgccccggaataatgtagtcggagggtctccactggccaaagggataaccacaaccatgcacccaggcagtgggagtctgagcagcctggccactgccaccaggccc

SEQ ID NO: 589336 - DNA, 120 bp, Artificial Sequence
  ENSG00000172985_17 (sequence is synthesized)
gccctgcccatcaccactccccaggcccacgcccagcaccccacagcctcgcccccaacaggcagctgtctacggcactcagcccagccaacggccagccaagcccggagcaccatttca

SEQ ID NO: 589337 - DNA, 120 bp, Artificial Sequence
  ENSG00000172985_18 (sequence is synthesized)
acagctgcccactctgcagcccaggctcaggaccggccaactgccaccgtgtcacccctgcgcacccagaactctccatcccgcctgcctgccaccagcctcaggccccactcggtggtg

SEQ ID NO: 589338 - DNA, 120 bp, Artificial Sequence
  ENSG00000172985_19 (sequence is synthesized)
tccccgcagcacagccaccagcccccggtgcagatgtgcccacggccggccatccccctcacatcagcagcatcagccatcacacctcccaacgtcagtgccgcaaacctcaacggggag

SEQ ID NO: 589339 - DNA, 120 bp, Artificial Sequence
  ENSG00000172985_20 (sequence is synthesized)
gctggaggggggcccatcggtgttctgtccacatccagccccaccaacacgggatgcaaactagacgagaagaaaagtgaaaagaaagagaagaagagtgggctcctgaagcttctagcc

SEQ ID NO: 589340 - DNA, 120 bp, Artificial Sequence
  ENSG00000172985_21 (sequence is synthesized)
ggagcatccaccaagaagaagtcacgctccccgccatctgtgtctccaacccacgacccccaggtggccgtggacgccctgctccaaggtgcagtgggccccgaagtgtcctcactgtcc

SEQ ID NO: 589341 - DNA, 120 bp, Artificial Sequence
  ENSG00000172985_22 (sequence is synthesized)
atccacggcagggcagggtcctgccccatagagagcgagatgcagggtgccatggggatggagcctctgcacaggaaggcaggctccttggatctaaacttcacatctccttcccggcaa

SEQ ID NO: 589342 - DNA, 120 bp, Artificial Sequence
  ENSG00000172985_23 (sequence is synthesized)
gctccgctgtccatggctgccatccgccccgagcccaagctgttgcccagagagaggtaccgcgtggtggtctcgtacccaccccagagtgaggcggagatcgagctgaaggaaggcgac

SEQ ID NO: 589343 - DNA, 120 bp, Artificial Sequence
  ENSG00000172985_24 (sequence is synthesized)
aggcctcttcccgggcagcttcgtcgagagcttctgagaactggtgctccctgcacccagctcacagagggggaggccgcctgggaagctccacggcacacagagagggagccatggcgc

SEQ ID NO: 589344 - DNA, 120 bp, Artificial Sequence
  ENSG00000172985_25 (sequence is synthesized)
cccaagggttccaggtcatctccaaggcacctggcgggggataccctggcccagggtgggggccagggactgtggaggtcgtgccttctcccaaaacccccaaacggagagcacacctgg

SEQ ID NO: 589345 - DNA, 120 bp, Artificial Sequence
  ENSG00000172985_26 (sequence is synthesized)
gatgttcttcaaggaaatgcccaccccctctgtggaaactgcaaagaaagcaccttgaggaagagaggcaggtgccggcgcaggcaggcctgtggctgtggtttgcagccatggcagcgt

SEQ ID NO: 589346 - DNA, 120 bp, Artificial Sequence
  ENSG00000172985_27 (sequence is synthesized)
tctcatttaccacctaagcagggttggaggttgcaggaggtctgcaggcgaggtgggtggcatgggggccaggagcgctggagatcatctttctgggctgccctgggcttcccgcggggc

SEQ ID NO: 589347 - DNA, 120 bp, Artificial Sequence
  ENSG00000172985_28 (sequence is synthesized)
ccaggttgctctgtcaccattctatatacctcagtcacctgccgcccggctgctcagcaggggtgtttgtgaggccctgggggtgccccggaaggggcaccccaccgcccctgttgggaa

SEQ ID NO: 589348 - DNA, 120 bp, Artificial Sequence
  ENSG00000172985_29 (sequence is synthesized)
ccagagcagaatctgtgggcttgtcgcctgccagtagtataagcaacactttctgttcaccaccattgtcccttgcattacttctttcttacagcatatttttaacataaagctgttaga

SEQ ID NO: 589349 - DNA, 120 bp, Artificial Sequence
  ENSG00000172985_30 (sequence is synthesized)
ctttatatatttctaataggtcagacattgcctatttttcatacatctggtgctgcctttttgtaaaactaataatgacttggttgagcttgaaagaaaagatgtctgaggcgacatcaa

SEQ ID NO: 589350 - DNA, 120 bp, Artificial Sequence
  ENSG00000172985_31 (sequence is synthesized)
aggggcagaatttttatatttcccatatggctttgggagagcgccgagaagccgccatcccgcacctcagcgctggccagtactctgggggctggcggggtggatccattgagggggtcg

SEQ ID NO: 589351 - DNA, 120 bp, Artificial Sequence
  ENSG00000172985_32 (sequence is synthesized)
gagggagcttggaagcagccggtttctttaaactcttaccaaaaccccgcgctctgtctagacggtgatgattattattcaagacctggaaacatttcgaggaagggccactataattgt

SEQ ID NO: 589352 - DNA, 120 bp, Artificial Sequence
  ENSG00000172985_33 (sequence is synthesized)
ccttttgtgtggcggtagaaggagcacgcaggtcaaccccagccgggaaggcaaaatcttccctttattgcctcagagagaactgcaattagcattctcagaagatgatttcttggtatc

SEQ ID NO: 589353 - DNA, 120 bp, Artificial Sequence
  ENSG00000172985_34 (sequence is synthesized)
aaaatgtgcagtttctacaacagtttagatcaccaccaccatttttcttcttttttaaaaataaataactgctcccatttcaggcagtgcaaaccttcatctgctggagaccagaggtac

SEQ ID NO: 589354 - DNA, 120 bp, Artificial Sequence
  ENSG00000172985_35 (sequence is synthesized)
aaggagatcagggggttgcagcaccgctgcaggcttgcaagatcggggagttgggagggcgagagaggaggaggtgcagctttgatgctgggacctccctgagtggggctgatgaatgta

SEQ ID NO: 589355 - DNA, 120 bp, Artificial Sequence
  ENSG00000172985_36 (sequence is synthesized)
tattcattagcaccatggctcacttcccaggaagactgatcaggagcccttcagggacaattttgttctcaagattcacaccttaggaacacatttttatcacctcaaaattttgatcca

SEQ ID NO: 589356 - DNA, 120 bp, Artificial Sequence
  ENSG00000172985_37 (sequence is synthesized)
tcacccctctctccacctatatttttacaaataccattcagacttaaattaagctgaagaaactagcctttggtaacatagggtgtcattggttttcagggatgtaaccaattccagaaa

SEQ ID NO: 589357 - DNA, 120 bp, Artificial Sequence
  ENSG00000172985_38 (sequence is synthesized)
tacattcttttgcctggcatgaagactttgaaacacgggccgcttattttcagagttcctgttttgggacgtgacttggctacttgttacttccaggtggtcaccacacggcgggggtca

SEQ ID NO: 589358 - DNA, 120 bp, Artificial Sequence
  ENSG00000172985_39 (sequence is synthesized)
tgcctttccctcccccaagatgataatagatttaatagactcaaagaagttgttcagaatcaaagaagaaaaagtctggcttaaacatagtaacttctgtgtgccaggttaatgacaacc

SEQ ID NO: 589359 - DNA, 120 bp, Artificial Sequence
  ENSG00000172985_40 (sequence is synthesized)
aaaagctctctatttaccattattgccaaacttcatcagttgcccatcctgcaccaaaatcctgtgcgtgtttaaattcacgttgtcaccaaagaggtgcacagatcaacaacctggatg

SEQ ID NO: 589360 - DNA, 120 bp, Artificial Sequence
  ENSG00000172985_41 (sequence is synthesized)
acgcaggtgttctccagggaaaccagaccaagtcaagtctccaggtaacttttttgaagtcttttttttaaggcgcgcaggtaccaagcaacagaatagagtaacctgaacgttcttact

SEQ ID NO: 589361 - DNA, 120 bp, Artificial Sequence
  ENSG00000172985_42 (sequence is synthesized)
ctcccaggcatggcccacgtggtgcttcaggtagaaatgtgcttcaccctcctggtggggggcgaggacacagcccactgcatgcagcatggtagagagctggggcgaatatctccatgt

SEQ ID NO: 589362 - DNA, 120 bp, Artificial Sequence
  ENSG00000172985_43 (sequence is synthesized)
ctttggaggatgtcagctggccgctttcagggcagagtcgggtgggcgttggtgccaccttaggaaggagagcgatgcgtgggtctggccagagctctggagccaatgccgggctgcctg

SEQ ID NO: 589363 - DNA, 120 bp, Artificial Sequence
  ENSG00000172985_44 (sequence is synthesized)
agagcagaggaaatgcatggcccatgtgcatttctgagtattttaaactcgttcaggccctgcagccttcatgatgatgtagctcgcagagaagagcaggagcagaattagccctttctt

SEQ ID NO: 589364 - DNA, 120 bp, Artificial Sequence
  ENSG00000172985_45 (sequence is synthesized)
caggccatcttgcctcaaagggtacacatgtttggcggttaagatgaaactaacccttatgtttcatcctggccccatgatgtacacatcttagccatgtagtggccttggggggccaca

SEQ ID NO: 589365 - DNA, 120 bp, Artificial Sequence
  ENSG00000172985_46 (sequence is synthesized)
gagatttcctttgaggagcatggtagagtccacagccatggctgaagtcagtggacaccgaggggacaggactgcaggccaccaggggcctctgcccagagggaggcagagaggatggcg

SEQ ID NO: 589366 - DNA, 120 bp, Artificial Sequence
  ENSG00000172985_47 (sequence is synthesized)
gccacgggtgctctcctggcatcctcatggggtgatgccaggccgggcacttcaaaacaggctcagccgactgggagatcctttgtactttgcacagttcacacacacaaacacacacac

SEQ ID NO: 589367 - DNA, 120 bp, Artificial Sequence
  ENSG00000172985_48 (sequence is synthesized)
cctatcccaagtgtttttgttagacacaaatgtcagcgtgtgattttggaagacttgtcagtgatgacaaaccatgatgcctgtgtttctgagtctttaaataaaaatgaacatggagaa

SEQ ID NO: 589368 - DNA, 80 bp, Artificial Sequence
  ENSG00000172986_0 (sequence is synthesized)
ctctcctctctctcctcctccttcgccgtcgccgccgccgccggccgcccgccggccgccacgaccccagtccccggcgg

SEQ ID NO: 589369 - DNA, 80 bp, Artificial Sequence
  ENSG00000172986_1 (sequence is synthesized)
cctgggggccgccgccgccgccgcgccgcaccatgaagctccgcagcaaggcggcggcgctgctcttgctcgcgctggcc

SEQ ID NO: 589370 - DNA, 80 bp, Artificial Sequence
  ENSG00000172986_2 (sequence is synthesized)
cttgctcgcgctggccgcgctgctgctggcgctgctgtccctgcgcgctggccgcgctgagcccccagcgctgcccgcgc

SEQ ID NO: 589371 - DNA, 120 bp, Artificial Sequence
  ENSG00000172986_3 (sequence is synthesized)
cccggggccagcccgggagttcggaggcgccggcccccgcgtccgcgcccccgagcgggccgccggggcgctgcgagactggagaagttggcgaggaggcctggagaacccaggagtttc

SEQ ID NO: 589372 - DNA, 120 bp, Artificial Sequence
  ENSG00000172986_4 (sequence is synthesized)
ggagtttccaagctgtgctgccacccgagctctggatccacctggctgtggtggcctgtggcaatcggctggaggagacgctggtcatgctcaaatcagctgtgctttttagccacagga

SEQ ID NO: 589373 - DNA, 120 bp, Artificial Sequence
  ENSG00000172986_5 (sequence is synthesized)
agatccaattccacatcttcactgaagactctctgaagcccgagtttgataagcagttacgccagtggcctgactcatatacaaagaagtttgagcacagaatctaccccatcacatttt

SEQ ID NO: 589374 - DNA, 120 bp, Artificial Sequence
  ENSG00000172986_6 (sequence is synthesized)
ctgttggaaaccctcaggagtggaagaaattgttcaaaccctgtgctgcccagagactctttcttccggtgattttaaaggatgtggactcacttctctacgtggacaccgatgtcctct

SEQ ID NO: 589375 - DNA, 120 bp, Artificial Sequence
  ENSG00000172986_7 (sequence is synthesized)
ttctgagacctgttgatgacatctggaagcttctgaggctgtttaattccacccagcttgcagccatggcccctgagcacgaaatccccaagattggctggtacagccgctttgctaggc

SEQ ID NO: 589376 - DNA, 120 bp, Artificial Sequence
  ENSG00000172986_8 (sequence is synthesized)
atcctttctatggctctgcaggagttaattcaggagtcatgttaatgaatttaactcggataagaagtacccagttcaagaacagcatgattccaacaggcctggcttgggaggacatgt

SEQ ID NO: 589377 - DNA, 120 bp, Artificial Sequence
  ENSG00000172986_9 (sequence is synthesized)
tgtaccctctgtaccagaagtacaagaatgccatcacgtggggagaccaggatttattaaatattattttttatttcaacccagagtgtctctatgtattcccctgccagtggaactacc

SEQ ID NO: 589378 - DNA, 120 bp, Artificial Sequence
  ENSG00000172986_10 (sequence is synthesized)
gtcccgatcactgcatgtacggaagcaactgcagagaggctgagcatgaaggtgtgtctgttctgcatggaaaccgaggcgtctaccatgacgataagcaaccaacgttcagagcactct

SEQ ID NO: 589379 - DNA, 120 bp, Artificial Sequence
  ENSG00000172986_11 (sequence is synthesized)
atgaagcaatacgggattttccctttcaagacaatctctttcaatccatgtattacccccttcagctgaagtttttggagactgtgcacactttatgtggacgaatcccgcaagtttttc

SEQ ID NO: 589380 - DNA, 120 bp, Artificial Sequence
  ENSG00000172986_12 (sequence is synthesized)
tgaagcaaattgagaaaacaatgaaaagggcttatgagaaacacgtcatcatccatgttggccccaaccagatgcactgaatattttgtcttgttgcaagtcaattaggtgtcttgtgac

SEQ ID NO: 589381 - DNA, 120 bp, Artificial Sequence
  ENSG00000172986_13 (sequence is synthesized)
ttgtgtgaatatttaatggtgctccatgactgttgagttttaaaaacctcgttaaattttgccaaatcagttgcccccaaaagggaatatgcttttccttatttttttttctaaaatgct

SEQ ID NO: 589382 - DNA, 120 bp, Artificial Sequence
  ENSG00000172986_14 (sequence is synthesized)
atttatctctaaggaaaaaaaaaaaagactattactcatttaacattgtttaagcaggttgagctagctgtgaaaatagcttttgtgagccttctaattcctaaacgtctgagaccattt

SEQ ID NO: 589383 - DNA, 120 bp, Artificial Sequence
  ENSG00000172986_15 (sequence is synthesized)
cagtggcacctgaggtgttatattgatctagcattcctgagactctttctatgcaactgactcccccacacccgtgttataaaagtaatacacacttttgaaacagagagacacacttgt

SEQ ID NO: 589384 - DNA, 120 bp, Artificial Sequence
  ENSG00000172986_16 (sequence is synthesized)
agagcatatgggtcaagggctcaacatcaagattagattagccataatcctattgaccagtggaaaagattgtttccattttaaagcagttccttacaaccttttttctctacttttgca

SEQ ID NO: 589385 - DNA, 120 bp, Artificial Sequence
  ENSG00000172986_17 (sequence is synthesized)
ttttccactctaacacacatctaaaacaggtaatctcagtaaaagctggcctttttgctgagatttttatgtgggagactaaaatattagatgagatgattatgtgtacagaattttatt

SEQ ID NO: 589386 - DNA, 120 bp, Artificial Sequence
  ENSG00000172986_18 (sequence is synthesized)
tgattatgtgtacagaattttatttaaaatacatctgagagaatcattcagatacttgggtagtgttaaaggatgaagcatgtatctgggggtatttcttctttttctttctttcttttt

SEQ ID NO: 589387 - DNA, 120 bp, Artificial Sequence
  ENSG00000172986_19 (sequence is synthesized)
gggattacaagtgtgagccactgcactcagccaatctgggagtatttctaaagaaaaaaattactttgatttgtggaggactaaatcataatacatttctatgcaacaatagcttctgag

SEQ ID NO: 589388 - DNA, 120 bp, Artificial Sequence
  ENSG00000172986_20 (sequence is synthesized)
tgagaggaaattcaggaatgtttgtgtttaccacagacaaaaacatttgatctgttaatcatcagtagctgtggtcatctctctttcttaaactcttgggcaatgggtggaaatcagaga

SEQ ID NO: 589389 - DNA, 120 bp, Artificial Sequence
  ENSG00000172986_21 (sequence is synthesized)
ccaacttcaaatttaatgtgtaaaaaacaaatagttcagctgcttctattggtaagaaaattcaacttcctaccagccttagaaaggtctctttaaacaatttctttccccctagggtta

SEQ ID NO: 589390 - DNA, 120 bp, Artificial Sequence
  ENSG00000172986_22 (sequence is synthesized)
cctagctggtccatacaggttttatcacctcactgcaaggaggaagttgaatattctgttccccacggggatctggcttaatccctagttgctcatatagttggtatcagcatagcaata

SEQ ID NO: 589391 - DNA, 120 bp, Artificial Sequence
  ENSG00000172986_23 (sequence is synthesized)
ttttgcataatgctttatttttctcaaatgactattgcatagatgatcttgatatttgcaacagcctagtggatttggtagggtcctgaatcatctctataaggcaaacaaggaaattgt

SEQ ID NO: 589392 - DNA, 120 bp, Artificial Sequence
  ENSG00000172986_24 (sequence is synthesized)
aacacaaagaaataaacatattgaatataattgctattctgtaagacatacagtctgtgtaagatgtatcttatttacagagacatttttgaaaattaaaatattaaatactttttgtta

SEQ ID NO: 589393 - DNA, 120 bp, Artificial Sequence
  ENSG00000172986_25 (sequence is synthesized)
ctccacagcccttgtgtcagctgtcgaagtttagcaatactatttccaaacatgggccagtaggcagccagcaggcaccagacagctgagtgctggcagaaaaagcctcagacacctata

SEQ ID NO: 589394 - DNA, 120 bp, Artificial Sequence
  ENSG00000172986_26 (sequence is synthesized)
gcagtccaaacagtgactcatcctgctattgccaggataaatatgggaataaatggtatttttctctaagcaggaagaattgtcaaaatgcttatcactttataaaatataacagattgt

SEQ ID NO: 589395 - DNA, 120 bp, Artificial Sequence
  ENSG00000172986_27 (sequence is synthesized)
gcctgatcatgttttgaaatgttctaaccattcactcgccggttttttgttgtttttacttttttgagtttagtaatagctttcacttgttttccctctttctaggaggcctggagaacc

SEQ ID NO: 589396 - DNA, 120 bp, Artificial Sequence
  ENSG00000172987_0 (sequence is synthesized)
aaggacaattagtcactagcgagacccagtaggaagagaggtttaaatcagagggattgaatgagggtgctttgtgccttccctgaagccatgccctccagcaactcccgcccccccgcg

SEQ ID NO: 589397 - DNA, 120 bp, Artificial Sequence
  ENSG00000172987_1 (sequence is synthesized)
tgcctagccccgggggctctctacttggctctgttgctccatctctccctttcctcccaggctggagacaggagacccttgcctgtagacagagctgcaggtttgaaggaaaagaccctg

SEQ ID NO: 589398 - DNA, 120 bp, Artificial Sequence
  ENSG00000172987_2 (sequence is synthesized)
attctacttgatgtgagcaccaagaacccagtcaggacagtcaatgagaacttcctctctctgcagctggatccgtccatcattcatgatggctggctcgatttcctaagctccaagcgc

SEQ ID NO: 589399 - DNA, 120 bp, Artificial Sequence
  ENSG00000172987_3 (sequence is synthesized)
ttggtgaccctggcccggggactttcgcccgcctttctgcgcttcgggggcaaaaggaccgacttcctgcagttccagaacctgaggaacccggcgaaaagccgcgggggcccgggcccg

SEQ ID NO: 589400 - DNA, 120 bp, Artificial Sequence
  ENSG00000172987_4 (sequence is synthesized)
gattactatctcaaaaactatgaggatgacattgttcgaagtgatgttgccttagataaacagaaaggctgcaagattgcccagcaccctgatgttatgctggagctccaaagggagaag

SEQ ID NO: 589401 - DNA, 120 bp, Artificial Sequence
  ENSG00000172987_5 (sequence is synthesized)
gcagctcagatgcatctggttcttctaaaggagcaattctccaatacttacagtaatctcatattaacagccaggtctctagacaaactttataactttgctgattgctctggactccac

SEQ ID NO: 589402 - DNA, 120 bp, Artificial Sequence
  ENSG00000172987_6 (sequence is synthesized)
ctgatatttgctctaaatgcactgcgtcgtaatcccaataactcctggaacagttctagtgccctgagtctgttgaagtacagcgccagcaaaaagtacaacatttcttgggaactgggt

SEQ ID NO: 589403 - DNA, 120 bp, Artificial Sequence
  ENSG00000172987_7 (sequence is synthesized)
aatgagccaaataactatcggaccatgcatggccgggcagtaaatggcagccagttgggaaaggattacatccagctgaagagcctgttgcagcccatccggatttattccagagccagc

SEQ ID NO: 589404 - DNA, 120 bp, Artificial Sequence
  ENSG00000172987_8 (sequence is synthesized)
ttatatggccctaatattgggcggccgaggaagaatgtcatcgccctcctagatggattcatgaaggtggcaggaagtacagtagatgcagttacctggcaacattgctacattgatggc

SEQ ID NO: 589405 - DNA, 120 bp, Artificial Sequence
  ENSG00000172987_9 (sequence is synthesized)
atggacttcctgaaaactcgcctgttagacacactctctgaccagattaggaaaattcagaaagtggttaatacatacactccaggaaagaagatttggcttgaaggtgtggtgaccacc

SEQ ID NO: 589406 - DNA, 120 bp, Artificial Sequence
  ENSG00000172987_10 (sequence is synthesized)
tcagctggaggcacaaacaatctatccgattcctatgctgcaggattcttatggttgaacactttaggaatgctggccaatcagggcattgatgtcgtgatacggcactcattttttgac

SEQ ID NO: 589407 - DNA, 120 bp, Artificial Sequence
  ENSG00000172987_11 (sequence is synthesized)
catggatacaatcacctcgtggaccagaattttaacccattaccagactactggctctctctcctctacaagcgcctgatcggccccaaagtcttggctgtgcatgtggctgggctccag

SEQ ID NO: 589408 - DNA, 120 bp, Artificial Sequence
  ENSG00000172987_12 (sequence is synthesized)
cggaagccacggcctggccgagtgatccgggacaaactaaggatttatgctcactgcacaaaccaccacaaccacaactacgttcgtgggtccattacactttttatcatcaacttgcat

SEQ ID NO: 589409 - DNA, 120 bp, Artificial Sequence
  ENSG00000172987_13 (sequence is synthesized)
cgatcaagaaagaaaatcaagctggctgggactctcagagacaagctggttcaccagtacctgctgcagccctatgggcaggagggcctaaagtccaagtcagtgcaactgaatggccag

SEQ ID NO: 589410 - DNA, 120 bp, Artificial Sequence
  ENSG00000172987_14 (sequence is synthesized)
cccttagtgatggtggacgacgggaccctcccagaattgaagccccgcccccttcgggccggccggacattggtcatccctccagtcaccatgggcttttatgtggtcaagaatgtcaat

SEQ ID NO: 589411 - DNA, 120 bp, Artificial Sequence
  ENSG00000172987_15 (sequence is synthesized)
gctttggcctgccgctaccgataagctatcctcacactcacggctaccagtgggcctgctgggctgcttccactcctccactccagtagtatcctctgttttcagacatcctagcaacca

SEQ ID NO: 589412 - DNA, 120 bp, Artificial Sequence
  ENSG00000172987_16 (sequence is synthesized)
gcccctgctgccccatcctgctggaatcaacacagacttgctctccaaagagactaaatgtcatagcgtgatcttagcctaggtaggccacatccatcccaaaggaaaatgtagacatca

SEQ ID NO: 589413 - DNA, 120 bp, Artificial Sequence
  ENSG00000172987_17 (sequence is synthesized)
cctgtacctatataaggataaaggcatgtgtatagagcagaatgtttcccttcatgtgcactatgaaaacgagctgacagcacactcccaggagaaatgtttccagacaactccccatga

SEQ ID NO: 589414 - DNA, 120 bp, Artificial Sequence
  ENSG00000172987_18 (sequence is synthesized)
tcctgtcacacagcattataaccacaaatccaaaccttagcctgctgctgctgctgccctcagaggaagatgaggaaggaaaaaaactgggtggacctacaaaaacccatcctctcccaa

SEQ ID NO: 589415 - DNA, 120 bp, Artificial Sequence
  ENSG00000172987_19 (sequence is synthesized)
ttttgacacatctctttccataggggagtaatgggtgtgtcagccctggcctgctgggagagctgtttgtatgatttcccggctgatgtatgagcgtgcgcatctgggttcctgacagtg

SEQ ID NO: 589416 - DNA, 120 bp, Artificial Sequence
  ENSG00000172987_20 (sequence is synthesized)
ttctattcctctgtgaatccagattcccccagagttgtaatgggagtcaagtaacaatattcattgagtggagagcagtttattaggcacaacaaaaagtagtcatcattcttcatgttg

SEQ ID NO: 589417 - DNA, 120 bp, Artificial Sequence
  ENSG00000172987_21 (sequence is synthesized)
ctatgagggagagtttgagtacaaagagaaagcatactgaaacatcaggtacacacacacaccccaactggacaaagcaaattagacctctccaaaattaagagaatattaggggctcta

SEQ ID NO: 589418 - DNA, 120 bp, Artificial Sequence
  ENSG00000172987_22 (sequence is synthesized)
tagggtaagcccttaattgtttggttaactcaaatcattatttttaaaaaagaagaaaaaagtgtgaatcaaggtcatcactggaagacacaactgaatctaacctttttgcctcttccc

SEQ ID NO: 589419 - DNA, 120 bp, Artificial Sequence
  ENSG00000172987_23 (sequence is synthesized)
aagtagcctatttgagctagaacaaaactttgttagccattttgggagagaatagggaatctagagaatgaagatctggccaaaactatggaatggtaggtaggaagcttctgagttggg

SEQ ID NO: 589420 - DNA, 120 bp, Artificial Sequence
  ENSG00000172987_24 (sequence is synthesized)
caggtgtgaagtgggggatgaggacgttctatatgattcaaggggcatgagggtctttgccaatgagctacagctgaaatgactttcttttctgtggatgtgattttctttctcaggata

SEQ ID NO: 589421 - DNA, 120 bp, Artificial Sequence
  ENSG00000172987_25 (sequence is synthesized)
aatgacaggaatgatgcttttgttagaaggaggagagatttgacactgttccaagtgagacggtgatacaatttctgctgtttgtgaaaggacaggaatggggcgggggcaaggcagggt

SEQ ID NO: 589422 - DNA, 120 bp, Artificial Sequence
  ENSG00000172987_26 (sequence is synthesized)
tgcctagggcagagactagggaggctgcctaagacgcacacggagttaaggatttgggccaagtctgcaaagtgagagatggaagggagattagaccaaagaggagggagagaattctga

SEQ ID NO: 589423 - DNA, 120 bp, Artificial Sequence
  ENSG00000172987_27 (sequence is synthesized)
gcttggagaacggtggatttgggagagggaagctgactacctaattccaggaagcgaggggaccgggttttgacatgcttatcattaagcacaggaggaacagcatacagcagatgtact

SEQ ID NO: 589424 - DNA, 120 bp, Artificial Sequence
  ENSG00000172987_28 (sequence is synthesized)
acagcgagcaagaaagggagagcccgaggaccaggctgcaccaggtcagtggctgtgctcagcatggaagcaactggagagagaggggcagaccctgagaccgccctgcaaggctgccca

SEQ ID NO: 589425 - DNA, 120 bp, Artificial Sequence
  ENSG00000172987_29 (sequence is synthesized)
gaagggacccgtttctctgggaccaggcacctcccactgaggcttcagctctgagagggcaggaaagtgaagtaccaagatgggggcggggcggggggtaggaaataagagaaagaagaa

SEQ ID NO: 589426 - DNA, 120 bp, Artificial Sequence
  ENSG00000172987_30 (sequence is synthesized)
acagattgacaggccaaagtgaggaaaagagaggaaaagagaaatgagactaaaaggtcgttcccccaactgttaaaaatgtgtgcagatatcaacgtctcttctacatactggtacagg

SEQ ID NO: 589427 - DNA, 120 bp, Artificial Sequence
  ENSG00000172987_31 (sequence is synthesized)
tgcgactgcagggccccctgatataacaagagtaaccaaaggtccctaagagcctggccctggggacctatggtttgctttgcgtccttagtaaccccatgataaaggggtactactgtt

SEQ ID NO: 589428 - DNA, 120 bp, Artificial Sequence
  ENSG00000172987_32 (sequence is synthesized)
atccccatttttcctacgaggcatggagaggatccatggctcgcccaggggcacccggggaaatgggttgccgagcgcgaaataatccagagcctgcccactcagccacaaggctcagcg

SEQ ID NO: 589429 - DNA, 120 bp, Artificial Sequence
  ENSG00000172987_33 (sequence is synthesized)
gctccacaggtccagacacctccttcacatctttgtaggttctgctcattcagaacagccagaactccactcaaacacactttctgtaaataagtgttgatttttttttactaaaccttg

SEQ ID NO: 589430 - DNA, 120 bp, Artificial Sequence
  ENSG00000172987_34 (sequence is synthesized)
cagaatatgggtaattcctgcttcttttatctttctctgtgtattaaatgctgctctcacgagatttaagttttgtttattttttagttaataaaaggaagagggaattactgaaattta

SEQ ID NO: 589431 - DNA, 120 bp, Artificial Sequence
  ENSG00000172992_0 (sequence is synthesized)
attcggccacgctttgaggaaagaaggggcgcaaggttggtgggaccgacccttgggaaccgggcggccgcctggcatgatgggagttgtagttcgatgctggtttagggtttcaggcgt

SEQ ID NO: 589432 - DNA, 120 bp, Artificial Sequence
  ENSG00000172992_1 (sequence is synthesized)
ggaggttccaaaatccgaggtttgatttcagcctgcccttgccagtgcctgggccgctgggagccgttattggctgccgttaaggaccgttacgtttcccggcaggtccttctggcactc

SEQ ID NO: 589433 - DNA, 120 bp, Artificial Sequence
  ENSG00000172992_2 (sequence is synthesized)
ctctggtggaccgcccccatcggccacacttgccctgctctccagtgattctgtagctcctggctccgtagtctcgcggacagctctctttcctggaagatgtttctggtgggcctgaca

SEQ ID NO: 589434 - DNA, 120 bp, Artificial Sequence
  ENSG00000172992_3 (sequence is synthesized)
gggggcattgcctcaggcaagagctcagtgatccaggtgttccagcagctgggctgtgcggtgattgacgtggacgtgatggcccggcacgtcgtgcagccaggataccctgcccaccgg

SEQ ID NO: 589435 - DNA, 120 bp, Artificial Sequence
  ENSG00000172992_4 (sequence is synthesized)
cgcatcgtagaggtcttcggcactgaggtcttgctggagaacggcgacataaatcgcaaggtcctgggggacctgatctttaaccagcctgaccggcggcagctgctcaacgccatcacc

SEQ ID NO: 589436 - DNA, 120 bp, Artificial Sequence
  ENSG00000172992_5 (sequence is synthesized)
caccccgagattcgcaaggagatgatgaaggagacgttcaagtacttcctccggggataccgctacgtgattctggatatccccctgctgtttgagaccaagaagttgctcaagtacatg

SEQ ID NO: 589437 - DNA, 120 bp, Artificial Sequence
  ENSG00000172992_6 (sequence is synthesized)
aagcacaccgtggtagtatactgcgaccgggacacacagctggcacggctgatgcggcggaacagcctgaaccgcaaggacgcagaggcccgcatcaatgcccagctgcccctgacagac

SEQ ID NO: 589438 - DNA, 120 bp, Artificial Sequence
  ENSG00000172992_7 (sequence is synthesized)
aaggcccgcatggcccgccatgtcctagacaactcgggcgagtggagtgtcaccaaacgccaggtcatcctcttgcacactgagctggagcgctccctggagtacctgccgctgaggttt

SEQ ID NO: 589439 - DNA, 120 bp, Artificial Sequence
  ENSG00000172992_8 (sequence is synthesized)
cctagtggggcactcaaggcagggagccccaggcctccatctatctccttggaggctgaagccaggtaacacatcctgtttcctctcagccccctccccacacacacacacacacacaca

SEQ ID NO: 589440 - DNA, 120 bp, Artificial Sequence
  ENSG00000172992_9 (sequence is synthesized)
cacacacacacacacacacggactctccgaatcagggctgggcctctgtgccaggccatcccgtctttggagtgtatcctatttgagatcaagaaatagcctgctgtccttcccaccttc

SEQ ID NO: 589441 - DNA, 120 bp, Artificial Sequence
  ENSG00000172992_10 (sequence is synthesized)
cctgagcagcacctacagaacagcaaccgtgatggtgtgtgaaagcaacagtcagagactgctatacatttctgtgggtgggggtagggaatactggctctgtggccctcctcagagctg

SEQ ID NO: 589442 - DNA, 120 bp, Artificial Sequence
  ENSG00000172992_11 (sequence is synthesized)
ggaggccaagggttcactgggcttgaatcctctctaagcacctaccccattgtggcctaaacctcctcagtggaccacgggaaatcatgttggaccaagggtttccatgttcaaacagtc

SEQ ID NO: 589443 - DNA, 120 bp, Artificial Sequence
  ENSG00000172992_12 (sequence is synthesized)
aacaaggccctcccctaggttgagatattttttatactgaaggcccaggccccccagtatggcttgctgccagcaagcagcaaggattctctcgtgggtaacgctgtagccaggcaggac

SEQ ID NO: 589444 - DNA, 120 bp, Artificial Sequence
  ENSG00000172992_13 (sequence is synthesized)
cagcctcttctgggagacccctctccccacgtagggtttgtgtagtgctcccacatcctgcttattgcctgccacccctgcttctcgcctggacctcttggtattccgtgtacaccatcc

SEQ ID NO: 589445 - DNA, 120 bp, Artificial Sequence
  ENSG00000172992_14 (sequence is synthesized)
acctcttggtattccgtgtacaccatccttgctgtttcttgcctctgtgccttcaacctgctgctcctggcctgggataccttttattttcttttatttcttcttccttttttttttttt

SEQ ID NO: 589446 - DNA, 120 bp, Artificial Sequence
  ENSG00000172992_15 (sequence is synthesized)
agttcaggcactgtctaaagccccaggctgggttaggtggtctaggataccaactccccctcaacattttaccttaatccaacagtacagtaattagccgaaacttgcctggtttttcct

SEQ ID NO: 589447 - DNA, 120 bp, Artificial Sequence
  ENSG00000172992_16 (sequence is synthesized)
actagactgtaagccctctagggacagggacagtgtcttattcatctctgtgttcttagtgcagagcctggcccgctgttggtgtttaataaagtgtgttgatctgaaatgccccagacc

SEQ ID NO: 589448 - DNA, 120 bp, Artificial Sequence
  ENSG00000172992_17 (sequence is synthesized)
ctcctctccagatggccccagagcaccccaagctcaggacatgtccctccccagccaagctgtctccctttacttcctttgcctcctctctcccaattattttggcccaaactgatcagt

SEQ ID NO: 589449 - DNA, 120 bp, Artificial Sequence
  ENSG00000172992_18 (sequence is synthesized)
ccgggcgccggggagggggcgggccctggccgcggctgctacgcggggctgccaccgccccgggcgacccaatttcgcggcctagtggggcgtacgggcctcttttgaaagcctgagtta

SEQ ID NO: 589450 - DNA, 120 bp, Artificial Sequence
  ENSG00000172992_19 (sequence is synthesized)
accccgagattcgcaaggagatgatgaaggagacgttcaagtacttcctccgggagccccgtaccagccccagaggaaagaagcacgttccctcagctcttaaggaggctgacagtttaa

SEQ ID NO: 589451 - DNA, 120 bp, Artificial Sequence
  ENSG00000172992_20 (sequence is synthesized)
tgagaagagacacatgaggctttcgagccatgagcccaggaattactggtatatctgcagggcttcgaggcggcagtggctctccccttctgaaattaaacatcggataatgtcaccagc

SEQ ID NO: 589452 - DNA, 120 bp, Artificial Sequence
  ENSG00000172992_21 (sequence is synthesized)
ggtctgcaggcgcgcgctcccgaggtcccgcctcgcccgctgagccggcctgtaagcgctgcggagattgggctagaggcggaggcctgggccacggcggaggcgctgggtccttctggc

SEQ ID NO: 589453 - DNA, 120 bp, Artificial Sequence
  ENSG00000172992_22 (sequence is synthesized)
agaagagacacatgaggctttcgagccatgagcccaggaagtaagttggtttttctagtagggatgggagtaataagagctggtgaataatggagccatagatctgagttcaaatcccaa

SEQ ID NO: 589454 - DNA, 120 bp, Artificial Sequence
  ENSG00000172995_0 (sequence is synthesized)
gtgctattagatttgcaaattgctgatctcccagtgactttccctcttagatcccagttgagtatggttaccttgagaactgtggtattagccatgttagagcatgctccactggggagt

SEQ ID NO: 589455 - DNA, 120 bp, Artificial Sequence
  ENSG00000172995_1 (sequence is synthesized)
tctgtgcagtctatttttaatgctatttaatgaaggagcgagcgcctcactcagcaataaaagaagcatgagggaagacagagcagtgcatggttatggatactggacaaggatatttgg

SEQ ID NO: 589456 - DNA, 120 bp, Artificial Sequence
  ENSG00000172995_2 (sequence is synthesized)
aaaggttgacgatgtgtcacactgtgtaagggaatcgcatggagatgggcattccgaactgttaatggggacatgggactccagttgtctctgatcacttgtgtggattttcctggcgta

SEQ ID NO: 589457 - DNA, 120 bp, Artificial Sequence
  ENSG00000172995_3 (sequence is synthesized)
gaacgacagaagccgctagtaagtcgccaagacctacagcaggaattctgcaccaaagggcataaaatcttgttattttaatttgcatctgggagaatgtctgagcaaggagacctgaat

SEQ ID NO: 589458 - DNA, 120 bp, Artificial Sequence
  ENSG00000172995_4 (sequence is synthesized)
caggcaatagcagaggaaggagggactgagcaggagacggccactccagagaacggcattgttaaatcagaaagtctggatgaagaggagaaactggaactgcagaggcggctggaggct

SEQ ID NO: 589459 - DNA, 120 bp, Artificial Sequence
  ENSG00000172995_5 (sequence is synthesized)
cagaatcaagaaagaagaaaatccaagtcaggagcaggaaaaggtaaactgactcgcagccttgctgtctgtgaggaatcttctgccagaccaggaggtgaaagtcttcaggatcaggaa

SEQ ID NO: 589460 - DNA, 120 bp, Artificial Sequence
  ENSG00000172995_6 (sequence is synthesized)
tcaattcatttacagctttccagtttttccagcctgcaagaggaggataaatctaggaaagatgactctgaaagagaaaaagaaaaggataaaaacaaagataaaacctctgaaaaaccc

SEQ ID NO: 589461 - DNA, 120 bp, Artificial Sequence
  ENSG00000172995_7 (sequence is synthesized)
aagatcagaatgttatcaaaagattgcagccaagaatacacggattctacaggcatagacttacacgagtttctgattaacacattaaagaataattccagggacaggatgatacttttg

SEQ ID NO: 589462 - DNA, 120 bp, Artificial Sequence
  ENSG00000172995_8 (sequence is synthesized)
aaaatggagcaggaaattattgatttcattgctgacaacaataatcattataaaaagttccctcagatgtcatcgtatcagaggatgcttgtccatcgagtggcagcttattttggattg

SEQ ID NO: 589463 - DNA, 120 bp, Artificial Sequence
  ENSG00000172995_9 (sequence is synthesized)
gatcacaatgtggatcaaacaggaaaatctgttatcatcaacaagaccagcagcaccagaataccagagcaaaggttttgtgaacatttaaaagatgaaaaaggtgaagaatcccagaag

SEQ ID NO: 589464 - DNA, 120 bp, Artificial Sequence
  ENSG00000172995_10 (sequence is synthesized)
cggtttatcttgaagcgagataactctagtattgataaagaagacaatcagcaaaacagaatgcatccatttagagatgacagacgaagtaaatcaattgaagagagagaagaggaatat

SEQ ID NO: 589465 - DNA, 120 bp, Artificial Sequence
  ENSG00000172995_11 (sequence is synthesized)
cagagagtgagggagagaatatttgcacacgattcagtttgctcccaggaaagcctttttgtggaaaacagtaggctcttggaagacagtaacatatgcaatgagacctataagaaaaga

SEQ ID NO: 589466 - DNA, 120 bp, Artificial Sequence
  ENSG00000172995_12 (sequence is synthesized)
cagctctttcggggcaacagagatggctcagggagaacatctgggagtcgacagagcagctcagaaaatgaactcaagtggtctgaccaccaaagggcctggagcagcacagactccgac

SEQ ID NO: 589467 - DNA, 120 bp, Artificial Sequence
  ENSG00000172995_13 (sequence is synthesized)
agttccaaccgcaatctaaagcccgccatgaccaagacggcgagttttgggggcatcacggtgctgaccaggggtgacagcacttccagtactaggagtaccgggaagctgtccaaagca

SEQ ID NO: 589468 - DNA, 120 bp, Artificial Sequence
  ENSG00000172995_14 (sequence is synthesized)
ccctagtctcaggtgtggcagctggctctccaggctgtgtgccttatccagagaatggaatagggggccaggttgctcccagcagcaccagctacatcctccttccacttgaagctgcaa

SEQ ID NO: 589469 - DNA, 120 bp, Artificial Sequence
  ENSG00000172995_15 (sequence is synthesized)
caggcatcccgcctggaagcatccttcttaatccacacacaggccagccctttgtgaatcccgatggaactcctgcaatatacaacccacccaccagtcagcagcccctgcgaagcgcca

SEQ ID NO: 589470 - DNA, 120 bp, Artificial Sequence
  ENSG00000172995_16 (sequence is synthesized)
tggtggggcagtcccaacagcagccaccacagcagcagccctccccgcagccccaacagcaggtccagccaccgcagccacagatggcaggccctctggtcactcagagagatgatgtgg

SEQ ID NO: 589471 - DNA, 120 bp, Artificial Sequence
  ENSG00000172995_17 (sequence is synthesized)
caacacagtttggccagatgaccctgagccggcagtcctcgggggagactcctgaacccccatcaggtcctgtctacccatcctcccttatgccacagccggcccagcagcccagctatg

SEQ ID NO: 589472 - DNA, 120 bp, Artificial Sequence
  ENSG00000172995_18 (sequence is synthesized)
taatcgcctctacaggccagcagcttcctacaggaggattctcaggctctggccctcccatctcccagcaggtcctccagccccctccctcaccacagggatttgtgcaacagcctccgc

SEQ ID NO: 589473 - DNA, 120 bp, Artificial Sequence
  ENSG00000172995_19 (sequence is synthesized)
ctgcacagatgcctgtatattattacccatctggtcagtaccctacctcaaccacgcaacagtaccggcccatggccccggttcagtacaacgctcagaggagtcaacagatgccacagg

SEQ ID NO: 589474 - DNA, 120 bp, Artificial Sequence
  ENSG00000172995_20 (sequence is synthesized)
cagcacagcaagcaggttaccagccagtcttgtctggtcaacagggattccaaggcctaataggagtgcagcagccacctcagagtcagaacgtgataaataaccaacaaggaactccgg

SEQ ID NO: 589475 - DNA, 120 bp, Artificial Sequence
  ENSG00000172995_21 (sequence is synthesized)
tgcaaagcgtgatggtttcctacccaacaatgtcttcttatcaggtgccaatgacccagggttctcaaggactgccccagcagtcataccaacagccaatcatgctacctaaccaggcag

SEQ ID NO: 589476 - DNA, 120 bp, Artificial Sequence
  ENSG00000172995_22 (sequence is synthesized)
gtcaagggtcactcccagccactggaatgcctgtttactgtaatgtcacaccgcccacccctcagaacaaccttaggctgattggcccacactgcccctccagcactgtcccagtgatgt

SEQ ID NO: 589477 - DNA, 120 bp, Artificial Sequence
  ENSG00000172995_23 (sequence is synthesized)
cagctagctgcagaacaaactgtgcaagtatgagcaatgctggttggcaggtcaaattctgagagctctggctgtggtacatttcttcagatatttctcatggcctttgatggaagagga

SEQ ID NO: 589478 - DNA, 120 bp, Artificial Sequence
  ENSG00000172995_24 (sequence is synthesized)
acaaggtgggaaaactggctgaggacttaagtattcactcaacactcaaatgattgctgctggtattctgtaaaaaataaacaaagactaatatacacgttagctggttaatggtgcata

SEQ ID NO: 589479 - DNA, 120 bp, Artificial Sequence
  ENSG00000172995_25 (sequence is synthesized)
tttctgtcatgtctgctaggtatgcctttatagcttagctagtgacatgaattcatcaaggtaagattttctcctaccactgaataccactgtgtagattataatatccctaatttggat

SEQ ID NO: 589480 - DNA, 120 bp, Artificial Sequence
  ENSG00000172995_26 (sequence is synthesized)
tagttttgtactttgtgttgagtttgtgatgctaaaagtatttaaaaattatatactaaatcacattgtaccaaagctgtaatggaaaagcaaagaagaattgatgaattgaaggaataa

SEQ ID NO: 589481 - DNA, 120 bp, Artificial Sequence
  ENSG00000172995_27 (sequence is synthesized)
tttatatacattatagagttttcttttttaatggatatatactgtattgtagtgtttaatcaaaataaaactatttgaccttatggaggaaggtcatgtttttaccaccagtttggttca

SEQ ID NO: 589482 - DNA, 120 bp, Artificial Sequence
  ENSG00000172995_28 (sequence is synthesized)
gcttcctcccagtcagtgcaatatccagcagtctcttttcctccccagcacctcctacctgtgtctccaacgcagcactttcccatggtcctccagccccctccctcaccacagggattt

SEQ ID NO: 589483 - DNA, 120 bp, Artificial Sequence
  ENSG00000172995_29 (sequence is synthesized)
atttctacagactgaatctgtggccatagtacttatttcaagataattggccaaggctaggttacatcctgtagccatgcaacagtgacagtaatttgatcacaataatgctgaccccat

SEQ ID NO: 589484 - DNA, 120 bp, Artificial Sequence
  ENSG00000172995_30 (sequence is synthesized)
gacttttgacttcataattatcttgctgtagtcagctggccaacagcacttcatcaatgaaaatatccaccaggaggaatattatcatggggacagttattagagccacctccattttga

SEQ ID NO: 589485 - DNA, 120 bp, Artificial Sequence
  ENSG00000172995_31 (sequence is synthesized)
ctttgccccaagcttggtctggggaaaaagcttcttaaagttgcctcagcagtagtttgctgcctcccagcctggttttaagtatatccataattaacacgacgggtagaggtgcaagaa

SEQ ID NO: 589486 - DNA, 120 bp, Artificial Sequence
  ENSG00000172995_32 (sequence is synthesized)
aacagattttaactctgaaaagccatttccagtgtctatagactattgtgagcctggagaagtagcatttagttgggatagcttcactagagctgcctgccaaagacttccttccacagg

SEQ ID NO: 589487 - DNA, 120 bp, Artificial Sequence
  ENSG00000172995_33 (sequence is synthesized)
atcttgtcgcaccagcaactgacaggagcttgggagctcgggagcttgggagagggcttatgtttttaataatgtagctgtcagttcgaagcctggaaatgttgaccctcaaagggcata

SEQ ID NO: 589488 - DNA, 120 bp, Artificial Sequence
  ENSG00000172995_34 (sequence is synthesized)
tcagctccccaaaatgcacttgcctataagaaacacaattgctggttcatatgaaacttaggaaatagtgaataaggtgcatttaactttggagaaatacttttatggctttggtggaga

SEQ ID NO: 589489 - DNA, 120 bp, Artificial Sequence
  ENSG00000172995_35 (sequence is synthesized)
tttctcaatactgcaaaagttgtccagaaatgaatctgagctgatggtgactttaagttaatattattaatatatcactgcatatttttacccttatttttgctccttacagcaagatta

SEQ ID NO: 589490 - DNA, 120 bp, Artificial Sequence
  ENSG00000172995_36 (sequence is synthesized)
gtaggttataaaaatttaaatttaaacaaaattatttcatgacaaaatgggaaacttcacatcatacttatttttgtttgcctttcaggcatcatattagcttttataaaaaatggtctt

SEQ ID NO: 589491 - DNA, 120 bp, Artificial Sequence
  ENSG00000172995_37 (sequence is synthesized)
gctgctgaaattgtacttattttatcagaggctgggtgcagtcaagacaaaagtaaaatggtttacctgagcccaggggagggaaaattgattaagatatcattatttttgtttggtttg

SEQ ID NO: 589492 - DNA, 120 bp, Artificial Sequence
  ENSG00000172995_38 (sequence is synthesized)
gttttgcttttttcctcttactttaattgaaatactctgaattcccctcatggaaacagagagcattgagagcactttctttaaaaggaccaaaaataaattcctaatagattttgtcct

SEQ ID NO: 589493 - DNA, 120 bp, Artificial Sequence
  ENSG00000172995_39 (sequence is synthesized)
agaagtcgagggtcatttgttcaaaagttggagaaatatcctcttttgttgcttcttctactctgtagtggagaatggggaactggtagttgtgtgggagttatgtgtctctaagatttg

SEQ ID NO: 589494 - DNA, 120 bp, Artificial Sequence
  ENSG00000172995_40 (sequence is synthesized)
ctctctgaaaactgcaaatggaaaggaattcaaaagaatttagattaaaagttaaataaaaagtaggcacagtagtgctgaattttcctcaaaggctctcttttgataaggctgaaccaa

SEQ ID NO: 589495 - DNA, 120 bp, Artificial Sequence
  ENSG00000172995_41 (sequence is synthesized)
tgaatttttaaagccataatcttgttcactcttagaagtaaaaaaaagagaaaatgcattcttagggaataaacatctgataacacattctgaatgtggagactgagatgtctgaaggct

SEQ ID NO: 589496 - DNA, 120 bp, Artificial Sequence
  ENSG00000172995_42 (sequence is synthesized)
cccatatatgtgtgtgcttgaatatatgtattagcagatacatatatctatgcgtacacacatatatgttatttaacacatctacaaatgatctaatttggaaaaaaaattttctttcag

SEQ ID NO: 589497 - DNA, 120 bp, Artificial Sequence
  ENSG00000172995_43 (sequence is synthesized)
ttaattccaaacagaattgtaaaactttttcttatttaaagtctcaatttctggtccttgcaaaggtatacttcctattaccttcaccaggcattaagaataataaatatggagacatca

SEQ ID NO: 589498 - DNA, 120 bp, Artificial Sequence
  ENSG00000172995_44 (sequence is synthesized)
gagtttatcatcaccaggtaataatttcaggattgtggctttatggctctcccattcttaacgtggatcgcatggagtctgcacgctctgctttgatttgaaccctttcccttggcttct

SEQ ID NO: 589499 - DNA, 120 bp, Artificial Sequence
  ENSG00000172995_45 (sequence is synthesized)
gttgtttggtggctgcagctctgcagctccagaagaaaccactagctcggaatccgacggccacacgtttctccagctgtttcattcacatttctcttcttctgacctccatgccgaaca

SEQ ID NO: 589500 - DNA, 120 bp, Artificial Sequence
  ENSG00000172995_46 (sequence is synthesized)
gactaaatctaaaacctggagacgtcctgaaggaaaaataccctatgctgcatgagaattgtttacttttctaatcctaaccaacctttttccttttttatttctatcttttgtacctat

SEQ ID NO: 589501 - DNA, 120 bp, Artificial Sequence
  ENSG00000172995_47 (sequence is synthesized)
tttgttaaaaatcagaaaacctttgacacacttttagataaatacacctactcctttgatcctttgtgtatgtattaccacagggcttaaatatcttaagattttagttaatgtcatttt

SEQ ID NO: 589502 - DNA, 120 bp, Artificial Sequence
  ENSG00000172995_48 (sequence is synthesized)
catgaaagacagtcatttggaagccaagagctctatctatgttttgttcaaatagccgagtaatctactatcttggcagtaattacttctgctgcatttctaatgtgaattgcatgtgag

SEQ ID NO: 589503 - DNA, 120 bp, Artificial Sequence
  ENSG00000172995_49 (sequence is synthesized)
aattattataaaatctgatttaagtgttgaccatagcctccagttccagccagctgaaaagataagcacatttgtatttgtgtggacaagtctgcagacttcttattgttgtctcaagcc

SEQ ID NO: 589504 - DNA, 120 bp, Artificial Sequence
  ENSG00000172995_50 (sequence is synthesized)
ttttctagcatcattttctttacatgccactcatgtcataaggcatggacaggctatctttcagtggccattactatgtttcgtacacatgctttattttacttgggctctgagaaatgt

SEQ ID NO: 589505 - DNA, 120 bp, Artificial Sequence
  ENSG00000172995_51 (sequence is synthesized)
gtggctttccttcagcattttatttgtgcttctctttttaatggagattgaaaagggagaataatgtgaatatcacggcttatattattaaatgttgattgatggcttgtaatgtactgc

SEQ ID NO: 589506 - DNA, 120 bp, Artificial Sequence
  ENSG00000172995_52 (sequence is synthesized)
acacaatatatgttaactctgcagaatgacagaccctgggagaagtaatgccccagttgtcccccactcctaatgccaggcagagaaggacagcctttatagacttaatctgctttttgt

SEQ ID NO: 589507 - DNA, 120 bp, Artificial Sequence
  ENSG00000172995_53 (sequence is synthesized)
cccatttgacaaggtaccaggaggaaattttttaagggatcaactgtatcacagtgcccactctggacctaagtctagtgtatccatacaattggtgcagagaaataaggtgtaaatggt

SEQ ID NO: 589508 - DNA, 120 bp, Artificial Sequence
  ENSG00000172995_54 (sequence is synthesized)
gctttgttcctgctggttccaagctcagaaaccaagactagctttgtaggagagaatgagagcctgcaagcctctctttggattggctgaggagtggtgggagcagggggttgatagaaa

SEQ ID NO: 589509 - DNA, 120 bp, Artificial Sequence
  ENSG00000172995_55 (sequence is synthesized)
acatccagacacacatataagcaagtggccgtgctacctttttagagaataaagaaacagacttttgagtttatatgcaatgccttcattaggtaccaccggcacttacaaaatgtgcgg

SEQ ID NO: 589510 - DNA, 120 bp, Artificial Sequence
  ENSG00000172995_56 (sequence is synthesized)
actgaatcccagagaacactggcagatgtatacagtatatggattgtatcgcttccccaatgtttgtaaattcacagtatttggaaaactgccttcattttccagtgtgggaaaaactct

SEQ ID NO: 589511 - DNA, 120 bp, Artificial Sequence
  ENSG00000172995_57 (sequence is synthesized)
tgctacctgtattacttgatctcagacccatacctgatggttcagtctgtccttaagttaaaagaattttgcttttctaatgttatactatttacctgtcagtgtattactgcaacttga

SEQ ID NO: 589512 - DNA, 120 bp, Artificial Sequence
  ENSG00000172995_58 (sequence is synthesized)
atcactcttttactgttgttggatataaacttatcctgtaccaatgtatttattaacacttgtattttattattgagcatatcaataaaaatattaaaaaataacagattgttttttacc

SEQ ID NO: 589513 - DNA, 120 bp, Artificial Sequence
  ENSG00000172995_59 (sequence is synthesized)
attcacaagtgtgtgtaaagggggtgtggatgggacaactgcatctgcctcttgtgcatgccttggggcataaaatcttgttattttaatttgcatctgggagaatgtctgagcaaggag

SEQ ID NO: 589514 - DNA, 120 bp, Artificial Sequence
  ENSG00000172995_60 (sequence is synthesized)
gcaccaaagcttaaaaaagtgaggaggaagtaaatgctaaattattcatgagcctcatttgacagcacatcagaaggggaagtgtcaggggttttataaagggcataaaatcttgttatt

SEQ ID NO: 589515 - DNA, 120 bp, Artificial Sequence
  ENSG00000172995_61 (sequence is synthesized)
ttgaagcgagataactctagtattgataaagaagacaatcagctttgtccttcagttgtgcacaaattgagctggattatcaatacggaccgatgatcaaccggtgtagctgtaaagaac

SEQ ID NO: 589516 - DNA, 120 bp, Artificial Sequence
  ENSG00000172995_62 (sequence is synthesized)
gggtgggactggcagagctacggacaggtgggagcagtcagacagcctgagagagggagaccagaacgcaaagagagcgagagcattaagtaggcagggagaggcacacagaaagataga

SEQ ID NO: 589517 - DNA, 120 bp, Artificial Sequence
  ENSG00000172995_63 (sequence is synthesized)
cagcaacactcgcgtgctccctccctccacacgccctcctcttaccgagcgaagcggccaggggcacagagtgggagaggactgtgggcacagaagaccggaagagggacgctgcattgc

SEQ ID NO: 589518 - DNA, 120 bp, Artificial Sequence
  ENSG00000172995_64 (sequence is synthesized)
tggtgggacggagggattcggacggacggacagaccagcgcacagactggcagcctgcgagagtggcagctttgagagcagagcgcagcaaagcgagaatcccgcgccgagctgctagtc

SEQ ID NO: 589519 - DNA, 120 bp, Artificial Sequence
  ENSG00000172995_65 (sequence is synthesized)
ggacccacagacggtcggactgacagacgtgcagacggacagaagagcagacaggaggcgggggcgcgttcactcccggcggccagccggccagagaaggcggcggtggcaccttctgag

SEQ ID NO: 589520 - DNA, 120 bp, Artificial Sequence
  ENSG00000172995_66 (sequence is synthesized)
cgcgtccggagcagagaccagcagcagcaggggcagcggggacacaagccgcgaccgagccgccgccgcagccctggctgccacagctgtgtgggatcccagccgacactgcagaaagct

SEQ ID NO: 589521 - DNA, 120 bp, Artificial Sequence
  ENSG00000172995_67 (sequence is synthesized)
ccttttactagcagttaaataaatcgaccaaaaacaaaacaaacaaacaaacccaacaacaacaacaacaacaaaagccaagccaaaagccaaaacaaacaaatccagccaaatcaatca

SEQ ID NO: 589522 - DNA, 120 bp, Artificial Sequence
  ENSG00000172995_68 (sequence is synthesized)
tgctgaattattaccttttcaatagttttttttgaccttgcagactactgtattctttatacctagggaagcatgtctatgtttggaacctgcaaataatttttcagtcatcttagagat

SEQ ID NO: 589523 - DNA, 120 bp, Artificial Sequence
  ENSG00000172995_69 (sequence is synthesized)
gggtacttgatttcatcttgttttttcccccttttgtataaaattctcaaaattgctcatttggatttgaatatgaaaggagaaatgaaatctctaaagaatgatagtaaataccttgca

SEQ ID NO: 589524 - DNA, 120 bp, Artificial Sequence
  ENSG00000172995_70 (sequence is synthesized)
gcatgaatgggatccacctttgtgtgcatgactcttaatttggtgttaaacagtgttttgggggagaaaaatataattgaagaaaataattcattttttggctttatcccctgcttatgc

SEQ ID NO: 589525 - DNA, 120 bp, Artificial Sequence
  ENSG00000172995_71 (sequence is synthesized)
ggcagcttattttggattggatcacaatgtggatcaaacaggaaaatctgttatcatcaacaagaccagcagcaccagaatgttccgagtcttccagcagtgcaggctcctcaggatcgc

SEQ ID NO: 589526 - DNA, 120 bp, Artificial Sequence
  ENSG00000172995_72 (sequence is synthesized)
tctggtcactcagtctgtccaggggctgcaggcttcctcccagtcagtgcaatatccagcagtctcttttcctccccagcacctcctacctgtgtctccaacgcagcactttcccatgag

SEQ ID NO: 589527 - DNA, 120 bp, Artificial Sequence
  ENSG00000172995_73 (sequence is synthesized)
acaatatacaaggtagccagaagtgaatatgattgagaattctcattagtgtgaggagacagtttgaagtccataaggttggaaattgcaaattaatcatttgtatataagtcagtttaa

SEQ ID NO: 589528 - DNA, 120 bp, Artificial Sequence
  ENSG00000172995_74 (sequence is synthesized)
ttttgtatgtggctaggtacagttaactagaaaagggcctcaatacttttatcaaatctttgatgtgatccatatttctttataaatattaaatgtcagtgtccttgatcaataattttt

SEQ ID NO: 589529 - DNA, 120 bp, Artificial Sequence
  ENSG00000172995_75 (sequence is synthesized)
attagagaagaagcaggcagcttgagacaggtggagctggatcaagctgtgaacgtgatttgctggaagctggtcattagtgttagaaaccccgtcttatttatttcatccttcacccta

SEQ ID NO: 589530 - DNA, 120 bp, Artificial Sequence
  ENSG00000173011_0 (sequence is synthesized)
cgggggcgcggcggctgcggcgggccgggcggcgggcggcgagcgggggaagatggcggagctggggaagaagtactgcgtgtactgcctggccgaggtgagcccgctgcgcttccgctg

SEQ ID NO: 589531 - DNA, 120 bp, Artificial Sequence
  ENSG00000173011_1 (sequence is synthesized)
ctgcctggccgaggtgagcccgctgcgcttccgctgcaccgagtgccaggacatcgagctgtgccccgagtgcttctcggccggcgccgagatcggccaccaccgccgctaccacggcta

SEQ ID NO: 589532 - DNA, 120 bp, Artificial Sequence
  ENSG00000173011_2 (sequence is synthesized)
ccagctggtggacggcgggcgcttcacgctctgggggcccgaggccgagggcggctggaccagtcgcgaggagcagctgctgctggacgccatcgagcagttcggcttcggaaactggga

SEQ ID NO: 589533 - DNA, 120 bp, Artificial Sequence
  ENSG00000173011_3 (sequence is synthesized)
agatatggctgcccacgttggtgcttcccggactccccaagaggtgatggagcattacgtgagcatgtacatccacgggaacctggggaaggcctgcatccccgacaccatccccaaccg

SEQ ID NO: 589534 - DNA, 120 bp, Artificial Sequence
  ENSG00000173011_4 (sequence is synthesized)
cgtgacagaccacacctgtcccagcggaggccccctctcacccagcctcaccaccccgctgcccccgctggacatctctgtggctgagcagcagcagctgggctacatgccgctgcggga

SEQ ID NO: 589535 - DNA, 120 bp, Artificial Sequence
  ENSG00000173011_5 (sequence is synthesized)
tgattacgagatcgagtatgaccaggatgccgagacgctcatcagcgggctctctgtcaactatgatgacgacgacgtggagatcgagctgaagcgcgcccacgtggacatgtacgtgcg

SEQ ID NO: 589536 - DNA, 120 bp, Artificial Sequence
  ENSG00000173011_6 (sequence is synthesized)
gaagctgaaagagagacagcggcggaagaacatcgcccgtgactacaatctggtgccagccttcctggggaaggacaagaaggagaaggaaaaggcgctgaagcgcaagatcaccaagga

SEQ ID NO: 589537 - DNA, 120 bp, Artificial Sequence
  ENSG00000173011_7 (sequence is synthesized)
ggagaaggagctgcgcctgaagctgaggccgctgtaccagttcatgtcatgcaaggagtttgatgacctttttgaaaacatgcacaaagaaaaaatgctccgggccaagatccgagaact

SEQ ID NO: 589538 - DNA, 120 bp, Artificial Sequence
  ENSG00000173011_8 (sequence is synthesized)
gcagcggtaccggcgaaacgggatcaccaagatggaagagtcggcagagtacgaggcagcgcggcataaacgggagaagaggaaggagaacaaaaacctagccggctccaaacggggaaa

SEQ ID NO: 589539 - DNA, 120 bp, Artificial Sequence
  ENSG00000173011_9 (sequence is synthesized)
ggaggacggcaaagacagcgagttcgccgccattgagaaccttccaggcttcgagctcctgtcagatcgcgagaaggtgctctgcagctctttaaacttgagtccagcccgctacgtgac

SEQ ID NO: 589540 - DNA, 120 bp, Artificial Sequence
  ENSG00000173011_10 (sequence is synthesized)
tgtgaagactattataattaaagaccacctccagaagcggcaaggaatcccctccaaaagccgccttcctagctacctggacaaagtcctaaagaaaaggattttgaatttcctcacaga

SEQ ID NO: 589541 - DNA, 120 bp, Artificial Sequence
  ENSG00000173011_11 (sequence is synthesized)
aagcggctggatctccagggacgcgtcttgaagctgagacgctttgaaagccagggtgatgctcagacagtgtgccagccaaaatgacttgggggaggggagccgcttccccactgttgc

SEQ ID NO: 589542 - DNA, 120 bp, Artificial Sequence
  ENSG00000173011_12 (sequence is synthesized)
tcttttttaaacaaattgagttcctttttttaagatagaaattcttttcatggtcctctgaaagaagcaatagtaacaatcttatattggatcatgggggaagcaaatgtgtgtatttta

SEQ ID NO: 589543 - DNA, 120 bp, Artificial Sequence
  ENSG00000173011_13 (sequence is synthesized)
agtgagttcctgcgagtcatacactgcgatgatgctccgcctttacccgttcagttgggagcttattgtgagattggatcatttccttttgagtgttcttctctttggtacaaaagctat

SEQ ID NO: 589544 - DNA, 120 bp, Artificial Sequence
  ENSG00000173011_14 (sequence is synthesized)
tgtgggtgacaggagcagtgttttcctgctggacccgcaagccaccagctatttcctggtgacacaagctcttctcaggcggggctgcctgcaggctcccgttttctgagcccacgctgc

SEQ ID NO: 589545 - DNA, 120 bp, Artificial Sequence
  ENSG00000173011_15 (sequence is synthesized)
ccacagctgaccccagcgcagccccgggcacgcggcactttacatgggggcagcttgggcccagactcctccgctgtgtagcagatgaggaaaatcaggccagaggacaacaggctggcg

SEQ ID NO: 589546 - DNA, 120 bp, Artificial Sequence
  ENSG00000173011_16 (sequence is synthesized)
ttttgttgggaactgaagaggaatctgttgaacacagcgaccagatgaccttccatttcaccggcggcagcagtttcagcgtgcagttcccaaaccccaaagctgaccctgcgccccatt

SEQ ID NO: 589547 - DNA, 120 bp, Artificial Sequence
  ENSG00000173011_17 (sequence is synthesized)
tgggcaggctcccatagtgaccacgtccccacgaatgggaaagcacgttagtgggagggacgtaggacacgtgtggaccgccaggccctctcagtccattttccggggctgctcggtgct

SEQ ID NO: 589548 - DNA, 120 bp, Artificial Sequence
  ENSG00000173011_18 (sequence is synthesized)
gctgttaagacgtgagtgcatttcacttggaagaacccattgtacaaagttcaaggctaagagttctgaattctggcgtcagcttcctcaggattttcttcagttgcaagtacctttcca

SEQ ID NO: 589549 - DNA, 120 bp, Artificial Sequence
  ENSG00000173011_19 (sequence is synthesized)
ctgaaaatatgagcatgcccgcctggctagtaggcatctgtaagagtgtcgccaggcccgcgccagctgaggcctcagactagccaggcaagagccgtctgaccagttggctggcggtgg

SEQ ID NO: 589550 - DNA, 120 bp, Artificial Sequence
  ENSG00000173011_20 (sequence is synthesized)
ttctggtggagcacgagggagcccgggtggtgccctgagcctcgagctgctctctgtcactgtcttgaatcagactcagaaatggcttcttcccagccctgcctacaagtttttctctgg

SEQ ID NO: 589551 - DNA, 120 bp, Artificial Sequence
  ENSG00000173011_21 (sequence is synthesized)
ggtcctctttcaaggatgtccacggtaccttcctcctgaaacttgaggaagtcttttgtcttccagctgctcagggttctctggtccaagaccctgctttaaagagagtctttggcgtgc

SEQ ID NO: 589552 - DNA, 120 bp, Artificial Sequence
  ENSG00000173011_22 (sequence is synthesized)
tcagactccagcgctccgttcttcaaggaggttgacttgcctctcgggccccgtaggtaccaagagactgtttacctcccagaatgtttgggcttgaagttacattaaagtgaagttatt

SEQ ID NO: 589553 - DNA, 120 bp, Artificial Sequence
  ENSG00000173011_23 (sequence is synthesized)
tgaaagaaagaaaacctcatcatttctaaggatgacttaattactgtgccttttcctttctttttacacatcctactgtcccttagggtaaaattttcagcattaaataaaacatttcaa

SEQ ID NO: 589554 - DNA, 120 bp, Artificial Sequence
  ENSG00000173011_24 (sequence is synthesized)
atatattgtatatggctttagttgtaaactatactgcatgctgacagagaagcgctcttttagctaagcccagaacttctcttttgacaataaagtactgagcagtggtatcatgagggc

SEQ ID NO: 589555 - DNA, 120 bp, Artificial Sequence
  ENSG00000173011_25 (sequence is synthesized)
cacctccacattgtcccctgcagaataaatgcggatgacagaaagcttatgctgtctaccactgaacagtgatggagatggtgctaagtttttacagttgtcttagccccagtggttctc

SEQ ID NO: 589556 - DNA, 120 bp, Artificial Sequence
  ENSG00000173011_26 (sequence is synthesized)
aaggtggggctcctggcccagcagcagcaacttgtttgttagaatgcagacgcgcaggccccacctggcctcctgaatcaaaatggtgtgcggcagggtgcagcgagctgttttcacgag

SEQ ID NO: 589557 - DNA, 120 bp, Artificial Sequence
  ENSG00000173011_27 (sequence is synthesized)
gcctccaggtgactggatgtaagcttgcttgagaactatgggttttagctattctggtgtctccctgattttctacagcgccaggatcctagtttggtgaggttttaaatttaatcttat

SEQ ID NO: 589558 - DNA, 120 bp, Artificial Sequence
  ENSG00000173011_28 (sequence is synthesized)
ttttatataaaatgattgccagacgtactatattaagcttgaagaagcagaagatccctgttaatgtgtatggcccaggccaagagctgtcaaatgaaaaactttgtgctgaagcaggtt

SEQ ID NO: 589559 - DNA, 120 bp, Artificial Sequence
  ENSG00000173011_29 (sequence is synthesized)
tttagtatgtatatctttttgatggtatgaagaatttatttaggcttgactgttttaaaacaccataatgaatgtataattaatttatgttaaagtattaaccctttgtcacaaaggaat

SEQ ID NO: 589560 - DNA, 120 bp, Artificial Sequence
  ENSG00000173011_30 (sequence is synthesized)
ggtaatgtgattggctgcctgttagcccatcgactattcccgtcacggtagtccttacctctgtcggcagctcagagcctccacatttttatatttaattctcatgataaattagccacc

SEQ ID NO: 589561 - DNA, 72 bp, Artificial Sequence
  ENSG00000173011_31 (sequence is synthesized)
ccacatttttatatttaattctcatgataaattagccaccataatcccatggaattaggtcttgttaaaatc

SEQ ID NO: 589562 - DNA, 78 bp, Artificial Sequence
  ENSG00000173011_32 (sequence is synthesized)
ctaagcaaactatctttgagtcaaaaaaagttggataactcatctatatttgaaataatgctgtctgaatggccaaca

SEQ ID NO: 589563 - DNA, 120 bp, Artificial Sequence
  ENSG00000173011_33 (sequence is synthesized)
ctcatctatatttgaaataatgctgtctgaatggccaacatcccaagaatgtattaaaaacagcaaccctgcctaccgttttgatgacctttttccatattaaacaagttgagaacaaaa

SEQ ID NO: 589564 - DNA, 120 bp, Artificial Sequence
  ENSG00000173011_34 (sequence is synthesized)
ttctcaaagaggcccacagttgagttttggcactgccttctgtagtcagagtcctggagattcctgggccccaggtggcggggggaagggtccagcacctcggctccaggcatgtgtgcc

SEQ ID NO: 589565 - DNA, 120 bp, Artificial Sequence
  ENSG00000173011_35 (sequence is synthesized)
agaggaagccccagctgtgggatcccatccgttcctggagcccagaacacttctctcccagacgccagctcatagtcatcagcctggatggggtggcggtccctctggtttcagctgggc

SEQ ID NO: 589566 - DNA, 120 bp, Artificial Sequence
  ENSG00000173011_36 (sequence is synthesized)
ctctggcagtgctgcaggcagcgctgcagtgctggttccacacccaggcgggcagaggcaggtgggggctgggtggctgagaggcggtggccagggaatgagtgcgcactttgggcagtt

SEQ ID NO: 589567 - DNA, 120 bp, Artificial Sequence
  ENSG00000173011_37 (sequence is synthesized)
actttctgaagtggctttagcggttgactttgaggaagaggcctctcggcagaaggaaaagattgagggagttatacagtttcctcccattaaaccttgtatttatgggttaccctcttg

SEQ ID NO: 589568 - DNA, 120 bp, Artificial Sequence
  ENSG00000173011_38 (sequence is synthesized)
taggaatgatgaatgctttcagccagtggcagactcccagccagctgcttaaccgtggaaggtgctaaaaatgaaggcctgctcccttgaagagccacaggcccatcttctgcagtcact

SEQ ID NO: 589569 - DNA, 120 bp, Artificial Sequence
  ENSG00000173011_39 (sequence is synthesized)
gcctaggaaagggccacgccagcccccccggcgcatgaaggccaggatgggtgtgcggccaggacaagcgtcacagaggtgtcctggcccttgcttttccagcgggtggcaacatggtag

SEQ ID NO: 589570 - DNA, 120 bp, Artificial Sequence
  ENSG00000173011_40 (sequence is synthesized)
aactgggtcccctcctgcagtgccgtggacttggcctggtctcacaccctggcacaagcccgttttctagtctgaatgaggcgagttcaggcattccttggcctgccctgctgtctcctg

SEQ ID NO: 589571 - DNA, 120 bp, Artificial Sequence
  ENSG00000173011_41 (sequence is synthesized)
ggacattcagacagcccctgagtgcagggtttatggcagtaccaggtgggctcctctggtcgcaggtggggaatgagaacaaagtccaaacctcagccaggggttctggcctcagctctg

SEQ ID NO: 589572 - DNA, 120 bp, Artificial Sequence
  ENSG00000173011_42 (sequence is synthesized)
ccaccagctcaccccaagaccttgtgccagcttgtgcctctctgggtcttcactttctcatgtacagaatcagcatgtgttgttgcttcaacattgtcatctctcccctgagcccagctc

SEQ ID NO: 589573 - DNA, 120 bp, Artificial Sequence
  ENSG00000173011_43 (sequence is synthesized)
ataagacagtgtgtgactgaatgcctttggggagggtgggtaacggtgctgtaggaagtactctaggtcagcctttgtaaaaacgtgaagagaatctgtgcggaacccaaatctggcacc

SEQ ID NO: 589574 - DNA, 120 bp, Artificial Sequence
  ENSG00000173011_44 (sequence is synthesized)
atccgacagctgcccatggcctgcatcaccacctgcttcttgagtgcctggaagcgtcgccactccttctccaccctggtgagcttctcctggcactgccgcttcaactggcccagctcc

SEQ ID NO: 589575 - DNA, 120 bp, Artificial Sequence
  ENSG00000173013_0 (sequence is synthesized)
gttgccccgggaaacctaacagcgtcctgccggggtccgctgcgctggccgagccgggaggagatggacgtcagctctgagcacactaaggaccccggcggggaaggcggagacggggaa

SEQ ID NO: 589576 - DNA, 120 bp, Artificial Sequence
  ENSG00000173013_1 (sequence is synthesized)
agcctggccgcgcggccgtccaagatcaaggccagctctggccctccgacctctcccgaacccggggagctggagtcggagccggaggaggaggaggaggagcaagcggcttcgcaggga

SEQ ID NO: 589577 - DNA, 120 bp, Artificial Sequence
  ENSG00000173013_2 (sequence is synthesized)
ggcaccgccgcggacgagcaggccgaggccccgaaagggctaacggcagccgaggctgcgggcgaggaggggcctggagagccggggaggccggccgagccccagcccgagcccgaagag

SEQ ID NO: 589578 - DNA, 120 bp, Artificial Sequence
  ENSG00000173013_3 (sequence is synthesized)
ccggccgaggttggggctgaggagcccgcccagccggagcccggagccgggcccgaggaactagaggcggaggcgggggcggaggaactggagcaggcggcagaggggaaggaagtcagg

SEQ ID NO: 589579 - DNA, 120 bp, Artificial Sequence
  ENSG00000173013_4 (sequence is synthesized)
ttccaggcctctctgccgctgaccaggatcgatgaggaagaggctgctgcagccccggaggccgagacagagcgggtggagggggaggaagaggacaaggaggagacgcagagagacggc

SEQ ID NO: 589580 - DNA, 120 bp, Artificial Sequence
  ENSG00000173013_5 (sequence is synthesized)
gcggagagcaaggagagggatggggaaggacgcccggccaaaagccaggaagaggggaagcgcctctatggaagggacgagtttgaggacctcgagtggtccgaggaggtccagaagctg

SEQ ID NO: 589581 - DNA, 120 bp, Artificial Sequence
  ENSG00000173013_6 (sequence is synthesized)
caggagcagcagctgcgcagcgacctcctggaccagtaccgttccctgctggtggagcggaaccgctcccagcgctacaacctatacctgcagcacaagatcttcgaggcgctgcgcaga

SEQ ID NO: 589582 - DNA, 120 bp, Artificial Sequence
  ENSG00000173013_7 (sequence is synthesized)
aagaagggcctggaggccgctgaggtggctgaccggggcgcagaggccgaggcccccgagaaagagcaagcgtacctgcgccatctgggcatgctggaggagctgaagaagcagcaggca

SEQ ID NO: 589583 - DNA, 120 bp, Artificial Sequence
  ENSG00000173013_8 (sequence is synthesized)
ggtgatgcaggccatgggcagctgtcggatgaggggcgggcgccaggctgctctgcgagaggtggagcagatccaggcgttggaggataaaaaggagaaggagatgagcgccgtgcggct

SEQ ID NO: 589584 - DNA, 120 bp, Artificial Sequence
  ENSG00000173013_9 (sequence is synthesized)
ggagaacattcagctgaagcagagcctggtgcattttgaaaccaggatgaggacccaggaggacctgacccagggtctgcttcttattgactttgaacagctgaagattgagaaccaaac

SEQ ID NO: 589585 - DNA, 120 bp, Artificial Sequence
  ENSG00000173013_10 (sequence is synthesized)
cttcaatgagaaaattgaggaacgaaatgaggaacttttaaaacttcgcagcaaggtgaccaacagtgtgcaagtaataacccacgtgaaggaaaagctgcacttcatggacatggagaa

SEQ ID NO: 589586 - DNA, 120 bp, Artificial Sequence
  ENSG00000173013_11 (sequence is synthesized)
cgcgtgcaaaaagacacagctggcagaaatcgaggcccaggccgccctaggaagagacatcctgaccaagacgaagcaagcccgagaggggctgcggacggacaacatcagactgaatca

SEQ ID NO: 589587 - DNA, 120 bp, Artificial Sequence
  ENSG00000173013_12 (sequence is synthesized)
gaagtgcggccttctaggcaaggactcacttcttcgggacttggaagaaaaggtggacaagaccgaactgcttcaccggcgcctggaatccctgaagcgccaccacgctagcctcacttt

SEQ ID NO: 589588 - DNA, 120 bp, Artificial Sequence
  ENSG00000173013_13 (sequence is synthesized)
gtcctgcagaggcgtgaggcagaagatcagggaggccaaagcctttctcccttcttgaccagatcgatgagaagagtctgcaaaacacttcatcctcaggacgtgctgtcctgctttatt

SEQ ID NO: 589589 - DNA, 120 bp, Artificial Sequence
  ENSG00000173013_14 (sequence is synthesized)
ttaccttcgttgctattaaaaaggcctgtgtcatttgggacgggactctattttgtatttatctcaaaacgttttagcttccaaatcagtgctgagcccaaacctgggttaggagtttta

SEQ ID NO: 589590 - DNA, 120 bp, Artificial Sequence
  ENSG00000173013_15 (sequence is synthesized)
tctgggattgagcaaaaataggtccagaaaagcaaacaaagggtgatttaatgtaactgacttctcatgaaaaactgtcaaaagtctcaagtctgagcaattctataatttcagtgatgt

SEQ ID NO: 589591 - DNA, 120 bp, Artificial Sequence
  ENSG00000173013_16 (sequence is synthesized)
aatactaaagagtactgttcctctttcatatgtaggagggtttaaaagttcagcgaatgggcaaggtacaaaaaaaccctgtgcattaagctaattattaaattctttggatttattaaa

SEQ ID NO: 589592 - DNA, 120 bp, Artificial Sequence
  ENSG00000173020_0 (sequence is synthesized)
gagcgccgagcgagcaggagcggcggcggcggcggcggcggcgggaggaggcagcgccgccgccaagatggcggacctggaggcggtgctggccgacgtgagctacctgatggccatgga

SEQ ID NO: 589593 - DNA, 120 bp, Artificial Sequence
  ENSG00000173020_1 (sequence is synthesized)
aggcggtgctggccgacgtgagctacctgatggccatggagaagagcaaggccacgccggccgcgcgcgccagcaagaagatcctgctgcccgagcccagcatccgcagtgtcatgcaga

SEQ ID NO: 589594 - DNA, 120 bp, Artificial Sequence
  ENSG00000173020_2 (sequence is synthesized)
agtacctggaggaccggggcgaggtgacctttgagaagatcttttcccagaagctggggtacctgctcttccgagacttctgcctgaaccacctggaggaggccaggcccttggtggaat

SEQ ID NO: 589595 - DNA, 120 bp, Artificial Sequence
  ENSG00000173020_3 (sequence is synthesized)
tctatgaggagatcaagaagtacgagaagctggagacggaggaggagcgtgtggcccgcagccgggagatcttcgactcatacatcatgaaggagctgctggcctgctcgcatcccttct

SEQ ID NO: 589596 - DNA, 120 bp, Artificial Sequence
  ENSG00000173020_4 (sequence is synthesized)
cgaagagtgccactgagcatgtccaaggccacctggggaagaagcaggtgcctccggatctcttccagccatacatcgaagagatttgtcaaaacctccgaggggacgtgttccagaaat

SEQ ID NO: 589597 - DNA, 120 bp, Artificial Sequence
  ENSG00000173020_5 (sequence is synthesized)
tcattgagagcgataagttcacacggttttgccagtggaagaatgtggagctcaacatccacctgaccatgaatgacttcagcgtgcatcgcatcattgggcgcgggggctttggcgagg

SEQ ID NO: 589598 - DNA, 120 bp, Artificial Sequence
  ENSG00000173020_6 (sequence is synthesized)
tctatgggtgccggaaggctgacacaggcaagatgtacgccatgaagtgcctggacaaaaagcgcatcaagatgaagcagggggagaccctggccctgaacgagcgcatcatgctctcgc

SEQ ID NO: 589599 - DNA, 120 bp, Artificial Sequence
  ENSG00000173020_7 (sequence is synthesized)
tcgtcagcactggggactgcccattcattgtctgcatgtcatacgcgttccacacgccagacaagctcagcttcatcctggacctcatgaacggtggggacctgcactaccacctctccc

SEQ ID NO: 589600 - DNA, 120 bp, Artificial Sequence
  ENSG00000173020_8 (sequence is synthesized)
agcacggggtcttctcagaggctgacatgcgcttctatgcggccgagatcatcctgggcctggagcacatgcacaaccgcttcgtggtctaccgggacctgaagccagccaacatccttc

SEQ ID NO: 589601 - DNA, 120 bp, Artificial Sequence
  ENSG00000173020_9 (sequence is synthesized)
tggacgagcatggccacgtgcggatctcggacctgggcctggcctgtgacttctccaagaagaagccccatgccagcgtgggcacccacgggtacatggctccggaggtcctgcagaagg

SEQ ID NO: 589602 - DNA, 120 bp, Artificial Sequence
  ENSG00000173020_10 (sequence is synthesized)
gcgtggcctacgacagcagtgccgactggttctctctggggtgcatgctcttcaagttgctgcgggggcacagccccttccggcagcacaagaccaaagacaagcatgagatcgaccgca

SEQ ID NO: 589603 - DNA, 120 bp, Artificial Sequence
  ENSG00000173020_11 (sequence is synthesized)
tgacgctgacgatggccgtggagctgcccgactccttctcccctgaactacgctccctgctggaggggttgctgcagagggatgtcaaccggagattgggctgcctgggccgaggggctc

SEQ ID NO: 589604 - DNA, 120 bp, Artificial Sequence
  ENSG00000173020_12 (sequence is synthesized)
aggaggtgaaagagagcccctttttccgctccctggactggcagatggtcttcttgcagaagtaccctcccccgctgatccccccacgaggggaggtgaacgcggccgacgccttcgaca

SEQ ID NO: 589605 - DNA, 120 bp, Artificial Sequence
  ENSG00000173020_13 (sequence is synthesized)
ggacagtgatcaggagctctaccgcaacttccccctcaccatctcggagcggtggcagcaggaggtggcagagactgtcttcgacaccatcaacgctgagacagaccggctggaggctcg

SEQ ID NO: 589606 - DNA, 120 bp, Artificial Sequence
  ENSG00000173020_14 (sequence is synthesized)
caagaaagccaagaacaagcagctgggccatgaggaagactacgccctgggcaaggactgcatcatgcatggctacatgtccaagatgggcaaccccttcctgacccagtggcagcggcg

SEQ ID NO: 589607 - DNA, 120 bp, Artificial Sequence
  ENSG00000173020_15 (sequence is synthesized)
gtacttctacctgttccccaaccgcctcgagtggcggggcgagggcgaggccccgcagagcctgctgaccatggaggagatccagtcggtggaggagacgcagatcaaggagcgcaagtg

SEQ ID NO: 589608 - DNA, 120 bp, Artificial Sequence
  ENSG00000173020_16 (sequence is synthesized)
cctgctcctcaagatccgcggtgggaaacagttcattttgcagtgcgatagcgaccctgagctggtgcagtggaagaaggagctgcgcgacgcctaccgcgaggcccagcagctggtgca

SEQ ID NO: 589609 - DNA, 120 bp, Artificial Sequence
  ENSG00000173020_17 (sequence is synthesized)
gcgggtgcccaagatgaagaacaagccgcgctcgcccgtggtggagctgagcaaggtgccgctggtccagcgcggcagtgccaacggcctctgacccgcccacccgccttttataaacct

SEQ ID NO: 589610 - DNA, 120 bp, Artificial Sequence
  ENSG00000173020_18 (sequence is synthesized)
ctaatttattttgtcgaatttttattatttgttttcccgccaagcggaaaaggttttattttgtaattattgtgatttcccgtggccccagcctggcccagctcccccgggaggggcccg

SEQ ID NO: 589611 - DNA, 120 bp, Artificial Sequence
  ENSG00000173020_19 (sequence is synthesized)
cttgcctcggctcctgctgcaccaacccagccgctgcccggcgccctctgtcctgacttcaggggctgcccgctcccagtgtcttcctgtgggggaagagcacagccctcccgccccttc

SEQ ID NO: 589612 - DNA, 120 bp, Artificial Sequence
  ENSG00000173020_20 (sequence is synthesized)
cccgagggatgatgccacaccaagctgtgccaccctgggctctgtgggctgcactctgtgcccatgggcactgctgggtggcccatcccccctcaccaggggcaggcacagcacagggat

SEQ ID NO: 589613 - DNA, 120 bp, Artificial Sequence
  ENSG00000173020_21 (sequence is synthesized)
ccgacttgaattttcccactgcaccccctcctgctgcagaggggcaggccctgcactgtcctgctccacagtgttggcgagaggaggggcccgttgtctccctggccctcaaggcctccc

SEQ ID NO: 589614 - DNA, 120 bp, Artificial Sequence
  ENSG00000173020_22 (sequence is synthesized)
acagtgactcgggctcctgtgcccttattcaggaaaagcctctgtgtcactggctgcctccactcccacttccctgacactgcggggcttggctgagagagtggcattggcagcaggtgc

SEQ ID NO: 589615 - DNA, 120 bp, Artificial Sequence
  ENSG00000173020_23 (sequence is synthesized)
tgctaccctccctgctgtcccctcttgccccaacccccagcacccgggctcagggaccacagcaaggcacctgcaggttgggccatactggcctcgcctggcctgaggtctcgctgatgc

SEQ ID NO: 589616 - DNA, 120 bp, Artificial Sequence
  ENSG00000173020_24 (sequence is synthesized)
tgggctgggtgcgaccccatctgcccaggacggggccggccaggtgggcgggcagcacagcaaggaggctggctggggcctatcagtgtgccccccatcctggcccatcagtgtaccccc

SEQ ID NO: 589617 - DNA, 120 bp, Artificial Sequence
  ENSG00000173020_25 (sequence is synthesized)
gcccaggctggccagccccacagcccacgtcctgtcagtgccgccgcctcgcccaccgcatgccccctcgtgccagtcgcgctgcctgtgtggtgtcgcgccttctcccccccggggctg

SEQ ID NO: 589618 - DNA, 120 bp, Artificial Sequence
  ENSG00000173020_26 (sequence is synthesized)
ggttggcgcaccctcccctcccgtctactcattccccggggcgtttctttgccgatttttgaatgtgattttaaagagtgaaaaatgagactatgcgtttttataaaaaatggtgcctga

SEQ ID NO: 589619 - DNA, 120 bp, Artificial Sequence
  ENSG00000173020_27 (sequence is synthesized)
gggacacacgaaccaaggcatggccttttcttacaatttaaaaaattgagatgcaattcatataaaattcatcattttattatacaatgtagtgttttttagtacattgaccgtgttgtg

SEQ ID NO: 589620 - DNA, 120 bp, Artificial Sequence
  ENSG00000173020_28 (sequence is synthesized)
caacccttaccccaaaaagaaaccccgtccccaccgcagtcactcctctccctctctccagcccccggcagccacggatctgcgttctgtgtccgtggatctgttcatatgagtggaatc

SEQ ID NO: 589621 - DNA, 120 bp, Artificial Sequence
  ENSG00000173020_29 (sequence is synthesized)
tcacaatatgtggcaaccctttgtgactggcttcgttcagcctcatgttttcaaggctcatccacgttgtggcccctgttggtgccttgttcctttttacagccgagccatgtgctgctg

SEQ ID NO: 589622 - DNA, 120 bp, Artificial Sequence
  ENSG00000173020_30 (sequence is synthesized)
cgtggagatgccacatgtgtgtcttttcatccgctcacaaaccaggcttggcttttgtgacttggccaagttcccaaagccagccggtggcatcactgggacgagaccccacaggcggtg

SEQ ID NO: 589623 - DNA, 120 bp, Artificial Sequence
  ENSG00000173020_31 (sequence is synthesized)
ggcctctgagcagggggccacctgccggccaccctggcctttgaggacacagcctggcgggggcggtgcaggcaaaggcttccttgaagccttctggtctgacctgtggctgggataagt

SEQ ID NO: 589624 - DNA, 120 bp, Artificial Sequence
  ENSG00000173020_32 (sequence is synthesized)
gagtaggcctgacgggctggcctccttcctggagggagtggcgacaccaccacagtgccctcagctcgcgtttctgggcctgcagcccccacgggctctgggggcttctgcttactgcgc

SEQ ID NO: 589625 - DNA, 120 bp, Artificial Sequence
  ENSG00000173020_33 (sequence is synthesized)
ggaaagccacgcaccctgctgctcctctcccgggagctgggcctgtggcttggctgggagggggaggtcaggggatgtctgtcctttagcccccagggccgtggctatgggggtcagggc

SEQ ID NO: 589626 - DNA, 120 bp, Artificial Sequence
  ENSG00000173020_34 (sequence is synthesized)
cgggatcccagcatggggaggccggagcaggtaaatatgtggcaaggatggccaggacatgggtatggggaccctggcatggggccagcccctgctgcccaggtgcctctgccccagggc

SEQ ID NO: 589627 - DNA, 120 bp, Artificial Sequence
  ENSG00000173020_35 (sequence is synthesized)
ccgtggctgtcctctccttcctctcgacatcccggccaccaggcccagaggagtggggctcctgggacatggccgccccgtatcttcccatctccgcccctgcccttcccaccgagccac

SEQ ID NO: 589628 - DNA, 120 bp, Artificial Sequence
  ENSG00000173020_36 (sequence is synthesized)
tctctgggtccaggttgtagctggggacaggagagaggacccccacctttgccctttctttgggtacccatcgtcctctccagtgaagcagtgacccagctggcatcttgcctggctggg

SEQ ID NO: 589629 - DNA, 120 bp, Artificial Sequence
  ENSG00000173020_37 (sequence is synthesized)
gacacaaaaggaatcaaggtactgggccttgcctggcctcttgtacctaggctgtgatcctggcctggggaaggatccctctcccttcttatcacctgtgagaccctgtgccagccctgc

SEQ ID NO: 589630 - DNA, 120 bp, Artificial Sequence
  ENSG00000173020_38 (sequence is synthesized)
cagcttgtaggcctcagttcctccttggccaacttccctggggggtggcagttgcactgaccatccctacccagggccctgggtctgggcagcctgtggctgatggtattccggcatctc

SEQ ID NO: 589631 - DNA, 120 bp, Artificial Sequence
  ENSG00000173020_39 (sequence is synthesized)
agcaccttgctggcccacctggactgagaagcatcagagtcctggtaggggtaggcccagtagagcgcatggcccccgtgaccctcacagccagagttggcgcggtgggtgggaattgta

SEQ ID NO: 589632 - DNA, 120 bp, Artificial Sequence
  ENSG00000173020_40 (sequence is synthesized)
ggtagatttcagccagctttagggagcagctgttttagggtcactgctgcccagccatggagtgagctctgtgtcactgggggtatgcaagcagggacaggagacgtacttgtcaaggat

SEQ ID NO: 589633 - DNA, 120 bp, Artificial Sequence
  ENSG00000173020_41 (sequence is synthesized)
atggtagcaggaagtctgggttagactggaagacctcctttctgtgcggatctgattccagcaggaagccacggccaggtggccgagggccatgctgggcacccaagcagccctgactgg

SEQ ID NO: 589634 - DNA, 120 bp, Artificial Sequence
  ENSG00000173020_42 (sequence is synthesized)
tgctgtgggcgggcaggccctcaacatatccttcctggaagaggacattaacgctcgtgatgtttccacacctaccctcacgggaccccagggagtggcggctgggtggggaggctcacg

SEQ ID NO: 589635 - DNA, 120 bp, Artificial Sequence
  ENSG00000173020_43 (sequence is synthesized)
acagcatcatccttcccacattctgagtggcccctgagccctgattcttcttttccagcgataagttcacacggttttgccagtggaagaatgtggagctcaacatccacgtgagtgggc

SEQ ID NO: 589636 - DNA, 120 bp, Artificial Sequence
  ENSG00000173020_44 (sequence is synthesized)
aaccccctccaaggtcccagcctccttggaggagctcataagttggggcatggccagccctgtccaatgttctcagagtggaggggctgccctgggagttggagctgctggaaccagcta

SEQ ID NO: 589637 - DNA, 120 bp, Artificial Sequence
  ENSG00000173020_45 (sequence is synthesized)
gtaactggcttccagaggggcccttgtcacagatgatgatgatagcagctttttatgtttatcaaacatttattaagcactgggcatagggttgcaaaatttaccagtgttaaaacccac

SEQ ID NO: 589638 - DNA, 120 bp, Artificial Sequence
  ENSG00000173020_46 (sequence is synthesized)
aaccctacgatgtaggaacttctgttctcccatttgagagatgaggaaacagctcaggcttaaggaacttgcccaagttcacagagccagaaagtggctcaatcaggagttaagcccggg

SEQ ID NO: 589639 - DNA, 120 bp, Artificial Sequence
  ENSG00000173020_47 (sequence is synthesized)
actcagggtggggctgagcccagatgactggcctctccccacagggctcaggaggtgaaagagagcccctttttccgctccctggactggcagatggtcttcttgcagaaggtaacagtc

SEQ ID NO: 589640 - DNA, 120 bp, Artificial Sequence
  ENSG00000173020_48 (sequence is synthesized)
tgcggcagggactgggggtgctctgcagccccacccccgagctaatgcccatgacccctgttctgctgcagtaccctcccccgctgatccccccacgaggggaggtgaacgcggccgacg

SEQ ID NO: 589641 - DNA, 120 bp, Artificial Sequence
  ENSG00000173020_49 (sequence is synthesized)
gccggctgctgcggcaccaggcccctgcctgcttagaagtgagcagctggctcgggtttaaggaactcaccctggatcacagccagaaagtggcggctctgggattcaaactcaggctgg

SEQ ID NO: 589642 - DNA, 62 bp, Artificial Sequence
  ENSG00000173020_50 (sequence is synthesized)
agccagaaagtggcggctctgggattcaaactcaggcgcagatcacttgaggtcaggagttt

SEQ ID NO: 589643 - DNA, 120 bp, Artificial Sequence
  ENSG00000173020_51 (sequence is synthesized)
gtaaggagcccgtgcgggggtccgggagccgggcttccgggtggctggccggcccggctcttacctgcaccacccatccctggccctgcagcagagcctgctgaccatggaggagatcca

SEQ ID NO: 589644 - DNA, 120 bp, Artificial Sequence
  ENSG00000173020_52 (sequence is synthesized)
acttctccaagaagaagccccatgccagcgtgtgagtgccccccaccctctccctccccaccccttgccactcccgcttatggcccccttgctcccacaggggcacccacgggtacatgg

SEQ ID NO: 589645 - DNA, 120 bp, Artificial Sequence
  ENSG00000173039_0 (sequence is synthesized)
atttccgcctctggcgaatggctcgtctgtagtgcacgccgcgggcccagctgcgaccccggccccgcccccgggaccccggccatggacgaactgttccccctcatcttcccggcagag

SEQ ID NO: 589646 - DNA, 120 bp, Artificial Sequence
  ENSG00000173039_1 (sequence is synthesized)
ccagcccaggcctctggcccctatgtggagatcattgagcagcccaagcagcggggcatgcgcttccgctacaagtgcgaggggcgctccgcgggcagcatcccaggcgagaggagcaca

SEQ ID NO: 589647 - DNA, 120 bp, Artificial Sequence
  ENSG00000173039_2 (sequence is synthesized)
gataccaccaagacccaccccaccatcaagatcaatggctacacaggaccagggacagtgcgcatctccctggtcaccaaggaccctcctcaccggcctcacccccacgagcttgtagga

SEQ ID NO: 589648 - DNA, 120 bp, Artificial Sequence
  ENSG00000173039_3 (sequence is synthesized)
aaggactgccgggatggcttctatgaggctgagctctgcccggaccgctgcatccacagtttccagaacctgggaatccagtgtgtgaagaagcgggacctggagcaggctatcagtcag

SEQ ID NO: 589649 - DNA, 120 bp, Artificial Sequence
  ENSG00000173039_4 (sequence is synthesized)
cgcatccagaccaacaacaaccccttccaagttcctatagaagagcagcgtggggactacgacctgaatgctgtgcggctctgcttccaggtgacagtgcgggacccatcaggcaggccc

SEQ ID NO: 589650 - DNA, 120 bp, Artificial Sequence
  ENSG00000173039_5 (sequence is synthesized)
ctccgcctgccgcctgtcctttctcatcccatctttgacaatcgtgcccccaacactgccgagctcaagatctgccgagtgaaccgaaactctggcagctgcctcggtggggatgagatc

SEQ ID NO: 589651 - DNA, 120 bp, Artificial Sequence
  ENSG00000173039_6 (sequence is synthesized)
ttcctactgtgtgacaaggtgcagaaagaggacattgaggtgtatttcacgggaccaggctgggaggcccgaggctccttttcgcaagctgatgtgcaccgacaagtggccattgtgttc

SEQ ID NO: 589652 - DNA, 120 bp, Artificial Sequence
  ENSG00000173039_7 (sequence is synthesized)
cggacccctccctacgcagaccccagcctgcaggctcctgtgcgtgtctccatgcagctgcggcggccttccgaccgggagctcagtgagcccatggaattccagtacctgccagataca

SEQ ID NO: 589653 - DNA, 120 bp, Artificial Sequence
  ENSG00000173039_8 (sequence is synthesized)
gacgatcgtcaccggattgaggagaaacgtaaaaggacatatgagaccttcaagagcatcatgaagaagagtcctttcagcggacccaccgacccccggcctccacctcgacgcattgct

SEQ ID NO: 589654 - DNA, 120 bp, Artificial Sequence
  ENSG00000173039_9 (sequence is synthesized)
gtgccttcccgcagctcagcttctgtccccaagccagcaccccagccctatccctttacgtcatccctgagcaccatcaactatgatgagtttcccaccatggtgtttccttctgggcag

SEQ ID NO: 589655 - DNA, 120 bp, Artificial Sequence
  ENSG00000173039_10 (sequence is synthesized)
gtcctagccccaggccctcctcaggctgtggccccacctgcccccaagcccacccaggctggggaaggaacgctgtcagaggccctgctgcagctgcagtttgatgatgaagacctgggg

SEQ ID NO: 589656 - DNA, 120 bp, Artificial Sequence
  ENSG00000173039_11 (sequence is synthesized)
gccttgcttggcaacagcacagacccagctgtgttcacagacctggcatccgtcgacaactccgagtttcagcagctgctgaaccagggcatacctgtggccccccacacaactgagccc

SEQ ID NO: 589657 - DNA, 120 bp, Artificial Sequence
  ENSG00000173039_12 (sequence is synthesized)
atgctgatggagtaccctgaggctataactcgcctagtgacaggggcccagaggccccccgacccagctcctgctccactgggggccccggggctccccaatggcctcctttcaggagat

SEQ ID NO: 589658 - DNA, 120 bp, Artificial Sequence
  ENSG00000173039_13 (sequence is synthesized)
gaagacttctcctccattgcggacatggacttctcagccctgctgagtcagatcagctcctaagggggtgacgcctgccctccccagagcactgggttgcaggggattgaagccctccaa

SEQ ID NO: 589659 - DNA, 120 bp, Artificial Sequence
  ENSG00000173039_14 (sequence is synthesized)
aagcacttacggattctggtggggtgtgttccaactgcccccaactttgtggatgtcttccttggaggggggagccatattttattcttttattgtcagtatctgtatctctctctcttt

SEQ ID NO: 589660 - DNA, 120 bp, Artificial Sequence
  ENSG00000173039_15 (sequence is synthesized)
ttggaggtgcttaagcagaagcattaacttctctggaaaggggggagctggggaaactcaaacttttcccctgtcctgatggtcagctcccttctctgtagggaactctggggtccccca

SEQ ID NO: 589661 - DNA, 120 bp, Artificial Sequence
  ENSG00000173039_16 (sequence is synthesized)
tccccatcctccagcttctggtactctcctagagacagaagcaggctggaggtaaggcctttgagcccacaaagccttatcaagtgtcttccatcatggattcattacagcttaatcaaa

SEQ ID NO: 589662 - DNA, 120 bp, Artificial Sequence
  ENSG00000173039_17 (sequence is synthesized)
ataacgccccagataccagcccctgtatggcactggcattgtccctgtgcctaacaccagcgtttgaggggctggccttcctgccctacagaggtctctgccggctctttccttgctcaa

SEQ ID NO: 589663 - DNA, 120 bp, Artificial Sequence
  ENSG00000173039_18 (sequence is synthesized)
ccatggctgaaggaaaccagtgcaacagcactggctctctccaggatccagaaggggtttggtctgggacttccttgctctccctcttctcaagtgccttaatagtagggtaagttgtta

SEQ ID NO: 589664 - DNA, 120 bp, Artificial Sequence
  ENSG00000173039_19 (sequence is synthesized)
agagtgggggagagcaggctggcagctctccagtcaggaggcatagtttttactgaacaatcaaagcacttggactcttgctctttctactctgaactaataaatctgttgccaagctgg

SEQ ID NO: 589665 - DNA, 80 bp, Artificial Sequence
  ENSG00000173039_20 (sequence is synthesized)
cgtcctcggcgaggcgcgcacttggccccgacccccggcagcggctgtgcgtgcagcctcttcgtcctccgcgcggcgtg

SEQ ID NO: 589666 - DNA, 120 bp, Artificial Sequence
  ENSG00000173039_21 (sequence is synthesized)
gcatttccgcctctggcgaatggctcgtctgtagtgcacgccgcgggcccagctgcgaccccggccccgcccccgggaccccggccatggacgtttcaccgcaggttctagggagcaggt

SEQ ID NO: 589667 - DNA, 120 bp, Artificial Sequence
  ENSG00000173039_22 (sequence is synthesized)
cctgactcagttcccctgggagggagcctggcttctcctctccgtggagagcagattcctccttgtgagaatgggcattgggtgtgtgctgaccctgatctccctcccctttcagaactg

SEQ ID NO: 589668 - DNA, 120 bp, Artificial Sequence
  ENSG00000173039_23 (sequence is synthesized)
ggctcgtctgtagtgcacgccgcgggcccagctgcgaccccggccccgcccccgggaccccggccatggacgaactgttccccctcatcttcccggcaggtaagtggcccccgcggcggt

SEQ ID NO: 589669 - DNA, 120 bp, Artificial Sequence
  ENSG00000173039_24 (sequence is synthesized)
agtagccgctacagtgttactcctttctggacccagggcagaattcctcactccttgccctgactcagctctgcaagtaaactgcctttgtcttgaaattatctatttgtacgtttactc

SEQ ID NO: 589670 - DNA, 120 bp, Artificial Sequence
  ENSG00000173039_25 (sequence is synthesized)
tcagtcagcgcatccagaccaacaacaaccccttccaaggtgagggcaaacctgcctgccacacccgcaccctctgtcaccctccccagcccgcctttcctgcatctccctcactggcca

SEQ ID NO: 589671 - DNA, 120 bp, Artificial Sequence
  ENSG00000173039_26 (sequence is synthesized)
agacacagtaaagctggaatcttggtgcccattcagtactctcccactttaccactgggaaactgagtcccaggaggggacatgacattcaggccacagtggagtcagtgctgggttctg

SEQ ID NO: 589672 - DNA, 120 bp, Artificial Sequence
  ENSG00000173039_27 (sequence is synthesized)
ttacaggcttgagccaccgcacccggcccgacactgtgtctcttaaaaataaataaatacacagataaataaacaaggtgctgtcagagtaacagtttcagtcctgaaaataaaacgagg

SEQ ID NO: 589673 - DNA, 120 bp, Artificial Sequence
  ENSG00000173039_28 (sequence is synthesized)
aaacgaggtcataggatagaaggataacctggggtgggggagttaggggagctggtgtgtgatgactttagattgggaggtcagggaaggcctccctcagctaagacttgaatggtgaga

SEQ ID NO: 589674 - DNA, 120 bp, Artificial Sequence
  ENSG00000173039_29 (sequence is synthesized)
aggaggagagaagtaggaaaagaacattccaagccgaccaaacaagtgcaaaggccttgaggtgggaatgagtgtcctgtgtttagagagtggaaaaggagccccggtggctgtaagcag

SEQ ID NO: 589675 - DNA, 120 bp, Artificial Sequence
  ENSG00000173039_30 (sequence is synthesized)
ggagcccacagggaggctggcaggggcaggggcacggaggtgcttgtcagctgagtgaagggacagggttcgttgcagcacagtaggaagccactggagagggttaggcatggagcgatg

SEQ ID NO: 589676 - DNA, 120 bp, Artificial Sequence
  ENSG00000173039_31 (sequence is synthesized)
aaaggtatacatcaggaggcaggggtgggctcttgggagcaaggggtgaagctgagcagagaagtggagtgtcaggtaactggctttggatacttcctcctgtgcctcgggggcctcagg

SEQ ID NO: 589677 - DNA, 120 bp, Artificial Sequence
  ENSG00000173039_32 (sequence is synthesized)
ataccaccaagacccaccccaccatcaaggtcagcactgcgccagggtgtgcggggaagggactgtggaaccccagccctctgtgtttgggagtcaggtttggatgtctgggcctctgta

SEQ ID NO: 589678 - DNA, 120 bp, Artificial Sequence
  ENSG00000173039_33 (sequence is synthesized)
tttccgcctctggcgaatggctcgtctgtagtgcacgccgcgggcccagctgcgaccccggccccgcccccgggaccccggccatggacgaactgttccccctcatcttcccggcagatc

SEQ ID NO: 589679 - DNA, 120 bp, Artificial Sequence
  ENSG00000173039_34 (sequence is synthesized)
tctgtccccaagccaggtaaggatttccttttgtcccactggaacgacaggttcagctctgttcagctgaggagcagtggagatgaagactcctgggccccattacagacctactgaatc

SEQ ID NO: 589680 - DNA, 120 bp, Artificial Sequence
  ENSG00000173039_35 (sequence is synthesized)
agaggctttgaaaggatggcgcaggaaccagcgacttcctgggatgctaatgcacactgaagcctgggaaccaccgtgccacttaaattctatattgggtatcttgggaatcagaagtta

SEQ ID NO: 589681 - DNA, 120 bp, Artificial Sequence
  ENSG00000173039_36 (sequence is synthesized)
aaaatgcagaatctctgctctcatctctcacttgaattgggggaacaaaaatcacctctaaattagcaagatgtgtgtgcctgtgcgaggctcaaaaactgacaagctctgcacttcagg

SEQ ID NO: 589682 - DNA, 120 bp, Artificial Sequence
  ENSG00000173039_37 (sequence is synthesized)
ccgctgctcacttggtgctccatgggctcattgcctctcaggacttagtttttcagctgtaaactgaggagtccagcttatctctccaagtgtcccttcctctaaaaggctggaagagtt

SEQ ID NO: 589683 - DNA, 120 bp, Artificial Sequence
  ENSG00000173039_38 (sequence is synthesized)
ggctgggtcagatggggtaagaggaaggagatagggtgttggcagtgactccctagagagggattgagcctgagcaccatgaagaggggctggggtacagaggacggggtggatctctag

SEQ ID NO: 589684 - DNA, 120 bp, Artificial Sequence
  ENSG00000173039_39 (sequence is synthesized)
ccgcgccgctttccgccccttcctgcgccgacgggcgctgcgcagggagcggtcggcctgccggatggtggcgcggggcggggcaggcggggaggggtctgactcagtttcccctctggg

SEQ ID NO: 589685 - DNA, 120 bp, Artificial Sequence
  ENSG00000173039_40 (sequence is synthesized)
gactcagtttcccctctgggtggagggggtggcccttgactcagcatcctccctgggtgggggagcagagggaaccttgactcagtttccctccacaccgtccatgggggcagctctggc

SEQ ID NO: 589686 - DNA, 120 bp, Artificial Sequence
  ENSG00000173039_41 (sequence is synthesized)
ccgcgccgctttccgccccttcctgcgccgacgggcgctgcgcagggagcggtcggcctgccggatggtggcgcggggcggggcaggcggggagggaactgttccccctcatcttcccgg

SEQ ID NO: 589687 - DNA, 120 bp, Artificial Sequence
  ENSG00000173040_0 (sequence is synthesized)
gactcggcggcacccgccgctttgaggtagcgggtcccgacaggcgatggacccctcgggctcccgggggcgccccacgtgggtgctggccgggggtctcctggcagtggccctggcgct

SEQ ID NO: 589688 - DNA, 120 bp, Artificial Sequence
  ENSG00000173040_1 (sequence is synthesized)
cgctggggggccgaggctgtctcggcgccagctcacgtccccgctggcgccccctcggcgcgcagccaccccgggatccccaggtggctcctaggtctgggcccggcctgaggatccctc

SEQ ID NO: 589689 - DNA, 120 bp, Artificial Sequence
  ENSG00000173040_2 (sequence is synthesized)
gcggagcggggcggggcccgagagcagcacgcaggacttgccctgtatgatttggcccaaagtggaatgctgtcactttaagactgcagtggaagcaccacttggaatgaaattggacaa

SEQ ID NO: 589690 - DNA, 120 bp, Artificial Sequence
  ENSG00000173040_3 (sequence is synthesized)
gaaaatggaagtcttcatcccactctcaacttctgcagcctctagtgggccatgggctcattccttatttgcttttataccctcctggcctaagaagaacttatttaaaagagagtctcc

SEQ ID NO: 589691 - DNA, 120 bp, Artificial Sequence
  ENSG00000173040_4 (sequence is synthesized)
tataacacaccgcctgtatggggacatttcaagagaagttcaagggacttctgaaaatggagtaatttttcagaaatgtgcactggtgtctgggtcgagtgaagcacagacagcccgcat

SEQ ID NO: 589692 - DNA, 120 bp, Artificial Sequence
  ENSG00000173040_5 (sequence is synthesized)
atggctgcttgttaacaacaccaagacaacctcgtcagccaacctctcggagctgctcttgctggacagcattgctggtctcaccatttgggactctgtgggaaacaggacctcggaagg

SEQ ID NO: 589693 - DNA, 120 bp, Artificial Sequence
  ENSG00000173040_6 (sequence is synthesized)
attccaggcttttagcaagaagtttctgcaagtgggagatgcctttgctgtcagctacgcagccacgctccaggctggagacctcgggaacggggagagcctcaagcttcctgcccaact

SEQ ID NO: 589694 - DNA, 120 bp, Artificial Sequence
  ENSG00000173040_7 (sequence is synthesized)
cacctttcagagctcgtcacggaacagaacacagctgaaagtgcttttttccataacagcagaagaaaacgtaacggttctgccgcaccacggcctccacgcagcagggttcttcattgc

SEQ ID NO: 589695 - DNA, 120 bp, Artificial Sequence
  ENSG00000173040_8 (sequence is synthesized)
cttcctcctctcccttgtgctgacctgggctgccctcttcctcatggttcgctatcagtgtctgaagggaaacatgctcaccagacatcgggtttggcagtatgagagcaagctggaacc

SEQ ID NO: 589696 - DNA, 120 bp, Artificial Sequence
  ENSG00000173040_9 (sequence is synthesized)
cttgccgttcacctcagctgatggcgtgaatgaggacctttcccttaacgaccaaatgatagacattctgtcttccgaggaccctgggagcatgcttcaagccttagaagagttggagat

SEQ ID NO: 589697 - DNA, 120 bp, Artificial Sequence
  ENSG00000173040_10 (sequence is synthesized)
tgcaaccctgaatcgggcagatgcagatctggaggcttgtcgaacacaaatcagcaaggatatcattgcccttctgctgaaaaatctcaccagcagtggccacctctcaccccaagtaga

SEQ ID NO: 589698 - DNA, 120 bp, Artificial Sequence
  ENSG00000173040_11 (sequence is synthesized)
gagaaaaatgagtgctgttttcaaaaagcagtttctattgctggaaaatgaaatacaagaggagtacgatcggaagatggtggcattgacagctgaatgtgacctggaaacaagaaagaa

SEQ ID NO: 589699 - DNA, 120 bp, Artificial Sequence
  ENSG00000173040_12 (sequence is synthesized)
gatggaaaaccagtaccagagagagatgatggcaatggaggaagcagaagagttgctgaaacgtgctggtgagaggtctgctgtagagtgcagcaaccttctgcggaccctccatggcct

SEQ ID NO: 589700 - DNA, 120 bp, Artificial Sequence
  ENSG00000173040_13 (sequence is synthesized)
ggaacaggagcacttgaggaagtctctcgctttgcaacaagaagaagactttgccaaagctcacagacagctggctgttttccagagaaatgaactgcacagtatcttttttacccagat

SEQ ID NO: 589701 - DNA, 120 bp, Artificial Sequence
  ENSG00000173040_14 (sequence is synthesized)
aaaaagtgctattttcaaaggggaattgaaaccagaggcagctaaaatgctgctgcaaaattattctaaaatacaggagaatgtagaagagttaatggactttttccaggctagtaagag

SEQ ID NO: 589702 - DNA, 120 bp, Artificial Sequence
  ENSG00000173040_15 (sequence is synthesized)
gtatcatctaagtaaaagatttggccacagggaatatctggtccagaacctccagtcatcagagacccgtgtgcagggccttctgagcaccgctgcagcccagctgactcacctcattca

SEQ ID NO: 589703 - DNA, 120 bp, Artificial Sequence
  ENSG00000173040_16 (sequence is synthesized)
gaagcacgagagagcagggtacctggatgaagaccaaatggaaatgctattggagcgggctcagacagaagtcttttcaatcaagcagaagttggacaatgacttaaagcaggaaaagaa

SEQ ID NO: 589704 - DNA, 120 bp, Artificial Sequence
  ENSG00000173040_17 (sequence is synthesized)
aaagctccaccaaaaattaataactaagagaagacgagagttgctacaaaagcacagggagcagcgtagggagcaggcgtccgtcggcgaggccttccgaacggttgaggatgccggcca

SEQ ID NO: 589705 - DNA, 120 bp, Artificial Sequence
  ENSG00000173040_18 (sequence is synthesized)
agcgtctggaccaggccgccctggacgatctcaggaccctgaccctttcgctgtttgaaaaggccaccgacgagctgcggcgcctgcagaactcagccatgacccaggagctgctcaagc

SEQ ID NO: 589706 - DNA, 120 bp, Artificial Sequence
  ENSG00000173040_19 (sequence is synthesized)
gtggggtgccctggctcttcctgcagcagatcctggaggagcacggcaaggagatggctgcacgggccgagcagctggagggggaggagagggacagggaccaggagggtgtccagagcg

SEQ ID NO: 589707 - DNA, 120 bp, Artificial Sequence
  ENSG00000173040_20 (sequence is synthesized)
tgaggcagagactgaaggatgacgctcctgaggccgtgacagaggagcaggcagagctgcgacgctgggagcacctgatcttcatgaagctctgctcctcagtcttctccctgtctgaag

SEQ ID NO: 589708 - DNA, 120 bp, Artificial Sequence
  ENSG00000173040_21 (sequence is synthesized)
aggagctgctcaggatgaggcaggaggtccatggctgctttgctcagatggacaggagcttggccctccccaagatccgggcccgagttctgctgcagcaatttcagactgcgtggcgag

SEQ ID NO: 589709 - DNA, 120 bp, Artificial Sequence
  ENSG00000173040_22 (sequence is synthesized)
aagcagagttcgtgaagctggaccaggccgtggctgcccctgagctgcagcaacagtccaaggtgagaaagtcacggtccaagagtaaaagcaagggagagcttctgaagaagtgcatcg

SEQ ID NO: 589710 - DNA, 120 bp, Artificial Sequence
  ENSG00000173040_23 (sequence is synthesized)
aagacaaaattcacctctgtgaggaacaggcctctgaagacctggtggaaaaggttcgaggtgaattgctgcgggagagagtgcagcggatggaggcacaggagggaggctttgcacagt

SEQ ID NO: 589711 - DNA, 120 bp, Artificial Sequence
  ENSG00000173040_24 (sequence is synthesized)
cgcttgttgctctgcagttccagaaggcgtcccgggtgaccgagactctgtcggcctacaccgccctcctcagcatccaggacttgctcctggaagagctgagtgcatctgagatgctga

SEQ ID NO: 589712 - DNA, 120 bp, Artificial Sequence
  ENSG00000173040_25 (sequence is synthesized)
ccaagtcggcctgcacacagatcctggagtcgcacagccgggagctccaggagttggagaggaagctggaggaccagctggtgcagcaggaggcagcccagcagcagcaggccctggcga

SEQ ID NO: 589713 - DNA, 120 bp, Artificial Sequence
  ENSG00000173040_26 (sequence is synthesized)
gctggcagcagtgggtggccgatgggcccgggattctgaacgaacctggggaggtggattctgaaaggcaggtctctactgtcctgcaccaagccctgagcaagagccagacattactgg

SEQ ID NO: 589714 - DNA, 120 bp, Artificial Sequence
  ENSG00000173040_27 (sequence is synthesized)
agcaacatcagcagtgtttgagagaggaacaacagaacagtgtcgtgctagaagacttgttggaaaacatggaggcagacacctttgcaaccctgtgcagccaggagctgagactggcat

SEQ ID NO: 589715 - DNA, 120 bp, Artificial Sequence
  ENSG00000173040_28 (sequence is synthesized)
cgtacctggcgaggatggccatggtgcccggggccacgcttcgccggctcctgagtgtggtactgcccacagcctcacagcctcagctgctggccctgctggattcggccaccgagagac

SEQ ID NO: 589716 - DNA, 120 bp, Artificial Sequence
  ENSG00000173040_29 (sequence is synthesized)
atgtggaccacgcagctgagagcgatggcggagcggagcaggccgacgtgggcaggcggaggaaacaccagagctggtggcaagccttagatggcaaactgcgaggagatctgataagca

SEQ ID NO: 589717 - DNA, 120 bp, Artificial Sequence
  ENSG00000173040_30 (sequence is synthesized)
gaggattagaaaagatgctgtgggcccgcaagagaaagcagagcatattaaagaagacatgtctccctctcagagagaggatgatattctctggaaaaggaagttggccacacctgtcac

SEQ ID NO: 589718 - DNA, 120 bp, Artificial Sequence
  ENSG00000173040_31 (sequence is synthesized)
tggagcccattggcgaactggcccctgtacccattgtaggggcagaaaccattgatctattaaacacaggagagaagctctttatattcagaaatccaaaggagccagagatctcactgc

SEQ ID NO: 589719 - DNA, 120 bp, Artificial Sequence
  ENSG00000173040_32 (sequence is synthesized)
acgttcctcccaggaaaaagaagaactttttgaatgccaaaaaggccatgagggccttgggcatggactagcccaagggaaagacctgcgggagcatctgaagagagaagggatgatttt

SEQ ID NO: 589720 - DNA, 120 bp, Artificial Sequence
  ENSG00000173040_33 (sequence is synthesized)
ctcctgcccgccggtgtttgtgtgtttataatgcacaactcgcaaatataaattgcacatgcagaaggcacagaccccgtagcgcatgccaacttgcagggactcggtttaatcttgtct

SEQ ID NO: 589721 - DNA, 120 bp, Artificial Sequence
  ENSG00000173040_34 (sequence is synthesized)
catgaatttccagatggcccactctcttccatatcacaaggacataaacactccttctttcagccccacctccccagggccctggaggagacccccaccctgcaatccacaccccatcct

SEQ ID NO: 589722 - DNA, 120 bp, Artificial Sequence
  ENSG00000173040_35 (sequence is synthesized)
ctgctgcagaagctatggtctgtgtggtgacagccagattctctactcttatgttttgtatttgttacatattctatttttataaagggaattttaaaaaataaatgtgttttgcacaaa

SEQ ID NO: 589723 - DNA, 120 bp, Artificial Sequence
  ENSG00000173040_36 (sequence is synthesized)
ttataaattctcagcttctcgaaccccatggccttgtccatgttaggtcaggaaaggcctgtccttggatggtctgggttatggggagagaggctgccaggggccaggctcgctggcctg

SEQ ID NO: 589724 - DNA, 120 bp, Artificial Sequence
  ENSG00000173040_37 (sequence is synthesized)
agactttatagacagcctaacagcctgccccgcaggaaggctggcgggagtggagccctcccccgtcaacaggtgtcagctgtcacccaggacctaggcagggatgaggaagcacacaaa

SEQ ID NO: 589725 - DNA, 120 bp, Artificial Sequence
  ENSG00000173040_38 (sequence is synthesized)
aggctccaccagtccccctttttgtgtctttctcctcctcctcctcctgcgtcccttggcaaagcaaatccctgtcccctcggagagttcagggagagcttgcttagggctgcgacttca

SEQ ID NO: 589726 - DNA, 120 bp, Artificial Sequence
  ENSG00000173040_39 (sequence is synthesized)
gacaccagctcccctctttctaggtccccagagaggtggcccagcggctggcctgtttcccactgggaatgcgaggggcacccgggccggcccagggctgacccacagcaggctcgggca

SEQ ID NO: 589727 - DNA, 120 bp, Artificial Sequence
  ENSG00000173040_40 (sequence is synthesized)
gtgggtgctcagctggtctgcactgaacgcaaccggaagtgagggtccttttccttctctgcggccaccccctcctccccgagctttcctgaaccttctgggtgctccaggactcccggc

SEQ ID NO: 589728 - DNA, 120 bp, Artificial Sequence
  ENSG00000173040_41 (sequence is synthesized)
cccgcgctccaaatgcttctccgttttctaagcggggatggggaaactctggattcacatccgtgtgtcaggaaaccgttcccaggggaagtgcgtctgagctgaggcttacagacccag

SEQ ID NO: 589729 - DNA, 120 bp, Artificial Sequence
  ENSG00000173040_42 (sequence is synthesized)
tcccgctcacggccagaaagcttcgagggaaactggagaccttcctcggggtgtggcagctgccggcttggacttcaccagcgaccctggacttgccctgtatgatttggcccaaagtgg

SEQ ID NO: 589730 - DNA, 120 bp, Artificial Sequence
  ENSG00000173040_43 (sequence is synthesized)
ggatgtctgaaaaatgagaacttacctgcaagtttgtcccaaacatagatgagttacctcggactgagcagtgcaatcgttggagcctctgtttgcgtaatatggccctggaacaccaag

SEQ ID NO: 589731 - DNA, 120 bp, Artificial Sequence
  ENSG00000173040_44 (sequence is synthesized)
gaagggcctgggagagctgctgttgttcctatgagcccagctgtgggcacactgcgctgacacaatgtcatggccctcatgacgaggatgacttggaggagccaatcctgacaactgacc

SEQ ID NO: 589732 - DNA, 120 bp, Artificial Sequence
  ENSG00000173041_0 (sequence is synthesized)
gtctctagctgctgcgggagctccaggtctagtctttactgctctgtgtattctgctcctagaggcccagcctctgtgactccgttatctgcaggtattgggagatgcacagctaagatg

SEQ ID NO: 589733 - DNA, 79 bp, Artificial Sequence
  ENSG00000173041_1 (sequence is synthesized)
tgcctggacactgcacaacggaatttatataggaaagtgatgtttgagaactacagaaacctggtcttcctgggtattg

SEQ ID NO: 589734 - DNA, 120 bp, Artificial Sequence
  ENSG00000173041_2 (sequence is synthesized)
atgtttgagaactacagaaacctggtcttcctgggtattgctgtctctaagcctcacctgataacctgtttggagcaaggaaaagagccctggaataggaagagacaggagatggtagcc

SEQ ID NO: 589735 - DNA, 120 bp, Artificial Sequence
  ENSG00000173041_3 (sequence is synthesized)
aaacccccagttatatattctcatttcactgaagacctttggccagagcatagcataaaagattcttttcaaaaagtgatactgagaggatatggaaaatgtggacatgagaatttacaa

SEQ ID NO: 589736 - DNA, 120 bp, Artificial Sequence
  ENSG00000173041_4 (sequence is synthesized)
ttaagaataagttgtaaaagtgtggatgagtctaaggtgttcaaagaaggttataatgaacttaaccaatgtttgagaactacccagagcaaaatatttcaatgtgataaatacgtgaaa

SEQ ID NO: 589737 - DNA, 120 bp, Artificial Sequence
  ENSG00000173041_5 (sequence is synthesized)
gtctttcataaattttcaaattcaaacagtcataagaaaagaaatactggaaagaaggttttcaaatgtaaagaatgtggcaaatcattttgcatgctttcacatctaacacaacatata

SEQ ID NO: 589738 - DNA, 120 bp, Artificial Sequence
  ENSG00000173041_6 (sequence is synthesized)
agaattcacactagagagaattcttacaaatgtgaggaatgtggcaaagttcttaactggttctcagagcttattaaacataagggaattcatatgggagagaaaccctacaaatgtgag

SEQ ID NO: 589739 - DNA, 120 bp, Artificial Sequence
  ENSG00000173041_7 (sequence is synthesized)
agaaaccctacaaatgtgaggaatgtggcaaagcctttaaccaatcctcaacccttattaaacataagaaaattcatattgaagagaaacccttcaaatgtgaagaatgtggcaaagcct

SEQ ID NO: 589740 - DNA, 120 bp, Artificial Sequence
  ENSG00000173041_8 (sequence is synthesized)
ccttagtaaacataagataattcatactggagacaaaccttacaaatgtgatgaatgtcacaaagcctttaactggtttgcaacccttactaaccataagagaattcatactggagagaa

SEQ ID NO: 589741 - DNA, 88 bp, Artificial Sequence
  ENSG00000173041_9 (sequence is synthesized)
ccttactaatcaaatgtgaagaatgtggcaaagactttaaccagttttcaaaccttactaaacataagaaaattcatactggagagaa

SEQ ID NO: 589742 - DNA, 120 bp, Artificial Sequence
  ENSG00000173041_10 (sequence is synthesized)
tttgcaaaccttactagacataagaaaattcatactggagagaaatcctacaaatgtgaagaatgcggcaaagcttttatacagtcctcaaaccttactgaacatatgagaattcatact

SEQ ID NO: 589743 - DNA, 120 bp, Artificial Sequence
  ENSG00000173041_11 (sequence is synthesized)
aatgtgaagaatgtggcaaagcttttaatgggtgctccagccttactcgacataagagaattcacactagagagaatacctacaaatgtgaagaatgtggcaaaggctttactttatttt

SEQ ID NO: 589744 - DNA, 120 bp, Artificial Sequence
  ENSG00000173041_12 (sequence is synthesized)
gaagaatgtggcaaagcttttaaccggtcctcacaccttactagacataagaaaattcatactggtgagaaactctacaaacctgaaaaatgtgacaataattttgataacacctaaaac

SEQ ID NO: 589745 - DNA, 120 bp, Artificial Sequence
  ENSG00000173041_13 (sequence is synthesized)
acctgaaaaatgtgacaataattttgataacacctaaaacttttctaaacataaaagacaccatcctgttgagaaaccctaaaaatgtgaagaatttgacaaagccttccaatgattgtt

SEQ ID NO: 589746 - DNA, 120 bp, Artificial Sequence
  ENSG00000173041_14 (sequence is synthesized)
acacttgcttgtaggtaagataatttatattggagaaaactttataagtgtaaagaatgtgacaaaacttaaccaatactcacatcttattgcacaggaaagcatttttacttgagaaag

SEQ ID NO: 589747 - DNA, 120 bp, Artificial Sequence
  ENSG00000173041_15 (sequence is synthesized)
attgtacaagtataaagaatgtgaaaaagtcattgatatcttttcacatcttactcaacaccagagtttatacttattaaaagcattataaatgcaattactgtcaaaagaaatttcaga

SEQ ID NO: 589748 - DNA, 120 bp, Artificial Sequence
  ENSG00000173041_16 (sequence is synthesized)
aaacataacactttaaagtgaagaagcgtgtttattttgaagacaaacataacaaatataaggagcataggagggttgtagtacctttacttgtattacaaatcttattgtacgcatttt

SEQ ID NO: 589749 - DNA, 120 bp, Artificial Sequence
  ENSG00000173041_17 (sequence is synthesized)
gtactagagaaaaacactgaagcagttgctcaaactttgttcaacatcagggaatttatattggagaaaaatcctgcaaatgtaatgaatttggaaaaacattttttttcaaaaactacg

SEQ ID NO: 589750 - DNA, 120 bp, Artificial Sequence
  ENSG00000173041_18 (sequence is synthesized)
gcgtagaaaacatgaatttatattgaaatgtgtttttgcagatgcagtaagtatgaaaaatatttaatccaaaattgagtctatgtaaatattaaataatttacagtagaaataactaag

SEQ ID NO: 589751 - DNA, 120 bp, Artificial Sequence
  ENSG00000173041_19 (sequence is synthesized)
gcactgacactttagacattacactaaaacagagtgttgagtataaaaaaatctataagttgttagattatttgtaaataactttaaaaggagtagaagattctttggagagttataatt

SEQ ID NO: 589752 - DNA, 120 bp, Artificial Sequence
  ENSG00000173041_20 (sequence is synthesized)
acattgaaagtatactttttttcttgaaaaaattatggcttatttgaaaagtaaataatgatgaaattcaactctcaaattactttatttcattcctattgtattcacatgtgaaagcat

SEQ ID NO: 589753 - DNA, 120 bp, Artificial Sequence
  ENSG00000173041_21 (sequence is synthesized)
gtgataaattgttgctgtgtcagatataggagagattcttttttattagatgggcattatttatggttttttctgtggaagagtatgggcattaaaatgtaaggtttatgatgaaaatct

SEQ ID NO: 589754 - DNA, 120 bp, Artificial Sequence
  ENSG00000173041_22 (sequence is synthesized)
aagtggagaggccctgttagtttacttttcatattgagtgatgcatgaggtaggtgtttggagtaatattctgcatcatagagaaaagcatttttaattttactttaaattaaatgtaat

SEQ ID NO: 589755 - DNA, 120 bp, Artificial Sequence
  ENSG00000173041_23 (sequence is synthesized)
gctgatcttgaactcctggtctcaagttatcttactgccttggcctccctaaagatgtgggattacagaaataatccactttgccaggctactatgtagcccttcatgtagaactgtgct

SEQ ID NO: 589756 - DNA, 120 bp, Artificial Sequence
  ENSG00000173041_24 (sequence is synthesized)
agtcataatgaatcataacactgtcaccttttattttgaaaagtctttatttttatctgtttttaaagtacactaatcttgaatcaagtattcttggttaggaattttattactgcatca

SEQ ID NO: 589757 - DNA, 120 bp, Artificial Sequence
  ENSG00000173041_25 (sequence is synthesized)
aaatttgggaagttcttagcctttttcatctacaagtaacctctacattactttttccctacattcttcttctaagagttttttaatgaatatattgatgtacttgatggtgtccaataa

SEQ ID NO: 589758 - DNA, 120 bp, Artificial Sequence
  ENSG00000173041_26 (sequence is synthesized)
tccaataagttttacatttcatgttttaattttcttttggaattttatatttttgttttatatattttaggatatgccacctcacatgagttaattgttttggttttttagtttatatta

SEQ ID NO: 589759 - DNA, 120 bp, Artificial Sequence
  ENSG00000173041_27 (sequence is synthesized)
tatgccagtatttaactctgtaaaatttaagacagtgtggaacaaagtcaaatatgaatcagccatatgtctactaccaatataacgatctctgtgtttacctgtataaatattttccct

SEQ ID NO: 589760 - DNA, 120 bp, Artificial Sequence
  ENSG00000173041_28 (sequence is synthesized)
atattatttttgtgtgggagaaaaacttttctatttaaagataatttacaaacgatcataatctcttttaggtatgtctatttttacttgtcaaaaacacataacatttacaatagaata

SEQ ID NO: 589761 - DNA, 120 bp, Artificial Sequence
  ENSG00000173041_29 (sequence is synthesized)
tttttaaatgtttattttagtcctattatattgacattgttatgcaacatattcctaaaatgtttttatcttgcaaagctaaatatcaatacccattaaaaaactatgaattttacccat

SEQ ID NO: 589762 - DNA, 120 bp, Artificial Sequence
  ENSG00000173041_30 (sequence is synthesized)
ttcctggcacttttcaaacaccactctgttttctctaagagtgtaactgcttcatatatctcatacaatctctgtctttttgtgactggctcattttattttgcacaatatcatcaagct

SEQ ID NO: 589763 - DNA, 120 bp, Artificial Sequence
  ENSG00000173041_31 (sequence is synthesized)
ttatagttgttagaatattttctgctttttaaatactgggtgatatttaagtattttgtattttagattatatctactgagtaatttggtgacaaatttgcactgcttttacctattggc

SEQ ID NO: 589764 - DNA, 120 bp, Artificial Sequence
  ENSG00000173041_32 (sequence is synthesized)
tttcagtaacaatgctgcaataattacaggtatgcaaatgacctatatgatcatatatgtgtaagtttatatatgtgccgcattctgttctactagtgtacgtttttacctttgtactca

SEQ ID NO: 589765 - DNA, 120 bp, Artificial Sequence
  ENSG00000173041_33 (sequence is synthesized)
taccaaattgttacaattctgtagctctgtaatgtgtttcaaaatcagaaactgtaatgccttcaaaattgtttattttattgcagatttttgggtactttattatctcttaagacttta

SEQ ID NO: 589766 - DNA, 120 bp, Artificial Sequence
  ENSG00000173041_34 (sequence is synthesized)
tatactttgggggttgctgtttctatttcttcaaaaatgcatgagaaatttgaacaacattgcattaaatctgtaaattacattgagcaggatggacatcttcacaagattaattatttt

SEQ ID NO: 589767 - DNA, 120 bp, Artificial Sequence
  ENSG00000173041_35 (sequence is synthesized)
aacatttcaacaagcatgctcaagagtgtattgttttaatttctatgtatttgtgaatttttcagttttttcttcttactgttctatactcatttcattttggtcatagaaagtaatcca

SEQ ID NO: 589768 - DNA, 120 bp, Artificial Sequence
  ENSG00000173041_36 (sequence is synthesized)
taaaaatttagttttaaataatttgttaagacttcttttttggtttaccaggttttctatcaaggagaatttcgtatgaggtattgagaaggctgtttatcattatgttgttgagtgttc

SEQ ID NO: 589769 - DNA, 120 bp, Artificial Sequence
  ENSG00000173041_37 (sequence is synthesized)
attctgctcctagaggcccagcctctgtgactccgttatctgcaggtattgggagatgcacagctaagatgccaggaccacctggaagcctagaaatggtattgctgtctctaagcctca

SEQ ID NO: 589770 - DNA, 120 bp, Artificial Sequence
  ENSG00000173041_38 (sequence is synthesized)
tgcataaatgagtttcagatccctgttttcaagaaaatctttgagctttgtccatgtagaaaaaaattccttcagtacgtttcatcttgacctgaactttccacattcctgagctgatct

SEQ ID NO: 589771 - DNA, 120 bp, Artificial Sequence
  ENSG00000173041_39 (sequence is synthesized)
atgtccttcactctagattagtggtaattacagaaatttgatggcataaaatgttgttgcccacaccttaaaatttaattgcccccaccaatttttgattcagtagtactgggtagtgaa

SEQ ID NO: 589772 - DNA, 120 bp, Artificial Sequence
  ENSG00000173041_40 (sequence is synthesized)
atatgctatgacattctctttactgagcacattagtagtttggtaattggagaatatgagcaagattcatgttatttatttttaataaaacaggtattgctgtctctaagcctcacctga

SEQ ID NO: 589773 - DNA, 120 bp, Artificial Sequence
  ENSG00000173041_41 (sequence is synthesized)
ggtattgagggaaaaacatagaaataatttctggattctctaagggggcagaaaaatagtgaaaaaaaatgatgaaaaaagagtgaaagacaaatagtgaaaaatttgtaaaggaaatta

SEQ ID NO: 589774 - DNA, 80 bp, Artificial Sequence
  ENSG00000173041_42 (sequence is synthesized)
gagtgaaagacaaatagtgaaaaatttgtaaaggaaattaaaaggtaaaatatttacgaatggtgtaaaagagggaccac

SEQ ID NO: 589775 - DNA, 80 bp, Artificial Sequence
  ENSG00000173064_0 (sequence is synthesized)
atgccgggagccccgcccccaacatggcgtctcactgacagttggttgccgagcggcagaggcggatcctgctcctgagg

SEQ ID NO: 589776 - DNA, 120 bp, Artificial Sequence
  ENSG00000173064_1 (sequence is synthesized)
ggtctcccgggccggggtcgggggtatggcgactcggaccgcctagggcggagttgcacgggcgaggcagcaagtggggcgccgctggcgggcgcggcggccgctgccatggactggtga

SEQ ID NO: 589777 - DNA, 120 bp, Artificial Sequence
  ENSG00000173064_2 (sequence is synthesized)
tgccatggactggtgatcgcggcggctcctgctccgtttcccccggccgggcgtctgctcctcagcgccaagccttcagccggggccatgggctcgtcggcggccgcggcggcggcggcg

SEQ ID NO: 589778 - DNA, 120 bp, Artificial Sequence
  ENSG00000173064_3 (sequence is synthesized)
cggcgcagtggctctcggtgaaggaagagaccatcttcctgcacgacgggctgatccgggtcaccgacctggccgagctgcccagcgagatcctcggggccccagaggccgcggacaccg

SEQ ID NO: 589779 - DNA, 120 bp, Artificial Sequence
  ENSG00000173064_4 (sequence is synthesized)
acctggagattttaacctttgagaccaagaacccgtcggaattagcagaacgtttgcgctctgtttgtgggaatcagagcaatgcctatgcccggctgctggaataccgcctgaatgcct

SEQ ID NO: 589780 - DNA, 120 bp, Artificial Sequence
  ENSG00000173064_5 (sequence is synthesized)
tgcgaggactgtggaatgcccagcgccagctggccttagaagaacagcatgaaagggaaagttcaggtgatgaggaaactttggccctgctcaaacgccagggcttgttgcagcaacctg

SEQ ID NO: 589781 - DNA, 120 bp, Artificial Sequence
  ENSG00000173064_6 (sequence is synthesized)
agcaagcgcccttcacatcgaggatggggctcctgctggtcttcccccttattcagtcccagagtagaacagacccctctctctgtaacataactgctgaggtgctattgaactgccttc

SEQ ID NO: 589782 - DNA, 120 bp, Artificial Sequence
  ENSG00000173064_7 (sequence is synthesized)
gtgactgccagcctttgagcttgaccaaggagcctgctgactgtctcaatggaattgaaactttgctgtgctcttggctagaggagacttctgacacaggccgacacatcccacataagc

SEQ ID NO: 589783 - DNA, 120 bp, Artificial Sequence
  ENSG00000173064_8 (sequence is synthesized)
aaaaagaaaatgctgctgctgccctggtggctttggcttgtgccaggggatcattgaaaactttcgtccacacagtccatctattacagaaacagacggatctagggtccctgcctgtag

SEQ ID NO: 589784 - DNA, 120 bp, Artificial Sequence
  ENSG00000173064_9 (sequence is synthesized)
ctgatgtgctatataggctgttgcttttggaaggggggcctggatctccctcctgtttgcttgggggcaaacacatagtatcatggggttatgaagacatgttgcctgcgccggatagca

SEQ ID NO: 589785 - DNA, 120 bp, Artificial Sequence
  ENSG00000173064_10 (sequence is synthesized)
acactggctccagttctgaaaataaagatgctgacttgggacgctgtctcacggcagatggtctttacctgtatactactaactcagttggaagaggagtaagcaaattgggatctggat

SEQ ID NO: 589786 - DNA, 120 bp, Artificial Sequence
  ENSG00000173064_11 (sequence is synthesized)
tacatggtactctcagaggttttgtgtactgccggaacgaggagttggaaccaggatgggtggcttttggcagcggcagtcttctccaccggcctgtctctttcgataataaacctcact

SEQ ID NO: 589787 - DNA, 120 bp, Artificial Sequence
  ENSG00000173064_12 (sequence is synthesized)
cccttttccaggtcattgaccagaacacccttcaggtgtgccaggtggtgccaatgccagccaatcacctccccattggcagcaccatgagcactgtgcacctgtcttcagatggcactt

SEQ ID NO: 589788 - DNA, 120 bp, Artificial Sequence
  ENSG00000173064_13 (sequence is synthesized)
acttctattggatctggtctcctgccagcctgaatgagaaaacaccgaagggacattctgtcttcatggacatttttgaacttgtggttgaaaatggtgtatttgtagccaacccacttc

SEQ ID NO: 589789 - DNA, 120 bp, Artificial Sequence
  ENSG00000173064_14 (sequence is synthesized)
aggaacgtacaattctaatgagaaaagagggcgaatctgccaaaagcattaatgagatgcttctaagtagactttctcggtatagagcctccccgtcagcaacgcttgctgccctgactg

SEQ ID NO: 589790 - DNA, 120 bp, Artificial Sequence
  ENSG00000173064_15 (sequence is synthesized)
gttccaccatctccaacacactgaaagaggatcaagcagcaaatactagctgtgggctgcctctaaaaatgctgcggaagacacccatatatacctgtggcacctacttggtgatgctgg

SEQ ID NO: 589791 - DNA, 120 bp, Artificial Sequence
  ENSG00000173064_16 (sequence is synthesized)
tgcctcctccagggggatcaggcagctctgccacccgatctctttttggtggaacaagtggtttgtcatctttaaaaatcctagcctccagcttggtgtataatatttcggatggtcagt

SEQ ID NO: 589792 - DNA, 120 bp, Artificial Sequence
  ENSG00000173064_17 (sequence is synthesized)
ttacaagtcgtgcagatctcatagatgctgctggaagctcactggggcgtggtgctctcgtaccaggattgggagcgtgttatgacacagtgaacaacatgctatggacatgctcaaatg

SEQ ID NO: 589793 - DNA, 120 bp, Artificial Sequence
  ENSG00000173064_18 (sequence is synthesized)
actatatcgatcagtggtgtaaccctgggaatcaagccttccattatgtctgccagagacttggagtcagtcacattatcactgagcccaaagaagaggctataaccacgaatgaggtta

SEQ ID NO: 589794 - DNA, 120 bp, Artificial Sequence
  ENSG00000173064_19 (sequence is synthesized)
taaaccaattattgcaccacgttggtgcgatgtgcatacaccaactcaatcttcttgccaccaaccccaatcttccaatcacaagtgtcttgggcaagcagcatccaattgaagcacatc

SEQ ID NO: 589795 - DNA, 120 bp, Artificial Sequence
  ENSG00000173064_20 (sequence is synthesized)
atcttagcagtatttgtgacattatggagaaggccatggttaatggagatacctgtattatacgctgcattctcgttgtctttcaggtggtatttaaatttttcttcagcccacaaactg

SEQ ID NO: 589796 - DNA, 120 bp, Artificial Sequence
  ENSG00000173064_21 (sequence is synthesized)
aaaggaatcgagacatcattcgacggtcgggattgcttctttggcagttgttgatggctccaaaagatcaaatttgccctgaaattcagaaggaagtctgccttgccatcagctctggtt

SEQ ID NO: 589797 - DNA, 120 bp, Artificial Sequence
  ENSG00000173064_22 (sequence is synthesized)
taaatatcttgtacccaggtgaaactgaaatcaataacttacttaaactggtcttaacagaaggagagagaaacagtggactctcccagctacgggatgtgatcctaaccaacctggctg

SEQ ID NO: 589798 - DNA, 120 bp, Artificial Sequence
  ENSG00000173064_23 (sequence is synthesized)
aacagctccaaaacaaccgatttggcagtgatgaggatgatcattacagactaaatgatgaacttttacactacattctgaagattgttgtacgagaatcctgtatcttaatcaccaagt

SEQ ID NO: 589799 - DNA, 120 bp, Artificial Sequence
  ENSG00000173064_24 (sequence is synthesized)
gccaaactgtctctaaagatgattttcaaaagctcctttcaactgtgcctgctgcatcctcctgcctgcgctatctgatggcagttcagaatcaccttctcagtaacactattttgatta

SEQ ID NO: 589800 - DNA, 120 bp, Artificial Sequence
  ENSG00000173064_25 (sequence is synthesized)
aacctgatgagaatgatgacagtgacagctccttgcagggagagacattgaaggagctaaaagtcagtattttggctcttgccacccaaatcctgactggatgtgatgaagtgttggaaa

SEQ ID NO: 589801 - DNA, 120 bp, Artificial Sequence
  ENSG00000173064_26 (sequence is synthesized)
tgctacagcaggtcacaactgccctcataaatagtgacatagcagaccgtgagcagaggttaaaaggcttggaacaagttactaaggctactatgcttggtcaccttcttccagtgttac

SEQ ID NO: 589802 - DNA, 120 bp, Artificial Sequence
  ENSG00000173064_27 (sequence is synthesized)
tgacctccttgatgcatccaaatttacagactctgatcatggcggatgccctgatgcctcagctagtgcagctggtactctataccagccagacggcgttgctgcttaaaacccagtgtc

SEQ ID NO: 589803 - DNA, 120 bp, Artificial Sequence
  ENSG00000173064_28 (sequence is synthesized)
cggtttttgctgaggtgggctgttccccgtgtggtgcaccagaccagaagtgcaggctgttccctgatgagagaatgttagaagagaaggaagagccaggatttctcactggtttaaaga

SEQ ID NO: 589804 - DNA, 120 bp, Artificial Sequence
  ENSG00000173064_29 (sequence is synthesized)
ttcctgccccatgggctgctggaaagactgtggaaacagtccaccccgtcagagacaactataaatttaaagaaacggtccatatcccaggagctcgctgcctgtaccttagatttgata

SEQ ID NO: 589805 - DNA, 120 bp, Artificial Sequence
  ENSG00000173064_30 (sequence is synthesized)
gcagatgctcttcgcaatatgactatgacaaattggtgatatatgcggggcctaacacaaacagtaggaaggttgctgaatatggaggcaacacactgggatatggcagccgtagtgtct

SEQ ID NO: 589806 - DNA, 120 bp, Artificial Sequence
  ENSG00000173064_31 (sequence is synthesized)
taggaactggttggccgaaagacttggtgaaggtggaaggagatacagtcaccttctcctttgaaatgagaagtggccgtgaacacaacactcctgataaagccatgtggggctttgctt

SEQ ID NO: 589807 - DNA, 120 bp, Artificial Sequence
  ENSG00000173064_32 (sequence is synthesized)
gcacagttcgcgctcaggagtcttcggaggatgtctcaggaggcttgccctttctggtagacctggctttaggtctgtctgtgttagcttgttccatgttaagaatcctgtacaatggac

SEQ ID NO: 589808 - DNA, 120 bp, Artificial Sequence
  ENSG00000173064_33 (sequence is synthesized)
cagaaattaccaaagaagaagaagcctgtcaggagctattgcggtccaaacttttacaaaggtgccagtggcaggtggaggccaatggcgtgatctcccctgcccttactccgagcccct

SEQ ID NO: 589809 - DNA, 120 bp, Artificial Sequence
  ENSG00000173064_34 (sequence is synthesized)
ctccactgcctctgaccatagaggaagacagagaattcacctacccctctgatgtcctcgtgcctcctgttggaaactactttgatctgcctcggatcagactgcctccaggaatcatga

SEQ ID NO: 589810 - DNA, 120 bp, Artificial Sequence
  ENSG00000173064_35 (sequence is synthesized)
taaagctcagggaaatttctgggcgtgctagacctcaatttagaccaagtataaaagaagtgattcagccagacgtgatggaggaaatggtggtatcttgtgttattaagcacttgaact

SEQ ID NO: 589811 - DNA, 120 bp, Artificial Sequence
  ENSG00000173064_36 (sequence is synthesized)
tggttgatgcactgcagtctctaataaatttccaatatcaagaagaacatgctgaagaatatgatttattatgtaaaattatgggagagacctttaagaaactcaatgccatggagagac

SEQ ID NO: 589812 - DNA, 120 bp, Artificial Sequence
  ENSG00000173064_37 (sequence is synthesized)
agctgcagagtgttgcagaactggaacaaaaatggcaaagtgaagttgatgatgccatgcaggggaaactggagaacaacatgcctttcttttatgattaccattttaatgagaacaaaa

SEQ ID NO: 589813 - DNA, 120 bp, Artificial Sequence
  ENSG00000173064_38 (sequence is synthesized)
tgaaagaactagaacttttatgttcaatgaaggaagtctcctttgatgggaatgatcttgaaaacatggtcctatcactgagggagaagttcctacaagaagtgaattctcttattcaga

SEQ ID NO: 589814 - DNA, 120 bp, Artificial Sequence
  ENSG00000173064_39 (sequence is synthesized)
aaccctcacacccactggctaaaacaaagacgttagtgaagagtttaatgaaccgagccgagctgttgctgcatgtcaccatcgcagcccagtcgggcctcacgagaagcatctctggga

SEQ ID NO: 589815 - DNA, 120 bp, Artificial Sequence
  ENSG00000173064_40 (sequence is synthesized)
cccctgctgaaacaccagcttgtaaatcagcttctgaaacaaaagtgatatctcacgctgtcaggcagcctgtttttcttcgcagcatgtcagctccttctgacctggaaatgattggta

SEQ ID NO: 589816 - DNA, 120 bp, Artificial Sequence
  ENSG00000173064_41 (sequence is synthesized)
atgaagatttggaatttactagagcaaatcagaggcgtcgccacgtgaccagccaccgcagcagctcctttacactcctgcagtcgctggccattgaggacagcagggacaagcccacct

SEQ ID NO: 589817 - DNA, 120 bp, Artificial Sequence
  ENSG00000173064_42 (sequence is synthesized)
acagtgtcctgctagggcagctgtttgctttcatcggcaccaaccctgaccaagctgtgtccagcagcagtttccttttggctgcacagacaaggtggcggcggggaaacactcgcaagc

SEQ ID NO: 589818 - DNA, 120 bp, Artificial Sequence
  ENSG00000173064_43 (sequence is synthesized)
aggcactggtgcacatgcgggaattgctgacagctgccgtacgagtcgggggagtgacgcatcttgtgggtccagtgacgatggtccttcagggaggacccagaattgaagaactcacat

SEQ ID NO: 589819 - DNA, 120 bp, Artificial Sequence
  ENSG00000173064_44 (sequence is synthesized)
gtggtgggatggtcgagcaggtccaggaagcctttggcgagaccatgacctctgttgtgtctctgtgtgctcgttaccctatcgcttgcgcaaatagcattggactcttatgtaccatac

SEQ ID NO: 589820 - DNA, 120 bp, Artificial Sequence
  ENSG00000173064_45 (sequence is synthesized)
cttacaccaggagcgaagagaagtgcctggtacgcagtggccttgtgcagctcatggatcgactgtgtagcttgagcaatcagaccgagtccagctccagtgagaaacagaccaagaagc

SEQ ID NO: 589821 - DNA, 120 bp, Artificial Sequence
  ENSG00000173064_46 (sequence is synthesized)
agaaggtggccaccatggcctgggctgccttccaggtgcttgccaaccgctgtgttgagtgggaaaaagaggaaggtggctccacagaggctgtgcactcaggtctggcccggcaggtgt

SEQ ID NO: 589822 - DNA, 120 bp, Artificial Sequence
  ENSG00000173064_47 (sequence is synthesized)
ccagccttctcactaaccatcttgcccgagccacagagtgctgtggcaaccaggctgctgggaatgacgcgctccaggatgtccttagtcttctcaatgatctctcaaggagccacatag

SEQ ID NO: 589823 - DNA, 120 bp, Artificial Sequence
  ENSG00000173064_48 (sequence is synthesized)
gtaaagccatcctgagccagccagcttgtgtgtccaaactcctctccctgctgcttgaccaacgcccgtctccaaagctagtccttattattctccagctgtgccgggcggcgctgcccc

SEQ ID NO: 589824 - DNA, 120 bp, Artificial Sequence
  ENSG00000173064_49 (sequence is synthesized)
tgatgagcgtagaagactgtggaaacgtggagctcccaccctggagctactctgtcccctccttaaacagtgagcaggaggatcccagcgacccagcttccaagatcgcctccctgctct

SEQ ID NO: 589825 - DNA, 120 bp, Artificial Sequence
  ENSG00000173064_50 (sequence is synthesized)
tagcaaagctggcagattatgtggttccaggatgtcagacagttctttctccaaccgcttctgaacctgacaccacattgacaaaaaccagtcccaagaattccttgaaaggagataaag

SEQ ID NO: 589826 - DNA, 120 bp, Artificial Sequence
  ENSG00000173064_51 (sequence is synthesized)
atcctggagaagagagtgaggctgtggatggcaagctctcgatatttatccacaagcgggaagaccagtcatcccatgaagtcctccagccattgctaagtagttcagaaggacggccct

SEQ ID NO: 589827 - DNA, 120 bp, Artificial Sequence
  ENSG00000173064_52 (sequence is synthesized)
tccgacttggtactggcgccaacatggagaaagttgtgaagatggatcgagacatgaccaagggtggctgttgcgaagtgattacagaagaggctgcagccgccctgcggaaagccacca

SEQ ID NO: 589828 - DNA, 120 bp, Artificial Sequence
  ENSG00000173064_53 (sequence is synthesized)
agtgggcacagtcaggcctcatcgtcagcattgggccacctgtagagtctatcaacccagagactgtgagtggactatccacaggcgacaaaaagaaaactgcccaaacttccatttgcc

SEQ ID NO: 589829 - DNA, 120 bp, Artificial Sequence
  ENSG00000173064_54 (sequence is synthesized)
gagagaggaactcggagcttgcaaggactgatcctgtgcgtcccttcatcagtgggcatgtggcaaacagcatggctgcagaagtgatcgccttgctacatagcttgctcatggcacctg

SEQ ID NO: 589830 - DNA, 120 bp, Artificial Sequence
  ENSG00000173064_55 (sequence is synthesized)
aatcaaatgctgctcaaatatggaccacaacagcagagaaggttctgtctagagcactgatgtacattccacaattggggaaatacgcagaaagcattctggaaaatggcagcagcagtg

SEQ ID NO: 589831 - DNA, 120 bp, Artificial Sequence
  ENSG00000173064_56 (sequence is synthesized)
gcaggaaacttgccaaacttcagagaattgcacgccaggccgttgccgcactgtgtgcacttggaggcttcaaagagacaatcaagataggatccgaggttcaggttttaggtagaggaa

SEQ ID NO: 589832 - DNA, 120 bp, Artificial Sequence
  ENSG00000173064_57 (sequence is synthesized)
tttcaggaagcattggagtagtggcttctatcaatgaacaggaaggtatagctacagtcagattcccacccatagactgtagaaagacttcgcaagcgtcagacacattgactattccat

SEQ ID NO: 589833 - DNA, 120 bp, Artificial Sequence
  ENSG00000173064_58 (sequence is synthesized)
tgtctagactttgtgttccaagatcagaggcattgcctcttcataaactgtccattactgagaaggtagtacaggcagtccagtccatgttgcttcctcaggagggaagtctctctattc

SEQ ID NO: 589834 - DNA, 120 bp, Artificial Sequence
  ENSG00000173064_59 (sequence is synthesized)
acacctcacttcctgcaacaggagatgggtcagctcctgtgatggcagtcgttcggctccttgctgaaataaggacaagagcatgcctggtcatggcccagcttttagaagacagcttat

SEQ ID NO: 589835 - DNA, 120 bp, Artificial Sequence
  ENSG00000173064_60 (sequence is synthesized)
tttgtgaagaattcatacaacaatgtccagcagctgttgaagttcttaacctagtagcccaggaatgtagtgctggagagcgacttgcagttgtggaggtacagtgtgaacggctgagga

SEQ ID NO: 589836 - DNA, 120 bp, Artificial Sequence
  ENSG00000173064_61 (sequence is synthesized)
tgctctaccgggactgtgctcggcccccaccacctcctttgcaggctgaccgaagacagcccaaagagattacttggagcccctcgcgagtgtttccgcctgttcgagcctgcatgttct

SEQ ID NO: 589837 - DNA, 120 bp, Artificial Sequence
  ENSG00000173064_62 (sequence is synthesized)
catctcaccttacctcagtcaccttcctggctgaccccagcgctgggggaggcctgccccggggcacttttatctatgccacttcaccactgccagttcaggccccgtctttttactggg

SEQ ID NO: 589838 - DNA, 120 bp, Artificial Sequence
  ENSG00000173064_63 (sequence is synthesized)
aaattgaaatcgtttcctatggagacaccgatgatgacaccggacccatagtttcctttggcttcactacagaagcagagaagcgagatggggcttggactaatccagtgggcacttgtc

SEQ ID NO: 589839 - DNA, 120 bp, Artificial Sequence
  ENSG00000173064_64 (sequence is synthesized)
ttttccataacaacggccgagccgtgcactataatggctccagtttgttacagtggaagagcgttcgcttagacgtgactctctcccccggtgacgtggcaggaattggctgggagagaa

SEQ ID NO: 589840 - DNA, 120 bp, Artificial Sequence
  ENSG00000173064_65 (sequence is synthesized)
gccgggtgtacttcacatactgcgggcagcgcctctcaccatatcttgaagacgtctctggtggcatgtggccagtggttcacattcagaaaaagaacaccaaaacccgagctaactttg

SEQ ID NO: 589841 - DNA, 120 bp, Artificial Sequence
  ENSG00000173064_66 (sequence is synthesized)
gctcccggccgtttgcctacgcggaagggcaggcccaccgcaatgctgctgacctgtgcactgacctagcagaagagatcagcgctaactttgaggccctgcctttcgccatggcatctg

SEQ ID NO: 589842 - DNA, 120 bp, Artificial Sequence
  ENSG00000173064_67 (sequence is synthesized)
acagtgacaatgatgctggcaccagtattgcatcagacccaggcactcatgggccaccatgccggattgctgccgtggccaccgctcagcaacaatatgatagtgacacctcctgtcatt

SEQ ID NO: 589843 - DNA, 120 bp, Artificial Sequence
  ENSG00000173064_68 (sequence is synthesized)
ataaagtcgagctcagctatgagaatttcatcacctctggcccagaccctcacccgcctcccattgcagatgatgaaagcgatgatgatgacgatgatgacatccctcaggaggaccact

SEQ ID NO: 589844 - DNA, 120 bp, Artificial Sequence
  ENSG00000173064_69 (sequence is synthesized)
acgccctgctggtgaaagcatgggagaccaaggtttttcctaccatccgaagacgcttccgcaatgaagcagagcggaaatcgggcctggaccagataaagggggccttacaactaggta

SEQ ID NO: 589845 - DNA, 120 bp, Artificial Sequence
  ENSG00000173064_70 (sequence is synthesized)
tggtggatattgcccgacagacggttgaatttctctacgaagagaatggtggcatcccaagagacctttatcttcccaccattgaagacattaaagacgaagcaaacaagttcacaattg

SEQ ID NO: 589846 - DNA, 120 bp, Artificial Sequence
  ENSG00000173064_71 (sequence is synthesized)
ataaagttcgaaaaggtctcacagtagtaacccgctctccagacagcaataatgtagccagcagtgctgttggaactgctctgccaaaatttgccatccgagggatgctgaaaacctttg

SEQ ID NO: 589847 - DNA, 120 bp, Artificial Sequence
  ENSG00000173064_72 (sequence is synthesized)
ggcttcatggagtcgtcttagatgttgattcagtgaatgaactggtgcaggtagaaacgtacctccgcagtgaaggtgtgctggtgcgatactggtatcctattgacatgttggaaaggc

SEQ ID NO: 589848 - DNA, 120 bp, Artificial Sequence
  ENSG00000173064_73 (sequence is synthesized)
ccccagcaggctaccgaaggactgccaccaatgggctggtcacactggacaataccaaccttcaaattcacagggagctgctgcgctgcgaggctgcgctggccaggctgtactgccgca

SEQ ID NO: 589849 - DNA, 120 bp, Artificial Sequence
  ENSG00000173064_74 (sequence is synthesized)
tggccctgctcaatatcttcgccccgaagttgcctcacttgttcactcgcctcttccacatccctgccatccgggacattaccctggagcacctgcaactgctgtccaatcagctcctcg

SEQ ID NO: 589850 - DNA, 120 bp, Artificial Sequence
  ENSG00000173064_75 (sequence is synthesized)
cacctcctctcccagacggcaccatcagctccagctcgatcctcctggcgcagtctttacagcattgcatccattcccagaactgctccgccacggacctcttttaccagggcaactccc

SEQ ID NO: 589851 - DNA, 120 bp, Artificial Sequence
  ENSG00000173064_76 (sequence is synthesized)
agacagtgagagagtggctcaacgtggccatcacccggaccctgcaccagggcgaggagagccttttagagctgacgaaacagatctgctctttcctgcagacagcaccagagcagttcc

SEQ ID NO: 589852 - DNA, 120 bp, Artificial Sequence
  ENSG00000173064_77 (sequence is synthesized)
cctccgaagagttcccaatttccgaatccaaagtcaacatggacgtgaatttccccggggcagcttttgttgttgtgtcttgtaaagaaagtcaatctggattccgcaaagactcctctc

SEQ ID NO: 589853 - DNA, 120 bp, Artificial Sequence
  ENSG00000173064_78 (sequence is synthesized)
tgtacaaggcaccgtgggcacgggtgctcgtatatggcctcggccacaaagtgaagcgaaatggccagctgaacctcatcgaggccgcctgttacccgcgggacgcgtccccagccaaca

SEQ ID NO: 589854 - DNA, 120 bp, Artificial Sequence
  ENSG00000173064_79 (sequence is synthesized)
ctgggcttgcacctccccccaccgctgaccagtacccctctgtggtcctctccacagacagggtccacatcaaactgggggtgtctccacctcctggagcagtcctggtgttacattccc

SEQ ID NO: 589855 - DNA, 120 bp, Artificial Sequence
  ENSG00000173064_80 (sequence is synthesized)
tgcccctggagttcccactggctatggccttcgcagagcagctgctgtcctggaaatcagaggacagtgaagggaagtccgaagatgagcctgacaccattccgacatccgtcctcctgc

SEQ ID NO: 589856 - DNA, 120 bp, Artificial Sequence
  ENSG00000173064_81 (sequence is synthesized)
aggtggtggagctgctaggaaacttcttgtggaccacggacatggcagcctgcgtgaaggagcttgttttccatctcctggcagagctcctgcgcacggtgcacaccctggagcagaggc

SEQ ID NO: 589857 - DNA, 120 bp, Artificial Sequence
  ENSG00000173064_82 (sequence is synthesized)
ggcaccccgctggcctgtcctcctcaatcgccctccagctgaacccctgcctggccatgctgatggccttgcagtcggagctccacaagctgtacgacgaggagacgcagaactgggtct

SEQ ID NO: 589858 - DNA, 120 bp, Artificial Sequence
  ENSG00000173064_83 (sequence is synthesized)
caggcggcgcctgcgggggctccgggggggcggcggccggtgaccagggcaggttctctacgtattttcatgcactcatggaagggtgcctggctgtggccgaagtgaccctgcctacta

SEQ ID NO: 589859 - DNA, 120 bp, Artificial Sequence
  ENSG00000173064_84 (sequence is synthesized)
acatgagtgtcacagccagtggggtgacctcagcgaccgccccaaatctcagtgactcgtcctcctcctcctcgtcctccccaggacagaccccacagagtcccagcctcctctccaaga

SEQ ID NO: 589860 - DNA, 120 bp, Artificial Sequence
  ENSG00000173064_85 (sequence is synthesized)
ggaaaaaagtcaagatgaagcgggaaaaggcctcctcgtcgggcaagcgccagtcttcccgcaccgtggactcggaccccaccgtgctcagcatcggaggcagcaagcccgaggacatgc

SEQ ID NO: 589861 - DNA, 120 bp, Artificial Sequence
  ENSG00000173064_86 (sequence is synthesized)
tgtggttccaccgcgcactcaccctgctcatcatcctccgccacctcaccaggaaggacccacaggggctgggcgtgacgagtgacgccatcgccgatgcctgccaggccctggtgggcc

SEQ ID NO: 589862 - DNA, 120 bp, Artificial Sequence
  ENSG00000173064_87 (sequence is synthesized)
ccaccgcccacagccgcttgctggtgatctccgggatccccacccacctggacgagggcgtagtcagaggcgccatccgcaaggcctgcaacgcccacggcggggtcttcaaagacgaga

SEQ ID NO: 589863 - DNA, 120 bp, Artificial Sequence
  ENSG00000173064_88 (sequence is synthesized)
tctacatcccgctgcaggaagaagacaccaagaagccaaaagacaaggccgagggcggggacgggaaagttgagcccgagaagacactggccttccccggcacagacagcatggaggtca

SEQ ID NO: 589864 - DNA, 120 bp, Artificial Sequence
  ENSG00000173064_89 (sequence is synthesized)
gcacgtccagcagcctgacccccgccatgagcatcagcgcctccgcctccaccagccaggcctccatctgcagctcgcagggcatctcccaaaccgtcagcgacctctctgtggatccgc

SEQ ID NO: 589865 - DNA, 120 bp, Artificial Sequence
  ENSG00000173064_90 (sequence is synthesized)
tgcctgccggcctcgagctgcccatccctccgggcctgttggagccccacgcggtgtccagccaggaaagcctggacatttccctgtgcagcaccggcagcctgggcagcctgggcagcc

SEQ ID NO: 589866 - DNA, 120 bp, Artificial Sequence
  ENSG00000173064_91 (sequence is synthesized)
tgggggagcccctggacaatgcagagacggcctcggtgtcggacatgggctccatgtacacagtcacttccctggacaaccagcccctcgccgcccgccccatcaaaggcttcgcagtcg

SEQ ID NO: 589867 - DNA, 120 bp, Artificial Sequence
  ENSG00000173064_92 (sequence is synthesized)
tggagataagatcccgagccaaaattgagaaaattcgagcaagtttatttaacaataatgacttgattggtttgtcaagtttggatggtgaagatgaattgatggaaatgtcaacagaag

SEQ ID NO: 589868 - DNA, 120 bp, Artificial Sequence
  ENSG00000173064_93 (sequence is synthesized)
agattctaaccgtgtctgtagtaaatcagagtctctttgatactcaagggagcccagggttagaagattatttcaatgataagtcaattaaaggggagaagctggtgcccggagccagag

SEQ ID NO: 589869 - DNA, 120 bp, Artificial Sequence
  ENSG00000173064_94 (sequence is synthesized)
aggttctgacggagatatttaagagttgtgcccattcagagcagacgctgagcctgacaccagcgaagcccatcagagtctctgacatttatcttagcaaagagcagatcaactcccaga

SEQ ID NO: 589870 - DNA, 120 bp, Artificial Sequence
  ENSG00000173064_95 (sequence is synthesized)
ccccaggcaacctcctccacctcttcttcaccaatgtccggccgccaaaaaaggtgctggaggatcagctcacccagatcctgaggaagtatggcgtgccaaagcccaagtttgacaaga

SEQ ID NO: 589871 - DNA, 120 bp, Artificial Sequence
  ENSG00000173064_96 (sequence is synthesized)
gcaagtacagcaaggccgggaaggagcagcaccccgtgaaggtggtgagcaccaagcggcctatcaccaagccgcccgccaaggacaaggctgtgctcaacagcgtcagcaggactgcct

SEQ ID NO: 589872 - DNA, 120 bp, Artificial Sequence
  ENSG00000173064_97 (sequence is synthesized)
taagtgagaagaagccaactgtgaagccaaaatcaccagaaaagagcaaaccagatgaaaaggacccagaaaagtcacctaccaaaaaacaagaagtccctgaggaaaaatacctgacgc

SEQ ID NO: 589873 - DNA, 120 bp, Artificial Sequence
  ENSG00000173064_98 (sequence is synthesized)
tggaaggatttcacaaatttgttattgaccgagccaggcaagatatccgtagcgtctggagggcgatcttgtcctgtggttacgatcttcactttgagaggtgcgcatgcatcgatgtcc

SEQ ID NO: 589874 - DNA, 120 bp, Artificial Sequence
  ENSG00000173064_99 (sequence is synthesized)
gacatgcacagaaggcctcaagaaagtggaccctggagatggacgtggcacttgtgcagtacatcaaccagctatgccgccacctcgccatcacacccgcacggctccatccccatgagg

SEQ ID NO: 589875 - DNA, 120 bp, Artificial Sequence
  ENSG00000173064_100 (sequence is synthesized)
tgtacctggaccccgcggatgctgctgaccccagagtggcctgtctcctgaacgtgcccatcgagagcctgcgcctgcgcttcgccttgctgcagtccctcaacaccacactggagacct

SEQ ID NO: 589876 - DNA, 120 bp, Artificial Sequence
  ENSG00000173064_101 (sequence is synthesized)
tcttcctgcccctggtggagctgcgccagacacccatgtatacccacagcatcgccgccctgctgaaggaggccaaagggctgatcttctatgacacgaaggtgaccgtgatgaatcgag

SEQ ID NO: 589877 - DNA, 120 bp, Artificial Sequence
  ENSG00000173064_102 (sequence is synthesized)
tgctgaatgccactgtgcagaggacagcggaccacgcggcccctgagatcaccttggacccactggaaattgtgggaggggaaatcagagcttctgaaaactcctacttctgtcaggctg

SEQ ID NO: 589878 - DNA, 120 bp, Artificial Sequence
  ENSG00000173064_103 (sequence is synthesized)
ccaggcagctggcctcagtgccgtcgtctcagctctgcgtcaagctggccagtggcggtgaccccacatatgccttcaacatccgcttcactggcgaggaggtccatggcaccagcggct

SEQ ID NO: 589879 - DNA, 120 bp, Artificial Sequence
  ENSG00000173064_104 (sequence is synthesized)
ctttccgccacttcctgtggcaggtgtgtaaggagctgcagagttcctcgctgtcgctgctgctgctgtgccccagctcagctgtcaataagaacaagggcaagtatatcctgaccccga

SEQ ID NO: 589880 - DNA, 120 bp, Artificial Sequence
  ENSG00000173064_105 (sequence is synthesized)
gccccatcacctacggggaggagcagctgctgcacttcctggggcagctgctggggattgcaattcgggcagacgtcccgctgcccctggacctcctgccctccttctggaagacgctgg

SEQ ID NO: 589881 - DNA, 120 bp, Artificial Sequence
  ENSG00000173064_106 (sequence is synthesized)
tgggcgagcccttggaccctgagcaagacctgcaggaagcggatatcctcacctacaattacgtcaagaagtttgagagcatcaatgatgagaccgagctggaggccctgtgcgctgaga

SEQ ID NO: 589882 - DNA, 120 bp, Artificial Sequence
  ENSG00000173064_107 (sequence is synthesized)
tcgcctcccagcacctggccacggagagccctgacagccccaacaagccctgctgcaggttcacctacctgaccatgacgggcgaggaggtggagctgtgcagccggggccggcacatcc

SEQ ID NO: 589883 - DNA, 120 bp, Artificial Sequence
  ENSG00000173064_108 (sequence is synthesized)
ttgtggcgtgggagaacaaggacatctacgcggcagccatccggagcctgcggctgcgggagctgcagaatgtggagtgcgtgacggccgtgcgggccggcctgggctccatcatccccc

SEQ ID NO: 589884 - DNA, 120 bp, Artificial Sequence
  ENSG00000173064_109 (sequence is synthesized)
tgcagctgctgaccatgctcagcccactggagatggagctgcgcacctgcggcctcccctacatcaacctcgagttcctcaaggcccacaccatgtaccaagtggggctgatggagacgg

SEQ ID NO: 589885 - DNA, 120 bp, Artificial Sequence
  ENSG00000173064_110 (sequence is synthesized)
accagcacatcgagttcttctggggggccctggagatgttcacccaggaggagctgtgcaagttcatcaagtttgcctgcaaccaggagcgcatcccgttcacctgcccctgcaaagatg

SEQ ID NO: 589886 - DNA, 120 bp, Artificial Sequence
  ENSG00000173064_111 (sequence is synthesized)
ggggtcccgacactgcccatgtgcccccgtaccccatgaagatcgcccccccagatggcacagcaggttccccagactctcgctacatccgcgtggagacctgcatgttcatgatcaagc

SEQ ID NO: 589887 - DNA, 120 bp, Artificial Sequence
  ENSG00000173064_112 (sequence is synthesized)
ttccccagtactcctctctggaaatcatgctggagaaacttcgttgtgccattcactaccgtgaagaccccctcagtggctgatgggagggagccccagaattaggctgtcactgaggca

SEQ ID NO: 589888 - DNA, 120 bp, Artificial Sequence
  ENSG00000173064_113 (sequence is synthesized)
cccactctgctggcttgggaagccaccactgcggcccgtccctccagggccctgcgtgaggagttggcaacattttgcttttccaaactttcgtccacattccagggcctcctggaagac

SEQ ID NO: 589889 - DNA, 120 bp, Artificial Sequence
  ENSG00000173064_114 (sequence is synthesized)
ttaaccttttgtctttgtacgtttcgtgatgggttggttcttttgctgcctgtttgtggtctatttgtaggatagtttagttcccagacagtttgtgtctaatttgatcttcttggacat

SEQ ID NO: 589890 - DNA, 120 bp, Artificial Sequence
  ENSG00000173064_115 (sequence is synthesized)
tgtccctcatggccaccagattctaatgccataaggccccagctggttccccatcacagaaccacccagcaggaagccgggggtacaatgacctcggccacacagagcgctcgtgctttc

SEQ ID NO: 589891 - DNA, 120 bp, Artificial Sequence
  ENSG00000173064_116 (sequence is synthesized)
agcagagcgcctccacagacaagcctgtggccagccctgccctccagcctcgagctggagttgctccagaggcagccccagcaggcctccctccacatagaggtggctgggccaattgcc

SEQ ID NO: 589892 - DNA, 120 bp, Artificial Sequence
  ENSG00000173064_117 (sequence is synthesized)
caaacacgtgagacacacagggagctttatgtgttcatcttcctgctttagaacttgctcccggtcttggtttttctgaggaaaagcccacagtggttcccctgcccctcccatacctcc

SEQ ID NO: 589893 - DNA, 120 bp, Artificial Sequence
  ENSG00000173064_118 (sequence is synthesized)
ctatctgccgtctgtctctttgggccctggtctgacagttttcatctgaggcctcctcgggagcaggagacttaagggttcatcccgaccttagttcacagagcctagctgggtgcatcc

SEQ ID NO: 589894 - DNA, 120 bp, Artificial Sequence
  ENSG00000173064_119 (sequence is synthesized)
cagccgcagggggtgagaagacacccagagatgggggacaatgctcaggtgggggcctcctccgagactctggttgagaggaaagcacatgattcaagcctaccccacaaaaaaggagca

SEQ ID NO: 589895 - DNA, 120 bp, Artificial Sequence
  ENSG00000173064_120 (sequence is synthesized)
caaaatgctcagaaatggcccttcctccctgcagtgacgtaggacaagggaaagggccacacccattttcaaaagagtggactgaggtgctctgctcaatttggggtctgctttagtgac

SEQ ID NO: 589896 - DNA, 120 bp, Artificial Sequence
  ENSG00000173064_121 (sequence is synthesized)
ccagacactcaagtccagatggagactccaggggggtccttctgcccctctggccagccccacccagcactccccatcaccccatgtaagtgtgtatgccagggctgagctgcctccagg

SEQ ID NO: 589897 - DNA, 120 bp, Artificial Sequence
  ENSG00000173064_122 (sequence is synthesized)
ctcacccactgcatctttgccccaaataggtctttgtccagtggtactttgttcatgagcagcacaggccatcttgttggacactgtcactttgggccttgccaggtctcacagaatcac

SEQ ID NO: 589898 - DNA, 120 bp, Artificial Sequence
  ENSG00000173064_123 (sequence is synthesized)
atcgctgtatttattgtataatattgtgaatattggaagttttgagtgagtgctgtctagaaggttttggagtgtggatgctggtccaagaaagaagatgtgccctggcctgctggaaag

SEQ ID NO: 589899 - DNA, 120 bp, Artificial Sequence
  ENSG00000173064_124 (sequence is synthesized)
attgtgaattctagagatagagccgttagcatccatctcctccctgtaactcttaggaaatgcatcaaggaccattatagaaaggatcccctgacctaaggatgaaatcgacctagggtt

SEQ ID NO: 589900 - DNA, 120 bp, Artificial Sequence
  ENSG00000173064_125 (sequence is synthesized)
aatcatgacagctgcatcagttgtattggatgcaagtcaactctggaggtgagtgcccgcaagcagttcccctgctttgaaagaagatggtcagcccgctgcctccccagcggccacagc

SEQ ID NO: 589901 - DNA, 120 bp, Artificial Sequence
  ENSG00000173064_126 (sequence is synthesized)
tcctttgagtgtggggggtcacagccaggatgtattcctgacaataaggatccttttattttcatttctgcataatgaaagagcctttcgatttattagaagtggtttttcctccctaca

SEQ ID NO: 589902 - DNA, 120 bp, Artificial Sequence
  ENSG00000173064_127 (sequence is synthesized)
tctttaaattcttggttctctttagtcctcatcccttgaatggacttgtcagctacctccccaggaggagttcagaagcttctgttggccatcacttgagtagatgacaagctgtaaggt

SEQ ID NO: 589903 - DNA, 120 bp, Artificial Sequence
  ENSG00000173064_128 (sequence is synthesized)
atctgctgctaacgtggctgcttctccgagagcacattgaggtccagacagatccaaaccttggccctaaaaaatgtgtgctgtaaagttacttgatgtatatttattataattatttat

SEQ ID NO: 589904 - DNA, 120 bp, Artificial Sequence
  ENSG00000173064_129 (sequence is synthesized)
ggttgcatttaacaaacttttcattcaatctgatgctatttacaccatgctgtgtaaaggaagctcactaaaggaaaaaagtcacaccaataaataaccttcatctaattttgatttacc

SEQ ID NO: 589905 - DNA, 120 bp, Artificial Sequence
  ENSG00000173064_130 (sequence is synthesized)
ttaagagttgtgtgatcatctactcttgctgagcaagttcaaaggctggcatgcttggatggctctgatatttaagtgctgccaagtggctaggaattaaagtgtttctaattattatgg

SEQ ID NO: 589906 - DNA, 120 bp, Artificial Sequence
  ENSG00000173064_131 (sequence is synthesized)
ccctggccctgcaggaagagagaggtgacctgcaagacaccagggccagaatccacgggcagcgtccttgggcagccccgccaggaagatgccaccccacctcaacctttcatgtagcag

SEQ ID NO: 589907 - DNA, 120 bp, Artificial Sequence
  ENSG00000173064_132 (sequence is synthesized)
gcagggctcctctggagcaacaggcccacccaagggaagttactttaattataaaagtaacatgctctgaaaaataaaattatttttaaggttttcaaattaattagaaatcatatatga

SEQ ID NO: 589908 - DNA, 120 bp, Artificial Sequence
  ENSG00000173064_133 (sequence is synthesized)
aggtctgtttactatctggcctccacatccctacatcccagaagtgacattgttaacagatgagtctctctccttccagacttttctcttgacatataaacagacacatgtgtgcacaca

SEQ ID NO: 589909 - DNA, 120 bp, Artificial Sequence
  ENSG00000173064_134 (sequence is synthesized)
gctggaaggtcccctcaggagctcagggaaggggcatagcagaaggagcttggctcccgggggcccacccagctgcatggggtcaggtggggcaggctttgctctgatcagccatgtgcc

SEQ ID NO: 589910 - DNA, 120 bp, Artificial Sequence
  ENSG00000173064_135 (sequence is synthesized)
tgccaaaaatggggattccagcatcaaaggaaagggagagaaggtcactggggaggctccccagagtctctgccacagcgtatagacagaagggggatatgcgcagaggaaacgagagag

SEQ ID NO: 589911 - DNA, 120 bp, Artificial Sequence
  ENSG00000173064_136 (sequence is synthesized)
gagttggggggcgaggacctccccaagaggcagagggaagcctctagaagatgagaaggggccaagcactgggggcccaggagggcaggttccaaaagtgggagccatgagtgctaaggc

SEQ ID NO: 589912 - DNA, 120 bp, Artificial Sequence
  ENSG00000173064_137 (sequence is synthesized)
acagaaggctctaaggtgttctgagggcagagaaggcacagggggccgagcgagggagcaggggtccagggacaggcacaggcctgctaggcccagggtctgtcctcaaggggaggggag

SEQ ID NO: 589913 - DNA, 120 bp, Artificial Sequence
  ENSG00000173064_138 (sequence is synthesized)
gacacactagcctttctctgtttggaactggggctgccaggccccatgtgaagggagaacaatgaacaggagccccacgtgccaaaactcagacatcattgaggattagggcccggcagg

SEQ ID NO: 589914 - DNA, 120 bp, Artificial Sequence
  ENSG00000173064_139 (sequence is synthesized)
aaccagccatacaggcctgctgttagatactttctcatatcttaaaagaagctgaaaatccagaatgcttcaaatcttctaacttttaaatgcagaaaaatggttaaaaaaaaaaaaaaa

SEQ ID NO: 589915 - DNA, 120 bp, Artificial Sequence
  ENSG00000173064_140 (sequence is synthesized)
ccttaaaaagtgattatacagatgagtttctcttcaaatcagggacgaagacacaaagcaaaaatgctctaatgccaattgacttgcctgagctttcctcagggactcagatcagggctg

SEQ ID NO: 589916 - DNA, 120 bp, Artificial Sequence
  ENSG00000173064_141 (sequence is synthesized)
gcagtagatggtaggctctccagtctcaaagctgtggccgccttcagaccacaccacctctaccattattttctgtccgacatgttcaaactgttcctgcattatatctacccaagttcc

SEQ ID NO: 589917 - DNA, 120 bp, Artificial Sequence
  ENSG00000173064_142 (sequence is synthesized)
cagggaaaagtccccattgtccttgatgaatggatgatctgtcattgccatgatggtcatacagacacaaatcaaagaaataggctgggcgtggggctcacacctgtaatcccagcactt

SEQ ID NO: 589918 - DNA, 73 bp, Artificial Sequence
  ENSG00000173064_143 (sequence is synthesized)
tagctagtcatggtgggcatatctgtagtcccagctatgtgggaggctaaggtgggaggatcgtttcagcctg

SEQ ID NO: 589919 - DNA, 82 bp, Artificial Sequence
  ENSG00000173064_144 (sequence is synthesized)
aaaaaattagctagtcatggtgggcatatctgtagtcccagctatgtgggaggctaaggtgggaggatcgtttctcagtgtt

SEQ ID NO: 589920 - DNA, 120 bp, Artificial Sequence
  ENSG00000173064_145 (sequence is synthesized)
tgtacctggaccccgcggatgctgctgaccccagagtggcctgtctcctgatgatagggttgcctgtgttgcctgtgagtcaggcatctcagccacctggccgagatctcagcctgactg

SEQ ID NO: 589921 - DNA, 120 bp, Artificial Sequence
  ENSG00000173064_146 (sequence is synthesized)
atagggaaactgggactctacaaagccaagtcacttcccaaggtcatgcagccagctggggttccagggtccaggcccctggccttccaggcgtcagcagtcaggacgctcctgcttctc

SEQ ID NO: 589922 - DNA, 120 bp, Artificial Sequence
  ENSG00000173064_147 (sequence is synthesized)
tgcagacccgagctccccgctgaggctgggttgggatcccacagaggaccttaggggtgtgagccatgtgccaggaaggcttatttcatggggacagaggcctctggcctccctccctgc

SEQ ID NO: 589923 - DNA, 120 bp, Artificial Sequence
  ENSG00000173064_148 (sequence is synthesized)
tggcagcagagattggaggtgacatgaccagccctgctggccctcccctcccacattggtgctcattgcctggccatgggcaagggctcctggagctgagtgaacaggcactgggagaac

SEQ ID NO: 589924 - DNA, 120 bp, Artificial Sequence
  ENSG00000173064_149 (sequence is synthesized)
tcctgcctgtccagggcatgcgtacgccacgcacagatgttgacagcatggtgctgttgcccagtgcccccctggagggagatggagtccacagtccttccgttcactcagtggccgtca

SEQ ID NO: 589925 - DNA, 120 bp, Artificial Sequence
  ENSG00000173064_150 (sequence is synthesized)
ctgaggcccagtcacgggccagccaggctctgggcactcgccctgtcctcagggagtgtccaggctcgtctccttcatgttggagggcggagggctttattccatcatcacaaggccagg

SEQ ID NO: 589926 - DNA, 120 bp, Artificial Sequence
  ENSG00000173064_151 (sequence is synthesized)
aggaaagtgaggctcaccaaagggaggtgacttgcctgggccctcacagctggcagggagcagagccaccaggagcccagggctgcctgctctgacttccgggctctccagcaccacgtg

SEQ ID NO: 589927 - DNA, 120 bp, Artificial Sequence
  ENSG00000173064_152 (sequence is synthesized)
ccctacagctgagagagccatcctggctgagtgtggagggcaacgtcccacccagcgcccctcaaggccacgagagtggacgtcgtgcctgaggcccggcagaagctgctctctcctggg

SEQ ID NO: 589928 - DNA, 120 bp, Artificial Sequence
  ENSG00000173064_153 (sequence is synthesized)
cctcaggtgaaggaggtgccagcggcttctgcctatgccggcagaatactccatggccgactgaggcactgcctggccaggtctctggtctctgccattgtccccctgggtcactcaggg

SEQ ID NO: 589929 - DNA, 120 bp, Artificial Sequence
  ENSG00000173064_154 (sequence is synthesized)
cagccattgcaagacaatagcagagccagagtcccggatgccagtggcttctcggtagaaacagggatgacaaggcattgtctaaagggtggaagaacacccacagtgggctgggggttt

SEQ ID NO: 589930 - DNA, 120 bp, Artificial Sequence
  ENSG00000173064_155 (sequence is synthesized)
gtcccccaaagagtttgtatttttttaactgaaaataattgtaaactaaacatttctatgatgttagctagtctttcttaacacattatttagtatttgtactcccacgaactctctaat

SEQ ID NO: 589931 - DNA, 120 bp, Artificial Sequence
  ENSG00000173064_156 (sequence is synthesized)
agttattttaatgtttaatagcctgtaactgcttgctactttaattgaatttttttaactgcctgtttttaactgtgatttgtttaggacattgagtaaaaggtcacttgtactgtttta

SEQ ID NO: 589932 - DNA, 120 bp, Artificial Sequence
  ENSG00000173064_157 (sequence is synthesized)
gaatgttgtgtttttgtctcattttattcaccgcctctacatgcgccttttactgttctgtttttctctttagctatcctcataccacccaaggcagtcttccacctggacagtttctgg

SEQ ID NO: 589933 - DNA, 120 bp, Artificial Sequence
  ENSG00000173064_158 (sequence is synthesized)
gctggccaccaggagctctcttgtgctggatgggatgggaaatatttcttgtgctggctgggatgggagccttttctcctagggactcagtgtgatccctctgaaatactgcgtatttct

SEQ ID NO: 589934 - DNA, 120 bp, Artificial Sequence
  ENSG00000173064_159 (sequence is synthesized)
gtcagctctccagaccttggcctcccaaattgctacttgccatttactgctttgggcttattctggccacctcattatttctagcagaatttactgctttgggcttattctgtccacctc

SEQ ID NO: 589935 - DNA, 120 bp, Artificial Sequence
  ENSG00000173064_160 (sequence is synthesized)
atttcatttggaaatacatcattaaatacatcatttcatgttgtcattgtgaacgtatgttcatcacaaagcttaaaaataatatgatgatattttctgcctaggagctaaaagtcagta

SEQ ID NO: 589936 - DNA, 120 bp, Artificial Sequence
  ENSG00000173064_161 (sequence is synthesized)
agaggtaatgaatgctgcttccttgcaggaacccttttcttgttttctttgggtgaaagcgtagtactccttttatgaaaatgatttttagcaaggattatctagctgtgaaaagaaaaa

SEQ ID NO: 589937 - DNA, 120 bp, Artificial Sequence
  ENSG00000173064_162 (sequence is synthesized)
gaccaagtataaagtatgttgctgtgtagtgttttacttttcccaatgggaaaaaaaagtttaaacaattgaaatgggtatatttcttctgtggtctagtaaatgaaactttaattttat

SEQ ID NO: 589938 - DNA, 120 bp, Artificial Sequence
  ENSG00000173064_163 (sequence is synthesized)
gtttactccatgaatgttaaaattaactgagtctagagggcccaccaggcagtattccagactaggggctctcaaaatttggcccaccagtcagcagcattggcatcacttgggaacttg

SEQ ID NO: 589939 - DNA, 120 bp, Artificial Sequence
  ENSG00000173064_164 (sequence is synthesized)
ttggttcttggaccccattttgcacctattgaatcagaaggtctgaggatggggcgcagcttaacaagtttcccatttgactgatgcatgctaaagtgtgacaagtgctaggtttatctc

SEQ ID NO: 589940 - DNA, 120 bp, Artificial Sequence
  ENSG00000173064_165 (sequence is synthesized)
tagtattttgaccttctactagcagtcagcctctactttactttccagagtctagagacatgtgtttatttttgatgcctagagaaatggtgaggagttctctaatgtagaatgtacata

SEQ ID NO: 589941 - DNA, 120 bp, Artificial Sequence
  ENSG00000173064_166 (sequence is synthesized)
cagttacaaatgtctgtggtattcttgcttaaagtcaagtctgttttgcaggcctctgctctgcctcctgaggcaggttttcagagagaaaactttagagaatatatgaaatttaaaatg

SEQ ID NO: 589942 - DNA, 120 bp, Artificial Sequence
  ENSG00000173064_167 (sequence is synthesized)
tataatgggtttgtttttagctttttaattttctaccatccccttgacctcttggaaatgaggccgccatctgctgtagtagttgcactcaaggtacagcctggagtacgtcggggagta

SEQ ID NO: 589943 - DNA, 120 bp, Artificial Sequence
  ENSG00000173064_168 (sequence is synthesized)
atgaccatccaggtagatctgaggttgtcatgaaagaatagagggatgctcctggctgaggggacatttatagccagaggattcttttgagtagtattaataaactctggtcttgctacc

SEQ ID NO: 589944 - DNA, 120 bp, Artificial Sequence
  ENSG00000173064_169 (sequence is synthesized)
tttatttcttgcaaatggtacatctccactgccccaactgaacacaaacttctttctaggagcagaagcagcagttaagtgttgcctctgtgaagttggttcgaggtgttttgtgcttga

SEQ ID NO: 589945 - DNA, 120 bp, Artificial Sequence
  ENSG00000173064_170 (sequence is synthesized)
aagccaggaatagttgcaatgcagtgtctttccctgatcctcatggcttataaataaagtttgaggtccattgtttgaggcagttcttcagataccacaaagaatatgacacagtgattt

SEQ ID NO: 589946 - DNA, 120 bp, Artificial Sequence
  ENSG00000173064_171 (sequence is synthesized)
cttcctaatgataatgtagcttcttgttttctcggtcaatggaatccactttttcttgtataaaaagaaaaggttttcctctgatgctaaccctgaaagccacttccctgcagtcttaac

SEQ ID NO: 589947 - DNA, 120 bp, Artificial Sequence
  ENSG00000173064_172 (sequence is synthesized)
ggtatgttaagtgtcttcatacacacacatcaaaacagccgagctgtaaggacaacacctgtcacaactcacgtgcatcacagacctagaaatgtaaataaaaagcttttaatctacacc

SEQ ID NO: 589948 - DNA, 120 bp, Artificial Sequence
  ENSG00000173064_173 (sequence is synthesized)
ttttattgttttgatgctgctccaaaagagtcagcacccacttgggagttgcgggagttgttttcacagattcaacatgtgccctctacaggagagcgacttgcagttgtggaggtacag

SEQ ID NO: 589949 - DNA, 120 bp, Artificial Sequence
  ENSG00000173065_0 (sequence is synthesized)
agccggctgggggagggggtgtcggcgcaccgcggagtcctgcgctccgtgagcctggcacccggagcagccgcctccccctccccctgcctagaccgctagaagccccctctcttccat

SEQ ID NO: 589950 - DNA, 120 bp, Artificial Sequence
  ENSG00000173065_1 (sequence is synthesized)
cctcccggggcgggggtgagctgggctcagctgcccaaggcgggcggggcggagccaggagccccacggagcgctgcggagcgaacctcacctttccagggcgcaagtgtgagccactgc

SEQ ID NO: 589951 - DNA, 120 bp, Artificial Sequence
  ENSG00000173065_2 (sequence is synthesized)
cccatgttgtgttgatgccaatctgccatgctagcctgtctaccagggccaggtgacctgtcctttcagcttctttctcacacgcagatgaacactggacttcagaaatgggacactaca

SEQ ID NO: 589952 - DNA, 120 bp, Artificial Sequence
  ENSG00000173065_3 (sequence is synthesized)
cagaaaatgagaactgctcactatcctaccccagccgaattggatgcgtatgctaagaaggtcgcaaacaacccactgactataaaaatcttccccaacagtgtgaaggttccccagcgg

SEQ ID NO: 589953 - DNA, 120 bp, Artificial Sequence
  ENSG00000173065_4 (sequence is synthesized)
aaacacgttcgtcgtactgtgaacggcctcgacacatcagcccagcgctacagcccctacccgacacaggctgccaccaaggcaggcctgcttgccattgtcaaagtgccagccaaaagc

SEQ ID NO: 589954 - DNA, 120 bp, Artificial Sequence
  ENSG00000173065_5 (sequence is synthesized)
atactcaaggactttgacggcacccgagcccggttgctccctgaggccatcatgaaccccccagtggcaccctatgctactgtggcacccagcactttagcccacccccaggcccaggct

SEQ ID NO: 589955 - DNA, 120 bp, Artificial Sequence
  ENSG00000173065_6 (sequence is synthesized)
ctggcccgccagcaggccctgcagcatgcacagaccctggcccatgcccctccccagacgctgcagcaccctcagggtatcccgccaccccaggcactgtcccaccctcagagcctccag

SEQ ID NO: 589956 - DNA, 120 bp, Artificial Sequence
  ENSG00000173065_7 (sequence is synthesized)
cagcctcagggcctgggccaccctcagcccatggcccaaacccagggcttggtccaccctcaggccctggctcaccagggtctccagcacccccacaatcccttgctgcatggaggccgg

SEQ ID NO: 589957 - DNA, 120 bp, Artificial Sequence
  ENSG00000173065_8 (sequence is synthesized)
aagatgccagactcagatgcccccccgaatgtgaccgtgtctacctcaactatccccctttcaatggcggccactctgcagcacagccagcctccggacctgagtagcatcgtgcaccag

SEQ ID NO: 589958 - DNA, 120 bp, Artificial Sequence
  ENSG00000173065_9 (sequence is synthesized)
atcaaccagttttgccagacgagggcaggcatcagcactacctcagtgtgtgagggccagatcgccaaccccagccccattagtcgcagtctgctcatcaatgcaagcacccgggtgtcg

SEQ ID NO: 589959 - DNA, 120 bp, Artificial Sequence
  ENSG00000173065_10 (sequence is synthesized)
acccacagcgtccccacaccaatgccttcatgtgtggtcaatcccatggagcacacccacgcggccaccgccgcgttgcctgctgcaggtcctgtcaacctgcccacaggcatctctcgc

SEQ ID NO: 589960 - DNA, 120 bp, Artificial Sequence
  ENSG00000173065_11 (sequence is synthesized)
gcagcgaggctagtgggacgccagcccctggcctgacaggcaagcatgcggcaggacgcgagttggcagggcctggctttgtgggcaaggcccctgcctacccgcaggaactctgcctgg

SEQ ID NO: 589961 - DNA, 120 bp, Artificial Sequence
  ENSG00000173065_12 (sequence is synthesized)
cgcagtccttccatctgaagccacccctggaaaagccgaccccatccccaccagtcaacggcatggcagccccattggcctaccccaatggtcactacttccaacccctgtggaacaaca

SEQ ID NO: 589962 - DNA, 120 bp, Artificial Sequence
  ENSG00000173065_13 (sequence is synthesized)
ttctgcccactcccaatagcgacagctcggggtctcaggaccttgccatgccgttccacggtgggcagcccacaggtgcacccctcgactgtgcggcagctcccggggcccactaccgag

SEQ ID NO: 589963 - DNA, 120 bp, Artificial Sequence
  ENSG00000173065_14 (sequence is synthesized)
cagggaccgggggcggtccagtggcaagccagaacagcttgatgcaaacagtggattacctaagtggggatttccaacaggcctgcttccgagaacagagcctggccatgctgagcaagg

SEQ ID NO: 589964 - DNA, 120 bp, Artificial Sequence
  ENSG00000173065_15 (sequence is synthesized)
cccaccgagcccctggcaaccgagcccccgatcccacagagagtcgaagtcttcatattcagcacccagggtatagataggtagccctgctgccctccacgtgcaacacatcatacatca

SEQ ID NO: 589965 - DNA, 120 bp, Artificial Sequence
  ENSG00000173065_16 (sequence is synthesized)
ccctcctaggtttagtcttttaagtaactggatagtttcaaagtttcactgctccagtgtgatcattcttagatgtctaagaaagggaatttggtgggatctaagtggggacagaagggg

SEQ ID NO: 589966 - DNA, 120 bp, Artificial Sequence
  ENSG00000173065_17 (sequence is synthesized)
tcctctcgtcctcccctccagcaacttttggttttatgttagaacctaaccctaagcccaggcttttctctccactgactgcctgtcagctagtctctccaccttggccatttccagcca

SEQ ID NO: 589967 - DNA, 120 bp, Artificial Sequence
  ENSG00000173065_18 (sequence is synthesized)
gctcccacccatcttttcttgaatctcttcctgtttcccttaggacgactgaggtgtgggctgacggaatgccctagttgaggtagtataggtgctcaggcccctaatccagacctctac

SEQ ID NO: 589968 - DNA, 120 bp, Artificial Sequence
  ENSG00000173065_19 (sequence is synthesized)
ctgttgctaccccccttcccctccctccaggactaagaagcaagatttcccaggtgctctgaaagctaattacttactcatcgaaggatctcaaatcaaagctgacccagtcttcatatc

SEQ ID NO: 589969 - DNA, 120 bp, Artificial Sequence
  ENSG00000173065_20 (sequence is synthesized)
cttcaagttcctttccattcctcaaggctttgttttgtgtctatattgatcccacagccactgcacttgcccttgccacacttgatctcaagggcatcttggaagtatttgaccatttct

SEQ ID NO: 589970 - DNA, 120 bp, Artificial Sequence
  ENSG00000173065_21 (sequence is synthesized)
tgagatatggggggaaaaagtctttgtattggcatcttggttccagactcccctttccaaacctagaaaaatacagtgacctttgagcatacccaagatccctttctcactgttgcctgt

SEQ ID NO: 589971 - DNA, 120 bp, Artificial Sequence
  ENSG00000173065_22 (sequence is synthesized)
cccctaactcacctccccacagcccctatcctttccccctcaacaaaaacaaaatctaccttacttgaggaattaggtaggtaaggaatgatcacattggagtttgggattaaaaacacc

SEQ ID NO: 589972 - DNA, 120 bp, Artificial Sequence
  ENSG00000173065_23 (sequence is synthesized)
acacgctgcgcaggcgcaggagcggctccgggtagtccccacagctgcgccggtgactgaggggccgggcagtggagaagtggtggcggcgggcggcgggcggcaaaggagcagccatga

SEQ ID NO: 589973 - DNA, 120 bp, Artificial Sequence
  ENSG00000173065_24 (sequence is synthesized)
gtagtgtgggtttgagtagcattgtgtgtgagtggccccacaggtacattcaccctctagtgcagcccctcagtttaatgaaggaaaaaaaaacaaacacaaagccttaagctctttgag

SEQ ID NO: 589974 - DNA, 120 bp, Artificial Sequence
  ENSG00000173065_25 (sequence is synthesized)
tacttcctttaccaaatgagcatggttctaacacctggagctgggcctacattggaaacaagcccctcctgccctctgtccattcttagagcataccttcatccactccatgctcagcac

SEQ ID NO: 589975 - DNA, 120 bp, Artificial Sequence
  ENSG00000173065_26 (sequence is synthesized)
gtctcatcccaagcgacaattagttggctagaaacacttttctgtaattttaaacttagactgttttgttacaaatttttgcaccattctgttaaagatgcagaattgggcttttttatt

SEQ ID NO: 589976 - DNA, 120 bp, Artificial Sequence
  ENSG00000173065_27 (sequence is synthesized)
ttttacagatgaaataagcccttacctttcctcttgtctctggggaatgtcagctgatggttcttatttaaggttttgcattttgttcactatccactactgttcgttagccagaaattc

SEQ ID NO: 589977 - DNA, 120 bp, Artificial Sequence
  ENSG00000173065_28 (sequence is synthesized)
tctagtgatctgaagcaatgtgactgaagaccagttttaagttatgtgttggcaagttgccttatatttaaaaggaaaaagaaaaaaaaaaaagcctgattgtgttatgccaaatgatag

SEQ ID NO: 589978 - DNA, 120 bp, Artificial Sequence
  ENSG00000173065_29 (sequence is synthesized)
caacatgaagtcctaatttattgttcccaattgttttcctgccgtctgtgaacactggtacctccctgtcctgatcccccaggagcacctgtagcttctgactcaatgccttctccgaag

SEQ ID NO: 589979 - DNA, 120 bp, Artificial Sequence
  ENSG00000173065_30 (sequence is synthesized)
gtgttggccgccatctcacccagggccctcttccagttcctgcttttctgagtcagatttaaagagcaccactgtcttccccctaccccttgcttgatctccaaagcagatattcttgct

SEQ ID NO: 589980 - DNA, 120 bp, Artificial Sequence
  ENSG00000173065_31 (sequence is synthesized)
gtatttttttttcctccccaatacctctccctgaaaggtgagctgctattttaggaaactggaccagacaccaacttgggggctttaagtcaaacaacctcaaacccatctcttcctgtg

SEQ ID NO: 589981 - DNA, 120 bp, Artificial Sequence
  ENSG00000173065_32 (sequence is synthesized)
taggggtgcaagcctctgaagctctcactcccacccttagtctgcatggaaaatgtactgtgatccccctgcccccaactgccctcgcctttggtgtgagatgttccttctttcggagtt

SEQ ID NO: 589982 - DNA, 120 bp, Artificial Sequence
  ENSG00000173065_33 (sequence is synthesized)
cagcctgagtccctctcccctctgccagccaacccccagccagcaataagggtccaagccagggcctcctctccacactccctgtctccatcctacactaccctagggaatacctggatt

SEQ ID NO: 589983 - DNA, 120 bp, Artificial Sequence
  ENSG00000173065_34 (sequence is synthesized)
ccccattctatccacatactgtagcattcattctccatctctctcacctcacctgtggtggtttatgggtgtgatggggtttttaagattattataaaccagtaaaaataagaaaacctc

SEQ ID NO: 589984 - DNA, 120 bp, Artificial Sequence
  ENSG00000173065_35 (sequence is synthesized)
acagctgcgccggtgactgaggggccgggcagtggagaagtggtggcggcgggcggcgggcggcaaaggagcagccatgagggccgggcccagtcaccgaccgaatatcacaggagtgat

SEQ ID NO: 589985 - DNA, 120 bp, Artificial Sequence
  ENSG00000173065_36 (sequence is synthesized)
catataatgtgctgcttctgaaaatgtctggctggtctccaaccaggcctataaatgggctggctgagccaggccctatgagggcccactctcctcaggaatactgagacattataaatg

SEQ ID NO: 589986 - DNA, 120 bp, Artificial Sequence
  ENSG00000173065_37 (sequence is synthesized)
cacctgtactttccagttgtatgaataggtgctttccagttttatttctcccatccatacatctgtggtaactgaaaaatcattttaaccatagtgatatttgacagcaaattgtcgtca

SEQ ID NO: 589987 - DNA, 120 bp, Artificial Sequence
  ENSG00000173065_38 (sequence is synthesized)
tcttccttgctgtttcctctagcctagagttgtgaggtcacaattgcaagtgactttacggtcccctattgagttaaagatggagaagaaaaaggcctttgagcaatggctaaacattat

SEQ ID NO: 589988 - DNA, 120 bp, Artificial Sequence
  ENSG00000173065_39 (sequence is synthesized)
cctgaatgaggtcaagcttcccccttgcctctgctaaaaaaaacctcagagttggtactaacttggaacaaagggactcttctactcatcaaggggacactacacagaaaatgagaactg

SEQ ID NO: 589989 - DNA, 120 bp, Artificial Sequence
  ENSG00000173065_40 (sequence is synthesized)
ctggccattactgcgagaagccgaggccaagcggggaccagagaaagcggaccccgcgacgcaggacacgcacctccgttggaagcctaagagtgaggaaaaagggatcacccgctccct

SEQ ID NO: 589990 - DNA, 120 bp, Artificial Sequence
  ENSG00000173065_41 (sequence is synthesized)
cgcgacatgagggcccacctgccagactcttaacaccgattgaacaagcctagccccgcgccagctgggggcagccattacagccgcaaggcactgcgggaaccgaccaggagcgctcct

SEQ ID NO: 589991 - DNA, 120 bp, Artificial Sequence
  ENSG00000173068_0 (sequence is synthesized)
acttgacaaccagcatgccgagatggcacaccttgggcccaccccacctccacatagccttaattacaaatcagaggacaggcttagtgagcaagactggccagcatatttcaaggtccc

SEQ ID NO: 589992 - DNA, 120 bp, Artificial Sequence
  ENSG00000173068_1 (sequence is synthesized)
atgttgtggggttgatacatctcaaattgagtcagaagaggcagaagtggatgtgagagaaagagagacacagagagacagagagccaaagagggcaagagacttgactttaagagactc

SEQ ID NO: 589993 - DNA, 120 bp, Artificial Sequence
  ENSG00000173068_2 (sequence is synthesized)
ctgtactgacaactccatgcagttcggaaccagaacgactacggctgaaccagggttcatggggacatggcaaaacgctgatactaacctcttattcagaatgtcccaacaggccatccg

SEQ ID NO: 589994 - DNA, 120 bp, Artificial Sequence
  ENSG00000173068_3 (sequence is synthesized)
ttgcacactggtaaactgcacatgtgaatgttttcagccagggaagattaacctgaggacttgtgatcagtgtaaacatggctgggtggcacatgccttggataagctcagcacgcagca

SEQ ID NO: 589995 - DNA, 120 bp, Artificial Sequence
  ENSG00000173068_4 (sequence is synthesized)
cctgtaccaccccacccaagtggagattgtgcagtccaacgtcgtgtttgacatcagcagcctgatgctctatgggacacaagcagtgcctgtgcggctaaagatcctgctggaccgtct

SEQ ID NO: 589996 - DNA, 120 bp, Artificial Sequence
  ENSG00000173068_5 (sequence is synthesized)
cttcagcgtcctgaagcaagaggaggtactgcacatactgcacggccttggctggactctgcgggactatgtccgaggatacatccttcaggatgctgctggcaaggtgctggaccgctg

SEQ ID NO: 589997 - DNA, 120 bp, Artificial Sequence
  ENSG00000173068_6 (sequence is synthesized)
ggccatcatgtctcgagaagaggaaatcatcacccttcagcagtttctgcggtttggagaaaccaaatccattgtggagctgatggcaattcaggagaaagaagggcaggccgtggctgt

SEQ ID NO: 589998 - DNA, 120 bp, Artificial Sequence
  ENSG00000173068_7 (sequence is synthesized)
accatcttcaaagacagactcagatataaggactttcattgagagcaataatcgcaccaggagtcccagcctccttgctcacttagagaacagcaatccttccagcattcatcacttcga

SEQ ID NO: 589999 - DNA, 120 bp, Artificial Sequence
  ENSG00000173068_8 (sequence is synthesized)
aaacatcccaaacagccttgcatttctgcttccattccagtacataaaccctgtctcagcaccactgctagggttgcctccaaatgggctactgttagagcaaccagggttgaggctgcg

SEQ ID NO: 590000 - DNA, 120 bp, Artificial Sequence
  ENSG00000173068_9 (sequence is synthesized)
ggaacccagcctttcaactcagaatgaatataatgagagcagcgaatccgaagtttctcccacaccttataagaatgatcaaacacccaatagaaatgccctgaccagcattactaatgt

SEQ ID NO: 590001 - DNA, 120 bp, Artificial Sequence
  ENSG00000173068_10 (sequence is synthesized)
ggagcccaaaaccgagccagcctgtgtctctcccattcagaattctgccccagtcagtgatctaaccaaaactgaacacccaaaaagctcattccggattcatcggatgagaaggatggg

SEQ ID NO: 590002 - DNA, 120 bp, Artificial Sequence
  ENSG00000173068_11 (sequence is synthesized)
gtcagcctctaggaaaggaagagtgttctgtaatgcatgtgggaagacattctatgacaaaggtactctcaaaattcattacaatgctgttcacctgaagatcaaacatcgatgcaccat

SEQ ID NO: 590003 - DNA, 120 bp, Artificial Sequence
  ENSG00000173068_12 (sequence is synthesized)
tgaaggttgcaacatggtctttagctccctccgaagtcgtaatcgccacagtgcaaaccccaatcctcgccttcacatgcctatgctaaggaataaccgagataaagatttaattcgggc

SEQ ID NO: 590004 - DNA, 120 bp, Artificial Sequence
  ENSG00000173068_13 (sequence is synthesized)
cacctcaggagctgccacccctgtcatagcaagtacaaaatcaaatctggcactcacaagccctggccgacccccaatgggttttaccactccccctctagaccctgtcttgcaaaatcc

SEQ ID NO: 590005 - DNA, 120 bp, Artificial Sequence
  ENSG00000173068_14 (sequence is synthesized)
tctccctagccagctagtattttctgggctaaagactgtacaaccagttcctccattttatagaagtttactcactccaggggaaatggtgagtcctccaacctccctcccaaccagtcc

SEQ ID NO: 590006 - DNA, 120 bp, Artificial Sequence
  ENSG00000173068_15 (sequence is synthesized)
catcattccaaccagtggtaccatagagcagcaccccccgccaccctctgagccagtagtgccagcagtgatgatggccacccatgagcccagtgctgacctggcacccaagaaaaagcc

SEQ ID NO: 590007 - DNA, 120 bp, Artificial Sequence
  ENSG00000173068_16 (sequence is synthesized)
caggaagtcaagcatgcctgtgaagattgagaaggaaattattgataccgccgatgagtttgatgatgaagatgatgaccccaatgatggtggagctgtggtcaatgacatgagccatga

SEQ ID NO: 590008 - DNA, 120 bp, Artificial Sequence
  ENSG00000173068_17 (sequence is synthesized)
caatcattgtcactcccaagaggagatgagcccaggcatgtctgtgaaggacttttctaagcataacaggacccggtgcatttcaaggactgaaataaggagggccgacagcatgacttc

SEQ ID NO: 590009 - DNA, 120 bp, Artificial Sequence
  ENSG00000173068_18 (sequence is synthesized)
tgaagaccaagaacctgagcgggactatgagaacgagtctgagtcttcggagcccaaactgggcgaggaatccatggaaggggatgagcacattcacagcgaagtgagtgaaaaagtcct

SEQ ID NO: 590010 - DNA, 120 bp, Artificial Sequence
  ENSG00000173068_19 (sequence is synthesized)
gatgaatagtgagaggcctgatgagaaccacagtgagccctctcaccaggacgtcatcaaggtgaaggaagaatttacagaccccacttacgacatgttttacatgagccagtatggact

SEQ ID NO: 590011 - DNA, 120 bp, Artificial Sequence
  ENSG00000173068_20 (sequence is synthesized)
gtacaatggtgggggtgccagcatggccgccttgcatgagagctttacatcgtctctgaattatggcagccctcaaaagttctccccagaaggtgacctatgttctagcccagaccccaa

SEQ ID NO: 590012 - DNA, 120 bp, Artificial Sequence
  ENSG00000173068_21 (sequence is synthesized)
aatctgttatgtgtgcaagaagagtttcaaaagctcctacagtgtgaaacttcactacaggaacgttcacttgaaagagatgcacgtctgcacagtggctggttgcaatgctgcattccc

SEQ ID NO: 590013 - DNA, 120 bp, Artificial Sequence
  ENSG00000173068_22 (sequence is synthesized)
ctctcgccgaagccgagacagacacagtgccaacataaacctacatcgtaaactgttgaccaaagaactcgatgacatgggcctggactcgtcgcagccctcccttagcaaggacctccg

SEQ ID NO: 590014 - DNA, 120 bp, Artificial Sequence
  ENSG00000173068_23 (sequence is synthesized)
cgatgaatttttggtgaagatatatggtgcccagcaccccatggggctcgatgtcagggaagacgcctcctctcccgcagggactgaagactcccacctgaacgggtatgggagaggcat

SEQ ID NO: 590015 - DNA, 120 bp, Artificial Sequence
  ENSG00000173068_24 (sequence is synthesized)
ggcagaggactacatggtccttgacttgagcaccacctccagcctccagtccagcagcagtatccattcctccagagaatccgacgcaggcagcgatgaggggattcttctcgatgacat

SEQ ID NO: 590016 - DNA, 120 bp, Artificial Sequence
  ENSG00000173068_25 (sequence is synthesized)
tgacggggcgagtgacagtggggagtcggcacacaaggccgaggcccctgccctccctggcagcctaggggctgaagtttcaggatctcttatgttcagcagcttgtctgggagcaatgg

SEQ ID NO: 590017 - DNA, 120 bp, Artificial Sequence
  ENSG00000173068_26 (sequence is synthesized)
tgggatcatgtgcaacatttgccacaaaatgtacagcaacaaggggaccctgagagtgcactacaaaactgtgcatttgagagaaatgcacaagtgcaaagtcccaggttgcaatatgat

SEQ ID NO: 590018 - DNA, 120 bp, Artificial Sequence
  ENSG00000173068_27 (sequence is synthesized)
gttttcctctgtacgaagccgaaatcggcacagtcagaaccctaatctccacaaaaacattcccttcacttcagtagattagtctcagaatggacactacaaatgccagctctcaccaga

SEQ ID NO: 590019 - DNA, 85 bp, Artificial Sequence
  ENSG00000173068_28 (sequence is synthesized)
agtctcagaatggacactacaaatgccagctctcaccagatggcctacgtgtttgaactgccatagtcagtgtgcgcttatgtac

SEQ ID NO: 590020 - DNA, 120 bp, Artificial Sequence
  ENSG00000173068_29 (sequence is synthesized)
cttgagataaacaagataaacactaggtgcttttgaatttttttcacttccctttatagttttgggaaaggagtgggatctttgatttcagggtgaaaacagagtacccctttaaacaca

SEQ ID NO: 590021 - DNA, 120 bp, Artificial Sequence
  ENSG00000173068_30 (sequence is synthesized)
cacacacacacacacacacacagtgtgcaactagccccagttttgacagaataattcttggtcttccccaaagagacaatttgttgtacccatgactgttgcctgcaaaaataaaaggga

SEQ ID NO: 590022 - DNA, 120 bp, Artificial Sequence
  ENSG00000173068_31 (sequence is synthesized)
tgttgcctgcaaaaataaaagggaaaaaaaagaaaaaagaaacaaaaaggaacttcttatagttgtcttttgtgaactttaaggttttgaaagaatcttcaattaaagcatggcagattc

SEQ ID NO: 590023 - DNA, 120 bp, Artificial Sequence
  ENSG00000173068_32 (sequence is synthesized)
acctgtaaatatttagccttgaggggccattgatgtaaaacaattgtattgatggttgtttaacttttttgtttaatttttacagttacatccagctgttagatatgcaggaaaagatag

SEQ ID NO: 590024 - DNA, 120 bp, Artificial Sequence
  ENSG00000173068_33 (sequence is synthesized)
tttgctggctagctctattcatttatgttagcattaatgcacatttttaaaaaaagaaaaaaacatggtcttgtttttactacctgttagatatagtgctaaagaggtgctggcatgctt

SEQ ID NO: 590025 - DNA, 120 bp, Artificial Sequence
  ENSG00000173068_34 (sequence is synthesized)
tacagcacagatctgattttttaaaatgtcctgtactagtacataaatcccgtcatgcactttttttcatacactacaaggggatgtgtaataaccatgcttcttttttatccttaaact

SEQ ID NO: 590026 - DNA, 120 bp, Artificial Sequence
  ENSG00000173068_35 (sequence is synthesized)
attgccatacttcagtaagtgtcttttttaaaaaaaattcacttgtataaaaatggtctggtcagtatagggcacaaatgccaaacaaagtattagtgttaacacaaaactgccaacttt

SEQ ID NO: 590027 - DNA, 120 bp, Artificial Sequence
  ENSG00000173068_36 (sequence is synthesized)
gcacaagtttccagaaaagaaaatacaattagtcactcaacataaccacaggccaatttgttggccaccagaaaaccgctttttaaaaaaacacttggtgattctttcaagtgccgaatg

SEQ ID NO: 590028 - DNA, 120 bp, Artificial Sequence
  ENSG00000173068_37 (sequence is synthesized)
ttattagaatcaacattgcatccttcttgcttatacgttaagttacataaaaggaaaacaaaattatgtggtgtgaaacagccaaggcatttattcttcagaggcaggataatatttcag

SEQ ID NO: 590029 - DNA, 120 bp, Artificial Sequence
  ENSG00000173068_38 (sequence is synthesized)
gatacaaaagcccaaattacccgctacggaacaaagatgaatacagtaaaagagtcgaacactcatttccaaggccctaacccttatcctttaaaaagaaatcctctgaactgggtcggt

SEQ ID NO: 590030 - DNA, 120 bp, Artificial Sequence
  ENSG00000173068_39 (sequence is synthesized)
ctgttgtatggctgtctaatttgttgcaaattctgcagtcgtactataattcaggcctgtttggtagacaaaatcaaaaggcatttaacagcagcagtacttggaagctttgaaaacatg

SEQ ID NO: 590031 - DNA, 120 bp, Artificial Sequence
  ENSG00000173068_40 (sequence is synthesized)
tgctaaacttgaatggagcaacactcctttctgaaaagccagaagaagggggttttaaagcaggatctctcaatgttcagtgttttgtgtttccccacacgatttgtcagagagaaatga

SEQ ID NO: 590032 - DNA, 120 bp, Artificial Sequence
  ENSG00000173068_41 (sequence is synthesized)
aagcaagcctgaaaccaagcaattgagagtgagaaagaggagagagactattctccaaaccttttttgttttgttttgtttccgatgtttacacatgttgcctgagctggttaaccacat

SEQ ID NO: 590033 - DNA, 120 bp, Artificial Sequence
  ENSG00000173068_42 (sequence is synthesized)
cggcagcctcagctaccacaacatactgactaaatgatgatatttactcaagttcagtctgcagccaaaaccattagggtgtgcattgcagactgttttgttgtcttttttttttctttt

SEQ ID NO: 590034 - DNA, 120 bp, Artificial Sequence
  ENSG00000173068_43 (sequence is synthesized)
ttcctttttttttaagtggaggggaaaagaagagataaacaaggaatattttgtcaaacagtacacaataatttaaagagaatgtatttcttttttgcatttaatggcctcagacatttc

SEQ ID NO: 590035 - DNA, 120 bp, Artificial Sequence
  ENSG00000173068_44 (sequence is synthesized)
tttcatcagtctaaaagttagaaatatccctttattttaacttttatgtcgtttccatttttcatgtttttgtaattattttttctatgttcacatcagcattcacttccgttaaatttg

SEQ ID NO: 590036 - DNA, 120 bp, Artificial Sequence
  ENSG00000173068_45 (sequence is synthesized)
ccaaaggaaactgttaatatgtttctgttgttattattcctgtaggatttattgtacctcacagtatttattgtttcccaaaataagcatcattagttggggattcagtatttttgttgt

SEQ ID NO: 590037 - DNA, 120 bp, Artificial Sequence
  ENSG00000173068_46 (sequence is synthesized)
gaaaatttcagaaacaatagattcttaaagataagctagctatgtctaggagctttatcttttcacctccttcagaggatgctatggggtccattttaattcttcatttgttctacgggg

SEQ ID NO: 590038 - DNA, 120 bp, Artificial Sequence
  ENSG00000173068_47 (sequence is synthesized)
aggaaagaccaaaagtatttgcagtacaaaagaaactatatcaaacactatgttaaatgacaagtgtttatggtaaaaagctgaggaattagtaataatcgtttttgttttcttgtactt

SEQ ID NO: 590039 - DNA, 120 bp, Artificial Sequence
  ENSG00000173068_48 (sequence is synthesized)
tgaattccccaaagtcttaattgctttattttggtgttgtgttaaattgaacagacagatgttttcctttgttttataccatataagactctgtacagtatgtttgtgaaagattgaact

SEQ ID NO: 590040 - DNA, 120 bp, Artificial Sequence
  ENSG00000173068_49 (sequence is synthesized)
agaataatgaaagtttgtttgcaaacattttggtcctctcagcgttctctgtgttgtgctgttgccccattaccaaatggttagattcaaaaagggtgggaaaagatttttaatatccca

SEQ ID NO: 590041 - DNA, 120 bp, Artificial Sequence
  ENSG00000173068_50 (sequence is synthesized)
acaaaacattatagaaactctggcttttgcagtgtgcatagactacatgtagttttatgaaaataaatacacatttttatttcagcaactttgaaaagttacactcagttgagttactag

SEQ ID NO: 590042 - DNA, 120 bp, Artificial Sequence
  ENSG00000173068_51 (sequence is synthesized)
aactcatcttgtacaacagcaatgtttagtctgtttaatttaatgtcaaataaaaggtcagatagccctcgtgagtgaattacatagctgtcggcagtcacatcagcaaatgcaccaggc

SEQ ID NO: 590043 - DNA, 120 bp, Artificial Sequence
  ENSG00000173068_52 (sequence is synthesized)
ttagaacaaatgtttgttacttgctgcaaaccaagctaatgtgtatagccagttagaaaaagtccagaagtaatgagattctagaagtagagtttcccttgcttggaaacatgaatgtgt

SEQ ID NO: 590044 - DNA, 120 bp, Artificial Sequence
  ENSG00000173068_53 (sequence is synthesized)
ctcaagtgcccagtcgttacggtggccttctaaatgagtaaataacattttccaatataaagcctatttgcttaaaagggacaggggagtggatggatgtagtacatgcaatggaaaatc

SEQ ID NO: 590045 - DNA, 120 bp, Artificial Sequence
  ENSG00000173068_54 (sequence is synthesized)
ataaaatgtacaattcttctgtttccaaagtattgctcgttcttgagtgtgtgcctgagtgtcttgttttgacttaactagaattctagttaagatggtgatcccatggcttatttgcaa

SEQ ID NO: 590046 - DNA, 120 bp, Artificial Sequence
  ENSG00000173068_55 (sequence is synthesized)
acaggaaggataaagagatcagcgttttagtcatggagctcatctttgcccattcctactcatttgctttttcataggagttttttgttgttaaacagtttctctcaagccacatgcatt

SEQ ID NO: 590047 - DNA, 120 bp, Artificial Sequence
  ENSG00000173068_56 (sequence is synthesized)
ctatgctggctgaaaattaatagtgatgtagatgttcatccgacaagcttttccccatgtgattggttttagccagagtttatcacaggtacaaaattaggcggtatgactgtgcatgtt

SEQ ID NO: 590048 - DNA, 120 bp, Artificial Sequence
  ENSG00000173068_57 (sequence is synthesized)
ctctagctgatgttgaaacttgtactgtcttgatcatttaaaactatgtttttgtaaatatcaggtttagtccgctttcgggaatatctgcatgctatggaaagagagaaaaaaaggata

SEQ ID NO: 590049 - DNA, 120 bp, Artificial Sequence
  ENSG00000173068_58 (sequence is synthesized)
gataatgaggaatttggtttaaaagtgtgataaaaatccttggcattctttgttctgatattaattgtatttaaataagtcaacccaatgtaactcattccagatcttagtccagctgcc

SEQ ID NO: 590050 - DNA, 120 bp, Artificial Sequence
  ENSG00000173068_59 (sequence is synthesized)
ctgttcagcctgatgccttttaaaggtttaaaggtgttaatgttttccttttcaacatggcaaacattttttaaaacctttttggcacaatggtgccactgtcctcatagtgttatttct

SEQ ID NO: 590051 - DNA, 120 bp, Artificial Sequence
  ENSG00000173068_60 (sequence is synthesized)
ttggtcatgaattttcaggcccttccagtaagaggagaaaggcacttaactggttaacagccccattattatacattgctctaaggaaaaaaaaaaaaaaaaaactttgaatatatcaag

SEQ ID NO: 590052 - DNA, 120 bp, Artificial Sequence
  ENSG00000173068_61 (sequence is synthesized)
aatgggctattccagaggcttctcctcaggagaaactatgcactaggttcccaccaaatacaatgtgacctttttttcccctttctctgtacacaccccagatatgtgccaagcaaatga

SEQ ID NO: 590053 - DNA, 120 bp, Artificial Sequence
  ENSG00000173068_62 (sequence is synthesized)
gaatgagggccgttgacaattaaagcataaagaagctagtcaccagattgagatggacatgctgctaactgctgacagcttgacctgagcagtcctaacttgtatctggtctgttagcat

SEQ ID NO: 590054 - DNA, 120 bp, Artificial Sequence
  ENSG00000173068_63 (sequence is synthesized)
tgggttagattgactaacagagtaaataaaattcacctgtcataagacacgctacatctgctatcatcaagaaacaaatcatccagaagaaactttttttcatcctgtggtcacaccctt

SEQ ID NO: 590055 - DNA, 120 bp, Artificial Sequence
  ENSG00000173068_64 (sequence is synthesized)
ttcttaagagcttcttttttaaaattatgacaaacgaatttcattctttaaaatcacttatcttctcccaaacttgaagtatttaaattaggtggttttgcttttccctctcattgttta

SEQ ID NO: 590056 - DNA, 120 bp, Artificial Sequence
  ENSG00000173068_65 (sequence is synthesized)
ttttttggggatggatctaaatgagtaagatgagcaataaaagataccagaaagactggagggatcacagtgttttcatcagaactaagtagagggtcggttcctgccctggttttgggg

SEQ ID NO: 590057 - DNA, 120 bp, Artificial Sequence
  ENSG00000173068_66 (sequence is synthesized)
tagctagaaaaggaaatcatgaatgcactggaaatgttggctcgagagaaaagactggcatagctctgcctcgcagtgggtgagagcgtattgatcgtagggacctgcagagttcctatg

SEQ ID NO: 590058 - DNA, 120 bp, Artificial Sequence
  ENSG00000173068_67 (sequence is synthesized)
accaggtgagtcggctctgaggaaggggttaggaaagcaagtacagctgcatgaaatagctgaagttcctttggggtcaggaagagccgacaattgtggggttttggttgcttttgcttt

SEQ ID NO: 590059 - DNA, 120 bp, Artificial Sequence
  ENSG00000173068_68 (sequence is synthesized)
gtttttgagtgggaagtgttgctggaatcccctgagaaccgaaagatgccaggggtcagcaaggctatagaaaaggccagtggtaacacctcgttttcatcctaacagaggagtaggtgc

SEQ ID NO: 590060 - DNA, 120 bp, Artificial Sequence
  ENSG00000173068_69 (sequence is synthesized)
gaatggcaccagcatggatcgttcctttcttgatcattactcatgcttgccactgtagcaacacaacaaagccatgattgtaattaatactaggctaaagaccttgatcaaaatgggagc

SEQ ID NO: 590061 - DNA, 120 bp, Artificial Sequence
  ENSG00000173068_70 (sequence is synthesized)
tcatttactgttctatgaggtatgtaagtaacttctcttcacattttccctcagagataaaccacacgtggtagtcttgtttgcgttagtactaaggtcatgtttgatctgtcccagacg

SEQ ID NO: 590062 - DNA, 120 bp, Artificial Sequence
  ENSG00000173068_71 (sequence is synthesized)
agtcgcatatttcctgtagctggagtgttgctcaccataaatggtcattttcaaaaagtattgtgtaattccagctgtacaactgaccagtgagttatctgtcatcactgttgcccacat

SEQ ID NO: 590063 - DNA, 120 bp, Artificial Sequence
  ENSG00000173068_72 (sequence is synthesized)
acccgtccttccttgtgtagtttcatcatcctcatccttcccacatcttgcgcaaaatgattttctgtgctcattcggcaataactatgttattcggcatactgtctttttggcatttgt

SEQ ID NO: 590064 - DNA, 120 bp, Artificial Sequence
  ENSG00000173068_73 (sequence is synthesized)
tgaaaaatccaaatgcttttaatccaaaagattaatccaaatcttttttaatccaaatgattttaatccaaatccaaataacaggaggttaaaaaaaaaaaaaaaactaagcatttttac

SEQ ID NO: 590065 - DNA, 120 bp, Artificial Sequence
  ENSG00000173068_74 (sequence is synthesized)
atgtacactgaattggatcagcattattgttcattataatgctatatatatttttggagcaacatactatagttgtcataaaactatctttattcttctcctctaaagtgctgttgtaaa

SEQ ID NO: 590066 - DNA, 120 bp, Artificial Sequence
  ENSG00000173068_75 (sequence is synthesized)
ttcatttgacctttactgcaggaaaaaaaaaaatcttttttatataggatatgaagaccaaggctcagtctgtaacaaatagtggaccattacaaaagaggaaagaaaaaagccagggct

SEQ ID NO: 590067 - DNA, 120 bp, Artificial Sequence
  ENSG00000173068_76 (sequence is synthesized)
gagcagcaagaagcttcagttcaatttcacctcgtatctttctaataacatacttgtcactttattaccttccagtaatgtgaacgctgctgacaagactgtcacactaacagcagacaa

SEQ ID NO: 590068 - DNA, 120 bp, Artificial Sequence
  ENSG00000173068_77 (sequence is synthesized)
caccctctctgcttcagcccagctctcctggctacttattgccctggccctgaagggacacaaactaatagtgtgctttccagttcagcacttggccatcaaatataaaaggatgcgtaa

SEQ ID NO: 590069 - DNA, 120 bp, Artificial Sequence
  ENSG00000173068_78 (sequence is synthesized)
ttgcctgtttatccccttgtgaaggagaaattgactacaagggctaggctttcccatcgagttccctgatgtacacacacatccacaatcagtcagtctctctctctctctctctctctc

SEQ ID NO: 590070 - DNA, 120 bp, Artificial Sequence
  ENSG00000173068_79 (sequence is synthesized)
tctctctctctctctctctctcccctctctctctccttccctcttattctcccctcctaacatacaagcacatacacacacctactgtatctgtgggaagcccaaggctgcctctcgatg

SEQ ID NO: 590071 - DNA, 120 bp, Artificial Sequence
  ENSG00000173068_80 (sequence is synthesized)
ccctctccagctattaagtggacagtaacaagatgacttcttaaataaagggtcagtagagagatgctgtctgtgacggcatcctttgcttctttgaaaacttaagtgttaacaattcca

SEQ ID NO: 590072 - DNA, 120 bp, Artificial Sequence
  ENSG00000173068_81 (sequence is synthesized)
tcttgagagtaatgggtgtggccctataattagagcaaattttcctgcaagtcagtggcataagtaagattatattgccccctaatctgtagggaaaagattaaaatatttttcttcccc

SEQ ID NO: 590073 - DNA, 120 bp, Artificial Sequence
  ENSG00000173068_82 (sequence is synthesized)
ttcaaaaagtgcacatgttgtaaactggttacgcacagtggtcatttttttttcttatccttggcatcaaaccatggacgtaggtgtacaaatgcatctttcaatgacccctccaaatcc

SEQ ID NO: 590074 - DNA, 120 bp, Artificial Sequence
  ENSG00000173068_83 (sequence is synthesized)
atagtgtaacatgatagattaacttttgtcaaactggactgacaatctaaaaaagatggcgtcaggcttttgactttaatcgttaaaacaaggaccaccctatgagtaaaaggtaaattc

SEQ ID NO: 590075 - DNA, 120 bp, Artificial Sequence
  ENSG00000173068_84 (sequence is synthesized)
tccactttgaagaactttggtaagtacaagtacagggagctttagaaaatcgagtgatggggaccaaaggtacaaaggaagaatacatgaaaatgttatattccaaaatgccctgagccc

SEQ ID NO: 590076 - DNA, 120 bp, Artificial Sequence
  ENSG00000173068_85 (sequence is synthesized)
aaagattggctgctatttttgtatattgaaatactcaaatgatggttggaaagtgactagttagtgactaaatgaagtgcaagatctatcaagcgtcttctttctgggactaggggatgc

SEQ ID NO: 590077 - DNA, 120 bp, Artificial Sequence
  ENSG00000173068_86 (sequence is synthesized)
catgcttccttccaaccttcccgcagcgcatctcagagaagatagttggccccattacaaacagtcacatttcagtaagatattagtcagccaggtaagacacgtgcaggtatcggtatc

SEQ ID NO: 590078 - DNA, 120 bp, Artificial Sequence
  ENSG00000173068_87 (sequence is synthesized)
atcttccatatgaactttagcaaggagagaacagcagcagatttagggatagacaatgtaacaggtctatgttgacaaatctgtgctaaataatttcatgaaccagtgtggggactggga

SEQ ID NO: 590079 - DNA, 120 bp, Artificial Sequence
  ENSG00000173068_88 (sequence is synthesized)
agaaaagcactttgagcaaggactcttgggttcgagcaaaggcaattagttgacatgatacttcttaagttcctcagtatgtatatgttacaatcgtttatcagacatcttaatagaatc

SEQ ID NO: 590080 - DNA, 120 bp, Artificial Sequence
  ENSG00000173068_89 (sequence is synthesized)
ctaattgaaaaaccagttgccaaaattgcacaagttctgctcgctgatactagctttctccccttaactctaaaataccagggatgcttaaggacgtttgtaatagtttttttaatgctt

SEQ ID NO: 590081 - DNA, 120 bp, Artificial Sequence
  ENSG00000173068_90 (sequence is synthesized)
tgtttcacttttttaaaaaagaatctttgaagggaaggaagagcagaaagaagtattttaagaaaaatggagagaagtagatagtattgaaagtatatttcttgaagagagagtatctaa

SEQ ID NO: 590082 - DNA, 120 bp, Artificial Sequence
  ENSG00000173068_91 (sequence is synthesized)
gtgctataccaagattttatagggcttcctgttgccaaatgtgatgttgagataatgcacagctaagatggcaaatccatcaattattaactggctctgcccacttctgtcatggaatgc

SEQ ID NO: 590083 - DNA, 120 bp, Artificial Sequence
  ENSG00000173068_92 (sequence is synthesized)
aaggattgagaggtgactctggggagaccctgggtgtgtgagagagctccattcatctggccctggatatgtttttcaaaagagagggagaaagcgccagtccctgcaaggtgaactgac

SEQ ID NO: 590084 - DNA, 120 bp, Artificial Sequence
  ENSG00000173068_93 (sequence is synthesized)
ctggcactgtttcagtgggagcctcactgcctgccttttccatgctaggagacaaagcatcctctaccccatctgtgaatcggtgctgtggccactgcgagaagcatgattcatgaggta

SEQ ID NO: 590085 - DNA, 120 bp, Artificial Sequence
  ENSG00000173068_94 (sequence is synthesized)
tgatgctcttgagctcccagacaatgtgctgagttaataggttcacttgagatgtatacaccaaggctgtttctttttttaaatctagtccccaatttggagtatttttgcatgtttttg

SEQ ID NO: 590086 - DNA, 120 bp, Artificial Sequence
  ENSG00000173068_95 (sequence is synthesized)
tacagagtaatccattcctctcattgtgtatcttaatctcctctgacttttccattgtctttctcaatcccaccctttgctcttcggatctcaccaaccccccttaaaaaataaatcatg

SEQ ID NO: 590087 - DNA, 120 bp, Artificial Sequence
  ENSG00000173068_96 (sequence is synthesized)
tttgagcaagaaggtagaacacgccctccctcatcttggttttaattgctttggaaacgtgttctaccctgtccagggtttgcataacgtgaattaagtgaatgagatgttctagtatta

SEQ ID NO: 590088 - DNA, 120 bp, Artificial Sequence
  ENSG00000173068_97 (sequence is synthesized)
tatcttaacctgataagactatctaagatttctagtatatggtgcatttgctttcctgtgcaaactttggttcagctgccctgcagagaatctcaccattttcctgccagtgccagtata

SEQ ID NO: 590089 - DNA, 120 bp, Artificial Sequence
  ENSG00000173068_98 (sequence is synthesized)
aagaatgcaggagagctaaacctgggtacatgaaggtcagaggggtgaggacggtcgagaaatggggagaagacttgggcttgagacgacctgggcttttcatgtgtagctcactcagca

SEQ ID NO: 590090 - DNA, 120 bp, Artificial Sequence
  ENSG00000173068_99 (sequence is synthesized)
gtatgaggatgactgacacaccagtgggtggtttccaagtgaggcaaatgcccatttcccctctcccctcacaccttgcctggcttcttccatgaagtccttgctgcttttctgcctccc

SEQ ID NO: 590091 - DNA, 120 bp, Artificial Sequence
  ENSG00000173068_100 (sequence is synthesized)
caaaggtgaggggaaggggctggttggggatctgggaaagccagttctctgttctctcctgctggtgatggactaggccttttagaactagcaagatccctcacacagctgggagaacac

SEQ ID NO: 590092 - DNA, 120 bp, Artificial Sequence
  ENSG00000173068_101 (sequence is synthesized)
acacctttcttactccagacccattggtgtgtctccagtaacaaaattattggactcagcctccatatttgacagcaaaagtggccagagggagttgaaatatcttgaagaaaaggaatt

SEQ ID NO: 590093 - DNA, 120 bp, Artificial Sequence
  ENSG00000173068_102 (sequence is synthesized)
ttcactaagatatgtcctctccctctcccagagtttagctgtttattccttttttttgtttatattgttctcatctgcataaaaccagtctcttgcaataagcctgccgcagaatcaaag

SEQ ID NO: 590094 - DNA, 120 bp, Artificial Sequence
  ENSG00000173068_103 (sequence is synthesized)
tctgtacttcaaaaggtaactgcaccaagggatgggacagtgtgcatcaccctgatctaatcattgtgacgttggtagcttcctaaatactgtatgtaccttgaacaagggttttatttt

SEQ ID NO: 590095 - DNA, 120 bp, Artificial Sequence
  ENSG00000173068_104 (sequence is synthesized)
tgttttgttctgttttgctttttgtttttattggtaggctaaggtaattaaattttttaatttgctgttactttggttgtattttctgtactataactgcctacagtatgtcttttgcat

SEQ ID NO: 590096 - DNA, 120 bp, Artificial Sequence
  ENSG00000173068_105 (sequence is synthesized)
aaaatgcataagggtttggggatgtaaatggaattttattcatattttgtccaaatacctcttgtaatttgtatcaaaattcttgtacaatttttatattaaagatttatcagtcactga

SEQ ID NO: 590097 - DNA, 120 bp, Artificial Sequence
  ENSG00000173068_106 (sequence is synthesized)
agacggagggagccagcggcggccgaggggctggtccaggcgcggccgctaagaggagaccaagaggcgggggctgcacttgacaaccagcatgccgagatgtcagaagaggcagaagtg

SEQ ID NO: 590098 - DNA, 120 bp, Artificial Sequence
  ENSG00000173068_107 (sequence is synthesized)
tagagggagctattctttttgttgttgttcctgggaatatttcttatattaagggagtccaaaatagatgatgacttgaagttagtggtttcctttacttttaattttacagttaagggt

SEQ ID NO: 590099 - DNA, 120 bp, Artificial Sequence
  ENSG00000173068_108 (sequence is synthesized)
tcagcacggttttaaatattccttaagtatttgaaagatggccttagtgaatatgaggagttcaatttagtactgttcacattcacttgtttgagatgatttgccagttgacaatgtggc

SEQ ID NO: 590100 - DNA, 120 bp, Artificial Sequence
  ENSG00000173068_109 (sequence is synthesized)
agactctgtcaagcctaaagtgagcctcggatcttcctaatgacctcctgctggcccagctggatgcaagacaagctcgtttaagcctctgctgacctttcactcctccactacaagaac

SEQ ID NO: 590101 - DNA, 120 bp, Artificial Sequence
  ENSG00000173068_110 (sequence is synthesized)
tgcaccactcatttccaccgtcttcagaactgtgcaccaaatagaccacaaagcttcatggctgacgaatgatttccttttcatgatgcaaagagatttttacaaatttctattgatgag

SEQ ID NO: 590102 - DNA, 120 bp, Artificial Sequence
  ENSG00000173068_111 (sequence is synthesized)
agttaacattaagtctcttgtggcattataacctctgttgcacaaatacaatgcttctatataactcttatttttaccttccttataaaggaacaatctactgttcttgccagcattatc

SEQ ID NO: 590103 - DNA, 120 bp, Artificial Sequence
  ENSG00000173068_112 (sequence is synthesized)
ttgaaaattcaggccaaaatatctgagcagaatgcacatactgagtgcaccggtggtatttttcatgaagagaccactttgaaagggtcttcctgatttccacctccctcagaatctatc

SEQ ID NO: 590104 - DNA, 120 bp, Artificial Sequence
  ENSG00000173068_113 (sequence is synthesized)
tgaccttctcacagactttattggtgtgaatctttcttatatttaaccatttatttgagatgctcatttttgtagcccatcttttctttttaaaaaacatgggctggtttctacccagaa

SEQ ID NO: 590105 - DNA, 120 bp, Artificial Sequence
  ENSG00000173068_114 (sequence is synthesized)
ccactagcatgaagctgatttgctgtgatggtcacttagaagggtttcgctttttcctaaactgtggctgtttaaagtcttggagtctggacaattaacagctgaagaaaatatgacaag

SEQ ID NO: 590106 - DNA, 120 bp, Artificial Sequence
  ENSG00000173068_115 (sequence is synthesized)
acacacgcaaagaggttgggagatagagaggaggagtgcgccagaaaggagctgagctgccttcttgtgtaaactgcctgagagcgggccccctcccctggcctccgtccctgtcccccc

SEQ ID NO: 590107 - DNA, 120 bp, Artificial Sequence
  ENSG00000173068_116 (sequence is synthesized)
ttccccaaggctgtgttctgctgtctgcccgaaggccaggactgatctgttaaccttgcaccactggctgggaggccgctgcagctcatggccatccgttgcacactggtaaactgcaca

SEQ ID NO: 590108 - DNA, 120 bp, Artificial Sequence
  ENSG00000173068_117 (sequence is synthesized)
ctgtgcagtgtcctgggtgtggggcaatgaggaagtgacttgggttttctagtgtgtaattttcctctgaaatgcatggaacagcaacaaaactaccaagatacattgcccagaatggtt

SEQ ID NO: 590109 - DNA, 120 bp, Artificial Sequence
  ENSG00000173068_118 (sequence is synthesized)
tcatggtagcactgaatgcattctacctgtcattatgtcaataaaaaaatttttaatatctgctgctaaaaaataaccaaatgccaaaatcatgtattctctctaaaacagatttttaga

SEQ ID NO: 590110 - DNA, 120 bp, Artificial Sequence
  ENSG00000173068_119 (sequence is synthesized)
aaatgatagggatatctgtgcagaaggtgcgaaagaagctctgaccccctccctcccccaaatctcccccttcccaaatgaaatgcacagttcagccagcttcttaactacactacactc

SEQ ID NO: 590111 - DNA, 120 bp, Artificial Sequence
  ENSG00000173068_120 (sequence is synthesized)
gctccaagaccggcccagacctctcgtttcatcttgccatgtcacgagtcaatgctgtgtcgtcttttcaaaaatctgcctgatttagacaagaaagaaaagtactttcatgttgcagcc

SEQ ID NO: 590112 - DNA, 120 bp, Artificial Sequence
  ENSG00000173068_121 (sequence is synthesized)
gcagtcccctgctaacttgtcagcagcaggatatgattcacttgggcccagaagaatggaacagagaggcgggttaggcggttcaataaagcccacggacagtcagaagaggcagaagtg

SEQ ID NO: 590113 - DNA, 120 bp, Artificial Sequence
  ENSG00000173068_122 (sequence is synthesized)
agaaccataggtccaggacatcgagacagcctgcatctccgaagaggaaattctaaccggcctggaacctgctgtcttcatacgggagattctcttgaagagagcgtgatagtcagaatt

SEQ ID NO: 590114 - DNA, 120 bp, Artificial Sequence
  ENSG00000173077_0 (sequence is synthesized)
tttactgatgccctgcacagagagaggtctgtaaagtggcaagcaggagtctgctacaatggaggaaaggattttgctgtatctcttgccaggcccaaggctgcagagggaattggtaat

SEQ ID NO: 590115 - DNA, 120 bp, Artificial Sequence
  ENSG00000173077_1 (sequence is synthesized)
agtttcaggtgttttctatgtagcaggagatggcctttccctggcactggctgtgaccaattattattttagagagacagttaacaacggcctgaccattactgaccattacctgattgt

SEQ ID NO: 590116 - DNA, 120 bp, Artificial Sequence
  ENSG00000173077_2 (sequence is synthesized)
cacctgacattcctgatgtgtgtgacaggaggtggggggggagtgtgaagtcggagagagccctcttctaccctgcttatgcctgatgagctacctactataacagaaatcttagagtga

SEQ ID NO: 590117 - DNA, 120 bp, Artificial Sequence
  ENSG00000173077_3 (sequence is synthesized)
aatggagttacatgttgagaattgcagtgcattgagaagcatggtgtccaggttatctgccaatagtcaagcctctatgcaggcttttaactgtgtatgtttacataagcatgagagaca

SEQ ID NO: 590118 - DNA, 120 bp, Artificial Sequence
  ENSG00000173077_4 (sequence is synthesized)
gacagatatatttctattttgtttaaaacactcttatttttggtttacaaattgttgtagctgaacttaatacacgggaacattttcaaaagagggctgggcacagtggctcactcctgt

SEQ ID NO: 590119 - DNA, 120 bp, Artificial Sequence
  ENSG00000173077_5 (sequence is synthesized)
gaattcaaagtttttcacactcaacatttctgtgactagcaggaaatcttagagtgagaggacataattttctccttccaatatctccttctggctgactaagataaaatggataaatgg

SEQ ID NO: 590120 - DNA, 120 bp, Artificial Sequence
  ENSG00000173077_6 (sequence is synthesized)
ttcgactccttcctgcacccctgcagctggaagaggaggcttggagatggtagaaacataagatggaaggggtctagatggctggatgactgcttgaggagagttattcaagactgctac

SEQ ID NO: 590121 - DNA, 120 bp, Artificial Sequence
  ENSG00000173077_7 (sequence is synthesized)
ttagctgatgtcagactctgaatccttgtgcatacaactgacttgtgtgggtgaggcttgcagaaaaaatcagctagaacagccttgggggtagtggcaaggtggccagagcaattgact

SEQ ID NO: 590122 - DNA, 120 bp, Artificial Sequence
  ENSG00000173077_8 (sequence is synthesized)
gggagctgggaacaggaatgaagaggaagagctgataagaaacatgcccagagcagatttgatgctactgccaatgtacctgaataagaagacaactctttctggaaaaagggaaaactt

SEQ ID NO: 590123 - DNA, 87 bp, Artificial Sequence
  ENSG00000173077_9 (sequence is synthesized)
tgaataagaagacaactctttctggaaaaagggaaaacttgaagggctattgaaggccgctagaaaggaaggctgagagaggtggca

SEQ ID NO: 590124 - DNA, 120 bp, Artificial Sequence
  ENSG00000173077_10 (sequence is synthesized)
attggttcatgaggtttaaagaaagaagccatctttatatcacaaaagttcaaggtaaagcagaaaatattgatatagaagctgcaacaagttatccagaagatctagctaagataattg

SEQ ID NO: 590125 - DNA, 120 bp, Artificial Sequence
  ENSG00000173077_11 (sequence is synthesized)
caaaacagctttatattggaagaagatgccatctaggactttcatagctacagagaagttaatgcctggcttcaaagcctcaaagaatatgctgactcttgttatgggctaatgcagctg

SEQ ID NO: 590126 - DNA, 120 bp, Artificial Sequence
  ENSG00000173077_12 (sequence is synthesized)
ttgactttaagttaaagccaatgttcatataccattcctaaaaatcctaagatttatgctaaatgactctgcctgtgctctataaatggaagaacaaagcctggatgactgcacgtctgt

SEQ ID NO: 590127 - DNA, 120 bp, Artificial Sequence
  ENSG00000173077_13 (sequence is synthesized)
ttacataatgcttcactgaagattttaagcccactgttgagacccactgctcagaaacaaagatttctttcacagtattactgcttatagaccattcacctggtcacccaagagttctga

SEQ ID NO: 590128 - DNA, 120 bp, Artificial Sequence
  ENSG00000173077_14 (sequence is synthesized)
taatatacaagaagattaaccttacttttatgccctacgaacacaatattcattctgcagctcatggttcaagaagtaattttgactttcacatttcattactgaaaaaaatacattttg

SEQ ID NO: 590129 - DNA, 120 bp, Artificial Sequence
  ENSG00000173077_15 (sequence is synthesized)
taaggctgtaactgccatagaaagtgattcttctgatgaatctgagcaaagtaaataaaaaacctggaaagaattcaccattctagatgtcactaggagcatttgtgattcatgggagga

SEQ ID NO: 590130 - DNA, 120 bp, Artificial Sequence
  ENSG00000173077_16 (sequence is synthesized)
tatcaaaatgacaacattagcagaactttggaagaagttgattccaactctcacatataaataactttgttcaagacgtcagtggtggaagtaactgcagaggtggcttaaataggaaga

SEQ ID NO: 590131 - DNA, 120 bp, Artificial Sequence
  ENSG00000173077_17 (sequence is synthesized)
tggattctgaaggcatggctgaattgctgctgtctcatgataaaacttgaatgaaaaggagttgcttttatggatgagcaaagagtggttgcttgagagggaatctactctttgtgagga

SEQ ID NO: 590132 - DNA, 120 bp, Artificial Sequence
  ENSG00000173077_18 (sequence is synthesized)
tgctgtgaacattgctgaaatggcaacaaatgatttaaaatattgcataaatttagttcatcaaacagcatcaggtttgaaagaattgtctccaattttgaaggaagttatactgtgagc

SEQ ID NO: 590133 - DNA, 120 bp, Artificial Sequence
  ENSG00000173077_19 (sequence is synthesized)
aatatgctatcaaacagcatcacatgccaaagagaaatattttgtgaaaggaagagtcaatcaacatagcaaacttcattgttatcttaagtaatttccatagccaccaaaccttcagca

SEQ ID NO: 590134 - DNA, 120 bp, Artificial Sequence
  ENSG00000173077_20 (sequence is synthesized)
accaccaccctcaccagtcagcagccatcaatactggggcagaatctccactggcaaaaagattaggacttgctgaaggcttagatgaccattagcatttttaaacaagaaagcattttt

SEQ ID NO: 590135 - DNA, 120 bp, Artificial Sequence
  ENSG00000173077_21 (sequence is synthesized)
ttagttaagctatgtgcatttttagatttgaaagacatttctcaaaagaagacatacaagtggcaagcaggcatatgaaaagatgctacacatcatccatcatcagataaatgcaaatca

SEQ ID NO: 590136 - DNA, 120 bp, Artificial Sequence
  ENSG00000173077_22 (sequence is synthesized)
gatatcatctcacaccagttagaatggcttatatccaaaacacaggcaataacaaatgctgatgaggaagtggagaaaagaggacagtcaatgggaatgtaaattagcacaactatggag

SEQ ID NO: 590137 - DNA, 90 bp, Artificial Sequence
  ENSG00000173077_23 (sequence is synthesized)
agtggagaaaagaggacagtcaatgggaatgtaaattagcacaactatggagtacagtttagaggtttcacaaaaaactaaaaatatgag

SEQ ID NO: 590138 - DNA, 120 bp, Artificial Sequence
  ENSG00000173077_24 (sequence is synthesized)
atctgcactcttatgtttgttgcagcactgtttacagcaactaagatttggaagcaacctaagtgttcaacagatgaatggttaaagaaaatgcggtacatacagacaatggagtactac

SEQ ID NO: 590139 - DNA, 120 bp, Artificial Sequence
  ENSG00000173077_25 (sequence is synthesized)
aagaaaatgcggtacatacagacaatggagtactactcagccataaaaaaaatgatatccagtcatttgcagcaacgtggatggaactggagaccattatgttaagtgaaataaaccagg

SEQ ID NO: 590140 - DNA, 120 bp, Artificial Sequence
  ENSG00000173077_26 (sequence is synthesized)
gtgggatccaaacaacaaaacaattgaactcatgctcatagagaggagaaggatggttaccagaggctgggaaaggtagtgggaaggtggaaagggaggtggggatcggtaatgtataaa

SEQ ID NO: 590141 - DNA, 120 bp, Artificial Sequence
  ENSG00000173077_27 (sequence is synthesized)
aaaatactggaaagagtgaataagacctactatttgatagtacaatggatgattatagtcaataataacctaattgtatattttcaaataacataaagagtgtaattggattgtttgtaa

SEQ ID NO: 590142 - DNA, 120 bp, Artificial Sequence
  ENSG00000173077_28 (sequence is synthesized)
gaaatcttagagtgagaggacataattttctccttccaatatctccttctggctgactaagataaaatggataaatgggatggcaaatacacggataaagtactccacaccaggctccag

SEQ ID NO: 590143 - DNA, 120 bp, Artificial Sequence
  ENSG00000173077_29 (sequence is synthesized)
ctcctggatgatggtggacgtctggtccccaggcacacggaactgcatttccagaccaccctcgtgggtgggcgtgtacacgacaagggcacccagattcaaattcagctgaaggacggt

SEQ ID NO: 590144 - DNA, 120 bp, Artificial Sequence
  ENSG00000173077_30 (sequence is synthesized)
tgcaccctcaggctccatctggcttgagaaccatttgttgtagtgtgtgaaatcagatgagactcacatcctgttataccaggctccttcacatttgatctctgtgcaatttgataagag

SEQ ID NO: 590145 - DNA, 120 bp, Artificial Sequence
  ENSG00000173077_31 (sequence is synthesized)
gagggaatgggccgtcaattatgaagagactgaaaacctgaaaatactgagtatggtcttagttccctctccaaagggagctcaggaaaaatgccaagccatacaagccactgattactc

SEQ ID NO: 590146 - DNA, 120 bp, Artificial Sequence
  ENSG00000173077_32 (sequence is synthesized)
ttggcctgctgcagcttcaacctcatgtgctcaagcaatcctgctacctcagcctccagagtatgggactacagccctgaacactctgcggcttctctgagaaaccctatcgaaggggat

SEQ ID NO: 590147 - DNA, 120 bp, Artificial Sequence
  ENSG00000173077_33 (sequence is synthesized)
gtggaatcccagagctactcttgctatcaactcgccgcatgaccttgggaaaatcatttcacctggttcagcaatgatttactgagctattgaaggccttactttccagatccagtggca

SEQ ID NO: 590148 - DNA, 120 bp, Artificial Sequence
  ENSG00000173077_34 (sequence is synthesized)
ggacatgaaggggacagagcgaaaaccctcagcccacatttactactagtaagccatgaaataaacaagtcctgaccatccttaccacatgttttcttggaacaaaagggatgtgggtat

SEQ ID NO: 590149 - DNA, 120 bp, Artificial Sequence
  ENSG00000173077_35 (sequence is synthesized)
gacagatccaacttttgctatgaactgtgaactagcatatttttaacttggcttctgaggttggtgaaggaaactttcttgtcctttgctaataaaatgcagatggttcttcttccaaag

SEQ ID NO: 590150 - DNA, 120 bp, Artificial Sequence
  ENSG00000173077_36 (sequence is synthesized)
ggagagaaagacaaggagaaacctgaaagcagcccagttatgacaatgaatgttctggaggctgggaagtggaagagcattgtgccagcacctggtgagggccttcttgccgtgttacac

SEQ ID NO: 590151 - DNA, 120 bp, Artificial Sequence
  ENSG00000173077_37 (sequence is synthesized)
cagctaaaatgtcagtagaagacttgacagcttgagaatagaggaaaaaataaaagcgaagcagacaaaaagaaccttacctcccccacaatacaacattgggctgctgaacccacaaaa

SEQ ID NO: 590152 - DNA, 120 bp, Artificial Sequence
  ENSG00000173077_38 (sequence is synthesized)
atctaaatccgtttagaatcatctatttaactcctcagagacatgcacaaactattctagagaggcttgtgcctacgaagattacttaagaatgtgttgacacatttggagggggttaat

SEQ ID NO: 590153 - DNA, 120 bp, Artificial Sequence
  ENSG00000173077_39 (sequence is synthesized)
ttaccagttatcatttactagaaaggctttttctataagaatatatgaaagagtttcctcggagcattcaaccgggcttctttgtagggtatgtgtactgcttggagctacggaagacca

SEQ ID NO: 590154 - DNA, 120 bp, Artificial Sequence
  ENSG00000173077_40 (sequence is synthesized)
cgtcctagaagtgctgtgtccctgaggcacacctatgtgtgttatctctctggcatactttccaacaaggattcttttctagtctatacattctgattaatttgcagtcagaggcaatgc

SEQ ID NO: 590155 - DNA, 120 bp, Artificial Sequence
  ENSG00000173077_41 (sequence is synthesized)
ataattatttccacatttgagtggcacagacaagaaggaagtaggcagggagagatgctgtttccagaaacaaaggatagaagagctcattcctccctcctcccctctcccataagcagt

SEQ ID NO: 590156 - DNA, 120 bp, Artificial Sequence
  ENSG00000173077_42 (sequence is synthesized)
ccctgcatttggaggtggagaagcaatgtctaaggagatgatggctgttgaaattcagtgaagactgttcataaacaggaaatcttagagtgagaggacataattttctccttccaatat

SEQ ID NO: 590157 - DNA, 120 bp, Artificial Sequence
  ENSG00000173077_43 (sequence is synthesized)
aaatacacagctctgtcagaaagctagaggtctgcttggcagagagagtcatcatggattgtggcagattctccttctgtcaaggcttatctgaaggctaaataaatcatgctggaatct

SEQ ID NO: 590158 - DNA, 120 bp, Artificial Sequence
  ENSG00000173077_44 (sequence is synthesized)
ctcctgcctcagcctcctgagtaggtgggcttataggtgcccgccatgatgcccagctaatttttgtttcattagtacaaatagggtttcactatgtcggccaggcttgtctcgaattcc

SEQ ID NO: 590159 - DNA, 70 bp, Artificial Sequence
  ENSG00000173077_45 (sequence is synthesized)
tttgagtaacctttaagtaagaaagtgccttttgggttgagtttaacaatttccatggtagagagtctct

SEQ ID NO: 590160 - DNA, 120 bp, Artificial Sequence
  ENSG00000173077_46 (sequence is synthesized)
tttgggttgagtttaacaatttccatggtagagagtctcttctgctatatgctgtttacttagcttctgcctagtatatgcagcagcagaaaatggtttcccttgttgtaggtctaatga

SEQ ID NO: 590161 - DNA, 120 bp, Artificial Sequence
  ENSG00000173077_47 (sequence is synthesized)
gatttagaacactttgggtcctcagatatagtgagcaagattttcacttcatagatgaaggaactgcagcctaaagaattgggaagaaaaggtttatccaggcttgctgtgcattccttc

SEQ ID NO: 590162 - DNA, 120 bp, Artificial Sequence
  ENSG00000173077_48 (sequence is synthesized)
ctttctctgggaattcccttggagaagaaatctggctgatcaaatctccttgtaaacatgctgtgaagactctggggaaaaccactaatgatatttgttagtggcagtctttatctttga

SEQ ID NO: 590163 - DNA, 120 bp, Artificial Sequence
  ENSG00000173077_49 (sequence is synthesized)
gagacttttagcagcatgaaccttacccccgtagtagaattgtatatggtaaacaaacctggaatctaaggattcatgggtaatggcttcttgaaaagtgtcaagtaagctatgtaacta

SEQ ID NO: 590164 - DNA, 120 bp, Artificial Sequence
  ENSG00000173077_50 (sequence is synthesized)
tggcaggagatggaactacttcagggttaaaaaagctggctttcatttcgtgcaagtaatgtacttgtgtacatcttttggagaaccatatgttaaatccgaatcagaccaagtcctaat

SEQ ID NO: 590165 - DNA, 120 bp, Artificial Sequence
  ENSG00000173077_51 (sequence is synthesized)
gtggtaagaaaagggctgtggagtagtattggcagtcctgggcttttccctatgttccctgtaccttgtgattacttatagctttgacattattagtaaagtttgatacttggtaaaata

SEQ ID NO: 590166 - DNA, 120 bp, Artificial Sequence
  ENSG00000173080_0 (sequence is synthesized)
atgcccacactcaatacttctgcctctccacccacattcttctgggccaatgcctccggaggcagtgtgctgagtgctgatgatgctccgatgcctgtcaaattcctagccctgaggctc

SEQ ID NO: 590167 - DNA, 120 bp, Artificial Sequence
  ENSG00000173080_1 (sequence is synthesized)
atggttgccctggcctatgggcttgtgggggccattggcttgctgggaaatttggcggtgctgtgggtactgagtaactgtgcccggagagcccctggcccaccttcagacaccttcgtc

SEQ ID NO: 590168 - DNA, 120 bp, Artificial Sequence
  ENSG00000173080_2 (sequence is synthesized)
ttcaacctggctctggcggacctgggactggcactcactctccccttttgggcagccgagtcggcactggactttcactggcccttcggaggtgccctctgcaagatggttctgacggcc

SEQ ID NO: 590169 - DNA, 120 bp, Artificial Sequence
  ENSG00000173080_3 (sequence is synthesized)
actgtcctcaacgtctatgccagcatcttcctcatcacagcgctgagcgttgctcgctactgggtggtggccatggctgcggggccaggcacccacctctcactcttctgggcccgaata

SEQ ID NO: 590170 - DNA, 120 bp, Artificial Sequence
  ENSG00000173080_4 (sequence is synthesized)
gccaccctggcagtgtgggcggcggctgccctggtgacggtgcccacagctgtcttcggggtggagggtgaggtgtgtggtgtgcgcctttgcctgctgcgtttccccagcaggtactgg

SEQ ID NO: 590171 - DNA, 120 bp, Artificial Sequence
  ENSG00000173080_5 (sequence is synthesized)
tggtgcccttgggcgtcatcaccaccagctacctgctgctgctggccttcctgcagcggcggcaacggcggcggcaggacagcagggtcgtggcccgctctgtccgcatcctggtggctt

SEQ ID NO: 590172 - DNA, 120 bp, Artificial Sequence
  ENSG00000173080_6 (sequence is synthesized)
ccttcttcctctgctggtttcccaaccatgtggtcactctctggggtgtcctggtgaagtttgacctggtgccctggaacagtactttctatactatccagacgtatgtcttccctgtca

SEQ ID NO: 590173 - DNA, 120 bp, Artificial Sequence
  ENSG00000173080_7 (sequence is synthesized)
ctacttgcttggcacacagcaatagctgcctcaaccctgtgctgtactgtctcctgaggcgggagccccggcaggctctggcaggcaccttcagggatctgcggttgaggctgtggcccc

SEQ ID NO: 590174 - DNA, 120 bp, Artificial Sequence
  ENSG00000173080_8 (sequence is synthesized)
agggcggaggctgggtgcaacaggtggccctaaagcaggtaggcaggcggtgggtcgcaagcaacccccgggagagccgcccttctaccctgctcaccaacctggacagagggacacccg

SEQ ID NO: 590175 - DNA, 120 bp, Artificial Sequence
  ENSG00000173080_9 (sequence is synthesized)
ggtgaagggcgcaagctgaacacactcctctttctgagatccaccaagtgtaggatccttgagtcctggggagaagctgccctctctgccaggctgcagtgccctcagggaaaagtctga

SEQ ID NO: 590176 - DNA, 120 bp, Artificial Sequence
  ENSG00000173083_0 (sequence is synthesized)
agtgctagagctctcgactctccgctgcgcggcagctggcggggggagcagccaggtgagcccaagatgctgctgcgctcgaagcctgcgctgccgccgccgctgatgctgctgctcctg

SEQ ID NO: 590177 - DNA, 120 bp, Artificial Sequence
  ENSG00000173083_1 (sequence is synthesized)
gggccgctgggtcccctctcccctggcgccctgccccgacctgcgcaagcacaggacgtcgtggacctggacttcttcacccaggagccgctgcacctggtgagcccctcgttcctgtcc

SEQ ID NO: 590178 - DNA, 120 bp, Artificial Sequence
  ENSG00000173083_2 (sequence is synthesized)
gtcaccattgacgccaacctggccacggacccgcggttcctcatcctcctgggttctccaaagcttcgtaccttggccagaggcttgtctcctgcgtacctgaggtttggtggcaccaag

SEQ ID NO: 590179 - DNA, 120 bp, Artificial Sequence
  ENSG00000173083_3 (sequence is synthesized)
acagacttcctaattttcgatcccaagaaggaatcaacctttgaagagagaagttactggcaatctcaagtcaaccaggatatttgcaaatatggatccatccctcctgatgtggaggag

SEQ ID NO: 590180 - DNA, 120 bp, Artificial Sequence
  ENSG00000173083_4 (sequence is synthesized)
aagttacggttggaatggccctaccaggagcaattgctactccgagaacactaccagaaaaagttcaagaacagcacctactcaagaagctctgtagatgtgctatacacttttgcaaac

SEQ ID NO: 590181 - DNA, 120 bp, Artificial Sequence
  ENSG00000173083_5 (sequence is synthesized)
tgctcaggactggacttgatctttggcctaaatgcgttattaagaacagcagatttgcagtggaacagttctaatgctcagttgctcctggactactgctcttccaaggggtataacatt

SEQ ID NO: 590182 - DNA, 120 bp, Artificial Sequence
  ENSG00000173083_6 (sequence is synthesized)
tcttgggaactaggcaatgaacctaacagtttccttaagaaggctgatattttcatcaatgggtcgcagttaggagaagattttattcaattgcataaacttctaagaaagtccaccttc

SEQ ID NO: 590183 - DNA, 120 bp, Artificial Sequence
  ENSG00000173083_7 (sequence is synthesized)
aaaaatgcaaaactctatggtcctgatgttggtcagcctcgaagaaagacggctaagatgctgaagagcttcctgaaggctggtggagaagtgattgattcagttacatggcatcactac

SEQ ID NO: 590184 - DNA, 120 bp, Artificial Sequence
  ENSG00000173083_8 (sequence is synthesized)
tatttgaatggacggactgctaccaaggaagattttctaaaccctgatgtattggacatttttatttcatctgtgcaaaaagttttccaggtggttgagagcaccaggcctggcaagaag

SEQ ID NO: 590185 - DNA, 120 bp, Artificial Sequence
  ENSG00000173083_9 (sequence is synthesized)
gtctggttaggagaaacaagctctgcatatggaggcggagcgcccttgctatccgacacctttgcagctggctttatgtggctggataaattgggcctgtcagcccgaatgggaatagaa

SEQ ID NO: 590186 - DNA, 120 bp, Artificial Sequence
  ENSG00000173083_10 (sequence is synthesized)
gtggtgatgaggcaagtattctttggagcaggaaactaccatttagtggatgaaaacttcgatcctttacctgattattggctatctcttctgttcaagaaattggtgggcaccaaggtg

SEQ ID NO: 590187 - DNA, 120 bp, Artificial Sequence
  ENSG00000173083_11 (sequence is synthesized)
ttaatggcaagcgtgcaaggttcaaagagaaggaagcttcgagtataccttcattgcacaaacactgacaatccaaggtataaagaaggagatttaactctgtatgccataaacctccat

SEQ ID NO: 590188 - DNA, 120 bp, Artificial Sequence
  ENSG00000173083_12 (sequence is synthesized)
aatgtcaccaagtacttgcggttaccctatcctttttctaacaagcaagtggataaataccttctaagacctttgggacctcatggattactttccaaatctgtccaactcaatggtcta

SEQ ID NO: 590189 - DNA, 120 bp, Artificial Sequence
  ENSG00000173083_13 (sequence is synthesized)
actctaaagatggtggatgatcaaaccttgccacctttaatggaaaaacctctccggccaggaagttcactgggcttgccagctttctcatatagtttttttgtgataagaaatgccaaa

SEQ ID NO: 590190 - DNA, 120 bp, Artificial Sequence
  ENSG00000173083_14 (sequence is synthesized)
gttgctgcttgcatctgaaaataaaatatactagtcctgacactgaatttttcaagtatactaagagtaaagcaactcaagttataggaaaggaagcagataccttgcaaagcaactagt

SEQ ID NO: 590191 - DNA, 120 bp, Artificial Sequence
  ENSG00000173083_15 (sequence is synthesized)
gggtgcttgagagacactgggacactgtcagtgctagatttagcacagtattttgatctcgctaggtagaacactgctaataataatagctaataataccttgttccaaatactgcttag

SEQ ID NO: 590192 - DNA, 89 bp, Artificial Sequence
  ENSG00000173083_16 (sequence is synthesized)
taataatagctaataataccttgttccaaatactgcttagcattttgcatgttttacttttatctaaagttttgttttgttttaatctc

SEQ ID NO: 590193 - DNA, 120 bp, Artificial Sequence
  ENSG00000173083_17 (sequence is synthesized)
ttgcccaggcttgagtgcagtggtgcaatcatagatcactgcagccttttaactcctgggctcaagtcatcctcctgcttagcctcccaagtagctaggaccacagacacatgccatcac

SEQ ID NO: 590194 - DNA, 120 bp, Artificial Sequence
  ENSG00000173083_18 (sequence is synthesized)
acttggctatttttaaaaaattttttgtagagatggggtctcgctatgttacccaaactggtcctgaactcctggactcaattgatcctcccaccttggccttccaggtgctgggatttc

SEQ ID NO: 590195 - DNA, 120 bp, Artificial Sequence
  ENSG00000173083_19 (sequence is synthesized)
tttgggagtacagcatggtacagcaggagatcatttgatgttacctctgtgcagtgttgctagtcagcgaaagactataatacctgtggggacagcgattagccaccacaaccagtcttt

SEQ ID NO: 590196 - DNA, 120 bp, Artificial Sequence
  ENSG00000173083_20 (sequence is synthesized)
tgacagagagagattccatctcaaaaaaacaagttattaaaaatgtatatgaatgctcctaatatggtcaggaagcaaggaagcgaaggatatattatgagttttaagaaggtgcttagc

SEQ ID NO: 590197 - DNA, 120 bp, Artificial Sequence
  ENSG00000173083_21 (sequence is synthesized)
gatatattatgagttttaagaaggtgcttagctgtatatttatctttcaaaatgtattagaagattttagaattctttccttcatgtgccatctctacaggcacccatcagaaaaagcat

SEQ ID NO: 590198 - DNA, 120 bp, Artificial Sequence
  ENSG00000173083_22 (sequence is synthesized)
actgccgttaccgtgaaactggttgtaaaagagaaactatctatttgcaccttaaaagacagctagattttgctgattttcttctttcggttttctttgtcagcaataatatgtgagagg

SEQ ID NO: 590199 - DNA, 120 bp, Artificial Sequence
  ENSG00000173083_23 (sequence is synthesized)
acagattgttagatatgatagtataaaaaatggttaatgacaattcagaggcgaggagattctgtaaacttaaaattactataaatgaaattgatttgtcaagaggataaattttagaaa

SEQ ID NO: 590200 - DNA, 120 bp, Artificial Sequence
  ENSG00000173083_24 (sequence is synthesized)
acacccaataccttataactgtctgttaatgcttgctttttctctacctttcttccttgtttcagttgggaagcttttggctgcaagtaacagaaactcctaattcaaatggcttaagca

SEQ ID NO: 590201 - DNA, 120 bp, Artificial Sequence
  ENSG00000173083_25 (sequence is synthesized)
ataaggaaatgtatattcccacataactagacgttcaaacaggccaggctccagcacttcagtacgtcaccagggatctgggttcttcccagctctctgctctgccatctttagcgctgg

SEQ ID NO: 590202 - DNA, 120 bp, Artificial Sequence
  ENSG00000173083_26 (sequence is synthesized)
cttcattctcagactctggtagcatgatggctgtagctgtttcatgggccccttcaaacctcatagcaaccagaggaagaaaatgagccattttttgagtctccttcatagacttgaata

SEQ ID NO: 590203 - DNA, 120 bp, Artificial Sequence
  ENSG00000173083_27 (sequence is synthesized)
actctttttcagagcttctcacagcaaacctctcctcatgtctcctcatgtcttattgttcagaaatgggtaatgtggccatttcaccagtcactgccaacaacaacgaggttcctataa

SEQ ID NO: 590204 - DNA, 120 bp, Artificial Sequence
  ENSG00000173083_28 (sequence is synthesized)
ttgtctctgagtaaccctttggaatggagagggtgttggtcagtctacaaactgaacactgcagttctgcgctttttaccagtgaaaaaatgtaattattttcccctcttaaggattaat

SEQ ID NO: 590205 - DNA, 120 bp, Artificial Sequence
  ENSG00000173083_29 (sequence is synthesized)
attcttcaaatgtatgcctgttatggatatagtatctttaaaattttttattttaatagctttaggggtacacactttttgcttacaggggtgaattgtgtagtggtgaagactcggctt

SEQ ID NO: 590206 - DNA, 120 bp, Artificial Sequence
  ENSG00000173083_30 (sequence is synthesized)
ttaatgtacttgtcacctgagtgatgtacattgtacccaataggtaatttttcatccattaccctccttccgccctcttcccttctgagtctccaacatcccttataccactgtgtatgt

SEQ ID NO: 590207 - DNA, 83 bp, Artificial Sequence
  ENSG00000173083_31 (sequence is synthesized)
ccttaggataacagcccccagttccgtccaagttgctgcaaaatacattattcttctttatggctgagtaatagtccatggta

SEQ ID NO: 590208 - DNA, 120 bp, Artificial Sequence
  ENSG00000173083_32 (sequence is synthesized)
tacattattcttctttatggctgagtaatagtccatggtacatatataccacattttctttatccacttatcagttgatggacacttaggttaattccattcaatttcattcaatttaag

SEQ ID NO: 590209 - DNA, 120 bp, Artificial Sequence
  ENSG00000173083_33 (sequence is synthesized)
ccattcaatttcattcaatttaagtatatttgtaaggagctaaagctgaaaattaaattttagatctttcaatactcttaaattttatatgtaagtggtttttatattttcacatttgaa

SEQ ID NO: 590210 - DNA, 120 bp, Artificial Sequence
  ENSG00000173083_34 (sequence is synthesized)
ccagcgctgctccccgggcgctcctccccgggcgctcctccccaggcctcccgggcgcttggatcccggccatctccgcacccttcaagtgggtgtgggtgatttcctggcggggggagc

SEQ ID NO: 590211 - DNA, 89 bp, Artificial Sequence
  ENSG00000173083_35 (sequence is synthesized)
tataggcgtgtgccaccacgcccagctactttctatattttttgtagagatggagtttcgtcctcgaactcctgtcctcaagtgatcca

SEQ ID NO: 590212 - DNA, 120 bp, Artificial Sequence
  ENSG00000173085_0 (sequence is synthesized)
atgaccccaatttcacaagtaaggatgaggaaaggttctgcccacaccgccgcccagcctggcagactaggattgcatcctgcgggtgccactgcgcatgcctgccggggaatgacgtca

SEQ ID NO: 590213 - DNA, 120 bp, Artificial Sequence
  ENSG00000173085_1 (sequence is synthesized)
gtcaatccgagctcgtcccggcctcaccagcgccatgctgggctcgcgagccgcggggttcgcgcggggcctgcgggctgtggcactggcgtggctgccgggctggcggggccgctcctt

SEQ ID NO: 590214 - DNA, 120 bp, Artificial Sequence
  ENSG00000173085_2 (sequence is synthesized)
ccttcgccctggcgcgtgcggcaggcgcgccccacggtggtgacttgcagccccccgcctgtcccgagccgcgcgggcgccagctcagtttgtccgcggcggcggtggtggactctgcgc

SEQ ID NO: 590215 - DNA, 120 bp, Artificial Sequence
  ENSG00000173085_3 (sequence is synthesized)
ctgcagccgtacttgcgcctcatgcggttggacaagcccattggaacctggcttctgtatttaccatgtacctggagcattggtttggcagctgaaccaggttgttttccagattggtac

SEQ ID NO: 590216 - DNA, 120 bp, Artificial Sequence
  ENSG00000173085_4 (sequence is synthesized)
atgctctccctctttggcactggagctattctgatgcgtggagcaggctgtactattaatgacatgtgggaccaggactatgataaaaaggttacaagaacagccaatcgtccaatagcc

SEQ ID NO: 590217 - DNA, 120 bp, Artificial Sequence
  ENSG00000173085_5 (sequence is synthesized)
gctggagacatttcaacttttcagtcctttgtttttcttgggggacagctaaccctggcactgggtgttcttctgtgtctaaattactacagtatagctctgggagcaggatccttactt

SEQ ID NO: 590218 - DNA, 120 bp, Artificial Sequence
  ENSG00000173085_6 (sequence is synthesized)
cgttacttggatggtctgctatcaagggttcctgtgatccatctgtttgcctgcctctttatttttctggagttatgtggacactaatatatgatactatttatgcccatcaggacaaaa

SEQ ID NO: 590219 - DNA, 120 bp, Artificial Sequence
  ENSG00000173085_7 (sequence is synthesized)
gagatgatgttttgattggtcttaagtcaacggctctgcggttcggagaaaataccaagccgtggctcagcggcttcagtgttgcaatgctgggggcactgagcctagtgggtgtgaaca

SEQ ID NO: 590220 - DNA, 120 bp, Artificial Sequence
  ENSG00000173085_8 (sequence is synthesized)
gtggacagactgctccctactacgctgccctgggtgctgtaggagcccatctgactcaccagatttacactctagacatccacagacctgaggattgttggaataaatttatctccaacc

SEQ ID NO: 590221 - DNA, 120 bp, Artificial Sequence
  ENSG00000173085_9 (sequence is synthesized)
gaacactgggactaatagtttttttagggattgtccttgggaatttgtggaaagaaaagaagacagacaaaacaaagaagggtatagagaataaaatagaaaattaatgaatgaaattta

SEQ ID NO: 590222 - DNA, 120 bp, Artificial Sequence
  ENSG00000173085_10 (sequence is synthesized)
tctaggaatttttaaaacattttttacaaaatataattagatttgaatacaaaatctgatacaatatgttaaagaattaagaacctgaagatgaagatttagagcatatttacctggatt

SEQ ID NO: 590223 - DNA, 120 bp, Artificial Sequence
  ENSG00000173085_11 (sequence is synthesized)
ttacttatttgctagcaaaattcccccttgtcacagaaaccagggactcttcaggatttgagatggccttgagtattttagttgatacattcttctgcccattataattctcacctgaag

SEQ ID NO: 590224 - DNA, 120 bp, Artificial Sequence
  ENSG00000173085_12 (sequence is synthesized)
ttatggggattgcacgggttttggcactttagaaaaagcctgatgtgggtcttacataaatgaatgtctgtataagaaaatggactcttttttttagggaaaaataaaagcaactatggg

SEQ ID NO: 590225 - DNA, 120 bp, Artificial Sequence
  ENSG00000173085_13 (sequence is synthesized)
ctgaaattcctggcttcaagcaatcttcctgccctggtctcccaaaagtgctgggattaccagtgtgagctaccaaccccagccaaggtatattattttttaaaaataatataggcctaa

SEQ ID NO: 590226 - DNA, 120 bp, Artificial Sequence
  ENSG00000173085_14 (sequence is synthesized)
atccaaattttcccatctgattttcctggaattacttctgattcatgtctggaaaaatttcagtgatatctgaagcttgtggtttgagttgaattactctaaaagcaaactgacagataa

SEQ ID NO: 590227 - DNA, 120 bp, Artificial Sequence
  ENSG00000173085_15 (sequence is synthesized)
agcttttaaaaaaaaatctgggtttctagtgatggttagtagactaattattcataaatttggtttctgctggcataaagaccaaggacagataagacatgaaatgcggaacatgtcaaa

SEQ ID NO: 590228 - DNA, 120 bp, Artificial Sequence
  ENSG00000173085_16 (sequence is synthesized)
gttctgccagtagagagcaggaagctgtcatttcaggatattcacccacaccacatcccctacctgtcagaaacttatgttgagaatctacattgttgacttgtaaatgaatgaactaaa

SEQ ID NO: 590229 - DNA, 120 bp, Artificial Sequence
  ENSG00000173085_17 (sequence is synthesized)
gtaggagcccatctgactcaccagatacgaccctatattttaaaatgcttaaaacatcttaacccattgcactggttccaattaaagaaggagcacttggtgggtgccagtggagcagga

SEQ ID NO: 590230 - DNA, 120 bp, Artificial Sequence
  ENSG00000173085_18 (sequence is synthesized)
gctgtgaatgccagtcacagccacagcttgccagggttggaatctgctttaacacctatcagttgggtgatcttgggcaagttccctgacctctctgtggctcactcggggataatcata

SEQ ID NO: 590231 - DNA, 120 bp, Artificial Sequence
  ENSG00000173085_19 (sequence is synthesized)
atacctttctcatgcatttcaaaattttctgtcttcccctgcgaatggagatttcatggtaagtgggaccttgtttgtcttattcattgaaatatccccaatataccatatcacaagggc

SEQ ID NO: 590232 - DNA, 120 bp, Artificial Sequence
  ENSG00000173085_20 (sequence is synthesized)
tgcctctccctcttcccggatttctttgctaaattgtttaatgcctctacctgatttttataatctggcctcaccctaatgtttcctccaactgaaagtacaccctccaccctctgggtg

SEQ ID NO: 590233 - DNA, 120 bp, Artificial Sequence
  ENSG00000173085_21 (sequence is synthesized)
cttccctcatttacagatgaaacaaagacttaagccttaagatactttactgtctagtgtcactcaacttacaagtggcagacatagaactgagaagtcttcttactttccccttcactg

SEQ ID NO: 590234 - DNA, 120 bp, Artificial Sequence
  ENSG00000173093_0 (sequence is synthesized)
gtggcgcagcgaggccgcgcagcaagcagtcctcccggcaccgtcggaagcgcagttgcagcagccgtcggacaagcggccggagcagccacggacaagcagtccgggccccgccactgg

SEQ ID NO: 590235 - DNA, 120 bp, Artificial Sequence
  ENSG00000173093_1 (sequence is synthesized)
gcattgcagagagacagagagagagaggaaggctcactggctttgagctctctgggtacagtgtctgagtggaggcaaagtgcggttccttcaagatgtctgtgttgaagaagaacagga

SEQ ID NO: 590236 - DNA, 120 bp, Artificial Sequence
  ENSG00000173093_2 (sequence is synthesized)
gaaaagactccgacactccccaggaaccttcggagaaggccaaagagcagcaggcggaggcagagctccggaagctaaggcagcagttcaggaagatggtggaaagccggaagtctttta

SEQ ID NO: 590237 - DNA, 120 bp, Artificial Sequence
  ENSG00000173093_3 (sequence is synthesized)
agttccgaaaccagcagaagattgcgagtcagtacaaggagatcaagaccctgaagacagagcaggatgagatcaccctactgttgagtctcatgaaatcctcgaggaacatgaatcgga

SEQ ID NO: 590238 - DNA, 120 bp, Artificial Sequence
  ENSG00000173093_4 (sequence is synthesized)
gtgagaagaactacatggagctgcgactcctgctccaaactaaggaggactatgaggcattgattaaatccctgaaagtgctgttggctgaactggatgagaagattcttcagatggaaa

SEQ ID NO: 590239 - DNA, 120 bp, Artificial Sequence
  ENSG00000173093_5 (sequence is synthesized)
aaaaaatcgcaaaccaaaaacagattttcgcaaaaatgcaggaggccaataacccccggaaactgcagaaacagattcacattttggaaacccgtttgaatctcgtcactgttcactttg

SEQ ID NO: 590240 - DNA, 120 bp, Artificial Sequence
  ENSG00000173093_6 (sequence is synthesized)
acaagatgctgaccactaatgccaagctccggaaggagattgaagacctacgatttgagaaggctgcttatgacaatgtctaccagcagctccagcactgcctgttgatggagaagaaaa

SEQ ID NO: 590241 - DNA, 120 bp, Artificial Sequence
  ENSG00000173093_7 (sequence is synthesized)
ccatgaacttggccattgagcaatcttctcaggcctatgagcagagggtggaggccatggctcgaatggctgccatgaaagaccgccagaagaaggacacctctcagtacaacctggaga

SEQ ID NO: 590242 - DNA, 120 bp, Artificial Sequence
  ENSG00000173093_8 (sequence is synthesized)
cttcctgctcgtcaagctgaatgatcgcaatgaattcgaggagcaggccaaaagggaggaagctctcaaggcaaagaagcatgtcaagaagaacaggggagagagttttgagagctatga

SEQ ID NO: 590243 - DNA, 120 bp, Artificial Sequence
  ENSG00000173093_9 (sequence is synthesized)
ggtggcccacctccggctgctgaagctggctgagagtgggaacctaaaccagctcattgaagattttctggccaaggaggagaagaattttgctcggttcacgtatgtcacggagctcaa

SEQ ID NO: 590244 - DNA, 120 bp, Artificial Sequence
  ENSG00000173093_10 (sequence is synthesized)
caacgacatggagatgatgcacaagaggacccaacgaatccaggacgagatcatcctcttgcgatcccagcagaaattgtcccacgatgacaaccactctgtcctgagacagctggagga

SEQ ID NO: 590245 - DNA, 120 bp, Artificial Sequence
  ENSG00000173093_11 (sequence is synthesized)
taaactgaggaagaccacggaggaggcagatatgtatgagagcaagtacggggaggtcagcaagaccttggatctattgaagaactcagtggagaaactgttcaagaagataaactgtga

SEQ ID NO: 590246 - DNA, 120 bp, Artificial Sequence
  ENSG00000173093_12 (sequence is synthesized)
cgccaccaagatcctggtgcagttaggggagacggggaaagtcactgacatcaaccttccgcagtattttgccatcattgaaaagaagaccaacgacctgctgctgttggagacctacag

SEQ ID NO: 590247 - DNA, 120 bp, Artificial Sequence
  ENSG00000173093_13 (sequence is synthesized)
gcgcatcctggaagtggaaggggcagaggctgagatcccgccacccttcatcaaccctttctggggtggctctgccctcctcaagcccccagaacccatcaaagtcatccccccagtgct

SEQ ID NO: 590248 - DNA, 120 bp, Artificial Sequence
  ENSG00000173093_14 (sequence is synthesized)
gggggctgaccccttcagcgacaggttggatgatgtggaacagcccctggaccacagcagccttcggcagctggttctcgacaattatatcctgaaggagaatcggagtaaggaagtgcg

SEQ ID NO: 590249 - DNA, 120 bp, Artificial Sequence
  ENSG00000173093_15 (sequence is synthesized)
cggagacagcctgcctgagaaggtggatgacttcagatccaggaagaaagtaaccatgtgaggtgcatgcatggggccacctttgcaacataaccgaaagaataaatgttttgttctgta

SEQ ID NO: 590250 - DNA, 120 bp, Artificial Sequence
  ENSG00000173093_16 (sequence is synthesized)
agaacgcccgggcgtggggctgggggtgtggcgcagcgaggccgcgcagcaagcagtcctcccggcaccgtcggaagcgcagttgcagcagccgtcggacaagcggccggagcagccacg

SEQ ID NO: 590251 - DNA, 120 bp, Artificial Sequence
  ENSG00000173093_17 (sequence is synthesized)
gtcatgagggtccgggtagtctggtaaggggtcgctggagagtgtgtcgcccctctcccccaaccaaaagcttccctccaaccagctgctcttgtcctctcctcccgagggccctgtgcc

SEQ ID NO: 590252 - DNA, 120 bp, Artificial Sequence
  ENSG00000173110_0 (sequence is synthesized)
agatccgagccgggctggctgcagagaaaccgcagggagagcctcactgctgagcgcccctcgacggcggagcggcagcagcctccgtggcctccagcatccgacaagaagcttcagcca

SEQ ID NO: 590253 - DNA, 120 bp, Artificial Sequence
  ENSG00000173110_1 (sequence is synthesized)
tgcaggccccacgggagctcgcggtgggcatcgacctgggcaccacctactcgtgcgtgggcgtgtttcagcagggccgcgtggagatcctggccaacgaccagggcaaccgcaccacgc

SEQ ID NO: 590254 - DNA, 120 bp, Artificial Sequence
  ENSG00000173110_2 (sequence is synthesized)
ccagctacgtggccttcaccgacaccgagcggctggtcggggacgcggccaagagccaggcggccctgaacccccacaacaccgtgttcgatgccaagcggctgatcgggcgcaagttcg

SEQ ID NO: 590255 - DNA, 120 bp, Artificial Sequence
  ENSG00000173110_3 (sequence is synthesized)
cggacaccacggtgcagtcggacatgaagcactggcccttccgggtggtgagcgagggcggcaagcccaaggtgcgcgtatgctaccgcggggaggacaagacgttctaccccgaggaga

SEQ ID NO: 590256 - DNA, 120 bp, Artificial Sequence
  ENSG00000173110_4 (sequence is synthesized)
tctcgtccatggtgctgagcaagatgaaggagacggccgaggcgtacctgggccagcccgtgaagcacgcagtgatcaccgtgcccgcctatttcaatgactcgcagcgccaggccacca

SEQ ID NO: 590257 - DNA, 120 bp, Artificial Sequence
  ENSG00000173110_5 (sequence is synthesized)
aggacgcgggggccatcgcggggctcaacgtgttgcggatcatcaatgagcccacggcagctgccatcgcctatgggctggaccggcggggcgcgggagagcgcaacgtgctcatttttg

SEQ ID NO: 590258 - DNA, 120 bp, Artificial Sequence
  ENSG00000173110_6 (sequence is synthesized)
acctgggtgggggcaccttcgatgtgtcggttctctccattgacgctggtgtctttgaggtgaaagccactgctggagatacccacctgggaggagaggacttcgacaaccggctcgtga

SEQ ID NO: 590259 - DNA, 120 bp, Artificial Sequence
  ENSG00000173110_7 (sequence is synthesized)
accacttcatggaagaattccggcggaagcatgggaaggacctgagcgggaacaagcgtgccctgcgcaggctgcgcacagcctgtgagcgcgccaagcgcaccctgtcctccagcaccc

SEQ ID NO: 590260 - DNA, 120 bp, Artificial Sequence
  ENSG00000173110_8 (sequence is synthesized)
aggccaccctggagatagactccctgttcgagggcgtggacttctacacgtccatcactcgtgcccgctttgaggaactgtgctcagacctcttccgcagcaccctggagccggtggaga

SEQ ID NO: 590261 - DNA, 120 bp, Artificial Sequence
  ENSG00000173110_9 (sequence is synthesized)
ccaaggtgcagaagttgctgcaggacttcttcaacggcaaggagctgaacaagagcatcaaccctgatgaggctgtggcctatggggctgctgtgcaggcggccgtgttgatgggggaca

SEQ ID NO: 590262 - DNA, 120 bp, Artificial Sequence
  ENSG00000173110_10 (sequence is synthesized)
aatgtgagaaagtgcaggatctcctgctgctggatgtggctcccctgtctctggggctggagacagcaggtggggtgatgaccacgctgatccagaggaacgccactatccccaccaagc

SEQ ID NO: 590263 - DNA, 120 bp, Artificial Sequence
  ENSG00000173110_11 (sequence is synthesized)
agacccagactttcaccacctactcggacaaccagcctggggtcttcatccaggtgtatgagggtgagagggccatgaccaaggacaacaacctgctggggcgttttgaactcagtggca

SEQ ID NO: 590264 - DNA, 120 bp, Artificial Sequence
  ENSG00000173110_12 (sequence is synthesized)
tccctcctgccccacgtggagtcccccagatagaggtgacttttgacattgatgctaatggcatcctgagcgtgacagccactgacaggagcacaggtaaggctaacaagatcaccatca

SEQ ID NO: 590265 - DNA, 120 bp, Artificial Sequence
  ENSG00000173110_13 (sequence is synthesized)
ccaatgacaagggccggctgagcaaggaggaggtggagaggatggttcatgaagccgagcagtacaaggctgaggatgaggcccagagggacagagtggctgccaaaaactcgctggagg

SEQ ID NO: 590266 - DNA, 120 bp, Artificial Sequence
  ENSG00000173110_14 (sequence is synthesized)
cccatgtcttccatgtgaaaggttctttgcaagaggaaagccttagggacaagattcccgaagaggacaggcgcaaaatgcaagacaagtgtcgggaagtccttgcctggctggagcaca

SEQ ID NO: 590267 - DNA, 120 bp, Artificial Sequence
  ENSG00000173110_15 (sequence is synthesized)
accagctggcagagaaggaggagtatgagcatcagaagagggagctggagcaaatctgtcgccccatcttctccaggctctatggggggcctggtgtccctgggggcagcagttgtggca

SEQ ID NO: 590268 - DNA, 120 bp, Artificial Sequence
  ENSG00000173110_16 (sequence is synthesized)
ctcaagcccgccagggggaccccagcaccggccccatcattgaggaggttgattgaatggcccttcgtgataagtcagctgtgactgtcagggctatgctatgggccttctagactgtct

SEQ ID NO: 590269 - DNA, 120 bp, Artificial Sequence
  ENSG00000173110_17 (sequence is synthesized)
tctatgatcctgcccttcagagatgaactttccctccaaagctagaactttcttcccaggataactgaagtcttttgactttttgcggggagggcggttcatcctcttctgcttcaaata

SEQ ID NO: 590270 - DNA, 120 bp, Artificial Sequence
  ENSG00000173110_18 (sequence is synthesized)
aaaagtcattaatttattaaaacttgtgtggcactttaacattgctttcacctatattttgtgtactttgttacttgcatgtatgaattttgttatgtaaaatatagttatagacctaaa

SEQ ID NO: 590271 - DNA, 120 bp, Artificial Sequence
  ENSG00000173113_0 (sequence is synthesized)
ggccacccgcagaacagagcttccgggacccacgcctcgtttgcactgggtgctggacagccgacgcaactacaaatggggcggagctttcggcactggagcagctaatttgcatatagg

SEQ ID NO: 590272 - DNA, 120 bp, Artificial Sequence
  ENSG00000173113_1 (sequence is synthesized)
aatgaggtgcggctcggcttccatgggcctaatttacagatagggcggtatttctgccccttaaccgaaagtgggatacagaggacgacggtgttaggcgcctgtgtaggagtaaaatgt

SEQ ID NO: 590273 - DNA, 120 bp, Artificial Sequence
  ENSG00000173113_2 (sequence is synthesized)
gtttattttgcattcaacgagagctcctgcattgcagctattttgcatatgatttgcatcttacgaagaatttgtggcaaaaaaaagctgggcgtgcgccgtaggaacctcctgctgaga

SEQ ID NO: 590274 - DNA, 120 bp, Artificial Sequence
  ENSG00000173113_3 (sequence is synthesized)
cgcttccggtagcggcgcgtgacccgacaggtctttcacctacctacctcagctcccacaaacacgagaagttccagcaagttcgccacttccggttctcctggctatccaatagcatcg

SEQ ID NO: 590275 - DNA, 120 bp, Artificial Sequence
  ENSG00000173113_4 (sequence is synthesized)
gcggaggacgacctttttccggttccggcctggcgagagtttgtgcggcgacatgaaactgcttacccacaatctgctgagctcgcatgtgcggggggtggggtcccgtggcttccccct

SEQ ID NO: 590276 - DNA, 120 bp, Artificial Sequence
  ENSG00000173113_5 (sequence is synthesized)
gcgcctccaggccaccgaggtccgtatctgccctgtggaattcaaccccaacttcgtggcgcgtatgatacctaaagtggagtggtcggcgttcctggaggcggccgataacttgcgtct

SEQ ID NO: 590277 - DNA, 120 bp, Artificial Sequence
  ENSG00000173113_6 (sequence is synthesized)
gatccaggtgccgaaagggccggttgagggatatgaggagaatgaggagtttctgaggaccatgcaccacctgctgctggaggtggaagtgatagagggcaccctgcagtgcccggaatc

SEQ ID NO: 590278 - DNA, 120 bp, Artificial Sequence
  ENSG00000173113_7 (sequence is synthesized)
tggacgtatgttccccatcagccgcgggatccccaacatgctgctgagtgaagaggaaactgagagttgattgtgccaggcgccagtttttcttgttatgactgtgtatttttgttgatc

SEQ ID NO: 590279 - DNA, 120 bp, Artificial Sequence
  ENSG00000173113_8 (sequence is synthesized)
tataccctgtttccgaattctgccgtgtgtatccccaacccttgacccaatgacaccaaacacagtgtttttgagctcggtattatatatttttttctcattaaaggtttaaaaccaaaa

SEQ ID NO: 590280 - DNA, 120 bp, Artificial Sequence
  ENSG00000173113_9 (sequence is synthesized)
acaatctgctgagctcgcatgtgcggggggtggggtcccgtggcttccccctgcgcctccaggtacccgccggcggcagtcttcccttttcgggcgggatggtgggccggggtccagtgc

SEQ ID NO: 590281 - DNA, 120 bp, Artificial Sequence
  ENSG00000173113_10 (sequence is synthesized)
gcggcccatcacttgcttcccgggccacctgcctcccgcactgaggctgccagtgctcagctctgtccctccctgcccgcaggtggaagtgatagagggcaccctgcagtgcccggaatc

SEQ ID NO: 590282 - DNA, 120 bp, Artificial Sequence
  ENSG00000173113_11 (sequence is synthesized)
aaatatagtgttattgctctgcagggcatagaggcagtgctctcctaccccctgaggaggctcgttgggagctgatggggaagccctggccaccccaggggtccaggggctggagtctgc

SEQ ID NO: 590283 - DNA, 120 bp, Artificial Sequence
  ENSG00000173113_12 (sequence is synthesized)
gtggaattcaaccccaacttcgtggcgcgtatgatacctaaagtggagtggtcggcgttcctggaggcggccgataacgtgaggatccttaccccgccccagcatatcccggggaatgcg

SEQ ID NO: 590284 - DNA, 120 bp, Artificial Sequence
  ENSG00000173114_0 (sequence is synthesized)
gtcagtgtgacaactgatcgggtgaacgatgcaccactaaccaccatggaaacaaggaaaaataaagccagctcacaggatctctcttcactggattgagagcctcagcctgccgactga

SEQ ID NO: 590285 - DNA, 120 bp, Artificial Sequence
  ENSG00000173114_1 (sequence is synthesized)
gaaaaagagttccaggaaaaagaaggaatcccggctgcagcctcctgccttcctttatattttaaaatagagagataagattgcgtgcatgtgtgcatatctatagtatatattttgtac

SEQ ID NO: 590286 - DNA, 120 bp, Artificial Sequence
  ENSG00000173114_2 (sequence is synthesized)
actttgttacacagacacacaaatgcacctatttataccgggcaagaacacaaccatgtgattatctcaaccaaggaactgaggaatccagcacgcaaggacatcggaggtgggctagca

SEQ ID NO: 590287 - DNA, 120 bp, Artificial Sequence
  ENSG00000173114_3 (sequence is synthesized)
ctgaaactgcttttcaagacgaggaagaggaggagaaagagaaagaagaggaagatgttgggcaacatttatttaacatgctccacagcccggaccctggcatcatgctgctattcctgc

SEQ ID NO: 590288 - DNA, 120 bp, Artificial Sequence
  ENSG00000173114_4 (sequence is synthesized)
aaatactgaagaagcatgggatttaaatattttacttctaaataaatgaattactcaatctcctatgaccatctatacatactccaccttcaaaaagtacatcaatattatatcattaag

SEQ ID NO: 590289 - DNA, 120 bp, Artificial Sequence
  ENSG00000173114_5 (sequence is synthesized)
gaaatagtaaccttctcttctccaatatgcatgacatttttggacaatgcaattgtggcactggcacttatttcagtgaagaaaaactttgtggttctatggcattcatcatttgacaaa

SEQ ID NO: 590290 - DNA, 120 bp, Artificial Sequence
  ENSG00000173114_6 (sequence is synthesized)
tgcaagcatcttccttatcaatcagctcctattgaacttactagcactgactgtggaatccttaagggcccattacatttctgaagaagaaagctaagatgaaggacatgccactccgaa

SEQ ID NO: 590291 - DNA, 120 bp, Artificial Sequence
  ENSG00000173114_7 (sequence is synthesized)
ttcatgtgctacttggcctagctatcactacactagtacaagctgtagataaaaaagtggattgtccacggttatgtacgtgtgaaatcaggccttggtttacacccagatccatttata

SEQ ID NO: 590292 - DNA, 120 bp, Artificial Sequence
  ENSG00000173114_8 (sequence is synthesized)
tggaagcatctacagtggattgtaatgatttaggtcttttaactttcccagccagattgccagctaacacacagattcttctcctacagactaacaatattgcaaaaattgaatactcca

SEQ ID NO: 590293 - DNA, 120 bp, Artificial Sequence
  ENSG00000173114_9 (sequence is synthesized)
cagactttccagtaaaccttactggcctggatttatctcaaaacaatttatcttcagtcaccaatattaatgtaaaaaagatgcctcagctcctttctgtgtacctagaggaaaacaaac

SEQ ID NO: 590294 - DNA, 120 bp, Artificial Sequence
  ENSG00000173114_10 (sequence is synthesized)
ttactgaactgcctgaaaaatgtctgtccgaactgagcaacttacaagaactctatattaatcacaacttgctttctacaatttcacctggagcctttattggcctacataatcttcttc

SEQ ID NO: 590295 - DNA, 120 bp, Artificial Sequence
  ENSG00000173114_11 (sequence is synthesized)
gacttcatctcaattcaaatagattgcagatgatcaacagtaagtggtttgatgctcttccaaatctagagattctgatgattggggaaaatccaattatcagaatcaaagacatgaact

SEQ ID NO: 590296 - DNA, 120 bp, Artificial Sequence
  ENSG00000173114_12 (sequence is synthesized)
ttaagcctcttatcaatcttcgcagcctggttatagctggtataaacctcacagaaataccagataacgccttggttggactggaaaacttagaaagcatctctttttacgataacaggc

SEQ ID NO: 590297 - DNA, 120 bp, Artificial Sequence
  ENSG00000173114_13 (sequence is synthesized)
ttattaaagtaccccatgttgctcttcaaaaagttgtaaatctcaaatttttggatctaaataaaaatcctattaatagaatacgaaggggtgattttagcaatatgctacacttaaaag

SEQ ID NO: 590298 - DNA, 120 bp, Artificial Sequence
  ENSG00000173114_14 (sequence is synthesized)
cctgagctgatttccatcgatagtcttgctgtggataacctgccagatttaagaaaaatagaagctactaacaaccctagattgtcttacattcaccccaatgcatttttcagactcccc

SEQ ID NO: 590299 - DNA, 120 bp, Artificial Sequence
  ENSG00000173114_15 (sequence is synthesized)
aagctggaatcactcatgctgaacagcaatgctctcagtgccctgtaccatggtaccattgagtctctgccaaacctcaaggaaatcagcatacacagtaaccccatcaggtgtgactgt

SEQ ID NO: 590300 - DNA, 120 bp, Artificial Sequence
  ENSG00000173114_16 (sequence is synthesized)
gtcatccgttggatgaacatgaacaaaaccaacattcgattcatggagccagattcactgttttgcgtggacccacctgaattccaaggtcagaatgttcggcaagtgcatttcagggac

SEQ ID NO: 590301 - DNA, 120 bp, Artificial Sequence
  ENSG00000173114_17 (sequence is synthesized)
atgatggaaatttgtctccctcttatagctcctgagagctttccttctaatctaaatgtagaagctgggagctatgtttcctttcactgtagagctactgcagaaccacagcctgaaatc

SEQ ID NO: 590302 - DNA, 120 bp, Artificial Sequence
  ENSG00000173114_18 (sequence is synthesized)
tactggataacaccttctggtcaaaaactcttgcctaataccctgacagacaagttctatgtccattctgagggaacactagatataaatggcgtaactcccaaagaagggggtttatat

SEQ ID NO: 590303 - DNA, 120 bp, Artificial Sequence
  ENSG00000173114_19 (sequence is synthesized)
acttgtatagcaactaacctagttggcgctgacttgaagtctgttatgatcaaagtggatggatcttttccacaagataacaatggctctttgaatattaaaataagagatattcaggcc

SEQ ID NO: 590304 - DNA, 120 bp, Artificial Sequence
  ENSG00000173114_20 (sequence is synthesized)
aattcagttttggtgtcctggaaagcaagttctaaaattctcaaatctagtgttaaatggacagcctttgtcaagactgaaaattctcatgctgcgcaaagtgctcgaataccatctgat

SEQ ID NO: 590305 - DNA, 120 bp, Artificial Sequence
  ENSG00000173114_21 (sequence is synthesized)
gtcaaggtatataatcttactcatctgaatccatcaactgagtataaaatttgtattgatattcccaccatctatcagaaaaacagaaaaaaatgtgtaaatgtcaccaccaaaggtttg

SEQ ID NO: 590306 - DNA, 120 bp, Artificial Sequence
  ENSG00000173114_22 (sequence is synthesized)
caccctgatcaaaaagagtatgaaaagaataataccacaacacttatggcctgtcttggaggccttctggggattattggtgtgatatgtcttatcagctgcctctctccagaaatgaac

SEQ ID NO: 590307 - DNA, 120 bp, Artificial Sequence
  ENSG00000173114_23 (sequence is synthesized)
tgtgatggtggacacagctatgtgaggaattacttacagaaaccaacctttgcattaggtgagctttatcctcctctgataaatctctgggaagcaggaaaagaaaaaagtacatcactg

SEQ ID NO: 590308 - DNA, 120 bp, Artificial Sequence
  ENSG00000173114_24 (sequence is synthesized)
aaagtaaaagcaactgttataggtttaccaacaaatatgtcctaaaaaccaccaaggaaacctactccaaaaatgaacaaaaaaaaaaaaagcgaaagactgcagttgtgctaaaaacaa

SEQ ID NO: 590309 - DNA, 120 bp, Artificial Sequence
  ENSG00000173114_25 (sequence is synthesized)
aacaaaacaaacaaacaaacaaaaaagtaaaaaaagattactttcgagagagaagtttaagcttcaccaatgctgctcctgaccaatggaaatatgtacaacttcagcattttaagtaac

SEQ ID NO: 590310 - DNA, 120 bp, Artificial Sequence
  ENSG00000173114_26 (sequence is synthesized)
tggcttcaaggggtactgtggcaaccaaataaaataactccattttctaaaactttcatgtaacttttatgtctggactacagttcaagtggacaaaaacatttctgtattttttttaag

SEQ ID NO: 590311 - DNA, 120 bp, Artificial Sequence
  ENSG00000173114_27 (sequence is synthesized)
taaataagagtagttgaactgagcaatacctcctcctgtgttgtattacacatattagccacgagtttttgcagtgaccagataaacttgaattgacacgtggtgtaataaaatggacaa

SEQ ID NO: 590312 - DNA, 120 bp, Artificial Sequence
  ENSG00000173114_28 (sequence is synthesized)
attctgtagagtagacacagtgagtatgtggacctcttttataaggaaaaatacattttggattaaaatcaattgcttctgtcttgttttgtttctaaataaagaataatttctgggaaa

SEQ ID NO: 590313 - DNA, 120 bp, Artificial Sequence
  ENSG00000173114_29 (sequence is synthesized)
tttcagccaaccagactggagcagctgcgagtgctacatcttggctgtctgaagcgattggctcctctctggggagtggagggtgttcagttattaatgaccgctgagcaggcagcacca

SEQ ID NO: 590314 - DNA, 120 bp, Artificial Sequence
  ENSG00000173114_30 (sequence is synthesized)
tgaggaacaatggaagaggcactgtttcccaactggtacaaaacaggacttcaggaacagcagaatgtgttctccagggattaagccccctaacgtgaagcttgggactcacaacactta

SEQ ID NO: 590315 - DNA, 120 bp, Artificial Sequence
  ENSG00000173120_0 (sequence is synthesized)
atgtgagagtctgacgggttcaaaatggcggcggctgcttcagcggctcctcctgtgtgagggaaacaacacccctccccggcagcggcggcggcggcggcggctctcggagcaccttcc

SEQ ID NO: 590316 - DNA, 120 bp, Artificial Sequence
  ENSG00000173120_1 (sequence is synthesized)
cagcggctgggcccgtggccgctctgtctttcctgggcaggggacgctccgggaggaggggcaacgccagggggcccatcccccggaatccctcttctgcgactggggagtagccggggg

SEQ ID NO: 590317 - DNA, 120 bp, Artificial Sequence
  ENSG00000173120_2 (sequence is synthesized)
tcttctgcgactggggagtagccggggggctcgtcccgcagcgcggagccagacctgagggggagacgcgaggggagccagggcccccatcccggcgcgccgcgccgctcccgccctgtc

SEQ ID NO: 590318 - DNA, 80 bp, Artificial Sequence
  ENSG00000173120_3 (sequence is synthesized)
ctcagctgatcggccgctgctcccgcaggcgaccagcccctgctggccgagggcacggcgaggagggcgctccctgcggc

SEQ ID NO: 590319 - DNA, 120 bp, Artificial Sequence
  ENSG00000173120_4 (sequence is synthesized)
ctcgggcccgggctgctgaccgctggcctgggggaggcgggggcgccccgggctcggcgccgaggggtcgcgctcctctctcctgacgcctccgactcccggtctccaaagccagaagag

SEQ ID NO: 590320 - DNA, 120 bp, Artificial Sequence
  ENSG00000173120_5 (sequence is synthesized)
tccaaagccagaagagaaggtttgattcagcaactgtttgctcccttttcctggtcgctctgaccctctctggatactgggttgatccacggaaaaaccgaagacgacgtttgggattta

SEQ ID NO: 590321 - DNA, 120 bp, Artificial Sequence
  ENSG00000173120_6 (sequence is synthesized)
attattcctctcagctttggaatcttttacttctcacttggacaagaactcaagagcagaatctccgtgttgcaatctggttcctaaggaggaagaggaaggcagccctggagtggtttc

SEQ ID NO: 590322 - DNA, 120 bp, Artificial Sequence
  ENSG00000173120_7 (sequence is synthesized)
tttacagtaatttcaacagaagagtgagagatggaacccgaagaagaaaggattcgttacagccagagattgcgtggtaccatgcgacgacgctatgaagatgatggcatttcagatgat

SEQ ID NO: 590323 - DNA, 120 bp, Artificial Sequence
  ENSG00000173120_8 (sequence is synthesized)
gaaattgaaggaaaaagaacttttgacttggaagagaaactgcacaccaacaaatataatgccaattttgttacttttatggaaggaaaagattttaatgtagagtatattcagcggggt

SEQ ID NO: 590324 - DNA, 120 bp, Artificial Sequence
  ENSG00000173120_9 (sequence is synthesized)
ggcttgagagatcctctgattttcaagaattctgatggactcggaataaaaatgccggatccagacttcactgtgaatgatgtcaaaatgtgtgtggggagtcgtcgcatggtggatgtc

SEQ ID NO: 590325 - DNA, 120 bp, Artificial Sequence
  ENSG00000173120_10 (sequence is synthesized)
atggacgtgaacacacagaaaggcattgaaatgaccatggctcagtggacacgctactatgagaccccagaggaggagcgagagaaactctataatgtcatcagcctcgagtttagccac

SEQ ID NO: 590326 - DNA, 120 bp, Artificial Sequence
  ENSG00000173120_11 (sequence is synthesized)
accaggctggagaatatggtgcagaggccctccacggtggatttcattgactgggtagacaacatgtggccaaggcacttgaaggaaagccagactgaatcaacaaatgccatcttggag

SEQ ID NO: 590327 - DNA, 120 bp, Artificial Sequence
  ENSG00000173120_12 (sequence is synthesized)
atgcagtaccctaaagtgcagaagtactgtctaatgagtgttcgaggctgctatactgacttccatgtggactttggtggtacctctgtttggtatcacatccatcaagggggaaaggtc

SEQ ID NO: 590328 - DNA, 120 bp, Artificial Sequence
  ENSG00000173120_13 (sequence is synthesized)
ttctggctcatcccccctacagcccacaacctggagctgtacgagaattggctgctgtcagggaaacagggagacatctttctgggtgaccgggtatcagattgtcagcgcattgagctc

SEQ ID NO: 590329 - DNA, 120 bp, Artificial Sequence
  ENSG00000173120_14 (sequence is synthesized)
aagcagggctataccttcgtcattccctcaggctggattcatgctgtgtatactcctacagacacattagtgtttgggggcaattttttgcatagcttcaacatccctatgcagttaaaa

SEQ ID NO: 590330 - DNA, 120 bp, Artificial Sequence
  ENSG00000173120_15 (sequence is synthesized)
atatacaacattgaagatcggacacgggttccaaataagtttcgctatccattctactatgagatgtgttggtatgtgttggagcgctatgtgtactgcataaccaaccgttcccaccta

SEQ ID NO: 590331 - DNA, 120 bp, Artificial Sequence
  ENSG00000173120_16 (sequence is synthesized)
actaaggaatttcagaaagagtccctcagcatggatttggagttaaatgggttggagtctgggaatggggatgaggaagcagtggatcgagaaccccgacgcttgagcagcaggcgttct

SEQ ID NO: 590332 - DNA, 120 bp, Artificial Sequence
  ENSG00000173120_17 (sequence is synthesized)
gtcctcactagccctgtagcgaatggagtcaacctggattatgatggactgggcaaaacctgccgaagtcttccaagtctgaagaaaactttggctggggactcatcttctgactgtagc

SEQ ID NO: 590333 - DNA, 120 bp, Artificial Sequence
  ENSG00000173120_18 (sequence is synthesized)
cggggctcccacaatggacaagtgtgggatccccagtgtgctccccgaaaggacaggcaagtgcatctgacccattttgagcttgaaggccttcgctgccttgtagataagttggagtct

SEQ ID NO: 590334 - DNA, 120 bp, Artificial Sequence
  ENSG00000173120_19 (sequence is synthesized)
ctgccactgcacaagaaatgtgtccccacagggatagaagatgaagatgctctcattgctgatgtaaagattttgctggaggagcttgccaacagcgatcccaagttagccctcactgga

SEQ ID NO: 590335 - DNA, 120 bp, Artificial Sequence
  ENSG00000173120_20 (sequence is synthesized)
gttcctatagtacagtggccaaaaagggataagcttaaattccccactcggccaaaggtgcgggttcctaccatccccattacgaagcctcacactatgaaaccagctccacggttaaca

SEQ ID NO: 590336 - DNA, 120 bp, Artificial Sequence
  ENSG00000173120_21 (sequence is synthesized)
cctgtgaggccagctgctgcctccccgattgtgtcaggagccagacggagacgagtgcgatgtcgaaaatgcaaagcctgtgtgcaaggagagtgtggtgtttgccactactgcagagac

SEQ ID NO: 590337 - DNA, 120 bp, Artificial Sequence
  ENSG00000173120_22 (sequence is synthesized)
atgaagaagtttggggggcctggacgcatgaagcagtcctgtgtcctccgacagtgcttggcacccagactgcctcactcagtcacatgttccctctgtggagaggtggatcagaatgaa

SEQ ID NO: 590338 - DNA, 120 bp, Artificial Sequence
  ENSG00000173120_23 (sequence is synthesized)
gagacacaagactttgagaagaaactcatggaatgctgtatctgcaatgagattgttcatcctggctgcctccagatggacggagaggggttgcttaacgaagaattgccaaattgctgg

SEQ ID NO: 590339 - DNA, 120 bp, Artificial Sequence
  ENSG00000173120_24 (sequence is synthesized)
gaatgtccaaagtgctaccaggaggacagctcggagaaagcccagaagcggaaaatggaagagagtgacgaagaagctgtgcaagccaaagtcctgcggcccctgcggagctgcgatgag

SEQ ID NO: 590340 - DNA, 120 bp, Artificial Sequence
  ENSG00000173120_25 (sequence is synthesized)
cctctcacgcccccgcctcattcacccacttccatgctgcagctcatccatgacccggtttccccccggggtatggtgactcggtcatcccctggggctggccccagcgaccaccacagt

SEQ ID NO: 590341 - DNA, 120 bp, Artificial Sequence
  ENSG00000173120_26 (sequence is synthesized)
gccagccgcgatgagcgcttcaaacggcggcagttgctgcggctgcaggccacagagcgcaccatggtacgggaaaaggagaacaatcccagcggcaaaaaggagctgtctgaagttgag

SEQ ID NO: 590342 - DNA, 120 bp, Artificial Sequence
  ENSG00000173120_27 (sequence is synthesized)
aaagccaagatccggggatcgtacctcactgtcacgctacagaggcccaccaaagagctccacgggacatccattgtgcccaagctgcaggccatcacggcctcctctgccaaccttcgc

SEQ ID NO: 590343 - DNA, 120 bp, Artificial Sequence
  ENSG00000173120_28 (sequence is synthesized)
cctcctctgccaaccttcgccattccccccgtgtgctagtgcagcactgcccagcccgaaccccccagcgtggggatgaggaggggctggggggagaggaggaggaagaggaggaggagg

SEQ ID NO: 590344 - DNA, 120 bp, Artificial Sequence
  ENSG00000173120_29 (sequence is synthesized)
gaggaggggggtgcagccaggctgaatggccggggcagttgggctcaggatggagacgaaagctggatgcagcgggaggtctggatgtctgtcttccgctacctcagccgcagagaactt

SEQ ID NO: 590345 - DNA, 120 bp, Artificial Sequence
  ENSG00000173120_30 (sequence is synthesized)
attgacttgagtaggtgtaaggccattgtgccccaggccctcagtggcatcatcaagaggcagccagtcagccttgacctcagttggaccaacatctctaaaaagcaactgacatggctc

SEQ ID NO: 590346 - DNA, 120 bp, Artificial Sequence
  ENSG00000173120_31 (sequence is synthesized)
gtcaataggctgccaggactgaaagacctcctcctagcaggctgctcctggtctgcagtctctgccctcagcacctccagctgcccccttctcaggacccttgatcttcggtgggcagta

SEQ ID NO: 590347 - DNA, 120 bp, Artificial Sequence
  ENSG00000173120_32 (sequence is synthesized)
ggaatcaaggaccctcaaattcgggacttgcttactccaccggctgataaaccaggtcaggacaatcgcagcaagctccggaacatgaccgacttccggctggcaggccttgacatcaca

SEQ ID NO: 590348 - DNA, 120 bp, Artificial Sequence
  ENSG00000173120_33 (sequence is synthesized)
gatgccacgcttcgcctcataattcgccacatgcccctcctgtctcgactcgacctcagtcactgcagccaccttacagatcagtcctccaatctactcactgctgtcgggtcttccact

SEQ ID NO: 590349 - DNA, 120 bp, Artificial Sequence
  ENSG00000173120_34 (sequence is synthesized)
cgctactctctcacagagctcaatatggcaggttgcaataaattgacagaccagaccctgatctacctacggcgcattgccaacgtcaccttgatcgaccttcgaggatgcaagcagatc

SEQ ID NO: 590350 - DNA, 120 bp, Artificial Sequence
  ENSG00000173120_35 (sequence is synthesized)
actcgaaaagcctgcgagcacttcatctcagacttgtccatcaacagcctctactgcctgtctgacgagaagctgatacagaagatcagctaagacacacccagcccagattcaacagga

SEQ ID NO: 590351 - DNA, 120 bp, Artificial Sequence
  ENSG00000173120_36 (sequence is synthesized)
aaccgatcttcccctgactccccaccgaggagagcctctcctcgaccctgcacgggctctgaggccagcgtcacactccctctctgctctcctgtcccttgagcccttcctctacaggtg

SEQ ID NO: 590352 - DNA, 120 bp, Artificial Sequence
  ENSG00000173120_37 (sequence is synthesized)
gggcagagagggtggtggacaccaggcttatctgcctgctcctctccctcctaaggaaaagggagtagcagattgatctgaggggaaagcacaggctgtgctgtcgaggcgcctgctcgc

SEQ ID NO: 590353 - DNA, 120 bp, Artificial Sequence
  ENSG00000173120_38 (sequence is synthesized)
ttactcgcctgccaggaggccgggctctcagtttggggtgtttgtgcaaccttcatctgcactgggccctgtgcccctcctccccatccatggtccccagcagtgcctggttctgagcaa

SEQ ID NO: 590354 - DNA, 120 bp, Artificial Sequence
  ENSG00000173120_39 (sequence is synthesized)
actcccagggaagaaaacggccctgtctccatggccaggttcttgtggtgtccagtgcgcgtctctcctccatcacactctcccggcttgcgcaggaggggccagcagccccaggagtcc

SEQ ID NO: 590355 - DNA, 120 bp, Artificial Sequence
  ENSG00000173120_40 (sequence is synthesized)
cagacccgtgccgatcacactggtgctgttgagatctcccaaacctcacgtccttaactgtgctctccctcctttcctctcccttgagcttggttctgcccagcactcgtgcttgttcac

SEQ ID NO: 590356 - DNA, 120 bp, Artificial Sequence
  ENSG00000173120_41 (sequence is synthesized)
ataattaggtttcccaccccagcctacccgacttacttgctagtctctatgaggtccttattgcacttattggggttgaagctcttcagaggagctggaactgtctaccccagggacaca

SEQ ID NO: 590357 - DNA, 120 bp, Artificial Sequence
  ENSG00000173120_42 (sequence is synthesized)
cccatttcgttgctacccaagtggattctgagacaggcaccatctccttgttccccctctctcttttgcctcccactgactgcccttttccatgtgtcttcattctgcctgaagaaggct

SEQ ID NO: 590358 - DNA, 120 bp, Artificial Sequence
  ENSG00000173120_43 (sequence is synthesized)
ttcccaggatgcacgtcctcagagggagcagcctatctcccccaagctggaggcggcagaggactgggccaagccccaacctgcctcccagccaggctcctccaggcctctggtttagcg

SEQ ID NO: 590359 - DNA, 120 bp, Artificial Sequence
  ENSG00000173120_44 (sequence is synthesized)
gagccccctgagcccaggcctgtgtctagccccagtggctcactgaactttcagggcagtcagggggtcctgcttagaagccagtcaccagccctctgcctgcagccatggaagggggtg

SEQ ID NO: 590360 - DNA, 120 bp, Artificial Sequence
  ENSG00000173120_45 (sequence is synthesized)
tgcacgtgcctctgtgtgtgtggctgagtgtattctgcgcgtgtgtgtggagggagggagggaggggagcatggtgtctcccgctccaccgccctttgttgagccccatcagctgccccc

SEQ ID NO: 590361 - DNA, 120 bp, Artificial Sequence
  ENSG00000173120_46 (sequence is synthesized)
ttttactttgcattgaacggcctgtccaaagatcctctctctagggcagcagagagctttttgcactttaaaaaaaaaaagaaagaaagaaaggtcggaatttcttttgggtcaatattt

SEQ ID NO: 590362 - DNA, 120 bp, Artificial Sequence
  ENSG00000173120_47 (sequence is synthesized)
ttaagtgtgtgaggagatgctcagtagcagcagcctatggcaagagcttataaatgattgatgcaaatttgcactctgctccccctctgtaaggatactgatagcacaacctcttccccc

SEQ ID NO: 590363 - DNA, 120 bp, Artificial Sequence
  ENSG00000173120_48 (sequence is synthesized)
caccccgccccgccttttggtcgtccatccctgtccctttctggccctcttcctgtagcccagtctcaggctttcctcttcctgaagccctacagagttagggaatggagcccaggcacc

SEQ ID NO: 590364 - DNA, 120 bp, Artificial Sequence
  ENSG00000173120_49 (sequence is synthesized)
aggggtctaaagtgtgagccactgagaagagagacgccaactgcacccttgccacttccaaagcaatagaggcagagtggtcccctctttgccacctaggccagttttgaccctggcatt

SEQ ID NO: 590365 - DNA, 120 bp, Artificial Sequence
  ENSG00000173120_50 (sequence is synthesized)
aactggccttagaagaaactggatcctggtagggggtggcattttgtttgtttcttccaatctgctgaatcttttgactgcaccttacaaacagcagtctgctcccatgaccctctgccc

SEQ ID NO: 590366 - DNA, 120 bp, Artificial Sequence
  ENSG00000173120_51 (sequence is synthesized)
acttccattggtctccaggccccaataatctggggttgaaactttgaggaaatgccagtgacttattccagagtgcctcagttaggggaacttctctgtaaagaaccctgggtattgagc

SEQ ID NO: 590367 - DNA, 120 bp, Artificial Sequence
  ENSG00000173120_52 (sequence is synthesized)
aaaaaccttattatcgttaatgacctataattggaagcttcctgcctttttctttggttgctcctgtggaaaatactgaaaagattactttgttttattttgttgtctttttataaaagg

SEQ ID NO: 590368 - DNA, 120 bp, Artificial Sequence
  ENSG00000173120_53 (sequence is synthesized)
ggaggtggagagaccccttcagagcagggattgtgccgggagagtgcctctgactttgggacatttcatccacagaaatttccaagccaatggtttcttttgggttttggtttttatgtt

SEQ ID NO: 590369 - DNA, 120 bp, Artificial Sequence
  ENSG00000173120_54 (sequence is synthesized)
tgttttttggggtttggaaaaacatgcatttttaccgtgcacgtaaattggtcagcagaaaagggagcccagaaaaggcagcagatggaccatgcccttgctgggttttccttttctttg

SEQ ID NO: 590370 - DNA, 120 bp, Artificial Sequence
  ENSG00000173120_55 (sequence is synthesized)
ggactgtgaggggaaatggtttttagaggtgagggttggtccatgtggaggaaagaagtgtctctgttgggggacagaggaacctggggagtccatcgcatgtcctacaatctgctctta

SEQ ID NO: 590371 - DNA, 120 bp, Artificial Sequence
  ENSG00000173120_56 (sequence is synthesized)
gacacggccttgccaggagagcctgccctcagactgcaggaccagaacccctgcctccatctttccaagcaccggggcgaaaaaccacaaaggaaaggaagaaaatttatatatatataa

SEQ ID NO: 590372 - DNA, 120 bp, Artificial Sequence
  ENSG00000173120_57 (sequence is synthesized)
tataaaatcacttggtgattaaaaaaataactgctccataaataaaactcctaaagtcacttatgtttaaagggtttggttgtgttttttgtttttcggagaaatattgtaaatatatat

SEQ ID NO: 590373 - DNA, 120 bp, Artificial Sequence
  ENSG00000173120_58 (sequence is synthesized)
ttttttgttgctgatttagagtcaatctccaatgttgtgctaaaaagtttaaattaaatgtaagcattaaggggataagtcttatgctatctcagttgacacattgaggttattttgggc

SEQ ID NO: 590374 - DNA, 120 bp, Artificial Sequence
  ENSG00000173120_59 (sequence is synthesized)
cagagaaggaggaagctagttggactttgttttgttttccaaaagttctccactattggttttagagagagcaaggacatctttcctctgacacgtgggaatgggtgatatttgtgtaat

SEQ ID NO: 590375 - DNA, 120 bp, Artificial Sequence
  ENSG00000173120_60 (sequence is synthesized)
aaaatttttaaaagacaaaaaaagaaatagcctccaatgggaaatattttaatttaggttttgtttttgtttgggggtttttgtttttttaaaaaaataaaaaggctttaaaaacaaaaa

SEQ ID NO: 590376 - DNA, 120 bp, Artificial Sequence
  ENSG00000173120_61 (sequence is synthesized)
tggtttctttacagtaatttcaacagaagagtgagagatggaacccgaagaagaaaggattcgttacagccagagattgtagagacggggttggctggtcttgaactcgtgacctcaggt

SEQ ID NO: 590377 - DNA, 120 bp, Artificial Sequence
  ENSG00000173120_62 (sequence is synthesized)
ccgtgagccactgcatctggcctgtctgttcatttcataaacatctgagagggtctttgctacaggacttcaggagcactagcatcgatggtggcagatgaaaaagcagatttttttccc

SEQ ID NO: 590378 - DNA, 120 bp, Artificial Sequence
  ENSG00000173120_63 (sequence is synthesized)
ctgaagctctttaataatggcaaaagttaaaaagtgttttctctgtagtcctgaatttactgaatgtattcccttcctgaataaattgactgttcccttagtgtagggctataacctggt

SEQ ID NO: 590379 - DNA, 120 bp, Artificial Sequence
  ENSG00000173120_64 (sequence is synthesized)
tctggccatagtgggccaagccccaggctaggtatgctaccatgtaatcttctaccctatccagtcttaaagcaacctgatatatttgacctcactgctttctctttccagcttaaattc

SEQ ID NO: 590380 - DNA, 120 bp, Artificial Sequence
  ENSG00000173120_65 (sequence is synthesized)
agagacttcagagttggaaagaaaaggtttatactctctttttggctttattttgtaccttttttccccaggtttagatagaaggtatctagtactaaaaatccgatttaatctttaggc

SEQ ID NO: 590381 - DNA, 120 bp, Artificial Sequence
  ENSG00000173120_66 (sequence is synthesized)
tttacctaattttcaaacaagagattagcatttgaagggcaaatcattgctttctttcccctcttcaggtagattagaaaggaccggggaggccaagtataggccaactgaaaataaact

SEQ ID NO: 590382 - DNA, 120 bp, Artificial Sequence
  ENSG00000173120_67 (sequence is synthesized)
ttctctccaccctgcctccatgcttccaggtgtttagtagagaattataggacccaaatctcccatcttcagtttaagggaaactgaaatgataaagatctgagtcagttctcttggatt

SEQ ID NO: 590383 - DNA, 120 bp, Artificial Sequence
  ENSG00000173120_68 (sequence is synthesized)
tgaaggataagaaagatctactgccttggaccttctagggtttaccacatagtcaagttctataggctgggaaaattgcttgcctttcttctacctggtggtcttaattttgtacctgtt

SEQ ID NO: 590384 - DNA, 120 bp, Artificial Sequence
  ENSG00000173120_69 (sequence is synthesized)
gttatgatagatgttacaagagattcactgatggtttatcaaaacttccatttttctttcagttaaaatgcagtgttgacattttgggaacacacaaaattttaaatttaattttttttt

SEQ ID NO: 590385 - DNA, 120 bp, Artificial Sequence
  ENSG00000173120_70 (sequence is synthesized)
ttttttttaaggcagaatcttgttctgttttccaggctagagtgcagtggcgtgatcatggatgattgcagcctcaacctcccaggctcaagcatcttcctgcctcagcctcccaagtag

SEQ ID NO: 590386 - DNA, 120 bp, Artificial Sequence
  ENSG00000173120_71 (sequence is synthesized)
atatacacttcagcaggaaccatgccattttaatacagatgaaggggctatagactgttgcttgctatgggtccctaacaactgttgtgttctcaaacactccagaataaatcagggtaa

SEQ ID NO: 590387 - DNA, 120 bp, Artificial Sequence
  ENSG00000173120_72 (sequence is synthesized)
agtggtcaagttatatactatcaacatgtaggtttgcaaagcgtctagttgttgtagagttcaaggcaattttttgcctattctgtgaggcaaaaaatgataaggtgtgatccctgtaca

SEQ ID NO: 590388 - DNA, 120 bp, Artificial Sequence
  ENSG00000173120_73 (sequence is synthesized)
cttgtagaagaacgagcctccaggtactctgcttttcccagaagccataagcagcctgtgatgggagctccactgatcaagttaatgaaggcgagttctcttcccttctatcacaggtgc

SEQ ID NO: 590389 - DNA, 120 bp, Artificial Sequence
  ENSG00000173120_74 (sequence is synthesized)
ctaaagtgcagaagtaagtgatgcgccctgcatcttcctccgtgtgctgtgggagaccaaagcaatagcaaggattggcttctcccttacgagctttgctctgtgtcttgaatgattaaa

SEQ ID NO: 590390 - DNA, 120 bp, Artificial Sequence
  ENSG00000173120_75 (sequence is synthesized)
aagatgaattatttaaagatgagactttacagttccacaaggaagagtgtatgtgagcataccatagcacacaaccacacagttaaaggaaaaaaaacttacattttagtcaatacggta

SEQ ID NO: 590391 - DNA, 120 bp, Artificial Sequence
  ENSG00000173120_76 (sequence is synthesized)
cagccctggagtggtttctttacagtaatttcaacagaagagtgagagatggaacccgaagaagaaaggattcgttacagccagagattggttcttggggtttttctctgtctgtgagta

SEQ ID NO: 590392 - DNA, 120 bp, Artificial Sequence
  ENSG00000173120_77 (sequence is synthesized)
cttggtaaaaagttaaaccctaaagataaaaggcagcaaatagtgaccaaacgaatgtttttggcaaatacattggtgaaggcctccttcagcgtggtaccatgcgacgacgctatgaag

SEQ ID NO: 590393 - DNA, 120 bp, Artificial Sequence
  ENSG00000173120_78 (sequence is synthesized)
gttgcaaagcatttctgggagctgcatgtgggtgacgcagcagcattgttcgcaggcacaggaagccgcggctgagctgaagggctcgagaaggagcccagagcgctgcacgctgctccc

SEQ ID NO: 590394 - DNA, 120 bp, Artificial Sequence
  ENSG00000173120_79 (sequence is synthesized)
tctgggtagtctgaagggtcagagctggactgccctgccctatgtgctctgggagattccagaatattcaagtaaatccggattttcccagaggcagaatatctaactccttcaggagaa

SEQ ID NO: 590395 - DNA, 120 bp, Artificial Sequence
  ENSG00000173120_80 (sequence is synthesized)
cttccagtacagaaaacaaaacaaagacgctggggaaacttcaccaagagcctcggcagctccagagcgacgggaaacgaaagattttgctggaggagcttgccaacagcgatcccaagt

SEQ ID NO: 590396 - DNA, 90 bp, Artificial Sequence
  ENSG00000173120_81 (sequence is synthesized)
gtaccaaaaatacaaaaattaagccaggcgtggtggcatgcgcctataatcccagctacttgcaaggctggggcaggagaatcacttgaa

SEQ ID NO: 590397 - DNA, 120 bp, Artificial Sequence
  ENSG00000173120_82 (sequence is synthesized)
aaaggtcagtattgttttggttccagcttacagtcctttgatgtgggaagccatagactctgagcattgggggtttagcctttatccagctaaaatattgcctgttgatgttatctatct

SEQ ID NO: 590398 - DNA, 120 bp, Artificial Sequence
  ENSG00000173120_83 (sequence is synthesized)
attttctcttgttatacaatgccatttgcatgcacttatcccccagtcctcccaccctgtgagtcattctctcctatattagaagtaatctttttattagggcaggagtattgttggatt

SEQ ID NO: 590399 - DNA, 120 bp, Artificial Sequence
  ENSG00000173124_0 (sequence is synthesized)
aactaaactataagaggtaagcagttctcagaggagacagaaggcaacagctctaccatcctccaaacatctgaagccccccatagaaactcctcttggaattggtggttccctgtctga

SEQ ID NO: 590400 - DNA, 120 bp, Artificial Sequence
  ENSG00000173124_1 (sequence is synthesized)
cccaaatgctaggccgatttcaacccttctccttggtccggagtttcagactgggatttgaagcctgctgctatccaaaccaaaaatgtgctactcagaccatcagaccccctgactcca

SEQ ID NO: 590401 - DNA, 120 bp, Artificial Sequence
  ENSG00000173124_2 (sequence is synthesized)
ggtgcctagtccaagcagtttctcagaactttaattttgcaaaggatgtgttggatcagtggtcccagctggaaaaggacggactcagagggccttaccccgccctctggaaggttagtg

SEQ ID NO: 590402 - DNA, 120 bp, Artificial Sequence
  ENSG00000173124_3 (sequence is synthesized)
ccaaaggagaagaggacaaatggagctttgaaaggatgactcaactctccaagaaggccgccagcatcctctcagacacctgtgcccttagccatggagaccggctgatgataatcttgc

SEQ ID NO: 590403 - DNA, 120 bp, Artificial Sequence
  ENSG00000173124_4 (sequence is synthesized)
ccccaacacctgaagcctactggatctgcctggcctgtgtgcgcttgggaatcacctttgtgcctgggagcccccagctgactgccaagaaaattcgctatcaattacgcatgtctaagg

SEQ ID NO: 590404 - DNA, 120 bp, Artificial Sequence
  ENSG00000173124_5 (sequence is synthesized)
cccagtgcattgtggctaatgaagctatggccccagttgtaaactctgccgtgtccgactgccccaccttgaaaaccaagctcctggtgtcagataagagctatgatgggtggttggatt

SEQ ID NO: 590405 - DNA, 120 bp, Artificial Sequence
  ENSG00000173124_6 (sequence is synthesized)
tcaagaagttgattcaagttgcccctccaaagcagacctacatgaggaccaaaagccaagatccaatggccatattcttcaccaagggtacaacaggagctcccaaaatggtcgagtatt

SEQ ID NO: 590406 - DNA, 120 bp, Artificial Sequence
  ENSG00000173124_7 (sequence is synthesized)
gcttccagacggtggatggatctccagccaacagatgtcttgtggagtctgggtgatgcctttggtggatctttatccctgagcgctgtcttgggaacttggttccaaggagcctgtgtg

SEQ ID NO: 590407 - DNA, 120 bp, Artificial Sequence
  ENSG00000173124_8 (sequence is synthesized)
tttctgtgtcacatgccaaccttctgccctgagactgttctaaatgtcctgtccagatttcccatcaccactctatctgcaaatccagagatgtaccaggaactgcttcagcacaagtgt

SEQ ID NO: 590408 - DNA, 120 bp, Artificial Sequence
  ENSG00000173124_9 (sequence is synthesized)
ttcaccagctacagattcaagagtctgaagcagtgtgtggctgcaggaggacccatcagccctggggtgattgaggactggaaacgcatcactaagttggacatctatgaaggctatggg

SEQ ID NO: 590409 - DNA, 120 bp, Artificial Sequence
  ENSG00000173124_10 (sequence is synthesized)
cagacggaaactggtctactctgtgccacttccaaaacaataaaattgaagccaagctctctggggaagccattgccaccttatattgtccagattgtggatgaaaactcaaatctcctg

SEQ ID NO: 590410 - DNA, 120 bp, Artificial Sequence
  ENSG00000173124_11 (sequence is synthesized)
cctccaggggaagaaggaaatattgcaatccgcataaaactaaaccaacctgcttctctgtactgtccacacatggtgagctgggaggaatatgcttcagcaagaggccacatgctttac

SEQ ID NO: 590411 - DNA, 120 bp, Artificial Sequence
  ENSG00000173124_12 (sequence is synthesized)
ctcacaggtgacagagggatcatggatgaagacggctacttctggtggtctggtagagttgatgatgttgccaatgcattgggtcagagattgtgaatgctttggttattgctattgagc

SEQ ID NO: 590412 - DNA, 120 bp, Artificial Sequence
  ENSG00000173124_13 (sequence is synthesized)
ctggggctgtgggagtttgaagaagactctggactgcttccaatacgtaggaattatatttctaaagtttagaaaatgcaaacaaccaaaaataaaaaaataaaactcatccataatctc

SEQ ID NO: 590413 - DNA, 120 bp, Artificial Sequence
  ENSG00000173124_14 (sequence is synthesized)
gccattattgttgagtactttatgatttgccaaatacttttgtcccaatttttaattttgcaaatttttgagtctccaaaaatgttaaatagtagcactcacctacattcacttcttatt

SEQ ID NO: 590414 - DNA, 120 bp, Artificial Sequence
  ENSG00000173124_15 (sequence is synthesized)
aagattttgccccatttacttcatatttgcacatttttgatgagacatttgggagtaaatgcagacattatgacactttgtccttaaatatttcagcagcatcctcctaataaggacttt

SEQ ID NO: 590415 - DNA, 120 bp, Artificial Sequence
  ENSG00000173124_16 (sequence is synthesized)
cttcttaaacatcagcaccatcacatctatgaaaattaaaaataattatttaatactatctaatatctagccaatacttagactttctcaattgtactcagatgtgttttataccttttg

SEQ ID NO: 590416 - DNA, 120 bp, Artificial Sequence
  ENSG00000173124_17 (sequence is synthesized)
taaatccagaattcaatcaaagttcatgcatttatttggttctcatatctctttagttgtttttatctataactgttccaccaccatgtttttcgtgacgtggacattttgaagaataga

SEQ ID NO: 590417 - DNA, 120 bp, Artificial Sequence
  ENSG00000173124_18 (sequence is synthesized)
ggacggttgtgttaaaaaatgcctcactttctaggcttacatattgtttctttataatgagatccaggataaacatctttctcaagactattatgtagatgatgtatatttcttatttgc

SEQ ID NO: 590418 - DNA, 120 bp, Artificial Sequence
  ENSG00000173124_19 (sequence is synthesized)
ttatggggggaaacattaggttgtctcattttggatgctgatcattttgatcttttgattaaggaggtgagtgccatttccattgtaaaggtacattttcctctttgtaattagtaataa

SEQ ID NO: 590419 - DNA, 120 bp, Artificial Sequence
  ENSG00000173124_20 (sequence is synthesized)
tctgccgtgtaacaatttgagactctgtaaatatcctattctccaattaactttcacccaatcattttagcatccatagatgattcttttctttttggaaacaattattaaaataaagag

SEQ ID NO: 590420 - DNA, 74 bp, Artificial Sequence
  ENSG00000173124_21 (sequence is synthesized)
ttattaaaataaagaagctaagatggacagatcacttgagcccaggggttcaagactagcctgggcaacatggc

SEQ ID NO: 590421 - DNA, 120 bp, Artificial Sequence
  ENSG00000173137_0 (sequence is synthesized)
gagacgctaagcggcgccgggcgggagaagagcggagcagtggtcggagatgtggcgaccggtgcagctctgtcatttccactctgctctgctgcacagcaggcagaagccctggccgtc

SEQ ID NO: 590422 - DNA, 120 bp, Artificial Sequence
  ENSG00000173137_1 (sequence is synthesized)
ccctgctgtgttcttcaggagaaacgtcaggggccttcctccaaggttctccagccccacacccctgtggaggaaggtgctctccaccgcggtagtgggggcgcccctgctcctcggagc

SEQ ID NO: 590423 - DNA, 120 bp, Artificial Sequence
  ENSG00000173137_2 (sequence is synthesized)
ccgctatgtcatggcagaggcacgggagaagaggaggatgcggctcgtggtggatggcatggggcgctttggcaggtctctgaaggtcggcctgcagatctccctggactactggtggtg

SEQ ID NO: 590424 - DNA, 120 bp, Artificial Sequence
  ENSG00000173137_3 (sequence is synthesized)
caccaatgttgtccttcgaggggtggaagagaacagcccaggctacttggaggtgatgtctgcgtgtcaccagcgggcggctgatgccctggtggcaggggccatcagcaacgggggcct

SEQ ID NO: 590425 - DNA, 120 bp, Artificial Sequence
  ENSG00000173137_4 (sequence is synthesized)
ctacgtgaagctgggccaggggctgtgctccttcaaccacctgcttccccccgagtatacccggaccctgcgcgtgctagaggacagggccctcaagcggggcttccaggaggtggatga

SEQ ID NO: 590426 - DNA, 120 bp, Artificial Sequence
  ENSG00000173137_5 (sequence is synthesized)
gttgttccttgaggacttccaggccctcccccacgagctcttccaggagtttgactaccagccaattgctgccgccagcctggcacaggtgcacagagccaagctgcacgatggcaccag

SEQ ID NO: 590427 - DNA, 120 bp, Artificial Sequence
  ENSG00000173137_6 (sequence is synthesized)
cgtggctgtgaaggtgcagtacatcgacctgcgggaccgctttgatggggacatccacaccctggagctcctgctgcggctcgttgaggtcatgcaccccagctttggcttcagctgggt

SEQ ID NO: 590428 - DNA, 120 bp, Artificial Sequence
  ENSG00000173137_7 (sequence is synthesized)
cctccaggacctgaaggggaccctggcccaggagctggacttcgagaatgagggccgcaacgcagagcgctgtgcgcgggagctggcgcacttcccctacgtcgtggtgccccgcgtgca

SEQ ID NO: 590429 - DNA, 120 bp, Artificial Sequence
  ENSG00000173137_8 (sequence is synthesized)
tgcgccggctgcaaggtcaacgatgtggaggccatcaggagccaggggctggcagtgcatgacatagcagaaaagctcatcaaggcctttgctgagcagatattttacaccggcttcatc

SEQ ID NO: 590430 - DNA, 120 bp, Artificial Sequence
  ENSG00000173137_9 (sequence is synthesized)
cactcggacccacatcctggcaacgttctggtgcggaaaggcccggacgggaaagcggagctggtgctgctggaccacgggctctaccagttcctggaggagaaggaccgcgcagccctc

SEQ ID NO: 590431 - DNA, 120 bp, Artificial Sequence
  ENSG00000173137_10 (sequence is synthesized)
tgccagctgtggcgggccatcatcctgcgggacgacgccgccatgagggcgcacgcagccgcactgggggtgcaagactacctcctgttcgccgagatgctcatgcagcgccccgtgcgc

SEQ ID NO: 590432 - DNA, 120 bp, Artificial Sequence
  ENSG00000173137_11 (sequence is synthesized)
ctggggcagctgtggggctcgcacctactgagccgcgaagaggcggcctacatggtggacatggcccgcgagcgcttcgaggccgtcatggcggtgctcagggagctgccgcggcccatg

SEQ ID NO: 590433 - DNA, 120 bp, Artificial Sequence
  ENSG00000173137_12 (sequence is synthesized)
ctgctggtgctgcgcaacatcaacaccgtgcgcgctatcaacgtggccctcggcgcccccgtggaccgctacttccttatggctaaaagggctgtccggggctggagccgcctggcgggc

SEQ ID NO: 590434 - DNA, 120 bp, Artificial Sequence
  ENSG00000173137_13 (sequence is synthesized)
gccacgtatcggggtgtctacggcaccagcctcctgcgccacgccaaggtcgtctgggagatgctcaagtttgaagtggcgctcaggctggagaccttggccatgcggctgaccgccctc

SEQ ID NO: 590435 - DNA, 120 bp, Artificial Sequence
  ENSG00000173137_14 (sequence is synthesized)
ctggctcgtgctctggtccacctgagcctcgtgcccccagcggaggagctctaccagtacctggagacctagggtgcagccgcccagggccggcggggcccttttcaccttgggctgacg

SEQ ID NO: 590436 - DNA, 120 bp, Artificial Sequence
  ENSG00000173137_15 (sequence is synthesized)
gaggtggcggggctagaggtgtagacaccccgagccccgtgggcactcgcactggggggctgtgacagcagctgggccaggaggccgtgtaatgaccacacactcctctcaagcaaaaaa

SEQ ID NO: 590437 - DNA, 120 bp, Artificial Sequence
  ENSG00000173137_16 (sequence is synthesized)
gctgcgagacgctaagcggcgccgggcgggagaagagcggagcagtggtcggagatgtggcgaccggctggagtgcagtgtctcaatcttggctcactgcaatctccgcctaccaagatc

SEQ ID NO: 590438 - DNA, 120 bp, Artificial Sequence
  ENSG00000173137_17 (sequence is synthesized)
tcttcctagtggacctcaggctgcaggtctctgaaggtcggcctgcagatctccctggactactggtggtgcaccaatgttgtccttcgaggggtggaagaggtttgtcctggtgccctg

SEQ ID NO: 590439 - DNA, 120 bp, Artificial Sequence
  ENSG00000173137_18 (sequence is synthesized)
ggcacacagtggtgggcatgaggtggtgggctgggtgggactgaggaggcagccacctgtccccatgtgttctccccatgcctgtggtcagaacagcccaggctacttggaggtgatgtc

SEQ ID NO: 590440 - DNA, 120 bp, Artificial Sequence
  ENSG00000173137_19 (sequence is synthesized)
aagcggcgccgggcgggagaagagcggagcagtggtcggagatgtggcgaccgtttctggcatcattctgagactcggcagttgcttctcactgctgcggccgggcctgtctgtgggagc

SEQ ID NO: 590441 - DNA, 120 bp, Artificial Sequence
  ENSG00000173137_20 (sequence is synthesized)
gcgctggaaaaccagacacgatcggacatgcatgtggttctgcggccaaagcacgccctttggttgtgaacttcatgatacctgtgtgcagctctgtcatttccactctgctctgctgca

SEQ ID NO: 590442 - DNA, 120 bp, Artificial Sequence
  ENSG00000173137_21 (sequence is synthesized)
gtggcacccttaggccaagctgactcaggagccctcgtggattccacaaggatggtgttttgtttcatgctcacagtggggtctaggagggcttgcaggcagtaagtgccaggacccgtg

SEQ ID NO: 590443 - DNA, 120 bp, Artificial Sequence
  ENSG00000173137_22 (sequence is synthesized)
ttggcgcccgaggatccctggcatgttcggggacggtgaggtgcctgcccggggaatgcgcagtgcgccgagggcgggactggaaccctccgctctcaggaggcgcggtccgggcgccaa

SEQ ID NO: 590444 - DNA, 120 bp, Artificial Sequence
  ENSG00000173141_0 (sequence is synthesized)
gcttacgccacggcgtctgctggcggccgcggagacgcagagtcttgagcagcgcggcaggcaccatgttcctgactgcgctcctctggcgcggccgcattcccggccgtcagtggatcg

SEQ ID NO: 590445 - DNA, 120 bp, Artificial Sequence
  ENSG00000173141_1 (sequence is synthesized)
ggaagcaccggcggccgcggttcgtgtcgttgcgcgccaagcagaacatgatccgccgcctggagatcgaggcggagaaccattactggctgagcatgccctacatgacccgggagcagg

SEQ ID NO: 590446 - DNA, 120 bp, Artificial Sequence
  ENSG00000173141_2 (sequence is synthesized)
agcgcggccacgccgcggtgcgcaggagggaggccttcgaggccataaaggcggccgccacttccaagttccccccgcatagattcattgcggaccagctcgaccatctcaatgtcacca

SEQ ID NO: 590447 - DNA, 120 bp, Artificial Sequence
  ENSG00000173141_3 (sequence is synthesized)
agaaatggtcctaatcctgagtcgtcacccttggattttatggatcacggagctgaccatctttacctggtcctggaactgaaaaactgtagcttgtgtgaaaatgagcctttggaccag

SEQ ID NO: 590448 - DNA, 120 bp, Artificial Sequence
  ENSG00000173141_4 (sequence is synthesized)
tctttattaaaacaaacaaacatgagtagtctgcatatcgaatatctagagctctaaacccccaatacttaaaagtctaattgctgtcctgtggtttcattagtctgataggaagatagg

SEQ ID NO: 590449 - DNA, 120 bp, Artificial Sequence
  ENSG00000173141_5 (sequence is synthesized)
gatttcctcagtcacagatgatattttgaaggaaagctgcaataaagccacaatgatttgaggtctttgcttaagtatgagatacttgatgggggctttatcatgcaacattagtttgct

SEQ ID NO: 590450 - DNA, 120 bp, Artificial Sequence
  ENSG00000173141_6 (sequence is synthesized)
taccttaagaattgcccaaaaatgaaagaaaatatgagcttttcagttaaacatactcctaaaaacattttccgggattttactactaaaattggacatttaagcgaagtaaaagaggcc

SEQ ID NO: 590451 - DNA, 67 bp, Artificial Sequence
  ENSG00000173141_7 (sequence is synthesized)
ggtgataaaacccgtctctactaatacaaaaaaaattagctgggtatgttggtgcaggcttgcaatc

SEQ ID NO: 590452 - DNA, 120 bp, Artificial Sequence
  ENSG00000173141_8 (sequence is synthesized)
aaaaaaaattagctgggtatgttggtgcaggcttgcaatcccagctacttgggacgctgaggtgggaggatcgcctgaacctcagaggcagaggttgcaatgaagcggaggttgcagtga

SEQ ID NO: 590453 - DNA, 120 bp, Artificial Sequence
  ENSG00000173141_9 (sequence is synthesized)
atttatcagagctgttacaggaaggtgtattttttagctattttggcagggtgctgtggtgcttgcatgtagtcccagctattcaggaatattgcttgagtccagcttgggcaacatagc

SEQ ID NO: 590454 - DNA, 77 bp, Artificial Sequence
  ENSG00000173141_10 (sequence is synthesized)
attcaggaatattgcttgagtccagcttgggcaacatagcgagaccctatctaaaataacaataatatatggccagg

SEQ ID NO: 590455 - DNA, 90 bp, Artificial Sequence
  ENSG00000173141_11 (sequence is synthesized)
acttgaggccaggagttcaagaccagcccaaccaacatggtgaaaccctgtctccactgaaaatacataaaattagccgggtgcagtggt

SEQ ID NO: 590456 - DNA, 120 bp, Artificial Sequence
  ENSG00000173141_12 (sequence is synthesized)
attgtgtcactgcactctagcctgggcgacagaaaaagaaaatttaggtggggaaaaaaatcagaattgcgtctgtgggaacaggaataaaggagaaaccactattgactgggaagacac

SEQ ID NO: 590457 - DNA, 120 bp, Artificial Sequence
  ENSG00000173141_13 (sequence is synthesized)
aaccactattgactgggaagacacacaaagaactttgtcaaagttgtatggctgaggcccacacggtggctcacttctgtaatcccatcactttgggaggcttaggcagaaggatcacct

SEQ ID NO: 590458 - DNA, 75 bp, Artificial Sequence
  ENSG00000173141_14 (sequence is synthesized)
aaaaaaaatttagccaggcttggtcatgcatgcctgtaatcctagctactgggaaggctgaggaaggagaattgc

SEQ ID NO: 590459 - DNA, 60 bp, Artificial Sequence
  ENSG00000173141_15 (sequence is synthesized)
tcagcaaaaaaaatttagccaggcttggtcatgcatgcctgtaatcctagctactgggat

SEQ ID NO: 590460 - DNA, 120 bp, Artificial Sequence
  ENSG00000173141_16 (sequence is synthesized)
cgggagtgagacaccatctcaaaaaatacatataataatataaataaaaatatcttttttgaaaataatttaatataccatgtaatttaccagttgaagatgttcgctttcagaatataa

SEQ ID NO: 590461 - DNA, 120 bp, Artificial Sequence
  ENSG00000173145_0 (sequence is synthesized)
ggtagtgtagggacttcggcacgtgtgtcattccccgggatttctgtagtaaccctgcttctggtgaacttgtctggccggcattcatttaaggcctaaggatgaaggcgagaagaaata

SEQ ID NO: 590462 - DNA, 120 bp, Artificial Sequence
  ENSG00000173145_1 (sequence is synthesized)
aaaaacagatcccaagctttcgcaagttaataaaaactagtaaagtcaaacttgaaaacaagctaaaaaataagcagtttaaacaacaaagcactctcaagaagtaccgaaaagaacaga

SEQ ID NO: 590463 - DNA, 120 bp, Artificial Sequence
  ENSG00000173145_2 (sequence is synthesized)
ggaaactaaggcaagctgtgaaagatgctgtgtctaagaaacccattccattggagaacccaaaggaaaagcgaccaggtaaaaggattgagagggaagaagaggaagaagaagaagccc

SEQ ID NO: 590464 - DNA, 120 bp, Artificial Sequence
  ENSG00000173145_3 (sequence is synthesized)
ttcctttagatatgatggatgaagatgacttacagttaatgaaggatttaggacaaagagtatcttttctaacaagagatctttcttctagtgagcctgttcatgcgaagaaacggaagc

SEQ ID NO: 590465 - DNA, 120 bp, Artificial Sequence
  ENSG00000173145_4 (sequence is synthesized)
atgaacgcattatagataaatatgaaaaaataccaagaactctgcaaactgcaccagagaaggaactgattcatttacttcctatcaaagataaaagtggtataatcccacagactaggg

SEQ ID NO: 590466 - DNA, 120 bp, Artificial Sequence
  ENSG00000173145_5 (sequence is synthesized)
agaagccagttactgatagtaacaaagatgaagaggatcaagaagaagagagggaacttgaggaagagatcattgaagatcctattcaagagctgaccatagaagaacatttgattgaga

SEQ ID NO: 590467 - DNA, 120 bp, Artificial Sequence
  ENSG00000173145_6 (sequence is synthesized)
gaaagaagaaattacaggagaagaagatgcatattgcagccttggcatctgccatattatcagatccagaaaataatattaaaaaattgaaagaattacgttctatgttgatggaacaag

SEQ ID NO: 590468 - DNA, 120 bp, Artificial Sequence
  ENSG00000173145_7 (sequence is synthesized)
atcctgatgtggctgttactgttcgaaagctggtaattgtttctctgatggagttatttaaagatattactccttcatataaaatccggcccctcacagaagcagaaaaatctactaaga

SEQ ID NO: 590469 - DNA, 120 bp, Artificial Sequence
  ENSG00000173145_8 (sequence is synthesized)
cccgaaaagaaacccagaagttaagagaatttgaagaaggcctggttagccaatacaagttttatttggaaaatctggaacaaatggttaaagattggaagcagaggaagctgaagaaaa

SEQ ID NO: 590470 - DNA, 120 bp, Artificial Sequence
  ENSG00000173145_9 (sequence is synthesized)
gtaatgtagtttccttaaaggcatacaaaggactggcagaagtcgctgtgaagagcttgtgtgagctgttggtggcactacctcattttaactttcacaacaacatcatcgtattgattg

SEQ ID NO: 590471 - DNA, 120 bp, Artificial Sequence
  ENSG00000173145_10 (sequence is synthesized)
tccctctcatgaatgacatgtcaaaattgatatctgaaatgtgttgtgaagctgtgaagaaactctttaagcaagataaattaggccaagcttctcttggtgtaattaaagtgatttctg

SEQ ID NO: 590472 - DNA, 120 bp, Artificial Sequence
  ENSG00000173145_11 (sequence is synthesized)
gttttgtgaagggcagaaattacgaagttaggccagagatgttaaaaacatttttatgcctaagaatcaaggaagtagaagtgaaaaaagatacagaagacattaataaaccaaaaaaat

SEQ ID NO: 590473 - DNA, 120 bp, Artificial Sequence
  ENSG00000173145_12 (sequence is synthesized)
ttatgactttcaaagaaaagagaaaatctctatcaagaatgcagagaaagtggaagaaagcagaagagaaactagagcgagagcttcgagaggcagaagcttcagagagtactgagaaaa

SEQ ID NO: 590474 - DNA, 120 bp, Artificial Sequence
  ENSG00000173145_13 (sequence is synthesized)
aacttaaactgcacacagagactctgaatattgtgtttgtaacctacttcagaatattgaagaaggcccagaggtcacctctcctgccagcagttctagaaggtcttgccaagtttgctc

SEQ ID NO: 590475 - DNA, 120 bp, Artificial Sequence
  ENSG00000173145_14 (sequence is synthesized)
gtccagactgcttttcatattctttctggacaaggtgatgttctgaatattgatccattgaaattctacacacatctctacaaaacactgttcaaattacatgcaggtgctaccaatgaa

SEQ ID NO: 590476 - DNA, 120 bp, Artificial Sequence
  ENSG00000173145_15 (sequence is synthesized)
ggtgttgagattgtactccagtgccttgatgtcatgctaactaagcgcagaaagcaagtttctcagcagcgagctcttgccttcatcaaacgcctttgtacccttgctcttcatgttctt

SEQ ID NO: 590477 - DNA, 120 bp, Artificial Sequence
  ENSG00000173145_16 (sequence is synthesized)
ccaaattcaagtattggcattttagcaactaccagaatattaatgcatactttccccaaaacagatctactgcttgacagtgaatctcagggaagtggagttttccttcctgaactggat

SEQ ID NO: 590478 - DNA, 120 bp, Artificial Sequence
  ENSG00000173145_17 (sequence is synthesized)
gagcctgagtactgcaatgctcagaacactgctctgtgggaactgcatgctctgcggaggcattatcatcccatagtgcagagatttgcagcccacctgatcgctggagcaccttctgaa

SEQ ID NO: 590479 - DNA, 120 bp, Artificial Sequence
  ENSG00000173145_18 (sequence is synthesized)
ggctctggagcactcaaaccagagttgagtcgaagatctgctactgaactttttgaggcatatagcatggcagaaatgacattcaatcctcctgttgaatcttcaaaccccaaaataaag

SEQ ID NO: 590480 - DNA, 120 bp, Artificial Sequence
  ENSG00000173145_19 (sequence is synthesized)
ggtaaatttttacaaggggattcatttttgaatgaagatttaaatcagctaatcaaaagatactccagtgaagttgctactgaatcgcctctggatttcacgaaatatttgaaaacatca

SEQ ID NO: 590481 - DNA, 120 bp, Artificial Sequence
  ENSG00000173145_20 (sequence is synthesized)
ctacactagtagaggaatgaagtcagtggactttcttgtatatttgtgtgtgcagatgtacataaagatgagttgttaacttaggatcttttctttttatacaaggaaagcttcctaaga

SEQ ID NO: 590482 - DNA, 120 bp, Artificial Sequence
  ENSG00000173145_21 (sequence is synthesized)
atgtctaggaagaagaggaagaatgaccctttgcatggcacagggttctgcccctattctgaatatgtcattccatcaaggagatcaaaagcctttttttctccccagtatttggaaatt

SEQ ID NO: 590483 - DNA, 120 bp, Artificial Sequence
  ENSG00000173145_22 (sequence is synthesized)
actttcttgatgatgctgccttttaaaagcttcacgtacattatagttttttaaaaaaatctttggactggatcttactgaagtgcagttgctatattaaaattagggcatagagcacag

SEQ ID NO: 590484 - DNA, 120 bp, Artificial Sequence
  ENSG00000173145_23 (sequence is synthesized)
aaaaatcaagaccatgagaagacattttaccatttagctactttttataactaaatactctttaaatatttttatttcaatactgtggatggaaatgagaagcattctaaatttgagtta

SEQ ID NO: 590485 - DNA, 120 bp, Artificial Sequence
  ENSG00000173145_24 (sequence is synthesized)
atatatttttatgaagatatttgagaaaagaaaaaaatagcttgtattcaggttcattggcttttgctggatgatccacctaaagaagttacctaatttggccttttaaaaaaggtgtta

SEQ ID NO: 590486 - DNA, 120 bp, Artificial Sequence
  ENSG00000173145_25 (sequence is synthesized)
gtgtttattatagctactttcaaggaaagtttgaatatgattctagtctctaaagttcttcacgttttctgacattccctggagggtgactggggaagaattgctccagggtagaagaac

SEQ ID NO: 590487 - DNA, 120 bp, Artificial Sequence
  ENSG00000173145_26 (sequence is synthesized)
caggcccaagactttaccattctgatctagagacaaaggatactcaatgaggagcttttttcccctcttggaacaggtaaaatgctttttcttattaatataattataaaacagtatttt

SEQ ID NO: 590488 - DNA, 120 bp, Artificial Sequence
  ENSG00000173145_27 (sequence is synthesized)
atgtaacagctattcccatattctaggagtggcctaagaaatgcgtgtttcagtgactagattataaatattctctattgtgaatagttgaataaaacagctgtttttttctgcttccta

SEQ ID NO: 590489 - DNA, 120 bp, Artificial Sequence
  ENSG00000173145_28 (sequence is synthesized)
agatcttcctagagtgggtaaggatagtagtcctataggactgctataaagcatatatgctttatcacagtcagtatgagaaaacatttcaatacagtattcattcaagcttctgctttt

SEQ ID NO: 590490 - DNA, 120 bp, Artificial Sequence
  ENSG00000173145_29 (sequence is synthesized)
agtttgtctggaaggcagatctgaagatgcactacttgggaaaacaaactgaaagtactccgttacataaatattgggcagtgtgccagtgctgccactttgccattcaccagcagttag

SEQ ID NO: 590491 - DNA, 120 bp, Artificial Sequence
  ENSG00000173145_30 (sequence is synthesized)
atatccatttagtgttaaaaacttggttctgaatttcacttaggtggttcaaggtgttcacctttgagcacaatgtttacaaagaataaagtattatttagcttatttcctaaataaagg

SEQ ID NO: 590492 - DNA, 120 bp, Artificial Sequence
  ENSG00000173145_31 (sequence is synthesized)
aggttcatgtataagataagctgatttcatttaatgtacatctttcttttgagtctgaatagtcaagtagagtgaatgggggaagaatgctgttctcactttgaggtagtggcagaacag

SEQ ID NO: 590493 - DNA, 120 bp, Artificial Sequence
  ENSG00000173145_32 (sequence is synthesized)
ttctgagttcctacggctatgatttcacttaatcctcattaccctgctggtaggtcttattcccatttccagagaggaaactgatggttccctgcagtcacaagtatctggaatttaaag

SEQ ID NO: 590494 - DNA, 120 bp, Artificial Sequence
  ENSG00000173145_33 (sequence is synthesized)
ttggaccttttaaactccaaagtctatgctatactctaaagattttgggaaagtaagagtcacacttggttttatgaactgttcttcataaagaatctgctgtaactttcacctttattt

SEQ ID NO: 590495 - DNA, 120 bp, Artificial Sequence
  ENSG00000173145_34 (sequence is synthesized)
tgcatctagagggaaaactggatgtagccaaagtttgagtttgtatggtaggttgtttacccatttcttttattcatttgctgtttgagtgcctgctatgtgccagacactagcctaagt

SEQ ID NO: 590496 - DNA, 120 bp, Artificial Sequence
  ENSG00000173145_35 (sequence is synthesized)
ctggtggtttttctgtacttttgaaatgataggtctctagataactttttagatctattaagactgaaaattgatctttttttcccctgcagtgagcctgttcatgcgaagaaacggaag

SEQ ID NO: 590497 - DNA, 120 bp, Artificial Sequence
  ENSG00000173153_0 (sequence is synthesized)
gtcagctggaggaagcggagtaggaagcggccgcgatgtccttttgtgtcctacaagcagccggcggcgccgccgagtgaggggacgcggcgcggtggggcggcgcggcccgaggaggcg

SEQ ID NO: 590498 - DNA, 120 bp, Artificial Sequence
  ENSG00000173153_1 (sequence is synthesized)
ccgcggcccccggctcactccggcactccgggccgctcggcccccatgcctgcccgaccgcgctgccggagccccaggtgaccagcgccatgtccagccaggtggtgggcattgagcctc

SEQ ID NO: 590499 - DNA, 120 bp, Artificial Sequence
  ENSG00000173153_2 (sequence is synthesized)
gtgggcattgagcctctctacatcaaggcagagccggccagccctgacagtccaaagggttcctcggagacagagaccgagcctcctgtggccctggcccctggtccagctcccactcgc

SEQ ID NO: 590500 - DNA, 120 bp, Artificial Sequence
  ENSG00000173153_3 (sequence is synthesized)
tgcctcccaggccacaaggaagaggaggatggggagggggctgggcctggcgagcagggcggtgggaagctggtgctcagctccctgcccaagcgcctctgcctggtctgtggggacgtg

SEQ ID NO: 590501 - DNA, 120 bp, Artificial Sequence
  ENSG00000173153_4 (sequence is synthesized)
gcctccggctaccactatggtgtggcatcctgtgaggcctgcaaagccttcttcaagaggaccatccaggggagcatcgagtacagctgtccggcctccaacgagtgtgagatcaccaag

SEQ ID NO: 590502 - DNA, 120 bp, Artificial Sequence
  ENSG00000173153_5 (sequence is synthesized)
cggagacgcaaggcctgccaggcctgccgcttcaccaagtgcctgcgggtgggcatgctcaaggagggagtgcgcctggaccgcgtccggggtgggcggcagaagtacaagcggcggccg

SEQ ID NO: 590503 - DNA, 120 bp, Artificial Sequence
  ENSG00000173153_6 (sequence is synthesized)
gaggtggacccactgcccttcccgggccccttccctgctgggcccctggcagtcgctggaggcccccggaagacagcagccccagtgaatgcactggtgtctcatctgctggtggttgag

SEQ ID NO: 590504 - DNA, 120 bp, Artificial Sequence
  ENSG00000173153_7 (sequence is synthesized)
cctgagaagctctatgccatgcctgaccccgcaggccctgatgggcacctcccagccgtggctaccctctgtgacctctttgaccgagagattgtggtcaccatcagctgggccaagagc

SEQ ID NO: 590505 - DNA, 120 bp, Artificial Sequence
  ENSG00000173153_8 (sequence is synthesized)
atcccaggcttctcatcgctgtcgctgtctgaccagatgtcagtactgcagagcgtgtggatggaggtgctggtgctgggtgtggcccagcgctcactgccactgcaggatgagctggcc

SEQ ID NO: 590506 - DNA, 120 bp, Artificial Sequence
  ENSG00000173153_9 (sequence is synthesized)
gaggagtatgttctactaaaggccttggcccttgccaattcagactctgtgcacatcgaagatgccgaggctgtggagcagctgcgagaagctctgcacgaggccctgctggagtatgaa

SEQ ID NO: 590507 - DNA, 120 bp, Artificial Sequence
  ENSG00000173153_10 (sequence is synthesized)
gccggccgggctggccccggagggggtgctgagcggcggcgggcgggcaggctgctgctcacgctaccgctcctccgccagacagcgggcaaagtgctggcccatttctatggggtgaag

SEQ ID NO: 590508 - DNA, 120 bp, Artificial Sequence
  ENSG00000173153_11 (sequence is synthesized)
ctggagggcaaggtgcccatgcacaagctgttcttggagatgctcgaggccatgatggactgaggcaaggggtgggactggtgggggttctggcaggacctgcctagcatggggtcagcc

SEQ ID NO: 590509 - DNA, 120 bp, Artificial Sequence
  ENSG00000173153_12 (sequence is synthesized)
ccaagggctggggcggagctggggtctgggcagtgccacagcctgctggcagggccagggcaatgccatcagcccctgggaacaggccccacgccctctcctccccctcctagggggtgt

SEQ ID NO: 590510 - DNA, 120 bp, Artificial Sequence
  ENSG00000173153_13 (sequence is synthesized)
cagaagctgggaacgtgtgtccaggctctgggcacagtgctgccccttgcaagccataacgtgcccccagagtgtagggggccttgcggaagccatagggggctgcacgggatgcgtggg

SEQ ID NO: 590511 - DNA, 120 bp, Artificial Sequence
  ENSG00000173153_14 (sequence is synthesized)
aggcagaaacctatctcagggagggaaggggatggaggccagagtctcccagtgggtgatgcttttgctgctgcttaatcctaccccctcttcaaagcagagtgggacttggagagcaaa

SEQ ID NO: 590512 - DNA, 120 bp, Artificial Sequence
  ENSG00000173153_15 (sequence is synthesized)
ggcccatgcccccttcgctcctcctctcatcatttgcattgggcattagtgtccccccttgaagcaataactccaagcagactccagcccctggacccctggggtggccagggcttcccc

SEQ ID NO: 590513 - DNA, 120 bp, Artificial Sequence
  ENSG00000173153_16 (sequence is synthesized)
atcagctcccaacgagcctcctcagggggtaggagagcactgcctctatgccctgcagagcaataacactatatttatttttgggtttggccagggaggcgcagggacatggggcaagcc

SEQ ID NO: 590514 - DNA, 120 bp, Artificial Sequence
  ENSG00000173153_17 (sequence is synthesized)
agggcccagagcccttggctgtacagagactctattttaatgtatatttgctgcaaagagaaaccgcttttggttttaaacctttaatgagaaaaaaatatataataccgagctcaaaaa

SEQ ID NO: 590515 - DNA, 120 bp, Artificial Sequence
  ENSG00000173153_18 (sequence is synthesized)
tagaggtctcccgcgggcggggagggggaggcgtagcaactttaggcaacttcccaaaggtgtgcgcaggttgggggcgggacgcggcgccccgggaggtggcggcctctgcgacagcgg

SEQ ID NO: 590516 - DNA, 120 bp, Artificial Sequence
  ENSG00000173153_19 (sequence is synthesized)
gagtataagagtggacctgcaggctggtcgcgaggaggtggagcggcgcccgccgtgtgcctgggaccggcatgctggggcaggagggcagccgcgtgtcaggtgaccagcgccatgtcc

SEQ ID NO: 590517 - DNA, 120 bp, Artificial Sequence
  ENSG00000173153_20 (sequence is synthesized)
caggtgtgaaaagctctggaggtgttttcatgagtccgtgcctgtgcgtgtggatgtggggagacctagtgagagtgtgtgtgatcatgagccttgactgagttcgtggatggggtgtgc

SEQ ID NO: 590518 - DNA, 120 bp, Artificial Sequence
  ENSG00000173153_21 (sequence is synthesized)
gctccaggagaagtgtgtgagcacaagtgtgagcaggagtgagcacgggtttgggaaggccggtgcaagtgtgaaagccctcagcagagagcgagcctgcgtgggcttgtggggctcctg

SEQ ID NO: 590519 - DNA, 120 bp, Artificial Sequence
  ENSG00000173153_22 (sequence is synthesized)
agcaccccggtgagtggagtgtgtgaactcggtgtgagcacgtccactggccttgggtctgctctccaatgcagaatacccagatgagggcagggtctcagaggtccccccaacatctgg

SEQ ID NO: 590520 - DNA, 120 bp, Artificial Sequence
  ENSG00000173153_23 (sequence is synthesized)
ggcagggctcccccgcccagcagccactcccctccctgcctgctcatggccccctgctctccctttcctccccatacccccagacctgtgcttgcccggggagagtcagggctctcctgt

SEQ ID NO: 590521 - DNA, 120 bp, Artificial Sequence
  ENSG00000173156_0 (sequence is synthesized)
gcccgctcagcgcccggccccgggatgacggcggcccaggccgcgggtgaggaggcgccaccaggcgtgcggtccgtcaaggtggtcctggtgggcgacggcggctgcgggaagacgtcg

SEQ ID NO: 590522 - DNA, 120 bp, Artificial Sequence
  ENSG00000173156_1 (sequence is synthesized)
tggtgggcgacggcggctgcgggaagacgtcgctgctgatggtcttcgccgatggggccttccccgagagctacacccccacggtgtttgagcggtacatggtcaacctgcaagtgaaag

SEQ ID NO: 590523 - DNA, 120 bp, Artificial Sequence
  ENSG00000173156_2 (sequence is synthesized)
gcaaacctgtgcacctccacatctgggacacagcagggcaagatgactatgaccgcctgcggcccctgttctaccctgacgccagcgtcctgctgctttgcttcgatgtcaccagcccga

SEQ ID NO: 590524 - DNA, 120 bp, Artificial Sequence
  ENSG00000173156_3 (sequence is synthesized)
acagctttgacaacatctttaaccggtggtacccagaagtgaatcatttctgcaagaaggtacccatcatcgtcgtgggctgcaagactgacctgcgcaaggacaaatcactggtgaaca

SEQ ID NO: 590525 - DNA, 120 bp, Artificial Sequence
  ENSG00000173156_4 (sequence is synthesized)
ctgtgacctaccacaggggccaggagatggcgaggtccgtgggcgcggtggcctacctcgagtgctcggctcggctccatgacaacgtccacgccgtcttccaggaggccgccgaggtgg

SEQ ID NO: 590526 - DNA, 120 bp, Artificial Sequence
  ENSG00000173156_5 (sequence is synthesized)
ccctcagcagccgcggtcgcaacttctggcggcggattacccagggcttttgcgtggtgacctgagcggctcggggcgtcccagcgacgcgggaaggggcagggcgctgacctgctgctg

SEQ ID NO: 590527 - DNA, 120 bp, Artificial Sequence
  ENSG00000173156_6 (sequence is synthesized)
agctggctgggctggacccggtccctaggctgtgaccgccgaactccactgcaacagacgggcgccaccaaagccaggccctgaggcctgggagtcctggactgagaaagggggttcctg

SEQ ID NO: 590528 - DNA, 120 bp, Artificial Sequence
  ENSG00000173156_7 (sequence is synthesized)
ggcccacctgctctgtgtagggctcgtcctgcggtgcccgagaatcactcgctaacccctatgcccggtcccggaccgacatcctggagccgcctgtgcagcctgatgccccctcgtggc

SEQ ID NO: 590529 - DNA, 120 bp, Artificial Sequence
  ENSG00000173156_8 (sequence is synthesized)
tgctcccagggctgcacctgccaggacctaatgttcttaggtccctctggccagaacccacacccggccccttcccacctgtcatactggtaactgtaacaagaaaaacgacatcactta

SEQ ID NO: 590530 - DNA, 120 bp, Artificial Sequence
  ENSG00000173156_9 (sequence is synthesized)
tctttaaccggtttctccctaggtgctggctttgctgattatccatatcagagctcaggctggggagcaagagagtggtccactgagagggccagaactctccagggctcacacatgccc

SEQ ID NO: 590531 - DNA, 120 bp, Artificial Sequence
  ENSG00000173156_10 (sequence is synthesized)
cccacatgccccctcgcccccctgcagtggtacccagaagtgaatcatttctgcaagaaggtacccatcatcgtcgtgggctgcaagactgacctgcgcaaggacaaatcactggtgaac

SEQ ID NO: 590532 - DNA, 120 bp, Artificial Sequence
  ENSG00000173157_0 (sequence is synthesized)
gcttccccgcgccgagctgaacctgagcagagagtttctgagggcagcgcgggcgcaggaaggggggtgaggctgcagtgcgatgaagcagcggctcagcgagcggagacaggcggtgtg

SEQ ID NO: 590533 - DNA, 120 bp, Artificial Sequence
  ENSG00000173157_1 (sequence is synthesized)
gctggaccagccggcccagggcccgcgctgctgttccctaggctgctgaggcgcggagagcggcgggcgagagggaggagagggatcggagcgcgagggaagccggcttggctgccggcg

SEQ ID NO: 590534 - DNA, 120 bp, Artificial Sequence
  ENSG00000173157_2 (sequence is synthesized)
gctctggtgggcctccccgatcggggtccccagggtggaaccatgtgggtggccaagtggctgactgggctgctctaccatctctcgctcttcatcaccaggtcttgggaagttgacttc

SEQ ID NO: 590535 - DNA, 120 bp, Artificial Sequence
  ENSG00000173157_3 (sequence is synthesized)
caccccaggcaagaagccctggtgaggacactgacctcctacgaagtagtgatccccgagcgggtcaatgagtttggagaagtgttccctcagagccaccacttcagccggcagaaacgc

SEQ ID NO: 590536 - DNA, 120 bp, Artificial Sequence
  ENSG00000173157_4 (sequence is synthesized)
agctccgaggcgctggaacccatgccgttccgaacccactatcgcttcactgcctacgggcagctcttccagctgaacctgaccgccgatgcatcctttctggccgccggctacaccgag

SEQ ID NO: 590537 - DNA, 120 bp, Artificial Sequence
  ENSG00000173157_5 (sequence is synthesized)
gtgcacttgggaaccccggagcgcggggcctgggagagcgacgcagggccctcggacctgcgccactgcttctaccgcggccaggtcaactcacaggaggattacaaggccgtcgtcagc

SEQ ID NO: 590538 - DNA, 120 bp, Artificial Sequence
  ENSG00000173157_6 (sequence is synthesized)
ttatgcggaggcctgacgggaacatttaaaggacagaacggtgaatatttcttagaacctataatgaaggcagatgggaatgaatatgaagatggtcacaacaagccacatcttatatac

SEQ ID NO: 590539 - DNA, 120 bp, Artificial Sequence
  ENSG00000173157_7 (sequence is synthesized)
agacaagacttaaataactcttttctgcagactctgaagtattgcagtgtgtcagaaagtcaaataaaggaaaccagtttaccctttcatacctacagcaacatgaatgaagatcttaat

SEQ ID NO: 590540 - DNA, 120 bp, Artificial Sequence
  ENSG00000173157_8 (sequence is synthesized)
gtaatgaaagaaagagttttaggacacacatcaaaaaatgtaccattgaaagatgaaagaagacattccaggaaaaaacgtcttatatcatatccaagatacattgaaattatggttaca

SEQ ID NO: 590541 - DNA, 120 bp, Artificial Sequence
  ENSG00000173157_9 (sequence is synthesized)
gctgatgctaaagtggtttctgctcatggatcgaatttgcaaaactatatactgactctaatgtcaattgttgcaacaatctacaaagatccaagtattggaaatttgatacacatagta

SEQ ID NO: 590542 - DNA, 120 bp, Artificial Sequence
  ENSG00000173157_10 (sequence is synthesized)
gtggtaaaattagttatgattcaccgtgaggaggaaggaccagtcattaattttgatggtgctaccacattaaagaacttttgttcatggcaacaaactcagaatgaccttgatgatgtt

SEQ ID NO: 590543 - DNA, 120 bp, Artificial Sequence
  ENSG00000173157_11 (sequence is synthesized)
cacccttcccaccatgacactgctgttcttatcactagggaagacatttgttcatctaaagagaaatgtaacatgttaggtttatcatatttaggtaccatatgtgatcctttacaaagc

SEQ ID NO: 590544 - DNA, 120 bp, Artificial Sequence
  ENSG00000173157_12 (sequence is synthesized)
tgctttattaatgaagaaaaaggactcatttctgcttttactatagcccatgagcttgggcacacacttggtgttcaacatgatgataatcctagatgtaaagaaatgaaagttacaaag

SEQ ID NO: 590545 - DNA, 120 bp, Artificial Sequence
  ENSG00000173157_13 (sequence is synthesized)
tatcatgtaatggcccctgctttaagttttcacatgagtccttggagctggtcaaactgtagtcggaaatatgttactgaattcctagatactggttacggggaatgtcttcttgacaaa

SEQ ID NO: 590546 - DNA, 120 bp, Artificial Sequence
  ENSG00000173157_14 (sequence is synthesized)
ccagatgaagaaatatataatctgccttcagaacttcctggatcacgatatgatggaaacaagcagtgtgagcttgcgtttggtcctgggtcacaaatgtgtccccatataaatatatgc

SEQ ID NO: 590547 - DNA, 120 bp, Artificial Sequence
  ENSG00000173157_15 (sequence is synthesized)
atgcatctgtggtgcacaagcacagaaaagcttcacaaaggctgtttcactcaacacgtgccaccagcagatggaacagactgcggtcctggaatgcattgccgtcatgggctatgtgta

SEQ ID NO: 590548 - DNA, 120 bp, Artificial Sequence
  ENSG00000173157_16 (sequence is synthesized)
aacaaagaaacggaaacacgtcctgtaaatggtgaatggggaccatgggaaccttacagttcttgttcaagaacatgtggaggcggaatcgaaagtgcaaccaggcgctgtaatcgtcct

SEQ ID NO: 590549 - DNA, 120 bp, Artificial Sequence
  ENSG00000173157_17 (sequence is synthesized)
gagccaagaaacggaggaaattactgtgtgggccgcaggatgaaatttcgatcatgtaatactgattcatgtccaaaaggcacacaagactttcgagagaagcagtgctctgattttaat

SEQ ID NO: 590550 - DNA, 120 bp, Artificial Sequence
  ENSG00000173157_18 (sequence is synthesized)
ggtaaacatttggacatcagtggcattccctctaatgtgaggtggcttccaagatacagtggcattggcacaaaggatcgttgtaaactctattgtcaggttgctggaaccaattatttc

SEQ ID NO: 590551 - DNA, 120 bp, Artificial Sequence
  ENSG00000173157_19 (sequence is synthesized)
tacctattgaaggatatggttgaagatggtactccttgtggaactgaaactcatgacatctgtgttcaaggccagtgtatggcagctggttgtgatcacgtgttaaactccagtgccaag

SEQ ID NO: 590552 - DNA, 120 bp, Artificial Sequence
  ENSG00000173157_20 (sequence is synthesized)
atagacaaatgtggagtgtgtggtggggacaactcttcatgcaagacaataacaggtgtcttcaacagttctcattatggttataatgttgttgtaaagattcccgcaggagcaacaaac

SEQ ID NO: 590553 - DNA, 120 bp, Artificial Sequence
  ENSG00000173157_21 (sequence is synthesized)
gttgacattcgtcagtacagctattctggacaaccagatgacagttaccttgcattatctgacgctgaagggaattttcttttcaatggaaattttcttctaagtacgtcaaaaaaagaa

SEQ ID NO: 590554 - DNA, 120 bp, Artificial Sequence
  ENSG00000173157_22 (sequence is synthesized)
atcaatgtgcaaggaacaagaactgttattgaatacagtggatcaaataacgcagttgaaagaattaatagtactaatcgacaagagaaagaacttattttgcaggtgttgtgtgtgggt

SEQ ID NO: 590555 - DNA, 120 bp, Artificial Sequence
  ENSG00000173157_23 (sequence is synthesized)
aatttatacaaccctgatgtacattattccttcaatatccctttggaagagaggagtgacatgttcacatgggacccctatggaccatgggaaggctgtaccaaaatgtgtcaaggtctt

SEQ ID NO: 590556 - DNA, 120 bp, Artificial Sequence
  ENSG00000173157_24 (sequence is synthesized)
cagcgaagaaacataacttgcatacataagagtgatcatagtgttgtgtctgataaagaatgtgaccacttgccacttccatcatttgttactcaaagttgcaatacagactgtgaacta

SEQ ID NO: 590557 - DNA, 120 bp, Artificial Sequence
  ENSG00000173157_25 (sequence is synthesized)
aggtggcatgttattggcaaaagtgaatgttcatcccaatgtggtcaaggatatagaaccttggacatccattgcatgaagtattccattcatgaaggacagactgttcaagttgatgac

SEQ ID NO: 590558 - DNA, 120 bp, Artificial Sequence
  ENSG00000173157_26 (sequence is synthesized)
aaaggtctcgagaatcttattgtatgaataactttggccatcgtcttgctgacaatgaatgccaagaactgtcccgagtgacgagagagaattgcaatgaattttcctgtcccagttggg

SEQ ID NO: 590559 - DNA, 120 bp, Artificial Sequence
  ENSG00000173157_27 (sequence is synthesized)
ctgctagtgaatggagcgagtgccttgttacatgtggtaaaggaacaaagcagcggcaggtatggtgtcagctgaatgtagatcacttgagtgatggcttctgtaattcaagtaccaaac

SEQ ID NO: 590560 - DNA, 120 bp, Artificial Sequence
  ENSG00000173157_28 (sequence is synthesized)
ctgaatctctgagtccatgtgaacttcatacatgtgcttcctggcaagtaggaccatggggtccttgcacaaccacatgtggacatgggtatcagatgcgagatgttaaatgtgtcaatg

SEQ ID NO: 590561 - DNA, 120 bp, Artificial Sequence
  ENSG00000173157_29 (sequence is synthesized)
agctagctagtgcagtgttagaggacacagaatgccatgaagctagtcgccccagtgacagacagagctgtgtacttacaccttgctcatttatttctaaacttgagaccgctttattac

SEQ ID NO: 590562 - DNA, 120 bp, Artificial Sequence
  ENSG00000173157_30 (sequence is synthesized)
caactgttctcataaaaaagatggcacaatggcgacatggttcttggaccccatgctccgtatcttgtggaagaggtactcaagcccgctatgtaagctgtcgtgatgctcttgatagaa

SEQ ID NO: 590563 - DNA, 120 bp, Artificial Sequence
  ENSG00000173157_31 (sequence is synthesized)
tagcagatgaatcatattgtgcccacttaccccgacctgctgaaatatgggactgttttaccccttgtggagagtggcaagcaggggattggtcaccctgttcagcttcctgtggccatg

SEQ ID NO: 590564 - DNA, 120 bp, Artificial Sequence
  ENSG00000173157_32 (sequence is synthesized)
gaaaaacaactcgacaagttttatgcatgaactaccatcagccaattgatgagaattactgtgatcctgaagttcgccctttgatggaacaggaatgtagcctggcagcctgccctcctg

SEQ ID NO: 590565 - DNA, 120 bp, Artificial Sequence
  ENSG00000173157_33 (sequence is synthesized)
cacacagccactttcctagttcccctgtgcagccaagctattatctaagcacgaatttgccattaactcaaaaacttgaagataatgaaaatcaggtggtccatccatcagtcagaggaa

SEQ ID NO: 590566 - DNA, 120 bp, Artificial Sequence
  ENSG00000173157_34 (sequence is synthesized)
accagtggagaaccggaccatggggatcatgctccagcagttgttctggaggtcttcagcatagggctgtggtctgccaggatgaaaatggacaaagtgctagttactgcgatgcagcct

SEQ ID NO: 590567 - DNA, 120 bp, Artificial Sequence
  ENSG00000173157_35 (sequence is synthesized)
ccaagcctccagagttacagcaatgtggtccagggccttgtccacagtggaactacggaaattggggagaatgttcacaaacatgtggaggaggaataaaatcaagacttgtaatatgtc

SEQ ID NO: 590568 - DNA, 120 bp, Artificial Sequence
  ENSG00000173157_36 (sequence is synthesized)
aatttcccaatggccaaatattagaagatcacaactgtgaaattgtaaacaagccacctagcgtaatacagtgtcatatgcatgcttgccctgctgatgtgtcatggcatcaggaaccat

SEQ ID NO: 590569 - DNA, 120 bp, Artificial Sequence
  ENSG00000173157_37 (sequence is synthesized)
ggacatcgtgctcagcttcttgtggtaaaggtagaaagtaccgtgaagtgttttgcattgaccaattccaaaggaaattagaagacacaaattgcagtcaagtacagaaacctccaactc

SEQ ID NO: 590570 - DNA, 120 bp, Artificial Sequence
  ENSG00000173157_38 (sequence is synthesized)
acaaagcctgtagatctgtcagatgcccttcatggaaagccaatagctggaatgagtgctctgtgacctgtggctctggagttcagcagagggatgtatactgcagactgaaaggtgttg

SEQ ID NO: 590571 - DNA, 120 bp, Artificial Sequence
  ENSG00000173157_39 (sequence is synthesized)
gtcaggtggttgaagaaatgtgtgatcagtccacccgaccttgttctcagaggcgatgttggagtcaggactgtgtgcagcacaaggggatggaaagagggaggctgaattgttcaacat

SEQ ID NO: 590572 - DNA, 120 bp, Artificial Sequence
  ENSG00000173157_40 (sequence is synthesized)
catgtgagagaaaagattcacatcaacgaatggagtgcacagataaccaaatcagacaagtgaatgaaatagtctataattcttcaaccatatctcttacatccaagaattgcaggaacc

SEQ ID NO: 590573 - DNA, 120 bp, Artificial Sequence
  ENSG00000173157_41 (sequence is synthesized)
ctccttgcaattacattgtggtaacagcagactcatcacagtgtgcaaacaactgtggatttagttacagacaaaggattacatattgcaccgagatcccatctactaagaaacataagc

SEQ ID NO: 590574 - DNA, 120 bp, Artificial Sequence
  ENSG00000173157_42 (sequence is synthesized)
tccatcgacttcggcctatagtttatcaagaatgccctgtggtgccttcctctcaggtttaccaatgcattaacagctgtttgcatttggccacttggaaagttggaaaatggagcaagt

SEQ ID NO: 590575 - DNA, 120 bp, Artificial Sequence
  ENSG00000173157_43 (sequence is synthesized)
gctcagtgacttgtggaattgggataatgaagagacaagtgaaatgcattaccaaacatggtttgtccagtgacttatgtttaaaccatttaaaaccaggtgctcaaaagaaatgttatg

SEQ ID NO: 590576 - DNA, 120 bp, Artificial Sequence
  ENSG00000173157_44 (sequence is synthesized)
ccaatgactgtaaatcatttaccacctgcaaagaaattcaagtgaaaaaccacattagaaaggatggtgactattaccttaacattaagggaagaataataaagatttattgtgcagaca

SEQ ID NO: 590577 - DNA, 120 bp, Artificial Sequence
  ENSG00000173157_45 (sequence is synthesized)
tgtacttggagaaccctaaggaatatttaacactggtccaaggtgaagaaaacttttctgaagtgtatggctttagactaaaaaatccatatcaatgtccttttaatgggagtagaaggg

SEQ ID NO: 590578 - DNA, 120 bp, Artificial Sequence
  ENSG00000173157_46 (sequence is synthesized)
aagactgtgaatgtgacaatggacacttagctgctggatacactgttttcagcaaaataagaattgatctcacttccatgcaaattaaaactacggaccttcttttttccaaaacaatat

SEQ ID NO: 590579 - DNA, 120 bp, Artificial Sequence
  ENSG00000173157_47 (sequence is synthesized)
ttggaaatgcagttccatttgccacagctggagattgctacagtgctttcagatgcccacagggacagtttagcattaatttgtcaggaactgggatgaagatatccagcacagcaaagt

SEQ ID NO: 590580 - DNA, 120 bp, Artificial Sequence
  ENSG00000173157_48 (sequence is synthesized)
ggctcactcaggggagttatacctctgtcagcatacgaagatcagaggatggaactagatttttcggcaaatgtggagggtactgtggaaagtgtcttcctcacatgactactggtctcc

SEQ ID NO: 590581 - DNA, 120 bp, Artificial Sequence
  ENSG00000173157_49 (sequence is synthesized)
caattcaagtcatatgaacatttagaagggggaagtatgccctaaagaggggatattctctggaatattcaaataactggtgctcatttctttatatctcccttcccgagatttccatgt

SEQ ID NO: 590582 - DNA, 120 bp, Artificial Sequence
  ENSG00000173157_50 (sequence is synthesized)
ccaatatgtctctgcctttttttcagggtgctcatcagggattcaaatcactgcttaataaggtctataaaagaaatttaagagctatcttaatttattttatatctaatcaggatattt

SEQ ID NO: 590583 - DNA, 120 bp, Artificial Sequence
  ENSG00000173157_51 (sequence is synthesized)
tttaaagaacataataatttataatagagaataccaggattgaatgaattataccaagacagtgttgctcttaacatcttggcctggaccacacttattttatacctataaacacacatg

SEQ ID NO: 590584 - DNA, 120 bp, Artificial Sequence
  ENSG00000173157_52 (sequence is synthesized)
ttactgaccatctactatatcctaggcactgtgatccagagacaattgaaacatatttcttatccctatggagtttacagtttacttggggagatttgaaatactataagaactcactat

SEQ ID NO: 590585 - DNA, 120 bp, Artificial Sequence
  ENSG00000173157_53 (sequence is synthesized)
aaaaagatatttttattagctatcttagattggaaatccactttctgcttactgtgtctctgttccatcttctttcattttattggttttagtttgcaagcctagttcttaagaagactg

SEQ ID NO: 590586 - DNA, 120 bp, Artificial Sequence
  ENSG00000173157_54 (sequence is synthesized)
gcagaatcctaactgctaatgagattgaattgtaatggcatttgtttctgagcatagacgttttattttccctacccattcatgacttcaattcaccaagcattaaacatttacttaggt

SEQ ID NO: 590587 - DNA, 120 bp, Artificial Sequence
  ENSG00000173157_55 (sequence is synthesized)
ctcatgctttatattagatattgaagcaattaaaattaagtgtttgtgagtcagattctctgttttagaggtcagcaaactatggtccaggtaccaaatctggcctgttgcctattttta

SEQ ID NO: 590588 - DNA, 120 bp, Artificial Sequence
  ENSG00000173157_56 (sequence is synthesized)
aaataagttctattggaacacagtcatgctcatttgtttacgtgttatctatggctggttttgcactacagcagtagcattgattagttgcaatagaaactctgtaactcacaaagcctg

SEQ ID NO: 590589 - DNA, 120 bp, Artificial Sequence
  ENSG00000173157_57 (sequence is synthesized)
aaatatttactatctaactttttctgggaaaagtttgctgacccctgttctatttaataaacattataatgcttttaagtttaacataaaaaggtacttagatttatagaatattaaaat

SEQ ID NO: 590590 - DNA, 120 bp, Artificial Sequence
  ENSG00000173157_58 (sequence is synthesized)
tacaaataattcattccaggtcagttttagatgtttttgatcctttgatattttacattttaaggtttatcaaccttctctacatatccactgtgatattcatgcaatgtttatgtaaat

SEQ ID NO: 590591 - DNA, 120 bp, Artificial Sequence
  ENSG00000173157_59 (sequence is synthesized)
gtatctatactatattccaatatatttttgttatgctattttttgtatgtaaattatatcacaagtgaaaaatctgaatgctcattaaagtcctctgtatagatgacttttcaacctcac

SEQ ID NO: 590592 - DNA, 120 bp, Artificial Sequence
  ENSG00000173163_0 (sequence is synthesized)
tcagctgttgcggggcggggccttcgcagagcatggcggcgggcgagcttgagggtggcaaacccctgagcgggctgctgaatgcgctggcccaggacactttccacgggtaccccggca

SEQ ID NO: 590593 - DNA, 120 bp, Artificial Sequence
  ENSG00000173163_1 (sequence is synthesized)
tcacagaggagctgctacggagccagctatatccagaggtgccacccgaggagttccgcccctttctggcaaagatgagggggattcttaagtctattgcgtctgcagacatggatttca

SEQ ID NO: 590594 - DNA, 120 bp, Artificial Sequence
  ENSG00000173163_2 (sequence is synthesized)
accagctggaggcattcttgactgctcaaaccaaaaagcaaggtgggatcacatctgaccaagctgctgtcatttccaaattctggaagagccacaagacaaaaatccgtgagagcctca

SEQ ID NO: 590595 - DNA, 120 bp, Artificial Sequence
  ENSG00000173163_3 (sequence is synthesized)
cactcagctcaaatacacacacctgttgccattatagagctggaattaggcaaatatggacaggaatctgaatttctgtgtttggaatttgatgaggtcaaagtcaaccaaattctgaag

SEQ ID NO: 590596 - DNA, 120 bp, Artificial Sequence
  ENSG00000173163_4 (sequence is synthesized)
acgctgtcagaggtagaagaaagtatcagcacactgatcagccagcctaactgaagatgatgtatgaaggagttggagttgttgaaaccaaggtgtccatgatccctccccactgacctt

SEQ ID NO: 590597 - DNA, 120 bp, Artificial Sequence
  ENSG00000173163_5 (sequence is synthesized)
ttctaagaaaattcttgtgcccgcattggtattaaatcctcgcattcagtcttcctgcctctacttgctcagatttctttttttctagctttcatttagtcttacatttgttccagtgca

SEQ ID NO: 590598 - DNA, 120 bp, Artificial Sequence
  ENSG00000173163_6 (sequence is synthesized)
ccagtgcagaggttctcacccttcagtgtgcataaatgttataaggggtacttgtaaaagcattcacttttttgttgttattattaaattcggagtgttgctctgttgcccaggctggag

SEQ ID NO: 590599 - DNA, 82 bp, Artificial Sequence
  ENSG00000173163_7 (sequence is synthesized)
ggaggcatcttatgttaacctacctaccattgcgctgtgtaacacagattctcctctgcactatgtggacattgccatccca

SEQ ID NO: 590600 - DNA, 89 bp, Artificial Sequence
  ENSG00000173163_8 (sequence is synthesized)
gttctgcgcatgcgtggcaccatttcctgtgaacacccatgggaggtcatgcctgatctggagaagagcaggctgctgctgaaaaggca

SEQ ID NO: 590601 - DNA, 68 bp, Artificial Sequence
  ENSG00000173163_9 (sequence is synthesized)
ctgaggttgcagactggtctgaaggtgtacaggtgccctctgtgcctattccctactgaagacgggag

SEQ ID NO: 590602 - DNA, 120 bp, Artificial Sequence
  ENSG00000173163_10 (sequence is synthesized)
atatggacaggtgagttaaacttaagtcaattttcctttgtaaactgtatttttcactacatgttagcttgtctattcagcttgattttatgcaataacagcaacaggaaaagacactgt

SEQ ID NO: 590603 - DNA, 120 bp, Artificial Sequence
  ENSG00000173163_11 (sequence is synthesized)
accccggcatcacagaggagctgctacggagccagctatatccagaggtgccacccgaggagttccgcccctttctggcaaagatgagggggattcttaagagacagaatctccccatat

SEQ ID NO: 590604 - DNA, 120 bp, Artificial Sequence
  ENSG00000173163_12 (sequence is synthesized)
ttaagcaaccctctctctttagcctcccaattgctgggattacagcagctattctgggcctggaaacttgacttgggttaaaggagtggctggtctattgcgtctgcagacatggatttc

SEQ ID NO: 590605 - DNA, 120 bp, Artificial Sequence
  ENSG00000173163_13 (sequence is synthesized)
gatgcgtgcggtgggctccgggctggcgagattgtacgcccggggcgctgtgggtgaagagcgccgggggaacctttacgcgaggcagcaatgacaacgcgcgattttaaaggcgagtgt

SEQ ID NO: 590606 - DNA, 89 bp, Artificial Sequence
  ENSG00000173163_14 (sequence is synthesized)
tcagccagcctaactgaagatgatgtatgaaggagttggagttgttgaaaccaagaggggtccatacggcgttgttctggattcccatc

SEQ ID NO: 590607 - DNA, 66 bp, Artificial Sequence
  ENSG00000173163_15 (sequence is synthesized)
atcctccaggaatactggccagagggccgtgctaaccttcgctaaccagatccaggcagccttccg

SEQ ID NO: 590608 - DNA, 120 bp, Artificial Sequence
  ENSG00000173166_0 (sequence is synthesized)
ccagtcagtcagtcagtcagtcagtcagtcagtcagtcagtcactgagcgcgcggcgcgggagctgctggcagtcgctgcgtctctggcgagggagcgccgcgcctggggaggaggcgga

SEQ ID NO: 590609 - DNA, 120 bp, Artificial Sequence
  ENSG00000173166_1 (sequence is synthesized)
ggcagcggctggaggagcgcgagcggcggtttccttgcccggggccgcgggaaggccgaccgactgccgcgatggagcagctatcagatgaagaaattgatcatggtgctgaagaagaca

SEQ ID NO: 590610 - DNA, 120 bp, Artificial Sequence
  ENSG00000173166_2 (sequence is synthesized)
gtgacaaggaagatcaggacctggacaaaatgtttggagcctggcttggagaactagacaaactcactcagagtttggattctgacaagcccatggaaccagtaaaaagatctcctcttc

SEQ ID NO: 590611 - DNA, 120 bp, Artificial Sequence
  ENSG00000173166_3 (sequence is synthesized)
gccaggaaacaaacatggccaacttttcttaccgcttctccatatacaacttgaatgaagctctgaatcagggagagactgtggatctggatgccttgatggctgatctttgctctatag

SEQ ID NO: 590612 - DNA, 120 bp, Artificial Sequence
  ENSG00000173166_4 (sequence is synthesized)
agcaggagctcagcagcattggttcaggaaacagtaagcgtcaaatcacagaaacgaaagctactcagaaattgcctgttagccgacatacattgaaacatggcaccttgaaaggattat

SEQ ID NO: 590613 - DNA, 120 bp, Artificial Sequence
  ENSG00000173166_5 (sequence is synthesized)
cttcttcatctaataggatagctaaaccttcccatgccagctactccttggacgacgtcactgcacagttagaacaggcctctttgagtatggatgaggctgctcagcaatctgtactag

SEQ ID NO: 590614 - DNA, 120 bp, Artificial Sequence
  ENSG00000173166_6 (sequence is synthesized)
aagatactaaacccttagtaactaatcagcacagaagaaccgcgtcagcaggcacagtgagtgatgctgaagtacactctattagtaattcctcccattccagcatcacttccgcagcct

SEQ ID NO: 590615 - DNA, 120 bp, Artificial Sequence
  ENSG00000173166_7 (sequence is synthesized)
ccagcatggactctttggatattgataaagtaacacgccctcaagagctggatttgacacatcaagggcagccaattactgaggaagaacaggcagcaaaattgaaagctgagaagatca

SEQ ID NO: 590616 - DNA, 120 bp, Artificial Sequence
  ENSG00000173166_8 (sequence is synthesized)
gagttgccctagagaaaattaaagaggcacaagtgaaaaagctggtgatcagagtccacatgtctgatgacagttctaaaacaatgatggtggatgagaggcagacagtaagacaagtac

SEQ ID NO: 590617 - DNA, 120 bp, Artificial Sequence
  ENSG00000173166_9 (sequence is synthesized)
tggataacctgatggacaaatcccactgcggttatagtttagactggtcactggtagaaaccgtttctgaattacaaatggagagaatctttgaagaccatgaaaacttggttgaaaatc

SEQ ID NO: 590618 - DNA, 120 bp, Artificial Sequence
  ENSG00000173166_10 (sequence is synthesized)
ttcttaattggacaagagatagccaaaacaagcttatatttatggagcgtatagaaaaatatgcacttttcaaaaacccacagaattatcttttggggaaaaaagaaacagctgagatgg

SEQ ID NO: 590619 - DNA, 120 bp, Artificial Sequence
  ENSG00000173166_11 (sequence is synthesized)
cagatagaaacaaagaagtcctcttggaggaatgtttttgtggaagttctgtaactgtaccagaaattgaaggagtcctttggttgaaggatgatggcaagaagtcctggaaaaagcgtt

SEQ ID NO: 590620 - DNA, 120 bp, Artificial Sequence
  ENSG00000173166_12 (sequence is synthesized)
attttctcttgcgagcatctggtatctactatgttcccaaaggaaaagcaaaggtctctcgggatctggtgtgctttctccagctggatcatgtcaacgtttattatggccaggactatc

SEQ ID NO: 590621 - DNA, 120 bp, Artificial Sequence
  ENSG00000173166_13 (sequence is synthesized)
ggaacaaatacaaagcacctacagactattgtctggtgctgaagcatccacaaatccagaagaaatctcaatatatcaaatacctttgttgtgatgatgtgaggacactgcatcagtggg

SEQ ID NO: 590622 - DNA, 120 bp, Artificial Sequence
  ENSG00000173166_14 (sequence is synthesized)
tcaatgggatccgcattgcaaagtatgggaagcagctctatatgaactaccaagaagccttgaagaggacagagtcagcctatgattggacttccttatccagctccagcattaaatcgg

SEQ ID NO: 590623 - DNA, 120 bp, Artificial Sequence
  ENSG00000173166_15 (sequence is synthesized)
gatccagttcttccagcatcccagagtctcagtcaaaccactccaatcagtctgatagcggagtttctgacacccagccagcaggacacgtccgttcccagagcattgtgagctccgtat

SEQ ID NO: 590624 - DNA, 120 bp, Artificial Sequence
  ENSG00000173166_16 (sequence is synthesized)
tctctgaagcctggaaacgaggcactcagttggaagagtccagcaaggccagaatggagtctatgaatcggccctacacttcacttgtgccccctttatccccgcaacctaagatagtca

SEQ ID NO: 590625 - DNA, 120 bp, Artificial Sequence
  ENSG00000173166_17 (sequence is synthesized)
ccccctacactgcttcacagccttcaccacctctacctcctccgccacccccacctcctcctccaccaccccctccaccaccccctcctcccccactccccagccagtctgcaccttctg

SEQ ID NO: 590626 - DNA, 120 bp, Artificial Sequence
  ENSG00000173166_18 (sequence is synthesized)
caggctcagcagccccaatgttcgtcaagtacagcacaataacacggctacagaatgcgtctcagcattcaggggccctgtttaagccgccaacacccccagtgatgcagtcacagtcag

SEQ ID NO: 590627 - DNA, 120 bp, Artificial Sequence
  ENSG00000173166_19 (sequence is synthesized)
tgaagcctcagatcctggtaccccccaatggagttgttccaccaccccctccccctcctccacccccaaccccaggctctgccatggcccagctaaagcctgcaccgtgtgccccatccc

SEQ ID NO: 590628 - DNA, 120 bp, Artificial Sequence
  ENSG00000173166_20 (sequence is synthesized)
ttccacagttcagtgccccgcctcctccactgaagatccatcaagttcagcatattactcaggtggctcccccaacaccccccccacctcctcctatccctgcacccctccctccccaag

SEQ ID NO: 590629 - DNA, 120 bp, Artificial Sequence
  ENSG00000173166_21 (sequence is synthesized)
ctcccccaaaaccccttgtgaccatccccgcaccaaccagcaccaagactgtggcacctgttgtgactcaagctgcaccacccacacctactcctccagtgcccccagcaaaaaagcagc

SEQ ID NO: 590630 - DNA, 120 bp, Artificial Sequence
  ENSG00000173166_22 (sequence is synthesized)
cagctttccctgcttcttacattccaccctctccccctacccctcctgttccagtacccccgccaacattacccaagcaacagagcttctgtgcaaaaccccctccctctccactgtcac

SEQ ID NO: 590631 - DNA, 120 bp, Artificial Sequence
  ENSG00000173166_23 (sequence is synthesized)
cggtgccctcggtcgtgaagcagatagccagccagtttccaccccctccaactccccctgccatggaatctcagcccttaaagcctgtcccagcaaatgtagctccacagtcccctcctg

SEQ ID NO: 590632 - DNA, 120 bp, Artificial Sequence
  ENSG00000173166_24 (sequence is synthesized)
cagtaaaagcaaagcccaagtggcagcccagctccatcccagtcccttctccggacttccctcctccccctcctgaaagcagcctggtgtttcctcctccacccccatcacctgtcccag

SEQ ID NO: 590633 - DNA, 120 bp, Artificial Sequence
  ENSG00000173166_25 (sequence is synthesized)
ccccaccaccaccacctccacccacagcttctcctacccctgacaaaagtggatctccaggcaaaaagaccagtaagacgtccagccctgggggaaagaaaccacccccaaccccacagc

SEQ ID NO: 590634 - DNA, 120 bp, Artificial Sequence
  ENSG00000173166_26 (sequence is synthesized)
gcaactccagcattaaatccagcagtggtgcagagcaccccgagcccaagagaccctcggtggacagtctagtcagcaagtttacaccgccagcagaatcagggtctcccagcaaggaga

SEQ ID NO: 590635 - DNA, 120 bp, Artificial Sequence
  ENSG00000173166_27 (sequence is synthesized)
ccctaccacctcctgcagcaccccccaagcctggaaaactcaatctttctggagtcaaccttcctggagttctccaacaagggtgtgtgtcagcaaaagcccctgttctgagtgggcgtg

SEQ ID NO: 590636 - DNA, 120 bp, Artificial Sequence
  ENSG00000173166_28 (sequence is synthesized)
gaaaggactccgtggtggaatttccttctcctccatccgattctgattttccaccccctccacctgaaacagagcttcctctgccccccattgagattccagcagttttctcgggaaaca

SEQ ID NO: 590637 - DNA, 120 bp, Artificial Sequence
  ENSG00000173166_29 (sequence is synthesized)
cctctccaaaagtggcagtcgttaatcctcaaccacaacaatggtctaaaatgtcagtgaagaaggcccctccacccacacgacccaaacggaatgatagcacccgcctcactcaagctg

SEQ ID NO: 590638 - DNA, 120 bp, Artificial Sequence
  ENSG00000173166_30 (sequence is synthesized)
agatttctgagcagccaacaatggccacagttgtgccacaagtgcccacctctcccaaatccagccttagtgtccagcctggattcctggctgacctcaacaggacactgcaacgaaagt

SEQ ID NO: 590639 - DNA, 120 bp, Artificial Sequence
  ENSG00000173166_31 (sequence is synthesized)
ccatcactcggcacggctcactctcctcccgcatgtccagagcagaaccaacagccaccatggatgatatggcattgcctccaccaccccctgaactgctgtctgatcaacagaaggctg

SEQ ID NO: 590640 - DNA, 120 bp, Artificial Sequence
  ENSG00000173166_32 (sequence is synthesized)
gttacggaggcagtcatatatcaggctatgcaacgttgcggagaggaccccctcctgctccccccaaaagagaccagaacaccaagctctccagagactggtagccaccataggacttta

SEQ ID NO: 590641 - DNA, 120 bp, Artificial Sequence
  ENSG00000173166_33 (sequence is synthesized)
ttttcatgatatctgtaatcactgctacaatcagctcacctgatcatctgtgaattcaggtgttcagagcctcctggtatgatgttattcaggtagtgtccagctatatgtgtatgtgtg

SEQ ID NO: 590642 - DNA, 120 bp, Artificial Sequence
  ENSG00000173166_34 (sequence is synthesized)
tgtgtacacgtgcatgtacacacagctgtacagtgtgtgtatatatgtatacatatatgtatgtgtatgtgtatatagagagagagctgagagttattctatttattccttttctctcct

SEQ ID NO: 590643 - DNA, 120 bp, Artificial Sequence
  ENSG00000173166_35 (sequence is synthesized)
aatctgaaaatgggtgttctgtattttgggtggaagaggcatagaaggggatgtgtgttgtctcttaagatttctatatcatgtggattggaccaaaaacttctaatcacttatttagaa

SEQ ID NO: 590644 - DNA, 120 bp, Artificial Sequence
  ENSG00000173166_36 (sequence is synthesized)
ggtatttataagtgtctgtccatgtgtagcctattcgtgcatgttgtgtattatataactaaggaatagatgtagaatgtgctatttctggttgagaaaaatcaccagaatgtttggtgt

SEQ ID NO: 590645 - DNA, 120 bp, Artificial Sequence
  ENSG00000173166_37 (sequence is synthesized)
atctataaggcttttgtgtttgtttttccccagttggctgaagttagaattgcttgactgacacttcattgctatacatgaaggggcactttaaatcaggaaaatctctcagcttcatag

SEQ ID NO: 590646 - DNA, 120 bp, Artificial Sequence
  ENSG00000173166_38 (sequence is synthesized)
aacgggtaactagtgcaggatggggaaatgttcacagacatcatctgtatgtggttgtgcatagaaagtaaatacatggcgtaattaactcagctgttctagctgcagtactgctgcagt

SEQ ID NO: 590647 - DNA, 120 bp, Artificial Sequence
  ENSG00000173166_39 (sequence is synthesized)
gatccacccacatttaggatgtgctgacagataagctctttgcctacaatacatggataattagtgctataattctggatagttcctttttagtactgttttatgaagctttatcaactt

SEQ ID NO: 590648 - DNA, 120 bp, Artificial Sequence
  ENSG00000173166_40 (sequence is synthesized)
tcttaaaatatgtgctttaggtaggtgttattacatatctgtagacaattggtatatgaaatatacacatcctgtgccccaatatggtgcattatgaaaaacaaaatcattttctaaaat

SEQ ID NO: 590649 - DNA, 120 bp, Artificial Sequence
  ENSG00000173166_41 (sequence is synthesized)
gcattttttgagcattgctctatagaagggaagggtgatgagagaacagaactggcccctgtacaggtgtcattaatctggttgtatatgggttataatatgtaatacaaaaagctcatt

SEQ ID NO: 590650 - DNA, 120 bp, Artificial Sequence
  ENSG00000173166_42 (sequence is synthesized)
aagtatgggactacatggagagggaagacagtttcatttatagctactggggctaccaggacccttgctgactgcagcctggttgtgattagttcaggttactaggtgttctgatggagt

SEQ ID NO: 590651 - DNA, 120 bp, Artificial Sequence
  ENSG00000173166_43 (sequence is synthesized)
gggacagtccaagtccagtaactgacattacgttttatgcgtgtgcagtttggtataacgtggagtcagtgctctaacgacacactatacttctatatgcttttttctgtgaattttcct

SEQ ID NO: 590652 - DNA, 120 bp, Artificial Sequence
  ENSG00000173166_44 (sequence is synthesized)
tggtacatgagagaaataagtactctcatcaacttatgataaattggactattaggaataaaacaatctcagagcagctcctaaacaagagaataaaaatgggccatcccagcacttata

SEQ ID NO: 590653 - DNA, 120 bp, Artificial Sequence
  ENSG00000173166_45 (sequence is synthesized)
aggggagcacatcttgtaatgaaagtctgtgcctattgttaatgattaccaatgcaaactgcagaaatcagttgacattgtcccacaaggaaaaagtgatgccagtaaagtgggggaaga

SEQ ID NO: 590654 - DNA, 120 bp, Artificial Sequence
  ENSG00000173166_46 (sequence is synthesized)
gatggtaaataattctagaatgagcaaaagtgcttaattagtacagtatactcaaggtcttgcataacccacactccacgaaaaccgcatcgtaaacagagagtgaacagcacctctcca

SEQ ID NO: 590655 - DNA, 120 bp, Artificial Sequence
  ENSG00000173166_47 (sequence is synthesized)
ttgctacatctccagaatattgttcggttatgttcatgtggttatggagcaataagaatatataccattaatttttaggtctttcaaattgttcaccaagttttgtgtttgatatttatg

SEQ ID NO: 590656 - DNA, 120 bp, Artificial Sequence
  ENSG00000173166_48 (sequence is synthesized)
aagtgatctttaacacatctgcattgttaatttaagcatgcacagaaatttgggtaatgtttgagtagattgccaagcgctactgtgattcatgaatgaatttctcatagtcttctgcct

SEQ ID NO: 590657 - DNA, 120 bp, Artificial Sequence
  ENSG00000173166_49 (sequence is synthesized)
gcagttttatagtttgaggggcacccatatttgtgggttagagttagtaagaatatgaatccagttatcaaagtattcatccctgaggttttgagttttattgtggtggtgattttctca

SEQ ID NO: 590658 - DNA, 120 bp, Artificial Sequence
  ENSG00000173166_50 (sequence is synthesized)
tgagaaggtagacaacacttcagtttttcttgagggggaaaaaatgtacccgctaaccttttttcacccatgatttgagccctaaaacaacagcctttatgttttcagtgcaggatttct

SEQ ID NO: 590659 - DNA, 120 bp, Artificial Sequence
  ENSG00000173166_51 (sequence is synthesized)
tggaatttcttgcttgtatcaatcctgatgatagccatcctgaacagatgcttctggtctgttttcctggaatagcagacatccttttgaacactaatgatgccaggaagagagtaaggc

SEQ ID NO: 590660 - DNA, 120 bp, Artificial Sequence
  ENSG00000173166_52 (sequence is synthesized)
tagaggaggagactcattttaaccccagtccagtggcttgtccgacaacaggccatttccctttacattcctccacagacagaaatggctattaaaaatgttttaacctcatgtatgaac

SEQ ID NO: 590661 - DNA, 120 bp, Artificial Sequence
  ENSG00000173166_53 (sequence is synthesized)
tgaatttaaaaaaccactaaagtgatactttatacttctgttttactccctagtgggttttctttaatttggatttttgttgggatgtagcttttcctagactgtatttctgtagctctt

SEQ ID NO: 590662 - DNA, 120 bp, Artificial Sequence
  ENSG00000173166_54 (sequence is synthesized)
tttctctggtgtattcatggaaagcatctactgccgcacgacactagtactgtgccttctttcactgccctctgctctgcagctctcacccagcttggctgcttcaagtctgtgcagttg

SEQ ID NO: 590663 - DNA, 120 bp, Artificial Sequence
  ENSG00000173166_55 (sequence is synthesized)
acttggctgtactgaaaagtgaacagcatggattaactcatcctgctgctgagggcagtgcaaacaggtgcttattagaggtagtgacttgcttaattagtgacactcctaatttctact

SEQ ID NO: 590664 - DNA, 120 bp, Artificial Sequence
  ENSG00000173166_56 (sequence is synthesized)
atggataatttcaaagtagaatcactctatgcttagagttttggcaccaatgctgtagggcagcagaatctattctcagtaaaataacttatggtttattagatattctgtattggattt

SEQ ID NO: 590665 - DNA, 120 bp, Artificial Sequence
  ENSG00000173166_57 (sequence is synthesized)
taccagcttgacttttactgctcagatgctttctttcccccccttagacgctgtaattctcttgggaagagtaactattcttaaggtttttacagatacccaccttagttgtaaattgga

SEQ ID NO: 590666 - DNA, 120 bp, Artificial Sequence
  ENSG00000173166_58 (sequence is synthesized)
tagtttatatttctgggactttttaaatgaaaatgtggaatgttaagttacaaaagacttttcatcagaaaatttcaaacaaagtaaacatggcgttttatagtcctctaaaatctaggt

SEQ ID NO: 590667 - DNA, 120 bp, Artificial Sequence
  ENSG00000173166_59 (sequence is synthesized)
gctcccacccaccaaaggcatatcctgcaaagggctgtgaactatcttggtgaactgtcttgggtcccctttccatgtatgttttcttgtcactgaaaacaaacaacgctgagtttatca

SEQ ID NO: 590668 - DNA, 120 bp, Artificial Sequence
  ENSG00000173166_60 (sequence is synthesized)
agaaaatttaaattgggggatcataataattccaaccaagtgacaactctgacatcaaggttattaggagctgtacatccaattcaagttttatttgctgctattctgggagaataaact

SEQ ID NO: 590669 - DNA, 120 bp, Artificial Sequence
  ENSG00000173166_61 (sequence is synthesized)
tgtatatggagaataaactaataaacttgtatcgaggaaatccataaagttataaattagcctgaaaaatatttcaggtaatggtgtggattggcctgctttgactctcagccaccaaca

SEQ ID NO: 590670 - DNA, 120 bp, Artificial Sequence
  ENSG00000173166_62 (sequence is synthesized)
gaaatctttgtcacctttgttcctcagctaaaagtaattttgttataaacacaaagtgactttaaacaggtaaaaaacccattcctatttttgtacattaccaaaagtttttcatatacc

SEQ ID NO: 590671 - DNA, 120 bp, Artificial Sequence
  ENSG00000173166_63 (sequence is synthesized)
tacagagctaactaattacaactgatttaatccactcaagtttagaccagttaaacccataggatcctgtatggttatcaatgtgatgccttgcttttcataaaataggtataattgggt

SEQ ID NO: 590672 - DNA, 120 bp, Artificial Sequence
  ENSG00000173166_64 (sequence is synthesized)
catacacttgacgagagggtgactgtttctaggggaagaaaaccctttagattgcaggtaactttcacttttttttttttaatatacactttacatttgtataaattatgcagggtactc

SEQ ID NO: 590673 - DNA, 120 bp, Artificial Sequence
  ENSG00000173166_65 (sequence is synthesized)
ctaaccctgtagaaatgtatgacctctcacaaagttgagatttgatccaaagagaaatgcaagtataaaagaattagatacttattatcttttaaggtttttttttttttttggtagaga

SEQ ID NO: 590674 - DNA, 120 bp, Artificial Sequence
  ENSG00000173166_66 (sequence is synthesized)
ataaaattcaaagagaaaatttctacacctttatccctcaaataaaacaagtgctcagttcttaccgtgcccttgcaaggtctatatgtaaaagaaatctgaaatttagctgtagaataa

SEQ ID NO: 590675 - DNA, 120 bp, Artificial Sequence
  ENSG00000173166_67 (sequence is synthesized)
aacttgataaataaaaagaaaaaacatacatttctccagttggtttgctctttgcttgttgaagtaataaaccgttttaaagagaaaatacttgctgtaaacccccagtgccttcaactc

SEQ ID NO: 590676 - DNA, 120 bp, Artificial Sequence
  ENSG00000173166_68 (sequence is synthesized)
ttttggcagaatatttttaaagaaatccagcaagcaaactttgaggtgctaatgaaagtaaaggaaggtggtatttctagttttggcagaaatgaaaagtgtctcacaagagacatcact

SEQ ID NO: 590677 - DNA, 120 bp, Artificial Sequence
  ENSG00000173166_69 (sequence is synthesized)
acccacgtggggtctggctgctttctaccaaagacatttagagaagtgaattgagtcagggtgatggtgaacactacatattttatagatggttaagttgagaattaattatgtttatca

SEQ ID NO: 590678 - DNA, 120 bp, Artificial Sequence
  ENSG00000173166_70 (sequence is synthesized)
tggatggctactaataccaagctcatgattgttgcagcctcaacgtcttaggcagtaaaacttgtctgcagcactaaagggggagaaacccttatattttgcaaactgtccattcgttaa

SEQ ID NO: 590679 - DNA, 120 bp, Artificial Sequence
  ENSG00000173166_71 (sequence is synthesized)
atttattgtaacctaataccaaaaactgccgtttttcatattatttccccacctcctacttttttttttttttttgctacttgtaaaataaccccttctagaaaataagcattaactgga

SEQ ID NO: 590680 - DNA, 120 bp, Artificial Sequence
  ENSG00000173166_72 (sequence is synthesized)
atgtttcaaacaattttgcttcattttactatcagccactagtgaactcttacagagatgtacatttaagataaaattagcttgtgctaagtgttttaaaaacattgtttactgttaaag

SEQ ID NO: 590681 - DNA, 120 bp, Artificial Sequence
  ENSG00000173166_73 (sequence is synthesized)
gggaattgcacattatatttaactgggattgctccctccctcagttctttaaaaaacaagagtcaaggctcacaccaacttgtaggctgtgggagctttgccataggtagatacaatgta

SEQ ID NO: 590682 - DNA, 120 bp, Artificial Sequence
  ENSG00000173166_74 (sequence is synthesized)
gaagtatacttttttaaagcatgaagaagacaaggaacttcattataatgtaccaggtagaggacattattattcaaaggattatgcacagctcagtgaagatgaagttacaatttttct

SEQ ID NO: 590683 - DNA, 120 bp, Artificial Sequence
  ENSG00000173166_75 (sequence is synthesized)
tacaatttttctcgcagctttgttgctattattttcttctgcataaatgtatgctcatttcattatgtgccttgctccctgattgtgcaaagctatatatatatatatatatatatagat

SEQ ID NO: 590684 - DNA, 120 bp, Artificial Sequence
  ENSG00000173166_76 (sequence is synthesized)
atatgagagagatatattcagtactactgaggatgtttttctgaggatgtttttgttctgctggattaagttattttccaagttactcttgccagttatgtcagtaaactattgtaatgg

SEQ ID NO: 590685 - DNA, 120 bp, Artificial Sequence
  ENSG00000173166_77 (sequence is synthesized)
cttagcacactagtcgtacagtcagtgtaaatgtttttcatttacatgttttcattatatcagcttatcaaatccttaataaaaaaaattcatagatttcatttaaacatggggactttg

SEQ ID NO: 590686 - DNA, 120 bp, Artificial Sequence
  ENSG00000173166_78 (sequence is synthesized)
agtgtttgtggatcggcaccattaagaatctggttttgcatttcatgtcagggtacccaaaacataggccatacacagaagaaattaagtgtggtaaataaactagtttgatatgttcaa

SEQ ID NO: 590687 - DNA, 120 bp, Artificial Sequence
  ENSG00000173166_79 (sequence is synthesized)
gctatttctctgagatgttccagcaagcaggccaagcgtcatattgacttcacagaagaacaggctgagctgacacctcactcctatctggacagggaaacctcccttcttctgagaaac

SEQ ID NO: 590688 - DNA, 120 bp, Artificial Sequence
  ENSG00000173166_80 (sequence is synthesized)
taaagaatgtcccccctttacctgcattgctggacttctgtgcatgttggatgcaattgtctcacaccaacacgagtgtgtgtgtcaagcttattcattcctgtgtgactgtgcacgcct

SEQ ID NO: 590689 - DNA, 120 bp, Artificial Sequence
  ENSG00000173166_81 (sequence is synthesized)
gctcaacattctcatactctcctgtgtcagcttactagcatcaaaaagccatcctcattccaccaggaagccctcctaaacccagttatagcatctgcttgatgtggatgcagtcatgga

SEQ ID NO: 590690 - DNA, 120 bp, Artificial Sequence
  ENSG00000173166_82 (sequence is synthesized)
ctgaaaggtaaactggagccatcacatctccccttggaagtccagtgctcagaggaccgccacagagggttccatgtagggcaggctgtgtcaaagtcatacagccaaggtcagaagtca

SEQ ID NO: 590691 - DNA, 120 bp, Artificial Sequence
  ENSG00000173166_83 (sequence is synthesized)
tgcatcctgtcaccattcaaacagcttttgcagccggacatttttcctagattgttagatggtctagctattttactgtggggtaaaacaagttttctgtttccttcttgcccgcacaat

SEQ ID NO: 590692 - DNA, 120 bp, Artificial Sequence
  ENSG00000173166_84 (sequence is synthesized)
cagattttagccttcctgacattgtccatctttatgatcaccaccaacttctgcatccttttcatgcatgtcccagactccctgctttttagttttacacaatcaaagcttacctctgta

SEQ ID NO: 590693 - DNA, 120 bp, Artificial Sequence
  ENSG00000173166_85 (sequence is synthesized)
aaggtaacagcttcgttttaatttacattgaaaattctgtggtattcttttgggtttaaattgttgctctcttatgtctttatcggggatcttatttggccttatttcagtctcctttat

SEQ ID NO: 590694 - DNA, 120 bp, Artificial Sequence
  ENSG00000173166_86 (sequence is synthesized)
taattttcaatcttcctaattgtagtgggtaaagacagttcagagagacctgttgatttgacttccccttggaaatgagtattttacaaattggctctaatgacttaaaatctcaaaaaa

SEQ ID NO: 590695 - DNA, 120 bp, Artificial Sequence
  ENSG00000173166_87 (sequence is synthesized)
gagaagtctgcactttgagatgtctgttctttatcaacttcctgactgctcaaagttgaatcagaacatgaggagagagaggtgaaatcagatgaggtttgggagaatagagtgaggaaa

SEQ ID NO: 590696 - DNA, 120 bp, Artificial Sequence
  ENSG00000173166_88 (sequence is synthesized)
agaacttagtgcttggaaaatgagagatttacctgaagtaatctgaacagattatggtactatgaccatcacattttgcactgaggtagagaaaatacctgtaagttcgatttctttgat

SEQ ID NO: 590697 - DNA, 120 bp, Artificial Sequence
  ENSG00000173166_89 (sequence is synthesized)
tcacagaagctgtcctcacagggctctgctgcgagggagccatattacgggttgggctaggtacgtaatcatttggtaccactggaggacgcactggctccagtgtgcgatagggggagt

SEQ ID NO: 590698 - DNA, 120 bp, Artificial Sequence
  ENSG00000173166_90 (sequence is synthesized)
gccgcctacaaaaagaagagcgtatgtattgtatgattaagcaagtttcggcacaataaattcaaagagttgccagcagttgagatacaatttgtaatcagagataggaaatgtgtttta

SEQ ID NO: 590699 - DNA, 120 bp, Artificial Sequence
  ENSG00000173166_91 (sequence is synthesized)
acataacccagctaccaatttcagtctttactaatgtatcacttctccaccattagggttttggtgaatattgttatttttcagtctccaacctcatttccctgtgctaatgcaattttg

SEQ ID NO: 590700 - DNA, 120 bp, Artificial Sequence
  ENSG00000173166_92 (sequence is synthesized)
ttcatttattctcaaagagcacaaaggttctctaccatttaagccaatgtttcccagaccctacctcttcttagaagagttggaattcttttagtatcatattaaagtctcccaactgta

SEQ ID NO: 590701 - DNA, 120 bp, Artificial Sequence
  ENSG00000173166_93 (sequence is synthesized)
ggacaaaatgtttggagcctggcttggagaactagacaaactcactcaggtgagtagtgcttgaaaaactggttgaggatttgaagtcaccattgtgttaaaagtttaatgtgcagaaga

SEQ ID NO: 590702 - DNA, 120 bp, Artificial Sequence
  ENSG00000173171_0 (sequence is synthesized)
gcaagatggcggcgcccatggagctgttctgctggtcagggggctgggggctgccgtcagtggacctggacagcctggccgtgctgacctatgccagatttactggtgctccactgaagg

SEQ ID NO: 590703 - DNA, 120 bp, Artificial Sequence
  ENSG00000173171_1 (sequence is synthesized)
tacacaagatcagcaacccctggcagagcccttcaggaactctgcctgcccttcggaccagtcatggagaggtcatctcagttccacacaagatcatcacccaccttcgaaaagagaagt

SEQ ID NO: 590704 - DNA, 120 bp, Artificial Sequence
  ENSG00000173171_2 (sequence is synthesized)
acaatgctgattatgatctgtcagctcggcaaggggcagacaccctggccttcatgtctctcctggaggagaagttgctcccggtgctggtacatactttttggatagacaccaagaact

SEQ ID NO: 590705 - DNA, 120 bp, Artificial Sequence
  ENSG00000173171_3 (sequence is synthesized)
acgtggaagtgacccggaagtggtatgcagaggctatgccctttcccctcaacttcttcctgcctggccgcatgcagcggcagtacatggaacggctacagctgctgactggggagcaca

SEQ ID NO: 590706 - DNA, 120 bp, Artificial Sequence
  ENSG00000173171_4 (sequence is synthesized)
gaggacgaggaagagctggagaaggagctgtaccgagaggctcgggagtgtctgaccctgctctctcagcgcctgggctctcaaaagttcttctttggagatgcccctgcctccttggac

SEQ ID NO: 590707 - DNA, 120 bp, Artificial Sequence
  ENSG00000173171_5 (sequence is synthesized)
gccttcgtcttcagctacttggccctgctgctgcaggcaaagctgcccagtgggaagctgcaggtccacctgcgtgggctgcacaacctctgtgcctattgtacccacattctcagtctc

SEQ ID NO: 590708 - DNA, 120 bp, Artificial Sequence
  ENSG00000173171_6 (sequence is synthesized)
tacttcccctgggatggagctgaggtaccaccgcaacgccagacaccagcaggcccagagactgaggaggagccataccggcgccggaaccagatcctatctgtgctggcaggactggca

SEQ ID NO: 590709 - DNA, 120 bp, Artificial Sequence
  ENSG00000173171_7 (sequence is synthesized)
gccatggtgggctacgccttgctcagcggcattgtctccatccagcgggcaacgcctgctcgggccccaggcacccggaccctgggcatggctgaggaggatgaagaggaatgatttgtc

SEQ ID NO: 590710 - DNA, 120 bp, Artificial Sequence
  ENSG00000173171_8 (sequence is synthesized)
ctcacgctcccaagactggtttttctactctcatgcattccagaggcccccgtgcctcctcgttgttggtacagccggacacggggtgctgccacccagaataaagccactcacactgac

SEQ ID NO: 590711 - DNA, 120 bp, Artificial Sequence
  ENSG00000173171_9 (sequence is synthesized)
cctttcccctcaacttcttcctgcctggccgcatgcagcggcagtacatggaacggctacagctgctgactggggagcacaggcctgaggacgaggaagagctggagaaggaggtagctc

SEQ ID NO: 590712 - DNA, 120 bp, Artificial Sequence
  ENSG00000173171_10 (sequence is synthesized)
tgagaccgggggctattgtatgagatgagccccaaggatgctggccaggaatgggagtgcttaggtggggaggtggcactgttcccacagctgcaagcctacctgtgtcgcccctacagc

SEQ ID NO: 590713 - DNA, 120 bp, Artificial Sequence
  ENSG00000173171_11 (sequence is synthesized)
tggaaaacatgctgctcgggggacccccccgcagtccccgctcggggacgagccccaaggggccctggagcagtacaggccacgtgcagtttggcaagagcccccagacctggcccaggc

SEQ ID NO: 590714 - DNA, 120 bp, Artificial Sequence
  ENSG00000173171_12 (sequence is synthesized)
gcacaagaccccgctctccagagcctgccgcgccttcaggggttcggggctccacttggacgaggcgccgtgactctccgaggcgcgccgggccgacagcgctgtcccgctacgtgggcc

SEQ ID NO: 590715 - DNA, 120 bp, Artificial Sequence
  ENSG00000173171_13 (sequence is synthesized)
acctctggatgggccggcggccgccctcccccgaggcccgcggcccagtcccccgcagttcagctgccagtcgggccagaagaagcctcgcctccccggggatctccccaggccccctga

SEQ ID NO: 590716 - DNA, 120 bp, Artificial Sequence
  ENSG00000173171_14 (sequence is synthesized)
cttggatagagggggctgccagtgagagaagttcagtcaattctatacaatacacatttattgagcaccagatatatgccatgctagatgcaggtgacccagagcatcaaggagcaacag

SEQ ID NO: 590717 - DNA, 120 bp, Artificial Sequence
  ENSG00000173171_15 (sequence is synthesized)
tcttgtggcagagacacacacaatgtcactgtgatgtattaaagcagtcggcaagagatgaaacttagggcactgtgaggcagggagggagaggagcacaggctgaaggagagtggaaga

SEQ ID NO: 590718 - DNA, 120 bp, Artificial Sequence
  ENSG00000173171_16 (sequence is synthesized)
cagcagttggcctctgatggtgggactggagagagatttctaagggccacttcctgttttcagggactaggttgggctagatatggggctcaggatggacaaggcttagagccaggttgg

SEQ ID NO: 590719 - DNA, 120 bp, Artificial Sequence
  ENSG00000173171_17 (sequence is synthesized)
agaagatgaaagagcattactagaggagtggggaggcctaggctatgctctttactctgccattgactatgtgatctcgggcaggccatgtaacctctcagggctgtgcactcccttatt

SEQ ID NO: 590720 - DNA, 120 bp, Artificial Sequence
  ENSG00000173171_18 (sequence is synthesized)
tgtaaaactagagggctgggccagcatgttttccaagggttcttctagcattgacggtcaggttccaagagggaacagtgtcagaagtaggacactcttcctcatttctaacttcccaaa

SEQ ID NO: 590721 - DNA, 120 bp, Artificial Sequence
  ENSG00000173171_19 (sequence is synthesized)
ggttgaggacctggggaattaattgagaggcctggaaagagaggatccagataaaagccaaagttcctggcagagccgaggccactgccctgattgcttaggtgtgaacagagcttttcc

SEQ ID NO: 590722 - DNA, 120 bp, Artificial Sequence
  ENSG00000173171_20 (sequence is synthesized)
agtttccaaagtattctaaattatttcctaacacaggggcattcagagaaagagattcttacccccattccacaggggagaaactgaggcttagggagatttaaggatcatgctgaagag

SEQ ID NO: 590723 - DNA, 120 bp, Artificial Sequence
  ENSG00000173171_21 (sequence is synthesized)
gttatctggggacaaagcttactcaggatgtggagggggatgctgaggaacagggactggagcctgggaaggtagggcaggctgagacctgggggtatgggtggaatgtgtatgtggtaa

SEQ ID NO: 590724 - DNA, 120 bp, Artificial Sequence
  ENSG00000173171_22 (sequence is synthesized)
caagctggggggccctgggcgtgggttccctggatccagggagtgtgaggatggctttctctggttcctgaggcatggaccgagtcctagcctgcatctgagctccgttgtgctagcttt

SEQ ID NO: 590725 - DNA, 120 bp, Artificial Sequence
  ENSG00000173171_23 (sequence is synthesized)
gtggtgtctgggtcggggaagttactgttagaaagttgccgtcagcgggcgttgttccagctttccatggaaattctgggagctgctcctagtttgcggcggagccttccttccttccct

SEQ ID NO: 590726 - DNA, 120 bp, Artificial Sequence
  ENSG00000173171_24 (sequence is synthesized)
gcattgggcgctggaccttcacggccaggaggctccaaggcccaggcttttcgccaacagcaacaggctactggctgggcccaggcaagggggccttggcaggaaaagttccttgctgta

SEQ ID NO: 590727 - DNA, 80 bp, Artificial Sequence
  ENSG00000173175_0 (sequence is synthesized)
gggcgagaagggaggagcggcgcgagcggccggagcggcgcagggcccgaagcgtgcatggcgcgccctgagccgggctc

SEQ ID NO: 590728 - DNA, 120 bp, Artificial Sequence
  ENSG00000173175_1 (sequence is synthesized)
tcaggcgggcccctctgggccggctgcttctgagccccggcgctggatctctggatgccttactccccgggagaagcctgcctgcgtcggggcagaaccgcggcagcgctgcgccggatt

SEQ ID NO: 590729 - DNA, 120 bp, Artificial Sequence
  ENSG00000173175_2 (sequence is synthesized)
gattccgtcctccgcctagtcgttccgcgccggccgcggtgggcccgcagccggcgacgaggagcttggggcttgcgaagcgggcgcgacagctctccgggccggcaggtcccggccggc

SEQ ID NO: 590730 - DNA, 120 bp, Artificial Sequence
  ENSG00000173175_3 (sequence is synthesized)
ctccgtttgcgggaaagggagaggcgagaggggaagggccgcaccgcaggagccggtccctgacccggaccccgccccctgcgcggacgcgccgaaggctcggctcggctttcgccgggg

SEQ ID NO: 590731 - DNA, 120 bp, Artificial Sequence
  ENSG00000173175_4 (sequence is synthesized)
gcatccactctcgccgcgagaggtgggggatgcgggcaacggcccccccgggctccaggaccctcccccccggggctccggagctgttgctccgcccgtcgccccctcccccgtcctctc

SEQ ID NO: 590732 - DNA, 120 bp, Artificial Sequence
  ENSG00000173175_5 (sequence is synthesized)
tctccacctcccatcccacctccccacccctcgtaagaaaataatgctggctggcgcccgcacctcccagtcgctcccagtccgctgcgaggaaagcgcacccgcagtgtctcttcgccg

SEQ ID NO: 590733 - DNA, 120 bp, Artificial Sequence
  ENSG00000173175_6 (sequence is synthesized)
agccgccctcgccgccgccgagccccgagagcagctgggctccgcttaggcggaatcagcgagcgccgcgcccgggcactgccggcccgaggaggcaccgcccgcaaggacaccactccg

SEQ ID NO: 590734 - DNA, 120 bp, Artificial Sequence
  ENSG00000173175_7 (sequence is synthesized)
gacaccactccgtcccgtctcgtccgcaactccggccctcgtcgagctcgacgcgagccaggatcccggacgtctctccgcgtgcggcgcagcagcagccagaccagtccctgcgacccc

SEQ ID NO: 590735 - DNA, 120 bp, Artificial Sequence
  ENSG00000173175_8 (sequence is synthesized)
acctcggaggcaactccatttcggacctgggacttctgacgcggatcctcagctacttctcacctcggggctgtgccctcctcctccgctcaggacgggggtgccaagatgccccgctgc

SEQ ID NO: 590736 - DNA, 120 bp, Artificial Sequence
  ENSG00000173175_9 (sequence is synthesized)
agcgcagggccccgggccgcccccgacgtgtgaccctagcctggtccccctgctcggccgtccgccctccccttggagacccccggcccggcttccgggggaggaggaaggagacgacga

SEQ ID NO: 590737 - DNA, 120 bp, Artificial Sequence
  ENSG00000173175_10 (sequence is synthesized)
acgaggccgagggggggatgtccggctccaaaagcgtgagccccccgggctacgcggcgcagaagactgcggcgccggcgccccggggaggccccgaacaccgctctgcgtggggcgagg

SEQ ID NO: 590738 - DNA, 120 bp, Artificial Sequence
  ENSG00000173175_11 (sequence is synthesized)
ccgattcccgcgcgaatggctacccccatgcccccgggggctctgcccgcggctccaccaagaaacccgggggggcggtgaccccgcagcagcagcagcgcctggccagccgctggcgca

SEQ ID NO: 590739 - DNA, 120 bp, Artificial Sequence
  ENSG00000173175_12 (sequence is synthesized)
cgacgacgacgatcctccgctgagcggtgacgaccccctggccgggggcttcggcttcagcttccgctccaagtccgcctggcaggagcgcggcggcgacgactgcggtcgcggcagccg

SEQ ID NO: 590740 - DNA, 80 bp, Artificial Sequence
  ENSG00000173175_13 (sequence is synthesized)
gcggcggcggctcggcggcggcggctgcctcggcgggcgggacggaggtgcgccctcgctcggtggaggtgggtctggag

SEQ ID NO: 590741 - DNA, 80 bp, Artificial Sequence
  ENSG00000173175_14 (sequence is synthesized)
ggaggtgggtctggaggagcggcggggcaaggggcgcgcggccgacgagctggaggccggcgccgtcgagggcggcgagg

SEQ ID NO: 590742 - DNA, 120 bp, Artificial Sequence
  ENSG00000173175_15 (sequence is synthesized)
cgcggggcccggcgcggtgctgtccctgggcgcctgctgcctggcgttgctgcagatattccgctccaagaagttcccgtcggacaaactggagcggctgtaccagcgctacttcttccg

SEQ ID NO: 590743 - DNA, 120 bp, Artificial Sequence
  ENSG00000173175_16 (sequence is synthesized)
cctgaaccagagcagcctcaccatgctcatggccgtgctggtgctcgtgtgcctggtcatgttggccttccacgcggcgcggcccccgctccagctgccctacctggccgtgctggcggc

SEQ ID NO: 590744 - DNA, 120 bp, Artificial Sequence
  ENSG00000173175_17 (sequence is synthesized)
cgccgtcggcgtgatcctcatcatggctgtgctttgcaaccgcgccgccttccaccaggaccacatgggcctggcctgctatgcgctcatcgccgtggtgctggccgtccaggtggtggg

SEQ ID NO: 590745 - DNA, 120 bp, Artificial Sequence
  ENSG00000173175_18 (sequence is synthesized)
cctgctgctgccgcagccacgcagcgcctctgagggcatctggtggaccgtgttcttcatctacaccatctacacgctgctgcccgtgcgcatgcgggccgcagtgctcagcggggtgct

SEQ ID NO: 590746 - DNA, 120 bp, Artificial Sequence
  ENSG00000173175_19 (sequence is synthesized)
cctgtccgccctccacctggccatcgccctgcgcaccaacgcccaggaccagttcctgctgaagcagcttgtctccaatgttctcattttctcctgcaccaacatcgtgggtgtctgcac

SEQ ID NO: 590747 - DNA, 120 bp, Artificial Sequence
  ENSG00000173175_20 (sequence is synthesized)
ccactatccggctgaggtctcccagagacaggctttccaggagacccgagagtgcatccaggcgcggctccactcgcagcgggagaaccagcagcaggaacggctcctgctgtctgtcct

SEQ ID NO: 590748 - DNA, 120 bp, Artificial Sequence
  ENSG00000173175_21 (sequence is synthesized)
tccccgtcatgttgccatggagatgaaagcagacatcaacgccaagcaggaggatatgatgttccataagatttacatccagaaacatgacaacgtgagcatcctgtttgctgacatcga

SEQ ID NO: 590749 - DNA, 120 bp, Artificial Sequence
  ENSG00000173175_22 (sequence is synthesized)
gggcttcaccagcctggcgtcccagtgcactgcacaggaactggtcatgaccctcaacgagctcttcgcccgctttgacaagctggccgcagagaatcactgtttacgtattaagatcct

SEQ ID NO: 590750 - DNA, 120 bp, Artificial Sequence
  ENSG00000173175_23 (sequence is synthesized)
tggggattgttattactgcgtctcggggctgcctgaagcaagggctgaccacgcccactgctgtgtggagatgggcatggacatgatcgaggccatctcgttggtccgggaggtgacagg

SEQ ID NO: 590751 - DNA, 120 bp, Artificial Sequence
  ENSG00000173175_24 (sequence is synthesized)
ggtgaacgtgaacatgcgtgtgggaattcacagcgggcgagtacactgcggtgtccttggtctcaggaagtggcagttcgacgtctggtctaacgatgtcacgctagccaaccacatgga

SEQ ID NO: 590752 - DNA, 120 bp, Artificial Sequence
  ENSG00000173175_25 (sequence is synthesized)
ggctggcggcaaggcaggacgcatccacatcaccaaggctacactcaactacctgaatggggactacgaggtggagccaggctgtgggggcgagcgcaacgcctacctcaaggagcacag

SEQ ID NO: 590753 - DNA, 120 bp, Artificial Sequence
  ENSG00000173175_26 (sequence is synthesized)
tatcgagaccttcctcatcctgcgctgcacccagaagcggaaagaagagaaggccatgatcgccaagatgaaccgccagagaaccaactccatcgggcacaacccaccacactggggggc

SEQ ID NO: 590754 - DNA, 120 bp, Artificial Sequence
  ENSG00000173175_27 (sequence is synthesized)
tgagcgccccttctacaaccacctgggtggcaaccaggtgtccaaggagatgaagcggatgggctttgaagaccccaaggacaagaacgcccaggagagtgcgaaccctgaggatgaagt

SEQ ID NO: 590755 - DNA, 120 bp, Artificial Sequence
  ENSG00000173175_28 (sequence is synthesized)
ggatgagtttctgggccgtgccattgacgccaggagcattgataggcttcggtctgagcacgtccgcaagttcctcctgaccttcagggagcctgacttagagaagaagtactccaagca

SEQ ID NO: 590756 - DNA, 120 bp, Artificial Sequence
  ENSG00000173175_29 (sequence is synthesized)
ggtagacgaccgatttggtgcctatgtggcgtgtgcctcgctcgtcttcctcttcatctgctttgtccagatcaccatcgtgccccactccatattcatgctcagcttctacctgacctg

SEQ ID NO: 590757 - DNA, 120 bp, Artificial Sequence
  ENSG00000173175_30 (sequence is synthesized)
cagcaccctggttggggtgttcaccatcaccctggtgttcctggcggcttttgtcaacatgttcacgtgcaactccagggacctgctgggctgcttggcacaggagcacaacatcagcgc

SEQ ID NO: 590758 - DNA, 120 bp, Artificial Sequence
  ENSG00000173175_31 (sequence is synthesized)
gagccaggtcaacgcgtgtcacgtggcggagtcggccgtcaactacagcctgggcgatgagcagggcttctgtggcagcccctggcccaactgcaacttccccgagtacttcacctacag

SEQ ID NO: 590759 - DNA, 120 bp, Artificial Sequence
  ENSG00000173175_32 (sequence is synthesized)
cgtgctgctcagcctgctggcctgctccgtgttcctgcagatcagctgcatcgggaagctggtgctcatgctggccatcgagctcatctacgtgctcatcgtggaggtgccaggtgtcac

SEQ ID NO: 590760 - DNA, 120 bp, Artificial Sequence
  ENSG00000173175_33 (sequence is synthesized)
gctcttcgacaacgccgacctgctggtcaccgccaacgccatagacttcttcaacaacgggacctcccagtgccctgagcatgcaaccaaggtggcattgaaggtggtgacgcccatcat

SEQ ID NO: 590761 - DNA, 120 bp, Artificial Sequence
  ENSG00000173175_34 (sequence is synthesized)
catctcagtctttgtgctggccctgtacctgcacgcccagcaggtggagtccactgcccgcctcgacttcctctggaaactgcaggccacagaggagaaagaggagatggaggagctgca

SEQ ID NO: 590762 - DNA, 120 bp, Artificial Sequence
  ENSG00000173175_35 (sequence is synthesized)
ggcctacaaccggcggctgctgcacaacatcctgcccaaggacgtggccgctcacttcctggcccgcgagcggcgcaatgatgagctctactatcagtcctgtgagtgtgtggcggtcat

SEQ ID NO: 590763 - DNA, 120 bp, Artificial Sequence
  ENSG00000173175_36 (sequence is synthesized)
gttcgcctccatcgccaacttctccgagttctacgttgagctggaggccaacaacgagggtgtcgagtgcctgcggctactcaatgagatcatcgctgactttgatgagatcatcagcga

SEQ ID NO: 590764 - DNA, 120 bp, Artificial Sequence
  ENSG00000173175_37 (sequence is synthesized)
ggatcggttccggcagctggagaagatcaagaccatcggcagcacctacatggctgcctccggcctcaacgactctacctacgacaaggtgggcaagacccacatcaaggcactggccga

SEQ ID NO: 590765 - DNA, 120 bp, Artificial Sequence
  ENSG00000173175_38 (sequence is synthesized)
ctttgccatgaagctgatggaccagatgaagtacatcaatgagcactccttcaacaacttccagatgaagatcgggctcaacatcggccccgtggtggccggggtgataggggcacgaaa

SEQ ID NO: 590766 - DNA, 120 bp, Artificial Sequence
  ENSG00000173175_39 (sequence is synthesized)
gcctcagtacgacatctggggcaataccgtgaacgtggccagccgcatggacagcaccggtgtacccgaccgcatccaggtcaccacagacatgtaccaggtgctggctgccaacacgta

SEQ ID NO: 590767 - DNA, 120 bp, Artificial Sequence
  ENSG00000173175_40 (sequence is synthesized)
ccagctggagtgccggggcgtggtcaaggtcaagggcaaaggcgagatgatgacctacttcctcaatggagggcccccgctcagttagcagctgttggccaatggtgccaggcagcctgg

SEQ ID NO: 590768 - DNA, 120 bp, Artificial Sequence
  ENSG00000173175_41 (sequence is synthesized)
cctccagaggcatggaagcagcttctctgtgtgccgggggtggcggggaagccatgctccagcccgcagggctgcgctgctgagattttccacttggactccagagcagcttctgccttt

SEQ ID NO: 590769 - DNA, 120 bp, Artificial Sequence
  ENSG00000173175_42 (sequence is synthesized)
gctggtgggcagcggcctctgtcccaggccccggggtgccagcgtcctgcgagcacccagctgaccaaagatgtttccctctgtagaagactctgctagactgggtctgaagcttgagtt

SEQ ID NO: 590770 - DNA, 120 bp, Artificial Sequence
  ENSG00000173175_43 (sequence is synthesized)
ttctaacaggtgctgctgcacaggtggaaaggagccgtgggaatgtgtgtgtggcacggcccagacaagggcagggctgaggggcctccgactcagctgggggtagacgggctcgaatgt

SEQ ID NO: 590771 - DNA, 120 bp, Artificial Sequence
  ENSG00000173175_44 (sequence is synthesized)
ggcctgggagagcctagggggccccaggggtctgcttttctatgtgagcctttaaacttcagacaggccaccaccctgcacctgcaggggctttggcacaggagtgctggctttggaggg

SEQ ID NO: 590772 - DNA, 120 bp, Artificial Sequence
  ENSG00000173175_45 (sequence is synthesized)
actgtggccttcatcgtggtcctctgcccacacctccacgcacacagacagtgccctaggagggaaacagaactaattacgagggggaggcaagaggacgccaagcaaggagtggtgatt

SEQ ID NO: 590773 - DNA, 120 bp, Artificial Sequence
  ENSG00000173175_46 (sequence is synthesized)
ctgagaaaaatatttattaaataaaacaaaacaagttctccgtgcccttctttagactatgctagttgtatgcgtgtaagagacacacaagcaaacgaggacgccactcggggggagggc

SEQ ID NO: 590774 - DNA, 120 bp, Artificial Sequence
  ENSG00000173175_47 (sequence is synthesized)
ggggatccccacttgtcttttttgtattttttattttgtattattgaaagccttggagatctcacagatagatatgccaaattctatattttgtaaattctctatattagaaaacagctg

SEQ ID NO: 590775 - DNA, 120 bp, Artificial Sequence
  ENSG00000173175_48 (sequence is synthesized)
tgcacagcagggcgggtgtgctcatttgtactgtgtgtatgtcggtgtatgtactggtgtatatgtgtgtgtgttcatgctgtggaactggtctcacacaggatgtgtttccctcatttc

SEQ ID NO: 590776 - DNA, 120 bp, Artificial Sequence
  ENSG00000173175_49 (sequence is synthesized)
agatttggcagttttgggttttccaaggtaccaccagagcagtgggtgtgtgcttttggggtaccatatgctcagattaagtaggaggatgcatggacacactgccccatcttttctgac

SEQ ID NO: 590777 - DNA, 120 bp, Artificial Sequence
  ENSG00000173175_50 (sequence is synthesized)
acacgcacacgtatgtacacacatgcacacaccctccttcccctaagcaaaacgcagatggaataagaaaacaaaaagctgctttcccatcccaggccgagctggaaccaagggaagcaa

SEQ ID NO: 590778 - DNA, 120 bp, Artificial Sequence
  ENSG00000173175_51 (sequence is synthesized)
tctcatcctgcgacaggcagtgtggtgccctccacaccctgagatttcagacgtttgcggcttacagaggcagcgcccacagattccagagtgcttacagaaggccaggtgctttgcagg

SEQ ID NO: 590779 - DNA, 120 bp, Artificial Sequence
  ENSG00000173175_52 (sequence is synthesized)
ctgggacgaggaagccaagcctccctggcctactcagttggccaaggtgcaggtggctcttcctggagatgttcactcagactgggggatgcaatgtgcagccttcaggtttgcggaaag

SEQ ID NO: 590780 - DNA, 120 bp, Artificial Sequence
  ENSG00000173175_53 (sequence is synthesized)
ggagtggccttgacctccaccggcaaaccaggcagaggaatgggtagagcccagctttagagtccacagggaaagctagcaggaattttgttttagtgggagggggcagttaaacatacc

SEQ ID NO: 590781 - DNA, 120 bp, Artificial Sequence
  ENSG00000173175_54 (sequence is synthesized)
aagaaaaaaatactatttttataacctatgaggaagacatttggaaaatgatactctagcacagaattcagtggaatccttagggcccatgcccaaatctttccattgcttctcaggtta

SEQ ID NO: 590782 - DNA, 120 bp, Artificial Sequence
  ENSG00000173175_55 (sequence is synthesized)
gaatgatcttcacctccaacatgagcttggaggtgatgaggcagtggctctgtgccagctgccacaatgtgactttgatgtccacctgtaccacctctcactgggctctagcaccaccct

SEQ ID NO: 590783 - DNA, 120 bp, Artificial Sequence
  ENSG00000173175_56 (sequence is synthesized)
cccctccccgcacaccaactgaacacagctctgagaagcaaagtgtgtggacccaaaactgccaagcctgagtctgtcccgtgcttctgctgctccatcctttgagttctgcattgccat

SEQ ID NO: 590784 - DNA, 120 bp, Artificial Sequence
  ENSG00000173175_57 (sequence is synthesized)
cctgacgtcggccacaggaggcctgctttcttccagctgttgttctcaagttccctgcccctccacatcgcccgccagtggtgttgggttttcgttctgcttccaacctgagtaaagtgt

SEQ ID NO: 590785 - DNA, 120 bp, Artificial Sequence
  ENSG00000173175_58 (sequence is synthesized)
gtgtgctgagttcatcccatgttctcccatggtcatggcttcccggccccatggggacccctctcccatcccagcagtgactggtgacagtgtgcaggtgcagtgctagctcttcgttcc

SEQ ID NO: 590786 - DNA, 120 bp, Artificial Sequence
  ENSG00000173175_59 (sequence is synthesized)
ctctaaagggtgtgcactctttttattcctactcttgcaaaaacagatacgattatgatttcccatggaaattgaaaagtctatttaaataatttaactattaaacactttcactggtaa

SEQ ID NO: 590787 - DNA, 120 bp, Artificial Sequence
  ENSG00000173175_60 (sequence is synthesized)
gtcttatgttctcagcactcggggtgcttgtcaaccagccttttggtctgcatttgaaagtccccttccagagcctcgaggcaatctctggggcccctggatccctgctgaggtgcccat

SEQ ID NO: 590788 - DNA, 120 bp, Artificial Sequence
  ENSG00000173175_61 (sequence is synthesized)
ggtcccctccatccccacagggcagcctgtgtagtgctgggtagggcccaggcctgtcccacggaagacatggccccatctaggttccgcactcagttggaggtaagcttgtctccaatg

SEQ ID NO: 590789 - DNA, 120 bp, Artificial Sequence
  ENSG00000173175_62 (sequence is synthesized)
gtgcatgcatgtgagtgtggatagagaatgtccttcattaagctgctgtggcctcatgaccatgactcataaacttacaatcaagctctgctggacagaggagacctgtccccaggcttg

SEQ ID NO: 590790 - DNA, 120 bp, Artificial Sequence
  ENSG00000173175_63 (sequence is synthesized)
agatgcatggagggcctggaatcatgatgaggggaggggatgcggtgctctctcgggcaccggctgcactatcagcgttccctggagaaacagaacccttaggatttatatagacatata

SEQ ID NO: 590791 - DNA, 120 bp, Artificial Sequence
  ENSG00000173175_64 (sequence is synthesized)
gaaagatttactgtgggggattggctcatgccgttacggagactgagaagacccatgagctgttgtctgtaagctggaggaccagaaaagccagtgacgtggtttcagtccaagcctgaa

SEQ ID NO: 590792 - DNA, 120 bp, Artificial Sequence
  ENSG00000173175_65 (sequence is synthesized)
caggggaagatggatgtctcagctcaagaagagagtgaattctcccctcctctacctttttgctctattcaagccttcagtggatttgataacgcccacctgaatttgcttgtctccaat

SEQ ID NO: 590793 - DNA, 120 bp, Artificial Sequence
  ENSG00000173175_66 (sequence is synthesized)
tataaatgtcctagggaaggaggttattgcctttagcccctttttggggaagcgtctggaagtaagtcctgaggaatgaagtctcagaaagagggctgttgcagcagaggtgacctgtcc

SEQ ID NO: 590794 - DNA, 120 bp, Artificial Sequence
  ENSG00000173175_67 (sequence is synthesized)
agctggaaagatggggcaaggcagaagctgggcctcagacacaggcaggggacatgggccgactgcccacctcctggcccctgaccatggtggagtgggaggtctggatggagcagtgag

SEQ ID NO: 590795 - DNA, 120 bp, Artificial Sequence
  ENSG00000173175_68 (sequence is synthesized)
cttcaacaacgggacctcccagtggtgagttgatgctcctcggatagggtcgctccctgccctcagcacagagcagacagggagggcagctggtgcccaggtgggaggggccttggtggc

SEQ ID NO: 590796 - DNA, 120 bp, Artificial Sequence
  ENSG00000173175_69 (sequence is synthesized)
caagaggaggaggattagggaaaggcaactgcattgcacaggaggtcactagagaccttgaagagggcactcctggtgaggggtgtcgaggacacaggtgcaggctccttgtgtcttgca

SEQ ID NO: 590797 - DNA, 120 bp, Artificial Sequence
  ENSG00000173175_70 (sequence is synthesized)
ttcacaggcatttgacaggagcagggtagcgggaggctgcagggtttagcacagccttgggcctggaagcccacgggtgtctcaggttgggagtcagaaggacctgcagcatgtggggag

SEQ ID NO: 590798 - DNA, 120 bp, Artificial Sequence
  ENSG00000173193_0 (sequence is synthesized)
ggagttggcgcggcccctgcagtccggcggagagcggagctgaggatggctgtgcccggctccttcccgctgctggtcgagggctcctggggccccgaccccccgaagaacttgaacacc

SEQ ID NO: 590799 - DNA, 120 bp, Artificial Sequence
  ENSG00000173193_1 (sequence is synthesized)
aagttgcagatgtacttccagagcccgaagaggtcgggaggcggcgagtgtgaggtccgccaggatcccaggagcccatcccgcttcctggtgttcttctacccggaggacgttcggcag

SEQ ID NO: 590800 - DNA, 120 bp, Artificial Sequence
  ENSG00000173193_2 (sequence is synthesized)
aaggttctggagagaaaaaatcatgagttggtatggcaaggaaaaggaacattcaagttaactgtccagttacctgcaaccccagatgaaatcgatcatgtctttgaagaggaacttcta

SEQ ID NO: 590801 - DNA, 120 bp, Artificial Sequence
  ENSG00000173193_3 (sequence is synthesized)
acaaaagaatccaagaccaaagaagatgttaaagaaccagatgtgtcagaagaattggatacaaaactccctcttgatggtggattagacaaaatggaagatatcccagaggaatgtgaa

SEQ ID NO: 590802 - DNA, 120 bp, Artificial Sequence
  ENSG00000173193_4 (sequence is synthesized)
aatatttcctctttggtggcatttgaaaacctcaaggcaaatgtgactgacataatgctaatcttgttagtggagaacataagtggcctgtctaatgatgactttcaagtggaaataata

SEQ ID NO: 590803 - DNA, 120 bp, Artificial Sequence
  ENSG00000173193_5 (sequence is synthesized)
agagattttgatgttgctgttgttacctttcaaaagcacatagatactataagatttgttgatgattgtaccaagcaccattcaattaaacaacttcagctttctccaagacttctggaa

SEQ ID NO: 590804 - DNA, 120 bp, Artificial Sequence
  ENSG00000173193_6 (sequence is synthesized)
gtgacaaacacaatcagggttgaaaacctgccacctggtgctgatgactacagtttaaaacttttctttgaaaatccctataatggagggggaagagttgccaatgttgaatattttcct

SEQ ID NO: 590805 - DNA, 120 bp, Artificial Sequence
  ENSG00000173193_7 (sequence is synthesized)
gaagagagttcagctctgattgaattttttgacagaaaagtgttagacaccatcatggccacaaaactcgacttcaataaaatgccactttctgtgttcccatactatgcctcattgggc

SEQ ID NO: 590806 - DNA, 120 bp, Artificial Sequence
  ENSG00000173193_8 (sequence is synthesized)
acagccttgtatggaaaggagaagcctctgatcaagcttccagcaccatttgaagagtcactagatcttcccttatggaagttcttacagaaaaagaatcacctcattgaggagataaac

SEQ ID NO: 590807 - DNA, 120 bp, Artificial Sequence
  ENSG00000173193_9 (sequence is synthesized)
gatgaaatgaggcgttgtcactgtgagctcacgtggtcccaactcagtggtaaagttaccatcagaccagcagccaccttagtcaatgaaggaagaccgagaatcaagacctggcaggca

SEQ ID NO: 590808 - DNA, 120 bp, Artificial Sequence
  ENSG00000173193_10 (sequence is synthesized)
gatacttccacaacactctctagcatcaggtctaaatataaagtcaacccaattaaagtggatccaacaatgtgggacaccataaaaaatgatgtgaaagatgacaggattttgattgag

SEQ ID NO: 590809 - DNA, 120 bp, Artificial Sequence
  ENSG00000173193_11 (sequence is synthesized)
tttgatacacttaaggagatggtaatcttagcagggaaatcagaggatgtccaaagcattgaggtacaagtcagggagttaatagaaagcactactcaaaaaattaaaagggaagagcaa

SEQ ID NO: 590810 - DNA, 120 bp, Artificial Sequence
  ENSG00000173193_12 (sequence is synthesized)
agtttgaaggaaaaaatgatcatttctccaggcaggtattttcttttgtgtcacagcagtctactggaccatttactcacggagtgcccagagatagagatttgttacgatagagtcact

SEQ ID NO: 590811 - DNA, 120 bp, Artificial Sequence
  ENSG00000173193_13 (sequence is synthesized)
caacacttgtgcttgaaaggacctagtgcagatgtgtataaagcaaagtgtgaaatccaggaaaaggtgtacaccatggctcagaaaaacattcaggtttctcctgagatttttcagttt

SEQ ID NO: 590812 - DNA, 120 bp, Artificial Sequence
  ENSG00000173193_14 (sequence is synthesized)
ttgcaacaggtaaactggaaagaattctctaagtgtcttttcatagcacagaagattcttgcactttatgagctagagggtacaactgttctcttaaccagctgttcttctgaagccctg

SEQ ID NO: 590813 - DNA, 120 bp, Artificial Sequence
  ENSG00000173193_15 (sequence is synthesized)
ttagaagcagaaaagcaaatgctcagtgccttaaattataagcgcattgaagttgagaacaaagaagttcttcatggcaagaaatggaaagggctcactcacaatttgcttaagaaacaa

SEQ ID NO: 590814 - DNA, 120 bp, Artificial Sequence
  ENSG00000173193_16 (sequence is synthesized)
aattcctccccaaacactgtaatcatcaatgagttaacttcagaaaccacagctgaagtcatcattacaggctgtgtaaaagaagtaaatgaaacctataaattgctttttaacttcgtt

SEQ ID NO: 590815 - DNA, 120 bp, Artificial Sequence
  ENSG00000173193_17 (sequence is synthesized)
gaacaaaacatgaaaatagagagactggttgaagtaaagccttccttagttattgactatttaaagacagaaaagaagctattctggccaaagataaagaaggtaaatgtgcaggtaagt

SEQ ID NO: 590816 - DNA, 120 bp, Artificial Sequence
  ENSG00000173193_18 (sequence is synthesized)
ttcaatcctgagaacaaacaaaaaggcattttactaactggctcaaagaccgaagtactgaaggcagtggacattgtcaagcaagtctgggattcagtctgtgttaaaagtgtccatact

SEQ ID NO: 590817 - DNA, 120 bp, Artificial Sequence
  ENSG00000173193_19 (sequence is synthesized)
gataagccaggagccaagcagttcttccaggataaagcacggttttatcaaagtgagatcaaacggttgtttggttgttacattgaactacaggagaatgaagtaatgaaggagggaggc

SEQ ID NO: 590818 - DNA, 120 bp, Artificial Sequence
  ENSG00000173193_20 (sequence is synthesized)
agccccgctgggcagaagtgcttctctcggacagtcttggcccctggcgttgtgctgattgtgcagcagggtgacttggcacggcttcctgtcgatgtggtggtgaatgcatctaatgag

SEQ ID NO: 590819 - DNA, 120 bp, Artificial Sequence
  ENSG00000173193_21 (sequence is synthesized)
gaccttaagcattatggtggcctggccgctgcgctctcaaaagcagctggccctgagctccaggccgactgtgaccagatagtgaagagagagggcagactcctaccgggcaatgccacc

SEQ ID NO: 590820 - DNA, 120 bp, Artificial Sequence
  ENSG00000173193_22 (sequence is synthesized)
atctccaaggcaggaaagctgccctaccaccacgtgatccatgcagtggggccccgctggagcggatatgaggccccgaggtgtgtgtacctattaaggagagctgtgcaactcagtctc

SEQ ID NO: 590821 - DNA, 120 bp, Artificial Sequence
  ENSG00000173193_23 (sequence is synthesized)
tgtctagccgaaaaatacaagtaccgatccatagccatcccagctattagttctggagtctttggctttcccttaggccgatgcgtggagaccattgtttctgccatcaaggaaaacttc

SEQ ID NO: 590822 - DNA, 120 bp, Artificial Sequence
  ENSG00000173193_24 (sequence is synthesized)
caattcaagaaggatggacactgcttgaaagaaatctaccttgtggatgtatctgagaagactgttgaggcctttgcagaagctgtgaaaactgtatttaaagccaccctgccagataca

SEQ ID NO: 590823 - DNA, 120 bp, Artificial Sequence
  ENSG00000173193_25 (sequence is synthesized)
gctgccccgccaggtttaccaccagcagcagcggggcctgggaaaacatcatgggaaaaaggaagcctggtgtccccgggaggcctgcagatgctgttggtgaaagagggtgtgcagaat

SEQ ID NO: 590824 - DNA, 120 bp, Artificial Sequence
  ENSG00000173193_26 (sequence is synthesized)
gctaagaccgatgttgttgtcaactccgttcccttggatctcgtgcttagtagagggcctctttctaagtccctcttggaaaaagctggaccagagctccaggaggaattggacacagtt

SEQ ID NO: 590825 - DNA, 120 bp, Artificial Sequence
  ENSG00000173193_27 (sequence is synthesized)
ggacaaggggtggctgtcagcatgggcacagtgctcaaaaccagcagctggaatctggactgtcgctatgtgcttcacgtggtagctccggagtggagaaatggtagcacatcttcactc

SEQ ID NO: 590826 - DNA, 120 bp, Artificial Sequence
  ENSG00000173193_28 (sequence is synthesized)
aagataatggaagacataatcagagaatgtatggagatcactgagagcttgtccttaaaatcaattgcatttccagcaataggaacaggaaacttgggatttcctaaaaacatattcgct

SEQ ID NO: 590827 - DNA, 120 bp, Artificial Sequence
  ENSG00000173193_29 (sequence is synthesized)
gaattaatcatttcagaggtgttcaaatttagtagcaagaatcagctgaaaactttacaagaggttcactttctgctgcacccgagtgatcatgaaaatattcaggcattttcagatgaa

SEQ ID NO: 590828 - DNA, 120 bp, Artificial Sequence
  ENSG00000173193_30 (sequence is synthesized)
tttgccagaagggctaatggaaatctcgtcagtgacaaaattccgaaggctaaagatacacaaggtttttatgggactgtttctagccctgattcaggtgtgtatgaaatgaagattggc

SEQ ID NO: 590829 - DNA, 120 bp, Artificial Sequence
  ENSG00000173193_31 (sequence is synthesized)
tccatcatcttccaggtggcttctggagatatcacgaaagaagaggcagatgtgattgtaaattcaacatcaaactcattcaatctcaaagcaggggtctccaaagcaattttagaatgt

SEQ ID NO: 590830 - DNA, 120 bp, Artificial Sequence
  ENSG00000173193_32 (sequence is synthesized)
agaaagggaatgttctcagcaagctcagcagcgcaaaaatgattatataatcaccggaggtggatttttgaggtgcaagaatatcattcatgtaattggtggaaatgatgtcaagagttc

SEQ ID NO: 590831 - DNA, 120 bp, Artificial Sequence
  ENSG00000173193_33 (sequence is synthesized)
agtttcctctgttttgcaggagtgtgaaaaaaaaaattactcatccatttgcctcccagccattgggacaggaaatgccaaacaacacccagataaggttgctgaagccataattgatgc

SEQ ID NO: 590832 - DNA, 120 bp, Artificial Sequence
  ENSG00000173193_34 (sequence is synthesized)
cattgaagactttgtccagaaaggatcagcccagtctgtgaaaaaagttaaagttgttatctttctgcctcaagtactggatgtgttttatgccaacatgaagaaaagagaagggactca

SEQ ID NO: 590833 - DNA, 120 bp, Artificial Sequence
  ENSG00000173193_35 (sequence is synthesized)
gctttcttcccaacagtctgtgatgtctaaacttgcatcatttttgggcttttcaaagcaatctccccaaaaaaagaatcatttggttttggaaaagaaaacagaatcagcaacttttcg

SEQ ID NO: 590834 - DNA, 120 bp, Artificial Sequence
  ENSG00000173193_36 (sequence is synthesized)
ggtgtgtggtgaaaatgtcacgtgtgtggaatatgctatctcctggctacaagacctgattgaaaaagaacagtgtccttacaccagtgaagatgagtgcatcaaagactttgatgaaaa

SEQ ID NO: 590835 - DNA, 120 bp, Artificial Sequence
  ENSG00000173193_37 (sequence is synthesized)
ggagtatcaggagttgaatgagctgcagaagaagttaaatattaacatttccctggaccataagagacctttgattaaggttttgggaattagcagagatgtgatgcaggctagagatga

SEQ ID NO: 590836 - DNA, 120 bp, Artificial Sequence
  ENSG00000173193_38 (sequence is synthesized)
aattgaggcgatgatcaagagagttcgattggccaaagaacaggaatcccgggcagattgtatcagtgagtttatagaatggcagtataatgacaataacacttctcattgttttaacaa

SEQ ID NO: 590837 - DNA, 120 bp, Artificial Sequence
  ENSG00000173193_39 (sequence is synthesized)
aatgaccaatctgaaattagaggatgcaaggagagaaaagaaaaaaacagttgatgtcaaaattaatcatcggcactacacagtgaacttgaacacatacactgccacagacacaaaggg

SEQ ID NO: 590838 - DNA, 120 bp, Artificial Sequence
  ENSG00000173193_40 (sequence is synthesized)
ccacagtttatctgttcagcgcctcacgaaatccaaagttgacatccctgcacactggagtgatatgaagcagcagaatttctgtgtggtggagctgctgcctagtgatcctgagtacaa

SEQ ID NO: 590839 - DNA, 120 bp, Artificial Sequence
  ENSG00000173193_41 (sequence is synthesized)
cacggtggcaagcaagtttaatcagacctgctcacacttcagaatagagaagattgagaggatccagaatccagatctctggaatagctaccaggcaaagaaaaaaactatggatgccaa

SEQ ID NO: 590840 - DNA, 120 bp, Artificial Sequence
  ENSG00000173193_42 (sequence is synthesized)
gaatggccagacaatgaatgagaagcaactcttccatgggacagatgccggctccgtgccacacgtcaatcgaaatggctttaaccgcagctatgccggaaagaatgctgtggcatatgg

SEQ ID NO: 590841 - DNA, 120 bp, Artificial Sequence
  ENSG00000173193_43 (sequence is synthesized)
aaagggaacctattttgctgtcaatgccaattattctgccaatgatacgtactccagaccagatgcaaatgggagaaagcatgtgtattatgtgcgagtacttactggaatctatacaca

SEQ ID NO: 590842 - DNA, 120 bp, Artificial Sequence
  ENSG00000173193_44 (sequence is synthesized)
tggaaatcattcattaattgtgcctccttcaaagaaccctcaaaatcctactgacctgtatgacactgtcacagataatgtgcaccatccaagtttatttgtggcattttatgactacca

SEQ ID NO: 590843 - DNA, 120 bp, Artificial Sequence
  ENSG00000173193_45 (sequence is synthesized)
agcatacccagagtaccttattacgtttagaaaataacactttggtatccttcccacaaaattattctccatttgtacatatctagttgtaaaacaagttttagcttttttttttaattc

SEQ ID NO: 590844 - DNA, 120 bp, Artificial Sequence
  ENSG00000173193_46 (sequence is synthesized)
ctcttaacagatttttctaatatccaaggatcattctttgtcgctgaagtcagtctttcttcagcttccctttcataatggaaatgaacttattatcttgagagcaaataacttggaaaa

SEQ ID NO: 590845 - DNA, 120 bp, Artificial Sequence
  ENSG00000173193_47 (sequence is synthesized)
tttaaatgagataatgcagttgcaactgtgtgtccacaagtatggacatcaaatctgtgggaaaagaacaggtttgtattttcaggaaggagagaataacagtcttatagacagagggca

SEQ ID NO: 590846 - DNA, 120 bp, Artificial Sequence
  ENSG00000173193_48 (sequence is synthesized)
cagctaagcacagctgccactgcaggagacaggccccatgtcaggatgccatagtgctgtggggagcacagtattacccagtgggtagggcttctgtcttccctgggagcagggatggta

SEQ ID NO: 590847 - DNA, 120 bp, Artificial Sequence
  ENSG00000173193_49 (sequence is synthesized)
tcttagtcaatttttttcccttgagatgaggtctgtgcctgatgtacaacggatactccataaatgtttgacaaaccaacgaagaatgaaaaaaagcctagtcagactcccatccaaagt

SEQ ID NO: 590848 - DNA, 120 bp, Artificial Sequence
  ENSG00000173193_50 (sequence is synthesized)
aggaactatctctttaacattcttgactcactatcactttacctcaaattgaacagattccatgacggaacttcattcttcacaaactagccagtgacatgtgggacagctctggccagg

SEQ ID NO: 590849 - DNA, 120 bp, Artificial Sequence
  ENSG00000173193_51 (sequence is synthesized)
gctctgggactgcagtgtacttgcgctctgcacggtccaggagctgtgatgtggctgtggtctaggggaatcctgcctgccccatggagttgcgcagcacaaccctggctccaattgcca

SEQ ID NO: 590850 - DNA, 71 bp, Artificial Sequence
  ENSG00000173193_52 (sequence is synthesized)
cccatggagttgcgcagcacaaccctggctccaattgccagaaggctctttttaatgctgaaccaaaatgt

SEQ ID NO: 590851 - DNA, 69 bp, Artificial Sequence
  ENSG00000173193_53 (sequence is synthesized)
agtagctgggattacaggcatgcgctacgacaggctggtctcgaactcccacctcagcctcccaaactg

SEQ ID NO: 590852 - DNA, 120 bp, Artificial Sequence
  ENSG00000173193_54 (sequence is synthesized)
ctgggattacaggtgtgagccaccgtgaccagccaatgtgccttcttatagtgtctactcattggtctttgttctgcccagtgataacaatgggataacgcctgctacacatcttcattg

SEQ ID NO: 590853 - DNA, 120 bp, Artificial Sequence
  ENSG00000173193_55 (sequence is synthesized)
gtgataacaatgggataacgcctgctacacatcttcattgtgaaacccttcccctgtgctgagattaaatgaactctaagattattaaatagtatattttccttgacagcctagcgtttg

SEQ ID NO: 590854 - DNA, 120 bp, Artificial Sequence
  ENSG00000173193_56 (sequence is synthesized)
atgattttaaagccttatgtataaataaaccaaaggaagtaagcagtcatattgctaatttgctaactcctatctattgaatggtgaagttttaaaaatttccccaggtaagtttaagat

SEQ ID NO: 590855 - DNA, 120 bp, Artificial Sequence
  ENSG00000173193_57 (sequence is synthesized)
tcaaacaccatctattgagcacctacattgtgtgccaggtagtaaaataggtgctttcatacacattgtctcaattcctgtgaggtcagaattatctctgcatttgaaacttgaggaaac

SEQ ID NO: 590856 - DNA, 120 bp, Artificial Sequence
  ENSG00000173193_58 (sequence is synthesized)
atgctcagagtgcaagaagcttccttgcctgagatcacctagaaaggaaccctcagagccggcaactgaatcttggtccctgtgatgtcaagcccattgctctcccactgcagaacatgg

SEQ ID NO: 590857 - DNA, 120 bp, Artificial Sequence
  ENSG00000173193_59 (sequence is synthesized)
cctctagattaatgccaccgattcaggaacacctccgacagtcttgaaatacccccatgttgccttgtttgttttttccttctggcttcttctattacagtctcttcattggaagctctg

SEQ ID NO: 590858 - DNA, 120 bp, Artificial Sequence
  ENSG00000173193_60 (sequence is synthesized)
taggccaaggccagagctgatactgacacggagccaatgcagatagcacatcagatgctaggggtcgctgggaggattaagggacttaatctgctaggaacacctgtacttgaagtggag

SEQ ID NO: 590859 - DNA, 120 bp, Artificial Sequence
  ENSG00000173193_61 (sequence is synthesized)
gaggctagggggccacagttgctgcttcattaacatagaggttttggatttttttctcttgtggtttgttttttaagtggattggcagactccttgttgcttaagagtggctttctaggc

SEQ ID NO: 590860 - DNA, 120 bp, Artificial Sequence
  ENSG00000173193_62 (sequence is synthesized)
aggccactggcatctgaattcatcattgacaataaatgtaagaaattggaataaaaaagagagacctgctgttattcgcttttgttctccagtgatttgattaactcagggcaaggctga

SEQ ID NO: 590861 - DNA, 120 bp, Artificial Sequence
  ENSG00000173193_63 (sequence is synthesized)
atatcagagtgtatcgcactgaagaataataatccattcagtaatgttatagttatcctcaatctaaatatgtcaactgtcattttgctacttttcaaataaaatacttgaaaactgtca

SEQ ID NO: 590862 - DNA, 120 bp, Artificial Sequence
  ENSG00000173193_64 (sequence is synthesized)
tgtagtcccagctattgggaggctgaggtggaaggattgcatgagcccaggagtttgacgccagtctgggtaacatagtgagatcctgctctcaaataaaaacaaccaattattttggca

SEQ ID NO: 590863 - DNA, 120 bp, Artificial Sequence
  ENSG00000173193_65 (sequence is synthesized)
gtccagcctcaataaatattaaacaagggaaaaattatgagctaagatgtttctctgatgtaggatgtacctcatattcccaaatgcttggtgttaattgaggtttctgttatttgtgtc

SEQ ID NO: 590864 - DNA, 120 bp, Artificial Sequence
  ENSG00000173193_66 (sequence is synthesized)
gaatatgccactatatatggccccagatgtattcaagagcacccttatcagaccttttcattattgtttctatttaccctccatctccaggctggtcccagggacattttcttatgtaaa

SEQ ID NO: 590865 - DNA, 120 bp, Artificial Sequence
  ENSG00000173193_67 (sequence is synthesized)
taaattgttaatcatgtattaatgctactttattgtttgtgtttcaggaatccaagaccaaagaagatgttaaagaaccagatgtgtcagaagaattggatacaaaactccctcttgatg

SEQ ID NO: 590866 - DNA, 120 bp, Artificial Sequence
  ENSG00000173193_68 (sequence is synthesized)
tagaatgcagtttctggatggtggaaataagttctgtcatggtcctatataaaatccattttcattcacttcctatcacatttttttaaacccagaattagaatttgtatggtaattagt

SEQ ID NO: 590867 - DNA, 120 bp, Artificial Sequence
  ENSG00000173193_69 (sequence is synthesized)
agttctagattctactcatgtgaccataattactgaggcattaagattcttgtgtcagtgattacaatatttgattgtaatatgatagaacactaaagacatatatttactttgtgaagc

SEQ ID NO: 590868 - DNA, 120 bp, Artificial Sequence
  ENSG00000173193_70 (sequence is synthesized)
aagctaatacaaattcaaagatatggctttaaaattggatttgatagctagcaaattccacagagagccatgcagaggctccttagatcaggaccatgttactctgccccattattcaca

SEQ ID NO: 590869 - DNA, 120 bp, Artificial Sequence
  ENSG00000173193_71 (sequence is synthesized)
tgtttgaaattatattttccttgacttctctagcaaaattattatgatttttttttccttgactaattttcttttcatttttgcaggcacgctgtttctcttccaaacccctaattctag

SEQ ID NO: 590870 - DNA, 120 bp, Artificial Sequence
  ENSG00000173193_72 (sequence is synthesized)
ctttattcacgccatttatgcttaaacggtcttttgtctctgtacctcaccagggaatatatttacccttcttggattcaactattagttcaatgtcaatagctcccaaatcaacattac

SEQ ID NO: 590871 - DNA, 120 bp, Artificial Sequence
  ENSG00000173193_73 (sequence is synthesized)
ttcaatgtcaatagctcccaaatcaacattaccaacctgggtctttgactcaagctctagaacatactcccagtggcctaaaaaaatctccacttgaggctgggcacagtggctcacgcc

SEQ ID NO: 590872 - DNA, 84 bp, Artificial Sequence
  ENSG00000173193_74 (sequence is synthesized)
atcacgaggtcaggggttcaagaccatcctggtgaagatggtgaaaccattggcaggtgcctataatcccacctacttgggagg

SEQ ID NO: 590873 - DNA, 120 bp, Artificial Sequence
  ENSG00000173193_75 (sequence is synthesized)
cagagtgagactccgtctcaaaaaaaaaatctccacttgaatatctaactgcaaaatcaacttctctaaaatctaatgcatcatacgtaagtaattctctttccctttccttcctcattt

SEQ ID NO: 590874 - DNA, 120 bp, Artificial Sequence
  ENSG00000173193_76 (sequence is synthesized)
ctgtttttggttctaccactttctgagtaaagccggagatctttgatccaccataagtctgccagtaagacctacattttctttgcaaatttttcttactctctatttgaactgccaaca

SEQ ID NO: 590875 - DNA, 120 bp, Artificial Sequence
  ENSG00000173193_77 (sequence is synthesized)
ctgtttattcatgttgttaagtacatcataatttaaaaagattcaaagtgccctacaaagatataaactataccttcagataaaataaatatacaaagaaaaatggttaaagagaaaaga

SEQ ID NO: 590876 - DNA, 120 bp, Artificial Sequence
  ENSG00000173193_78 (sequence is synthesized)
atggcagggaaaataagataatacagacgaactgctagttctcaaaaatatataacatgaggttaccaatttgtccctgagcttcctagtagacaaagcaagaagtaaacattcaggtac

SEQ ID NO: 590877 - DNA, 120 bp, Artificial Sequence
  ENSG00000173193_79 (sequence is synthesized)
aagactcataatgtccgtaaatcaaaaagcaaaccatttgataaggaggctcacagctcctcacaatactgagactgactcctgagagatttctcttgtggatcaagtactagagaatat

SEQ ID NO: 590878 - DNA, 120 bp, Artificial Sequence
  ENSG00000173193_80 (sequence is synthesized)
cctcaacgtcatcctcacaataaattaaatatcaacttttatatcactgtttttttttaatgtaaaactggttgaacaaaaccgatgcctgattgaatgaaaacaattctatgaggcacc

SEQ ID NO: 590879 - DNA, 120 bp, Artificial Sequence
  ENSG00000173193_81 (sequence is synthesized)
aagacaatatgattcaagtatgcagctctatgatggtctatttctgagataacaagtaagtctcactccaagtaccaattactactaactggtagtggctgattggcacattgtgatgag

SEQ ID NO: 590880 - DNA, 120 bp, Artificial Sequence
  ENSG00000173193_82 (sequence is synthesized)
atgctaagtttagattgagcaggaatgaatgttctgcttgaccagcaatatctacagtgggccctgtggatgcctgctgtgtattggcagaccctggccagagaattgatttcaacactt

SEQ ID NO: 590881 - DNA, 120 bp, Artificial Sequence
  ENSG00000173193_83 (sequence is synthesized)
ttttgcagtgaaaccttttttttcaataaaatcttatgtgaaatcccagtgtatgaaccagataaaagcagaggtgtgggtagtacttaaggtgcctccatggaggtccctagaattgtg

SEQ ID NO: 590882 - DNA, 120 bp, Artificial Sequence
  ENSG00000173198_0 (sequence is synthesized)
agtttgaaggctaatctgaaagaggaagaagaatctgtatatctgtatatattggctagcaaatgtgccctgctctctcccctcttaaaaatagcagcaacccatctttgcaaagaagct

SEQ ID NO: 590883 - DNA, 120 bp, Artificial Sequence
  ENSG00000173198_1 (sequence is synthesized)
tgcctatagagcaggcactctgtgaatggactgtgcttttacgaccctacagggtatcaagatactgtgcagctcgccaacaaggattaattgcaaggactggtagatcgaatttactga

SEQ ID NO: 590884 - DNA, 120 bp, Artificial Sequence
  ENSG00000173198_2 (sequence is synthesized)
agacttggagcttgcttctgagaacaaacgcaaaaggacagtaaactgtggaccttgaagttagcagcgtgggcttcctctaatattacaccgtaaaaggcattgatcaccataagaagg

SEQ ID NO: 590885 - DNA, 120 bp, Artificial Sequence
  ENSG00000173198_3 (sequence is synthesized)
aacatttgtgaaggtactccagtgccagaaagaggcacaaagcagacattcgtagagaaacatggatgaaacaggaaatctgacagtatcttctgccacatgccatgacactattgatga

SEQ ID NO: 590886 - DNA, 120 bp, Artificial Sequence
  ENSG00000173198_4 (sequence is synthesized)
cttccgcaatcaagtgtattccaccttgtactctatgatctctgttgtaggcttctttggcaatggctttgtgctctatgtcctcataaaaacctatcacaagaagtcagccttccaagt

SEQ ID NO: 590887 - DNA, 120 bp, Artificial Sequence
  ENSG00000173198_5 (sequence is synthesized)
atacatgattaatttagcagtagcagatctactttgtgtgtgcacactgcctctccgtgtggtctattatgttcacaaaggcatttggctctttggtgacttcttgtgccgcctcagcac

SEQ ID NO: 590888 - DNA, 120 bp, Artificial Sequence
  ENSG00000173198_6 (sequence is synthesized)
ctatgctttgtatgtcaacctctattgtagcatcttctttatgacagccatgagctttttccggtgcattgcaattgtttttccagtccagaacattaatttggttacacagaaaaaagc

SEQ ID NO: 590889 - DNA, 120 bp, Artificial Sequence
  ENSG00000173198_7 (sequence is synthesized)
caggtttgtgtgtgtaggtatttggatttttgtgattttgaccagttctccatttctaatggccaaaccacaaaaagatgagaaaaataataccaagtgctttgagcccccacaagacaa

SEQ ID NO: 590890 - DNA, 120 bp, Artificial Sequence
  ENSG00000173198_8 (sequence is synthesized)
tcaaactaaaaatcatgttttggtcttgcattatgtgtcattgtttgttggctttatcatcccttttgttattataattgtctgttacacaatgatcattttgaccttactaaaaaaatc

SEQ ID NO: 590891 - DNA, 120 bp, Artificial Sequence
  ENSG00000173198_9 (sequence is synthesized)
aatgaaaaaaaatctgtcaagtcataaaaaggctataggaatgatcatggtcgtgaccgctgcctttttagtcagtttcatgccatatcatattcaacgtaccattcaccttcatttttt

SEQ ID NO: 590892 - DNA, 120 bp, Artificial Sequence
  ENSG00000173198_10 (sequence is synthesized)
acacaatgaaactaaaccctgtgattctgtccttagaatgcagaagtccgtggtcataaccttgtctctggctgcatccaattgttgctttgaccctctcctatatttcttttctggggg

SEQ ID NO: 590893 - DNA, 120 bp, Artificial Sequence
  ENSG00000173198_11 (sequence is synthesized)
acccagaaagaaggcctctttgccagaaaaaggagaagaaatatgtaaagtatagtttaaacccatttccagtccaaaccaatgaaaatagtttcccaaataagtattttgtcaaatcat

SEQ ID NO: 590894 - DNA, 120 bp, Artificial Sequence
  ENSG00000173198_12 (sequence is synthesized)
ttacaaaaaaaataaaaattttacttaatattttacaaatacttaactatttgggcctacaactctatctcatttatgcatccacatgattagatatttatagatattttaagtgctaaa

SEQ ID NO: 590895 - DNA, 120 bp, Artificial Sequence
  ENSG00000173198_13 (sequence is synthesized)
aattcggtccacaactatgaactgaattataaataattttgaccactcaccagaatttggagaatatttttatctttgcactataaaatatgtcttatattaaagttttcctcttcaaat

SEQ ID NO: 590896 - DNA, 120 bp, Artificial Sequence
  ENSG00000173198_14 (sequence is synthesized)
ataaaatatataaaattagtcaataaaaatacatgcaagctaaaagttataaaatataaaactagatataaaattggcaaatagttctgaatcattctaacatattcctttgcatgcatg

SEQ ID NO: 590897 - DNA, 120 bp, Artificial Sequence
  ENSG00000173198_15 (sequence is synthesized)
ttcctttgcatgcatgccatcagatgagaactggagatgactcaggagctacataaaacgtactgtcacccttctttgtagtactgattcgctaggcaaattagggccatttcttccaaa

SEQ ID NO: 590898 - DNA, 120 bp, Artificial Sequence
  ENSG00000173198_16 (sequence is synthesized)
agagaatgtaaaagtgctagaacagactagtattcagctaaagggtcctaaaagcaccatacaatgttcaatatggcaacaggagaaatctggtcaaaagccagtttgtctccagttttc

SEQ ID NO: 590899 - DNA, 120 bp, Artificial Sequence
  ENSG00000173198_17 (sequence is synthesized)
ttctgcctttgcctcaggctcccaaaattgaatagtggagttttagctgctcagtgaggttcctgtagagatttctctccatccatgacatataattcttccttaagaagccagacaact

SEQ ID NO: 590900 - DNA, 120 bp, Artificial Sequence
  ENSG00000173198_18 (sequence is synthesized)
ggcactcctatatataaatagaagtaattaaaaacttatctgaagaagagaaaaggaaaaggaatctacttttctatatgccaattgctgggatcaaaataaactacaaaggatttatga

SEQ ID NO: 590901 - DNA, 120 bp, Artificial Sequence
  ENSG00000173198_19 (sequence is synthesized)
agaaaattgtgaatgttcacattacaaattcttttaagaagtgcatacatttatgtatatgtatacaactatatgtaagagattttgctgtatgatatgcattatgggtgaaagttcacg

SEQ ID NO: 590902 - DNA, 120 bp, Artificial Sequence
  ENSG00000173198_20 (sequence is synthesized)
ataagttttattattgctttattactttttattggtatgttgacaggaatatcatggatatgtttacagtgacttttatattacagtggacgctttgatcttaaaacagccacaacaact

SEQ ID NO: 590903 - DNA, 120 bp, Artificial Sequence
  ENSG00000173198_21 (sequence is synthesized)
catctacggctgaaatataatatgcgtggacaagcttttgctgaagtgtagtgtgtcctttaagtttgttttttaaaaagtaacttacctcagaagaaataaataactataaagaaaaaa

SEQ ID NO: 590904 - DNA, 84 bp, Artificial Sequence
  ENSG00000173198_22 (sequence is synthesized)
agaacaaacgcaaaaggacagtaaactgtggaccttgaagttagcaggaaaatctcggctcaccacagcctccgcctcccgggt

SEQ ID NO: 590905 - DNA, 90 bp, Artificial Sequence
  ENSG00000173198_23 (sequence is synthesized)
agctaattttgtatttttaggagagatggtgtttctccatgttggtcactcactcaccttggtctcccaaagcgctgggattacaggcat

SEQ ID NO: 590906 - DNA, 120 bp, Artificial Sequence
  ENSG00000173198_24 (sequence is synthesized)
ctgggattacaggcatgagccaccgctatgccgtctttgttttaagatctttgcctccctttctgcccaaatgtgtagattcaatctgctccaccccctttcctttcttctctggtgatt

SEQ ID NO: 590907 - DNA, 120 bp, Artificial Sequence
  ENSG00000173198_25 (sequence is synthesized)
tggtgatttgtaaaatgcccatccatgagtcatggtcccctgcactctgtgaattttcaggcttcttttaaatagattctaccctactagatatatccacattttactatcactttacac

SEQ ID NO: 590908 - DNA, 81 bp, Artificial Sequence
  ENSG00000173198_26 (sequence is synthesized)
ccttcctctgatcctagacatccaccctgggaaattagatgctctattactcaaaagctcttaagaccacaaagttactct

SEQ ID NO: 590909 - DNA, 120 bp, Artificial Sequence
  ENSG00000173198_27 (sequence is synthesized)
ctctattactcaaaagctcttaagaccacaaagttactcttcaaagttgcccaattaggagaggaaaagagcaaaaaatgaagaaagcaactcactgctactaatgagctatgagcttac

SEQ ID NO: 590910 - DNA, 86 bp, Artificial Sequence
  ENSG00000173198_28 (sequence is synthesized)
aagaaagcaactcactgctactaatgagctatgagcttactgtctaaatgggtgtgacagacatgtaagcaaaaagagtaattaca

SEQ ID NO: 590911 - DNA, 120 bp, Artificial Sequence
  ENSG00000173198_29 (sequence is synthesized)
aaagtataataaaaaaaagaaaactaaacaactttaaaaaaagagtaattacagcactgtaataaatgaaccatgcacatgggagtattcatagagaatgataacttcaacctaaatctt

SEQ ID NO: 590912 - DNA, 120 bp, Artificial Sequence
  ENSG00000173198_30 (sequence is synthesized)
gaagtataagtataaatttgccaggttcacctcttgattatttaagtgtgaaagaggatgcatagatcaccttcaagtagctaaggcataatgagataaggatgctgaactaagttggtt

SEQ ID NO: 590913 - DNA, 120 bp, Artificial Sequence
  ENSG00000173200_0 (sequence is synthesized)
agtcccagcgagctgaggatggctgcgccaggcccccttcctgccgctgctctgagtccaggggctccgacccccagagaacttatgcacggagttgcaggtgttacttccagagccgga

SEQ ID NO: 590914 - DNA, 120 bp, Artificial Sequence
  ENSG00000173200_1 (sequence is synthesized)
cgagatcgggaggcggggagcgtgctgccggccgggaaccgtggggcgcggaaggcctcccggcgctcttcctcccggagtatgtccagagacaacaagttcagcaagaaagattgtctt

SEQ ID NO: 590915 - DNA, 120 bp, Artificial Sequence
  ENSG00000173200_2 (sequence is synthesized)
tcaatcaggaatgttgtagcttcaatccaaaccaaagaaggtctgaatctcaagttgataagtggagatgttctgtacatctgggccgatgtcattgtcaacagcgttcccatgaatctt

SEQ ID NO: 590916 - DNA, 120 bp, Artificial Sequence
  ENSG00000173200_3 (sequence is synthesized)
cagcttggaggaggaccactatctcgggcatttttgcagaaagctggtcccatgctccagaaagagttagatgacagaaggcgggaaacagaggaaaaagtaggtaacatattcatgaca

SEQ ID NO: 590917 - DNA, 120 bp, Artificial Sequence
  ENSG00000173200_4 (sequence is synthesized)
agcggctgcaatctggactgcaaagctgtgctccatgctgtggctccatactggaataatggagcagagacttcttggcagatcatggcaaatataatcaagaaatgtttgacaactgta

SEQ ID NO: 590918 - DNA, 120 bp, Artificial Sequence
  ENSG00000173200_5 (sequence is synthesized)
gaagtgctatctttctcatcaatcacatttcccatgattggaacaggaagtttgcagtttcccaaagctgtttttgctaaactaatcctttcagaagtgttcgaatacagtagcagcaca

SEQ ID NO: 590919 - DNA, 120 bp, Artificial Sequence
  ENSG00000173200_6 (sequence is synthesized)
aggccgataactagccctttacaagaagtccactttctggtatatacaaatgacgatgaaggctgtcaggcatttttagatgaattcactaactggtcaagaataaatcccaacaaggcc

SEQ ID NO: 590920 - DNA, 120 bp, Artificial Sequence
  ENSG00000173200_7 (sequence is synthesized)
aggattcccatggcaggagatacccaaggtgtggtcgggactgtctctaagccttgtttcacagcatatgaaatgaaaatcggtgcaattacttttcaggttgctactggagatatagcc

SEQ ID NO: 590921 - DNA, 120 bp, Artificial Sequence
  ENSG00000173200_8 (sequence is synthesized)
actgaacaggtagatgttattgtaaactcaacagcaaggacatttaatcggaaatcaggtgtgtcaagagctattttagaaggtgctggacaagctgtggaaagtgaatgtgctgtacta

SEQ ID NO: 590922 - DNA, 120 bp, Artificial Sequence
  ENSG00000173200_9 (sequence is synthesized)
gctgcacagcctcacagagattttataattacaccaggtggatgcttaaagtgcaaaataataattcatgttcctgggggaaaagatgtcaggaaaacggtcaccagtgttctagaagag

SEQ ID NO: 590923 - DNA, 120 bp, Artificial Sequence
  ENSG00000173200_10 (sequence is synthesized)
tgtgaacagaggaagtacacatcggtttcccttccagccattggaacaggaaatgccggaaaaaaccctatcacagttgctgataacataatcgatgctattgtagacttctcatcacaa

SEQ ID NO: 590924 - DNA, 120 bp, Artificial Sequence
  ENSG00000173200_11 (sequence is synthesized)
cattccaccccatcattaaaaacagttaaagttgtcatttttcaacctgagctgctaaatatattctacgacagcatgaaaaaaagagacctctctgcatcactgaactttcagtccaca

SEQ ID NO: 590925 - DNA, 120 bp, Artificial Sequence
  ENSG00000173200_12 (sequence is synthesized)
ttctccatgactacatgtaatcttcctgaacactggactgacatgaatcatcagctgttttgcatggtccagctagagccaggacaatcagaatataataccataaaggacaagttcacc

SEQ ID NO: 590926 - DNA, 120 bp, Artificial Sequence
  ENSG00000173200_13 (sequence is synthesized)
cgaacttgttcttcctacgcaatagagaagattgagaggatacagaatgcatttctctggcagagctaccaggtaaagaaaaggcaaatggatatcaagaatgaccataagaataatgag

SEQ ID NO: 590927 - DNA, 120 bp, Artificial Sequence
  ENSG00000173200_14 (sequence is synthesized)
agactcctcttccatgggacagatgcagactcagtgccatatgtcaatcagcacggctttaatagaagttgtgctgggaaaaatgctgtatcctatggaaaaggaacctattttgctgtg

SEQ ID NO: 590928 - DNA, 120 bp, Artificial Sequence
  ENSG00000173200_15 (sequence is synthesized)
gatgccagttattctgccaaggacacctactccaagccagacagcaatgggagaaagcacatgtacgttgtgcgagtacttactggagtcttcacaaagggacgtgcaggattagtcacc

SEQ ID NO: 590929 - DNA, 120 bp, Artificial Sequence
  ENSG00000173200_16 (sequence is synthesized)
cctccacccaagaatcctcacaatcccacagatctctttgactcagtgacaaacaatacacgatctccaaagctatttgtggtattctttgataatcaggcttacccagaatatctcata

SEQ ID NO: 590930 - DNA, 120 bp, Artificial Sequence
  ENSG00000173200_17 (sequence is synthesized)
actttcacggcttaaaaatatttttatcatcaaagagatgatttaagtcatctgtaagaacaacatgcaatctttgtctttgcttctggcctgtgtaagcagatgaaagtttccctttta

SEQ ID NO: 590931 - DNA, 120 bp, Artificial Sequence
  ENSG00000173200_18 (sequence is synthesized)
ggtgccaaaatgctgaaaattacctttttaaagtgctctattgctgcgatttgtagcatacctttttttctcagcaaattgatgggtggaagctgagaaatgtatggtaaatgtcacaga

SEQ ID NO: 590932 - DNA, 120 bp, Artificial Sequence
  ENSG00000173200_19 (sequence is synthesized)
gctacaaccattcacagacaccaaatctctaggagaataaaaagcacattattctttttctatcagaaaaaaacaagatgcatcaccttaaaaccaagatgacattgttcttcttggaac

SEQ ID NO: 590933 - DNA, 120 bp, Artificial Sequence
  ENSG00000173200_20 (sequence is synthesized)
attttgccttattaaggaaaacttgtcaatagttcagctgaaatgactgaatcacagaatattaactctgttatggaacaaatcataacagattttacctgtttacatttcaggtaaaaa

SEQ ID NO: 590934 - DNA, 120 bp, Artificial Sequence
  ENSG00000173200_21 (sequence is synthesized)
tgtatcgcattgttatctaatattaaaaaattacccccaattttagtgacttaatcccacacagtctttatgggtcaggaattcaggcatggcttacctggatcattctgctagggtctc

SEQ ID NO: 590935 - DNA, 120 bp, Artificial Sequence
  ENSG00000173200_22 (sequence is synthesized)
tctgaagttacagacaagatgtcaggggatgtggtcgtttgaaggcttgtctgggctggaggtctatttccaaggtgaatcactcacatacctggcacgtttctgtcaggtattggcagt

SEQ ID NO: 590936 - DNA, 120 bp, Artificial Sequence
  ENSG00000173200_23 (sequence is synthesized)
cctcagttcctctcctctcaggcctctccacaggctgcttgagtgtcctcatgacacaacagttggcttactccagagtgagcaactcaagagagagcaaggcagaagctaccaaatctt

SEQ ID NO: 590937 - DNA, 120 bp, Artificial Sequence
  ENSG00000173200_24 (sequence is synthesized)
tatgtttgaagtcatgcaccatcttttccacgagtatcctgttgattattttgatcagcttgttcagtctgggagggaattgcacaagggcatgaatactccactggcaaggatcattgg

SEQ ID NO: 590938 - DNA, 120 bp, Artificial Sequence
  ENSG00000173200_25 (sequence is synthesized)
gggccatcttggaagctgtgtgaatgagcaaatgaatgcacagatagaatattagcagtgacaatgatgctagaggtcacctaccccactgtcctcttgtccttctcccccaaccctccc

SEQ ID NO: 590939 - DNA, 120 bp, Artificial Sequence
  ENSG00000173200_26 (sequence is synthesized)
ctgctcccaggcaagaagccctctagcctctgcttgatcactttcagcactcaacatcttcagggaacctattccgccgtgggacagtgttaattagtggaaaactctttttcaaaagtt

SEQ ID NO: 590940 - DNA, 120 bp, Artificial Sequence
  ENSG00000173200_27 (sequence is synthesized)
gaaatcagttcctctgtgtctattacctgctgatcactgtccagacttctggaggacacagagcaagttttattcctcttactgatggtagcctttcagatccatcccttccctccagta

SEQ ID NO: 590941 - DNA, 120 bp, Artificial Sequence
  ENSG00000173200_28 (sequence is synthesized)
tattagagttacgtaaattcttaaaatgcttagcagctcatttatcctgaagcatcacttttgaagagttacagacatttaagaagtatttacattatcataaataaattacatgcgcat

SEQ ID NO: 590942 - DNA, 120 bp, Artificial Sequence
  ENSG00000173200_29 (sequence is synthesized)
ttaaagagaacagaaaagtataaagaaaaataactcaccaaactcactcataattccagcactaagggaaaaccactgccaatttctcatgtctcccttccagtttcttctctgtccaaa

SEQ ID NO: 590943 - DNA, 120 bp, Artificial Sequence
  ENSG00000173200_30 (sequence is synthesized)
cagtttcttctctgtccaaattcaacaaagtcaaaatcacattttgttctgtcacaaatcatataatattatttctaccatttttctttttttaatctttttttattatactttaagttt

SEQ ID NO: 590944 - DNA, 61 bp, Artificial Sequence
  ENSG00000173200_31 (sequence is synthesized)
aactttttaatgattgccattctaacgggtgtgggatggtatctcattgttgttttgattt

SEQ ID NO: 590945 - DNA, 120 bp, Artificial Sequence
  ENSG00000173200_32 (sequence is synthesized)
gatcccatatttctaccatttttcattaaacattacaagttgttctcttgtgttcttattttttctgtaaacataattttaatggcagagatattctgctttatatctttccctatttta

SEQ ID NO: 590946 - DNA, 120 bp, Artificial Sequence
  ENSG00000173200_33 (sequence is synthesized)
tgctttatatctttccctattttatgtatatagaattataaagtttttaaaaatgtaatcatcattatttatagtttaataatcagtttcatcttgcagtgtatcattttcctcgtcatt

SEQ ID NO: 590947 - DNA, 120 bp, Artificial Sequence
  ENSG00000173200_34 (sequence is synthesized)
ttcctaggttgaaccgcaatcctttaagaagtctctgagggaagaggaaatattttgagaactattgttatcaactctttgatatctgatgatcaatgctccaaagaattggattaatat

SEQ ID NO: 590948 - DNA, 120 bp, Artificial Sequence
  ENSG00000173200_35 (sequence is synthesized)
gttaaagattgctgtgtattcagggtaggcaacgtaggatgtcaacacatttattaatgtttgtgatggacaccatggaagttcagcaacttcagatttcctcagaacctttggaacaga

SEQ ID NO: 590949 - DNA, 120 bp, Artificial Sequence
  ENSG00000173207_0 (sequence is synthesized)
gcgtgctgttgggagttgcttggaggttggcggcgcggggctgaaggctagcaaaccgagcgatcatgtcgcacaaacaaatttactattcggacaaatacgacgacgaggagtttgagt

SEQ ID NO: 590950 - DNA, 120 bp, Artificial Sequence
  ENSG00000173207_1 (sequence is synthesized)
atcgacatgtcatgctgcccaaggacatagccaagctggtccctaaaacccatctgatgtctgaatctgaatggaggaatcttggcgttcagcagagtcagggatgggtccattatatga

SEQ ID NO: 590951 - DNA, 120 bp, Artificial Sequence
  ENSG00000173207_2 (sequence is synthesized)
tccatgaaccagaacctcacatcttgctgttccggcgcccactacccaagaaaccaaagaaatgaagctggcaagctacttttcagcctcaagctttacacagctgtccttacttcctaa

SEQ ID NO: 590952 - DNA, 120 bp, Artificial Sequence
  ENSG00000173207_3 (sequence is synthesized)
tgttcaatacactgtttgaatgtgctggtaactgctttgcttcttgagtagagccaccaccaccatagcccagccagatgagtgctctgtggacccacagcctaagctgagtgtgacccc

SEQ ID NO: 590953 - DNA, 120 bp, Artificial Sequence
  ENSG00000173207_4 (sequence is synthesized)
agaagccacgatgtgctctgtatccagaacacacttggcagatggaggaagcatctgagtttgagaccatggctgttacagggatcatgtaaacttgctgtttttgttttttcctgccgg

SEQ ID NO: 590954 - DNA, 120 bp, Artificial Sequence
  ENSG00000173207_5 (sequence is synthesized)
gtgttgtatgtgtggtgacttgcggatttatgtttcagtgtactggaaactttccattttattcaagaaatctgttcatgttaaaagccttgattaaagaggaagtttttataatctagt

SEQ ID NO: 590955 - DNA, 120 bp, Artificial Sequence
  ENSG00000173207_6 (sequence is synthesized)
aggcatgagccaccgcccctggcctatttcttctgtattttaatcagatttcaaacttcatactgtatctttttcaaactcctgggttcaaatgaccctcctgcctcagcctcccaagta

SEQ ID NO: 590956 - DNA, 120 bp, Artificial Sequence
  ENSG00000173207_7 (sequence is synthesized)
cctggcttagattttaaaggacaagatagttcatttcatcctttgtaataacttgtccacacagtacttcataaaaggcctttcctcgccacaaaataacttctcttccttccttctaat

SEQ ID NO: 590957 - DNA, 120 bp, Artificial Sequence
  ENSG00000173207_8 (sequence is synthesized)
tattaacactgtgtgctccgtggggctcccattatgttgtagataatcaactagaagactataaggtccatgaaggcggagaaaatgtgccttgaacttaagtgctcattcactggaatt

SEQ ID NO: 590958 - DNA, 120 bp, Artificial Sequence
  ENSG00000173207_9 (sequence is synthesized)
atataaactctgacatcaaaaaccagtttttctttcctttcttggccttgtaaacaggcatttgtctaagagactgtatctggtactaacataaattccccacttccccgtttctgttac

SEQ ID NO: 590959 - DNA, 120 bp, Artificial Sequence
  ENSG00000173207_10 (sequence is synthesized)
catgaaccaggtcagtgcactggctaaaaacaaccatatagaactgctacactgagagaatgaaagaataagattgtataacccaaatagggagataggaaatggtttactggttccttc

SEQ ID NO: 590960 - DNA, 120 bp, Artificial Sequence
  ENSG00000173207_11 (sequence is synthesized)
cctgtaatctttcattcaatcagagggtattctttttaaggccacatatagcctgatcatagcccctgcctcattctccatcgaaaacattcttggatgtgttctaaataagcaaaggaa

SEQ ID NO: 590961 - DNA, 120 bp, Artificial Sequence
  ENSG00000173207_12 (sequence is synthesized)
agtatatttattgataagacaccagacacccagctgccaggcaaaactaataagggacaccctggggctgtataaacatagcaaaagaactgatattaacaattctgtacttggcagaca

SEQ ID NO: 590962 - DNA, 120 bp, Artificial Sequence
  ENSG00000173207_13 (sequence is synthesized)
gtccagacttctgggtctgcttctaaggccatatgcttaagtctttatttagttataaagatctgagtgggtgatagctggggaggtggtagtggaatacactataggttgtacatagaa

SEQ ID NO: 590963 - DNA, 120 bp, Artificial Sequence
  ENSG00000173208_0 (sequence is synthesized)
agatgcagcggagtctgagctctgctgcatctgtcacagcagaacaaaattaaaaacacaacagtggaagagaaacgctgcagactatgggacgctgtaggactttctaaaacatttgct

SEQ ID NO: 590964 - DNA, 120 bp, Artificial Sequence
  ENSG00000173208_1 (sequence is synthesized)
ggggatttctgtgaagcatgatcttttaaaacgaattcttttggaagccggtttgggtaactgggaaaatgacacatatgctaaatgcagcagctgatcgagtgaaatggaccagatcga

SEQ ID NO: 590965 - DNA, 120 bp, Artificial Sequence
  ENSG00000173208_2 (sequence is synthesized)
gtgctgctaagagggctgcctgcctggtggctgcggcatatgctctgaaaaccctctatcccatcattggcaagcgtttaaagcaatctggccacgggaagaaaaaagcagcagcttacc

SEQ ID NO: 590966 - DNA, 120 bp, Artificial Sequence
  ENSG00000173208_3 (sequence is synthesized)
ctgctgcagagaacacagaaatactgcattgcaccgagaccatttgtgaaaaaccttcgcctggagtgaatgcagatttcttcaaacagctactagaacttcggaaaattttgtttccaa

SEQ ID NO: 590967 - DNA, 120 bp, Artificial Sequence
  ENSG00000173208_4 (sequence is synthesized)
aacttgtgaccactgaaacagggtggctctgcctgcactcagtggctctaatctcaagaacctttctttctatctatgtggctggtctggatggaaaaatcgtgaaaagcattgtggaaa

SEQ ID NO: 590968 - DNA, 120 bp, Artificial Sequence
  ENSG00000173208_5 (sequence is synthesized)
agaagcctcggactttcatcatcaaattaatcaagtggcttatgattgccatccctgctaccttcgtcaacagtgcaataaggtacctggaatgcaaattggctttggccttcagaactc

SEQ ID NO: 590969 - DNA, 120 bp, Artificial Sequence
  ENSG00000173208_6 (sequence is synthesized)
gcctagtagaccacgcctatgaaacctattttacaaatcagacttattataaagtgatcaatatggatgggaggctggcaaaccctgaccaatctcttacggaggatattatgatgttct

SEQ ID NO: 590970 - DNA, 120 bp, Artificial Sequence
  ENSG00000173208_7 (sequence is synthesized)
cccaatctgtggctcacttgtattccaatctgaccaaacctattttagatgtaatgctgacctcctatacactcattcaaactgctacatccagaggagcaagcccaattgggcccaccc

SEQ ID NO: 590971 - DNA, 120 bp, Artificial Sequence
  ENSG00000173208_8 (sequence is synthesized)
tactagcaggacttgtggtgtatgccactgctaaagtgttaaaagcctgttctcccaaatttggcaaactggtggcagaggaagcacatagaaaaggctatttgcggtatgtgcactcga

SEQ ID NO: 590972 - DNA, 120 bp, Artificial Sequence
  ENSG00000173208_9 (sequence is synthesized)
gaattatagccaatgtagaagaaattgccttttacagaggacataaggtagaaatgaaacaacttcagaaaagttacaaagctttagcagatcagatgaacctcattttatccaaacgtt

SEQ ID NO: 590973 - DNA, 120 bp, Artificial Sequence
  ENSG00000173208_10 (sequence is synthesized)
tgtggtacatcatgatagaacagttcctgatgaagtatgtttggagcagcagtggactaattatggtggctatacctattatcactgcaactggctttgcagatggtgaggatggccaaa

SEQ ID NO: 590974 - DNA, 120 bp, Artificial Sequence
  ENSG00000173208_11 (sequence is synthesized)
agcaagttatggttagtgaacggacagaagcctttaccactgctcgaaatttactggcctctggagctgatgctattgaaaggattatgtcttcatacaaagaggtcactgaattagcag

SEQ ID NO: 590975 - DNA, 120 bp, Artificial Sequence
  ENSG00000173208_12 (sequence is synthesized)
gctacactgctcgagtgtacaatatgttttgggtctttgatgaagtaaaaagaggcatttataagagaactgctgtcattcaagaatctgaaagccatagcaagaatggagctaaggtag

SEQ ID NO: 590976 - DNA, 120 bp, Artificial Sequence
  ENSG00000173208_13 (sequence is synthesized)
aattacctctcagtgacacattggcaattaaaggaaaagttattgatgtggatcacggaattatttgtgaaaatgttcccataattacaccagcaggagaagtggtggcttccaggctaa

SEQ ID NO: 590977 - DNA, 120 bp, Artificial Sequence
  ENSG00000173208_14 (sequence is synthesized)
acttcaaagtagaagaaggaatgcatcttttgataactggtcccaatggttgtgggaaaagttctctcttcagaattctaagtgggctctggcctgtgtatgaaggagtcctctataaac

SEQ ID NO: 590978 - DNA, 120 bp, Artificial Sequence
  ENSG00000173208_15 (sequence is synthesized)
cacctcctcaacatatgttttatattccacaaaggccatatatgtctcttggaagtcttcgggatcaagtcatttaccctgattcagtggatgatatgcatgataaaggttatacagacc

SEQ ID NO: 590979 - DNA, 120 bp, Artificial Sequence
  ENSG00000173208_16 (sequence is synthesized)
aagatctggaacgtatcctacacaatgtccatctctatcacatagttcaaagagaaggaggatgggatgctgttatggactggaaagatgtcctgtcaggaggggaaaagcaaagaatgg

SEQ ID NO: 590980 - DNA, 120 bp, Artificial Sequence
  ENSG00000173208_17 (sequence is synthesized)
gcatggctcgtatgttttatcataaaccaaaatatgccttgctggatgaatgtaccagtgctgtcagcattgatgtcgaaggaaagatatttcaggctgcaaaaggggctggaatttcct

SEQ ID NO: 590981 - DNA, 120 bp, Artificial Sequence
  ENSG00000173208_18 (sequence is synthesized)
tactgtctataacacacagaccttctctttggaaataccacacacatttattacagtttgatggtgaaggaggttggcgctttgaacaattggatactgctatccgtttgacattgagtg

SEQ ID NO: 590982 - DNA, 120 bp, Artificial Sequence
  ENSG00000173208_19 (sequence is synthesized)
aagaaaaacaaaagctagaatctcagctagctggaattcccaaaatgcagcagagactcaatgaactatgtaaaattttgggagaagactcagtgctgaaaacaattaaaaatgaagatg

SEQ ID NO: 590983 - DNA, 120 bp, Artificial Sequence
  ENSG00000173208_20 (sequence is synthesized)
agacatcttaatttgttttgacatattttaaaagttaattattagataaaggctcaaagacattctgttatactgcatgaagtatgttaagctaagcacagagaaaaaaaggcagcaaga

SEQ ID NO: 590984 - DNA, 120 bp, Artificial Sequence
  ENSG00000173208_21 (sequence is synthesized)
catgttttataagattttagcattaaggaagtatatgatctgacttttcagaagaaaataaacaaatgcattatgtaaggtcagtcattatgacttatactaattcctagtgaaggccta

SEQ ID NO: 590985 - DNA, 120 bp, Artificial Sequence
  ENSG00000173208_22 (sequence is synthesized)
atgcacttgtaaaacaggattttctaggtgaattcatgatgaataccagatttactatgtatatgtggtgtgtctgaagttcttaacaaacatgggcaatattctggaaatgaaacaagt

SEQ ID NO: 590986 - DNA, 120 bp, Artificial Sequence
  ENSG00000173208_23 (sequence is synthesized)
taaactgagcagcatttgggttgataccaagtgcataagattcaaactttgagtgacatttagtccatttatggttgatattaggtttaatagctagaattcaaattgattattgctagt

SEQ ID NO: 590987 - DNA, 120 bp, Artificial Sequence
  ENSG00000173208_24 (sequence is synthesized)
ggccaactaaacctgtacaaaatagctgacagttttataaataatttcaatataaaaattgttttaatggcatttgttgaaagaaaaaagcatggctaaaatgtataaaatgccatattt

SEQ ID NO: 590988 - DNA, 120 bp, Artificial Sequence
  ENSG00000173208_25 (sequence is synthesized)
ttaaattttggactttaagcatcttaatgagggcatataacaaattaattttagtacaaatcttaaatatttttaataaatcctttcattttaaaaagagaattgccaatacagaaaagg

SEQ ID NO: 590989 - DNA, 120 bp, Artificial Sequence
  ENSG00000173208_26 (sequence is synthesized)
ttgcaacttctgttcagaaatacacagcttgtttttttgcccaaggatgagtctacattttaagaactgcaatggtataaaggaacttaaggattctgagaatcatagtaataacataca

SEQ ID NO: 590990 - DNA, 120 bp, Artificial Sequence
  ENSG00000173208_27 (sequence is synthesized)
ttggaatagtactttataatttacaatccccatttacatcatttcaccttaatgttgatgacaatgttttgaaacaaatactatttttcctactttgcttttgagaaaattgacactcag

SEQ ID NO: 590991 - DNA, 120 bp, Artificial Sequence
  ENSG00000173208_28 (sequence is synthesized)
acttgccctaatcatgcactttacttaaggaaagatcgagaaatcaaatgaagttctcctgactctctggtttagtgctcttttgttattatcctttaaatcaaactgggctataatagc

SEQ ID NO: 590992 - DNA, 120 bp, Artificial Sequence
  ENSG00000173208_29 (sequence is synthesized)
aataaaagttagacgaagtgtagaaaataaaataaatttcataatgttagtcttattgttatttggttattgtttacaagaaatgaaaattaagtacaaagtgcaaagatcattgttctg

SEQ ID NO: 590993 - DNA, 120 bp, Artificial Sequence
  ENSG00000173208_30 (sequence is synthesized)
cggcttaaaatgaaatgagaaagttagtaaatcattcagcaactatgcagtcttactcaatattaatgtacctctaaggcattagcaatgagaagggcaaataattatggttttggtaaa

SEQ ID NO: 590994 - DNA, 120 bp, Artificial Sequence
  ENSG00000173208_31 (sequence is synthesized)
gttaatatttattgaacataatgagaaataatctatatggactagtcatatgaaatagattttattctatttgtgtgcactggagctggaaagccaagactgaaactttatctcttgctg

SEQ ID NO: 590995 - DNA, 120 bp, Artificial Sequence
  ENSG00000173208_32 (sequence is synthesized)
cctgtgataccacattgacataccagaagaatattggaatgatcagttgttagtggcctaggattttatttgcctgttgagacacagccataatagatgttaagtctgtgattcttagac

SEQ ID NO: 590996 - DNA, 120 bp, Artificial Sequence
  ENSG00000173208_33 (sequence is synthesized)
ttttcaggtgatagagtacctggaagtcattcataatgatcgttatagaacatcataacatttctacattttcaattctgccatgatagctagtgtatttttaattttcaataaatgtaa

SEQ ID NO: 590997 - DNA, 120 bp, Artificial Sequence
  ENSG00000173208_34 (sequence is synthesized)
ccaacttacatgaaggaatgcaatataaaattataatcagtacatttgtccaacgttttcattagtattatcacctacttattcatcagttactaatatttcctgttagaaaagtgaggc

SEQ ID NO: 590998 - DNA, 120 bp, Artificial Sequence
  ENSG00000173208_35 (sequence is synthesized)
aggaattaaagatttttttttaagaagcatggaaccaaaacttaaacttgctaaaaattattcattaatcttttctacataagtgattatccagtttatactgctacaagggcaaaagtc

SEQ ID NO: 590999 - DNA, 120 bp, Artificial Sequence
  ENSG00000173208_36 (sequence is synthesized)
tgaggcaagtgttttaagttaacttttaaaggtacaagaagaaaatgaaaaatcctcatgtgaaagatgtgtataattttcatgccttaattttcataatataaaaataaaacataattt

SEQ ID NO: 591000 - DNA, 120 bp, Artificial Sequence
  ENSG00000173208_37 (sequence is synthesized)
taaaacaacctgataattttgttttgaaacattgaaaagaatgccaaaacaaatattagatttgtaattagtcagtatttaatatattttacccatgagctaaagcaaaaaagactcatt

SEQ ID NO: 591001 - DNA, 120 bp, Artificial Sequence
  ENSG00000173208_38 (sequence is synthesized)
atttatgatgcacaggattcaaagatgcctaaaattctgtattaaaaactatgtacactgtaatttaaatgttaaagttctaatatgcacatgttttccatgagctttttgtgcctattt

SEQ ID NO: 591002 - DNA, 120 bp, Artificial Sequence
  ENSG00000173208_39 (sequence is synthesized)
gttttctgaatttatttttcaggaccaacatccttaacttggaagggaaaacatctctgatttgaacttgtatttatgtaccattcaattgtttccaaatggtccaatgggtataccata

SEQ ID NO: 591003 - DNA, 120 bp, Artificial Sequence
  ENSG00000173208_40 (sequence is synthesized)
ttttactactcttatattttacggaaaacatgaaaaagactgagaaactagccatttttgaatacagcaagggatagatgaggaaaggaaaaaagaaagaatatttcaagtttcaaacta

SEQ ID NO: 591004 - DNA, 120 bp, Artificial Sequence
  ENSG00000173208_41 (sequence is synthesized)
cttttaccatgttatatctatttgcccaaacgtttgacatatttttggtcaaacaaaaagctataagtttatggagcttgagtttaaaatgtgcattctttaggttaactcttaaacttg

SEQ ID NO: 591005 - DNA, 120 bp, Artificial Sequence
  ENSG00000173208_42 (sequence is synthesized)
aaaaataagttggattctatgaaaacgttgcattatatttctacagcatgtaatgttatgccaagcatgagtctaaaacagtttgtgttcttgtaagcaggataatgtgtaataatccct

SEQ ID NO: 591006 - DNA, 120 bp, Artificial Sequence
  ENSG00000173208_43 (sequence is synthesized)
ctgaaataatctcaagaagaatgatataccttaaaactcaactcaaatttacatttgtttacagtgggaatggttttctcttgatagaaatttggtttttgtctcaagttttggtctgtc

SEQ ID NO: 591007 - DNA, 120 bp, Artificial Sequence
  ENSG00000173208_44 (sequence is synthesized)
agtaaaggcataaatgaatatcctagtttttatttgaaacattggttccaagtatagtttcatatttggcaatagattcatcttattctaatatgtttggaatagctttttgattcaatg

SEQ ID NO: 591008 - DNA, 120 bp, Artificial Sequence
  ENSG00000173208_45 (sequence is synthesized)
agtctaggaaaatctgttacacattgaaacccaagtccagagaatgttacacacttctaatatatgcataaaatgatggtaaaggttattaaatcattgatttaaaaagatgactttgat

SEQ ID NO: 591009 - DNA, 120 bp, Artificial Sequence
  ENSG00000173208_46 (sequence is synthesized)
ataattactttatgggcaaaattgtcctcatttagaagtgaaaagtactttcacatagcctaggctatttacagttctgattatatacatttagatatgttgaatatgttttggggttga

SEQ ID NO: 591010 - DNA, 120 bp, Artificial Sequence
  ENSG00000173208_47 (sequence is synthesized)
atatgttttgccacatgagcgccttcaggtggatgtataaaatatttttttaaaaaccaatttcttcttcattgttgatgcttttcctgactaccaagttcagggctggtttacatttca

SEQ ID NO: 591011 - DNA, 120 bp, Artificial Sequence
  ENSG00000173208_48 (sequence is synthesized)
tattgtgaaattttcaaaaccaatggtctatttataagccagaattgtattaatgaaaatgaatgagaaaaatgtccttaaaggtaaaaatcattatgtagctaaatgaaattgtggctg

SEQ ID NO: 591012 - DNA, 120 bp, Artificial Sequence
  ENSG00000173208_49 (sequence is synthesized)
tgtgtgagtacattataatataatttccatctgatgtgtatttacttgaactcatcattccttatgaattccttaaccattaagaaaaagactagattaatcaaaggaattacaaattat

SEQ ID NO: 591013 - DNA, 120 bp, Artificial Sequence
  ENSG00000173208_50 (sequence is synthesized)
tccatttttacaaaataccctgtttctatactgcaaatggccatgttgggtatatgtctatatacgccttacttagacattgtattgtatataaccgtgtgtagaactatagacaatagt

SEQ ID NO: 591014 - DNA, 120 bp, Artificial Sequence
  ENSG00000173208_51 (sequence is synthesized)
caccaaatagttatttaaatattaattttctttattaatacaacacatttaataagtatctacctatgccaggcactgtgctaagttctattactaaataaaatttggtccctgtccgaa

SEQ ID NO: 591015 - DNA, 120 bp, Artificial Sequence
  ENSG00000173210_0 (sequence is synthesized)
ctgccaacccgcgagcccgcatcatggatgtcgagctcccctatttcgcattgctagccctggaattcgagaccccagacgaggaccaggattcatgaaatcagtcgcaggggccggggc

SEQ ID NO: 591016 - DNA, 120 bp, Artificial Sequence
  ENSG00000173210_1 (sequence is synthesized)
aggggcctctggctcccgacactggccgagaggtgatgagtgaggttcgaagaacggaagatttaaaaagcagccggggcctccgtattgaatgaaagacccagtgcaaagacatcacca

SEQ ID NO: 591017 - DNA, 120 bp, Artificial Sequence
  ENSG00000173210_2 (sequence is synthesized)
tgaacactagcattccttatcagcagaatccttacaatccacggggcagctccaatgtcatccagtgctaccgctgtggagacacctgcaaaggggaagtggtccgcgtgcacaacaacc

SEQ ID NO: 591018 - DNA, 120 bp, Artificial Sequence
  ENSG00000173210_3 (sequence is synthesized)
acttccacatcagatgcttcacctgtcaagtatgtggctgtggcctggcccagtcaggcttcttcttcaagaaccaggagtacatctgcacccaggactaccagcaactctatggcaccc

SEQ ID NO: 591019 - DNA, 120 bp, Artificial Sequence
  ENSG00000173210_4 (sequence is synthesized)
gctgtgacagctgccgggacttcatcacaggcgaagtcatctcggccctgggccgcacttaccaccccaagtgcttcgtgtgcagcttgtgcaggaagcctttccccattggagacaagg

SEQ ID NO: 591020 - DNA, 120 bp, Artificial Sequence
  ENSG00000173210_5 (sequence is synthesized)
tgaccttcagcggtaaagaatgtgtgtgccaaacgtgctcccagtccatggccagcagtaagcccatcaagattcgtggaccaagccactgtgccgggtgcaaggaggagatcaagcacg

SEQ ID NO: 591021 - DNA, 120 bp, Artificial Sequence
  ENSG00000173210_6 (sequence is synthesized)
gccagtcactcctggctctggacaagcagtggcacgtcagctgcttcaagtgccagacctgcagcgtcatcctcaccggggagtatatcagcaaggatggtgttccatactgtgagtccg

SEQ ID NO: 591022 - DNA, 120 bp, Artificial Sequence
  ENSG00000173210_7 (sequence is synthesized)
actaccatgcccagtttggcattaaatgtgagacttgtgaccgatacatcagtggcagagtcttggaggcaggagggaagcactaccacccaacctgtgccaggtgtgtacgctgccacc

SEQ ID NO: 591023 - DNA, 120 bp, Artificial Sequence
  ENSG00000173210_8 (sequence is synthesized)
agatgttcaccgaaggagaggaaatgtacctcacaggttccgaggtttggcaccccatctgcaaacaggcagcccgggcagagaagaagttaaagcatagacggacatctgaaacctcca

SEQ ID NO: 591024 - DNA, 120 bp, Artificial Sequence
  ENSG00000173210_9 (sequence is synthesized)
tctcaccccctggatccagcattgggtcacccaaccgagtcatctgcgctaaagtggataatgagatccttaattacaaagacctggcggctctccccaaggttaagtctatctacgagg

SEQ ID NO: 591025 - DNA, 120 bp, Artificial Sequence
  ENSG00000173210_10 (sequence is synthesized)
tacaacgccccgacctcatttcctatgagcctcattccagatacatgtccgacgagatgctggagagatgtggctatggagagtcgctgggaacattatctccctactcccaggacatct

SEQ ID NO: 591026 - DNA, 120 bp, Artificial Sequence
  ENSG00000173210_11 (sequence is synthesized)
acgagaacctggacctccggcagagacgggcctccagcccggggtacatagactcccccacctacagccggcagggcatgtcccccaccttctcccgctcacctcaccactactaccgct

SEQ ID NO: 591027 - DNA, 120 bp, Artificial Sequence
  ENSG00000173210_12 (sequence is synthesized)
ctgggcccgagagtggccggagctctccataccatagccagttagatgtgaggtcctccactccaacctcttaccaggctcccaagcactttcacatcccagctggagacagtaacatct

SEQ ID NO: 591028 - DNA, 120 bp, Artificial Sequence
  ENSG00000173210_13 (sequence is synthesized)
accggaaacccccgatctacaaacggcatggtgatttgtctacagcaaccaagagcaaaacaagtgaagacatcagccagacctccaagtacagtcccatctactcgccagacccctact

SEQ ID NO: 591029 - DNA, 120 bp, Artificial Sequence
  ENSG00000173210_14 (sequence is synthesized)
atgcttcggagtctgagtactggacctaccatgggtcccccaaagtgccccgagccagaaggttctcgtctggaggagaggaggatgattttgaccgcagcatgcacaagctccaaagtg

SEQ ID NO: 591030 - DNA, 120 bp, Artificial Sequence
  ENSG00000173210_15 (sequence is synthesized)
gaattggccggctgattctgaaggaagaaatgaaggcccggtcgagctcctatgcagatccctggacccctccccggagctccaccagcagccgggaagccctgcacacagctggctatg

SEQ ID NO: 591031 - DNA, 120 bp, Artificial Sequence
  ENSG00000173210_16 (sequence is synthesized)
agatgtccctcaatggctcccctcggtcgcactacctggctgacagtgatcctctcatctccaaatctgcctccctgcctgcctaccgaagaaatgggctgcacaggacacccagcgcag

SEQ ID NO: 591032 - DNA, 120 bp, Artificial Sequence
  ENSG00000173210_17 (sequence is synthesized)
acctcttccactacgacagcatgaacgcagtcaactggggcatgcgagagtacaagatctacccttatgaactgctgctggtgactacaagaggaagaaaccgactgcccaaggatgtag

SEQ ID NO: 591033 - DNA, 120 bp, Artificial Sequence
  ENSG00000173210_18 (sequence is synthesized)
cccgtttagagcgccacctgtcccaggaagagttctaccaagtctttggcatgaccatctctgagtttgaccggctggccctctggaagaggaatgaactgaagaagcaagcccggctgt

SEQ ID NO: 591034 - DNA, 120 bp, Artificial Sequence
  ENSG00000173210_19 (sequence is synthesized)
tctaggcagaggctctataaatatatatgcatttatataaagatatatgtaaaatctctctactgaagctcggtataatcctctcttgtgtaatgggacacactgcctgccatgagactt

SEQ ID NO: 591035 - DNA, 120 bp, Artificial Sequence
  ENSG00000173210_20 (sequence is synthesized)
gcttttctgtactgtcaggcaagcccacgtcatcgagatatttttatgctccttactttctcttttctaagtgctgtgggatctgggaagggatttgaggggactctgtccttttattgg

SEQ ID NO: 591036 - DNA, 120 bp, Artificial Sequence
  ENSG00000173210_21 (sequence is synthesized)
ggatcctttttatactgaaacatctgtcctaacttgagtgccccaaggtccaactctctttcctaaagaaggtgcctgaagaagtctctcttctctctgcttcgtggcccctttcttaaa

SEQ ID NO: 591037 - DNA, 120 bp, Artificial Sequence
  ENSG00000173210_22 (sequence is synthesized)
tttctagggctgatgctgaccatgtggtttccacaccttattggccccagaggggccctcccatgggaagatctgcagcagtctccccaaatcagtgagcacctttgagcgcccacgaag

SEQ ID NO: 591038 - DNA, 120 bp, Artificial Sequence
  ENSG00000173210_23 (sequence is synthesized)
aactttctcaacacccccaattaggagctcagtgctctcttggggcaatgcagttaaaagggtgagcctcaaatctagtcattacaccagtcaacagaagtggacagggcctaggcctct

SEQ ID NO: 591039 - DNA, 120 bp, Artificial Sequence
  ENSG00000173210_24 (sequence is synthesized)
cctcagctccttaaccctcctccttctgccctggattgtaacctctcccttgtccaaatctaggattcctggtaggaaaaggaaaaggcccttcccttccctccaccacttccaactggc

SEQ ID NO: 591040 - DNA, 120 bp, Artificial Sequence
  ENSG00000173210_25 (sequence is synthesized)
ccctttgcctgacctggacttggagaaccagaggaaaagagagggagcggaagtgggagatggagcagggcacctgttagaatcagagctgcaggatttcttgggaccctcctctctccc

SEQ ID NO: 591041 - DNA, 120 bp, Artificial Sequence
  ENSG00000173210_26 (sequence is synthesized)
tcactgctcccagcacctcctgacccttccctctttcaaggagaagcccatgattgcagcttgtattctttagccttattacaatctatgtgcctgacaactcaacacaccgcagggcta

SEQ ID NO: 591042 - DNA, 120 bp, Artificial Sequence
  ENSG00000173210_27 (sequence is synthesized)
atgttcccaccagagctccaactgaacaaccagacagacaactctcatcatcctccagagagaaaataggccgtgtctcaaagaaaggttcttggtctatgcctctggtctgtgggctgg

SEQ ID NO: 591043 - DNA, 120 bp, Artificial Sequence
  ENSG00000173210_28 (sequence is synthesized)
cagggcaaccataccatacccccgccagtcctcggctcctgctgcaaagttggccatgtttcacagggaaacttttggaagagtggctgcttatgagattccaaaatgaagtgttggcca

SEQ ID NO: 591044 - DNA, 120 bp, Artificial Sequence
  ENSG00000173210_29 (sequence is synthesized)
acaccgctcatggccatcctggattttcccagtggcttcccttcctgctcgcctccctgaacaggggagaaagcttaacctctcttctcctctccaaacctttcaccttgaatgggtaat

SEQ ID NO: 591045 - DNA, 120 bp, Artificial Sequence
  ENSG00000173210_30 (sequence is synthesized)
gtttggtgggggctgttccttcttggagaagccttgagtcggaccattttgagatcatggaggaaggatgaagaagtgaaaatgacaataatgactctcaagaggctggcgatgtgacat

SEQ ID NO: 591046 - DNA, 120 bp, Artificial Sequence
  ENSG00000173210_31 (sequence is synthesized)
ggcaaatgtagaactgacttaaattgaacaaaccctcactgagcacctctgatgttgagcacctgctgaatactgagcactgaatgggggagggggaggggagcacggggtgagtcaacc

SEQ ID NO: 591047 - DNA, 120 bp, Artificial Sequence
  ENSG00000173210_32 (sequence is synthesized)
tgggactcggtctcagggatatgcctaccaatagcgggtatcgtaaggcatgtacccaaacataacggatgtaaggcagaaagtgatcggagaaggaatgagaaagtgtgcgtgatgtta

SEQ ID NO: 591048 - DNA, 120 bp, Artificial Sequence
  ENSG00000173210_33 (sequence is synthesized)
atgaaaagtcatatgcagctagagcagacccaggaaagctttctggaagagattgcatctgaggaaattcaggaaggatctttgtagattggggggagattctaaattgaaggggtgatg

SEQ ID NO: 591049 - DNA, 120 bp, Artificial Sequence
  ENSG00000173210_34 (sequence is synthesized)
gggtgaggggccagagggaagtctgctgtgttctcatgtaggatgtcagccctccctgcaacttctctttttggccaatgtcttttcactttcctgaccctttagaatcatccccagcca

SEQ ID NO: 591050 - DNA, 120 bp, Artificial Sequence
  ENSG00000173210_35 (sequence is synthesized)
gacgcaatcatggaagttgccttattgtcactggttaagaacttggcgagattgaagggcttttgttattgttgttggatatttttgtttcccataaaagcacatcatttcaaccctaaa

SEQ ID NO: 591051 - DNA, 120 bp, Artificial Sequence
  ENSG00000173210_36 (sequence is synthesized)
ggccggggcaggggcctctggctcccgacactggccgagaggtgggttccggggcgggtcgctgctccttgaagccgggcggggacgcgctgcccccgccctgcctccctgtggtccaca

SEQ ID NO: 591052 - DNA, 120 bp, Artificial Sequence
  ENSG00000173210_37 (sequence is synthesized)
ccccctttgggctccggagccgctgggcaggaatagtccggggtgcgcgcgagcaggcgctgccaaccccacttctgcccgggattccaatctgaggagcaggaggaccggggcgccggt

SEQ ID NO: 591053 - DNA, 120 bp, Artificial Sequence
  ENSG00000173210_38 (sequence is synthesized)
gtcctgccgcctccttctccttgctctcacctgcgcctattagtccacgcgccttcaaggccaggggctacagcccagacagagaggggacagcagagggagagagagcacctgaggata

SEQ ID NO: 591054 - DNA, 120 bp, Artificial Sequence
  ENSG00000173210_39 (sequence is synthesized)
caacatttcctgtcccttcttggcccacttttcctgaatcctgccctaggtctcttgcctactgaaatcagatactctccctgggcttcagagacactctgttggcttgccagtcaccaa

SEQ ID NO: 591055 - DNA, 120 bp, Artificial Sequence
  ENSG00000173210_40 (sequence is synthesized)
atattagacacttacattcgggaggtcatgtgcccatattattccatgggcacatggcaaatacctccaagcttattcctagtagtattaggggactctcttgggccttgtcttttgaga

SEQ ID NO: 591056 - DNA, 120 bp, Artificial Sequence
  ENSG00000173210_41 (sequence is synthesized)
gaaggtatcttaagactgctgggcaaccccaagaagggcagatccagctcttcctccagacttaatttctggccatttctggatagaacagagagcccagacacaaaatgtacctgaaag

SEQ ID NO: 591057 - DNA, 120 bp, Artificial Sequence
  ENSG00000173210_42 (sequence is synthesized)
aacgtggtgcatgagagcacatgctgcttccgccccggaacctgagcacgctgagacgccccagcccatcccccatctctgctgtcatcacctcaccacttcctaaactgccaccgcgtt

SEQ ID NO: 591058 - DNA, 120 bp, Artificial Sequence
  ENSG00000173210_43 (sequence is synthesized)
ctaagcctcgattgaaggagcacatcccttccattgaagctgcagaggagcagctgccaccctgtgcacccacacttgcttaagggtctagctggataacaaaaggaggcccagaatcgg

SEQ ID NO: 591059 - DNA, 120 bp, Artificial Sequence
  ENSG00000173210_44 (sequence is synthesized)
tggagcttggagatgagcgaagcagtcctgcaccaggttctgaactaattagctggtggaggggacaatacgagtttaaacagcggctctgggtgcctaagattctacattttatacaga

SEQ ID NO: 591060 - DNA, 120 bp, Artificial Sequence
  ENSG00000173210_45 (sequence is synthesized)
catccttggttccagagggggctgagcaggggggtccgaggtgagtctgtgagcatgtgcaagtctgtaccagcttgtgaaggacatgccatgtcccctgagtactcatagaaagacacc

SEQ ID NO: 591061 - DNA, 120 bp, Artificial Sequence
  ENSG00000173210_46 (sequence is synthesized)
aacatgacaaaggtagtttggctttatacctagaaaaggcccccaggtcacaagcttctcaggactttgtgggattttccaggtgggccctgaggggtggcactaaagcagactcaagag

SEQ ID NO: 591062 - DNA, 120 bp, Artificial Sequence
  ENSG00000173210_47 (sequence is synthesized)
gagtctggggtggaggtgggttgcttggaaaagagggcggaggaaaaagctaaatgcagtcagccaggaggggctgcccaggacccaagtcaaagagaagaatttgaaagctttggaagc

SEQ ID NO: 591063 - DNA, 120 bp, Artificial Sequence
  ENSG00000173210_48 (sequence is synthesized)
aagtgctgttgtgggggctgcatagcccagggctggctgaagctgatccaccacgctctgccactctggctccacagagcacagagcttgtccctaaagcttcctgtagctgaccatgag

SEQ ID NO: 591064 - DNA, 120 bp, Artificial Sequence
  ENSG00000173210_49 (sequence is synthesized)
aaatggtcatgcagccacacacacttccccagcccctctctctgctctaccagcctgtcacccacgtttgggccacgagaagtcactgctctgtaagtagttgtgactgcagtgggtctt

SEQ ID NO: 591065 - DNA, 120 bp, Artificial Sequence
  ENSG00000173210_50 (sequence is synthesized)
tttggtcacccctgtcctgggcttacttcaggtggaagcttgaagctggatggcagctgagccagcagaccgattctgacacttacagatgaggaaactaaggcagagatggtaggacct

SEQ ID NO: 591066 - DNA, 120 bp, Artificial Sequence
  ENSG00000173210_51 (sequence is synthesized)
gcccagtgttacagctgagtaaagtggcagagctgggaccagaacccaggtttgctgactccctgtctagcactccttccttcaggctatgtagtccctgagcagaatgtggcatctcag

SEQ ID NO: 591067 - DNA, 120 bp, Artificial Sequence
  ENSG00000173210_52 (sequence is synthesized)
atgatggagttcaaatttataacaaggaaggcttctaaagggctaggaaggcttctaaagggctggggctcacctgggacctgtccagtcttatttgaggagccacacccttagaggtca

SEQ ID NO: 591068 - DNA, 120 bp, Artificial Sequence
  ENSG00000173210_53 (sequence is synthesized)
ttctggaacagacctgggaatccatggaatgtgctggaaagagccctgggctgggatctggtccagttctggtgctcacatgctatgtggtcttaagcaagccccttcccctctctggtg

SEQ ID NO: 591069 - DNA, 120 bp, Artificial Sequence
  ENSG00000173210_54 (sequence is synthesized)
ctccaattactaaatgcaaaatgagggtttggccccagtgcttttccagctccgatgctccatggcccagttctaacagagagccctgatcttgaagtggactcactcccctgggctgga

SEQ ID NO: 591070 - DNA, 120 bp, Artificial Sequence
  ENSG00000173210_55 (sequence is synthesized)
aactgctcccacgggcctggagggaagtgggagaggttcccaacctggaggcctcctgcatcatgaccccattggcatgtggcccagactcacaagcttcacaagcacaatgcagggaag

SEQ ID NO: 591071 - DNA, 120 bp, Artificial Sequence
  ENSG00000173212_0 (sequence is synthesized)
atttttactgccagctttcaagttggaagagggaaattacgtttaaaggtcagcagatgacagatggattttcacaatttggaaataaaaacatgagtgaagggttcggaaggcaagtct

SEQ ID NO: 591072 - DNA, 120 bp, Artificial Sequence
  ENSG00000173212_1 (sequence is synthesized)
ctggtccattacacacttccagaaaaacttagtacccagagactcacattactgggagtgctatctactcacaagtgttgcactccattgagaaaaaaaaaaaaaccaggaagttgctgt

SEQ ID NO: 591073 - DNA, 120 bp, Artificial Sequence
  ENSG00000173212_2 (sequence is synthesized)
tctactgaggactgaccaagaagccatgaaataccttactgtgggagacttagaagattgcctactgaataaggtggacttgaggcgccagcagatttcccaggctgtggaggaggtgca

SEQ ID NO: 591074 - DNA, 120 bp, Artificial Sequence
  ENSG00000173212_3 (sequence is synthesized)
gaaagtcgttcatcatttgaccacaaacatcagcaaccaagacattagatttcaagctgtgccttactctgacacgtacaatgaaaatattaaggttttggctcccagtcagttcctcgt

SEQ ID NO: 591075 - DNA, 120 bp, Artificial Sequence
  ENSG00000173212_4 (sequence is synthesized)
cacagtcccaataaaaggcctggccgggtacagggaggccagggagcagcactggcggtactacacactgcagggcaccaggctgccctgcccgttgcgggaccctgagggtctgcagca

SEQ ID NO: 591076 - DNA, 120 bp, Artificial Sequence
  ENSG00000173212_5 (sequence is synthesized)
gtggctggaggtggaacagtttatgaagagcctgtggcagtggcatgagacagatgtgaacatcgacggagacattgtgcctgccaaggtcctcctagtgttccggaagctggtggaaaa

SEQ ID NO: 591077 - DNA, 120 bp, Artificial Sequence
  ENSG00000173212_6 (sequence is synthesized)
tgcagttagaacctgtcacctctcaggtaaggtcagcctgctaggaaaccgctctgcagtttgggttgctgtggaaacatctgcatatcaggtggaactggagctggtccccgcagtgga

SEQ ID NO: 591078 - DNA, 120 bp, Artificial Sequence
  ENSG00000173212_7 (sequence is synthesized)
gatccccaccacctggtccaagaaagcccggtggcctcgatgtctgcagcgctggccttcccaagagagagtggagtgcatcaagtcgtttggatttaacttgttggcctgttcaaatta

SEQ ID NO: 591079 - DNA, 120 bp, Artificial Sequence
  ENSG00000173212_8 (sequence is synthesized)
tcactggcagctgagcttcctccgtgctgagcaggtgttactggaacagctggatgaagatgggggctgccgtaggaagtgttttcaggtcatgaggcacctgaaggaggacatctggtg

SEQ ID NO: 591080 - DNA, 120 bp, Artificial Sequence
  ENSG00000173212_9 (sequence is synthesized)
cccagggaacaggccggttatcacgtcccaccatctgcagactgtgctcttttggacctgcgagaaatatccccactttaaagactggcaggtcttcagcaaagcatttctgcgcctggt

SEQ ID NO: 591081 - DNA, 120 bp, Artificial Sequence
  ENSG00000173212_10 (sequence is synthesized)
gaggaaactgcacaagtgcgtgagccagcacttcctgaaacactatttcgtccggaacagcaacctctttcagtgcaccaacccgactgaactggacactgtggcccaaaagctggccac

SEQ ID NO: 591082 - DNA, 120 bp, Artificial Sequence
  ENSG00000173212_11 (sequence is synthesized)
cttcctgaagaacccccagatcggcccgccctgatggttgccccggcctgggaggctcttggacattttattctggcttaacattgttctttggatggttcctcagtcaggtgccaggat

SEQ ID NO: 591083 - DNA, 120 bp, Artificial Sequence
  ENSG00000173212_12 (sequence is synthesized)
cctgcctaggagaaaggccacgaatggcagcggaaattacatcaaaccagaaacacttcagcagggggaaaactgtgccccaggatgtctggcccaggcctccctggagcccagcaagca

SEQ ID NO: 591084 - DNA, 120 bp, Artificial Sequence
  ENSG00000173212_13 (sequence is synthesized)
cgtctcacagtgaagatggagacagaacccctggaagtctggacatgagcctgctggccaatactgtgcccagcccactgatcatgggcacattctcctgccatttgtaaaatgggaatg

SEQ ID NO: 591085 - DNA, 120 bp, Artificial Sequence
  ENSG00000173212_14 (sequence is synthesized)
ttaacgtgcctacctctgagcagggctgtgtgcctatgaaactgtgctggcgccttttcaaggggaaggcattggatcaacacaaagtgttcctggttggttgagtagctggtgtttgca

SEQ ID NO: 591086 - DNA, 120 bp, Artificial Sequence
  ENSG00000173212_15 (sequence is synthesized)
tcctggatcggtacccacagcactgacgcaaaattgcacctgatgagttagtgagcctgtgcttccttgctgccctccagcttccttagcatgtgggtcagtggctcctgatgttctgtc

SEQ ID NO: 591087 - DNA, 120 bp, Artificial Sequence
  ENSG00000173212_16 (sequence is synthesized)
tgcttcgctggtattctctaagcagggaggggaatggttttgatgataagtgtaagtcaaagatgaaagtacaactcttggcctgatcccaaccatagccctctctttgcttcccatgcc

SEQ ID NO: 591088 - DNA, 120 bp, Artificial Sequence
  ENSG00000173212_17 (sequence is synthesized)
atgggccatggatggaacttccttatatatttatgtaaataacctagtactatgatctgcatggagtgaccttaggtgtctgtcactgctcagtgtgttcctttgctcacttcattcact

SEQ ID NO: 591089 - DNA, 120 bp, Artificial Sequence
  ENSG00000173212_18 (sequence is synthesized)
cactcactcattgacaaataatgctcattaggcaccgggaacacagcaaagagcaaagtggatgaggacctccccctggggatgccacctaatggtggagacaagaaatgaacgacagat

SEQ ID NO: 591090 - DNA, 120 bp, Artificial Sequence
  ENSG00000173212_19 (sequence is synthesized)
aaacacgcacagttattacagatggaagcaagtgcttcaaaggaaataaacagaatgttgaagtagagtccacagaaaggtccccgaaggatgaaaatgcaaatagctgaaggggaagga

SEQ ID NO: 591091 - DNA, 120 bp, Artificial Sequence
  ENSG00000173212_20 (sequence is synthesized)
aaagtgaccaaaggcaggcatggtggggctggcatgagtcagagcacctggccttgtaaagccaggaaggaatcagtattttattctaagatcaaaggtgtgacatttggcctctccaga

SEQ ID NO: 591092 - DNA, 120 bp, Artificial Sequence
  ENSG00000173212_21 (sequence is synthesized)
agcagaagagtatcacgatctgactgcattttaaacaattgttctggtaactgcatgaagaaggtctggggactcacacaggagctgggcactgagtgctcttgagccacccatttggaa

SEQ ID NO: 591093 - DNA, 120 bp, Artificial Sequence
  ENSG00000173212_22 (sequence is synthesized)
tttcacagaggcccacaaggcaacatattctgtgtggcacaaccgatcaggaattctaggagttctcggtgagatcaatggtttttttctggcgtttatgtaatgcttctcaactcaagg

SEQ ID NO: 591094 - DNA, 120 bp, Artificial Sequence
  ENSG00000173212_23 (sequence is synthesized)
ggctcctttattacttttgaatgtttttgcccaaatgtctataccaaagataaatttctaaagcatgaactactgattttgttttcatgaaaattcacatttgaaaatgaaaatgattac

SEQ ID NO: 591095 - DNA, 120 bp, Artificial Sequence
  ENSG00000173213_0 (sequence is synthesized)
atgagggaaatcgtgctcacgcagaccgggcagtgcgggaaccagatcggcgccaagttctgggaggtgatctctgatgaacatgccatcgactccgctggcacctaccacggggacagc

SEQ ID NO: 591096 - DNA, 120 bp, Artificial Sequence
  ENSG00000173213_1 (sequence is synthesized)
cacctgcagctggagcgcatcaacgtgcaccaccacgaggccagcggtggcaggtacgtgccccgcgctgtgctcgtggatctggagccgggcaccatggactctgtgcactcggggccc

SEQ ID NO: 591097 - DNA, 120 bp, Artificial Sequence
  ENSG00000173213_2 (sequence is synthesized)
ttcgggcaggtcttcaggccagacaacttcatttccggtcagtgtggggccggaaacaactgggccaagggacgctacacagaaggcgcggagctgacggagtcagtgatggacgttgtc

SEQ ID NO: 591098 - DNA, 120 bp, Artificial Sequence
  ENSG00000173213_3 (sequence is synthesized)
agaaaggaggctgagagctgtgactgcctgcagggtttccagctgacccactccctgggtggggggactgggtctgggatgggtacccttctcattagtaagatccgggaggagtaccca

SEQ ID NO: 591099 - DNA, 120 bp, Artificial Sequence
  ENSG00000173213_4 (sequence is synthesized)
gacaggatcataaacacattcagcatcctgccctcgcccaaggtgtcggacaccgtggtggagccctacaacgccaccctctcagtccaccagctcatagaaaacgcggatgagaccttc

SEQ ID NO: 591100 - DNA, 120 bp, Artificial Sequence
  ENSG00000173213_5 (sequence is synthesized)
gcgctatatgacatatgttccaggaccctaaaactgcccacacccacctatggtgacctgaaccacctggtgtctgctaccatgagtggggtcaccacatgcctgcgcttcccaggccag

SEQ ID NO: 591101 - DNA, 120 bp, Artificial Sequence
  ENSG00000173213_6 (sequence is synthesized)
ctgaatgctgacctgcggaagctggccgtgaacatggtcccgtttccccggctgcatttcttcatgcccggctttgccccactgaccagccggggcagccagcagtaccgggccttgact

SEQ ID NO: 591102 - DNA, 120 bp, Artificial Sequence
  ENSG00000173213_7 (sequence is synthesized)
gtggctgagctcacccagcagatgtttgatgctaagaacatgatggctgcctgtgacccccgtcacggctgctacctaacggtggctgccattttcaggggtcgcatgcccatgagggag

SEQ ID NO: 591103 - DNA, 120 bp, Artificial Sequence
  ENSG00000173213_8 (sequence is synthesized)
gtggatgaacaaatgttcaacattcaagataagaacagcagctactttgctgactggttccccgacaacgtaaaaacagccgtctgtgacatcccaccccgggggctaaaaatgtcagcc

SEQ ID NO: 591104 - DNA, 120 bp, Artificial Sequence
  ENSG00000173213_9 (sequence is synthesized)
accttcattgggaataatgcggccatccaggaactcttcacatgtgtctcagagcagtttacagcaatgttcaggcgcaaggccttcctccactggtacacgggcgagggcatggatgag

SEQ ID NO: 591105 - DNA, 120 bp, Artificial Sequence
  ENSG00000173213_10 (sequence is synthesized)
atggaattcaccgaggccgagagcaacatgaacgacctggtgtctgaatatcagcaatatcaggatgccacggccgaggaggaggaggatgaggagtatgccgaggaggaggtggcctag

SEQ ID NO: 591106 - DNA, 120 bp, Artificial Sequence
  ENSG00000173213_11 (sequence is synthesized)
ggagtgcccaaggtcatcctgtgggaactgtggcgccagggcccctgaacaccctcctatccgccgagtcgagtcgcttcatctgcctcctaaatgggcttcgggaggaaggccccggtg

SEQ ID NO: 591107 - DNA, 120 bp, Artificial Sequence
  ENSG00000173213_12 (sequence is synthesized)
tctcctcaaggggaagctgctgtcctgtaactctggaggagggagtttcatttgctccacctgcagggcgaatggtgctttcacctcacatgtgacacttggccctttctgcattatggt

SEQ ID NO: 591108 - DNA, 120 bp, Artificial Sequence
  ENSG00000173214_0 (sequence is synthesized)
tcttctctgccccggttccgggcggtccgctgggaggtggcgcccggagggacacccgtgcctggggtcggggccagtgctcttctcggagctccagaagttctgctgagaagcgcggcg

SEQ ID NO: 591109 - DNA, 120 bp, Artificial Sequence
  ENSG00000173214_1 (sequence is synthesized)
gcagcaagacgacttctccggagccgccgagctggagttagaggtggagctccgtggggccgggcccccggctgcggggcagcggctcctgcaggcggaggccccggcggagaatgagcc

SEQ ID NO: 591110 - DNA, 120 bp, Artificial Sequence
  ENSG00000173214_2 (sequence is synthesized)
ggagccggaggtggtggtggtctcctggcagagcggtgggaccgggagcaagctgcggtggttcaccaccttgatgctgtgtgcctccttcctggggctggtggtaacgtccttatcttg

SEQ ID NO: 591111 - DNA, 120 bp, Artificial Sequence
  ENSG00000173214_3 (sequence is synthesized)
gctatttggggggacaaaggagccccacatatgcaggccttacacttctcttttgccttgggtgcctttttggctccactgctagctaaactggctttgggtccgacagcgtctgctgaa

SEQ ID NO: 591112 - DNA, 120 bp, Artificial Sequence
  ENSG00000173214_4 (sequence is synthesized)
aaccacacagagtctgacttccatcctgcactcaaccaatcatctgatgctgactcagaagctctgtttggagtacctaatgataagaatttactgtgggcttatgctgttatcggtact

SEQ ID NO: 591113 - DNA, 120 bp, Artificial Sequence
  ENSG00000173214_5 (sequence is synthesized)
tacatgttcttagtttctgtcatttttttttgtctgtttttaaagaatagctcaaagcaagaaaaagcaagagcatctgctgagacatttcgaagagcaaaatatcacaacgcccttctt

SEQ ID NO: 591114 - DNA, 120 bp, Artificial Sequence
  ENSG00000173214_6 (sequence is synthesized)
tgtctcctttttctgttcttctttttttatgttggagctgaggtaacatatggctcttatgttttctcatttgcaaccacccatgctggcatgaaagaaagtgaagctgctgggttgaac

SEQ ID NO: 591115 - DNA, 120 bp, Artificial Sequence
  ENSG00000173214_7 (sequence is synthesized)
tccatcttctgggggacatttgcagcctgcaggggcctggcaatcttttttgctacctgtttacagcctggaaccatgattgtgttgagcaacattggcagcctgacttcatctttattt

SEQ ID NO: 591116 - DNA, 120 bp, Artificial Sequence
  ENSG00000173214_8 (sequence is synthesized)
ctggtgctttttgacaagaacccaatttgtctctggatagcaacttcagtgtatggggcttcaatggcaaccacatttccgagtggtgtttcttggattgagcagtacacgaccatccat

SEQ ID NO: 591117 - DNA, 120 bp, Artificial Sequence
  ENSG00000173214_9 (sequence is synthesized)
gggaaatctgcagcattttttgtaattggtgcttccctgggagaaatggctattcctgcagtcattggaattcttcaaggaaaataccctgatttgcctgtagttctgtatacctctttg

SEQ ID NO: 591118 - DNA, 120 bp, Artificial Sequence
  ENSG00000173214_10 (sequence is synthesized)
ggagcatcaatagctactggtattttatttcctgtgctatataaattagccacttcacctcttgatcgccagcgaaaagaagacagaaagagtgaggaccagaaagctctgctctctagc

SEQ ID NO: 591119 - DNA, 120 bp, Artificial Sequence
  ENSG00000173214_11 (sequence is synthesized)
tccgggctaaatgaatatgaggaagagaatgaagaggaggatgcagaaaaatggaatgaaatggattttgaaatgattgaaacgaatgatacaatgaggcattctataatagagacatct

SEQ ID NO: 591120 - DNA, 120 bp, Artificial Sequence
  ENSG00000173214_12 (sequence is synthesized)
agaagtagtctgacggagcccacagctgaagtctataatcaatacccatcaaatgcactggtgtttgagtcttctccttttaatactggcagtgcccatgtgaagcacttgccagaaacc

SEQ ID NO: 591121 - DNA, 120 bp, Artificial Sequence
  ENSG00000173214_13 (sequence is synthesized)
aggacaaaagggactaacgtttagagaagatggattactcactgacatctttgaataactgccacttctaaggacgccattcagagcagagcattagcagaatttcaccatgctttgggg

SEQ ID NO: 591122 - DNA, 120 bp, Artificial Sequence
  ENSG00000173214_14 (sequence is synthesized)
attaaaatttttaggtccatattatagcaaatgctaaaaatttttgaaatgttctgtaattcccagagtcttccataaataaccaaatggtctcatacacgtacaataggatcttgttat

SEQ ID NO: 591123 - DNA, 120 bp, Artificial Sequence
  ENSG00000173214_15 (sequence is synthesized)
aacgctatcatttgacatgtgactgattaggaaatattttatggtctccacccctcagagcacccaaagaaggcattgtttttgagaaggggggtattctcagaatgagaccatgtagga

SEQ ID NO: 591124 - DNA, 120 bp, Artificial Sequence
  ENSG00000173214_16 (sequence is synthesized)
gttgaattgattggttgaacaaattatcaggtatcaatatttttccaggaaagttgaggagaatagtttcataaaagagaaatgggccgggtgcagtggctaaagcctgtaatcccagca

SEQ ID NO: 591125 - DNA, 73 bp, Artificial Sequence
  ENSG00000173214_17 (sequence is synthesized)
accgtactccagcctgggcgacatctagactccgtctcaaaaaagaaatggagaggtatttttattaattgct

SEQ ID NO: 591126 - DNA, 120 bp, Artificial Sequence
  ENSG00000173214_18 (sequence is synthesized)
gtctcaaaaaagaaatggagaggtatttttattaattgctttaccttatctgtagggttggatcaaagaatgtaatgactcatttgatttctaatttcaatgaagagaacacagaacagg

SEQ ID NO: 591127 - DNA, 120 bp, Artificial Sequence
  ENSG00000173214_19 (sequence is synthesized)
gcccaaggggtcgggcttcaagccttgacttcttctagccctgcactctgtcacttaacgtaggccttgtttatctcgcctcctgatctgtgattctagaaatgaaaatgagatgatttc

SEQ ID NO: 591128 - DNA, 120 bp, Artificial Sequence
  ENSG00000173214_20 (sequence is synthesized)
caaattgggaatctgtaagttttaaagtttgtgcaaaatgtctgctagaaattagtacaagtgacagcatgttcttcatttcaaatgagaagtgaaaccaaaatgataaatagctttaag

SEQ ID NO: 591129 - DNA, 120 bp, Artificial Sequence
  ENSG00000173214_21 (sequence is synthesized)
aatgtgctaatgataaatgattacatgtcaatttaatgtacttaatgtttaataccttatttgaataattacctgaagaatatattttttagtactgcatttcattgattctaagttgca

SEQ ID NO: 591130 - DNA, 120 bp, Artificial Sequence
  ENSG00000173214_22 (sequence is synthesized)
aaaataatgtgttttacaatcagtggcttagattcagtgaaatacagtaattcattcaattatgatagtatctttacagacattttaaaaataagttatttttatatgctaatattctat

SEQ ID NO: 591131 - DNA, 120 bp, Artificial Sequence
  ENSG00000173214_23 (sequence is synthesized)
gttcaagtggaatttggagacactatgttctaattttaagaactgtttcagtgttattagattagtagtagggctgtagatggggtctttcgaggtcctttgcctacctcagtaacagag

SEQ ID NO: 591132 - DNA, 120 bp, Artificial Sequence
  ENSG00000173214_24 (sequence is synthesized)
gctgggtctgagccttgctcgagattagctcttcaccaggtctgtgtggtaatcatatcgtagttaccgtaggtcacgctgcaagtgtaatttacagtgaggcatagtcttttccagtga

SEQ ID NO: 591133 - DNA, 120 bp, Artificial Sequence
  ENSG00000173214_25 (sequence is synthesized)
ttggaatacttgtgtcaccgatccagggtttctctttcctgagtctgaaatacctgggaaaccagttagaaggtgactgggtagcctaggagtcaaggatcagaaagggtacttcatata

SEQ ID NO: 591134 - DNA, 120 bp, Artificial Sequence
  ENSG00000173214_26 (sequence is synthesized)
tatgtggcagaattggtgcaggtgatcctttgaaaaatgacaagaattgatgaaattttgtttacttcctccaattttttgctgaataacatctcctttctacctgattggagtaggctt

SEQ ID NO: 591135 - DNA, 120 bp, Artificial Sequence
  ENSG00000173214_27 (sequence is synthesized)
gctttctcttacttaatttctataaatttgccattgttttgtctcaagtaaaatacagtgtctttcttgaccactgcccgcccattcaccttatatgcctgccacagtcttggttcatgt

SEQ ID NO: 591136 - DNA, 120 bp, Artificial Sequence
  ENSG00000173214_28 (sequence is synthesized)
aataacctaacagctttggagatggcggtggagaagttaatggtaaaaaccttcttgctctttttatttttatttatttattaggggtgggggatggtgtctcactctgtcactcaggct

SEQ ID NO: 591137 - DNA, 120 bp, Artificial Sequence
  ENSG00000173214_29 (sequence is synthesized)
ctgtgcccagcccttttgctctttttatagtgtaaatttccctcagttagaacttggaaattacttctgcttcacttactgccttttctcaggttgttggaatctaggcagtagcagtta

SEQ ID NO: 591138 - DNA, 120 bp, Artificial Sequence
  ENSG00000173214_30 (sequence is synthesized)
cttggcagctaggaggcttgctagaataggaattccaccttcagcatttactgttacagggtagaagatgcagctcagggagagaaggatgatgataagaacatggcagaaaatctcaaa

SEQ ID NO: 591139 - DNA, 120 bp, Artificial Sequence
  ENSG00000173214_31 (sequence is synthesized)
atctactctggaaaattcactatgtttccacacaccaacatgtgaatcgtcatgagatcatagggcattgttaaagttccatattggaaggaaaagacttagtacaattctaagaattag

SEQ ID NO: 591140 - DNA, 120 bp, Artificial Sequence
  ENSG00000173214_32 (sequence is synthesized)
catttatcctgctgatcagttcttagctaagtgtctgctgatacctaagtaaccaatatacccaagtgttctattgctgggtaacacagtaccacacattgaacaccttaaaacaataga

SEQ ID NO: 591141 - DNA, 120 bp, Artificial Sequence
  ENSG00000173214_33 (sequence is synthesized)
catttggtaatgtctgtacaggctgtactgaagcggcctgtacagggccgcttcagtacaggaccttacctatgtagactgaggtacgtgtttcttgctgactgtcagctgggcaccact

SEQ ID NO: 591142 - DNA, 120 bp, Artificial Sequence
  ENSG00000173214_34 (sequence is synthesized)
cagcttcgagaggcctcccacagttcttgccatgtggccttctcacagatgcctctcacaacatggcagtttcttcaaagcaagcaggagaatctctaaatgagtcttgtatgacattac

SEQ ID NO: 591143 - DNA, 120 bp, Artificial Sequence
  ENSG00000173214_35 (sequence is synthesized)
gtcattatgggaataacatcccatcacctttgccatattctagcgtctagaagcaaggtatgagttccaacaaaactcaagggtagaggctagaacagggatgtgactcattgcggatca

SEQ ID NO: 591144 - DNA, 120 bp, Artificial Sequence
  ENSG00000173214_36 (sequence is synthesized)
gcggatcaccttagagcatgcctgccacactcgggtacctgcagaatagagattctcaaaagttctaaaaactgagctaagagcaggacatgatggctcacacctgtaatcccagctact

SEQ ID NO: 591145 - DNA, 73 bp, Artificial Sequence
  ENSG00000173214_37 (sequence is synthesized)
accagcctgggcaatatagtgagacctctgtctctaaaaaatttttaaaagagaccccttctctaaaaaacag

SEQ ID NO: 591146 - DNA, 120 bp, Artificial Sequence
  ENSG00000173214_38 (sequence is synthesized)
gagcgagactgtctcaaaaaaaaaaaacaaaaatattcaactatgagctggggaaaaaagcttcagcggtcactgaaagtgcttacaggtacagctagtatggggatggaatatgcccca

SEQ ID NO: 591147 - DNA, 120 bp, Artificial Sequence
  ENSG00000173214_39 (sequence is synthesized)
tggggatggaatatgccccattagccaggccaacagatctcatataggagaatctgttttatgtttgttggacagtgggtgagttatcgcagagttatgccttttttttctgtcactatt

SEQ ID NO: 591148 - DNA, 120 bp, Artificial Sequence
  ENSG00000173214_40 (sequence is synthesized)
agttatgccttttttttctgtcactattttatgtcccttatcactgtgcctttaacctactgaaatgcagttgaggccgggtgcggtggctcacgccaagatggcgccactacactccag

SEQ ID NO: 591149 - DNA, 120 bp, Artificial Sequence
  ENSG00000173214_41 (sequence is synthesized)
ataaaagatccaagtttctcacctatatcatgttccttttctctggagaacttctaacatttcttataagaagtatagtggccaaagcgaaggagatttatggaaggcaatgattaaccc

SEQ ID NO: 591150 - DNA, 120 bp, Artificial Sequence
  ENSG00000173214_42 (sequence is synthesized)
taggcagtcaagcaaccgatcacctcatcgttttcaagaatcaactacagataataagacggcaacaggagagaaatataagaagctctcggcatgtggccaactgccttggaagggaag

SEQ ID NO: 591151 - DNA, 120 bp, Artificial Sequence
  ENSG00000173214_43 (sequence is synthesized)
aagaaacaaaaacttttggggtccacttaaaaactcaatgagaatatacttctatctgaagaaaaaagtgttaacaagaatgcaggtggcaacaatagacagtgggaactactagaaagg

SEQ ID NO: 591152 - DNA, 120 bp, Artificial Sequence
  ENSG00000173214_44 (sequence is synthesized)
aaaggtagggaggggggcaaggattaagtaaccattgggtgccatgctcactacctgggtaacgggggtaaatcatgtcccaagcctcagcatcatgcaatatacccatgtaacaaacct

SEQ ID NO: 591153 - DNA, 120 bp, Artificial Sequence
  ENSG00000173214_45 (sequence is synthesized)
gtggagaagttaatgagatggggtctcactgtgttgactaggctggttttgaattcctggcctcaggcgatcctcccgtctcagcctcccaaactgctgggattacagtgaactctgccc

SEQ ID NO: 591154 - DNA, 120 bp, Artificial Sequence
  ENSG00000173214_46 (sequence is synthesized)
ccaggagcagagtatccagttctgtgtccaagcactctatgaatctttacccttgttgaagaaatactcagagacagaagcatttagaaaaggaaaagtttacctgcaaagagagcaaga

SEQ ID NO: 591155 - DNA, 120 bp, Artificial Sequence
  ENSG00000173214_47 (sequence is synthesized)
gacctggtgggaggtaactaaatcatgggggcaagtctttcccgtgctgttcttgtgatagtgaggaagtctcacgagatcttttggttattataagagggagttttcctgcacaagccc

SEQ ID NO: 591156 - DNA, 120 bp, Artificial Sequence
  ENSG00000173214_48 (sequence is synthesized)
cttttggttattataagagggagttttcctgcacaagccctcattttgcctgctgccatctatataagatgtgatttgctgctccttgccttccgccatgattgtgaagcctccccagcc

SEQ ID NO: 591157 - DNA, 120 bp, Artificial Sequence
  ENSG00000173214_49 (sequence is synthesized)
aaagccaaaggattccatttttcctctctaaaaacatttggagacaataacaaggtcttgatgacttgttcttcaatttctagtgggttttattcattctatcaggtttctgaaagttac

SEQ ID NO: 591158 - DNA, 120 bp, Artificial Sequence
  ENSG00000173214_50 (sequence is synthesized)
agaaagaataaagttgggtagatgggattagtggtgaaaacaacccaaaactgtggataaaatagaagcagaagaaataggtaaatggttccatttgcttaggcagaaaaaagctgcttc

SEQ ID NO: 591159 - DNA, 120 bp, Artificial Sequence
  ENSG00000173214_51 (sequence is synthesized)
acagttagtattttaagtaactcactaccatctacacacatgacagataagggtactctagtagaggcaaggggcacggaggggaaggaatcatcttgaaaaagaattctgaggttaaat

SEQ ID NO: 591160 - DNA, 120 bp, Artificial Sequence
  ENSG00000173214_52 (sequence is synthesized)
ggatatgatgtaatataaatgtaatagcatttagggaagaggaaaagggaagaatcatagttatatttaagttagggagactgcgcaaagtgaagttaatagtccaaggaaatacagaaa

SEQ ID NO: 591161 - DNA, 120 bp, Artificial Sequence
  ENSG00000173214_53 (sequence is synthesized)
gaggaaaatgattgtgacaagattatagatgaggttttacttgtttaatatcactttatattacttttcgtgtttgtcacttgaggaagtcaatattaaaaatggaaaaataaagatata

SEQ ID NO: 591162 - DNA, 120 bp, Artificial Sequence
  ENSG00000173214_54 (sequence is synthesized)
tttatttttatattagtacctagcactgccccttacacacagttaacatttatgtactcactatgtgccagacctgagtttaagagttttatgtgtattatctacccattttacagatta

SEQ ID NO: 591163 - DNA, 120 bp, Artificial Sequence
  ENSG00000173214_55 (sequence is synthesized)
ggaaaacaaagctgagagagttaagcaacttattcaagacagaaacacagtgctggctgactccaaaggctgtgctgagtaggtacacaacaaatagggtgaaagaatgaaataatcaat

SEQ ID NO: 591164 - DNA, 120 bp, Artificial Sequence
  ENSG00000173214_56 (sequence is synthesized)
ctttttgcagagttgtttggactaatatataaagaacactatagaattgaaaagttgacatttaagcatttttctttttatgacagttttgtttaccccattttccttaattactagtac

SEQ ID NO: 591165 - DNA, 120 bp, Artificial Sequence
  ENSG00000173214_57 (sequence is synthesized)
aaaaggcaagcatacaagcccagggacattactggacatgtgctggtacacaaaatagtattgactgaaactcttacatatttctttctctgagttgcttgcagaaataaaagaagtgtg

SEQ ID NO: 591166 - DNA, 120 bp, Artificial Sequence
  ENSG00000173214_58 (sequence is synthesized)
gatactgaaagcatctgacatgttgatgacaacctctgtgagaagataaaaggtctgatggagatgtacaagacgactaatgttggttccctgcctgctaacacaacatccgttctgcag

SEQ ID NO: 591167 - DNA, 120 bp, Artificial Sequence
  ENSG00000173214_59 (sequence is synthesized)
cccatgggtcaaagagtaatttcaactttcaagtcttattatttaagaagtgcatttcataaggctatagctgtcactgacagtgattccactgatggatctgggcaaaatatattgaaa

SEQ ID NO: 591168 - DNA, 120 bp, Artificial Sequence
  ENSG00000173214_60 (sequence is synthesized)
accttccagaaaggattcaccattcaagatgctctaggctgctctggtctgtaactttccattccaacagtaaaaaatctgggatctcctacttttcacctcagaaagctacaaatgtaa

SEQ ID NO: 591169 - DNA, 120 bp, Artificial Sequence
  ENSG00000173214_61 (sequence is synthesized)
aaggaaaaataaatttgttttgagaggaaatcacttattcaaatagccatgttattctgttttgttcataatatcaacggctctataaataaagaactttaaagaaatagcaaattcacc

SEQ ID NO: 591170 - DNA, 120 bp, Artificial Sequence
  ENSG00000173214_62 (sequence is synthesized)
cagagaaagctctgcctgcaatatttttcaggtcatgtcacacaaagaaaaataacaatgcttgcacagcccactgagataaaatggacaaggatgttcagtggtggaggtgatggctca

SEQ ID NO: 591171 - DNA, 120 bp, Artificial Sequence
  ENSG00000173214_63 (sequence is synthesized)
agggacttaggaatccgtctggaatgctgagagaccaacacgtccactaacctacagctattcacaccatcagggaagtgctggactaaagtaacaaggctctaacaactccagggattt

SEQ ID NO: 591172 - DNA, 120 bp, Artificial Sequence
  ENSG00000173214_64 (sequence is synthesized)
ctagaattgtgtatcatatactattcctaaaatataaaaagtaacattaaggtctgaggttaaaaaaaaaaaagaatcacaatacatatcaattgctaagcagtgtaaagggttcacttt

SEQ ID NO: 591173 - DNA, 120 bp, Artificial Sequence
  ENSG00000173214_65 (sequence is synthesized)
tgcagtggtctagaactaaacccacaataccttttaggtagcctgtatactaaaaaccatcaaactgtcctctttaaacggatataaattataactcaataaagctgttaccaaaaaaaa

SEQ ID NO: 591174 - DNA, 120 bp, Artificial Sequence
  ENSG00000173214_66 (sequence is synthesized)
gtcgtgccttgggatatttgagtggctctgtgattggtggatttcttgtcgatgtcatgaattattttttacttttgggaatctcaatgtcggctaccaccgttggtctttatcttgttc

SEQ ID NO: 591175 - DNA, 120 bp, Artificial Sequence
  ENSG00000173214_67 (sequence is synthesized)
aatccagggacattttgagagtatttttcaattactctgttatttttaaaagaaaaatcttttgaaaaattactttttattataaaaacaataaagacataaaattttggcacaaaaata

SEQ ID NO: 591176 - DNA, 120 bp, Artificial Sequence
  ENSG00000173214_68 (sequence is synthesized)
taaggaacaagtataatccataatcctaagcacctagaaaagttcttacatttctcaaatttcctaagtaaagggtaaaaggaaagaaaaattctccatcagataaagtatcagaaataa

SEQ ID NO: 591177 - DNA, 120 bp, Artificial Sequence
  ENSG00000173214_69 (sequence is synthesized)
cttgaattttgtgtctaaagtatattgacattacagttggtgaactggttattagtttgaagaattatagtttatttttttaaaaaaacctaattgggagatgatcagtagattccttga

SEQ ID NO: 591178 - DNA, 71 bp, Artificial Sequence
  ENSG00000173214_70 (sequence is synthesized)
taaaaaaacctaattgggagatgatcagtagattccttgagtaatcaggatagctttctcatgtccagaac

SEQ ID NO: 591179 - DNA, 68 bp, Artificial Sequence
  ENSG00000173214_71 (sequence is synthesized)
ttagccaggtgtggtggtggcaggcatttgtaatcccacttctggggaggctgaggcacgagaatcac

SEQ ID NO: 591180 - DNA, 120 bp, Artificial Sequence
  ENSG00000173214_72 (sequence is synthesized)
agaatcacttgaacttgggaggcagagtttacagtaagctgagatcacgctactgcacttcagcctgggttacaaagtgagactgtctaaaaaatttaaaataaccagaacttctgattt

SEQ ID NO: 591181 - DNA, 120 bp, Artificial Sequence
  ENSG00000173214_73 (sequence is synthesized)
ccagaacttctgatttatcatggcaatgtgtcactcagtccccaatcctgctacttaaaagttatttttattttttaagtggcctgatcgcagctcactgcagccctgacctcccaggct

SEQ ID NO: 591182 - DNA, 120 bp, Artificial Sequence
  ENSG00000173214_74 (sequence is synthesized)
gatcaaagcagggtaattaggatattaattatctcaagtgttataatttctttgtgttaggaaaattccacatcttgtgctatagctgttttcagttatatactggattattgaactata

SEQ ID NO: 591183 - DNA, 69 bp, Artificial Sequence
  ENSG00000173214_75 (sequence is synthesized)
gattacaggtgtgagccaccgcacccgatctctatctaactgtatatatatatgtgtatatttttccgg

SEQ ID NO: 591184 - DNA, 120 bp, Artificial Sequence
  ENSG00000173214_76 (sequence is synthesized)
ctcccgacctcaggtgatccacttgcctcgggtcagagaagatattttgatcagaaatgattatattttggtcagaaaagattatattgtggtcagaaaagattatatgttttttgagtt

SEQ ID NO: 591185 - DNA, 120 bp, Artificial Sequence
  ENSG00000173214_77 (sequence is synthesized)
gctctgttgctcaggctggagtgcagtcgcctaatcatggctcactgcagtctcaagcttttaggctcaagcagtcccctgcctcagccttctgagcaactaggattacaggtgtcacta

SEQ ID NO: 591186 - DNA, 120 bp, Artificial Sequence
  ENSG00000173214_78 (sequence is synthesized)
attacaggtgtcactatgcttattattattattttctattgtagagatggggtctcactgtgttgactaggctggttttgaattcctggcctcaggcgatcctcccgtctcagcctccca

SEQ ID NO: 591187 - DNA, 120 bp, Artificial Sequence
  ENSG00000173214_79 (sequence is synthesized)
aactgctgggattacaggtatgaggtactgtgtccagccagaaaagattcttgatatgattttaattcttgtaaattagttgagatttgtgtttttttttttttttttgtttaacatgtg

SEQ ID NO: 591188 - DNA, 120 bp, Artificial Sequence
  ENSG00000173214_80 (sequence is synthesized)
gtctatcctggagaatgtgctgatgagaagaatgtttattctgtagctgttgggtgaaatgtcctgtaaatgtctgttaggcccagttggtctaaatctaatgtttctttgttgattttc

SEQ ID NO: 591189 - DNA, 120 bp, Artificial Sequence
  ENSG00000173214_81 (sequence is synthesized)
tgtctagatgatctgtccagtgctgagactggatgactgaagtccccaactactattgtagttggagtctatgtgcccatttatttttttagttttttgagacagagtctcactctgtta

SEQ ID NO: 591190 - DNA, 120 bp, Artificial Sequence
  ENSG00000173214_82 (sequence is synthesized)
cccaggctggagtgcagtggcacaattacggctcactgtagttttgacctcctgagctcaagtgattctcttgcttcagccttttgagtagttggaactacaggtgtgtgtcaccatggc

SEQ ID NO: 591191 - DNA, 120 bp, Artificial Sequence
  ENSG00000173214_83 (sequence is synthesized)
tggctaatttgttatttctttaatagaggtggggcctcagtatgtttcccaggcaggtcttgaactgcactcaagtgatcttcccaccttgacctcccaaagtgctgaaattacaggcat

SEQ ID NO: 591192 - DNA, 85 bp, Artificial Sequence
  ENSG00000173214_84 (sequence is synthesized)
agtgctgaaattacaggcatgagccactgtacctagcctaatttttaaattatttctagagacaaggtctcactatgttgcgtcc

SEQ ID NO: 591193 - DNA, 120 bp, Artificial Sequence
  ENSG00000173214_85 (sequence is synthesized)
gattacaggtgtgagagccccttgaaatataagaatattggctttatttattttggtgctctggtgttcggtgcatatatatttacagttgttttagccttttgaattgatctctttatc

SEQ ID NO: 591194 - DNA, 120 bp, Artificial Sequence
  ENSG00000173214_86 (sequence is synthesized)
attatataatgattttctttgtctctttttacagttttggatatagtctattttatctaagcatagctattcttgcctggttttggttttgctttgtgtggagtatctttttccatacct

SEQ ID NO: 591195 - DNA, 120 bp, Artificial Sequence
  ENSG00000173214_87 (sequence is synthesized)
acactttcagtccatatgtgtgtttacgggtgaagtgagttttttgcaggcagcatacagttgggtaatggggttttttgtttttttgtttattttaatccattcagtctttctataact

SEQ ID NO: 591196 - DNA, 120 bp, Artificial Sequence
  ENSG00000173214_88 (sequence is synthesized)
tttaggtggggaatttaatccgtttacattcaaggctgttattgacaggtgaagacttgctcttgtcattttgtgagttgttttctgattgctttgtatatcctttgttttttcctctca

SEQ ID NO: 591197 - DNA, 120 bp, Artificial Sequence
  ENSG00000173214_89 (sequence is synthesized)
atgtttatcactgtgattttgtgattttctgtggagataagttttctttatcttcctcctttgtgtatctataacactagtacattttatgcttttgtatgttttcatgatggtgattat

SEQ ID NO: 591198 - DNA, 120 bp, Artificial Sequence
  ENSG00000173214_90 (sequence is synthesized)
catctttttgccttcagatgtattaagcatttcttgtaaggctggtctagttgtgatgaattccatcagtttttgtctgggatctgtgtttattttaattatgtcttgtcttattctctg

SEQ ID NO: 591199 - DNA, 120 bp, Artificial Sequence
  ENSG00000173214_91 (sequence is synthesized)
ttttttgtgttattttttaaaattatttcagagaagattggttcttacactgtgactatccttttctgtttatttatttcattttaatttttttagagacaggatctccctctattgccc

SEQ ID NO: 591200 - DNA, 120 bp, Artificial Sequence
  ENSG00000173214_92 (sequence is synthesized)
atcatggagtgcagtggtgtgatcatagctcattgcagcttcggactcctgggctcaagcaatccactcacctcagtctcttgagtagctgggactacagttgcatgccaccttacctgg

SEQ ID NO: 591201 - DNA, 120 bp, Artificial Sequence
  ENSG00000173214_93 (sequence is synthesized)
cttttttttttttttcagagacagggtctcatttcgttgcccaggctagtcttaaattcctggcttcaagcaatccttccacctcagctaggattacaggtgtaagccacgataccccac

SEQ ID NO: 591202 - DNA, 120 bp, Artificial Sequence
  ENSG00000173214_94 (sequence is synthesized)
tctgtgactattcttatatattgcttttatgtcttcgtttgctttgatttttaattgcagaatgtgtttaatagattctgtaaatttattgcagcttggttttgatacatttggttatga

SEQ ID NO: 591203 - DNA, 120 bp, Artificial Sequence
  ENSG00000173214_95 (sequence is synthesized)
gttagttaaccagtgtcctggaggaatgttttgaagttagatgacatgagtagcataaggggctggcttttagctcagaacaacttttttttttttttttttaatatggagtcttgctct

SEQ ID NO: 591204 - DNA, 120 bp, Artificial Sequence
  ENSG00000173214_96 (sequence is synthesized)
gtgtgagccactgtgcccggtcagctcagaacaacttgttgagattatacgatgcttttccaataaaaattatttaattttgataaaatatacttaatggaaaaatgtatcttttaacat

SEQ ID NO: 591205 - DNA, 120 bp, Artificial Sequence
  ENSG00000173214_97 (sequence is synthesized)
tttaaattgtacagttcagtggcattaagtatattcacattgtcttacaaccatcacttccactcatccacagaacgttttttaccttgcaaaactgaaactctgtgctgttaaacagta

SEQ ID NO: 591206 - DNA, 120 bp, Artificial Sequence
  ENSG00000173214_98 (sequence is synthesized)
actgccattctacgcccccatcccagcccttgtcaaccaccattctactttgtctatgaatttgactgctcagagtacttcatataagtgggatcatacagtttttgtcctttcattact

SEQ ID NO: 591207 - DNA, 120 bp, Artificial Sequence
  ENSG00000173214_99 (sequence is synthesized)
agcttctttcccttaacataatgtcttcaaggatcatccttgttgtagcatgtgttagaatttctttcctttttaagtctatgatacaccattgtatatacatactatattttgtttatt

SEQ ID NO: 591208 - DNA, 120 bp, Artificial Sequence
  ENSG00000173214_100 (sequence is synthesized)
catctgtcagtggacatttgtgttgcttctacattttggctgttgttaatacgctgctgtgaatgtgggtgtacaactgtgtctttgagatcttgttttcagttcttttgagatatatac

SEQ ID NO: 591209 - DNA, 120 bp, Artificial Sequence
  ENSG00000173214_101 (sequence is synthesized)
ccataagtggaattgctggatcttatggtaattctatttttaatattttgttgtgtttgtgttttttgtcttagatttttttcttaatcaagtttttccagaagagagtagctttaggaa

SEQ ID NO: 591210 - DNA, 120 bp, Artificial Sequence
  ENSG00000173214_102 (sequence is synthesized)
gagaataaacacatacttttaaggtattatctcagactttaggcgcattatgatcatatcagtagcacccatgtactgaataagtgaactcaaagaaaagttatgttgggcaactacctc

SEQ ID NO: 591211 - DNA, 120 bp, Artificial Sequence
  ENSG00000173214_103 (sequence is synthesized)
aaagttttgttatctctgcttgcaatttttgttcagtcattgcacaagtgcttgagggcttactgcatgtgaggctctgtagactaagtattaatgaactttcttttttgtccttgcagt

SEQ ID NO: 591212 - DNA, 120 bp, Artificial Sequence
  ENSG00000173214_104 (sequence is synthesized)
agcaggtacagctttgatctcagttttctgccaaatgaatggttctgtgttttgtgctcattcgtttacagagatccctctgaaccaccttggaaccagaaggtgtgtggtctgagaacg

SEQ ID NO: 591213 - DNA, 120 bp, Artificial Sequence
  ENSG00000173214_105 (sequence is synthesized)
ataaatgggctgctctctgcctctctcacagcagttctgcccctccttgggaccactcgttttctgcattcctggcccatcttctatatatctctggtccagattccagaggaaacctgt

SEQ ID NO: 591214 - DNA, 120 bp, Artificial Sequence
  ENSG00000173214_106 (sequence is synthesized)
ttgacttgaatagatgccattgcccttattgggccttgcctcaggagttcctctgtgtatctctggtccagattccggaggaaacctgtttgacttgagtagatgccattgcccttattg

SEQ ID NO: 591215 - DNA, 120 bp, Artificial Sequence
  ENSG00000173214_107 (sequence is synthesized)
ggccttgcctcaggagttgctggttagcctatgaaggggttccctttgggttgatgacattgctcccatccagaaagtggctacttctaccctcctactcccaccactctgcatgcagga

SEQ ID NO: 591216 - DNA, 120 bp, Artificial Sequence
  ENSG00000173214_108 (sequence is synthesized)
gctgttatcatcaaaagggaatgtccactgtctgctctgtaccagagaagtgctaggcttcataaatattggtaatcgatacctgaatgggatgaaaattggcaggtcctgggatggatg

SEQ ID NO: 591217 - DNA, 120 bp, Artificial Sequence
  ENSG00000173214_109 (sequence is synthesized)
gcctggttcatctgcatcagaactggaaaaacaaaatcacaccaaattgcagacttttttggaagagcgtgttagacaaggtttgtggattgtttgatttttaccaagaaagaaagcttt

SEQ ID NO: 591218 - DNA, 120 bp, Artificial Sequence
  ENSG00000173214_110 (sequence is synthesized)
ctcctaagagggtaagatttctacttgagtgagctctaagaggagtcccagtttgcaagagatattattacagttctcatctgtgcggaccagaaagttttccaaattcatgcatttcag

SEQ ID NO: 591219 - DNA, 120 bp, Artificial Sequence
  ENSG00000173214_111 (sequence is synthesized)
ttatctaacagatatttactgagcatttaccatgttcagtaaccagggccctgggaatataataggagaaggcagatgagatccttgccttcaccaagcttatgtttttctattttaagt

SEQ ID NO: 591220 - DNA, 120 bp, Artificial Sequence
  ENSG00000173214_112 (sequence is synthesized)
aaaatttgccatgacaaaatttctatcagcggaagagccagtaactcttattgtaataggttttacccagttttagaaaaggaaagtagctaaactcttggttccttggtgtgtgttttt

SEQ ID NO: 591221 - DNA, 120 bp, Artificial Sequence
  ENSG00000173214_113 (sequence is synthesized)
gtttgttcatttctagtacttgtctatgtctttggggtaatttttgatttagaattttgtagaaattactcggcacagtgtagttgaggtgaatataggcaagaaggcttaggaagccta

SEQ ID NO: 591222 - DNA, 120 bp, Artificial Sequence
  ENSG00000173214_114 (sequence is synthesized)
caacaaaggaatctgacaccaacttttgagatttattcagtccagccaagagaatatatttatggtcaaactagatcttggattacagctccaaagacccttgggctgacagagcaggtt

SEQ ID NO: 591223 - DNA, 120 bp, Artificial Sequence
  ENSG00000173214_115 (sequence is synthesized)
tgcattagactgttcacggtgaaaaacagtaactgcctcatgtaattattgtattcataaaggttatggcaaatcttcagatgtagtacaggaaaaaccaaggataaaatttcttaggga

SEQ ID NO: 591224 - DNA, 120 bp, Artificial Sequence
  ENSG00000173214_116 (sequence is synthesized)
gtccaggtttatgggaaacattcaaggttttattgttttttagatcatcaacagttagatgaccctatcatttttgttttgtctcagggtgcaacgtctttcttttctgatggtgattga

SEQ ID NO: 591225 - DNA, 120 bp, Artificial Sequence
  ENSG00000173214_117 (sequence is synthesized)
gttcttagtcttactgaagcaagggaaagtgacattttgcttctacaccctccagaattcataagctccagaaggaaagaggacccaagggaaaaacgtgattgcaaaatgtgttcttgt

SEQ ID NO: 591226 - DNA, 120 bp, Artificial Sequence
  ENSG00000173214_118 (sequence is synthesized)
cctctgcccaagtgattaacctttgctccagtggttttcaaacctggctgctgttagaatcacctggcagtgtttaaaaatgactgatgcccagcattttaacttaaataccaatttggt

SEQ ID NO: 591227 - DNA, 120 bp, Artificial Sequence
  ENSG00000173214_119 (sequence is synthesized)
ctggagtggagcctgagtatggatatttaaaaaagtaactcctcctccccaatcccccgtaattgtaatgtgcagccaagattgagaaccactgctttgatcagtgcacaaaactggatc

SEQ ID NO: 591228 - DNA, 120 bp, Artificial Sequence
  ENSG00000173214_120 (sequence is synthesized)
actggatcctctactaatgaccgtggttttttcttaggcttacttacagattgattaagttatgccacttttgtagatccttgaaattctgtgcactttctttctttctttttttttttt

SEQ ID NO: 591229 - DNA, 83 bp, Artificial Sequence
  ENSG00000173214_121 (sequence is synthesized)
tgcagtggcgctatctcagctcactgcaaacttcacctcccgggttcacgccattgcccagctaattttttgtatttctagta

SEQ ID NO: 591230 - DNA, 120 bp, Artificial Sequence
  ENSG00000173214_122 (sequence is synthesized)
gcatgagccaccgcgcctagcctgtgcactttcttaaaggaaaactggagaggaagagatctcatgttttctattcactccactgctgcttggtccagtgcaggaaatattgctgttatt

SEQ ID NO: 591231 - DNA, 120 bp, Artificial Sequence
  ENSG00000173214_123 (sequence is synthesized)
tgaagtccttcctaaaacaaaagctcagatcttttggaggttgcccttctaggcaggttttcaccagtcaattttgatttggggggcttaacagagtaggaatgatcttgcaggtttatt

SEQ ID NO: 591232 - DNA, 90 bp, Artificial Sequence
  ENSG00000173214_124 (sequence is synthesized)
ggcgtggtggctcacacctgtaatctcagtgctttgggaggccaaggcgggaggataccttgagccgaggagttcaactgagtgagactc

SEQ ID NO: 591233 - DNA, 120 bp, Artificial Sequence
  ENSG00000173214_125 (sequence is synthesized)
gccatgatcacaccactgcatgagtgagactccatctcaaacaaaaaaaatagactactcactgtttacatagctttgtaccatataaaaacttgtttgaataaaatattgataacaata

SEQ ID NO: 591234 - DNA, 120 bp, Artificial Sequence
  ENSG00000173214_126 (sequence is synthesized)
gagtgaaatgccatgcacatcttgatgggctgattactggacaaatgggatcacataaagctaaaaagcttctgcacagtaaaggaaataatcaacaaagtgaagagacaacccatagaa

SEQ ID NO: 591235 - DNA, 120 bp, Artificial Sequence
  ENSG00000173214_127 (sequence is synthesized)
tgggagaaattatttgcaaactacccatctaacatgggattaataaccagaatatgtaaggaactcaaacaactcagtaggaaaaaaacaaataattcgattaaaaatgcacaaaaggtc

SEQ ID NO: 591236 - DNA, 120 bp, Artificial Sequence
  ENSG00000173214_128 (sequence is synthesized)
agccatagttcctggcctgaccttgtctttcttaactttgggttcttccaataggggaggaggcggcagcaaagacatcttcacatcatcttgtatctaatgcccatttacttatgtgtg

SEQ ID NO: 591237 - DNA, 120 bp, Artificial Sequence
  ENSG00000173214_129 (sequence is synthesized)
tctcccaaacagctatgaaatacacaagggcaggggattacctcggtatctccagatgagtgaaatgccatgcacatcttgatggttagtaaatatttattgaatggcaaatacttaaaa

SEQ ID NO: 591238 - DNA, 120 bp, Artificial Sequence
  ENSG00000173214_130 (sequence is synthesized)
ctgaatgggatgaaaattggcaggtcctgggatggatggcctggttcatctgcatcagaactggaaaaacaaaatcacaccaaattgcagacttttttggaagagcgtgttagacaagtg

SEQ ID NO: 591239 - DNA, 120 bp, Artificial Sequence
  ENSG00000173218_0 (sequence is synthesized)
ctcgctcacaaaaaattgagccggccctggaggcctggggggcgagtccggttgcgcctcggagagcgcaacaggcagaatttgttcctgttgaagagtggctcctcttctaatttccag

SEQ ID NO: 591240 - DNA, 120 bp, Artificial Sequence
  ENSG00000173218_1 (sequence is synthesized)
actccttgaggttttaggagtctggtaggtgaaattttctacctctaaggagaaacagtacctgctccttcctcaagcgcaagccctccattgctatggataccgaatccacttattctg

SEQ ID NO: 591241 - DNA, 120 bp, Artificial Sequence
  ENSG00000173218_2 (sequence is synthesized)
gatattcttactattcaagtcattcgaaaaaatctcacagacaaggggaaagaactagagagagacacaagtcaccccggaataaagacggcagagggtcagaaaagtctgtcaccattc

SEQ ID NO: 591242 - DNA, 120 bp, Artificial Sequence
  ENSG00000173218_3 (sequence is synthesized)
aacctcccactggagagcccctgttgggaaatgattctactcggacagaggaagttcaggatgacaactggggagagaccaccacggccatcacaggcacctcggagcacagcatatccc

SEQ ID NO: 591243 - DNA, 120 bp, Artificial Sequence
  ENSG00000173218_4 (sequence is synthesized)
aagaggacattgccaggatcagcaaggacatggaggacagcgtggggctggattgcaaacgctacctgggcctcaccgtcgcctcttttcttggacttctagttttcctcacccctattg

SEQ ID NO: 591244 - DNA, 120 bp, Artificial Sequence
  ENSG00000173218_5 (sequence is synthesized)
ccttcatccttttacctccgatcctgtggagggatgagctggagccttgtggcacaatttgtgaggggctctttatctccatggcattcaaactcctcattctgctcatagggacctggg

SEQ ID NO: 591245 - DNA, 120 bp, Artificial Sequence
  ENSG00000173218_6 (sequence is synthesized)
cactttttttccgcaagcggagagctgacatgccacgggtgtttgtgtttcgtgcccttttgttggtcctcatctttctctttgtggtttcctattggcttttttacggggtccgcattt

SEQ ID NO: 591246 - DNA, 120 bp, Artificial Sequence
  ENSG00000173218_7 (sequence is synthesized)
tggactctcgggaccggaattaccagggcattgtgcaatatgcagtctcccttgtggatgccctcctcttcatccattacctggccatcgtcctgctggagctcaggcagctgcagccca

SEQ ID NO: 591247 - DNA, 120 bp, Artificial Sequence
  ENSG00000173218_8 (sequence is synthesized)
tgttcacgctgcaggtggtccgctccaccgatggcgagtcccgcttctacagcctgggacacctgagtatccagcgagcagcattggtggtcctagaaaattactacaaagatttcacca

SEQ ID NO: 591248 - DNA, 120 bp, Artificial Sequence
  ENSG00000173218_9 (sequence is synthesized)
agtcccgggccatgattgctgcagctgctcggcgcagggactcaagccacaacgagttgtattatgaagaggccgaacatgaacggcgagtaaagaagcggaaagcaaggctggtggttg

SEQ ID NO: 591249 - DNA, 120 bp, Artificial Sequence
  ENSG00000173218_10 (sequence is synthesized)
cagtggaagaggccttcatccacattcagcgtctccaggctgaggagcagcagaaagccccaggggaggtgatggaccctagggaggccgcccaggccattttcccctccatggccaggg

SEQ ID NO: 591250 - DNA, 120 bp, Artificial Sequence
  ENSG00000173218_11 (sequence is synthesized)
ctctccagaagtacctgcgcatcacccggcagcagaactaccacagcatggagagcatcctgcagcacctggccttctgcatcaccaacggcatgacccccaaggccttcctagaacggt

SEQ ID NO: 591251 - DNA, 120 bp, Artificial Sequence
  ENSG00000173218_12 (sequence is synthesized)
acctcagtgcgggccccaccctgcaatatgacaaggaccgctggctctctacacagtggaggcttgtcagtgatgaggctgtgactaatggattacgggatggaattgtgttcgtcctta

SEQ ID NO: 591252 - DNA, 120 bp, Artificial Sequence
  ENSG00000173218_13 (sequence is synthesized)
agtgcttggacttcagcctcgtagtcaatgtgaagaaaattccattcatcatactctctgaagagttcatagaccccaaatctcacaaatttgtccttcgcttacagtctgagacatccg

SEQ ID NO: 591253 - DNA, 120 bp, Artificial Sequence
  ENSG00000173218_14 (sequence is synthesized)
tttaaaagttctatatttgtggctttattaaaaaaaaaagaaaaatatatagagagatatatatctatgccagaggggtgtcttttttaaaaattcttcttcattgctgactgaaactgg

SEQ ID NO: 591254 - DNA, 120 bp, Artificial Sequence
  ENSG00000173218_15 (sequence is synthesized)
cagatgattgaccagtatcctttgaccatctgcactttatttggaaggaagcaggggctgtccaccctgaaaaagagtgactgatgacatctgacttttgtcgatgggacttctcaagaa

SEQ ID NO: 591255 - DNA, 120 bp, Artificial Sequence
  ENSG00000173218_16 (sequence is synthesized)
gccattccttggagcttctgttacagctgtaaaccaaagtggagctggtgcttcttgggagcctcgccttacaactaattcctgcctttcgtccagtaccaagtcccccgttgcttctgg

SEQ ID NO: 591256 - DNA, 120 bp, Artificial Sequence
  ENSG00000173218_17 (sequence is synthesized)
tcagcccacttgtagacttccaggggacacatctttattctgtttcaggaaaccagtcacgacacgtccacatatgtatttgtgtatgttaatgtccagtatcacatcacccatgaaagt

SEQ ID NO: 591257 - DNA, 120 bp, Artificial Sequence
  ENSG00000173218_18 (sequence is synthesized)
gcggcggcggggctctgcctctccaggagcccagcgcaggccgcagagccggggccgctgtgagccgagaccgcgggccgcggagctcgggcggccggcgcggagaatttgttcctgttg

SEQ ID NO: 591258 - DNA, 120 bp, Artificial Sequence
  ENSG00000173218_19 (sequence is synthesized)
acagctattaagtgatttgattttgtttttttcccaaagagaaaacctacctgccctgtttctgatcccacccctctgctggcttgaagcaggtaaccctttcccagccctgcagctgcc

SEQ ID NO: 591259 - DNA, 120 bp, Artificial Sequence
  ENSG00000173218_20 (sequence is synthesized)
cacctggcctccatgccatcctgcccccacctggctggcagccctggctctccatgtgtgccctccggctctgtgtgaagcctcaagtcagtcccagcattgtttccatagggaagtgtg

SEQ ID NO: 591260 - DNA, 120 bp, Artificial Sequence
  ENSG00000173218_21 (sequence is synthesized)
gggtgcccagcaggtaaagcacagggagagagggcagtgggaatgccacctttaggctgcagcaggagccccacactgcccagttttcctccccactgttctacaccaaccaggggagac

SEQ ID NO: 591261 - DNA, 120 bp, Artificial Sequence
  ENSG00000173218_22 (sequence is synthesized)
taacactgtgactctgggattggcaggtgcaacttggagccacttaatttcctggggacgtaagttcttcccaagcttagagcaagctgccctgccaaaggagaccaaaccatgccaacc

SEQ ID NO: 591262 - DNA, 120 bp, Artificial Sequence
  ENSG00000173218_23 (sequence is synthesized)
acgctggcaactgctgctgtccagtccctgtgttttctgaccaccgtcactgtgcaactcatcgcctctgccacttaggaccaggaaagaggctggttttgctcccactcttagttgctg

SEQ ID NO: 591263 - DNA, 120 bp, Artificial Sequence
  ENSG00000173218_24 (sequence is synthesized)
ataaagtggggagaaggaaaatggacactctacagagtttggggaagggagagtagggagcccatcttgtccagaaagattcatctgtggtctgtctgttaaacacagctgatttcagtg

SEQ ID NO: 591264 - DNA, 120 bp, Artificial Sequence
  ENSG00000173218_25 (sequence is synthesized)
ggctttcccctggccctgggggagcagacactgactgggttgtgggcagaggagccatcctggcggagccctgctgcaggggagctccttcaggagccccatccggacctcttgcactgg

SEQ ID NO: 591265 - DNA, 120 bp, Artificial Sequence
  ENSG00000173218_26 (sequence is synthesized)
gctgcctttgcctccatttgccttcctgtatctgcaacaaaccttttaaaagtgttcactcttgctttttccagtatttcggtaatcagccatcttgctgtagtacaggatgacattgtc

SEQ ID NO: 591266 - DNA, 120 bp, Artificial Sequence
  ENSG00000173218_27 (sequence is synthesized)
gaatgctctttgtatgtgtgcacacccccttactcccttactgcttcatacactccacaagtggtacagtattttgtgtcattgtaaaaatcaaaattggctttggatctttgtaataca

SEQ ID NO: 591267 - DNA, 120 bp, Artificial Sequence
  ENSG00000173218_28 (sequence is synthesized)
cctgtacctgaaaaagtaaacaacattcttcaattactagccttcagcttgaaaagacatgctggagaagaaggaagggggaacccataggtgtggcgtggagccaagatgtactattca

SEQ ID NO: 591268 - DNA, 120 bp, Artificial Sequence
  ENSG00000173218_29 (sequence is synthesized)
actatgtgtttctgtttataaaaaacacataccatggaaccatggtgcttttgttcttagtttttgccgttagatcccttcaaactggaagttccttacaatatctttctcaggaaatat

SEQ ID NO: 591269 - DNA, 120 bp, Artificial Sequence
  ENSG00000173218_30 (sequence is synthesized)
tttgggaaatggggtaagagatggcaagtgtgagacgggctgtgtcagaggttgctacgtcatggatacagtgcagttccaagtgccataagtgtatgtacatatagttaataatgacac

SEQ ID NO: 591270 - DNA, 120 bp, Artificial Sequence
  ENSG00000173218_31 (sequence is synthesized)
tgttcatcaccattctaaaatactgttcttccaaccctatcttcaatgaccagtccagaaggggttaagctggattcatttgctctggcatgtgcattcccagcagggtgaagaaaggtt

SEQ ID NO: 591271 - DNA, 120 bp, Artificial Sequence
  ENSG00000173218_32 (sequence is synthesized)
taaattaaagaatttattttctctctcccccttcctctttctcccagtctttgcataggagaatgttagacattcagaaattactgtttctgttttaaattgagtattgatttttttata

SEQ ID NO: 591272 - DNA, 120 bp, Artificial Sequence
  ENSG00000173218_33 (sequence is synthesized)
ttgactttgtattgagttctttttgaaagaataacaaaataaaatgcaggatctttgtaaagcctttgcactttcaacctctttatagcttgagttacttttgcagtgggaacaatgtaa

SEQ ID NO: 591273 - DNA, 120 bp, Artificial Sequence
  ENSG00000173218_34 (sequence is synthesized)
atgacatttaaaagatttaaggtttcagaaagctgcatcccacaattgaacacaatgcatttttatttcaattcttggaactggtaggctattctttttaaaagggggtaaacttcgccc

SEQ ID NO: 591274 - DNA, 120 bp, Artificial Sequence
  ENSG00000173218_35 (sequence is synthesized)
gtagacaggatttcatttgccttatatgtttatagattttttataattttcatcctacgttattaaaattagagcattgagtgttaaagaacttaatgaggagtctatatctgagattgc

SEQ ID NO: 591275 - DNA, 120 bp, Artificial Sequence
  ENSG00000173218_36 (sequence is synthesized)
tctcttccctggtgatgttttaactggtagataatttgttcttaaatatgtacttttgaagataggacagtttttatagtccatgaactgaatgttaaaaagttctgtatgcattctcag

SEQ ID NO: 591276 - DNA, 120 bp, Artificial Sequence
  ENSG00000173218_37 (sequence is synthesized)
agaggattttaaagctatatagttcatccatcctttgcattatcaaaatgttaagtcaaatctgtaatactttggctaaaattcataaagtaagccctagagaaaatacttgaccaccaa

SEQ ID NO: 591277 - DNA, 120 bp, Artificial Sequence
  ENSG00000173218_38 (sequence is synthesized)
atttttgcccaactatcatcacctcccttcccccgcctctgttcttgccttttgacatctacatggaagacaagttctttacagcaaatggtaagaggcaggtgacctggtgtgtttgct

SEQ ID NO: 591278 - DNA, 120 bp, Artificial Sequence
  ENSG00000173218_39 (sequence is synthesized)
gtgttgtagttcattgcctggggcttgggactccttttttaatggagagactagctgtgcaggtgtgtgttggatagggataaagtgctcacccctgccctctctacagtagttggtggt

SEQ ID NO: 591279 - DNA, 120 bp, Artificial Sequence
  ENSG00000173218_40 (sequence is synthesized)
agatttctctctcattttgcctcataatcactttcgagtgcatgtatttacctaagggctgtagctctgtgggatgctaccagcatattggactgacagaaattgattaccttgccactc

SEQ ID NO: 591280 - DNA, 120 bp, Artificial Sequence
  ENSG00000173218_41 (sequence is synthesized)
caacctacgtactgagtgagtgctccagccactcagtgaaaccaacaaaagtgagtccttggtttaccttccaatctgggtcctgctgtgtaagtatccctaagtggggatgcatatttg

SEQ ID NO: 591281 - DNA, 120 bp, Artificial Sequence
  ENSG00000173218_42 (sequence is synthesized)
tttgtgcgtttttatttccatatatgtgagcatttctctgagtgtattaccagacggatagcacatttatatgtcagacatcttaacatctgtgttatctgtagcaggtgtgtagctcag

SEQ ID NO: 591282 - DNA, 120 bp, Artificial Sequence
  ENSG00000173218_43 (sequence is synthesized)
cagatacgtgtcattgtgtatatagctgagtgtgtgagggtgtctgtgtttctgcagtcccctgtgtttgagagatgacttaataaccctgtgttttgagaggtcgctctaaaccagtga

SEQ ID NO: 591283 - DNA, 120 bp, Artificial Sequence
  ENSG00000173218_44 (sequence is synthesized)
cttttccctcccctgctttattcctttccctcactgacactggcttctcccgctagagtaaatggctttagcacagcactgtcttctggggagcctgctgtcctgcaggcaagtccatta

SEQ ID NO: 591284 - DNA, 120 bp, Artificial Sequence
  ENSG00000173218_45 (sequence is synthesized)
aactctttcttgctttaggactctgaaaacagcaagaaacaaacaaacaaaggtcaagctctaagaaaattactgctcaaacttcactaccctggaagccttactagatatttcttaagg

SEQ ID NO: 591285 - DNA, 120 bp, Artificial Sequence
  ENSG00000173218_46 (sequence is synthesized)
taacttaaaaattgggctttatttttaaaaagtgataggttacttacagtagcacagaaatgttagcatatttatttaaatagtcctgcagcagagaccctgcgattgtaaagtgattta

SEQ ID NO: 591286 - DNA, 120 bp, Artificial Sequence
  ENSG00000173218_47 (sequence is synthesized)
agtatttctgggtagtgtttgtgatttacggatttgttactgaaaaacaaaaaaatcactactgtgaatttactactatgtaaccttgtggtcgtatttcattataaataaaataagaat

SEQ ID NO: 591287 - DNA, 120 bp, Artificial Sequence
  ENSG00000173218_48 (sequence is synthesized)
tgctcttctgcccaccgttcttgattggtattcagtgcagtagcgaaatgagatagtttagacactgttgaaataactgcattgagctttaaccaagtgtatgctcagaaaattcagttt

SEQ ID NO: 591288 - DNA, 120 bp, Artificial Sequence
  ENSG00000173218_49 (sequence is synthesized)
tggatcacattttgacaaaacatgttttggtcaaagaaaggaaaggctactaacacatttatcaggtaatgtatgtcacagtccgtgttccacccagccttgttatccccacattctttc

SEQ ID NO: 591289 - DNA, 120 bp, Artificial Sequence
  ENSG00000173218_50 (sequence is synthesized)
aagataggagtcatcttggtttttcgggtgaaaaacggaaggtcagagaggaaggggcttgtccaaggtctcatgtctggttaacagaatttcaaactagatgtttgattctaacccctc

SEQ ID NO: 591290 - DNA, 120 bp, Artificial Sequence
  ENSG00000173218_51 (sequence is synthesized)
agtccactgtaccttgaagtatggtctaaatgattcggcacttctggatgttgaggaaggacctagagacacatccttgaactagaacctggggtgagagttcattgggaggcaggatct

SEQ ID NO: 591291 - DNA, 120 bp, Artificial Sequence
  ENSG00000173218_52 (sequence is synthesized)
cttctttcactttggatttacaccttgtcccttggaaagcttctccactatgctagcaaatatcttaggatatttgatggaaagaacttgagaatcccttctggaaaacccagcctttca

SEQ ID NO: 591292 - DNA, 120 bp, Artificial Sequence
  ENSG00000173218_53 (sequence is synthesized)
gtgttaacacctgctgcaagacagggatgctgttgttctggcagcccccctttgcttttgcctggccccaccttctgctcccactctgctggcttgggcaagatgcgtgccttgggcctt

SEQ ID NO: 591293 - DNA, 120 bp, Artificial Sequence
  ENSG00000173218_54 (sequence is synthesized)
gggtgcagggaggcaggcaggggcttgacctggcctctctctggtgccatggcaacattatgccccaaacttcttccctggttggagtgagaggggctgtccacagccccatcctgtggg

SEQ ID NO: 591294 - DNA, 120 bp, Artificial Sequence
  ENSG00000173218_55 (sequence is synthesized)
gatctcaagccggagtccctggcctggcctccttgacgtaggtgttctcagcaagcagtttgcatcccaccgtctttctcacacttgcccccaagacttttgacagagcagacgtaaaac

SEQ ID NO: 591295 - DNA, 120 bp, Artificial Sequence
  ENSG00000173218_56 (sequence is synthesized)
aggactcagaaaaccatttttctctgttcccatatgtagtaagttttgattcagttgtgcataaaccatagttttctgccctgctgtttgctttcaatggaagacagtaaagggaagatg

SEQ ID NO: 591296 - DNA, 120 bp, Artificial Sequence
  ENSG00000173218_57 (sequence is synthesized)
gtgctcacatctctccatgtgacatctcattaggaattaagatgcgatggattagaaatgtaaaacttcagaataaaattaaatttcagggctctataagtcccgttttcccaggtcctg

SEQ ID NO: 591297 - DNA, 120 bp, Artificial Sequence
  ENSG00000173218_58 (sequence is synthesized)
ttccgtttctacgtagataacccaatttgttttgtctatgaaataagcctctttagtgggttgttttagtctctccaacaaaagagcagattcctaaagccaggtgcagcactgtgaaaa

SEQ ID NO: 591298 - DNA, 120 bp, Artificial Sequence
  ENSG00000173218_59 (sequence is synthesized)
gtttctttcaatatggcaccaagactctaccatttatgtctctctcagcttacaaacatcagcgttttgtccttgtcatagtggaagaaagacacttactttaagctttggggacaaagg

SEQ ID NO: 591299 - DNA, 120 bp, Artificial Sequence
  ENSG00000173218_60 (sequence is synthesized)
tgacaaaccccaggcttttatcttaaaagtgtctttggcacttcttttggcactgaaatggtatttgggaagcattatttgaatgtacagttgtttggttttgtatgtgcttatctttat

SEQ ID NO: 591300 - DNA, 120 bp, Artificial Sequence
  ENSG00000173218_61 (sequence is synthesized)
ctgagctttcacttgtagacatggccttttgttgtgaagttgctcatcatttaggagtgtttaattctaaaaagccttcagcctaagaaagcttcatctgtggggaccagagacttgttg

SEQ ID NO: 591301 - DNA, 120 bp, Artificial Sequence
  ENSG00000173218_62 (sequence is synthesized)
ctcagggagttagtgatgggacttgggcatctgatctgcaggtgacaagtttagttcaactgaagttgtagggaatttagacagttgcacatcattgccgttctaggggccttgtagaaa

SEQ ID NO: 591302 - DNA, 120 bp, Artificial Sequence
  ENSG00000173218_63 (sequence is synthesized)
gatgaaacagttgtttttcatttaccagcacctctcagttatagaggtaatggaacattcgcttacttttcatcatcattctttaaaaagggaacatacaaaaatctaaactatggcaat

SEQ ID NO: 591303 - DNA, 120 bp, Artificial Sequence
  ENSG00000173218_64 (sequence is synthesized)
aatttatttttataatagtttacggtaggctttaattaaatggcaaactcctctgggacccctaagttatggcgtgattagccaaatttgatttccaacagtcatttatggccataacta

SEQ ID NO: 591304 - DNA, 120 bp, Artificial Sequence
  ENSG00000173218_65 (sequence is synthesized)
ttgcatagagtgcaggatgccagcaaagatgagggtgggggcagatactggctcagtgatttaactcacattatagatgaccccttcctcaacagaaatgctactgagagaaccagagag

SEQ ID NO: 591305 - DNA, 120 bp, Artificial Sequence
  ENSG00000173218_66 (sequence is synthesized)
gcctgggccaggcaggtcttatttgagaggagattatttgataattgctttggttagaaggactttacatttcctgatttcaagtccagcaccaatttagaaagttcagagatgaaacca

SEQ ID NO: 591306 - DNA, 120 bp, Artificial Sequence
  ENSG00000173218_67 (sequence is synthesized)
cctgtctttacctgacagagtcataacggtttgtgtaaaaatgtggtcagggaccttttttgttctttctgattagttaatactgtacattgtaaccaggaggggcagttttgccaacca

SEQ ID NO: 591307 - DNA, 120 bp, Artificial Sequence
  ENSG00000173218_68 (sequence is synthesized)
gcctctgctcatggtcaccatatgtgtatgacaaggcctgagtgagttcctgcataaactgggtagtgggctcttttgacacatttgcaagcatgtaaatgaatgaatgacactaccagc

SEQ ID NO: 591308 - DNA, 120 bp, Artificial Sequence
  ENSG00000173218_69 (sequence is synthesized)
aaccatctgtacaggtccatttacttacattcataaggtttatgctatgaaacttcttctcattgtgatgtcagtaacagagttagtgtctctgatggaatagtgtacctgtcacccaag

SEQ ID NO: 591309 - DNA, 120 bp, Artificial Sequence
  ENSG00000173218_70 (sequence is synthesized)
ttattttgttcctttttgggtcctccagtataatccccccctcatcccaattaactgtaaaatgttttacacatcacattttttatactgtaaacttggaaaataaactgaaatatcaaa

SEQ ID NO: 591310 - DNA, 120 bp, Artificial Sequence
  ENSG00000173218_71 (sequence is synthesized)
aaaggtgaagctggttttcatggtctcctgagggcccctggcccctgggagatgggtcacactccctgaatgctgtgctgttggtttccctggaggattcttgctgcaggccaggtcccg

SEQ ID NO: 591311 - DNA, 120 bp, Artificial Sequence
  ENSG00000173218_72 (sequence is synthesized)
ctcctgccagcggctacagctgggatggcttccctcgcacggcgtctgcccacagccttgcgcccggagcccagaggactcacaggaaaaggagctggcaaagcgagcagcattggtggt

SEQ ID NO: 591312 - DNA, 120 bp, Artificial Sequence
  ENSG00000173221_0 (sequence is synthesized)
gctcaataccccaagcaatacctgcaactgaggattcttcccggggagaccgcagcccatcggcatggctcaagagtttgtgaactgcaaaatccagcctgggaaggtggttgtgttcat

SEQ ID NO: 591313 - DNA, 120 bp, Artificial Sequence
  ENSG00000173221_1 (sequence is synthesized)
caagcccacctgcccgtactgcaggagggcccaagagatcctcagtcaattgcccatcaaacaagggcttctggaatttgtcgatatcacagccaccaaccacactaacgagattcaaga

SEQ ID NO: 591314 - DNA, 120 bp, Artificial Sequence
  ENSG00000173221_2 (sequence is synthesized)
ttatttgcaacagctcacgggagcaagaacggtgcctcgagtctttattggtaaagattgtataggcggatgcagtgatctagtctctttgcaacagagtggggaactgctgacgcggct

SEQ ID NO: 591315 - DNA, 120 bp, Artificial Sequence
  ENSG00000173221_3 (sequence is synthesized)
atgaaaagcatagttggtcttggtgtcatatggatcagaggcacaagtgcagaggctgtggtcatgcggaacactctgttatttaagatggctatccagataatcctgaacactgtgtat

SEQ ID NO: 591316 - DNA, 120 bp, Artificial Sequence
  ENSG00000173221_4 (sequence is synthesized)
ttattttatttagactaccagcaaagattaaagcatgaaatgtaaaacatctgataaaacttacagccccctacaccaagagtgtatctgtgaaagagctcctacactttgaaaacttaa

SEQ ID NO: 591317 - DNA, 120 bp, Artificial Sequence
  ENSG00000173221_5 (sequence is synthesized)
gaatcccttatcatgaagtttgcctgttctagaattgtaagattgttaatttccttcaatctctagtgacaacacttaatttcttttctaataaaaaaaacctatagatgattcagtgat

SEQ ID NO: 591318 - DNA, 120 bp, Artificial Sequence
  ENSG00000173221_6 (sequence is synthesized)
ttttgtccaattcatttgcatgttctcaagacattaaggaatgttatgcgaaatacactaacttaaaactgtgtttatatttggccctgccattataaataaagacacgtgctgctgtca

SEQ ID NO: 591319 - DNA, 120 bp, Artificial Sequence
  ENSG00000173221_7 (sequence is synthesized)
agctctgcagtaaccacagaacaggccccatgctgacgtccctcctcaagagctggatggcattgcaaatgatgacagcacttctggtggatgaatttgggggcacaaacagcttttttc

SEQ ID NO: 591320 - DNA, 120 bp, Artificial Sequence
  ENSG00000173221_8 (sequence is synthesized)
ctcttttggctcagtatttaaaagtggaccaacttgctcttaatcacagggccaagaaggttgacgggccatcttggttttcttctggatgtgctctttggttttcagaagactgtgaca

SEQ ID NO: 591321 - DNA, 120 bp, Artificial Sequence
  ENSG00000173221_9 (sequence is synthesized)
gcatgcgtttcttactgttctccatgtgtcggcatgtctctacctctaagccagtgtttttcaactatgtttatccagactccttctccacaatgatgaatccacagttggttatctgct

SEQ ID NO: 591322 - DNA, 120 bp, Artificial Sequence
  ENSG00000173221_10 (sequence is synthesized)
actgcccattagctaaaatcattttgctgcttgactttatggagtttgtattatgaaatcagtgggtattttgaatgtgttctttctaactacatgcatctctccactcaactccacccc

SEQ ID NO: 591323 - DNA, 120 bp, Artificial Sequence
  ENSG00000173221_11 (sequence is synthesized)
atcccatcccaccttgaaaatcactgctctgaaccagtgttctccaccttgtcctccacagatctcataggaaatgttcaacaattctgtgaaaggtcacaggacccaattggagaaatc

SEQ ID NO: 591324 - DNA, 120 bp, Artificial Sequence
  ENSG00000173221_12 (sequence is synthesized)
tcaagctagactcaaactcctggactcaagggatcctcccgcctcagccttccaagtcactgggattataagtgcatgccatcccacgcagctactctcttgaatactcgagaaagccaa

SEQ ID NO: 591325 - DNA, 120 bp, Artificial Sequence
  ENSG00000173221_13 (sequence is synthesized)
ttggagctctgcagtaaccacaggtgagtggcaggtgaggtgctgggccaggaacatgggagaccgtggaattcttctgtcgtggtttgttatactgtatgacagcattctggttggggg

SEQ ID NO: 591326 - DNA, 61 bp, Artificial Sequence
  ENSG00000173221_14 (sequence is synthesized)
agaagacacttcagttatctccacggagatttatttgtccagattgtgaaactccttgatc

SEQ ID NO: 591327 - DNA, 120 bp, Artificial Sequence
  ENSG00000173221_15 (sequence is synthesized)
gctgggattacaggcatgagccgccacatccggcccattttaaccacttttaagtatatgattcattggcatgaagtacattcacactgctgtgcagtcatcaccaccaccatctccaga

SEQ ID NO: 591328 - DNA, 120 bp, Artificial Sequence
  ENSG00000173221_16 (sequence is synthesized)
tgcagtcatcaccaccaccatctccagaacatgtttcttcttcccaaactgaaactctgtacccaataaacactaactccctgtttccccctttccccagcccctggcaaccacccaatt

SEQ ID NO: 591329 - DNA, 120 bp, Artificial Sequence
  ENSG00000173221_17 (sequence is synthesized)
tggctgggggttttttcaatacttccctagaaatctggtttttcatgtaattctcgttcttatccctccttacattcttacattcttttgtagctatggaaccaagaacactgtgtatgg

SEQ ID NO: 591330 - DNA, 120 bp, Artificial Sequence
  ENSG00000173221_18 (sequence is synthesized)
attccagtatctggcttaactttttgattattcattttgactcatttttccctaacacacttttgccaatttttaaaaatcctatcattattactgctttcctctgtaatattttctaat

SEQ ID NO: 591331 - DNA, 120 bp, Artificial Sequence
  ENSG00000173221_19 (sequence is synthesized)
tagcaaggtaaaacttaatattagcagcttcaattacttgagtgagaggatgactgaaaatcaaattttcctattactccaaatctggtcaatttgtaaatttaatatacagatttgcca

SEQ ID NO: 591332 - DNA, 120 bp, Artificial Sequence
  ENSG00000173221_20 (sequence is synthesized)
acaatgaaataataaacaataagctttatttccaaaaagaacaaatgctttcatttttattaggcaaaaatactaagtctttttttgagacggagtctcactcggtcacccaagcttgag

SEQ ID NO: 591333 - DNA, 120 bp, Artificial Sequence
  ENSG00000173221_21 (sequence is synthesized)
cggggtttcaccatgttggtcaggctgtttttgaactgacttcaggtgatctgctcacctcagccttccaaagtgctcagattacaggcatgagctacggcacctggccgtaagtcagtc

SEQ ID NO: 591334 - DNA, 120 bp, Artificial Sequence
  ENSG00000173221_22 (sequence is synthesized)
tggccgtaagtcagtctttaacactgacagaaacaactgcaactggctccaaaatactctacagaaagctgcaagcccagaattaatttaatcaacacaaatacatttgcttctttttga

SEQ ID NO: 591335 - DNA, 120 bp, Artificial Sequence
  ENSG00000173221_23 (sequence is synthesized)
acttctaaaatctttcactagagggctcatgacttgtttaaaacttatttcaatacccagtgtaagaaacctttccattctaaaaattaaagcagtgaatctgaagagaggtctggcttg

SEQ ID NO: 591336 - DNA, 120 bp, Artificial Sequence
  ENSG00000173221_24 (sequence is synthesized)
tttgttttgctatagtcacagctcctaaattagtgccttcatttatttctcctctaatgcacttttctttacatagatctgagtttctgaactatatcatttcccttctctctgaagaac

SEQ ID NO: 591337 - DNA, 120 bp, Artificial Sequence
  ENSG00000173221_25 (sequence is synthesized)
ttctttgggcatttcttgcaaggtgattccattggtaacacattccctcaagttttgtttaccttagaaagtatttctccttcgcatttgaatgatgattttactggatgcaacaaatat

SEQ ID NO: 591338 - DNA, 120 bp, Artificial Sequence
  ENSG00000173221_26 (sequence is synthesized)
ttttaagcacctactatgtaccagacacttttatgtacattggggaaaaaattctgccttttctgccatgaaaaaaacccttctgcctttgttgaacctatattctagtgggggagacaa

SEQ ID NO: 591339 - DNA, 120 bp, Artificial Sequence
  ENSG00000173221_27 (sequence is synthesized)
acaaatacagtaataaaacagtatgttgggagttggtaagtggcacgtgctatgaggaaaagtaggaaaggtagggaggaagcatcagggtccagttttaaatggagccattgggtctca

SEQ ID NO: 591340 - DNA, 120 bp, Artificial Sequence
  ENSG00000173221_28 (sequence is synthesized)
ctgagaagggaacattcgagcagatatctataggagctgagggagatgggtgtacacaatttacaggtagagtgaatgcaaaggtcctggggtagacgtttgcctggcaggtttgtggaa

SEQ ID NO: 591341 - DNA, 120 bp, Artificial Sequence
  ENSG00000173221_29 (sequence is synthesized)
tagtaaggaagccagtatagttgcagcactgtgagccagtaggagagttagtggaggtgaggtctgagagctaataggagcttggaagaactgtgactggtactcggtgtgagatgagat

SEQ ID NO: 591342 - DNA, 120 bp, Artificial Sequence
  ENSG00000173221_30 (sequence is synthesized)
gcccctggtgggtgctgagcagacgagtcacttgatctgaccccattttgaaagggccactctggcagctgtggggagaagagacagtagggcaaaggtgaaggttgaagctgggagaca

SEQ ID NO: 591343 - DNA, 120 bp, Artificial Sequence
  ENSG00000173221_31 (sequence is synthesized)
ttgggaggctatagtagttattcaggtgacagatgaaggtggcttataccagggaggtagccgaggagtgttgagaaattgcttttgagtagttgcatttgtgtaaccctagctagcgta

SEQ ID NO: 591344 - DNA, 120 bp, Artificial Sequence
  ENSG00000173221_32 (sequence is synthesized)
caggagatgttgcctggctgaggctggggaaacctagtgcaggagaataagaaccacaggattaccaaactcgttttggggtggcagttctttcctctccttgacagtagcggactctca

SEQ ID NO: 591345 - DNA, 120 bp, Artificial Sequence
  ENSG00000173221_33 (sequence is synthesized)
agttcctctaaagaggaggctgggacgggaagggacaggaggggaagcagcacagggtatttcctcttctttgctcaactttatcaacagtacttcttgctttggtttcactgccacagc

SEQ ID NO: 591346 - DNA, 120 bp, Artificial Sequence
  ENSG00000173221_34 (sequence is synthesized)
acccccgtgccgtctgtacagcctgccattcagctcccgttaggggtaccattcactgatacgatttatggcagttttgcagttgtccagactagaggatgggtgtgagggtaaaggagc

SEQ ID NO: 591347 - DNA, 120 bp, Artificial Sequence
  ENSG00000173221_35 (sequence is synthesized)
ctttcgcttctttgccagacactgagcacaaaactccacgctgggagcagcctggtcacatttcagggtcatctcaggaggctggggggcagctccagggctgtgggttttcaaagcctc

SEQ ID NO: 591348 - DNA, 120 bp, Artificial Sequence
  ENSG00000173221_36 (sequence is synthesized)
agttatcctgtgagagcacagggaatagccatggaaatgtgcaagatttgtttttaatttttagactttatttttaatgcctaccttcacccagaccccctttttaataaaagtgctgta

SEQ ID NO: 591349 - DNA, 120 bp, Artificial Sequence
  ENSG00000173221_37 (sequence is synthesized)
agaacttatccacaataatgaagccccttttctcacctttctcactttttggacaatttgctccaattattatgctttctgaggaaagcccaaagctttgaaaaatagtctcattgcttt

SEQ ID NO: 591350 - DNA, 120 bp, Artificial Sequence
  ENSG00000173221_38 (sequence is synthesized)
agaggcccgctggctctgatgacgcggtgacctccatggggcttttttcttcactgccaggcagccttggtggaacactcctggcctataaattcagccacgttgagggtatttcctcct

SEQ ID NO: 591351 - DNA, 120 bp, Artificial Sequence
  ENSG00000173221_39 (sequence is synthesized)
ccctcgcgattctaaaagccctctggaattctggaatgtgtctgctcctagcagcagggaggaagtgtgtaactagagaggagcctattcagcaggtgtcatgactgtggcttggcgtgg

SEQ ID NO: 591352 - DNA, 120 bp, Artificial Sequence
  ENSG00000173221_40 (sequence is synthesized)
gtgacgcaccctcatccggggtgagttaaccatcttatgatggaccagcgattaaaggagactcaaacaccactacacccccctggttgaggacagagctcacttgtgttgctttgtttt

SEQ ID NO: 591353 - DNA, 120 bp, Artificial Sequence
  ENSG00000173221_41 (sequence is synthesized)
tttgttttgctttctttgttttgctctgtcgtccaggtgtgagtgcaatggcaccatcacagcttactgcagcctcgacctcccgggccaaagcaatccttccacttcagcctcctgagt

SEQ ID NO: 591354 - DNA, 89 bp, Artificial Sequence
  ENSG00000173221_42 (sequence is synthesized)
ttttgtagagacggggtctcacgatgttacctccctcccacctcagcctcacaaaagtagtaggattacattcatgagccactgtgcct

SEQ ID NO: 591355 - DNA, 120 bp, Artificial Sequence
  ENSG00000173221_43 (sequence is synthesized)
cacaaaagtagtaggattacattcatgagccactgtgcctggccctcacctgtgttttaacaacacagagagatgattgtacttaataaaccatggacctgaaaaatcagagacgtaatg

SEQ ID NO: 591356 - DNA, 120 bp, Artificial Sequence
  ENSG00000173221_44 (sequence is synthesized)
caaatacttttccagctgtatttagaaacgaactccttccttcctgattgctgtgacccagtttacaatcttaggtgtggtccctgatgcagagaaagcagagttcaatctaggtggtct

SEQ ID NO: 591357 - DNA, 120 bp, Artificial Sequence
  ENSG00000173221_45 (sequence is synthesized)
gactgcagccaatcagaattctccttctgaaacatgtttctgtagagtgaaatttttaaatccctttgacaagttggacaagctcatgcatagcacacaacttgaaaactcttctggcgt

SEQ ID NO: 591358 - DNA, 120 bp, Artificial Sequence
  ENSG00000173221_46 (sequence is synthesized)
aaaaacattctcgagttaataatgttaccccttataacagaaaggaagtcctgtcctgtgagcatatacataaggaggttttaaagtgatttgaaaagtttggaatcacgggaaatattt

SEQ ID NO: 591359 - DNA, 120 bp, Artificial Sequence
  ENSG00000173226_0 (sequence is synthesized)
gcgtcgcgacgcacgctgccccggaaggccgcggcgctgtagtgcggcgtgggagccccaggttctttagtggaagaacgcgaagcgaggatgagtgatccgtggaggcagtaacaggcg

SEQ ID NO: 591360 - DNA, 120 bp, Artificial Sequence
  ENSG00000173226_1 (sequence is synthesized)
cggcgagggagaagtgattcccgaagaatcaaggctgggccggacccggtggcctggcaacagggtaataagagaaatgaagccaacaggtacagacccaaggatcttatctatagctgc

SEQ ID NO: 591361 - DNA, 120 bp, Artificial Sequence
  ENSG00000173226_2 (sequence is synthesized)
tgaagttgcaaaaagccctgagcagaatgtccctgttatactgttgaagttaaaagaaataataaacatcacacctttaggaagctcagagttgaagaaaatcaaacaagatatatattg

SEQ ID NO: 591362 - DNA, 120 bp, Artificial Sequence
  ENSG00000173226_3 (sequence is synthesized)
ttatgatctcattcaatattgcctcttggtcctcagtcaagattattctcgaatccagggtggttggactacaatttcccagcttacacagatattaagccattgctgtgtgggcttgga

SEQ ID NO: 591363 - DNA, 120 bp, Artificial Sequence
  ENSG00000173226_4 (sequence is synthesized)
gccaggagaagatgcagaggaattttacaatgaattacttccatcagctgcagaaaattttctagttttggggagacaattacaaacatgttttatcaatgcagctaaggctgaagaaaa

SEQ ID NO: 591364 - DNA, 120 bp, Artificial Sequence
  ENSG00000173226_5 (sequence is synthesized)
agatgaattactacactttttccaaattgtgactgattctctcttctggcttttgggaggccatgttgaacttattcagaatgtactacaaagtgatcatttcttacatttactgcaagc

SEQ ID NO: 591365 - DNA, 120 bp, Artificial Sequence
  ENSG00000173226_6 (sequence is synthesized)
tgacaatgtccaaataggatctgcagtcatgatgatgctacagaatatactacagatcaacagtggtgatttactcagaataggaagaaaagccctgtattcaattttagatgaagttat

SEQ ID NO: 591366 - DNA, 120 bp, Artificial Sequence
  ENSG00000173226_7 (sequence is synthesized)
tttcaagcttttttcaactcctagtccagttataagaagtactgctacaaaactcctactgttgatggctgaatcccatcaggaaattttgattttactgagacaaagtacctgctacaa

SEQ ID NO: 591367 - DNA, 120 bp, Artificial Sequence
  ENSG00000173226_8 (sequence is synthesized)
aggactcagacgtctactaagtaaacaggaaactgggactgaattcagtcaagaacttagacagcttgttggccttttaagcccaatggtctatcaggaagtagaagagcagaaactaca

SEQ ID NO: 591368 - DNA, 120 bp, Artificial Sequence
  ENSG00000173226_9 (sequence is synthesized)
tcaagcagcatgcttgattcaagcctattggaagggttttcagacaagaaagagattaaagaagcttccatctgctgtgattgctttgcagaggagtttcagatccaaacgatcaaagat

SEQ ID NO: 591369 - DNA, 120 bp, Artificial Sequence
  ENSG00000173226_10 (sequence is synthesized)
tcaaagacagagagccatgagactttcccgagaattgcagctgagtatgctcgaaatagttcatccaggtcaggtggagaaacactatcgggaaatggaagagaaatcagcactgattat

SEQ ID NO: 591370 - DNA, 120 bp, Artificial Sequence
  ENSG00000173226_11 (sequence is synthesized)
ccagaaacattggagagggtacagggaaaggaaaaattttcaccaacagaggcagtctctcatagagtataaagcagctgtcacacttcaaagagcagcgcttaaattcctagcgaagtg

SEQ ID NO: 591371 - DNA, 120 bp, Artificial Sequence
  ENSG00000173226_12 (sequence is synthesized)
ccgtaagaaaaagaaactatttgctccttggcgaggactccaagaactcactgatgcacgccgagttgaactgaagaaacgagtggatgactatgtcagaagacatttgggctctccaat

SEQ ID NO: 591372 - DNA, 120 bp, Artificial Sequence
  ENSG00000173226_13 (sequence is synthesized)
gtcagatgtggtcagtagggagctccatgcccaagctcaagaacgactgcaacactactttatgggcagggccctagaagagcgagcccagcagcacagagaagctctgatagcacagat

SEQ ID NO: 591373 - DNA, 120 bp, Artificial Sequence
  ENSG00000173226_14 (sequence is synthesized)
cagcaccaacgttgaacagctaatgaaggcaccaagtctgaaggaggcagaagggaaagaacctgagctcttcctaagtagatccaggcctgtggcagccaaggccaagcaggcccatct

SEQ ID NO: 591374 - DNA, 120 bp, Artificial Sequence
  ENSG00000173226_15 (sequence is synthesized)
cacaaccctgaagcacatacaagcaccctggtggaagaagcttggagaagaatctggagatgagattgatgttccaaaggatgagcttagtatagaattagaaaatttattcattggtgg

SEQ ID NO: 591375 - DNA, 120 bp, Artificial Sequence
  ENSG00000173226_16 (sequence is synthesized)
aaccaaaccaccttagtgagtaaccctaagaattgacacaaatctcatattttaggagattatattggttctgcctctggcatgctggtagactagggccatcctaacttattattttcc

SEQ ID NO: 591376 - DNA, 120 bp, Artificial Sequence
  ENSG00000173226_17 (sequence is synthesized)
agaggttctcctccagacaagacctgcagtaagcaaagagttatattctacctctctctcaattttctttttcttttctctgtatcctcatcgttagccacacacagatttgtgtggctt

SEQ ID NO: 591377 - DNA, 120 bp, Artificial Sequence
  ENSG00000173226_18 (sequence is synthesized)
ttattgtagaactaaacttagcatagtgttctgttgtttacatgaagtgtgtttttctttggtttcttctgttttccaactaaatatttttttctaaataaatattttcaacaattgatt

SEQ ID NO: 591378 - DNA, 120 bp, Artificial Sequence
  ENSG00000173226_19 (sequence is synthesized)
tgaaaaatttgtcaggattatttcaacttttcacatttgttatctgaaattcctatttcctgttaacataggaggtgtgtgcagactttattaatgtgaggaaaagaaatgctcaattga

SEQ ID NO: 591379 - DNA, 120 bp, Artificial Sequence
  ENSG00000173226_20 (sequence is synthesized)
aggacatttccctgttttctataaagcaatggttgaactcattttctattttgttatttctaaaaggaactgcataccaaaaaaatgcattctttctattaaactgtgagaactacataa

SEQ ID NO: 591380 - DNA, 120 bp, Artificial Sequence
  ENSG00000173226_21 (sequence is synthesized)
tagccttaaaatagataaataattgtctttttgtgtcaaatttcatgaatttaatgtaaagatgggagaagtgttgaattataggagaaacactcgagaaagtttacagatggtttccat

SEQ ID NO: 591381 - DNA, 120 bp, Artificial Sequence
  ENSG00000173226_22 (sequence is synthesized)
ggttatgtctccttcaacctgtctgtgtaaatcctaccctttgaaggtgtgccgaagctgtttcatatcgtagttaaatgctttaaggcagatggtggctctagtttgaacccctgcttt

SEQ ID NO: 591382 - DNA, 120 bp, Artificial Sequence
  ENSG00000173226_23 (sequence is synthesized)
atacttaacagtgtgactttgtgccagctaattacattctccagagtttaagtatgctcattgttcaaattgggaaaaaaataatagtatctgttccttagagttgttggaatgattaaa

SEQ ID NO: 591383 - DNA, 120 bp, Artificial Sequence
  ENSG00000173227_0 (sequence is synthesized)
gaagttctagaaaatgttaattgggggagctgtggctggcagagaaggaaaaaggaagctgaagggcacttgggctcataatggtctctccaaccctgatcctgtcctttatggacattt

SEQ ID NO: 591384 - DNA, 120 bp, Artificial Sequence
  ENSG00000173227_1 (sequence is synthesized)
ggcagcgctgctgccttgaggtgccttgcaatgctttatctttttgttaaagccacctctgttgcttcagccagcttgagcggttttctgttacttgctagtggttgggaaggcttagcc

SEQ ID NO: 591385 - DNA, 120 bp, Artificial Sequence
  ENSG00000173227_2 (sequence is synthesized)
gacgaagggaaaatgagtcaggtcctgaaggatgagcaagttacgggagtgggccgcatggtgagggagtggacttcctgatggggttaagggcgcctgaacacctgggaggcaagttga

SEQ ID NO: 591386 - DNA, 120 bp, Artificial Sequence
  ENSG00000173227_3 (sequence is synthesized)
ggccaagacctggggtgatggagaggcagggtaggctacccagtgagtaggaggccgaaggaaccacagcagggctccagatctcctggcccagaggggctggtacgggaagcccagaag

SEQ ID NO: 591387 - DNA, 120 bp, Artificial Sequence
  ENSG00000173227_4 (sequence is synthesized)
acactcatccctaaggggagcctgagactgaggaactctcatgccctgcgtcgggctcgtgggcgaagggccttcccagggactgcaccatggcctgtccccagccttacccaggggcct

SEQ ID NO: 591388 - DNA, 120 bp, Artificial Sequence
  ENSG00000173227_5 (sequence is synthesized)
ccagccttacccaggggcctccctctcaggttctgaaggacccaggggtcacagctgtgtggggtgctccactgaacacttccttcaaactccttcaggctggagtgcagtggcgcgatc

SEQ ID NO: 591389 - DNA, 120 bp, Artificial Sequence
  ENSG00000173227_6 (sequence is synthesized)
ttgaaaggatgaagagtttacatcctctggaaagaagcaaatagaaggcattccaggcaaaaggaactgcatcgagtaaaagcatggaggcaagaaagggcttggtgtgtttgagaaaca

SEQ ID NO: 591390 - DNA, 120 bp, Artificial Sequence
  ENSG00000173227_7 (sequence is synthesized)
gtgagtagggcatggtggtggcagaagcttaaagtgtatggcccgtggacagtgacagccggacaagaagctgaagtgacagaacaagttgaaccaaaggaattccagacctgggaaagt

SEQ ID NO: 591391 - DNA, 120 bp, Artificial Sequence
  ENSG00000173227_8 (sequence is synthesized)
ggagaaagaattttggggtcagagccgtttaagactttgcctagggcctgggtcttctttctcctaaaggcctcaacccacagcacgccacacaaatatgtcacataacacacaaacaaa

SEQ ID NO: 591392 - DNA, 120 bp, Artificial Sequence
  ENSG00000173227_9 (sequence is synthesized)
catcatatttcacagtccaggaaatgaaatgaagacaaaagcgccccctgtgggtgaagtcacagtcactgcagcagacatcatggctgtggatgtggcagaataccatctgagcgtcat

SEQ ID NO: 591393 - DNA, 120 bp, Artificial Sequence
  ENSG00000173227_10 (sequence is synthesized)
caagagcccccctggctgggaggtgggtgtctatgctgcaggggccctggccctgctgggaatcgcagctgtgagcctgtggaagctctggacgtcggggagcttccccagcccctctcc

SEQ ID NO: 591394 - DNA, 120 bp, Artificial Sequence
  ENSG00000173227_11 (sequence is synthesized)
gttccccaattacgactacaggtaccttcagcagaagtacggcgagagctgcgcagaggccagggagaagagagtgcctgcctggaatgcccagcgggccagcacgcggggaccacccag

SEQ ID NO: 591395 - DNA, 120 bp, Artificial Sequence
  ENSG00000173227_12 (sequence is synthesized)
ccgcaaaggcagtctcagcattgaggacacctttgagagcatcagtgaactggggcctctggagctgatgggccgggagttggacctggccccctatgggaccctccggaagtcccagtc

SEQ ID NO: 591396 - DNA, 120 bp, Artificial Sequence
  ENSG00000173227_13 (sequence is synthesized)
ggccgactccctgaactccatctcctccgtgagcaacacctttgggcaggacttcacactgggccaggtggaggtgagcatggagtacgacactgcctcccacacgctgaacgtggcggt

SEQ ID NO: 591397 - DNA, 120 bp, Artificial Sequence
  ENSG00000173227_14 (sequence is synthesized)
gatgcagggcaaggacctcctggagcgggaggaggccagcttcgagtcctgcttcatgcgcgtcagcctgctgccggacgagcagatcgtgggcatttctcggatccagagaaatgccta

SEQ ID NO: 591398 - DNA, 120 bp, Artificial Sequence
  ENSG00000173227_15 (sequence is synthesized)
ctccatcttctttgatgagaagttctccatccccctggatcccacagccctggaggagaagagcctgcggttttctgtatttggcatcgatgaggatgagcgcaacgtcagcacgggggt

SEQ ID NO: 591399 - DNA, 120 bp, Artificial Sequence
  ENSG00000173227_16 (sequence is synthesized)
ggtggagctgaagctttctgtgcttgacctcccgctgcagcccttcagtggctggctctatttacaggaccagaacaaggccgccgatgctgtgggggagatcctgctctccctcagcta

SEQ ID NO: 591400 - DNA, 120 bp, Artificial Sequence
  ENSG00000173227_17 (sequence is synthesized)
cctccccacagccgagcgcctcaccgtggtcgtggttaaggccaagaacctcatctggaccaacgacaagaccacagcggaccccttcgtcaaggtgtacctgctgcaggatgggaggaa

SEQ ID NO: 591401 - DNA, 120 bp, Artificial Sequence
  ENSG00000173227_18 (sequence is synthesized)
gacctgtctctccgcgtgacggtggctgagagcagcagcgacggccgtggggacaacgtgggccatgtcatcattgggccgtcagccagtggcatgggaaccacacattggaaccagatg

SEQ ID NO: 591402 - DNA, 120 bp, Artificial Sequence
  ENSG00000173227_19 (sequence is synthesized)
ttggccacgctgcgcaggcccgtgtccatgtggcacgctgtccggcgaaactagcaaccagggcgggccagttgggcaatggagctgctggagcccggtacccactcagctctgtctgat

SEQ ID NO: 591403 - DNA, 120 bp, Artificial Sequence
  ENSG00000173227_20 (sequence is synthesized)
gccctctccatagcccagctggagccgtgaacactggggtcccctggcagagtcctcatgacccatcctggtctctctgtccagattgcagcagaggagtgggcgtggctctgtgtccag

SEQ ID NO: 591404 - DNA, 120 bp, Artificial Sequence
  ENSG00000173227_21 (sequence is synthesized)
ggccccagggtctgctcctgctgaggaccagctgtggctgggccaggacagaggactcaaccctgctcctcccggtaggccagctgccgagctgggctatgttctggaacccagtgaatc

SEQ ID NO: 591405 - DNA, 120 bp, Artificial Sequence
  ENSG00000173227_22 (sequence is synthesized)
ttgggggccaggcactgtgctaggcaccagcaggggtaacacgaagaagacccggcccttagggcatcaggaagactagctcccctgccccggaggatctgctcagtgctgatggcagcc

SEQ ID NO: 591406 - DNA, 120 bp, Artificial Sequence
  ENSG00000173227_23 (sequence is synthesized)
cagctgtgtggactcagggggctctgagggctagggaaacaggaagggcctctttgacaaggtaggagctgtgcttggaggggcaggaaaagaactgagcatgtcgcaggcagcgggccc

SEQ ID NO: 591407 - DNA, 120 bp, Artificial Sequence
  ENSG00000173227_24 (sequence is synthesized)
agcctgagcaatggcaggatgtgaacttccccatcgcaaatgcagttctcagcccactgcagtggatacaaggaagggcctttctcggggccggagaagagaccaagagaccaggcccgg

SEQ ID NO: 591408 - DNA, 120 bp, Artificial Sequence
  ENSG00000173227_25 (sequence is synthesized)
gcagcagcctaccggccacgtggaacactggctccggagttattctctgtcaaatctactccccggacctcaaccatggcaagaaccagaggtccaaagaggcccagacccaggtccttg

SEQ ID NO: 591409 - DNA, 120 bp, Artificial Sequence
  ENSG00000173227_26 (sequence is synthesized)
tgctcagtcctgcgcaaaccaggcccagaccctgcaagcatttgttgatgcccttgcaggcccactgggagaaagatgcctcaggcaggtctcagcctgggggtggcaggggtggggcag

SEQ ID NO: 591410 - DNA, 120 bp, Artificial Sequence
  ENSG00000173227_27 (sequence is synthesized)
agagaatactgacagcagaggtcttggtgggctgcacgtgcctgcgaagatgtggtggacaaggaggctctcgggctgggccttggaggggtggcagcggaaggacagcccaggtggctg

SEQ ID NO: 591411 - DNA, 120 bp, Artificial Sequence
  ENSG00000173227_28 (sequence is synthesized)
aggcctgatgggaagccggggaaggccagggtggaagggcggcttgagggacgccaggagaagactgaatgccaggctaggaaggaggcggctctcgatcacggggtgggtgcccccgac

SEQ ID NO: 591412 - DNA, 120 bp, Artificial Sequence
  ENSG00000173227_29 (sequence is synthesized)
accgggtctcctagcttgagttccctagaagcgaaatctgagagggggattctggggcaagtagtttcttgcgggtgagtgttctcagagaaacttaccagatcaagaaagggagctcag

SEQ ID NO: 591413 - DNA, 120 bp, Artificial Sequence
  ENSG00000173227_30 (sequence is synthesized)
gctggatggaggaagccacgcaagtgtggcttcaagatccatcgccttggcctgatcgctgtgggggcaggggcctggagtacgaggggcaccctgggggctcccacccagaagcagagg

SEQ ID NO: 591414 - DNA, 120 bp, Artificial Sequence
  ENSG00000173227_31 (sequence is synthesized)
ggctgggctgttgcacctctactggcatcagtctttggttaccccccagccccagtaggaggagagcaggcagagcttgtcatccccagcctggtgtcccgcagtcccaggaagccgctt

SEQ ID NO: 591415 - DNA, 120 bp, Artificial Sequence
  ENSG00000173227_32 (sequence is synthesized)
cttgccttcatggctgagtgctgggaagggctgagctcacccaggccagcaggtggggtatcatctgctcggtggggccacccacaggtgacagcatggaccctcaggctggctgcccct

SEQ ID NO: 591416 - DNA, 120 bp, Artificial Sequence
  ENSG00000173227_33 (sequence is synthesized)
gttccttggtccataactggtgagctatggagacccaggccaacaaattatccccagtgatatggggggaggaggggctagaacaagggcccaggggactggaggcaggatggtggcttt

SEQ ID NO: 591417 - DNA, 120 bp, Artificial Sequence
  ENSG00000173227_34 (sequence is synthesized)
ccctacctgacacagccatggcccagccccaaggccaggctgtctaccctatggccacagcaggaggtcagcccagggccaggagacacatggctggacaaggctttgcagcctgggaga

SEQ ID NO: 591418 - DNA, 120 bp, Artificial Sequence
  ENSG00000173227_35 (sequence is synthesized)
ccccgactttctctaacccagtggctgtgcggtgcaggccactgactccccccctgccctctcccctctctccctccccctaactgcatgacatgttaactgtgtgcccaggacagccgt

SEQ ID NO: 591419 - DNA, 120 bp, Artificial Sequence
  ENSG00000173227_36 (sequence is synthesized)
ggtggggaccgggtatgccaactggaatgattctagaaccaaaataaagttggggcaggaagagggggcttccagggagccctgctcggccctgaatcaccttcgtctcttctctaggaa

SEQ ID NO: 591420 - DNA, 120 bp, Artificial Sequence
  ENSG00000173227_37 (sequence is synthesized)
atgtaaaaaatggagtcaccacgaccagattaggccacggtgaggactgagatgatgttgtaaggcaccagcacagagctgacctacagctcaatcgtggtgggagggagtaattatcca

SEQ ID NO: 591421 - DNA, 120 bp, Artificial Sequence
  ENSG00000173227_38 (sequence is synthesized)
ttcagaaaaggggaaactttccgctgcgcctcctgtcgctgttttccttggctcccggaggtgcgcagtatcgggtccgtttttaagtcacagtcactgcagcagacatcatggctgtgg

SEQ ID NO: 591422 - DNA, 120 bp, Artificial Sequence
  ENSG00000173227_39 (sequence is synthesized)
atctccggctcggaccccaggagcagagacagcgctcgagcttgtcactttaaattcaagagggagcgggcgggcaagcgggcgagcgcgagggagcgcgcggcgggctcctgggagcgt

SEQ ID NO: 591423 - DNA, 80 bp, Artificial Sequence
  ENSG00000173227_40 (sequence is synthesized)
ccgcgctcctcggaggcgggagcccggcgacactgcaggggtggcgttgccgccggcggccgggctaggcgcaggtgcgt

SEQ ID NO: 591424 - DNA, 120 bp, Artificial Sequence
  ENSG00000173227_41 (sequence is synthesized)
cgggctaggcgcaggtgcgtgcgcgctgcgggaggcgggccggcagctggagcccagccggagcggcggcccctccgcggagcccggtcacagtcactgcagcagacatcatggctgtgg

SEQ ID NO: 591425 - DNA, 120 bp, Artificial Sequence
  ENSG00000173227_42 (sequence is synthesized)
ctcactctcttttcccttccagtcacagtcactgcagcagacatcatggctgtggatgtggcagaataccatctgagcgggtccccggggagaccctcatcctgctgcaccctggggatg

SEQ ID NO: 591426 - DNA, 120 bp, Artificial Sequence
  ENSG00000173227_43 (sequence is synthesized)
tttaatgggaaactctccccgcacacacacacactttttttttgaggcacagtctcactatgttgtccagactggttttgaactcctgggctcaagagatcctcccacaccagcctcccc

SEQ ID NO: 591427 - DNA, 120 bp, Artificial Sequence
  ENSG00000173227_44 (sequence is synthesized)
agtagctgggactacaggcatgacccactgcacccagctaaatttttcaattttaaaatgttggcaactcacttaaatgtaagacaaataaacacatctgtaggctggcagtgctgccca

SEQ ID NO: 591428 - DNA, 120 bp, Artificial Sequence
  ENSG00000173227_45 (sequence is synthesized)
cactgcccagactaggggttagggggtctgtatgggccatcaccaggctgctaaccacagcaaccaatatgtgccaagcctgactacacgtaccttctcattccaccctcctggcagcct

SEQ ID NO: 591429 - DNA, 120 bp, Artificial Sequence
  ENSG00000173227_46 (sequence is synthesized)
cacatctgctttacaggtggggaactgaggctctaagagactaagaaaattacccaaggccactgcagctagccaggggcaggtatgggagtcagagctgggtgcagctgactacaaacc

SEQ ID NO: 591430 - DNA, 120 bp, Artificial Sequence
  ENSG00000173227_47 (sequence is synthesized)
ctgtgctcaggatgacaccctctaggagcctcgacctctctcccagttctcttctccctccactcaggcaaatgagctctgccttcacagggcaccaggctggaacatatgtctggaggc

SEQ ID NO: 591431 - DNA, 87 bp, Artificial Sequence
  ENSG00000173227_48 (sequence is synthesized)
tctgtctggggtgtgcctagcagtcattcacaccctcactgaaatctcagctccctgggaaaggatgtcgtgttaaagggagaggaa

SEQ ID NO: 591432 - DNA, 120 bp, Artificial Sequence
  ENSG00000173227_49 (sequence is synthesized)
cagctccctgggaaaggatgtcgtgttaaagggagaggaaagaacagacagcgtgggagtctggggtctgagctgggccagccatggaggtgatggggcccccgacagccagaggccaga

SEQ ID NO: 591433 - DNA, 120 bp, Artificial Sequence
  ENSG00000173227_50 (sequence is synthesized)
tgcagcttgaggctttgtcccgtaccacgcctgttgtgctgtggggtgtactttgccatgcataccttgctcgcgtgctgcgggcattggctgtcccagcttggccccactcttgcaaag

SEQ ID NO: 591434 - DNA, 120 bp, Artificial Sequence
  ENSG00000173227_51 (sequence is synthesized)
tcagcttgtgccaggtaagcaggaaaaagccgatggcttatctgattcccggcaaggcagaagcaggctgggaggtgcgtgtgtgtacattagcatgtgtttcagcgtatccagaccagc

SEQ ID NO: 591435 - DNA, 120 bp, Artificial Sequence
  ENSG00000173227_52 (sequence is synthesized)
ttccgccaggagctaggaccaccttgggcaggtacatggtgacccatttgacctgcagattcttaggaaactttttggaaaccatatgcccacttgcagtgagacacagtggttaggagc

SEQ ID NO: 591436 - DNA, 120 bp, Artificial Sequence
  ENSG00000173227_53 (sequence is synthesized)
atggagccagttggcctgggttgaacagtttattagctgtgtggcctggggcaaattacgccctgggactctcacccgcaaaccagagataataatagtacctacctcatggggctgtta

SEQ ID NO: 591437 - DNA, 120 bp, Artificial Sequence
  ENSG00000173227_54 (sequence is synthesized)
ggcaaattaaatgaggtcagataaatgcaaagtgcttagaatggcgcttgatgtgtaagaagggctcgacaaggttctctattactatcattatctccagcccaggcccaggaatgagct

SEQ ID NO: 591438 - DNA, 120 bp, Artificial Sequence
  ENSG00000173227_55 (sequence is synthesized)
tccactctagtcaggatgggtgaagcccttcctggcttagcaccacccttccatcaccatgacaacgcacatctccttgtgggagtgggggcagcatcaggagaactggaagccaggagc

SEQ ID NO: 591439 - DNA, 120 bp, Artificial Sequence
  ENSG00000173227_56 (sequence is synthesized)
tggctgtgcaccttatctgacctgcttctagaggctcctgggcacctccaggacttaagggggtagactaggacttatggcaccccaaatgtgctggataaccctgactggagcatggca

SEQ ID NO: 591440 - DNA, 120 bp, Artificial Sequence
  ENSG00000173227_57 (sequence is synthesized)
ccgaagcttcttgactccaaagccacagactggggagaaccccggaattcctgaaaatgtggagggccttagctttaccctctgattcgaccccagtcccaaagggaacctacaggatgc

SEQ ID NO: 591441 - DNA, 120 bp, Artificial Sequence
  ENSG00000173227_58 (sequence is synthesized)
tccgaggggttgggaattggtgggtcacactccccaaggactttttatactgcgtctgaatggtgtttgcatttttttgcaaattggttgctacctttaaaactcaggaaatggcacata

SEQ ID NO: 591442 - DNA, 120 bp, Artificial Sequence
  ENSG00000173227_59 (sequence is synthesized)
aaaaattcaggtatctggcttttctttaaagtgccagaagatcaagccacggtggttggcattcctgctggggcaaaaatgcagctgcccttgggccaggccatcactctgcagttctta

SEQ ID NO: 591443 - DNA, 120 bp, Artificial Sequence
  ENSG00000173227_60 (sequence is synthesized)
cctccccttccccttgccctaccaccctgcaccaggcctgcaggcttaccatgtgtaaccacctctctgaactacaagggaatccagaaattggggtgggcattatcctggccctcggtg

SEQ ID NO: 591444 - DNA, 120 bp, Artificial Sequence
  ENSG00000173227_61 (sequence is synthesized)
cccttgacctgagatcagtgcagcccatcccaaattcctttttccaggactcccacatacacccacttagaacacatctgtgagccagatttacttcttagcacactaataaaacaatga

SEQ ID NO: 591445 - DNA, 120 bp, Artificial Sequence
  ENSG00000173227_62 (sequence is synthesized)
gcagtcacctaggttcaggtaatgggttgtacgagctcccagacctttctagaacaacttaagcctcagtcattcctaaaagctgggggtggaggatggggtggggaagaaaccatgcca

SEQ ID NO: 591446 - DNA, 120 bp, Artificial Sequence
  ENSG00000173227_63 (sequence is synthesized)
agcagtgaaaggactgataatagaatattgcagacacgcagcctttccttcccaatcaaaatggaagcatttgaaggaaggctctggctcaagccaggggggccttgctctaatgagtca

SEQ ID NO: 591447 - DNA, 120 bp, Artificial Sequence
  ENSG00000173227_64 (sequence is synthesized)
cctactgcgtcgccgctggtcagcctgatgttgttaggatggaaatgagctggggttgccagatttggcaaatacaaaaacaggacacccaggagcattgatgttttggatgaacaatgg

SEQ ID NO: 591448 - DNA, 120 bp, Artificial Sequence
  ENSG00000173227_65 (sequence is synthesized)
attgatgttttggatgaacaatggaaaagattttggcgtaaatatgtcctgtggaatatttgggacacacatattaaaaacgtatttgaaatttggccaggcgctgtggctcacacctgt

SEQ ID NO: 591449 - DNA, 61 bp, Artificial Sequence
  ENSG00000173227_66 (sequence is synthesized)
ttgggagaccaaggctggtggatcacctgaggccaggagttcgatatgggtggcacatgcc

SEQ ID NO: 591450 - DNA, 120 bp, Artificial Sequence
  ENSG00000173227_67 (sequence is synthesized)
ccactgcactctagcctgggcaacaaagagagactccatctgaaaaaacaaaacaaaacaaaacaaaatctgaaattcacatgccactgggcatcctgtgttttatctggcaatcctgag

SEQ ID NO: 591451 - DNA, 120 bp, Artificial Sequence
  ENSG00000173227_68 (sequence is synthesized)
atgccactgggcatcctgtgttttatctggcaatcctgagaagagtcttagaatgcttgaaaagagctttaaacatcatttcttaaaatgccaagcctccctttggtggcactcccctta

SEQ ID NO: 591452 - DNA, 120 bp, Artificial Sequence
  ENSG00000173227_69 (sequence is synthesized)
ccttctgtggagactgtcaagtagccaagggaaaataagcccaggaaggtcaaggttagattcatggggcgttaaactcagagaccacccagtccagaggcagaggttatagtgagctga

SEQ ID NO: 591453 - DNA, 120 bp, Artificial Sequence
  ENSG00000173227_70 (sequence is synthesized)
gggcaacagagtgagactccgtctcatcagaaaaaaaaagaggccacccagtccagggccatggctcccaccttgtcaccctttgcctcagcagggagatgggagctggctgggagatgc

SEQ ID NO: 591454 - DNA, 120 bp, Artificial Sequence
  ENSG00000173227_71 (sequence is synthesized)
cagcagggagatgggagctggctgggagatgcctcgagactccagacatactcctgcagccctccccatggacagcggatggggtcagagaagaaacataccagccgtcttttctccctt

SEQ ID NO: 591455 - DNA, 120 bp, Artificial Sequence
  ENSG00000173227_72 (sequence is synthesized)
tgttcctctcctcattcacagatgggagaagtgaggcttagagagtaacggggtcaggatgtgcactcaggtctcctgactcccagccccgtgctccccatcactctagcccctacccta

SEQ ID NO: 591456 - DNA, 120 bp, Artificial Sequence
  ENSG00000173227_73 (sequence is synthesized)
acgcagcccctggggagcccagggctgatctgaagggtgtgcccgggaatcacctttcccatcactttttcccaaaagtgagccagggagccgcacttttcaccctcaggctcacaggtc

SEQ ID NO: 591457 - DNA, 120 bp, Artificial Sequence
  ENSG00000173227_74 (sequence is synthesized)
ttgcccccctgcccccaccctgccccctacccgtatggccttgggcaagtggtgaaaccggaacttctacttacttatctgtaaaatgcaaaagatgaggcttgcctcagggctgttggg

SEQ ID NO: 591458 - DNA, 120 bp, Artificial Sequence
  ENSG00000173227_75 (sequence is synthesized)
aagatttagagagctgatggttgtgcagcgcccagcatggtgcaaacgccactcttccagtggcagcgctttgcacacgctgttcccctgtcctggagtccttccctgcctctgccactg

SEQ ID NO: 591459 - DNA, 120 bp, Artificial Sequence
  ENSG00000173227_76 (sequence is synthesized)
cctgcctgagtcctggcacctggtggtggggttataggtgcagatctggacccagtctgtctggaggcagatctctcctccgtccctcagcttcctcatctgtaaaatggggaaaacaat

SEQ ID NO: 591460 - DNA, 120 bp, Artificial Sequence
  ENSG00000173227_77 (sequence is synthesized)
agaaccaacctcacaggattgccttgactccatgggttaatatacgtgacgtgcttagaacagggcctggcaaatcataaatagtaagtgcttcataaggggagctattcctcctcctcc

SEQ ID NO: 591461 - DNA, 120 bp, Artificial Sequence
  ENSG00000173227_78 (sequence is synthesized)
tcatcccactcgtttctggtcttcgcctagaccccacttccaatatcaccccaagactggtattccataaaatcaataaatgaatgcgaattgtcatttcatgtcaccttcctggggctt

SEQ ID NO: 591462 - DNA, 120 bp, Artificial Sequence
  ENSG00000173227_79 (sequence is synthesized)
ttccttctgtgcccccagccctgcccccttttctgccaccccgggcatgggctccacccttcagctcccaaagagcctcaggcacaggggagcctgaacctgctttgccacctggctgtg

SEQ ID NO: 591463 - DNA, 120 bp, Artificial Sequence
  ENSG00000173227_80 (sequence is synthesized)
cccacagcctgcttagagaccttgggcctctggtcctgccctctagccaacccccggctactacccagccctgctgtgaccctgttcccaggactcccagaatacaccaagccttagcag

SEQ ID NO: 591464 - DNA, 120 bp, Artificial Sequence
  ENSG00000173227_81 (sequence is synthesized)
ggcggggcccgggagcctccatggatctctttgtcatgggcatacgtagcccacaggtgacattctgtcaacagcggcaggaggaaggagggtttcttcacagcccttccaccgtcgtta

SEQ ID NO: 591465 - DNA, 120 bp, Artificial Sequence
  ENSG00000173227_82 (sequence is synthesized)
cccattccttctgtttttccctggtctgcccagcccgtgactatgtgctgcgtgacttttgcgcacgtcacacgattgcgtgattagaccatgttggggattcatttttttcctctctta

SEQ ID NO: 591466 - DNA, 120 bp, Artificial Sequence
  ENSG00000173227_83 (sequence is synthesized)
acaatgccagaaatgtgtctctgcattgccacagtgccatcctaatgacctcaattgtcattctcgaaggccagtgacatttcctcccaagacagagccaccagccctcactggccccct

SEQ ID NO: 591467 - DNA, 120 bp, Artificial Sequence
  ENSG00000173227_84 (sequence is synthesized)
cggtgggaccttcaggctgtctccagatttctgctgttataaatacagcctcgatgactcatcccagacacaaaacctgttgggattttccctttagaataaattcaccagagtgggacc

SEQ ID NO: 591468 - DNA, 120 bp, Artificial Sequence
  ENSG00000173227_85 (sequence is synthesized)
gctggatgggggatgttcttgtcatccgcattttccaaacggagtatgaagcccagaggtgctgggtgacttgcctggaagccaaggtaccggtgcccggctctgccgtttctcaccgct

SEQ ID NO: 591469 - DNA, 120 bp, Artificial Sequence
  ENSG00000173227_86 (sequence is synthesized)
ctctgccgtttctcaccgctggccttgagtggagaaacagatgtgctcattacccttccttggtctcagttttcctcttttagaaagtagggccttggccaggggcggtggctcacgcct

SEQ ID NO: 591470 - DNA, 120 bp, Artificial Sequence
  ENSG00000173230_0 (sequence is synthesized)
aactgctagtggctgagtccctggcggggcgcggcggtggaaggtgtcgcgtacgggcttcccgagctgacgtggcttgaattgggaggggggcagctggagcctcaggcggcagcgctt

SEQ ID NO: 591471 - DNA, 120 bp, Artificial Sequence
  ENSG00000173230_1 (sequence is synthesized)
ctagaaatgctgagccgattatcaggattagcaaatgttgttttgcatgaattatcaggagatgatgacactgatcagaatatgagggctcccctagaccctgaattacaccaagaatct

SEQ ID NO: 591472 - DNA, 120 bp, Artificial Sequence
  ENSG00000173230_2 (sequence is synthesized)
gacatggaatttaataatactacacaagaagatgttcaggagcgcctggcttatgcagagcaattggtggtggagctaaaagatattattagacagaaggatgttcaactgcagcagaaa

SEQ ID NO: 591473 - DNA, 120 bp, Artificial Sequence
  ENSG00000173230_3 (sequence is synthesized)
gatgaagctctacaggaagagagaaaagctgctgataacaaaattaaaaaactaaaacttcatgcgaaggccaaattaacttctttgaataaatacatagaagaaatgaaagcacaagga

SEQ ID NO: 591474 - DNA, 120 bp, Artificial Sequence
  ENSG00000173230_4 (sequence is synthesized)
gggactgttctgcctacagaacctcagtcagaggagcaactttccaagcatgacaagagttctacagaggaagagatggaaatagaaaagataaaacataagctccaggagaaggaggaa

SEQ ID NO: 591475 - DNA, 120 bp, Artificial Sequence
  ENSG00000173230_5 (sequence is synthesized)
ctaatcagcactttgcaagcccagcttactcaggcacaggcagaacaacctgcacagagttctacagagatggaagaatttgtaatgatgaagcaacagctccaggagaaggaagaattc

SEQ ID NO: 591476 - DNA, 120 bp, Artificial Sequence
  ENSG00000173230_6 (sequence is synthesized)
attagcactttacaagcccagctcagccagacacaggcagagcaagctgcacagcaggtggtccgagagaaagatgcccgctttgaaacacaagttcgtcttcatgaagatgagcttctt

SEQ ID NO: 591477 - DNA, 120 bp, Artificial Sequence
  ENSG00000173230_7 (sequence is synthesized)
cagttagtaacccaggcagatgtggaaacagagatgcaacagaaattgagggtgctgcaaaggaagcttgaggaacacgaagaatccttggtgggccgtgctcaggtcgttgacttgctg

SEQ ID NO: 591478 - DNA, 120 bp, Artificial Sequence
  ENSG00000173230_8 (sequence is synthesized)
caacaggagctgactgctgctgagcagagaaaccagattctctctcagcagttacagcagatggaagctgagcataatactttgaggaacactgtggaaacagaaagagaggagtccaag

SEQ ID NO: 591479 - DNA, 120 bp, Artificial Sequence
  ENSG00000173230_9 (sequence is synthesized)
attctactggaaaagatggaacttgaagtggcagagagaaaattatccttccataatctgcaggaagaaatgcatcatcttttagaacagtttgagcaagcaggccaagcccaggctgaa

SEQ ID NO: 591480 - DNA, 120 bp, Artificial Sequence
  ENSG00000173230_10 (sequence is synthesized)
ctagagtctcggtatagtgctttggagcagaagcacaaagcagaaatggaagagaagacctctcatattttgagtcttcaaaagactggacaagagctgcagtctgcctgtgatgctcta

SEQ ID NO: 591481 - DNA, 120 bp, Artificial Sequence
  ENSG00000173230_11 (sequence is synthesized)
aaggatcaaaattcaaagcttctccaagataagaatgagcaagcagttcagtcagcccagaccattcagcaactggaagatcagctccagcaaaaatccaaagaaattagccaatttcta

SEQ ID NO: 591482 - DNA, 120 bp, Artificial Sequence
  ENSG00000173230_12 (sequence is synthesized)
aatagactgcccttgcaacaacatgaaacagcatctcagacttctttcccagatgtttataatgagggcacacaggcagtcactgaggagaatattgcttctttgcagaagagagtggta

SEQ ID NO: 591483 - DNA, 120 bp, Artificial Sequence
  ENSG00000173230_13 (sequence is synthesized)
gaactagagaatgaaaagggagccttgctccttagttctatagagctggaggagctgaaagctgagaatgaaaaactgtcttctcagattactctcctagaggctcagaatagaactggg

SEQ ID NO: 591484 - DNA, 120 bp, Artificial Sequence
  ENSG00000173230_14 (sequence is synthesized)
gaggcagacagagaagtcagtgagatcagcattgttgatattgccaacaagaggagctcttctgctgaggaaagtggacaagatgttctagaaaacacattttctcagaaacataaagaa

SEQ ID NO: 591485 - DNA, 120 bp, Artificial Sequence
  ENSG00000173230_15 (sequence is synthesized)
ttatcagttttattgttggaaatgaaagaagctcaagaggaaattgcatttcttaaattacagctccagggaaaaagggctgaggaagcagatcatgaggtccttgaccagaaagaaatg

SEQ ID NO: 591486 - DNA, 120 bp, Artificial Sequence
  ENSG00000173230_16 (sequence is synthesized)
aaacagatggagggtgagggaatagctccaattaaaatgaaagtatttcttgaagatacagggcaagattttcccttaatgccaaatgaagagagcagtcttccagcagttgaaaaagaa

SEQ ID NO: 591487 - DNA, 120 bp, Artificial Sequence
  ENSG00000173230_17 (sequence is synthesized)
caggcgagcactgaacatcaaagtagaacatctgaggaaatatctttaaatgatgctggagtagaattgaaatcaacaaagcaggatggtgataaatccctttctgctgtaccagatatt

SEQ ID NO: 591488 - DNA, 120 bp, Artificial Sequence
  ENSG00000173230_18 (sequence is synthesized)
ggtcagtgtcatcaggatgagttggaaaggttaaaaagtcaaattttggagctcgagctaaactttcataaagcacaagaaatctatgagaaaaatttagatgagaaagctaaggaaatt

SEQ ID NO: 591489 - DNA, 120 bp, Artificial Sequence
  ENSG00000173230_19 (sequence is synthesized)
agcaacctaaaccagttgattgaggagtttaagaaaaatgctgacaacaacagcagtgcattcactgctttgtctgaagaaagagaccagcttctctctcaggtgaaggaacttagcatg

SEQ ID NO: 591490 - DNA, 120 bp, Artificial Sequence
  ENSG00000173230_20 (sequence is synthesized)
gtaacagaattgagggctcaggtaaagcaactggaaatgaaccttgcagaagcagaaaggcaaagaagacttgattatgaaagccaaactgcccatgacaacctgctcactgaacagatc

SEQ ID NO: 591491 - DNA, 120 bp, Artificial Sequence
  ENSG00000173230_21 (sequence is synthesized)
catagtctcagcatagaagccaaatctaaagatgtgaaaattgaagttttacagaatgaactggatgatgtgcagcttcagttttctgagcagagtaccctgataagaagcctgcaaagc

SEQ ID NO: 591492 - DNA, 120 bp, Artificial Sequence
  ENSG00000173230_22 (sequence is synthesized)
cagctgcaaaataaggaaagtgaagtgcttgagggggcagaacgtgtaaggcatatctcaagtaaagtggaagaactgtcccaggctctttcacagaaggaacttgaaataacaaaaatg

SEQ ID NO: 591493 - DNA, 120 bp, Artificial Sequence
  ENSG00000173230_23 (sequence is synthesized)
gatcagctcttactagagaaaaagagagatgtggaaaccctccaacaaaccatcgaggagaaggatcaacaagtgacagaaatcagctttagtatgactgagaaaatggttcagcttaat

SEQ ID NO: 591494 - DNA, 120 bp, Artificial Sequence
  ENSG00000173230_24 (sequence is synthesized)
gaagagaagttttctcttggggttgaaattaagactcttaaagaacagctaaatttattatccagagctgaggaagcaaaaaaagagcaggtggaagaagataatgaagtttcttctggc

SEQ ID NO: 591495 - DNA, 120 bp, Artificial Sequence
  ENSG00000173230_25 (sequence is synthesized)
cttaaacaaaattatgatgagatgagcccagcaggacaaataagtaaggaagaacttcagcatgaatttgaccttctgaagaaagaaaatgagcagagaaagagaaagctccaggcagct

SEQ ID NO: 591496 - DNA, 120 bp, Artificial Sequence
  ENSG00000173230_26 (sequence is synthesized)
cttattaacagaaaggagcttctgcaaagagtcagtagattggaagaagaattagccaacttgaaagatgaatctaagaaagaaatcccactcagtgagactgagaggggagaagtggaa

SEQ ID NO: 591497 - DNA, 120 bp, Artificial Sequence
  ENSG00000173230_27 (sequence is synthesized)
gaagataaagaaaacaaagaatactcagaaaaatgtgtgacttctaagtgccaagaaatagaaatttatttaaaacagacaatatctgagaaagaagtggaactacagcatataaggaag

SEQ ID NO: 591498 - DNA, 120 bp, Artificial Sequence
  ENSG00000173230_28 (sequence is synthesized)
gatttggaagaaaagctggcagctgaagagcaattccaggctctggtcaaacagatgaatcagaccttgcaagataaaacaaaccaaatagatttgctccaagcagaaatcagtgaaaac

SEQ ID NO: 591499 - DNA, 120 bp, Artificial Sequence
  ENSG00000173230_29 (sequence is synthesized)
caagcaattatccagaagttaatcacaagtaacacggatgcaagtgatggggactccgtagcacttgtaaaggaaacagtggtgataagtccaccttgtacaggtagtagtgaacactgg

SEQ ID NO: 591500 - DNA, 120 bp, Artificial Sequence
  ENSG00000173230_30 (sequence is synthesized)
aaaccagaactagaagaaaagatactggcccttgaaaaagaaaaggagcaacttcaaaagaagctacaggaagccttaacctcccgcaaggcaattcttaaaaaggcacaggagaaagaa

SEQ ID NO: 591501 - DNA, 120 bp, Artificial Sequence
  ENSG00000173230_31 (sequence is synthesized)
agacatctcagggaggagctaaagcaacagaaagatgactataatcgcttgcaagaacagtttgatgagcaaagcaaggaaaatgagaatattggagaccagctaaggcaactccagatt

SEQ ID NO: 591502 - DNA, 120 bp, Artificial Sequence
  ENSG00000173230_32 (sequence is synthesized)
caagtaagggaatccatagacggaaaactcccaagcacagaccagcaggaatcgtgttcttccactccaggtttagaagaacctttattcaaagccacagaacagcatcacactcaacct

SEQ ID NO: 591503 - DNA, 120 bp, Artificial Sequence
  ENSG00000173230_33 (sequence is synthesized)
gttttagagtccaacttgtgcccagactggccttctcattctgaagatgcgagtgctctgcagggcggaacttctgttgcccagattaaggcccagctgaaggaaatagaggctgagaaa

SEQ ID NO: 591504 - DNA, 120 bp, Artificial Sequence
  ENSG00000173230_34 (sequence is synthesized)
gtagagttagaattgaaagttagttctacaacaagtgagcttactaaaaaatcagaagaggtatttcagttacaagagcagataaataaacagggtttagaaatcgagagtctaaagaca

SEQ ID NO: 591505 - DNA, 120 bp, Artificial Sequence
  ENSG00000173230_35 (sequence is synthesized)
gtatcccatgaagctgaagtccatgccgaaagcctgcagcagaaattggaaagcagccaactacaaattgctggcctagaacatctaagagaattgcaacctaaactggatgaactgcaa

SEQ ID NO: 591506 - DNA, 120 bp, Artificial Sequence
  ENSG00000173230_36 (sequence is synthesized)
aaactcataagcaaaaaggaagaagacgttagctacctttctggacaacttagtgagaaagaagcagctctcactaaaatacagacagagataatagaacaagaagatttaattaaggct

SEQ ID NO: 591507 - DNA, 120 bp, Artificial Sequence
  ENSG00000173230_37 (sequence is synthesized)
ctgcatacacagctagaaatgcaagccaaagagcatgatgagaggataaagcagctacaggtggaactttgtgaaatgaagcaaaaaccagaagagattggagaagaaagtagagcaaag

SEQ ID NO: 591508 - DNA, 120 bp, Artificial Sequence
  ENSG00000173230_38 (sequence is synthesized)
caacaaatacaaaggaaactgcaagctgcccttatttcccgaaaagaagcactaaaagaaaacaaaagtctccaagaggaattgtctttggccagaggtaccattgaacgtctcaccaag

SEQ ID NO: 591509 - DNA, 120 bp, Artificial Sequence
  ENSG00000173230_39 (sequence is synthesized)
tctctggcagatgtggaaagccaagtttctgctcaaaataaagaaaaagatacggtcttaggaaggttagctcttcttcaagaagaaagagacaaactcattacagaaatggacaggtct

SEQ ID NO: 591510 - DNA, 120 bp, Artificial Sequence
  ENSG00000173230_40 (sequence is synthesized)
ttattggaaaatcagagtctcagcagctcctgtgaaagtctaaaactagctctagagggtcttactgaagacaaggaaaagttagtgaaggaaattgaatctttgaaatcttctaagatt

SEQ ID NO: 591511 - DNA, 120 bp, Artificial Sequence
  ENSG00000173230_41 (sequence is synthesized)
gcagaaagtactgagtggcaagagaaacacaaggagctacaaaaagagtatgaaattcttctgcagtcctatgagaatgttagtaatgaagcagaaaggattcagcatgtggtggaagct

SEQ ID NO: 591512 - DNA, 120 bp, Artificial Sequence
  ENSG00000173230_42 (sequence is synthesized)
gtgaggcaagagaaacaagaactgtatggcaagttaagaagcacagaggcaaacaagaaggagacagaaaagcagttgcaggaagctgagcaagaaatggaggaaatgaaagaaaagatg

SEQ ID NO: 591513 - DNA, 120 bp, Artificial Sequence
  ENSG00000173230_43 (sequence is synthesized)
agaaagtttgctaaatctaaacagcagaaaatcctagagctggaagaagagaatgaccggcttagggcagaggtgcaccctgcaggagatacagctaaagagtgtatggaaacacttctt

SEQ ID NO: 591514 - DNA, 120 bp, Artificial Sequence
  ENSG00000173230_44 (sequence is synthesized)
tcttccaatgccagcatgaaggaagaacttgaaagggtcaaaatggagtatgaaaccctttctaagaagtttcagtctttaatgtctgagaaagactctctaagtgaagaggttcaagat

SEQ ID NO: 591515 - DNA, 120 bp, Artificial Sequence
  ENSG00000173230_45 (sequence is synthesized)
ttaaagcatcagatagaaggtaatgtatctaaacaagctaacctagaggccaccgagaaacatgataaccaaacgaatgtcactgaagagggaacacagtctataccaggtgagactgaa

SEQ ID NO: 591516 - DNA, 120 bp, Artificial Sequence
  ENSG00000173230_46 (sequence is synthesized)
agacctacatgttcagaatcggttccatcagcgaagagtgccaaccctgctgtaagtaaggatttcagctcacatgatgaaattaataactacctacagcagattgatcagctcaaagaa

SEQ ID NO: 591517 - DNA, 120 bp, Artificial Sequence
  ENSG00000173230_47 (sequence is synthesized)
agaattgctggattagaggaggagaagcagaaaaacaaggaatttagccagactttagaaaatgagaaaaataccttactgagtcagatatcaacaaaggatggtgaactaaaaatgctt

SEQ ID NO: 591518 - DNA, 120 bp, Artificial Sequence
  ENSG00000173230_48 (sequence is synthesized)
caggaggaagtaaccaaaatgaacctgttaaatcagcaaatccaagaagaactctccagagttaccaaactaaaggagacagcagaagaagagaaagatgatttggaagagaggcttatg

SEQ ID NO: 591519 - DNA, 120 bp, Artificial Sequence
  ENSG00000173230_49 (sequence is synthesized)
aatcaattagcagaacttaatggaagcattgggaattactgtcaggatgttacagatgcccaaataaaaaatgagctattggaatctgaaatgaagaaccttaaaaagtgtgtgagtgaa

SEQ ID NO: 591520 - DNA, 120 bp, Artificial Sequence
  ENSG00000173230_50 (sequence is synthesized)
ttggaagaagaaaagcagcagttagtcaaggaaaaaactaaggtggaatcagaaatacgaaaggaatatttggagaaaatacaaggtgctcagaaagaacccggaaataaaagccatgca

SEQ ID NO: 591521 - DNA, 120 bp, Artificial Sequence
  ENSG00000173230_51 (sequence is synthesized)
aaggaacttcaggaactgttaaaagaaaaacaacaagaagtaaagcagctacagaaggactgcatcaggtatcaagagaaaattagtgctctggagagaactgttaaagctctagaattt

SEQ ID NO: 591522 - DNA, 120 bp, Artificial Sequence
  ENSG00000173230_52 (sequence is synthesized)
gttcaaactgaatctcaaaaagatttggaaataaccaaagaaaatctggctcaagcagttgaacaccgcaaaaaggcacaagcagaattagctagcttcaaagtcctgctagatgacact

SEQ ID NO: 591523 - DNA, 120 bp, Artificial Sequence
  ENSG00000173230_53 (sequence is synthesized)
caaagtgaagcagcaagggtcctagcagacaatctcaagttgaaaaaggaacttcagtcaaataaagaatcagttaaaagccagatgaaacaaaaggatgaagatcttgagcgaagactg

SEQ ID NO: 591524 - DNA, 120 bp, Artificial Sequence
  ENSG00000173230_54 (sequence is synthesized)
gaacaggcagaagagaagcacctgaaagagaagaagaatatgcaagagaaactggatgctttgcgcagagaaaaagtccacttggaagagacaattggagagattcaggttactttgaac

SEQ ID NO: 591525 - DNA, 120 bp, Artificial Sequence
  ENSG00000173230_55 (sequence is synthesized)
aagaaagacaaggaagttcagcaacttcaggaaaacttggacagtactgtgacccagcttgcagcctttactaagagcatgtcttccctccaggatgatcgtgacagggtgatagatgaa

SEQ ID NO: 591526 - DNA, 120 bp, Artificial Sequence
  ENSG00000173230_56 (sequence is synthesized)
gctaagaaatgggagaggaagtttagtgatgcgattcaaagcaaagaagaagaaattagactcaaagaagataattgcagtgttctaaaggatcaacttagacagatgtccatccatatg

SEQ ID NO: 591527 - DNA, 120 bp, Artificial Sequence
  ENSG00000173230_57 (sequence is synthesized)
gaagaattaaagattaacatttccaggcttgaacatgacaagcagatttgggagtccaaggcccagacagaggtccagcttcagcagaaggtctgtgatactctacagggggaaaacaaa

SEQ ID NO: 591528 - DNA, 120 bp, Artificial Sequence
  ENSG00000173230_58 (sequence is synthesized)
gaacttttgtcccagctagaagagacacgccacctataccacagttctcagaatgaattagctaagttggaatcagaacttaagagtctcaaagaccagttgactgatttaagtaactct

SEQ ID NO: 591529 - DNA, 120 bp, Artificial Sequence
  ENSG00000173230_59 (sequence is synthesized)
ttagaaaaatgtaaggaacaaaaaggaaacttggaagggatcataaggcagcaagaggctgatattcaaaattctaagttcagttatgaacaactggagactgatcttcaggcctccaga

SEQ ID NO: 591530 - DNA, 120 bp, Artificial Sequence
  ENSG00000173230_60 (sequence is synthesized)
gaactgaccagtaggctgcatgaagaaataaatatgaaagagcaaaagattataagcctgctttctggcaaggaagaggcaatccaagtagctattgctgaactgcgtcagcaacatgat

SEQ ID NO: 591531 - DNA, 120 bp, Artificial Sequence
  ENSG00000173230_61 (sequence is synthesized)
aaagaaattaaagagctggaaaacctgctgtcccaggaggaagaggagaatattgttttagaagaggagaacaaaaaggctgttgataaaaccaatcagcttatggaaacactgaaaacc

SEQ ID NO: 591532 - DNA, 120 bp, Artificial Sequence
  ENSG00000173230_62 (sequence is synthesized)
atcaaaaaggaaaacattcagcaaaaggcacagttggattcctttgttaaatccatgtcttctctccaaaatgatcgagaccgcatagtgggtgactatcaacagctggaagagcgacat

SEQ ID NO: 591533 - DNA, 120 bp, Artificial Sequence
  ENSG00000173230_63 (sequence is synthesized)
ctctctataatcttggaaaaagaccaactcatccaagaggctgctgcagagaataataagcttaaagaagaaatacgaggcttgagaagtcatatggatgatctcaattctgagaatgcc

SEQ ID NO: 591534 - DNA, 120 bp, Artificial Sequence
  ENSG00000173230_64 (sequence is synthesized)
aagctagatgcagaactgatccaatatagagaagacctgaaccaagtgataacaataaaggacagccaacaaaagcagcttcttgaagttcaacttcagcaaaataaggagctggaaaat

SEQ ID NO: 591535 - DNA, 120 bp, Artificial Sequence
  ENSG00000173230_65 (sequence is synthesized)
aaatatgctaaattagaagaaaagctgaaggaatctgaggaagcaaatgaggatctgcggaggtcctttaatgccctacaagaagagaaacaagatttatctaaagagattgagagtttg

SEQ ID NO: 591536 - DNA, 120 bp, Artificial Sequence
  ENSG00000173230_66 (sequence is synthesized)
aaagtatctatatcccagctaacaagacaagtaacagccttgcaagaagaaggtactttaggactctatcatgcccagttaaaagtaaaagaagaagaggtacacaggttaagtgctttg

SEQ ID NO: 591537 - DNA, 120 bp, Artificial Sequence
  ENSG00000173230_67 (sequence is synthesized)
ttttcctcctctcaaaagagaattgcagaactggaagaagaattggtttgtgttcaaaaggaagctgccaagaaggtaggtgaaattgaagataaactgaagaaagaattaaagcatctt

SEQ ID NO: 591538 - DNA, 120 bp, Artificial Sequence
  ENSG00000173230_68 (sequence is synthesized)
catcatgatgcagggataatgagaaatgaaactgaaacagcagaagagagagtggcagagctagcaagagatttggtggagatggaacagaaattactcatggtcaccaaagaaaataaa

SEQ ID NO: 591539 - DNA, 120 bp, Artificial Sequence
  ENSG00000173230_69 (sequence is synthesized)
ggtctcacagcacaaattcagtcttttggaaggtctatgagttccttgcaaaatagtagagatcatgccaatgaggaacttgatgaactgaaaaggaaatatgatgccagtctgaaggaa

SEQ ID NO: 591540 - DNA, 120 bp, Artificial Sequence
  ENSG00000173230_70 (sequence is synthesized)
ttggcacagttgaaagaacagggactcttaaacagagagagagatgctcttctttctgaaaccgccttttcaatgaactccactgaggagaatagcttgtctcaccttgagaaacttaac

SEQ ID NO: 591541 - DNA, 120 bp, Artificial Sequence
  ENSG00000173230_71 (sequence is synthesized)
caacagctcctatccaaagatgagcaattgcttcacttgtcctcacaactagaagattcttataaccaagtgcagtccttttccaaggctatggccagtctgcagaatgagagagatcac

SEQ ID NO: 591542 - DNA, 120 bp, Artificial Sequence
  ENSG00000173230_72 (sequence is synthesized)
ctgtggaatgagctggagaaatttcgaaagtcagaggaagggaagcagaggtctgcagctcagccttccaccagcccagctgaagtacagagtttaaaaaaagctatgtcttcactccaa

SEQ ID NO: 591543 - DNA, 120 bp, Artificial Sequence
  ENSG00000173230_73 (sequence is synthesized)
aatgacagagacagactactgaaggaattgaagaatctgcagcagcaatacttacagattaatcaagagatcactgagttacatccactgaaggctcaacttcaggagtatcaagataag

SEQ ID NO: 591544 - DNA, 120 bp, Artificial Sequence
  ENSG00000173230_74 (sequence is synthesized)
acaaaagcatttcagattatgcaagaagagctcaggcaggaaaacctctcctggcagcatgagctgcatcagctcaggatggagaagagttcctgggaaatacatgagaggagaatgaag

SEQ ID NO: 591545 - DNA, 120 bp, Artificial Sequence
  ENSG00000173230_75 (sequence is synthesized)
gaacagtaccttatggctatctcagataaagatcagcagctcagtcatctgcagaatcttataagggaattgaggtcttcttcctcccagactcagcctctcaaagtgcaataccaaaga

SEQ ID NO: 591546 - DNA, 120 bp, Artificial Sequence
  ENSG00000173230_76 (sequence is synthesized)
caggcatccccagagacatcagcttccccagatgggtcacaaaatctggtttatgagacagaacttctcaggacccagctcaatgacagcttaaaggaaattcaccaaaaggagttaaga

SEQ ID NO: 591547 - DNA, 120 bp, Artificial Sequence
  ENSG00000173230_77 (sequence is synthesized)
attcagcaactgaacagcaacttctctcagctactggaagagaaaaacaccctttccattcagctctgcgataccagtcagagtcttcgtgagaaccagcagcactatggtgacctttta

SEQ ID NO: 591548 - DNA, 120 bp, Artificial Sequence
  ENSG00000173230_78 (sequence is synthesized)
aatcactgtgcagtcttggagaagcaggttcaagagctgcaggcggggccactaaatatagatgttgctccaggagctccccaggaaaagaatggagttcacagaaagagtgaccctgag

SEQ ID NO: 591549 - DNA, 120 bp, Artificial Sequence
  ENSG00000173230_79 (sequence is synthesized)
gaactaagggaaccgcagcaaagcttttctgaagctcagcagcagctatgcaacaccagacaggaagtgaatgaattaaggaagctgctggaagaagaacgagaccaaagagtggctgct

SEQ ID NO: 591550 - DNA, 120 bp, Artificial Sequence
  ENSG00000173230_80 (sequence is synthesized)
gagaatgctctctctgtggccgaggagcagatcagacggttagagcacagtgaatgggactcttcccggactcctatcattggctcctgtggcactcaggagcaggcactgttaatagat

SEQ ID NO: 591551 - DNA, 120 bp, Artificial Sequence
  ENSG00000173230_81 (sequence is synthesized)
cttacaagcaacagttgtcgaaggacccggagtggcgttggatggaagcgagtcctgcgttcactctgtcattcacggacccgagtgccacttctagcagccatctactttctaatgatt

SEQ ID NO: 591552 - DNA, 120 bp, Artificial Sequence
  ENSG00000173230_82 (sequence is synthesized)
catgtcctgctcattctgtgttttacgggccatctatagacttagttgttactctttggaccactcccctcaaaacttggaattctctcacctctaacatcagaacatcaattccagtgg

SEQ ID NO: 591553 - DNA, 120 bp, Artificial Sequence
  ENSG00000173230_83 (sequence is synthesized)
aacagtcttcccatttacaggtcttctctccaactcttcacggaaagtgcctgcaaaaacagaggtggatacgaggacaggttggagctgcagggactggcgagtctgctttcttctact

SEQ ID NO: 591554 - DNA, 120 bp, Artificial Sequence
  ENSG00000173230_84 (sequence is synthesized)
gccctgagcctgaacgcttctgcttaatctgagaatcacatttggtttgttgagcctaatatttgttgagattttgcaggaccctgatcttttgtggtcctgtaaaagatactgaggaat

SEQ ID NO: 591555 - DNA, 120 bp, Artificial Sequence
  ENSG00000173230_85 (sequence is synthesized)
gtctttcagccaagccaagaggatggtttcaataaacctaataatctgaagttcagtatcattttgattgataactttctttgccttgtttgcctgtattttctcctgtttcagggggaa

SEQ ID NO: 591556 - DNA, 120 bp, Artificial Sequence
  ENSG00000173230_86 (sequence is synthesized)
ggtggctctgccataaacagagttcagggaaatgaacatgtcacctcataggacatctgatttaggtctcttgcagaatagggtggtgaaagctgaaggaactccctaggggttttagct

SEQ ID NO: 591557 - DNA, 120 bp, Artificial Sequence
  ENSG00000173230_87 (sequence is synthesized)
gttagatcacatgggaggacagcatcttcttccctgccaatttcagatataattggagggagaatttcaggtcttagactataaggatagaatccctttgcttttgcccttgatcacatg

SEQ ID NO: 591558 - DNA, 120 bp, Artificial Sequence
  ENSG00000173230_88 (sequence is synthesized)
tatactaaggtattaagtggcccaagtctttcctttcaccaaagggcagggagaagtgtctatggacagcagggttccaattcttgtcattccaggaatatctgaatattcctggaatgt

SEQ ID NO: 591559 - DNA, 120 bp, Artificial Sequence
  ENSG00000173230_89 (sequence is synthesized)
ggaccctgagacagtgctcaggggccactgggagccaatattaggcattgactctcagccaggagtctgactggtctaacaccacactgcaactcctgacctcttgaagtactaagctac

SEQ ID NO: 591560 - DNA, 120 bp, Artificial Sequence
  ENSG00000173230_90 (sequence is synthesized)
tttgctgttagtgacagttattacagtttctcagccccattgtctctgccctctgtggcaatggaaggagaatatagagaagacaaaattaaatatagatagacctgagaaggacagcca

SEQ ID NO: 591561 - DNA, 120 bp, Artificial Sequence
  ENSG00000173230_91 (sequence is synthesized)
ggatagaattccatttgtgcctattccctgcctcccctcccctcccccatcctaccagttggttattttctcattgcatacgtgatgtgttcactgcctagcctctccctaaagaagaga

SEQ ID NO: 591562 - DNA, 120 bp, Artificial Sequence
  ENSG00000173230_92 (sequence is synthesized)
gaagacaagtgggctgactgatctgctctaaatctactgtggtgattaaatcttggttacaacatcctgggaagtttcctgaacaactgtaaaataataaaattattttcagaatgaaga

SEQ ID NO: 591563 - DNA, 80 bp, Artificial Sequence
  ENSG00000173230_93 (sequence is synthesized)
tcttcgtgagaaccagcagcactatggtgaccttttaaatcactgtgcagtcttggagaagcaggttcaagagctgcagg

SEQ ID NO: 591564 - DNA, 120 bp, Artificial Sequence
  ENSG00000173230_94 (sequence is synthesized)
ggtctttagggcggagatcacagaatcattggagatattaatgcaaacggaggcctgtccaataatcctgctaatgctaatgggttactggaaagatgagaagagaggaaagatcccaac

SEQ ID NO: 591565 - DNA, 120 bp, Artificial Sequence
  ENSG00000173230_95 (sequence is synthesized)
tttgtaaaatgcttaacatttataaaatacttaatatattgtaatggctatgataatgattattattggatcagagttagattcttaagttaacaagaatatgaattgggcaaaacataa

SEQ ID NO: 591566 - DNA, 120 bp, Artificial Sequence
  ENSG00000173237_0 (sequence is synthesized)
agatgggtggaggcactgggccacctcagagggccagtgtcttgctgaggggccggagcagtcctgtgcctgcagcctccggagccatgggaacagggctgcgaagtcagtccttgcgag

SEQ ID NO: 591567 - DNA, 120 bp, Artificial Sequence
  ENSG00000173237_1 (sequence is synthesized)
agccccgaccctcctatggaaagctgcaggagccctgggggaggccccaggagggccaactccgcagggcgctaagcctcagacaggggcaagagaagtccaggtcccagggcctcgaga

SEQ ID NO: 591568 - DNA, 120 bp, Artificial Sequence
  ENSG00000173237_2 (sequence is synthesized)
gaggcacagaagggccagatgccactgcccaggagcgggtgccggggagcctgggggacacagagcagctgatccaagcccagcgaagaggcagccggtggtggctgaggcggtaccaac

SEQ ID NO: 591569 - DNA, 120 bp, Artificial Sequence
  ENSG00000173237_3 (sequence is synthesized)
aggtaagaagaaggtgggagagctttgtcgccatcttccccagcgtgactctgagtcagccggcctccccgtagcccacactgggcaccatcagctaaagatgctggaagccatcgtggc

SEQ ID NO: 591570 - DNA, 120 bp, Artificial Sequence
  ENSG00000173237_4 (sequence is synthesized)
gagtcgccacgtggctgccactcttagctctggcccttccactccagcactagctctctttgaagatcccagcagggtcaaaaagaagggggctcagctgtctgccctctgggcttgggt

SEQ ID NO: 591571 - DNA, 120 bp, Artificial Sequence
  ENSG00000173237_5 (sequence is synthesized)
aggggccttggactatgattctatgaaggtttagaagaagcctgcccggaatgggggctgtggacgctcctgccccacacgaccagctgtcaacttccaggacggagcttgatgaagcca

SEQ ID NO: 591572 - DNA, 120 bp, Artificial Sequence
  ENSG00000173237_6 (sequence is synthesized)
gacccatggccgagaggctcacggacgttgcctggtcactgggccatgacccaactgcccttcttgtcagttgctgatggtgggccagggcgcaggtctccctcccagatggtgagccct

SEQ ID NO: 591573 - DNA, 120 bp, Artificial Sequence
  ENSG00000173237_7 (sequence is synthesized)
ctggggcaaggaccacagctgggtggccctcctggctgagcactctgtgctgaaaacctttgaacctcacggtgtcctgatgaaggaagcagaggaagtcttcctccctgtgtgacagag

SEQ ID NO: 591574 - DNA, 120 bp, Artificial Sequence
  ENSG00000173237_8 (sequence is synthesized)
ggggaaactgaggcccagagtggggaagggatttcttggttttgacatctccgaccccaccccaccccatccagtgtccagcactggagtcgaacacagtaataaagatgctgagaaaaa

SEQ ID NO: 591575 - DNA, 120 bp, Artificial Sequence
  ENSG00000173239_0 (sequence is synthesized)
ctactttgtgttctttccctaccaactaagcttgcctaatttgcttcagaattggaagagggaattgcagcaggaaaatatgtgaagagtttttaaacccacaaattcttcttactttag

SEQ ID NO: 591576 - DNA, 120 bp, Artificial Sequence
  ENSG00000173239_1 (sequence is synthesized)
aattagttgttacattggcaggaaaaaataaatgcagatgttggaccatgttggaaaccttgtcaagacagtggattgtctcacacagaatggaaatgtggcttctgattctggtggcgt

SEQ ID NO: 591577 - DNA, 120 bp, Artificial Sequence
  ENSG00000173239_2 (sequence is synthesized)
atatgttccagagaaatgtgaattcagtacatatgccaactaaagctgtggacccagaagcattcatgaatattagtgaaatcatccaacatcaaggctatccctgtgaggaatatgaag

SEQ ID NO: 591578 - DNA, 120 bp, Artificial Sequence
  ENSG00000173239_3 (sequence is synthesized)
tcgcaactgaagatgggtatatcctttctgttaacaggattcctcgaggcctagtgcaacctaagaagacaggttccaggcctgtggtgttactgcagcatggcctagttggaggtgcta

SEQ ID NO: 591579 - DNA, 120 bp, Artificial Sequence
  ENSG00000173239_4 (sequence is synthesized)
gcaactggatttccaacctgcccaacaatagcctgggcttcattctggcagatgctggttttgacgtgtggatggggaacagcaggggaaacgcctggtctcgaaaacacaagacactct

SEQ ID NO: 591580 - DNA, 120 bp, Artificial Sequence
  ENSG00000173239_5 (sequence is synthesized)
ccatagaccaagatgagttctgggctttcagttatgatgagatggctaggtttgaccttcctgcagtgataaactttattttgcagaaaacgggccaggaaaagatctattatgtcggct

SEQ ID NO: 591581 - DNA, 120 bp, Artificial Sequence
  ENSG00000173239_6 (sequence is synthesized)
ccagagctggctcagaaaatcaaaatgtattttgctttagcacccatagccactgttaagcatgcaaaaagccccgggaccaaatttttgttgctgccagatatgatgatcaagggattg

SEQ ID NO: 591582 - DNA, 120 bp, Artificial Sequence
  ENSG00000173239_7 (sequence is synthesized)
tttggcaaaaaagaatttctgtatcagaccagatttctcagacaacttgttatttacctttgtggccaggtgattcttgatcagatttgtagtaatatcatgttacttctgggtggattc

SEQ ID NO: 591583 - DNA, 120 bp, Artificial Sequence
  ENSG00000173239_8 (sequence is synthesized)
aacaccaacaatatgaacatgagccgagcaagtgtatatgctgcccacactcttgctggaacatctgtgcaaaatattctacactggagccaggcagtgaattctggtgaactccgggca

SEQ ID NO: 591584 - DNA, 120 bp, Artificial Sequence
  ENSG00000173239_9 (sequence is synthesized)
tttgactgggggagtgagaccaaaaatctggaaaaatgcaatcagccaactcctgtaaggtacagagtcagagatatgacggtccctacagcaatgtggacaggaggtcaggactggctt

SEQ ID NO: 591585 - DNA, 120 bp, Artificial Sequence
  ENSG00000173239_10 (sequence is synthesized)
tcaaatccagaagacgtgaaaatgctgctctctgaggtgaccaacctcatctaccataagaatattcctgaatgggctcacgtggatttcatctggggtttggatgctcctcaccgtatg

SEQ ID NO: 591586 - DNA, 120 bp, Artificial Sequence
  ENSG00000173239_11 (sequence is synthesized)
tacaatgaaatcatccatctgatgcagcaggaggagaccaacctttcccagggacggtgtgaggccgtattgtgaagcatctgacactgacgatcttaggacaacctcctgagggatggg

SEQ ID NO: 591587 - DNA, 120 bp, Artificial Sequence
  ENSG00000173250_0 (sequence is synthesized)
tttcctatgcaaaagagcccaggcagaaagacaaacctaaataagaatctaacttctgtaagaagctgtgaagagtgatgctggcagctgcctttgcagactctaactccagcagcatga

SEQ ID NO: 591588 - DNA, 120 bp, Artificial Sequence
  ENSG00000173250_1 (sequence is synthesized)
atgtgtcctttgctcacctccactttgccggagggtacctgccctctgattcccaggactggagaaccatcatcccggctctcttggtggctgtctgcctggtgggcttcgtgggaaacc

SEQ ID NO: 591589 - DNA, 120 bp, Artificial Sequence
  ENSG00000173250_2 (sequence is synthesized)
tgtgtgtgattggcatcctccttcacaatgcttggaaaggaaagccatccatgatccactccctgattctgaatctcagcctggctgatctctccctcctgctgttttctgcacctatcc

SEQ ID NO: 591590 - DNA, 120 bp, Artificial Sequence
  ENSG00000173250_3 (sequence is synthesized)
gagctacggcgtactccaaaagtgtttgggatctaggctggtttgtctgcaagtcctctgactggtttatccacacatgcatggcagccaagagcctgacaatcgttgtggtggccaaag

SEQ ID NO: 591591 - DNA, 120 bp, Artificial Sequence
  ENSG00000173250_4 (sequence is synthesized)
tatgcttcatgtatgcaagtgacccagccaagcaagtgagtatccacaactacaccatctggtcagtgctggtggccatctggactgtggctagcctgttacccctgccggaatggttct

SEQ ID NO: 591592 - DNA, 120 bp, Artificial Sequence
  ENSG00000173250_5 (sequence is synthesized)
ttagcaccatcaggcatcatgaaggtgtggaaatgtgcctcgtggatgtaccagctgtggctgaagagtttatgtcgatgtttggtaagctctacccactcctggcatttggccttccat

SEQ ID NO: 591593 - DNA, 120 bp, Artificial Sequence
  ENSG00000173250_6 (sequence is synthesized)
tattttttgccagcttttatttctggagagcttatgaccaatgtaaaaaacgaggaactaagactcaaaatcttagaaaccagatacgctcaaagcaagtcacagtgatgctgctgagca

SEQ ID NO: 591594 - DNA, 120 bp, Artificial Sequence
  ENSG00000173250_7 (sequence is synthesized)
ttgccatcatctctgctctcttgtggctccccgaatgggtagcttggctgtgggtatggcatctgaaggctgcaggcccggccccaccacaaggtttcatagccctgtctcaagtcttga

SEQ ID NO: 591595 - DNA, 120 bp, Artificial Sequence
  ENSG00000173250_8 (sequence is synthesized)
tgttttccatctcttcagcaaatcctctcatttttcttgtgatgtcggaagagttcagggaaggcttgaaaggtgtatggaaatggatgataaccaaaaaacctccaactgtctcagagt

SEQ ID NO: 591596 - DNA, 120 bp, Artificial Sequence
  ENSG00000173250_9 (sequence is synthesized)
ctcaggaaacaccagctggcaactcagagggtcttcctgacaaggttccatctccagaatccccagcatccataccagaaaaagagaaacccagctctccctcctctggcaaagggaaaa

SEQ ID NO: 591597 - DNA, 120 bp, Artificial Sequence
  ENSG00000173250_10 (sequence is synthesized)
ctgagaaggcagagattcccatccttcctgacgtagagcagttttggcatgagagggacacagtcccttctgtacaggacaatgaccctatcccctgggaacatgaagatcaagagacag

SEQ ID NO: 591598 - DNA, 120 bp, Artificial Sequence
  ENSG00000173250_11 (sequence is synthesized)
gggaaggtgttaaatagatttaagtttcaaagcaaaacaaactgtgattattgtatttacttgtactgctgcttatcaatattgctgactttacaaactgatataattattaccattagg

SEQ ID NO: 591599 - DNA, 120 bp, Artificial Sequence
  ENSG00000173250_12 (sequence is synthesized)
ttagaacttggcttcccaaacaatttaagtgttgtgtaaagatgttgctgtcaaagtgattagacagcctggctattctgtcatttgttcacagtggttttactgggtaccccctaggac

SEQ ID NO: 591600 - DNA, 120 bp, Artificial Sequence
  ENSG00000173250_13 (sequence is synthesized)
cagccctgtagtggaccggctggagcctgcagtagaggttctgtcaaagctgagcccctttaccttcagtttcacccaggacctgctagtcctaattttacctactaaattgtatttcac

SEQ ID NO: 591601 - DNA, 120 bp, Artificial Sequence
  ENSG00000173250_14 (sequence is synthesized)
ataaccaaagctcaaaatctactttcacttgagatttttaacacattaatgataaattttaatgcgttcttcatttacttaataagtgttaatttacttgatgaaaagtccgtatcataa

SEQ ID NO: 591602 - DNA, 120 bp, Artificial Sequence
  ENSG00000173250_15 (sequence is synthesized)
tgttcatgactgaaggtcaaagaaaaagaaacagcaccttattccaattctggactcatttcaagccatggctggttctggccaagtttaaataaattcaaacttaaactaaagcctgct

SEQ ID NO: 591603 - DNA, 120 bp, Artificial Sequence
  ENSG00000173250_16 (sequence is synthesized)
tcagtgaactttttaaagctacctgaatgagtcttcagtttctaagtctaagaattgtagcagctttccaatgacattcagtagtctgatatgggggaaaaaatacttaaaaaaatgtcc

SEQ ID NO: 591604 - DNA, 120 bp, Artificial Sequence
  ENSG00000173250_17 (sequence is synthesized)
tctcttcacttccaaaatgtgggaaagttatttttctataagcagaaatgtgttcctcctaatatctcctttctcccaagataaaccatggttaatgatataggtatagattactcctca

SEQ ID NO: 591605 - DNA, 120 bp, Artificial Sequence
  ENSG00000173250_18 (sequence is synthesized)
aatacaaatagaagatggagatggtgatctttcttgttaatggtactaaacttacccttactcagaacattgaacttgaaccctactcaacttttaaaatactataggctaagttataaa

SEQ ID NO: 591606 - DNA, 120 bp, Artificial Sequence
  ENSG00000173250_19 (sequence is synthesized)
aataatctagcaacctgagaaagagattaatatcaaaaagagaaaattcaacaaaccaagacagaatttggttaagaatacaaaataaaaagcataagggcaatgcagaaagcagtaaaa

SEQ ID NO: 591607 - DNA, 120 bp, Artificial Sequence
  ENSG00000173250_20 (sequence is synthesized)
ctgtgtacccagacatacggtaaaatctgagtaacaggcaataaccattcattttatagcaaggtaaaacatacccaataaaacatgattatgatatatttctgccccttttaagtataa

SEQ ID NO: 591608 - DNA, 120 bp, Artificial Sequence
  ENSG00000173250_21 (sequence is synthesized)
tgacattcacccatgattcttgattactttgttatggaactcgggtattttcactgaaagtttccctcagaatagaaatgcctttagggcaaaccaagccatggagaatctgaaatataa

SEQ ID NO: 591609 - DNA, 120 bp, Artificial Sequence
  ENSG00000173250_22 (sequence is synthesized)
aggatatgttatggaaaaaaaaagattttgctttttgtctatgggtttccggattctttgctttttcataagtggtcatagtttgctttttaacacaggaggtagggctgtattcttttt

SEQ ID NO: 591610 - DNA, 120 bp, Artificial Sequence
  ENSG00000173250_23 (sequence is synthesized)
acatccttcattacaaattttatttgaagctcatgtattcaaataaagtaaaatttaacccaagaatccaaaatattgtcttgtgatatggtagttataaaaaggattatcattgtctgt

SEQ ID NO: 591611 - DNA, 120 bp, Artificial Sequence
  ENSG00000173250_24 (sequence is synthesized)
gattatttgaataaataatttttatgttcattatatgtagtaaatttaggatgtaagcttccagggtttgacactttaaacttgtaaagaaataaaaataattacgctttacttccgata

SEQ ID NO: 591612 - DNA, 120 bp, Artificial Sequence
  ENSG00000173253_0 (sequence is synthesized)
atggccgacccgcaggctggctccgcggccggggactgggagatcgatgtcgagagcctggagctggaagaggacgtctgcggggcgccgcggtccacgccccccgggcccagcccgccg

SEQ ID NO: 591613 - DNA, 120 bp, Artificial Sequence
  ENSG00000173253_1 (sequence is synthesized)
ccggcggacggggactgcgaggacgacgaagatgacgacggggtggacgaagacgcggaagaagagggcgacggcgaggaggcaggcgcgtcccccgggatgcccggccagccggagcag

SEQ ID NO: 591614 - DNA, 80 bp, Artificial Sequence
  ENSG00000173253_2 (sequence is synthesized)
cgggggggaccgcagccgaggccgccgctcgcgcctcaggcctcacccgccggcaccggtccccgagagcgctgcactcc

SEQ ID NO: 591615 - DNA, 120 bp, Artificial Sequence
  ENSG00000173253_3 (sequence is synthesized)
cccaagtgcgcgcgctgccgcaaccacggcgtggtgtcctgcctgaagggccacaagcgcttctgtcgctggcgcgactgccagtgcgccaactgcctgctggtggtggagcggcagcgc

SEQ ID NO: 591616 - DNA, 120 bp, Artificial Sequence
  ENSG00000173253_4 (sequence is synthesized)
gtcatggccgcccaggtggcgctccggaggcagcaggccaccgaggacaagaaggggctttccgggaaacagaataatttcgagcgcaaagctgtgtaccagaggcaagtcagagccccc

SEQ ID NO: 591617 - DNA, 120 bp, Artificial Sequence
  ENSG00000173253_5 (sequence is synthesized)
agtttgctggccaaaagcattttagaaggctatcgccccattccagcggagacttatgtaggagggaccttccctctacctcccccagttagtgacaggatgaggaaaagaagagccttt

SEQ ID NO: 591618 - DNA, 120 bp, Artificial Sequence
  ENSG00000173253_6 (sequence is synthesized)
gctgataaagagttggagaacattatgctggagagagaatataaagaaagggagatgttggaaacttctcaagctgctgctctgtttctgcccaaccgcatggtgcctggacctgactac

SEQ ID NO: 591619 - DNA, 120 bp, Artificial Sequence
  ENSG00000173253_7 (sequence is synthesized)
aattcctacaaaagtgcctacagccccagcccagtggaaccaccaagcaaggacttctgtaattttttgcccacctgccttgatttaaccatgcagtattcagggtctgggaatatggaa

SEQ ID NO: 591620 - DNA, 120 bp, Artificial Sequence
  ENSG00000173253_8 (sequence is synthesized)
cccttgtcctcaagatttttagtttggcccaagtgtggccccattagcgacaccctcctctaccagcaatgcctgctaaatgccaccacctcagttcaagccctgaagcctggggccagc

SEQ ID NO: 591621 - DNA, 120 bp, Artificial Sequence
  ENSG00000173253_9 (sequence is synthesized)
tgggacttgaagggagcacgagtccaggatggactcagtgcagagcaggacatgatgccatcgaaattggaaggttccctggtgctgcctcacactcctgagatccagaccacgagaagt

SEQ ID NO: 591622 - DNA, 120 bp, Artificial Sequence
  ENSG00000173253_10 (sequence is synthesized)
gaccttcagggtcatcaggctgtcccagagaggtccgcgttctccccaccccgacggaatttctctcccattgttgacacggactccctggcagctcaagggcatgtcttaacgaagatc

SEQ ID NO: 591623 - DNA, 120 bp, Artificial Sequence
  ENSG00000173253_11 (sequence is synthesized)
agcaaagaaaacaccaggcaccctctgccacttagacataatccattccactcattattccagcaaacacttactgacaaatcgggtcctgagttgaaaacaccatttgtcaaagaggcc

SEQ ID NO: 591624 - DNA, 120 bp, Artificial Sequence
  ENSG00000173253_12 (sequence is synthesized)
tttgaagagacccctaagaaacacagagagtgtttagttaaggacaaccagaagtacacatttacaatagatagatgtgcaaaagacctttttgtagccaaacaagttggaacaaaactc

SEQ ID NO: 591625 - DNA, 120 bp, Artificial Sequence
  ENSG00000173253_13 (sequence is synthesized)
tcggtgaatgaaccactgtcattttctgttgagtctattcttaagaggccttcatctgccatcactcgtgtctctcagtgaaaggctgcttaaacagaaagctggattttctgcagtctt

SEQ ID NO: 591626 - DNA, 120 bp, Artificial Sequence
  ENSG00000173253_14 (sequence is synthesized)
agagcattatagccatttgctactttttttaaaagttaagatgtttgtgtaaagaaatttctaatgtaaagatgatgattttgaaaaattttatatattcctaatatgcatgtacttttt

SEQ ID NO: 591627 - DNA, 120 bp, Artificial Sequence
  ENSG00000173253_15 (sequence is synthesized)
cttatcacatatatttaaacttacagatggaaattgcccaatgtgcaaattgttaagtaccacactttacacagcatttcaaaaagcaataaaattgacactgtcttctcaaagacccaa

SEQ ID NO: 591628 - DNA, 120 bp, Artificial Sequence
  ENSG00000173253_16 (sequence is synthesized)
gccagtggcgctgcgctgaatgcaactgcgcgcgcccgccgggtgagccagcgatctgagccaggcgggggcggcccgacctttcccgcccagcctgggtcagaggaagccgaaagcggc

SEQ ID NO: 591629 - DNA, 120 bp, Artificial Sequence
  ENSG00000173253_17 (sequence is synthesized)
ctcagcaagtgggttcgttccgggcctccagctatcagctcccgatctcgtgtttgagggtagcgaccccgatttctgtttgcatgcacagccagcagccctagcgccagatcctaaagc

SEQ ID NO: 591630 - DNA, 120 bp, Artificial Sequence
  ENSG00000173253_18 (sequence is synthesized)
agtttgctggccaaaagcattttagaagttctccttggattattctacagctattatgtgtacataatgaaccatctttagaaaataaaagtgacatcagctctaggtatagatatattt

SEQ ID NO: 591631 - DNA, 120 bp, Artificial Sequence
  ENSG00000173253_19 (sequence is synthesized)
tttaataatgaaaaaagatgacatggataataataaaacattgattgatacaagataaatagtcttgtctcttaatgcgtagggggcctgggaagaatattaaaattttaatcaataaag

SEQ ID NO: 591632 - DNA, 120 bp, Artificial Sequence
  ENSG00000173253_20 (sequence is synthesized)
tatgtctgttgaagcaagcaagcaaacaaatccataacaaccacaacaagcaacaagaacaagaacaacaacaagaagaagttgcagtatggatatctttcaccctcccaggaaactctt

SEQ ID NO: 591633 - DNA, 120 bp, Artificial Sequence
  ENSG00000173253_21 (sequence is synthesized)
tcaaacctaatctgtacttttgcatctgtataaaaatatcagtgagatggaactgtaaataattgttctgctgatctgtagtgttgctgttaccttctgggtttccacatttttattccg

SEQ ID NO: 591634 - DNA, 120 bp, Artificial Sequence
  ENSG00000173253_22 (sequence is synthesized)
tcagcaaggtgaggcgcccgaggctgcagaagaccgagcagaactttgcagagttcgggatgtgctgggctaggtcgctgaggacttgactggcttcctccctccttccctccacctacc

SEQ ID NO: 591635 - DNA, 120 bp, Artificial Sequence
  ENSG00000173253_23 (sequence is synthesized)
attgatgtactcttgcaggagaaagaaggatgtcgctgtacgccccgaaagagaggcatcatttttacgcccagtttggattaatgattgattgagtcgcagaaatgcttgtgatgctga

SEQ ID NO: 591636 - DNA, 120 bp, Artificial Sequence
  ENSG00000173253_24 (sequence is synthesized)
tagaggccaatactggtctttctgatctcttcctcgtcgtttattaccttctcttgtggacaacgcattcctaagaatgtatctctgcttgtttcccagtccgcgagataaatggtgact

SEQ ID NO: 591637 - DNA, 120 bp, Artificial Sequence
  ENSG00000173253_25 (sequence is synthesized)
tctctcttgcaggcaccgtcatacctcgggtttagattctggacaggcgagccggctgcaccgaaggcccggtaggcggactctggcggagcgcttcagagagaagagtgtagaccgcgg

SEQ ID NO: 591638 - DNA, 120 bp, Artificial Sequence
  ENSG00000173253_26 (sequence is synthesized)
gaggcggagggctccctgccagcgtgcctcggccaatcagtattcacaccgcctgacaaccggccaatcagaggacgtaaagctccggggcctgagcggacagtactaggaaggggagcg

SEQ ID NO: 591639 - DNA, 120 bp, Artificial Sequence
  ENSG00000173253_27 (sequence is synthesized)
agcgcgctggacgccatgggcacctggtcctgggcttggtctcctcccgcgtcccgcatgggtcatcgcctgccctgcgttcccacgcgttctctgtagcatatgctgggacaagaaggg

SEQ ID NO: 591640 - DNA, 120 bp, Artificial Sequence
  ENSG00000173258_0 (sequence is synthesized)
aggcttgcgcgcgcactcgctgcgggacaagcttctggaagctctttgcggtggcgttggtgctgtttgcggatgctgatgcagtttctgcaggactgtaaactggattcctggaacctt

SEQ ID NO: 591641 - DNA, 120 bp, Artificial Sequence
  ENSG00000173258_1 (sequence is synthesized)
tgatattcctggctgtgtatagtgcctgttggtggactgtactgatactcaactagagtgtgaagggactggattcctgcccctgagacacaatgcaagctgtagtgcccttgaacaaga

SEQ ID NO: 591642 - DNA, 120 bp, Artificial Sequence
  ENSG00000173258_2 (sequence is synthesized)
tgacagccatctcaccagaacctcaaactctggcctcgactgaacaaaatgaggtcccaagagtggttacttctggggaacaagaagctattttaagaggaaatgctgctgatgcagagt

SEQ ID NO: 591643 - DNA, 120 bp, Artificial Sequence
  ENSG00000173258_3 (sequence is synthesized)
ctttcagacagaggtttaggtggttttgttactcagaagtagctggacccaggaaagctctgagtcaactctgggagctctgcaatcagtggctgagaccagacattcacacgaaagaac

SEQ ID NO: 591644 - DNA, 120 bp, Artificial Sequence
  ENSG00000173258_4 (sequence is synthesized)
agattttagagcttctggtgtttgagcagttcctgaccattttgcctggggagatcaggatttgggtaaagtcacaacatcctgagagtagtgaggaagtggtgaccctaatagaagatt

SEQ ID NO: 591645 - DNA, 120 bp, Artificial Sequence
  ENSG00000173258_5 (sequence is synthesized)
tgacccagatgcttgaagaaaaagatccagtctctcaagattctactgtttcccaagaggagaactcaaaagaggataaaatggtcactgtttgtcccaatactgagtcctgtgaatcta

SEQ ID NO: 591646 - DNA, 120 bp, Artificial Sequence
  ENSG00000173258_6 (sequence is synthesized)
taacattgaaggatgtagctgtgaacttttcaagaggagagtggaagaagctggagccttttcaaaaggagctatataaggaagtgctactggaaaacctcaggaacctagaatttctgg

SEQ ID NO: 591647 - DNA, 120 bp, Artificial Sequence
  ENSG00000173258_7 (sequence is synthesized)
actttccagtttcaaaattagagttgatttcccagctaaagtgggttgaattgccatggctgctggaagaagtctcaaaaagctcccgactagatgaatcagctttagataaaataatag

SEQ ID NO: 591648 - DNA, 120 bp, Artificial Sequence
  ENSG00000173258_8 (sequence is synthesized)
aaaggtgcctcagggatgatgatcatggcttgatggaagaatcccagcaatattgtggcagctcagaggaggatcacggtaatcagggaaattcaaaaggaagagtcgcacaaaacaaaa

SEQ ID NO: 591649 - DNA, 120 bp, Artificial Sequence
  ENSG00000173258_9 (sequence is synthesized)
ctcttgggagtggcagtaggggtaagaaatttgacccagataaaagcccctttggacataatttcaaagaaacttcagacttaattaaacatctgagagtctacttgaggaagaaatctc

SEQ ID NO: 591650 - DNA, 120 bp, Artificial Sequence
  ENSG00000173258_10 (sequence is synthesized)
ggaggtataatgaaagcaagaaacccttcagttttcattcagaccttgttctgaaccgcaaggagaaaaccgccggagaaaagtcacggaaatctaatgatggtgggaaagtcctgagtc

SEQ ID NO: 591651 - DNA, 120 bp, Artificial Sequence
  ENSG00000173258_11 (sequence is synthesized)
actcttcagctcttactgaacatcagaaacgtcagaagattcatttgggggataggtcccaaaaatgcagtaagtgtgggataatctttattagaagatcaactctttctaggagaaaaa

SEQ ID NO: 591652 - DNA, 120 bp, Artificial Sequence
  ENSG00000173258_12 (sequence is synthesized)
cccctatgtgtgagaaatgtcggaaagattcatgtcaagaagcagccttaaataaagatgagggaaatgagagtggagaaaaaactcataaatgtagtaagtgtggaaaagcctttggct

SEQ ID NO: 591653 - DNA, 120 bp, Artificial Sequence
  ENSG00000173258_13 (sequence is synthesized)
atagcgcctcactcaccaaacatcggagaattcacactggagaaaaaccctatatgtgtaatgaatgtggaaaagcttttagtgatagttcatcgctcacaccacatcatagaactcata

SEQ ID NO: 591654 - DNA, 120 bp, Artificial Sequence
  ENSG00000173258_14 (sequence is synthesized)
gtggagagaaacccttcaaatgtgatgactgtgggaaaggtttcaccctaagtgctcacctcattaaacatcagagaattcatactggagaaaaaccttataaatgtaaagactgtggga

SEQ ID NO: 591655 - DNA, 120 bp, Artificial Sequence
  ENSG00000173258_15 (sequence is synthesized)
gaccctttagtgacagttcatctcttattcaacatcagcgaattcatactggagaaaaaccctatacatgtagcaattgtggaaaatccttcagtcatagctcatccctttccaaacatc

SEQ ID NO: 591656 - DNA, 120 bp, Artificial Sequence
  ENSG00000173258_16 (sequence is synthesized)
agagaattcatactggagagaaaccctataaatgtggcgaatgtggaaaagcctttaggcagaattcatgccttacccggcatcagagaattcacactggagaaaaaccatatttgtgta

SEQ ID NO: 591657 - DNA, 120 bp, Artificial Sequence
  ENSG00000173258_17 (sequence is synthesized)
atgattgcggaatgacttttagccattttacgtctgtgatttatcatcaaagacttcattcaggagaaaaaccctacaaatgtaaccagtgtgagaaagccttcccaacccattcactgc

SEQ ID NO: 591658 - DNA, 120 bp, Artificial Sequence
  ENSG00000173258_18 (sequence is synthesized)
taagtcgtcatcagagaattcatactggtgtaaaaccttataaatgtaaagaatgtgggaagtccttcagtcagagttcatctcttaatgagcaccaccgaattcatacaggagagaaac

SEQ ID NO: 591659 - DNA, 120 bp, Artificial Sequence
  ENSG00000173258_19 (sequence is synthesized)
cctatgagtgtaactattgtggtgcaacctttagtcgaagctcaatccttgtagaacacctaaaaattcataccggaaggagagaatatgaatgtaacgaatgtgagaagacatttaaaa

SEQ ID NO: 591660 - DNA, 120 bp, Artificial Sequence
  ENSG00000173258_20 (sequence is synthesized)
gtaattcaggcctcattagacatcggggatttcactctgcagagtaatcctggaactacattaaagtggggggaatttaattcaaattgtcagttactgaaaccctgggatgtaaactta

SEQ ID NO: 591661 - DNA, 120 bp, Artificial Sequence
  ENSG00000173258_21 (sequence is synthesized)
cagtattgatcagtagctgcagctttcgtaaattggcagttaggaaaaatatccttttgcccattcatccctcttcttttcaaggatggcaacgactggtaaacagtaattagttggtaa

SEQ ID NO: 591662 - DNA, 120 bp, Artificial Sequence
  ENSG00000173258_22 (sequence is synthesized)
agtcactggaaagggaagaatgcaaaatgattctgaggccagacgaattggaaaagctcttttcttcaggggatttctctctgatttcttctactaccatgtagtgtgatggagagaact

SEQ ID NO: 591663 - DNA, 120 bp, Artificial Sequence
  ENSG00000173258_23 (sequence is synthesized)
tgactgcagtcacataacttggattctgtcccagtttgccaaccaacttgctgtatacaccttggacaagtcatttgacctttcagaattttattttcgtcaccagcagaatgaagggat

SEQ ID NO: 591664 - DNA, 120 bp, Artificial Sequence
  ENSG00000173258_24 (sequence is synthesized)
gggattaatgatttttgccttttttggttttttagttttttattggtatcctgataatctctgaagctgtggacataagttatttttttttatttgtcattactttcaagtttctctagt

SEQ ID NO: 591665 - DNA, 72 bp, Artificial Sequence
  ENSG00000173258_25 (sequence is synthesized)
tttttttatttgtcattactttcaagtttctctagtaaaaaatacaataccactattcaggatgctggggga

SEQ ID NO: 591666 - DNA, 120 bp, Artificial Sequence
  ENSG00000173258_26 (sequence is synthesized)
tcctgggctcaagtgatccttccatctcactttcctgagtagctgacattacgggtacactccatcaagcctggttcctaggatgctggacttctagcttagtgagaatgcagtatactt

SEQ ID NO: 591667 - DNA, 120 bp, Artificial Sequence
  ENSG00000173258_27 (sequence is synthesized)
tttgaaaacttcgtgcaggaatccctcaaatgctgtaactaggaatgggtcagtgaagttcaaacgacttttccttgagggagtattttaatcggacaagggaactctttttcttttggg

SEQ ID NO: 591668 - DNA, 120 bp, Artificial Sequence
  ENSG00000173258_28 (sequence is synthesized)
cattggccaacaggactgagaagccagagagcttgcacctgagccatctcagccgtgagagtaacagtcctaggaaaatagatgggggctgggggtaaggaaatgtgctgaagacagagc

SEQ ID NO: 591669 - DNA, 120 bp, Artificial Sequence
  ENSG00000173258_29 (sequence is synthesized)
tattctggatggattttggtttgcaaaaattctactttaaaacaattttgcctgtagcaagtacatttttttgcaattggagtgtaaacattctgtgtggcaacagttaaaagctgttat

SEQ ID NO: 591670 - DNA, 120 bp, Artificial Sequence
  ENSG00000173258_30 (sequence is synthesized)
gtgtgtgtgtgtgtgtgtgtgtatacattgttgccactatctaaaattagggcatttcatactaaaaacaaagcttgtcttaaaaaaaattataagggctaacaacactgggcttttatt

SEQ ID NO: 591671 - DNA, 120 bp, Artificial Sequence
  ENSG00000173258_31 (sequence is synthesized)
taagggctaacaacactgggcttttatttatgtaaagcactcagctggtcctgggtagcagctgccaccttttgatggggaatcaactttctgacttagctagttctctcatgtatgtca

SEQ ID NO: 591672 - DNA, 120 bp, Artificial Sequence
  ENSG00000173258_32 (sequence is synthesized)
cctgactttcccactgtatgaatgttctattataacccctaccatttggagaatagataccctaaaatctaaagagactgcactgatagcaagtaaagttcagggaatgaatgtagaatt

SEQ ID NO: 591673 - DNA, 120 bp, Artificial Sequence
  ENSG00000173258_33 (sequence is synthesized)
gatacagaaaaaattttcagttaagttttcttttgtgaaattagacctcagaggaatggaatatacgggtattggtggattattccttataaatttcattggtggagtctgaataataat

SEQ ID NO: 591674 - DNA, 120 bp, Artificial Sequence
  ENSG00000173258_34 (sequence is synthesized)
ttccaactgaaaaaggaacttaaggccctgaatgagtgaggttttggcttcaggtcatagggttctggaggaaccccatggactcaacagtggtctagaaataagttcctaaagttgaaa

SEQ ID NO: 591675 - DNA, 120 bp, Artificial Sequence
  ENSG00000173258_35 (sequence is synthesized)
ttgtgggcacctcctataaaaagagagctaaaccagaaaactcttcacttatggaagtaaagcgatccttaatgctaatcttagactcaggaacatttactgtgactaatgtatgtaggt

SEQ ID NO: 591676 - DNA, 120 bp, Artificial Sequence
  ENSG00000173258_36 (sequence is synthesized)
gtgaaatgctacctctgggagaaggtttttggtgcctccccaaccccaagcctgcagtttaaatattgccgtgtgataaattggtccgcatagttattgctaagcagaccaacgaatcac

SEQ ID NO: 591677 - DNA, 120 bp, Artificial Sequence
  ENSG00000173258_37 (sequence is synthesized)
atcctagccatgaaaggaatgtttattatgagaatcattcataatggttttaagtttttttctgaaaagacagaaaacttgttgtaagttttgttttctgaaaaatataatttatagaaa

SEQ ID NO: 591678 - DNA, 120 bp, Artificial Sequence
  ENSG00000173258_38 (sequence is synthesized)
gttgaagaaataacgtaaaagtcttcagaagaggcttgttccaagatgattactcttagactccctaacattcataacaatgttttatcccagtatccattgggaatctggagtataaac

SEQ ID NO: 591679 - DNA, 120 bp, Artificial Sequence
  ENSG00000173258_39 (sequence is synthesized)
tttttttttaaaggaatttattgaggtacaaattacatatcattaaaaccatttcaagtgtacaattcagtgagttttagtaaatatgctgagttgtgcaaccattaccataatccattt

SEQ ID NO: 591680 - DNA, 120 bp, Artificial Sequence
  ENSG00000173258_40 (sequence is synthesized)
tttagaacatcatcccagcaagatccgttattccagtttacagttaatctcccgtccaacctctaatcccaggcacccactactcagtcgactttgtgtctctagagttgtctttttctg

SEQ ID NO: 591681 - DNA, 120 bp, Artificial Sequence
  ENSG00000173258_41 (sequence is synthesized)
tacattttatgttatatgtgatctttctgtgtttttttcattaatgtgttttaagttcatccatgttgtaacatactagtactttattcctttttatcataaataatattacattatgtg

SEQ ID NO: 591682 - DNA, 120 bp, Artificial Sequence
  ENSG00000173258_42 (sequence is synthesized)
gatgcttcgtgcattcactagttgaagaacatttgaggtttttccagtttttgcctgttaggaataatgctgctttgaacattggtatgcaagtgttttgaacgttagtgtacaagtctt

SEQ ID NO: 591683 - DNA, 120 bp, Artificial Sequence
  ENSG00000173258_43 (sequence is synthesized)
tgtgtggacatgttttcatttttcttaggcagatgcctgaggggagttgctaggtcatacggtaaattttcatttaacttttttaggaaactgccaaattgttttccaaagtgaccgcat

SEQ ID NO: 591684 - DNA, 120 bp, Artificial Sequence
  ENSG00000173258_44 (sequence is synthesized)
tattttacattctgactagtaatgtgtggggcttcccatttctctacagtcttgccagtcattgttgtctgttttttaaaaattatgcccatcctagcgtttgaaatgatattcctttgt

SEQ ID NO: 591685 - DNA, 120 bp, Artificial Sequence
  ENSG00000173258_45 (sequence is synthesized)
ggttttaactttgattttcctgatggcgaataatgtcaaagcatcttttatgtgctcttcagccattcatgtatcttagtgaaatgtttattcagattttttgtccatttaaaattggag

SEQ ID NO: 591686 - DNA, 120 bp, Artificial Sequence
  ENSG00000173258_46 (sequence is synthesized)
tttgctgatactgtgttgtagtcctttttattctggatataagtcctttatccaatatgaactttctaaataccatgtactagctacagagagcagcccaaactctgttggataatattt

SEQ ID NO: 591687 - DNA, 120 bp, Artificial Sequence
  ENSG00000173258_47 (sequence is synthesized)
atcaaagtcttgatttcagtagttaagtctgtataattgcctgcaggacattcagtctggcccatcacccaaatatttaaattcacttttggattaagtcagattatcaaaaggctttaa

SEQ ID NO: 591688 - DNA, 120 bp, Artificial Sequence
  ENSG00000173258_48 (sequence is synthesized)
acgtcttttgattcattataggattgcttttatgaagagcactgtgacacattttactttaaaatgaagtccttgctttaaataatgtttcctcttaatgagcgtgtataaatttttttc

SEQ ID NO: 591689 - DNA, 120 bp, Artificial Sequence
  ENSG00000173258_49 (sequence is synthesized)
atgtcacaggacaaggcaaggttttggtcaataaagtcattttatttattttagaattattttttaatgtagtaagatacatatagcttaaaatgaaccatttaaacactttttggttat

SEQ ID NO: 591690 - DNA, 120 bp, Artificial Sequence
  ENSG00000173258_50 (sequence is synthesized)
acagctcaatagcatttagatagatgcacattttgtgcagtcatcaccactatccatctccagaactttttcatcatcccaaactgaaactctgtactccttaaacagtaactccccatt

SEQ ID NO: 591691 - DNA, 120 bp, Artificial Sequence
  ENSG00000173258_51 (sequence is synthesized)
ttctcctcctcaggctcctggtaaccactgttctacttcctgtctgtacaaatttgactgttctaattacttggtatgaatggaatcatacaatatttgccctgttgtgtttggcttatt

SEQ ID NO: 591692 - DNA, 120 bp, Artificial Sequence
  ENSG00000173258_52 (sequence is synthesized)
atcatacaatatttgccctgttgtgtttggcttattccacttagcattatgttttcaaggttcggccgtgttgtagcacatatcagaatttaattcctttttaaggctgaataatattcc

SEQ ID NO: 591693 - DNA, 120 bp, Artificial Sequence
  ENSG00000173258_53 (sequence is synthesized)
tctgccagtgaacatttaagttgtttgcaccattttggctatcaagaataacattgctataatcagtggtgctttctgttcttttaagtatatgcctagaaatagaattgctggatctta

SEQ ID NO: 591694 - DNA, 120 bp, Artificial Sequence
  ENSG00000173258_54 (sequence is synthesized)
tgatgattctatatttaacttcttgaggaagtgcaactacactattttaaattcccaccagctatgtacaagggtttcagtatccccgcccttgctaacacttattttctatttcttttt

SEQ ID NO: 591695 - DNA, 120 bp, Artificial Sequence
  ENSG00000173258_55 (sequence is synthesized)
tataatagacatcctaatgggtttgaagtggcatcttattctagttttgttttgcatttccctagtgattagtgatgttaactgtctttttatgtgcttattgaccatttgtatctcttc

SEQ ID NO: 591696 - DNA, 120 bp, Artificial Sequence
  ENSG00000173258_56 (sequence is synthesized)
tttggagaaatgtttattgaagtcctttgcccattttttaattggttttgttggcgttgttgtttagttgtagaagttcttaatatatccagaatatataaagaacttttcagataaatg

SEQ ID NO: 591697 - DNA, 120 bp, Artificial Sequence
  ENSG00000173258_57 (sequence is synthesized)
atttgcaaatactttcttccattctgtgtgggttgccttttcattctattcctaatgccctttgaaagaaggttttaattttggtgaagtttaatttttctattttttcttttgtttcct

SEQ ID NO: 591698 - DNA, 120 bp, Artificial Sequence
  ENSG00000173258_58 (sequence is synthesized)
gtgcttttctggtcatacccaagaaaccatggccaaatccaatgtcatgaagcttttctcctattctaggagttttatagtttcaggtcttatgtttaagtcttttaaccattttgattt

SEQ ID NO: 591699 - DNA, 120 bp, Artificial Sequence
  ENSG00000173258_59 (sequence is synthesized)
ttatgtatggtaaagggtccatcttcattcttttgcatgcgaatatccagttttcccagccccatctgttgaagagactatcctttccacatcatgtattctttgcactcttgtcaaaga

SEQ ID NO: 591700 - DNA, 120 bp, Artificial Sequence
  ENSG00000173258_60 (sequence is synthesized)
tcatttgaccatatacatgcatgtttatttctggctgtctgctctgtttctttggtctatatgtttgtctttatgccagtaccatgctattttgattactccagtaatgttttgtaatca

SEQ ID NO: 591701 - DNA, 120 bp, Artificial Sequence
  ENSG00000173258_61 (sequence is synthesized)
ccagctttgttctttcccaaattgttttggctatttgggggtccttaagatttcaaatgaattttaggatggtttgtttgtttttgtggaaaatggcatgaagattgggcttgcattgaa

SEQ ID NO: 591702 - DNA, 120 bp, Artificial Sequence
  ENSG00000173258_62 (sequence is synthesized)
tttgtagatcgctttgggtaatgtggacatactaacaataacaaacattacagtctgtgaaccccaggtgtctttccatgtatttgtgccgtctttaattttttcagcaatgtgttacag

SEQ ID NO: 591703 - DNA, 120 bp, Artificial Sequence
  ENSG00000173258_63 (sequence is synthesized)
ttgtcattgtacaagtcttttgcctccttggtcaagtttattcttgagtattttatgtttttgatgctgttgtaaatgggtctttgttagtgaagcataactgagttttgagtgttgatt

SEQ ID NO: 591704 - DNA, 120 bp, Artificial Sequence
  ENSG00000173258_64 (sequence is synthesized)
ttgtatcttgcaactttgctgaatttgtttattagtcataatagtttcttgtgaaatttttgggatttttaaatataagattatggcatctgcaaatagataatttttccttcttcctaa

SEQ ID NO: 591705 - DNA, 120 bp, Artificial Sequence
  ENSG00000173258_65 (sequence is synthesized)
tttggatggctttaacttgccaatggctctagctaggacttccagtactgtgttgaatacaagtagcaaaagcaggcatctgtgccttttcctgaaatgctttctattttatatcattcc

SEQ ID NO: 591706 - DNA, 120 bp, Artificial Sequence
  ENSG00000173258_66 (sequence is synthesized)
gtatgatgttagctgtggtcttttcatatttgacctttattatgttaaggtaatttccttttattgataaattcttgtttgaaggacagttttgctgtatatagaattctcagttgacag

SEQ ID NO: 591707 - DNA, 120 bp, Artificial Sequence
  ENSG00000173258_67 (sequence is synthesized)
tttttttttttttctttctgcattaagagtataacaacgccacagccttctggcttccaaggtttttgatgagcaatcaacagtctcactgaggatttcttttatgtgatgatttgcttc

SEQ ID NO: 591708 - DNA, 120 bp, Artificial Sequence
  ENSG00000173258_68 (sequence is synthesized)
tctcttgatgcttttgagattctccttttgtctttggatttcagcagcttgattataacttgtcttggtgtctctgtggggtgagggtaggagtcaattgcagtgcttgttgccatagtt

SEQ ID NO: 591709 - DNA, 120 bp, Artificial Sequence
  ENSG00000173258_69 (sequence is synthesized)
cagaacctgcaccacaaagacccttccagttctgtagagtggtttattgctttattatcagtgcaatagagagtcactgagtcactggaggttctctgtgtgtgtgagtgtataaataaa

SEQ ID NO: 591710 - DNA, 120 bp, Artificial Sequence
  ENSG00000173258_70 (sequence is synthesized)
gatttaattttgttttgctcttttgttttcccctcggaatagtttatcagatgaggaatttcttgatcactggggagaaatatcttacaattctgaaaacacactgtcaaaatgcttttc

SEQ ID NO: 591711 - DNA, 120 bp, Artificial Sequence
  ENSG00000173258_71 (sequence is synthesized)
ataaaatgtagcacattttagggtttctcccttgtgtggaaatgttagtgtctataaaggtctgaactaagaaagcttctctcaagccacaacacatgtgaggttcctctgctgaatgaa

SEQ ID NO: 591712 - DNA, 120 bp, Artificial Sequence
  ENSG00000173258_72 (sequence is synthesized)
tcttttggtgctcagtaagttgtgatttccaagcaaagtgtttttcaccctgagaaattggtgaggtatctttctctcagagtcttttttatgaagtctgatgttgagaggttcttccag

SEQ ID NO: 591713 - DNA, 120 bp, Artificial Sequence
  ENSG00000173258_73 (sequence is synthesized)
gttggagttctcaggtctgtctcccttgtagattatcagagtgggtcgataatctacaagctttgctaaacctacctgtagctcttctggggcagcggtcgtggtggtggtggcagcggc

SEQ ID NO: 591714 - DNA, 120 bp, Artificial Sequence
  ENSG00000173258_74 (sequence is synthesized)
agcagggttccccattgattttctaaatgtttgtagtccttttgtaaagtggacccttgccttctaaggtaatggtgaatgatacatattcccttcatttttctgctttgaagcttcaat

SEQ ID NO: 591715 - DNA, 120 bp, Artificial Sequence
  ENSG00000173258_75 (sequence is synthesized)
cttcttcattttctcttttgatctgtcaacacaatcagaacatttagctctttgagcatctttaaggcagttgctttaaagtctgtctagtgagtcaatgtttggtcttcctcatgtcca

SEQ ID NO: 591716 - DNA, 120 bp, Artificial Sequence
  ENSG00000173258_76 (sequence is synthesized)
ttttttgttggtttattttgtgcctttgaatggtcaatacttgtttctttgtatgcatcgtgattgtttttgttgacagctagacatttgaattttataatgtggcaactctggaaataa

SEQ ID NO: 591717 - DNA, 120 bp, Artificial Sequence
  ENSG00000173258_77 (sequence is synthesized)
gattattcctttttccccagggtttattttttgttgttgttttttgtgttgtgtgttttttgttttcgtttttgttttactgtcataggctgtctctgtgctagggatcagcctgtgttg

SEQ ID NO: 591718 - DNA, 120 bp, Artificial Sequence
  ENSG00000173258_78 (sequence is synthesized)
aatgcctaaagttgtctcaattctttacagagcctgcgtttttccctgggcgggagcaatggctttctgaattcacctagatacacagttttttgaatgtccagaaaaacaggtttcatc

SEQ ID NO: 591719 - DNA, 120 bp, Artificial Sequence
  ENSG00000173258_79 (sequence is synthesized)
ccttttttctcctggaagccactttagccagttgggggttgggagaatggtagcttgcttctttgtctgctctttctctgtgatcagaagtagatatctgcaatcagaaccctgatattt

SEQ ID NO: 591720 - DNA, 120 bp, Artificial Sequence
  ENSG00000173258_80 (sequence is synthesized)
ggaggaagtggctattattgtccaccctggctgcagcaagctgacccagaaatgtggggttgtgtctccacagctgcctgccatggagtgggtggggatgggtagctgctacttcactga

SEQ ID NO: 591721 - DNA, 120 bp, Artificial Sequence
  ENSG00000173258_81 (sequence is synthesized)
aggctgaaatccaccaatgttaactgcaatttaccactcagaatttcccctagaagctacaagtgttcagatggactcatgtgctcccaaaataatcactttaggaactttctgccgatg

SEQ ID NO: 591722 - DNA, 120 bp, Artificial Sequence
  ENSG00000173258_82 (sequence is synthesized)
taattattatctaggtggagaggtggattcctgggccactctatccatgtctttgatttttcctgctttcttgaagatttcttcaactttatcttccagctctactattaaatgttgtga

SEQ ID NO: 591723 - DNA, 120 bp, Artificial Sequence
  ENSG00000173258_83 (sequence is synthesized)
atgtttttatctctgctgtcatatttttatttccaagtgcattatctgattctttcttccttttttctaattggttttgtttcataggtgaaatattttttctctgagcatgttaattat

SEQ ID NO: 591724 - DNA, 120 bp, Artificial Sequence
  ENSG00000173258_84 (sequence is synthesized)
agtgtctttctgtgttattctgctccctgcattatccctgtttcctttgagttgttttcacctgttttctgtctctcacactggaggctttcctgaagcctctgatgatctttgactatt

SEQ ID NO: 591725 - DNA, 120 bp, Artificial Sequence
  ENSG00000173258_85 (sequence is synthesized)
tatatttaagagcagggctctaaaaagctgattggaaggtgttttaggtacttcagcaccatccaacagtaatataatgtgagccacatacataatttcaaattttctagtagccacttt

SEQ ID NO: 591726 - DNA, 120 bp, Artificial Sequence
  ENSG00000173258_86 (sequence is synthesized)
tagaaaataaaacaggtaaaattaaaaatgtattttacttcacccaatatatccataatattatttcatcatgtaatcaatgtaaaaaagtattgagacattttgttttttgcactattt

SEQ ID NO: 591727 - DNA, 120 bp, Artificial Sequence
  ENSG00000173258_87 (sequence is synthesized)
ttgaaatctggtatgtaatgtgttaatctacacacaaaattttcatttgtaatacataactcacatttagatttataaaacgtagagttgataagtagattcacatagttcttccaaaca

SEQ ID NO: 591728 - DNA, 120 bp, Artificial Sequence
  ENSG00000173258_88 (sequence is synthesized)
cgtagagttgataagtagattcacatagttcttccaaacatactttgttgttgttctaaatatacttaattttccaataactgaatcaagtatccagtttttgttttttttttttttttt

SEQ ID NO: 591729 - DNA, 88 bp, Artificial Sequence
  ENSG00000173258_89 (sequence is synthesized)
cctgggttccagagattactggtgcacactgccacgcctggctaattattttagtagaggcggggtttcactgtgttgcccaggctgt

SEQ ID NO: 591730 - DNA, 120 bp, Artificial Sequence
  ENSG00000173258_90 (sequence is synthesized)
ctgccacgcctggctaattattttagtagaggcggggtttcactgtgttgcccaggctgttctccaactcctaagcccaggcaatctgcctgtctcggcctcccaaagtgccgggattac

SEQ ID NO: 591731 - DNA, 120 bp, Artificial Sequence
  ENSG00000173258_91 (sequence is synthesized)
aaccccaatttttgtttaaaatttgcatccacattaacaaaacttttattagaaaaattcatttaatatctaggcaaaattatatcactttcaaaactttttaagtaaattcagtaacat

SEQ ID NO: 591732 - DNA, 120 bp, Artificial Sequence
  ENSG00000173258_92 (sequence is synthesized)
atcaattcagtttattagcatcaaatttgatgaagcagtgcataaatggaaacaaaacagtttatcaatacaatatatcattcttcagattttgcttattttttgcagccatttattaca

SEQ ID NO: 591733 - DNA, 120 bp, Artificial Sequence
  ENSG00000173258_93 (sequence is synthesized)
tttaaaattttgtgcatattgtctcatttgaaaaatgtgagttattctgttttatttgtattatgaaatgtttctattgtaaataaattcttttacctgtctagccaggtcacaagtttt

SEQ ID NO: 591734 - DNA, 120 bp, Artificial Sequence
  ENSG00000173258_94 (sequence is synthesized)
tcccattttaggagcttcaaatttagcttgttcatatgcagcgtgatattagggagaaaatgtgaatcacagtgctactttttgtctttgattgaatatttggtaagcatttcttttgtt

SEQ ID NO: 591735 - DNA, 120 bp, Artificial Sequence
  ENSG00000173258_95 (sequence is synthesized)
tcaaggaaatcttgaattggattttctagtacaggaaatccttataaaattcttttgtaagtcatccaggtaacattggtaaagaaacaagatcattagatacattgtctttttttttca

SEQ ID NO: 591736 - DNA, 120 bp, Artificial Sequence
  ENSG00000173258_96 (sequence is synthesized)
gaagtttcataaactgtcaacattctatagcttttgtgcatatgtactgaagaattataacacatgtatccgtgactcgtttcttggagtctgcttcagaaaattgaacacaaatatttt

SEQ ID NO: 591737 - DNA, 120 bp, Artificial Sequence
  ENSG00000173258_97 (sequence is synthesized)
cagtatgtatcatgcaatagaatagagcaatgagggaaaagttatcctcttgctttaaaattccaacatggatggtcttttgacttaacttagctggagttccatccttgtgatagaaac

SEQ ID NO: 591738 - DNA, 120 bp, Artificial Sequence
  ENSG00000173258_98 (sequence is synthesized)
taacttttctgtctctaactgaaattctttgacagatggaagattgtcaaaaatatctgccatgagtttgagcctttaggcaatgaattcacatttcattgcctttacatgaatcgacat

SEQ ID NO: 591739 - DNA, 120 bp, Artificial Sequence
  ENSG00000173258_99 (sequence is synthesized)
tgtaaatttggaggttctttgagacagaatatacccagagttttctttgggcagtgtcttgtatcaaacagttcatctaaggctaaagaaaaatacttgaaatttttcaagatttgaatt

SEQ ID NO: 591740 - DNA, 120 bp, Artificial Sequence
  ENSG00000173258_100 (sequence is synthesized)
aattggtctttattattaaaatataaatattctattagcaaaaatatattctgttcatgtatatccaagagcaaaattgtttaatggtttcattgacgttttcagttttcatgaatgtct

SEQ ID NO: 591741 - DNA, 120 bp, Artificial Sequence
  ENSG00000173258_101 (sequence is synthesized)
tttaaggtcttttcctcataattttctaaatacgataaagtgataatttcttcatctctccatctaaggttctttgtagatgcatgtgtaagaagctattttatagcttgccaggtttac

SEQ ID NO: 591742 - DNA, 120 bp, Artificial Sequence
  ENSG00000173258_102 (sequence is synthesized)
aaactcagacccttttaaaagttgtttaaattgttttgttagaaatttcactcgcagttcatatgagtaattttgtgtattcttttttgacttacactcactaaatggttgctaaaaatt

SEQ ID NO: 591743 - DNA, 120 bp, Artificial Sequence
  ENSG00000173258_103 (sequence is synthesized)
acatgtcttaaatattgtcttaagtattatctactatgtatctttaacacttttgaatagaacaaacagcttttccattttgctctgctgcagtaaattgcaattgccattcatcattaa

SEQ ID NO: 591744 - DNA, 120 bp, Artificial Sequence
  ENSG00000173258_104 (sequence is synthesized)
atgtgcactatactgtctctagtcttcttgactatgccagttgtagtaccagcttctgtatctgcactgaattctgcctcagtaatatgcctttgtttaaaatttaaatattttttcatt

SEQ ID NO: 591745 - DNA, 120 bp, Artificial Sequence
  ENSG00000173258_105 (sequence is synthesized)
tttttaacctagaaaataattataatgaaaatattaagtatctcattttaggattctgatttacataggtatcactgtaacttgtgctgtttgcataggtatactctatcttgtgctatc

SEQ ID NO: 591746 - DNA, 120 bp, Artificial Sequence
  ENSG00000173258_106 (sequence is synthesized)
tgcataaaatatccaagtaaacacattgtgattttacatccgtgcatagaaaaaaaaatcatctgaactcaaatcaatctgttgatactgactagattggtgacgtgtttatgtgtaaca

SEQ ID NO: 591747 - DNA, 120 bp, Artificial Sequence
  ENSG00000173258_107 (sequence is synthesized)
ctagtgataatgcacgttcctgtacaagcattataatacaacagtgtcctatgcaatgcagtggttaaagtgaattgtagttctatcaaaataaagatacgtttagtggaaaagtatttg

SEQ ID NO: 591748 - DNA, 120 bp, Artificial Sequence
  ENSG00000173258_108 (sequence is synthesized)
actctgcttctgtttttaaaattgtgaaatgtggcactgtgtggatttccatttctcactagcctcaagtgactaccatattaagttgctctacgcaatcctagccacagagaacccaac

SEQ ID NO: 591749 - DNA, 120 bp, Artificial Sequence
  ENSG00000173258_109 (sequence is synthesized)
aaattggagtagcttaactgaatgaaagtttattccccaggggtctttccagcattttgttgctttcccatattttgtagtcatgctgtgtggagcacataacttccaacgtcccagagg

SEQ ID NO: 591750 - DNA, 120 bp, Artificial Sequence
  ENSG00000173258_110 (sequence is synthesized)
cagggaaaggaagaactggagcattgtgcagtgtttttaagcactagcctagaaacagctgagaaccacaggtttcaaactcggtgccaaggtttcccattccactctagagatctcaca

SEQ ID NO: 591751 - DNA, 120 bp, Artificial Sequence
  ENSG00000173258_111 (sequence is synthesized)
caggcttcccaggatattttaaaatctggagattatcacaactacaactattgacatcacaaactactactattatgttattggaactaactacttagcaaatggaattgatagttaatg

SEQ ID NO: 591752 - DNA, 120 bp, Artificial Sequence
  ENSG00000173258_112 (sequence is synthesized)
ggttttttgtttgtttgcctgggagcattgtggaaaaatggccatggtactacagatcctgtaactaagaaagtcaacctctgtcttagaagtcacttctactcttccgttgcccagaga

SEQ ID NO: 591753 - DNA, 120 bp, Artificial Sequence
  ENSG00000173258_113 (sequence is synthesized)
tcaatcatataaccctaacctaacttaaagggaggcttgaaatacagctttcccctcattgtggtgagcacatagattatttctaccacagtctgttctttcggtcaccaaactctttct

SEQ ID NO: 591754 - DNA, 120 bp, Artificial Sequence
  ENSG00000173258_114 (sequence is synthesized)
tcccacacttaatgcatacagtagcccccttatccatgggggatatgctccaagacctcgagtggatgcctgcaacctcagatagtaccaaaccctgtatgttctatgttttgtcagtct

SEQ ID NO: 591755 - DNA, 120 bp, Artificial Sequence
  ENSG00000173258_115 (sequence is synthesized)
gataacccaagaaggctactaagtgactaacagacaggtagtgtagatgacatggatatgctggacaaagggataatttgtgtcctaggaggcacggagcaggatggcaagaggtttcat

SEQ ID NO: 591756 - DNA, 120 bp, Artificial Sequence
  ENSG00000173258_116 (sequence is synthesized)
caggctactcagaacatactggaattttttatttctggaattttctatttaaaattttggggccaagattgagggtaactgaaaccacggaaagtgaaactttgaataaggggagaccac

SEQ ID NO: 591757 - DNA, 120 bp, Artificial Sequence
  ENSG00000173258_117 (sequence is synthesized)
tgtattttacccaagggagacaatccaaagtctaatctgctcagggtctacaactgaagtccagggtctttgagttagatgctttgagtgtgacctactttttgcctttgggaccctaaa

SEQ ID NO: 591758 - DNA, 120 bp, Artificial Sequence
  ENSG00000173258_118 (sequence is synthesized)
tgtcagtgcctgttaatttttctttgagaagtgtaatttctccagaggtctgctctttaatttccccagagaaggatgttctagtcagcatgggggatataagcctggctaccattactg

SEQ ID NO: 591759 - DNA, 120 bp, Artificial Sequence
  ENSG00000173258_119 (sequence is synthesized)
gcgagcaggcagaggcacgccacatggtgggataggagttggagttcatccccttttattcagacttccacttagtatcctgtttttagtcttctatcttatttccatcctcctccaggc

SEQ ID NO: 591760 - DNA, 120 bp, Artificial Sequence
  ENSG00000173258_120 (sequence is synthesized)
ccagggtacccaagttaatagcctatcaagttctatttggcaaaagataatgcctctcatttcctgtgggaattgtggtgaattgataatcacctggcaaaataaggtaggagtggcatt

SEQ ID NO: 591761 - DNA, 120 bp, Artificial Sequence
  ENSG00000173258_121 (sequence is synthesized)
ttgagctcaaactgttctgtgcacattttcaaactctttagcctctgattttctccctacttccagaaaacctgatgcctccacctcctaaatctttccatatttcattagtaccccatc

SEQ ID NO: 591762 - DNA, 120 bp, Artificial Sequence
  ENSG00000173258_122 (sequence is synthesized)
tggagcagtaaaaaagatgcagatgttctctgaggctgaataagaccatgctctgccttcttgtttcaactgttacacagagatgaccagaggatggggccactgcagtgcagttcaaga

SEQ ID NO: 591763 - DNA, 120 bp, Artificial Sequence
  ENSG00000173258_123 (sequence is synthesized)
ggctctggttcggggaagagctggatggagtatgaatcccaactctgggggtattagctagtggagtggccataggcaagttacttaacacttctgaacctccttttgtctttcataaaa

SEQ ID NO: 591764 - DNA, 120 bp, Artificial Sequence
  ENSG00000173258_124 (sequence is synthesized)
tcagattatagtctatgtgagatatgtgcaaacatgtacatatttcccctagaagcaatggttttcagccttggtggtgaccttatagaacataaatattgtgaataatgaaaatccact

SEQ ID NO: 591765 - DNA, 81 bp, Artificial Sequence
  ENSG00000173258_125 (sequence is synthesized)
ccttatagaacataaatattgtgaataatgaaaatccactgaatctaataagggacttgtatcggtaagatgtaaagaact

SEQ ID NO: 591766 - DNA, 85 bp, Artificial Sequence
  ENSG00000173258_126 (sequence is synthesized)
aaaactgtctcaaaaaaaaaaaaatcttacaacctcacaaataacctagttcaaaaatgggcaaagattttgaacagatatttct

SEQ ID NO: 591767 - DNA, 120 bp, Artificial Sequence
  ENSG00000173258_127 (sequence is synthesized)
ctagttcaaaaatgggcaaagattttgaacagatatttctccaaagaagatatacaaatggcaaatacatacgttgaaagatccttaatattgttagccatagggaaatgcaagtcaaac

SEQ ID NO: 591768 - DNA, 120 bp, Artificial Sequence
  ENSG00000173258_128 (sequence is synthesized)
tcaaatcagaatgaaatatcacttcaaacctactaggatggttataataaaaaagacagacaatagcacgtgttggtgagtatgtagagaagttggaaccctcatacactgcttgtggga

SEQ ID NO: 591769 - DNA, 120 bp, Artificial Sequence
  ENSG00000173258_129 (sequence is synthesized)
atgtaaagtactgtagccactttgcaaaacagtttgacagctcctcaaaatgttaaacatgaaattatcatatgacccagcaattctactcataggtatatacttaaaagaaatgaaaaa

SEQ ID NO: 591770 - DNA, 120 bp, Artificial Sequence
  ENSG00000173258_130 (sequence is synthesized)
taaaagaaatgaaaaatccacacaaaaacctctgcatgaatgttcatagtaacattatacttcatagccagaaagtataagctaatacccatcaggctgggtgtggtggctcacgcctgt

SEQ ID NO: 591771 - DNA, 71 bp, Artificial Sequence
  ENSG00000173258_131 (sequence is synthesized)
tgcgtgtggtggcacatcgagggaggtcgaggctgcagtgagccacgatcacaccactgcactccagccta

SEQ ID NO: 591772 - DNA, 120 bp, Artificial Sequence
  ENSG00000173258_132 (sequence is synthesized)
agtctgaggttagaagttgggactgggtttgaatcagccctgccatttactgtgtgattttgggcaagctgtgtaaactctcagaatgtaaatatttttatctgttaaaaagggatttta

SEQ ID NO: 591773 - DNA, 120 bp, Artificial Sequence
  ENSG00000173261_0 (sequence is synthesized)
caaagctagtaatcacctcttaatttctgttattcttataaacctgaattttcatgtagggcacatttattcaacaaattattgagtgctttttatgtgccagacactgtggtcagcact

SEQ ID NO: 591774 - DNA, 120 bp, Artificial Sequence
  ENSG00000173261_1 (sequence is synthesized)
tggaatagagtagtaagcagaaaaaacatacctgtccttaatgtagggtacatccttactgttaagaagacaatgacagttgcccagaaccccatgattgaaggcagttatgaagctatg

SEQ ID NO: 591775 - DNA, 120 bp, Artificial Sequence
  ENSG00000173261_2 (sequence is synthesized)
tctgaggaatcttgatttggaaggtattataggcttttcctaacaacctggttcaataaatgctttgaagttcagaaccctaagcaaccattctctatgggtctgatgaaaagaatatat

SEQ ID NO: 591776 - DNA, 120 bp, Artificial Sequence
  ENSG00000173261_3 (sequence is synthesized)
gatataattggcagtatcctcctgatgtctttctaatgtaatgtcaaattatgattgcagagccctttcctcaacgtgaaattttgcctaattttttgtcttaggatatttcctaatatt

SEQ ID NO: 591777 - DNA, 120 bp, Artificial Sequence
  ENSG00000173261_4 (sequence is synthesized)
tctagggtccacacctccataagacatgtgccagaggcatgattcagaggctcctgagaccttgaggattcagagctgttgtgaggacatcaccaggcaagccttgcttcagttactaga

SEQ ID NO: 591778 - DNA, 120 bp, Artificial Sequence
  ENSG00000173261_5 (sequence is synthesized)
ttccgtctggactgggtaggaaagaaatgccactttcctggcattatcaatgaagttaatggaagagcagagaatttctagaagttctgaaaaggctttgaggcttgtgacaatctacca

SEQ ID NO: 591779 - DNA, 120 bp, Artificial Sequence
  ENSG00000173261_6 (sequence is synthesized)
tagctcaaacttgaggagaccacctttcataagatggattcaaatacaatacctgcgctgaaagacttttttttgctcctgcttttgggttggctatgggacttgcatcatctggctgaa

SEQ ID NO: 591780 - DNA, 120 bp, Artificial Sequence
  ENSG00000173261_7 (sequence is synthesized)
aaatgtttactagaggcatctcttaaagagttttccaccaaagataagtctttttcttctatttactctatactccagcaatatctccctacagattagtaagatgaatgtgtccacagt

SEQ ID NO: 591781 - DNA, 120 bp, Artificial Sequence
  ENSG00000173261_8 (sequence is synthesized)
taggtgtatacctgtttttaaagaaaaaagatgtctgttagttacactgctatgacctcaggttccagaatattaagggaacattctttcaagagatgtttcactttggactaatccgaa

SEQ ID NO: 591782 - DNA, 120 bp, Artificial Sequence
  ENSG00000173261_9 (sequence is synthesized)
gtttagaaaccagcttattgccaaagggaaaaaggatagcccaaaggacaagaaaacacttctcactatgaattggtttggaagtaacttcttcaggtgtcctgaggatctttccttact

SEQ ID NO: 591783 - DNA, 120 bp, Artificial Sequence
  ENSG00000173261_10 (sequence is synthesized)
caacatatactcacctctgttgtcacacatgtcatctgaagatgaacattttatttccaacttgagaggccatgtaccagccagcgctgtggtgaagcagcctgttcggggagccagtgg

SEQ ID NO: 591784 - DNA, 120 bp, Artificial Sequence
  ENSG00000173261_11 (sequence is synthesized)
caggacgacaatcacagcaattgtccagactggcgggggctggagcaccggtctcttcagtgtctgcagagataggagaatttgtttctgtggtctattctgtcctatgtgtcttgagtg

SEQ ID NO: 591785 - DNA, 120 bp, Artificial Sequence
  ENSG00000173261_12 (sequence is synthesized)
tgacatcgccaggcattatggagagtgtctttgttggccgttgttacctgggtccacctttgcactgagaattggcaccagggagagacataaaatacagggcacactgtgtgaagactg

SEQ ID NO: 591786 - DNA, 120 bp, Artificial Sequence
  ENSG00000173261_13 (sequence is synthesized)
gctggcggtgcactgctgttgggctttttccatctgccaggtggcccgggaactcaagatgaggacctcccaagtctatgaaatctgtgcagtcccaatgactaaggacaccctggtttg

SEQ ID NO: 591787 - DNA, 120 bp, Artificial Sequence
  ENSG00000173261_14 (sequence is synthesized)
acagcaagataactcctcctccttactccccaacaccctcctctcaaacctctcagtggaacaattgctttttcctaagtttttactgaaatggtatgaaaataaatgatttccccccta

SEQ ID NO: 591788 - DNA, 120 bp, Artificial Sequence
  ENSG00000173262_0 (sequence is synthesized)
ggacccctgctctgaccgcaggtgggtgcttgtcttgcttacggagggctcccgatgaaccgagtcacgttttgtaaccacattaacggaccattcaaagtcgaatcctaggcttttcga

SEQ ID NO: 591789 - DNA, 120 bp, Artificial Sequence
  ENSG00000173262_1 (sequence is synthesized)
ggcagttagtgggtcccaacggctgcaggcggggccggcgggggcgcagcggcccgggaggaagcagtaccttgaagagaaattggagagggagtcaattcctaggatagcagagagatg

SEQ ID NO: 591790 - DNA, 78 bp, Artificial Sequence
  ENSG00000173262_2 (sequence is synthesized)
aattggagagggagtcaattcctaggatagcagagagatggacaacagacagaatagatggagtttcacaatggtggc

SEQ ID NO: 591791 - DNA, 120 bp, Artificial Sequence
  ENSG00000173262_3 (sequence is synthesized)
tctttgccatcacagttgctacaatcggctctttccagtttggctacaacactggggtcatcaatgctcctgagacgatcataaaggaatttatcaataaaactttgacggacaaggcaa

SEQ ID NO: 591792 - DNA, 120 bp, Artificial Sequence
  ENSG00000173262_4 (sequence is synthesized)
atgcccctccctctgaggtgctgctcacgaatctctggtccttgtctgtggccatattttccgtcgggggtatgatcggctccttttccgtcggactctttgttaaccgctttggcaggc

SEQ ID NO: 591793 - DNA, 120 bp, Artificial Sequence
  ENSG00000173262_5 (sequence is synthesized)
gcaattcaatgctgattgtcaacctgttggctgccactggtggctgccttatgggactgtgtaaaatagctgagtcagttgaaatgctgatcctgggccgcttggttattggcctcttct

SEQ ID NO: 591794 - DNA, 120 bp, Artificial Sequence
  ENSG00000173262_6 (sequence is synthesized)
gcggactctgcacaggttttgtgcccatgtacattggagagatctcgcctactgccctgaggggtgcctttggcactctcaaccagctgggcatagttattggaattctggtggcccaga

SEQ ID NO: 591795 - DNA, 120 bp, Artificial Sequence
  ENSG00000173262_7 (sequence is synthesized)
tctttggtctggaactcatccttgggtctgaagagctatggccggtgctattaggctttaccatccttccagctatcctgcaaagtgcagcccttccatgttgccctgaaagtcccagat

SEQ ID NO: 591796 - DNA, 120 bp, Artificial Sequence
  ENSG00000173262_8 (sequence is synthesized)
ttttgctcattaacagaaaaaaagaggagaatgctacgcggatcctccagcggttgtggggcacccaggatgtatcccaagacatccaggagatgaaagatgagagtgcaaggatgtcac

SEQ ID NO: 591797 - DNA, 120 bp, Artificial Sequence
  ENSG00000173262_9 (sequence is synthesized)
catcatcatttccattgtgctccagctctctcagcagctctctgggatcaatgctgtgttctattactcaacaggaatcttcaaggatgcaggtgttcaacagcccatctatgccaccat

SEQ ID NO: 591798 - DNA, 120 bp, Artificial Sequence
  ENSG00000173262_10 (sequence is synthesized)
cagcgcgggtgtggttaatactatcttcactttactttctctatttctggtggaaagggcaggaagaaggactctgcatatgataggccttggagggatggctttttgttccacgctcat

SEQ ID NO: 591799 - DNA, 120 bp, Artificial Sequence
  ENSG00000173262_11 (sequence is synthesized)
gactgtttctttgttattaaagaatcactataatgggatgagctttgtctgtattggggctatcttggtctttgtggcctgttttgaaattggaccaggccccattccctggtttattgt

SEQ ID NO: 591800 - DNA, 120 bp, Artificial Sequence
  ENSG00000173262_12 (sequence is synthesized)
ggccgaactcttcagccagggcccccgcccagctgcgatggcagtggccggctgctccaactggacctccaacttcctagtcggattgctcttcccctctgctgcttactatttaggagc

SEQ ID NO: 591801 - DNA, 120 bp, Artificial Sequence
  ENSG00000173262_13 (sequence is synthesized)
ctacgtttttattatcttcaccggcttcctcattaccttcttggcctttaccttcttcaaagtccctgagacccgtggcaggacttttgaggatatcacacgggcctttgaagggcaggc

SEQ ID NO: 591802 - DNA, 120 bp, Artificial Sequence
  ENSG00000173262_14 (sequence is synthesized)
acacggtgcagatagatctgggaaggacggcgtcatggggatgaacagcatcgagcctgctaaggagaccaccaccaatgtctaagtcatgcctccttccacctccctcccggcatggga

SEQ ID NO: 591803 - DNA, 120 bp, Artificial Sequence
  ENSG00000173262_15 (sequence is synthesized)
aagccacctctccctcaacaagggagagactttatcaggatgaacccaggactgcttctgaatgctgctacttgatttctttctcatcccacgcactccatgagcaccccaaggctgcag

SEQ ID NO: 591804 - DNA, 120 bp, Artificial Sequence
  ENSG00000173262_16 (sequence is synthesized)
tttgttggatcttcaatggctttttaaattttatttcctggacatcctcttctgcttaggagagaccgagtgaacctaccttcatttcaggagggattggccgcttggcacatgacaact

SEQ ID NO: 591805 - DNA, 120 bp, Artificial Sequence
  ENSG00000173262_17 (sequence is synthesized)
ttgccagcttttcctcccttgggttctgatattgccgcactagaggatataggagaggaaaagtaaggtgcagttgccccaacctcagacttaccaggaagcagatacatatgagtgtgg

SEQ ID NO: 591806 - DNA, 120 bp, Artificial Sequence
  ENSG00000173262_18 (sequence is synthesized)
aagccggagggtgtttatgtaagagcaccttcctcacttccatacagctctacgcggcaaattaacttgagttttatttatcttatcctctggtttaattacataaatatttatttttta

SEQ ID NO: 591807 - DNA, 120 bp, Artificial Sequence
  ENSG00000173262_19 (sequence is synthesized)
agtcgcggggtctgggaggagacctgaatgaaatgagggagccttgggagcatgatccaggcggagggaactggattcgggaggaggaactgccttggccttgaaagatacctaccagga

SEQ ID NO: 591808 - DNA, 120 bp, Artificial Sequence
  ENSG00000173262_20 (sequence is synthesized)
gttcaagtgctgtgcgggtgcatcagctttgtagatttgtgcaagatgaaaattggaattgtcttaggaaattatggatcattcatttattcagtgctggattcattcagtgatttatgt

SEQ ID NO: 591809 - DNA, 120 bp, Artificial Sequence
  ENSG00000173262_21 (sequence is synthesized)
ctgaagtgtgacagaaggggagtaaggccaagtgtccttgccctctattggagattctgcctcccctgggacagatggcttcttgagcacactcccacgatgggtggctgctctggtaca

SEQ ID NO: 591810 - DNA, 120 bp, Artificial Sequence
  ENSG00000173262_22 (sequence is synthesized)
tctcatccacttcttcatctgtgaagctgtcacccatggtggtgagcagctcctggaggtggtcctcatgaatgaaacctgaggattcctcgttgaagcaggtattcatccatggggttc

SEQ ID NO: 591811 - DNA, 120 bp, Artificial Sequence
  ENSG00000173262_23 (sequence is synthesized)
ttccgcggtgaagccagcttgtcgtgctgtcccccttgtcattgaagccatcatggttctggtcaatcatgttgaaagcctccttaaactcctggatgtggaactggtcgaacatcacga

SEQ ID NO: 591812 - DNA, 120 bp, Artificial Sequence
  ENSG00000173262_24 (sequence is synthesized)
agacattggatgtggccccttgtgctgtggtcgcttcttggtggtcttggctttggtccacttgctgaacattttggcttcaggaagcagtaccttgaagagaaattggagagggagtca

SEQ ID NO: 591813 - DNA, 120 bp, Artificial Sequence
  ENSG00000173262_25 (sequence is synthesized)
tgctggagaggttaaggtgcaataagaattcagggagaaatgttgttcattattggagggtaaatgatgtggtgcctgaggtctgtacattacctcttaacaatttctgtccttcagatg

SEQ ID NO: 591814 - DNA, 120 bp, Artificial Sequence
  ENSG00000173262_26 (sequence is synthesized)
gaaactctttgatttctcagaaaagttgtatgcctatttaataaagctactcatttcctttggaactttatctttaagataatagtttacatgtagtagtacttgaaatctaggattatt

SEQ ID NO: 591815 - DNA, 120 bp, Artificial Sequence
  ENSG00000173262_27 (sequence is synthesized)
aactaatatgggcattgtagttaatggcggttgatgggttctaattttggatggagtccagggaagagaaagtgatttctagaaagcctgttcccctcactggacgaaataactccttgt

SEQ ID NO: 591816 - DNA, 120 bp, Artificial Sequence
  ENSG00000173262_28 (sequence is synthesized)
agtagtctcattacttttgaagtaatcccgccacctatctagtgggagagccatccaaatgagaaacctaaaataattggttcttggtagagattcattatttctccactttgttcttta

SEQ ID NO: 591817 - DNA, 120 bp, Artificial Sequence
  ENSG00000173262_29 (sequence is synthesized)
ggagattttaggtgttgattttctgttttattttaactcatacctttaaaggaattccccaaagaatgtttacagcaaacttggaatttgtaacctcagctctgggagaggatttttttc

SEQ ID NO: 591818 - DNA, 120 bp, Artificial Sequence
  ENSG00000173262_30 (sequence is synthesized)
tgagcgattattatctaaagtgtgttgttgctttaggctcacggcacgcttgcgtatgtctgttaccatgtcactgtggtcctatgccgaatgccctcaggggacttgaatctttccaat

SEQ ID NO: 591819 - DNA, 120 bp, Artificial Sequence
  ENSG00000173262_31 (sequence is synthesized)
aaaccaggtttagacagtatgagtcaatgtgcagtgcagcccacacttgagaggatgaatgtatgtgcactgtcactttgctctgggtggaagtatgttattgttgacttattttctctg

SEQ ID NO: 591820 - DNA, 120 bp, Artificial Sequence
  ENSG00000173262_32 (sequence is synthesized)
tgtttgttcctacagcccctttttcatatgttgctcagtctccctttcccttcttggtgcttacacatctcagaccctttagccaaacccttgccagtgacagtattttggttctcagtt

SEQ ID NO: 591821 - DNA, 120 bp, Artificial Sequence
  ENSG00000173262_33 (sequence is synthesized)
ctcactgttccctctgctcctggagcctttgaataaaaatgcacgtagctatggagtggggtttagctggaaaggtggccttccaacttcacgtcaacttctggctcctcagtttggcag

SEQ ID NO: 591822 - DNA, 120 bp, Artificial Sequence
  ENSG00000173262_34 (sequence is synthesized)
taaggcagggaagttgttttcctatttctcactgagaagattgtgaatatttccatatggattttccattattgtttgtttgattctttgttttaaaataaaaattctgaatgtacatga

SEQ ID NO: 591823 - DNA, 120 bp, Artificial Sequence
  ENSG00000173262_35 (sequence is synthesized)
agttagtgggtcccaacggctgcaggcggggccggcgggggcgcagcggcccgggaggtgcgtggttgagcgaagccgcggggcccaaccgcagtcgcggggtctgggaggaagcagtac

SEQ ID NO: 591824 - DNA, 120 bp, Artificial Sequence
  ENSG00000173262_36 (sequence is synthesized)
acaacctgacttttgttcacaatgcaaagactccaactgttgagagtagaagtactcctgggtgtgaaacaaggagatgaaatgcggcatttctttttttcttctcagacctccactctg

SEQ ID NO: 591825 - DNA, 120 bp, Artificial Sequence
  ENSG00000173262_37 (sequence is synthesized)
agcagccgccggggctggaccgtgcggtgcgcaggtgagaagccgggaggggccggacaaccccgaccgcgagccggacccctgctctgaccgcaggaagcagtaccttgaagagaaatt

SEQ ID NO: 591826 - DNA, 120 bp, Artificial Sequence
  ENSG00000173262_38 (sequence is synthesized)
acaccttgaattctaatcaagggaaactagcccaactggccccgaatatgactgcccttgcttggagctctactaccctggagagctcccacccagctgtgcaagagatgaactgtgtga

SEQ ID NO: 591827 - DNA, 120 bp, Artificial Sequence
  ENSG00000173262_39 (sequence is synthesized)
gtgattggcctttgcagtccagttagggatagttcagaattattccctagtaagctcaactatggggtttccaggaacatacttaatttacaaggtccaaagttgattacttttctcaaa

SEQ ID NO: 591828 - DNA, 74 bp, Artificial Sequence
  ENSG00000173262_40 (sequence is synthesized)
gtctcgaacccctgacctcaagttatccgctctgcggcccgaaataactctttacaggatctcgccctgggcct

SEQ ID NO: 591829 - DNA, 120 bp, Artificial Sequence
  ENSG00000173262_41 (sequence is synthesized)
cggcccgaaataactctttacaggatctcgccctgggccttcccagcccagccggcccgcccgcggggatagcccgggcactatctccctgctgcaggcggtgaggggctcgggtatctt

SEQ ID NO: 591830 - DNA, 120 bp, Artificial Sequence
  ENSG00000173262_42 (sequence is synthesized)
gtgcgccgcgccgtccctgcggccggggggtgcgggaatgaggacctgagctggggtagaggtggccgagctagagtagaggaagcagtaccttgaagagaaattggagagggagtcaat

SEQ ID NO: 591831 - DNA, 120 bp, Artificial Sequence
  ENSG00000173262_43 (sequence is synthesized)
cagacagaatagacagggtctccttgtgtcgcccaggctggtccaaaagggggaaataagaactcctggactcaagcgatcctcccgccttgacctccaaaagtgctgagattacaggca

SEQ ID NO: 591832 - DNA, 120 bp, Artificial Sequence
  ENSG00000173264_0 (sequence is synthesized)
atctccctctctgcaccctgcaattcccacccctccgtatttatttccctggtcccgccgacagtccctccttgtctgtctccgggattcaggcctccctccctgacatggagagtaacc

SEQ ID NO: 591833 - DNA, 120 bp, Artificial Sequence
  ENSG00000173264_1 (sequence is synthesized)
tgtctggcctggtgcctgctgccgggctggtgcctgcgctgccacctgctgtgaccctggggctgacagctgcctacaccaccctgtatgccctgctcttcttctccgtctatgcccagc

SEQ ID NO: 591834 - DNA, 120 bp, Artificial Sequence
  ENSG00000173264_2 (sequence is synthesized)
tctggctggtgcttctgtatgggcacaagcgtctcagctatcagacggtgttcctggccctctgtctgctctgggccgccttgcgtaccaccctcttctccttctacttccgagatactc

SEQ ID NO: 591835 - DNA, 120 bp, Artificial Sequence
  ENSG00000173264_3 (sequence is synthesized)
cccgcgccaaccgcctggggcccttgcccttctggcttctctactgctgccccgtctgcctgcagttcttcaccttgacgcttatgaacctctactttgcccaggtggtgttcaaggcca

SEQ ID NO: 591836 - DNA, 120 bp, Artificial Sequence
  ENSG00000173264_4 (sequence is synthesized)
aggtgaagcgtcggccggagatgagccgaggcttgctcgctgtccgaggggcctttgtgggggcctcgctgctctttctgctggtgaacgtgctgtgtgctgtgctctcccatcggcgcc

SEQ ID NO: 591837 - DNA, 120 bp, Artificial Sequence
  ENSG00000173264_5 (sequence is synthesized)
gggcacagccctgggccctgctgcttgtccgcgtcctggtgagcgactccctgttcgtcatctgcgcgctgtctcttgctgcctgcctctgcctcgtcgccaggcgggcgccctccacta

SEQ ID NO: 591838 - DNA, 120 bp, Artificial Sequence
  ENSG00000173264_6 (sequence is synthesized)
aggcggccgcgatgggtggcgccatggtcctgctctatgccagccgggcctgctacaacctgacagcactggccttggccccccagagccggctggacaccttcgattacgactggtaca

SEQ ID NO: 591839 - DNA, 120 bp, Artificial Sequence
  ENSG00000173264_7 (sequence is synthesized)
atgtgtctgaccaggcggacctggtgaatgacctggggaacaaaggctacctggtatttggcctcatcctcttcgtgtgggagctactgcccaccaccctgctggtgggcttcttccggg

SEQ ID NO: 591840 - DNA, 120 bp, Artificial Sequence
  ENSG00000173264_8 (sequence is synthesized)
tgcaccggcccccacaggacctgagcaccagccacatcctcaatgggcaggtctttgcctctcggtcctacttctttgaccgggctgggcactgtgaagatgagggctgctcctgggagc

SEQ ID NO: 591841 - DNA, 120 bp, Artificial Sequence
  ENSG00000173264_9 (sequence is synthesized)
acagccggggtgagagcaccagtatgtcgggcagtctaggctctgggagctggtatggtgccatcgggcgtgagccgggctggtatgggggcagccagacgaagaccactcctctgctct

SEQ ID NO: 591842 - DNA, 120 bp, Artificial Sequence
  ENSG00000173264_10 (sequence is synthesized)
tctcccaggtgccaggaccaggcggccaccaccacagtctctactccaccccacagacgtgatccccctccctcccccacagaatacccaggccccagtccccctcaccctaggcccctg

SEQ ID NO: 591843 - DNA, 120 bp, Artificial Sequence
  ENSG00000173264_11 (sequence is synthesized)
tgccaagtttgtctgccgcttcttgcccaggatcctgggggtcgtggctaccccctcctctggccggctccttgctgctcctgtcatagtgagcttgtgccgtccccctaggatgggggg

SEQ ID NO: 591844 - DNA, 120 bp, Artificial Sequence
  ENSG00000173264_12 (sequence is synthesized)
catggccctggctgccagatgcccacagcaccctggcatgacctgccacctctgcttccacaccggagccagctacctctcctgtgcctgccactcaataaacagtgtctgcgccccaca

SEQ ID NO: 591845 - DNA, 84 bp, Artificial Sequence
  ENSG00000173264_13 (sequence is synthesized)
tctcctccactagctctgagtggggccacaggaccactacgcttgccggacacaaggccccacaggtggaagagatgtgatctt

SEQ ID NO: 591846 - DNA, 120 bp, Artificial Sequence
  ENSG00000173264_14 (sequence is synthesized)
agccggggagccggagccccgggtccccacgacctgagccggctctcccatcagcggcctgaggacctggcgtccgcctcctccctccccttgaggctggagcgtggacgcggtggggga

SEQ ID NO: 591847 - DNA, 120 bp, Artificial Sequence
  ENSG00000173264_15 (sequence is synthesized)
gggtggggcgggggcagctttcgagaattacgaggacaggaggcagaggccctccccatccgcattattggaggagagagagcctcccccagcttggggagggggagagcggggcattgg

SEQ ID NO: 591848 - DNA, 120 bp, Artificial Sequence
  ENSG00000173264_16 (sequence is synthesized)
gataaggaaaggaacctcctccctggctgggatggctgcccgggcgcgggaggagggccggggacccggtgagggaggaccgtagggcccgtgggggcttcacgcctggcaggcggccgg

SEQ ID NO: 591849 - DNA, 120 bp, Artificial Sequence
  ENSG00000173264_17 (sequence is synthesized)
ggatccaaggctcctcgtccgcatcctttttcctccctccttcggccccggggctcacatcctcgctgcctcacaccttgggcgtgtgtgggagcaggagagggattctctggggtcccc

SEQ ID NO: 591850 - DNA, 120 bp, Artificial Sequence
  ENSG00000173264_18 (sequence is synthesized)
atttggaacctggagacccacttctgccaacaagtccttcagcccctctgggccttagtttccccccagtgaagtggggatagtgacagctcccccgggagccagtgaaaactttgtgaa

SEQ ID NO: 591851 - DNA, 120 bp, Artificial Sequence
  ENSG00000173264_19 (sequence is synthesized)
gggagtgattactgcgggcgaaggcgcttggcacagccacaactgaagctcagccgtcggatgtgattattgttgctattgttaccgctccgcctggactgggtgcccggtcggaaagtc

SEQ ID NO: 591852 - DNA, 120 bp, Artificial Sequence
  ENSG00000173264_20 (sequence is synthesized)
ccgctccccgctcctcctcccaggcgcggaagcttcgcgccgcccgcctcgggggacacctcccgcgccatctcgggggcactggagataaggcctccctccctgacatggagagtaacc

SEQ ID NO: 591853 - DNA, 120 bp, Artificial Sequence
  ENSG00000173264_21 (sequence is synthesized)
atcttggctatgggcggaagttttcttcagagaccgagggacgggaatccgttgccgcccccggccgggcggcacgaccccgatttgggtataggagagaggagcgtgggaactggcgga

SEQ ID NO: 591854 - DNA, 120 bp, Artificial Sequence
  ENSG00000173264_22 (sequence is synthesized)
agcggccgctgccctgacccgacgggtatcagccggctctccccctccacccaggacgacatgaacgaccgaggccagggagtcctctccttgggcctctgcatccccccatccttggct

SEQ ID NO: 591855 - DNA, 120 bp, Artificial Sequence
  ENSG00000173264_23 (sequence is synthesized)
ctggggtaggcccagggaggagacacccccaacccctatccggtctgtcctggagaaaagagactgcccttccatgcccctgagtgaggggcctggggcccaggctgcctgtgttcccca

SEQ ID NO: 591856 - DNA, 120 bp, Artificial Sequence
  ENSG00000173264_24 (sequence is synthesized)
ggaagggaatctgggtcagccctccctccaaaggagacagcacggatcctctttttgcataggcctgagggaagtacttccgcccatattcaagatggctgcccagggcagtgggaacgg

SEQ ID NO: 591857 - DNA, 120 bp, Artificial Sequence
  ENSG00000173264_25 (sequence is synthesized)
gtggagtttcgggatgtggagcgaaggtcactgggagggggcggagcttcccctgcccaagttccgatcccaccaggactggaagactcgcgtccagctggagctttgccgcatctgcgt

SEQ ID NO: 591858 - DNA, 120 bp, Artificial Sequence
  ENSG00000173264_26 (sequence is synthesized)
tgctgtgcccgcgctcttcgggcgaggaagtcccttctggtggagggagaaaagggttacatgagttagattaccatggcagctcgagccaggctctccacttccgtgagccttcctcta

SEQ ID NO: 591859 - DNA, 120 bp, Artificial Sequence
  ENSG00000173264_27 (sequence is synthesized)
agtgagatcgggggggagataatgaaggccacaactcccaggaggctccacgccgggcggtcagggacgctcgcgaggacgcatgggcccccaggaatgggaactggttagatcccagga

SEQ ID NO: 591860 - DNA, 120 bp, Artificial Sequence
  ENSG00000173264_28 (sequence is synthesized)
actccgtgccggagacgggaagagaggatgcctagggccctaaatggaaaggccagagctggagacctagcacccagaagatgagaccgcaattcgagaatcaaagggccgggagcgatg

SEQ ID NO: 591861 - DNA, 120 bp, Artificial Sequence
  ENSG00000173264_29 (sequence is synthesized)
actcggctcaaactctgggatctggaacatgctctgggctgtgaggacaagatgttacgtagtcaaggcacagctggggccaacggtggccctggaaggcagagcaccccgggctccggg

SEQ ID NO: 591862 - DNA, 120 bp, Artificial Sequence
  ENSG00000173267_0 (sequence is synthesized)
gacagccgctgcggcagcactcgagccagctcaagcccgcagctcgcagggagatccagctccgtcctgcctgcagcagcacaaccctgcacacccaccatggatgtcttcaagaagggc

SEQ ID NO: 591863 - DNA, 120 bp, Artificial Sequence
  ENSG00000173267_1 (sequence is synthesized)
ttctccatcgccaaggagggcgtggtgggtgcggtggaaaagaccaagcagggggtgacggaagcagctgagaagaccaaggagggggtcatgtatgtgggagccaagaccaaggagaat

SEQ ID NO: 591864 - DNA, 120 bp, Artificial Sequence
  ENSG00000173267_2 (sequence is synthesized)
gttgtacagagcgtgacctcagtggccgagaagaccaaggagcaggccaacgccgtgagcgaggctgtggtgagcagcgtcaacactgtggccaccaagaccgtggaggaggcggagaac

SEQ ID NO: 591865 - DNA, 120 bp, Artificial Sequence
  ENSG00000173267_3 (sequence is synthesized)
ttgaggccatctgccccccaacaggagggtgaggcatccaaagagaaagaggaagtggcagaggaggcccagagtgggggagactagagggctacaggccagcgtggatgacctgaagag

SEQ ID NO: 591866 - DNA, 120 bp, Artificial Sequence
  ENSG00000173267_4 (sequence is synthesized)
cgctcctctgccttggacaccatcccctcctagcacaaggagtgcccgccttgagtgacatgcggctgcccacgctcctgccctcgtctccctggccacccttggcctgtccacctgtgc

SEQ ID NO: 591867 - DNA, 120 bp, Artificial Sequence
  ENSG00000173267_5 (sequence is synthesized)
tgctgcaccaacctcactgccctccctcggccccacccaccctctggtccttctgaccccacttatgctgctgtgaattttttttttaaatgattccaaataaaacttgagcccactcct

SEQ ID NO: 591868 - DNA, 120 bp, Artificial Sequence
  ENSG00000173267_6 (sequence is synthesized)
tggaccctgggtctagccagtgtccctacctcaggcctgctctctcttgtcccccacattctgtcctgtccccttcccatccatccacttcttccagacacagcaggaagaggccctctg

SEQ ID NO: 591869 - DNA, 120 bp, Artificial Sequence
  ENSG00000173267_7 (sequence is synthesized)
aaggggccgccggcccccagacaccatccttacccccccaccgaccccacagtttgtccagctgttctgttgtgtttgtcctgaccgcccccaacacctcgagggaggtctgggctgaca

SEQ ID NO: 591870 - DNA, 120 bp, Artificial Sequence
  ENSG00000173267_8 (sequence is synthesized)
gagggtgaggcatccaaagagaaagaggaagtggcagaggaggtaggagctgggctcctggggtgcaccatggggggttccttggtagggaccccatcccccacagacgcactgcttccc

SEQ ID NO: 591871 - DNA, 120 bp, Artificial Sequence
  ENSG00000173267_9 (sequence is synthesized)
tcctgggctcccagggcccagaggggcctcctgaccttccacagcccctacagggactgtgtacagggctaaccctgaacctgagtgggaggtccccccacggatgacccctcaggcatg

SEQ ID NO: 591872 - DNA, 120 bp, Artificial Sequence
  ENSG00000173269_0 (sequence is synthesized)
aagacaacgtcactagcagtttctggagctacttgccaaggctgagtgtgagctgagcctgccccaccaccaagatgatcctgagcttgctgttcagccttgggggccccctgggctggg

SEQ ID NO: 591873 - DNA, 120 bp, Artificial Sequence
  ENSG00000173269_1 (sequence is synthesized)
ggctgctgggggcatgggcccaggcttccagtactagcctctctgatctgcagagctccaggacacctggggtctggaaggcagaggctgaggacaccggcaaggaccccgtaggacgta

SEQ ID NO: 591874 - DNA, 120 bp, Artificial Sequence
  ENSG00000173269_2 (sequence is synthesized)
actggtgcccctacccaatgtccaagctggtcaccttactagctctttgcaaaacagagaaattcctcatccactcgcagcagccgtgtccgcagggagctccagactgccagaaagtca

SEQ ID NO: 591875 - DNA, 120 bp, Artificial Sequence
  ENSG00000173269_3 (sequence is synthesized)
aagtcatgtaccgcatggcccacaagccagtgtaccaggtcaagcagaaggtgctgacctctttggcctggaggtgctgccctggctacacgggccccaactgcgagcaccacgattcca

SEQ ID NO: 591876 - DNA, 120 bp, Artificial Sequence
  ENSG00000173269_4 (sequence is synthesized)
tggcaatccctgagcctgcagatcctggtgacagccaccaggaacctcaggatggaccagtcagcttcaaacctggccaccttgctgcagtgatcaatgaggttgaggtgcaacaggaac

SEQ ID NO: 591877 - DNA, 120 bp, Artificial Sequence
  ENSG00000173269_5 (sequence is synthesized)
agcaggaacatctgctgggagatctccagaatgatgtgcaccgggtggcagacagcctgccaggcctgtggaaagccctgcctggtaacctcacagctgcagtgatggaagcaaatcaaa

SEQ ID NO: 591878 - DNA, 120 bp, Artificial Sequence
  ENSG00000173269_6 (sequence is synthesized)
cagggcacgagttccctgatagatccttggagcaggtgctgctaccccacgtggacaccttcctacaagtgcatttcagccccatctggaggagctttaaccaaagcctgcacagcctta

SEQ ID NO: 591879 - DNA, 120 bp, Artificial Sequence
  ENSG00000173269_7 (sequence is synthesized)
cccaggccataagaaacctgtctcttgacgtggaggccaaccgccaggccatctccagagtccaggacagtgccgtggccagggctgacttccaggagcttggtgccaaatttgaggcca

SEQ ID NO: 591880 - DNA, 120 bp, Artificial Sequence
  ENSG00000173269_8 (sequence is synthesized)
aggtccaggagaacactcagagagtgggtcagctgcgacaggacgtggaggaccgcctgcacgcccagcactttaccctgcaccgctcgatctcagagctccaagccgatgtggacacca

SEQ ID NO: 591881 - DNA, 120 bp, Artificial Sequence
  ENSG00000173269_9 (sequence is synthesized)
aattgaagaggctgcacaaggctcaggaggccccagggaccaatggcagtctggtgttggcaacgcctggggctggggcaaggcctgagccggacagcctgcaggccaggctgggccagc

SEQ ID NO: 591882 - DNA, 120 bp, Artificial Sequence
  ENSG00000173269_10 (sequence is synthesized)
tgcagaggaacctctcagagctgcacatgaccacggcccgcagggaggaggagttgcagtacaccctggaggacatgagggccaccctgacccggcacgtggatgagatcaaggaactgt

SEQ ID NO: 591883 - DNA, 120 bp, Artificial Sequence
  ENSG00000173269_11 (sequence is synthesized)
actccgaatcggacgagactttcgatcagattagcaaggtggagcggcaggtggaggagctgcaggtgaaccacacggcgctccgtgagctgcgcgtgatcctgatggagaagtctctga

SEQ ID NO: 591884 - DNA, 120 bp, Artificial Sequence
  ENSG00000173269_12 (sequence is synthesized)
tcatggaggagaacaaggaggaggtggagcggcagctcctggagctcaacctcacgctgcagcacctgcagggtggccatgccgacctcatcaagtacgtgaaggactgcaattgccaga

SEQ ID NO: 591885 - DNA, 120 bp, Artificial Sequence
  ENSG00000173269_13 (sequence is synthesized)
agctctatttagacctggacgtcatccgggagggccagagggacgccacgcgtgccctggaggagacccaggtgagcctggacgagcggcggcagctggacggctcctccctgcaggccc

SEQ ID NO: 591886 - DNA, 120 bp, Artificial Sequence
  ENSG00000173269_14 (sequence is synthesized)
tgcagaacgccgtggacgccgtgtcgctggccgtggacgcgcacaaagcggagggcgagcgggcgcgggcggccacgtcgcggctccggagccaagtgcaggcgctggatgacgaggtgg

SEQ ID NO: 591887 - DNA, 120 bp, Artificial Sequence
  ENSG00000173269_15 (sequence is synthesized)
ctggatgacgaggtgggcgcgctgaaggcggccgcggccgaggcccgccacgaggtgcgccagctgcacagcgccttcgccgccctgctggaggacgcgctgcggcacgaggcggtgctg

SEQ ID NO: 591888 - DNA, 120 bp, Artificial Sequence
  ENSG00000173269_16 (sequence is synthesized)
aggaggtgctggaggagatgtctgagcagacgccgggaccgctgcccctgagctacgagcagatccgcgtggccctgcaggacgccgctagcgggctgcaggagcaggcgctcggctggg

SEQ ID NO: 591889 - DNA, 120 bp, Artificial Sequence
  ENSG00000173269_17 (sequence is synthesized)
ccgcggccggcagagcacctggagcccagccacgacgcgggccgcgaggaggccgccaccaccgccctggccgggctggcgcgggagctccagagcctgagcaacgacgtcaagaatgtc

SEQ ID NO: 591890 - DNA, 120 bp, Artificial Sequence
  ENSG00000173269_18 (sequence is synthesized)
gggcggtgctgcgaggccgaggccggggccggggccgcctccctcaacgcctcccttcacggcctccacaacgcactcttcgccactcagcgcagcttggagcagcaccagcggctcttc

SEQ ID NO: 591891 - DNA, 120 bp, Artificial Sequence
  ENSG00000173269_19 (sequence is synthesized)
cacagcctctttgggaacttccaagggctcatggaagccaacgtcagcctggacctggggaagctgcagaccatgctgagcaggaaagggaagaagcagcagaaagacctggaagctccc

SEQ ID NO: 591892 - DNA, 120 bp, Artificial Sequence
  ENSG00000173269_20 (sequence is synthesized)
cggaagagggacaagaaggaagcggagcctttggtggacatacgggtcacagggcctgtgccaggtgccttgggcgcggcgctctgggaggcaggatcccctgtggccttctatgccagc

SEQ ID NO: 591893 - DNA, 120 bp, Artificial Sequence
  ENSG00000173269_21 (sequence is synthesized)
ttttcagaagggacggctgccctgcagacagtgaagttcaacaccacatacatcaacattggcagcagctacttccctgaacatggctacttccgagcccctgagcgtggtgtctacctg

SEQ ID NO: 591894 - DNA, 120 bp, Artificial Sequence
  ENSG00000173269_22 (sequence is synthesized)
tttgcagtgagcgttgaatttggcccagggccaggcaccgggcagctggtgtttggaggtcaccatcggactccagtctgtaccactgggcaggggagtggaagcacagcaacggtcttt

SEQ ID NO: 591895 - DNA, 120 bp, Artificial Sequence
  ENSG00000173269_23 (sequence is synthesized)
gccatggctgagctgcagaagggtgagcgagtatggtttgagttaacccagggatcaataacaaagagaagcctgtcgggcactgcatttgggggcttcctgatgtttaagacctgaacc

SEQ ID NO: 591896 - DNA, 120 bp, Artificial Sequence
  ENSG00000173269_24 (sequence is synthesized)
ccagccccaatctgatcagacatcatggactcgcccagctctcctcggcctggggctctggccaaggatgggctggaggtcattcagttggtctgtctcttccctggaaaccttctgcaa

SEQ ID NO: 591897 - DNA, 120 bp, Artificial Sequence
  ENSG00000173269_25 (sequence is synthesized)
agatggtgtggtgtacgtggcttccctgtaaccacatggggcttggccatttctccatgatgagaaggactggaatgcttctccgggcaggacatggtcctaggaagcctgaaccttggc

SEQ ID NO: 591898 - DNA, 120 bp, Artificial Sequence
  ENSG00000173269_26 (sequence is synthesized)
ttggcatgccttctcagacagcacggcctgggctccaactcttcaccacaccctgtattctacaacttctttggtgttttgctcctcctgtggttggaaacttctgtacaacactttaaa

SEQ ID NO: 591899 - DNA, 120 bp, Artificial Sequence
  ENSG00000173269_27 (sequence is synthesized)
cttttctcttgcttcctcttctcttctcccttatcgtatgatagaaagacattcttccccaggaggaatgtttaaaatggaggcaacattttggccaacattggaaagcactagagggca

SEQ ID NO: 591900 - DNA, 120 bp, Artificial Sequence
  ENSG00000173269_28 (sequence is synthesized)
atgggattaaaccaacctgcttggtctctattagtcagtaatgaagacgacagcctggccaaccaagggaaaggaaattagtatctttagtttcagtcattccttgtaggatatggttta

SEQ ID NO: 591901 - DNA, 120 bp, Artificial Sequence
  ENSG00000173269_29 (sequence is synthesized)
gctgtgcccccacctaaaatatcatcttgaattgtaatccctataatccccacatcaagggagagatcaggtggaggtaattggatcttgggggcggttcccccatgctgttcttgtgat

SEQ ID NO: 591902 - DNA, 120 bp, Artificial Sequence
  ENSG00000173269_30 (sequence is synthesized)
agttctcacgagatctgatgattttataagtttgatagttcctcctgtgttcattctccttcctgccaccttgtgaagatgccttggttcctcttcactgtctgccatgattgtaagttt

SEQ ID NO: 591903 - DNA, 86 bp, Artificial Sequence
  ENSG00000173269_31 (sequence is synthesized)
caattcttgatagcagtgtgaaaatggactaatacacttgtgtttatctgtaatttaaatttcatgtctttttctccttgccttac

SEQ ID NO: 591904 - DNA, 120 bp, Artificial Sequence
  ENSG00000173269_32 (sequence is synthesized)
tctgtaatttaaatttcatgtctttttctccttgccttacatagggtaaagaccaagaaatgccaaacgtgaactaaaatatgtagggccttcaacttttttacttcctccagtatctta

SEQ ID NO: 591905 - DNA, 120 bp, Artificial Sequence
  ENSG00000173269_33 (sequence is synthesized)
ggaccatcgtaattcttgttagcatctctaaccaggaggcagctgagggaggagggaaagaagactgtaaaaatccccctcactaatgatcaactttggaataaagtgatgcccttcaaa

SEQ ID NO: 591906 - DNA, 120 bp, Artificial Sequence
  ENSG00000173269_34 (sequence is synthesized)
ggcagctccaaaccaggccagaggagccccacatccactctgggttggccactgggagatgagggcacccagcaggactccccaagggagggcacaaagatgaagccagcctgagacgga

SEQ ID NO: 591907 - DNA, 120 bp, Artificial Sequence
  ENSG00000173269_35 (sequence is synthesized)
atttcagtctcaagggaagaactgtgggcctcccctggagcactggtgaagtaaggggttggtttggatattgtctcctgactgggatatgggcaggactgacagggagctggagtccta

SEQ ID NO: 591908 - DNA, 120 bp, Artificial Sequence
  ENSG00000173269_36 (sequence is synthesized)
acgaagcctgggctaggtgcaggaagaaccaacccagtggtctcctgacatctcccacgcccccaccgcagctgggtcacctccagaatacggaggagagagctggaggtggaggaacta

SEQ ID NO: 591909 - DNA, 120 bp, Artificial Sequence
  ENSG00000173269_37 (sequence is synthesized)
ccagatcccatcctccggaaagggttagtcaggcaagtgtgctgagaggcccctgggaacctcgtctcgattaacccatcagaaagcagcccatcctttgcacccagctctcagatggaa

SEQ ID NO: 591910 - DNA, 120 bp, Artificial Sequence
  ENSG00000173272_0 (sequence is synthesized)
gatggcggcgcagggcgtagggcctgggccggggtcggcggcgcccccggggctggaggcggcccggcagaagctggcgctgcggcgcaagaaggtgctgagcaccgaggagatggagct

SEQ ID NO: 591911 - DNA, 120 bp, Artificial Sequence
  ENSG00000173272_1 (sequence is synthesized)
agcaccgaggagatggagctgtacgagctggctcaggcggcgggcggcggtatcgaccccgacgtgttcaagatcctggtggacctgctgaagctgaacgtggcccccctcgccgtcttc

SEQ ID NO: 591912 - DNA, 120 bp, Artificial Sequence
  ENSG00000173272_2 (sequence is synthesized)
tgccctcgggggagtattggccctggcggaacgcagcaaccacgagggatccagccagaggatgccacgccagcccagcgctaccaggctgcccaaggggggcgggcctgggaagagccc

SEQ ID NO: 591913 - DNA, 120 bp, Artificial Sequence
  ENSG00000173272_3 (sequence is synthesized)
tacgcagggcagcacctaggatggggcagagacttgtcacatctttgtccccagcaaaggctacatgttacctccttcagttgataataaacctttctgagatgcagagggtccaggtca

SEQ ID NO: 591914 - DNA, 120 bp, Artificial Sequence
  ENSG00000173272_4 (sequence is synthesized)
tgaggggaggagaggaagctcagatggcggcaaactgaagggaagccgactctgagtcaggcctaggtgcacggcctgccatgctgcgtgctgtggggagctgagagcgcatgggcacct

SEQ ID NO: 591915 - DNA, 120 bp, Artificial Sequence
  ENSG00000173272_5 (sequence is synthesized)
aaattgcacgctttcttgaaacagatgctcaagtccatgtgtgccgggcagaggctagcgagcgagccccaggaccctgcggccgtgtctctgcccacgtcgagcgtgcccgagacccga

SEQ ID NO: 591916 - DNA, 120 bp, Artificial Sequence
  ENSG00000173272_6 (sequence is synthesized)
gcctcaacaagatttcacacagcagctacgggggccagagaagcagcaccgcatggtgtggcaggagaaggaggacatgcacaagcaattggttgaagcttcagagacattgaaatccca

SEQ ID NO: 591917 - DNA, 120 bp, Artificial Sequence
  ENSG00000173272_7 (sequence is synthesized)
cccatcagcagcaaaagctggccctgcaggagttcttggagctcaatgagctcatggcagagctctactcccagaagcagaaggtgtgggacaaggaggaggagatggaagtagccatgc

SEQ ID NO: 591918 - DNA, 120 bp, Artificial Sequence
  ENSG00000173272_8 (sequence is synthesized)
aaggaggaggagatggaagtagccatgcagaaagctgacatgatgtggcaggagatctgaagatccaagaagctcagaaagaggatgctgtttagccagatgcggtggctcacgcctgta

SEQ ID NO: 591919 - DNA, 120 bp, Artificial Sequence
  ENSG00000173272_9 (sequence is synthesized)
aagcactgaagctggaagcgtctgcatcaatttctgtggctgccagcacagaaccgcaggaagtaagacagcgttgtcctactgatgctctcacctggggtctgccctcatgtccaggtg

SEQ ID NO: 591920 - DNA, 120 bp, Artificial Sequence
  ENSG00000173272_10 (sequence is synthesized)
ggcgggcggggagggggcaggcgcggcacagcggcggcgtggccctgagtggccaggcctgtctgtcggtcggtctaggcccagcacctgcagggcccatccgtgggctctgctcctggg

SEQ ID NO: 591921 - DNA, 120 bp, Artificial Sequence
  ENSG00000173272_11 (sequence is synthesized)
cttcgctgccagccttaggaggcacgtccaggtcaggtggacgcagagtgcgtgccccagggtggtccaggctgggtagggctcctccgcttagctcctccccacctcttcactcaggcc

SEQ ID NO: 591922 - DNA, 120 bp, Artificial Sequence
  ENSG00000173272_12 (sequence is synthesized)
ttcatcctacaaagtcgggaatcaagacggtttggggctgggcgccgtggctcacgcctataatctttgggaccccacggcgggaggatcctttgaggccatgagtttgagaccagtctg

SEQ ID NO: 591923 - DNA, 120 bp, Artificial Sequence
  ENSG00000173272_13 (sequence is synthesized)
ggtgacagggtgagatcctgtctctaaatgtttttcaaaagacagtctcgatctctgtcctgtggtatacagcatccagggaagtgcccagggagcagggcaggcagacgtcttcctgcc

SEQ ID NO: 591924 - DNA, 120 bp, Artificial Sequence
  ENSG00000173272_14 (sequence is synthesized)
tttaccccacctgggcccagttcctgcctctgatgattgcaggaagagagttagacgcggaactcccagggtgcagaggcctgcggggtctgaagggcctcctccctctccagtgtggtg

SEQ ID NO: 591925 - DNA, 120 bp, Artificial Sequence
  ENSG00000173272_15 (sequence is synthesized)
actgggctgaggagatgctgggactgagagtgtcatggtggagcctccgtccctgctcatcctctccgcatgttgcttctgctcccgatggctctctctgaaatgcagcacaacctccca

SEQ ID NO: 591926 - DNA, 120 bp, Artificial Sequence
  ENSG00000173272_16 (sequence is synthesized)
ggccaatggaaggaggcccagagctggctccctgcctggaagcaggaggagaccctcacaggcatcatgagaaggcgtggaaagcaggctgccttcatgggggaagtgccagggcctggg

SEQ ID NO: 591927 - DNA, 120 bp, Artificial Sequence
  ENSG00000173272_17 (sequence is synthesized)
cacccacgcccgctgacccaagagggcccgggcacctgcgtgctggcctcttcactgaccctcgctctgtctgctctctttgtgtctctctctgacctccagaggcctcctttctctctg

SEQ ID NO: 591928 - DNA, 120 bp, Artificial Sequence
  ENSG00000173272_18 (sequence is synthesized)
ttatgctccacagcccagctgccacacactcacctctctctccaggccccccgggttccctccgcctctcttgctgcctgttctctccttttgcaggttgcgtttattggcttatctctg

SEQ ID NO: 591929 - DNA, 120 bp, Artificial Sequence
  ENSG00000173272_19 (sequence is synthesized)
ggggttggtgctcttccttgttttcatggaaactgcatggccccaagaggcccaagcagctttgagctgcaagggcaggatcatgcaggccaccgctgccctgccgcttagccacagggc

SEQ ID NO: 591930 - DNA, 120 bp, Artificial Sequence
  ENSG00000173272_20 (sequence is synthesized)
actatttctgactcggtttattagagacatggtgtggcagtctctagaccccacagtcgggctggcatccggggacaggaccaacatccccacaccccagaggcgaactagtggtgagtg

SEQ ID NO: 591931 - DNA, 120 bp, Artificial Sequence
  ENSG00000173272_21 (sequence is synthesized)
taaagagcccctctccaggggaagacagccagccgggtgcagtgtgctctgctggagagcacagccccaggcgtgacaaacgcctcggcctcttagaagttgtcccctacctggacagga

SEQ ID NO: 591932 - DNA, 120 bp, Artificial Sequence
  ENSG00000173272_22 (sequence is synthesized)
agtctggaggctgaaacagagactcccaccttcccagagtctgccaggcagtgccacacagatgccatgtgctggtcccatggccacactccagcactcagcccccttgcccgcctcact

SEQ ID NO: 591933 - DNA, 120 bp, Artificial Sequence
  ENSG00000173272_23 (sequence is synthesized)
cctgagttgggacactttccaggtgtcaccaggtgtgatcaggggcctgtgagagcccaggggtctttggtcgcgcctcctgcatgagcctcctgacagcggccacctcactgccaccca

SEQ ID NO: 591934 - DNA, 120 bp, Artificial Sequence
  ENSG00000173272_24 (sequence is synthesized)
gagctcaggcccaagagagggtggagagggcctgaaggacaggcctggagtaggggtgtatggactgcaggctgagatgagcaattgaggggcaagtgtccagcaggagggagaaactgg

SEQ ID NO: 591935 - DNA, 120 bp, Artificial Sequence
  ENSG00000173272_25 (sequence is synthesized)
gaacagagttcttgtcactccaggagatgttgctgctcacttagcactcactcagggctctgggtgccaggcctagctctcagggcagagggcgtggcagggaagtgagatgatcacact

SEQ ID NO: 591936 - DNA, 88 bp, Artificial Sequence
  ENSG00000173272_26 (sequence is synthesized)
cagggcagagggcgtggcagggaagtgagatgatcacactcagtccagtgagaggcagtgaggaaaaccaccagtgagaccagtgtgc

SEQ ID NO: 591937 - DNA, 120 bp, Artificial Sequence
  ENSG00000173273_0 (sequence is synthesized)
gcagtgacagtgctaggggagtccgaagatggcggcgtcgcgtcgctctcagcatcatcaccaccatcatcaacaacagctccagcccgccccaggggcttcagcgccgccgccgccacc

SEQ ID NO: 591938 - DNA, 120 bp, Artificial Sequence
  ENSG00000173273_1 (sequence is synthesized)
cactcagccctggcctggccccggggaccaccccagcctctcccacggccagcggcctggcccccttcgcctccccgcggcacggcctagcgctgccggagggggatggcagtcgggatc

SEQ ID NO: 591939 - DNA, 120 bp, Artificial Sequence
  ENSG00000173273_2 (sequence is synthesized)
tcgggatccgcccgacaggccccgatccccggacccggttgacggtaccagctgttgcagtaccaccagcacaatctgtaccgtcgccgccgctcccgtggtcccagcggtttctacttc

SEQ ID NO: 591940 - DNA, 120 bp, Artificial Sequence
  ENSG00000173273_3 (sequence is synthesized)
atctgccgctggggtcgctcccaacccagccggcagtggcagtaacaattcaccgtcgtcctcttcttccccgacttcttcctcatcttcctctccatcctcccctggatcgagcttggc

SEQ ID NO: 591941 - DNA, 120 bp, Artificial Sequence
  ENSG00000173273_4 (sequence is synthesized)
ggagagccccgaggcggccggagttagcagcacagcaccactggggcctggggcagcaggacctgggacaggggtcccagcagtgagcggggccctacgggaactgctggaggcctgtcg

SEQ ID NO: 591942 - DNA, 120 bp, Artificial Sequence
  ENSG00000173273_5 (sequence is synthesized)
caatggggacgtgtcccgggtaaagaggctggtggacgcggcaaacgtaaatgcaaaggacatggccggccggaagtcttctcccctgcacttcgctgcaggttttggaaggaaggatgt

SEQ ID NO: 591943 - DNA, 120 bp, Artificial Sequence
  ENSG00000173273_6 (sequence is synthesized)
tgtagaacacttactacagatgggtgctaatgtccacgctcgtgatgatggaggtctcatcccgcttcataatgcctgttcttttggccatgctgaggttgtgagtctgttattgtgcca

SEQ ID NO: 591944 - DNA, 120 bp, Artificial Sequence
  ENSG00000173273_7 (sequence is synthesized)
aggagctgatccaaatgccagggataactggaactatacacctctgcatgaagctgctattaaagggaagatcgatgtgtgcattgtgctgctgcagcacggagctgacccaaacattcg

SEQ ID NO: 591945 - DNA, 120 bp, Artificial Sequence
  ENSG00000173273_8 (sequence is synthesized)
gaacactgatgggaaatcagccctggacctggcagatccttcagcaaaagctgtccttacaggtgaatacaagaaagacgaactcctagaagctgctaggagtggtaatgaagaaaaact

SEQ ID NO: 591946 - DNA, 120 bp, Artificial Sequence
  ENSG00000173273_9 (sequence is synthesized)
aatggctttactgactcctctaaatgtgaattgccatgcaagtgatgggcgaaagtcgactcctttacatctagcagcgggctacaacagagttcgaatagttcagcttcttcttcagca

SEQ ID NO: 591947 - DNA, 120 bp, Artificial Sequence
  ENSG00000173273_10 (sequence is synthesized)
tggtgctgatgttcatgcaaaagacaaaggtggacttgtgcctcttcataatgcatgttcatatggacattatgaagtcacagaactgctactaaagcatggagcttgtgttaatgccat

SEQ ID NO: 591948 - DNA, 120 bp, Artificial Sequence
  ENSG00000173273_11 (sequence is synthesized)
ggatctctggcagtttactccactgcacgaggctgcttccaagaaccgtgtagaagtctgctctttgttacttagccatggcgctgatcctacattagtcaactgccatggcaaaagtgc

SEQ ID NO: 591949 - DNA, 120 bp, Artificial Sequence
  ENSG00000173273_12 (sequence is synthesized)
tgtggatatggctccaactccggagcttagggagagattgacttatgaatttaaaggtcattctttactacaagcagccagagaagcagacttagctaaagttaaaaaaacactcgctct

SEQ ID NO: 591950 - DNA, 120 bp, Artificial Sequence
  ENSG00000173273_13 (sequence is synthesized)
ggaaatcattaatttcaaacaaccgcagtctcatgaaacagcactgcactgtgctgtggcctctctgcatcccaaacgtaaacaagtgacagaattgttacttagaaaaggagcaaatgt

SEQ ID NO: 591951 - DNA, 120 bp, Artificial Sequence
  ENSG00000173273_14 (sequence is synthesized)
taatgaaaaaaataaagatttcatgactcccctgcatgttgcagccgaaagagcccataatgatgtcatggaagttctgcataagcatggcgccaagatgaatgcactggacacccttgg

SEQ ID NO: 591952 - DNA, 120 bp, Artificial Sequence
  ENSG00000173273_15 (sequence is synthesized)
tcagactgctttgcatagagccgccctagcaggtcacctgcagacctgccgcctcctgctgagttacggctctgacccctccatcatctccttacaaggcttcacagcagcacagatggg

SEQ ID NO: 591953 - DNA, 120 bp, Artificial Sequence
  ENSG00000173273_16 (sequence is synthesized)
caatgaagcagtgcagcagattctgagtgagagtacacctatacgtacttctgatgttgattatcgactcttagaggcatctaaagctggagacttggaaactgtgaagcaactttgcag

SEQ ID NO: 591954 - DNA, 120 bp, Artificial Sequence
  ENSG00000173273_17 (sequence is synthesized)
ctctcaaaatgtgaattgtagagacttagagggccggcattccacgcccttacacttcgcagcaggctacaaccgcgtgtctgttgtagagtacctgctacaccacggtgccgatgtcca

SEQ ID NO: 591955 - DNA, 120 bp, Artificial Sequence
  ENSG00000173273_18 (sequence is synthesized)
tgccaaagacaagggtggcttggtgccccttcataatgcctgttcatatggacactatgaggtggctgagcttttagtaaggcatggggcttctgtcaatgtggcggacttatggaaatt

SEQ ID NO: 591956 - DNA, 120 bp, Artificial Sequence
  ENSG00000173273_19 (sequence is synthesized)
tacccctctccatgaagcagcagctaaaggaaagtatgaaatctgcaagctccttttaaaacatggagcagatccaactaaaaagaacagagatggaaatacacctttggatttggtaaa

SEQ ID NO: 591957 - DNA, 120 bp, Artificial Sequence
  ENSG00000173273_20 (sequence is synthesized)
ggaaggagacacagatattcaggacttactgagaggggatgctgctttgttggatgctgccaagaagggctgcctggcaagagtgcagaagctctgtaccccagagaatatcaactgcag

SEQ ID NO: 591958 - DNA, 120 bp, Artificial Sequence
  ENSG00000173273_21 (sequence is synthesized)
agacacccagggcagaaattcaacccctctgcacctggcagcaggctataataacctggaagtagctgaatatcttctagagcatggagctgatgttaatgcccaggacaagggtggttt

SEQ ID NO: 591959 - DNA, 120 bp, Artificial Sequence
  ENSG00000173273_22 (sequence is synthesized)
aattcctcttcataatgcggcatcttatgggcatgttgacatagcggctttattgataaaatacaacacgtgtgtaaatgcaacagataagtgggcgtttactcccctccatgaagcagc

SEQ ID NO: 591960 - DNA, 120 bp, Artificial Sequence
  ENSG00000173273_23 (sequence is synthesized)
ccagaaaggaaggacgcagctgtgcgccctcctcctagcgcatggtgcagaccccaccatgaagaaccaggaaggccagacgcctctggatctggcaacagctgacgatatcagagcttt

SEQ ID NO: 591961 - DNA, 120 bp, Artificial Sequence
  ENSG00000173273_24 (sequence is synthesized)
gctgatagatgccatgcccccagaggccttacctacctgttttaaacctcaggctactgtagtgagtgcctctctgatctcaccagcatccaccccctcctgcctctcggctgccagcag

SEQ ID NO: 591962 - DNA, 120 bp, Artificial Sequence
  ENSG00000173273_25 (sequence is synthesized)
catagacaacctcactggccctttagcagagttggccgtaggaggagcctccaatgcaggggatggcgccgcgggaacagaaaggaaggaaggagaagttgctggtcttgacatgaatat

SEQ ID NO: 591963 - DNA, 120 bp, Artificial Sequence
  ENSG00000173273_26 (sequence is synthesized)
cagccaatttctaaaaagccttggccttgaacaccttcgggatatctttgaaacagaacagattacactagatgtgttggctgatatgggtcatgaagagttgaaagaaataggcatcaa

SEQ ID NO: 591964 - DNA, 120 bp, Artificial Sequence
  ENSG00000173273_27 (sequence is synthesized)
tgcatatgggcaccgccacaaattaatcaaaggagtagaaagactcttaggtggacaacaaggcaccaatccttatttgacttttcactgtgttaatcagggaacgattttgctggatct

SEQ ID NO: 591965 - DNA, 120 bp, Artificial Sequence
  ENSG00000173273_28 (sequence is synthesized)
tgctccagaagataaagaatatcagtcagtggaagaagagatgcaaagtactattcgagaacacagagatggtggtaatgctggcggcatcttcaacagatacaatgtcattcgaattca

SEQ ID NO: 591966 - DNA, 120 bp, Artificial Sequence
  ENSG00000173273_29 (sequence is synthesized)
aaaagttgtcaacaagaagttgagggagcggttctgccaccgacagaaggaagtgtctgaggagaatcacaaccatcacaatgagcgcatgttgtttcatggttctcctttcattaatgc

SEQ ID NO: 591967 - DNA, 120 bp, Artificial Sequence
  ENSG00000173273_30 (sequence is synthesized)
cattattcataaagggtttgatgagcgacatgcatacataggaggaatgtttggggccgggatttattttgctgaaaactcctcaaaaagcaaccaatatgtttatggaattggaggagg

SEQ ID NO: 591968 - DNA, 120 bp, Artificial Sequence
  ENSG00000173273_31 (sequence is synthesized)
aacaggctgccctacacacaaggacaggtcatgctatatatgtcacagacaaatgctcttctgtagagtgacccttgggaaatcctttctgcagtttagcaccatgaaaatggcccacgc

SEQ ID NO: 591969 - DNA, 120 bp, Artificial Sequence
  ENSG00000173273_32 (sequence is synthesized)
gcctccagggcaccactcagtcattggtagaccgagcgtcaatgggctggcatatgctgaatatgtcatctacagaggagaacaggcatacccagagtatcttatcacttaccagatcat

SEQ ID NO: 591970 - DNA, 120 bp, Artificial Sequence
  ENSG00000173273_33 (sequence is synthesized)
gaagccagaagccccttcccagaccgcaacagccgcagagcagaagacctagtgaatgcctgctggtgaaggccagatcagatttcaacctgggactggattacagaggattgtttctaa

SEQ ID NO: 591971 - DNA, 120 bp, Artificial Sequence
  ENSG00000173273_34 (sequence is synthesized)
taacaacatcaatattctagaagtccctgacagcctagaaataagctgtttgtcttctataaagcattgctatagtgatgaatagtatgagtaactgatacatactcaactgctactgtt

SEQ ID NO: 591972 - DNA, 120 bp, Artificial Sequence
  ENSG00000173273_35 (sequence is synthesized)
ccctttgaggaaatgtttacaggggcggccttttaacatatctcaggctcattttcattgcaattatccatttctaaaacaagattgcttcgatctagacttggaaatggaaaataagaa

SEQ ID NO: 591973 - DNA, 120 bp, Artificial Sequence
  ENSG00000173273_36 (sequence is synthesized)
aaccaatgctttttcaaatgttcacaattcacacactacatttgttttgttatgcatgacgtgtctataacaaatatacacatacgacaggcaacaagcttgtttttgatttgccagaca

SEQ ID NO: 591974 - DNA, 120 bp, Artificial Sequence
  ENSG00000173273_37 (sequence is synthesized)
gtttgttttttgtttttttgtgttttttgggttactttgaaaatgagccagagccttcttgaggatattttgcacaaagtcacgctgacaaaatcattagcagtgcaacccaagcttctg

SEQ ID NO: 591975 - DNA, 120 bp, Artificial Sequence
  ENSG00000173273_38 (sequence is synthesized)
cagtgcaacccaagcttctggctgagcaagattcagtttccactttttaaaatttttttattttgctctgtagctgcacttctcgttatcataaattgagatgaaaaggaaaaaacatca

SEQ ID NO: 591976 - DNA, 120 bp, Artificial Sequence
  ENSG00000173273_39 (sequence is synthesized)
agttttagtacctttttatgaattggcctatcttacaagagaagggcacaaacaccaacctgacttaggaacgcctaaattcagagaagtcaaagccggtgaaggccacttgctctttcc

SEQ ID NO: 591977 - DNA, 120 bp, Artificial Sequence
  ENSG00000173273_40 (sequence is synthesized)
cttcgggacagtactggagatgcaggttgacacgggcttgagttccaaggtgaaaaaactggggaggctgtgaaggaagagctgcattaaggagggtgaggagcgtgtggttctgtatca

SEQ ID NO: 591978 - DNA, 120 bp, Artificial Sequence
  ENSG00000173273_41 (sequence is synthesized)
tggcagccccaatggatccaggggatgcctccaaaaaatacatgcttcccttcccttaatctgtactgttgggattgttacccctccaaattagctgccttatttcaaaagtcagtgaaa

SEQ ID NO: 591979 - DNA, 120 bp, Artificial Sequence
  ENSG00000173273_42 (sequence is synthesized)
ttactgcacttgatgagggtcacaaaaataccacttgattgtttctttagttgagaatgctgggattcagactcgaatagtggatagatacacacaaatgcaaggacttttttgtttact

SEQ ID NO: 591980 - DNA, 120 bp, Artificial Sequence
  ENSG00000173273_43 (sequence is synthesized)
ccagatttggggtttattttgagtggcatgcttcaaatagttcataaagatccttgcattaaatttctgaaccatttcttcaaacttcttagtgtgtttagacaaggagaacaaaaattg

SEQ ID NO: 591981 - DNA, 120 bp, Artificial Sequence
  ENSG00000173273_44 (sequence is synthesized)
aaaccaaagccctttctgttattttttcaatgaaggtgagaaagaaataccatacaattttctttgtgaaattactgtttattttcatcaacatttaccaagtgccattgacatttataa

SEQ ID NO: 591982 - DNA, 120 bp, Artificial Sequence
  ENSG00000173273_45 (sequence is synthesized)
aaaaaaatgatcctttatagttcttacacttgcccttttcaccttaactgaatatgaattgagtgcactaacttatttacttgatatactgtgcatctactctgctttgaagcgaaagaa

SEQ ID NO: 591983 - DNA, 120 bp, Artificial Sequence
  ENSG00000173273_46 (sequence is synthesized)
atataaacacgaggaggaataggaaagacagtgtgacacaaacttgccattgcaattcaaagccctgaaaacgatgggtttaatgcaaggtgattaagctgtgacctcctttaatctcct

SEQ ID NO: 591984 - DNA, 120 bp, Artificial Sequence
  ENSG00000173273_47 (sequence is synthesized)
gaagcaaaataaaatggttacatgcaaaacttctagaaatagactcttaaaatatatacattttgctttgattttggcttcaacccagtgctggaactaggcatccagactagtttgaat

SEQ ID NO: 591985 - DNA, 120 bp, Artificial Sequence
  ENSG00000173273_48 (sequence is synthesized)
gtttgtagctgaatttttatgggtcctcaaaattaaatcgagaattagcctcagttgttgcttcttttgaagtttcagtgacccaagctgggtgtttgtgtcttggctacttgtttaata

SEQ ID NO: 591986 - DNA, 120 bp, Artificial Sequence
  ENSG00000173273_49 (sequence is synthesized)
gcactagaattccaggtgaagctttgagagttgatattcattaagagggctttttttccccttctttccttctcttttgctgtaacaaagggttgaagaaattgccatctgtgtagtttt

SEQ ID NO: 591987 - DNA, 120 bp, Artificial Sequence
  ENSG00000173273_50 (sequence is synthesized)
cagtagctgtcaagtgtgtcttacttaccttcccccagacgtagtttaaaatggtaaacacagctgtgatttttagttaagtaaaagagttaatatgatatagatatggaaagctttatg

SEQ ID NO: 591988 - DNA, 120 bp, Artificial Sequence
  ENSG00000173273_51 (sequence is synthesized)
gcttcattaaaaagataaaccactacctaactgtggttgtatgttgtttccatcatactaactagatgaatggatgcgccagttttcatcttggtccttacacttgagaagttaaactgt

SEQ ID NO: 591989 - DNA, 120 bp, Artificial Sequence
  ENSG00000173273_52 (sequence is synthesized)
ggttcagtatttaaactgccagtgttatacgtctcatgctctgtgtgccaggtgaaggtactgtgtaaggaagacatttgcggtgcttcttgtcctataatgattcaagtatatagtagt

SEQ ID NO: 591990 - DNA, 120 bp, Artificial Sequence
  ENSG00000173273_53 (sequence is synthesized)
tcttgaaagagtgtgcatatattactcatctgcttaagagagtgggttaatggatatatcagaggagccaaatacatttttttcagaacttgaaaaccaaaggtcatcatgagtgcactc

SEQ ID NO: 591991 - DNA, 120 bp, Artificial Sequence
  ENSG00000173273_54 (sequence is synthesized)
aaaagttaggacaagtttattacatttgggattttcatctgtagccgtatgaagaaccctttccaatataaaagcatggcattaaattaggctgaagtcttttattttttgtatatgtac

SEQ ID NO: 591992 - DNA, 120 bp, Artificial Sequence
  ENSG00000173273_55 (sequence is synthesized)
tatatagaaatactagcaagttaggatcatccaatatggcctaccccgaaatggcccctctgtttccctaaccacatggaagaaagaatctgaacgtctccaccggctctacccgagttc

SEQ ID NO: 591993 - DNA, 120 bp, Artificial Sequence
  ENSG00000173273_56 (sequence is synthesized)
caaaactaaagggcttctccagacctgatggttccagtttacctgctgttggcctgctggatacttgactcaggcataaattaagtgccctggtcccgaactttctccctgtatttgacc

SEQ ID NO: 591994 - DNA, 120 bp, Artificial Sequence
  ENSG00000173273_57 (sequence is synthesized)
tccttccctctttcctaaattactagtctggaattaaaattagctccagcaatgacctttgactccattcattttctcctcatcttgggtcttaaaaaaggagaccagatacctcctagc

SEQ ID NO: 591995 - DNA, 120 bp, Artificial Sequence
  ENSG00000173273_58 (sequence is synthesized)
ttttgtatcacaaccaggaatgggtattaggcctcatgcgctttgctcagaacactgccgctttgttaacaaatgacagcatggaacccagagttttgattcgatgcaaaataacagcag

SEQ ID NO: 591996 - DNA, 120 bp, Artificial Sequence
  ENSG00000173273_59 (sequence is synthesized)
tgcaaccaggattcttgttttccttttccttcttggagtttggaatttctagcttttcaagcagcataagtagaatcaacattaggatgttttcatgaaatagcatccttatacttcttt

SEQ ID NO: 591997 - DNA, 120 bp, Artificial Sequence
  ENSG00000173273_60 (sequence is synthesized)
gagcttgatgttagtggctagactgatttccctttgctctcaaaatacaaagtgcattgaagtatacagagaaatgcctgaatatggcaagcaaataatgtagattaacattctattatt

SEQ ID NO: 591998 - DNA, 120 bp, Artificial Sequence
  ENSG00000173273_61 (sequence is synthesized)
gtatccgttttacaaaaaataaaattttgatatatgccggagaacggcattagaatgcaataagttgtctaggtttttctgtttcagtgtctctcccaatggcacgaagggttattgggc

SEQ ID NO: 591999 - DNA, 120 bp, Artificial Sequence
  ENSG00000173273_62 (sequence is synthesized)
attgtccccacccccgcctttttaacatgtgcactatctggattcctgtaaatggccttgcaaacagaagtggtgtgtattttcaagcacctttcccccattgtatccgaatccctcttg

SEQ ID NO: 592000 - DNA, 120 bp, Artificial Sequence
  ENSG00000173273_63 (sequence is synthesized)
tgtgatatctgtgacaaatagccttcttcttgtgttttctgttggactaattgtctcacgtaaagctatagaccttactaatttggcaggtattcaaaactgccattaagataggatttc

SEQ ID NO: 592001 - DNA, 120 bp, Artificial Sequence
  ENSG00000173273_64 (sequence is synthesized)
atgtcagatacgtatttaaagagtaaagtcaaatttgtttaatgtcagatcagtgacagaagtgaaaagaaagtaattgtgaaagtgatgtttgagctattgtacacatctagcatatgg

SEQ ID NO: 592002 - DNA, 120 bp, Artificial Sequence
  ENSG00000173273_65 (sequence is synthesized)
aaagcaaatgcactcgaaaactactattctagaacatgaggcttcttcagcaacttgtgcactctgccattaataaattaaatttttcccctctagaaagccttaactatggcggaaact

SEQ ID NO: 592003 - DNA, 120 bp, Artificial Sequence
  ENSG00000173273_66 (sequence is synthesized)
ttttaaccttttatattttaataaataaaacattgtagtcccatttcttagtgtttgaaaggtgtgtcagtgagtcggccatgtctccatgtgtttcagacctgttcatcttattttatg

SEQ ID NO: 592004 - DNA, 120 bp, Artificial Sequence
  ENSG00000173273_67 (sequence is synthesized)
atggtatatttcataagtaatattcccttacatgcaatggagctgattaaaattaatccatttcaatttctccatattggaacttcctcagctaccagatttctggtttggagaagtgct

SEQ ID NO: 592005 - DNA, 120 bp, Artificial Sequence
  ENSG00000173273_68 (sequence is synthesized)
ggaaagatttcaaagcctattcagttgtgtatgtggggatacgacagcaactgtgataccttgtagaatatgagtgatatgcaagctgtgttttttaattgttttaaaatgtaaattatg

SEQ ID NO: 592006 - DNA, 120 bp, Artificial Sequence
  ENSG00000173273_69 (sequence is synthesized)
gttatgctaaagtgaaaacctagaggaagctaatgattttatatactttgcacgaccaaatatggtcgtagtatgacgagttttatacattgccagagagttctgcctcctctgaaataa

SEQ ID NO: 592007 - DNA, 120 bp, Artificial Sequence
  ENSG00000173273_70 (sequence is synthesized)
cattcgcactgtagattgcatttcggcttttcctcctttcacattcttttttgctttacacttcacgtcttcgcacctgccctacctcccatcctttcaaagaggtttctttcacgttcc

SEQ ID NO: 592008 - DNA, 120 bp, Artificial Sequence
  ENSG00000173273_71 (sequence is synthesized)
agaattcagattgttctgtgatttcttttacatcagtctacccatttctgcaggcagccctgaaagcccttgtgttgattcagagtgtttgcagagaaatgcagttgaaccctggtagtg

SEQ ID NO: 592009 - DNA, 120 bp, Artificial Sequence
  ENSG00000173273_72 (sequence is synthesized)
gggtgtccctcacacacccgcgcacccctcccaaagttcaggatgaaaggctagaaaacccattcaaagttaggaaagaacacagatctttgaggccgatagcctagacctagaagatga

SEQ ID NO: 592010 - DNA, 120 bp, Artificial Sequence
  ENSG00000173273_73 (sequence is synthesized)
ccttgagtatgtaaacattgtctccgtgacacaaaacactgaaactcttcatgtgcatataacacctgcttctgctcccattgtttcaagctcatcttatctttgtagtagtaatgtttg

SEQ ID NO: 592011 - DNA, 120 bp, Artificial Sequence
  ENSG00000173273_74 (sequence is synthesized)
tctttgatacctacaaactaaaaaggtacttttatcaaggtttctcaaaacatttacaaaaccagctttgagaaaatgttatgttgcctggcaacagcactcggagtagtaattgtgttt

SEQ ID NO: 592012 - DNA, 120 bp, Artificial Sequence
  ENSG00000173273_75 (sequence is synthesized)
tctcattgtgatgttggtctgtgtgagcaaccagtgtagtgactctttggttcattattcgtgttgtttttatttttagtctctgtgtgacccaacagtggcaggggttacaaccccctc

SEQ ID NO: 592013 - DNA, 120 bp, Artificial Sequence
  ENSG00000173273_76 (sequence is synthesized)
tcctttcttttttgtatttatctatttgtaggattgtcagatcaagtacaagatgcccagttaagtttgaatttcagagaaacaatttcacgttaagaatgtttcatgcaatatttggca

SEQ ID NO: 592014 - DNA, 120 bp, Artificial Sequence
  ENSG00000173273_77 (sequence is synthesized)
tatatttacagtaaaagcattcattatttgtctgaaattcaaatttaactgagcatgctggtttttctcattgtttggtttttctaaatctggcaatcctacagctgtggtcatgggaaa

SEQ ID NO: 592015 - DNA, 120 bp, Artificial Sequence
  ENSG00000173273_78 (sequence is synthesized)
tcacctacagcatgttaaagtcctctagtcatcatctcgtcacctgaaatggaagtcctttttccctcaccctccacttctttccaaaggagggcatcaaggaacttaacctgcctgcct

SEQ ID NO: 592016 - DNA, 120 bp, Artificial Sequence
  ENSG00000173273_79 (sequence is synthesized)
ggtgggtttctatttaagacatctttgtgattatatttaacctgcaattgtgctttggcttaatgtctagctcactgtacttgtaaatgattaatattcaataaaaccatttttaaagta

SEQ ID NO: 592017 - DNA, 120 bp, Artificial Sequence
  ENSG00000173273_80 (sequence is synthesized)
ctctctccgatttttctgaagaaactaattttataaaggactattagttcgtacttaaattcatggattctcctataaagctgatttagatcttgtttctaataaaaataattacccgtg

SEQ ID NO: 592018 - DNA, 120 bp, Artificial Sequence
  ENSG00000173273_81 (sequence is synthesized)
gaaaatattcttatttggaaaaagaaaactttttggataaatttttgaaactttgagcaagctatcaaaagttgtctgcctcctccttctccccagccccaaaatacacagacttaacaa

SEQ ID NO: 592019 - DNA, 120 bp, Artificial Sequence
  ENSG00000173273_82 (sequence is synthesized)
taatttatgaaagcagataaatatggggtatataataagataatttcattatttaattcaatgaattgcttgttttagtgctctgtaagtatttgaacaagtaaactttttgagttaaca

SEQ ID NO: 592020 - DNA, 120 bp, Artificial Sequence
  ENSG00000173273_83 (sequence is synthesized)
tttccacatttcgttcagttgaaaaggagatgtatgaaaatgtttattatgatttcagaaaaatatggaggacactttaaagctgcttggattaacttgtgataaacatcagacttcatg

SEQ ID NO: 592021 - DNA, 120 bp, Artificial Sequence
  ENSG00000173273_84 (sequence is synthesized)
catacaaagccttgctatgatataacaagtgagaaggaaagagttaaaagatgtgcaaattagttcaggccagatgaattgcccctatatgaggcaaggtgacatgagaatttttcagat

SEQ ID NO: 592022 - DNA, 120 bp, Artificial Sequence
  ENSG00000173273_85 (sequence is synthesized)
ttcaaaaaagacatggtttggctatttcttaacaaggtgaatacaagaaagacgaactcctagaagctgctaggagtggtaatgaagaaaaactaatggctttactgactcctctaaatg

SEQ ID NO: 592023 - DNA, 120 bp, Artificial Sequence
  ENSG00000173273_86 (sequence is synthesized)
aaaggtaagttattttaaatacaatcctctttaattgcaatgcttcaaaattttgtgaatgtggcatatatatatataagcacgtatacctacatggctttattttaactggcatctttt

SEQ ID NO: 592024 - DNA, 120 bp, Artificial Sequence
  ENSG00000173273_87 (sequence is synthesized)
cactgtaaatgaaatgctactatatctgttattggcagttgtgacacattcatagaactggtgaagcatggatcttaagtaagccttttctcttaaatgtcagacacagcaagttatttg

SEQ ID NO: 592025 - DNA, 120 bp, Artificial Sequence
  ENSG00000173273_88 (sequence is synthesized)
ttacatgaaactgcagttttgtcggtgattaaaattacagcatatgctcttttctgggtatgataatggaaactggaaatatgagtgtcctatttacccatctttgttaagacatttgtg

SEQ ID NO: 592026 - DNA, 120 bp, Artificial Sequence
  ENSG00000173273_89 (sequence is synthesized)
tgggtgcagggtccggttaggacaagaaaacaggttattgtgatgggacaaagtgggggcgtggttatggttcttcatcacctcaccagaagactggaggttcctttcttttggtggtgc

SEQ ID NO: 592027 - DNA, 120 bp, Artificial Sequence
  ENSG00000173273_90 (sequence is synthesized)
ctgggtgatgggggcgtggttgggggggataagtgaatccaaggaattcttcagtggttgcacagtactcattacaaaactcactgtagttggtagtctctgcatatggatatatttaca

SEQ ID NO: 592028 - DNA, 120 bp, Artificial Sequence
  ENSG00000173273_91 (sequence is synthesized)
ctttagtttttggtgtgcaggaatacagttagatttggacagctttagagtagttttgtcgtttgtgtgctagtttattttgtttttacaagggtatgtcctttgaggacagtccagacc

SEQ ID NO: 592029 - DNA, 120 bp, Artificial Sequence
  ENSG00000173273_92 (sequence is synthesized)
aaaagaggtttaatacaacccaacacatgtttgaggatctattgtagccttaataacccaatgaaagacataaatgaagtgtttgaaagtttcccttcttctaaagaagtttgcagtcta

SEQ ID NO: 592030 - DNA, 120 bp, Artificial Sequence
  ENSG00000173273_93 (sequence is synthesized)
gacggggagaccaaaatatgccaatgtgaaacaactggagaagaatatttggatgcattatatgatgatggaagaaatataggctttgatgttgtggccactattatttgttgtctagca

SEQ ID NO: 592031 - DNA, 120 bp, Artificial Sequence
  ENSG00000173273_94 (sequence is synthesized)
gaccatttacctcgtgtcagttgcctcagttttctcatgggcaaaaatcataaaatgatgttgtgcgagcatttggtgagaagtatctggcacaaagttctccctcaaaaagtgtgaatt

SEQ ID NO: 592032 - DNA, 120 bp, Artificial Sequence
  ENSG00000173273_95 (sequence is synthesized)
acttgtctttttttttttttttgcaagtagttgatgattttctctcaaagacacctaataatatgtttataaaataaagagaactgtaaaataaaaacaaaggaccataatctcactgcc

SEQ ID NO: 592033 - DNA, 120 bp, Artificial Sequence
  ENSG00000173273_96 (sequence is synthesized)
tgcctggatacctattgttgatattttaaaaatgtaggtaataatgttttatacattagaaacattatattggaaatacatatattgtacgttatacaattcaaataggacagaaaaata

SEQ ID NO: 592034 - DNA, 120 bp, Artificial Sequence
  ENSG00000173273_97 (sequence is synthesized)
atgaaaggcatcacacagaaacatcagagataacacaccagagataacttctgttaagtttctcctatatttctaatatatatatatatcacttcttcagtttgttctgttaacagtaaa

SEQ ID NO: 592035 - DNA, 120 bp, Artificial Sequence
  ENSG00000173273_98 (sequence is synthesized)
acatgtgttgacccactgtagtatttatttttaccacacttgggagatatgattaaccattttacagatgacaaaagtgaagcatatatcgatcgcttaaataagtccaaattcagtcag

SEQ ID NO: 592036 - DNA, 120 bp, Artificial Sequence
  ENSG00000173273_99 (sequence is synthesized)
gaaatagtggaaattgagtttgaattcaggcagtttgattttagagcttgtgaaatcaaacttaaactgtcagaaccctggattaaggtcacttttcatttttgtgagtaattgaagtgt

SEQ ID NO: 592037 - DNA, 120 bp, Artificial Sequence
  ENSG00000173273_100 (sequence is synthesized)
agagttcccaatttttgggagaagtagtaatgcggaggggcttatatgcaagagagtagctttcacatgttttttattgtagcccatacttagaaatacattttacattgtcacatacgc

SEQ ID NO: 592038 - DNA, 120 bp, Artificial Sequence
  ENSG00000173273_101 (sequence is synthesized)
aactgaatcaaaagtttctggaaacaatactttcccttaatacatgtgttgtcctctgatattttatattttattctgtttcatttttagcaaatgctgcttgtgatccattaatgggtc

SEQ ID NO: 592039 - DNA, 120 bp, Artificial Sequence
  ENSG00000173273_102 (sequence is synthesized)
gtgaccagtggtatgagaaacacttaaaggaaatcattgttaggtcactggattcattattgatatacagacactacttattaggaatgcagtgaattgaatcagaaacagacttttgcc

SEQ ID NO: 592040 - DNA, 120 bp, Artificial Sequence
  ENSG00000173273_103 (sequence is synthesized)
tatttgtttgctcaagggtcttgcttgttttagatgaaatagcatttctttttccttaggctaaatgaaaggcctaagtctgattttattaatcaacagaggtgtctacttttgcatact

SEQ ID NO: 592041 - DNA, 120 bp, Artificial Sequence
  ENSG00000173273_104 (sequence is synthesized)
ttattccaagtttgcctattttaacaaattgcgtcacaaatcatgtcatttctcaccatcccactttatgcgtaatcaccaataaatgatagttatatttatgtgtattaatgtatttag

SEQ ID NO: 592042 - DNA, 120 bp, Artificial Sequence
  ENSG00000173273_105 (sequence is synthesized)
gataagtcacacaaaatagtgcttgtttctcaaatcacgtgtcttctatttgccacaatagttacttgttattctgtttcagagttttatgtatatccagataagctagaagataaacaa

SEQ ID NO: 592043 - DNA, 120 bp, Artificial Sequence
  ENSG00000173273_106 (sequence is synthesized)
tcaaacagtaccgtaattatgttgtagttatgacaagctaaccttgaattggctttttaagaaagtttttagctcagttgtggaaaacacagtaataaaattctcgatatgaaaacataa

SEQ ID NO: 592044 - DNA, 120 bp, Artificial Sequence
  ENSG00000173273_107 (sequence is synthesized)
catactgctgcttgaaggaggcaaaccaaaactctacattgcaagatttttctagtttcatgtttatgatgttaagtcatgtgataatattgtaccataagttgccaacttcatttcact

SEQ ID NO: 592045 - DNA, 120 bp, Artificial Sequence
  ENSG00000173273_108 (sequence is synthesized)
aataccgttgataaactgctatgtgtgcctggattgcctttgtcttgacaaattgtgtgagacaagtgaatctctccattatctttttattttcttttgacacggagtctcgctctgttg

SEQ ID NO: 592046 - DNA, 62 bp, Artificial Sequence
  ENSG00000173273_109 (sequence is synthesized)
taaattacaggtgtgagccaccgcgcccggcggataattttttaagaggaacaaggttttgg

SEQ ID NO: 592047 - DNA, 120 bp, Artificial Sequence
  ENSG00000173273_110 (sequence is synthesized)
tgagttacggctctgacccctccatcatctccttacaaggcttcacagcagcacagatgggcaatgaagcagtgcagcagattctgagtggtcattcgtagatagtgatcattctacttc

SEQ ID NO: 592048 - DNA, 120 bp, Artificial Sequence
  ENSG00000173273_111 (sequence is synthesized)
ctctttttctgttcttctctatttaattctctatttgctgcctactgcatttcttaatctgtcttctgccaaatgctaacagcatgatattttgcaatcatctaggtgaatacaagaaag

SEQ ID NO: 592049 - DNA, 120 bp, Artificial Sequence
  ENSG00000173273_112 (sequence is synthesized)
cgtcaatttgctgcccgtctccaaggcactggtgatgctgccttcacaagctggctaacgtcacggctccatcacccagcggggtgaatacaagaaagacgaactcctagaagctgctag

SEQ ID NO: 592050 - DNA, 120 bp, Artificial Sequence
  ENSG00000173275_0 (sequence is synthesized)
agttgccggtgagcttgggagaaccgtgggcgctgaggcgctgtaggtggctccctcccaccccaacgatttcagagagaaacaagtcggaatctgagaagtgaggctccagataaactg

SEQ ID NO: 592051 - DNA, 120 bp, Artificial Sequence
  ENSG00000173275_1 (sequence is synthesized)
taaactgctggaagggggcgatggctgtggccctgggttgtgcaatccaggcatccttgaatcaaggctctgtgtttcaagaatatgatactgactgtgaagttttccgtcagcgcttca

SEQ ID NO: 592052 - DNA, 120 bp, Artificial Sequence
  ENSG00000173275_2 (sequence is synthesized)
ggcagttccagtacagagaagcagctgggcctcatgaagcatttaacaaactctgggagctttgctgtcaatggctgaagccaaagatgcgctctaaggaacaaatcctggagctgctag

SEQ ID NO: 592053 - DNA, 120 bp, Artificial Sequence
  ENSG00000173275_3 (sequence is synthesized)
tgttggagcaattcctaactatcctgcccacagagatagagacctgggtgagggagcactgcccagagaatagagaaagagttgtgtcactgatagaagacttacagagagaacttgaga

SEQ ID NO: 592054 - DNA, 120 bp, Artificial Sequence
  ENSG00000173275_4 (sequence is synthesized)
taccagagcagcaggttgatatgcatgacatgctcttggaagaactggcaccagtgggaacggcacacataccaccaaccatgcacctagagtcacctgcactccaggtaatgggacctg

SEQ ID NO: 592055 - DNA, 120 bp, Artificial Sequence
  ENSG00000173275_5 (sequence is synthesized)
cccaggaggccccagtagcagaggcatggatcccacaggcagggccaccggagctgaactatggtgctactggagaatgtcagaactttctggaccctggatatccattaccaaaacttg

SEQ ID NO: 592056 - DNA, 120 bp, Artificial Sequence
  ENSG00000173275_6 (sequence is synthesized)
acatgaacttctcattggagaatagagaagagccatgggtgaaggaattacaggattctaaagaaatgaaacaattacttgattccaagataggttttgagatcgggatagaaaatgaag

SEQ ID NO: 592057 - DNA, 120 bp, Artificial Sequence
  ENSG00000173275_7 (sequence is synthesized)
aagatacttcaaaacagaaaaaaatggagactatgtatccatttattgtaactttagaggggaatgctctccagggtcccattttgcaaaaagactatgtacagttagaaaatcaatggg

SEQ ID NO: 592058 - DNA, 120 bp, Artificial Sequence
  ENSG00000173275_8 (sequence is synthesized)
aaacccccccagaggatttacagacagatttagcaaaactggtagatcagcagaaccccactctgggagagacacctgagaactccaacttggaagaacctctcaaccctaaaccccaca

SEQ ID NO: 592059 - DNA, 120 bp, Artificial Sequence
  ENSG00000173275_9 (sequence is synthesized)
agaaaaagagtccaggagagaaacctcaccgatgtcctcagtgtggaaaatgttttgctcggaagtcacaacttactgggcatcagagaattcattcaggagaagaacctcacaaatgcc

SEQ ID NO: 592060 - DNA, 120 bp, Artificial Sequence
  ENSG00000173275_10 (sequence is synthesized)
ctgaatgtgggaaaagattccttcgtagttcagacctttatagacaccaacgacttcatacaggggagagaccctatgaatgcactgtatgtaaaaagcgattcactcggcggtcacatc

SEQ ID NO: 592061 - DNA, 120 bp, Artificial Sequence
  ENSG00000173275_11 (sequence is synthesized)
ttatagggcaccagagaacccattctgaagaagaaacatataaatgtcttgagtgtgggaaaagtttttgtcatggatcaagtcttaaaagacatctgaaaactcatacaggtgaaaaac

SEQ ID NO: 592062 - DNA, 120 bp, Artificial Sequence
  ENSG00000173275_12 (sequence is synthesized)
ctcatagatgtcataattgtgggaaaagttttagtcgactgacagctcttactttgcaccagagaacgcatactgaagagagaccttttaaatgtaattattgtgggaaaagttttagac

SEQ ID NO: 592063 - DNA, 120 bp, Artificial Sequence
  ENSG00000173275_13 (sequence is synthesized)
agagaccaagcctcgttattcatttaagaatccacacaggggagaagccatacaagtgtactcattgttctaaaagcttcagacagagagccggccttattatgcaccaggtcactcact

SEQ ID NO: 592064 - DNA, 120 bp, Artificial Sequence
  ENSG00000173275_14 (sequence is synthesized)
ttagaggacttatttaagaattgctaagggaaacaggtcttacacaaattgacactaactcaaaaaaaatcttaacctgcagcaggctgtttgtcttggaagcttttgtttgagcttata

SEQ ID NO: 592065 - DNA, 120 bp, Artificial Sequence
  ENSG00000173275_15 (sequence is synthesized)
agaacatagacagcttttttttttactagttttaaaacccatcttccaaggtatatgaattctagagtatttatctactcctgtgattttcttagatttgatttcttctgtctgcacaac

SEQ ID NO: 592066 - DNA, 120 bp, Artificial Sequence
  ENSG00000173275_16 (sequence is synthesized)
taaattatgacaatccttttagaggtagggtcaatatagtggataaacctgtctatcagacgtattgattatagcagtactatagttattctgctgtcattattaaagatgattatattc

SEQ ID NO: 592067 - DNA, 120 bp, Artificial Sequence
  ENSG00000173275_17 (sequence is synthesized)
attcaaagctttagatgtgtcccatgtggcaagaaaggagacagtgaattttgtcaaacaataaaaatgtgtcaggaacacaaggatgaaggggatgtcatttgcctggtaagaactggg

SEQ ID NO: 592068 - DNA, 120 bp, Artificial Sequence
  ENSG00000173275_18 (sequence is synthesized)
ttatttccactgaaatttgttatgtttaaggaaattaagattttaagcttgaaattatacaagcagaatctaatttaattttgattgactgaagaaccagggtcttttgctctcctttgg

SEQ ID NO: 592069 - DNA, 120 bp, Artificial Sequence
  ENSG00000173275_19 (sequence is synthesized)
tatttcactctcctttggtattcaatcatgtgtcttttagtgctttttaaaattttacccattctttaattcagcatctccctatgtatgtgtcatagaatacttagttctgctagatat

SEQ ID NO: 592070 - DNA, 120 bp, Artificial Sequence
  ENSG00000173275_20 (sequence is synthesized)
tctgcaaatatatttgggaattacttcctgctgtttcgccttcttaggttcatagtacacatcagcatatgagaatctctgagaggtcctctagaaaggagagaaaaagcacctcttttg

SEQ ID NO: 592071 - DNA, 120 bp, Artificial Sequence
  ENSG00000173275_21 (sequence is synthesized)
gctcaatgttttccaaacttatttgaccccaaaacctttttcatatacccaataataagctacagaactaatattctgcaaatgtctcttggaacacactgccttaaacagatatttcta

SEQ ID NO: 592072 - DNA, 120 bp, Artificial Sequence
  ENSG00000173275_22 (sequence is synthesized)
tagctgtcagtatagttatgttgctcccaagcctagttatctccagttgttttaagggtgttatgaaaaattcttaaaatatatatgaatttgtgtaacacacacagagacacacacaca

SEQ ID NO: 592073 - DNA, 120 bp, Artificial Sequence
  ENSG00000173275_23 (sequence is synthesized)
tactactttaagggggtgaggatcattaattcagataatttttaagtttcctagtgattctcaatctctttgaattttacttacatttacacacacacgcacacacatatgtatatacac

SEQ ID NO: 592074 - DNA, 120 bp, Artificial Sequence
  ENSG00000173275_24 (sequence is synthesized)
atatcattttaagaagctgaggatcactaattcagataatgtataagtttcccagtgattctcaacctctttgaattttacttataattacatacacacacacactgctacttatataaa

SEQ ID NO: 592075 - DNA, 120 bp, Artificial Sequence
  ENSG00000173275_25 (sequence is synthesized)
tgttctcatgtaatcatggtaacagctcaaattcccaaagcaagggaagacttctcattgtcagttaaacctgttaaaacatgaaaatattcattgagcctagttccttgttataaaata

SEQ ID NO: 592076 - DNA, 120 bp, Artificial Sequence
  ENSG00000173275_26 (sequence is synthesized)
caagaaataagacattcaggcattttccctttatgaagatgttcagtcatcctttccttgaactacaattaggaaaagtatatgtctttattccattgaagttctcgagagtgatataaa

SEQ ID NO: 592077 - DNA, 120 bp, Artificial Sequence
  ENSG00000173275_27 (sequence is synthesized)
tactttggggggtatctactatgtgcctaactagtcctgttctaggcttagtggaagctagtaaagaaatataattcatggatcaggctcataaagattttataatatttttagttaaac

SEQ ID NO: 592078 - DNA, 120 bp, Artificial Sequence
  ENSG00000173275_28 (sequence is synthesized)
aagagttgggaaacaggtggagaataatgcaagagagtttgtaattaagtgccaattataccaattgctagacccaggatgtatctttaattcttgtcatccaggtcaacatatgatgct

SEQ ID NO: 592079 - DNA, 120 bp, Artificial Sequence
  ENSG00000173275_29 (sequence is synthesized)
gctataagtctggggctcaaattgatatcccagtagcaataaacatataatataggaggagtctgaatgtagagatgaaaaatacagaatgtaatggcttctcttttctctcttgtggaa

SEQ ID NO: 592080 - DNA, 120 bp, Artificial Sequence
  ENSG00000173275_30 (sequence is synthesized)
ttgcattcaaaccagaacagtgccttagaatggatgtgcccaactgctctgtatttatgcaatatttgaataaagcggaaatgtatgtgctcttcctgcttcacttgcactaattaatta

SEQ ID NO: 592081 - DNA, 120 bp, Artificial Sequence
  ENSG00000173275_31 (sequence is synthesized)
tttgaacaacttagagcttcttccctgaacagtggcaacaagcatggcaattgactctgtcctcatcccaagttggaatcgcttttctctctgcaaccatggcactgtgattatgcatca

SEQ ID NO: 592082 - DNA, 120 bp, Artificial Sequence
  ENSG00000173275_32 (sequence is synthesized)
tttttagcatttaatacagtccatttttggctagtagggttagttgcaatcataatatgagttgcatcctccctctcatttatatcaaatatacttgactagatttttacaagttagaga

SEQ ID NO: 592083 - DNA, 120 bp, Artificial Sequence
  ENSG00000173275_33 (sequence is synthesized)
taccagagcagcaggtaagaaaagaatgtgggatctttgtgattggtccaaaggaagtagctgaggcagctgggactagaccacacatttgtctctatgtcattccccagcctcaagatt

SEQ ID NO: 592084 - DNA, 120 bp, Artificial Sequence
  ENSG00000173275_34 (sequence is synthesized)
tctccagagtcctcttcctttttctcttctgctgaactcagcaaatgagtcagtgcttttaactctatcagactcaattccccttctataacaaatagtttataatgtccactttactat

SEQ ID NO: 592085 - DNA, 120 bp, Artificial Sequence
  ENSG00000173275_35 (sequence is synthesized)
gcacaaatgaaattgatagacaacataatctacccacatacatcaacccaaagcatcagtaaattgctccatggcctgaaggccaattctagccataccctgtttatctgtatactctgt

SEQ ID NO: 592086 - DNA, 120 bp, Artificial Sequence
  ENSG00000173275_36 (sequence is synthesized)
atgtaatggtttttttatcttgttgaaaggtcattgaaaaaaagaggaaggagaagaactgacagtgaatgtgccccacagtgcctaaaatatttactatttggctctttataaagtttg

SEQ ID NO: 592087 - DNA, 120 bp, Artificial Sequence
  ENSG00000173275_37 (sequence is synthesized)
tcaagtctagaaggaatataaaggaaaagaaacatagtttgttataaattgatagggatttgtacatatatgtgcttgggcctgaccgaatgtcatgaagttgtcagatgtttgcatcta

SEQ ID NO: 592088 - DNA, 120 bp, Artificial Sequence
  ENSG00000173275_38 (sequence is synthesized)
tgcttagaatcattgtgaatgggacagccagaaattcagactgataaagctcaagtactacgaacagtgttgctcctcgtcatgtgattttccaaaatggcatacgactctaggtaaatc

SEQ ID NO: 592089 - DNA, 120 bp, Artificial Sequence
  ENSG00000173275_39 (sequence is synthesized)
tgaacaataagcagtgtagtctttgcttttcacattagtgcattcctagaaaatttcatttgtgctgaaactatgcaaaacaaaacaaacaattgtacttatttgaccaacaaggtgggg

SEQ ID NO: 592090 - DNA, 120 bp, Artificial Sequence
  ENSG00000173275_40 (sequence is synthesized)
ttcttgacaggttctttttactcacatgaatgtttgagtgggacattccacacttggtagggacctagaacaattctgcattgtaaattatgttccattaaattctgatagccaccacct

SEQ ID NO: 592091 - DNA, 120 bp, Artificial Sequence
  ENSG00000173275_41 (sequence is synthesized)
gtcagcatatccaaaactccccatggggacagtggcactgtctgccattcagaatgactgtgtaaagcctcttttcagaagtgccgtgactgagagagggcagtatctttgggaaaaggg

SEQ ID NO: 592092 - DNA, 120 bp, Artificial Sequence
  ENSG00000173275_42 (sequence is synthesized)
agcaggagcttccagatgggcatcagggatactccagtcttgtctatgggggttctctgcaggagctgttagcttcagggctcctgaacaggagtcttctgaagttttctgtctccctag

SEQ ID NO: 592093 - DNA, 120 bp, Artificial Sequence
  ENSG00000173275_43 (sequence is synthesized)
ggtacttgggttggtggttgcccttcctttctctgtctccttggttttgtttactatataagattttatcttcatgtggtctagacatttgctgctgaatacagtcactactagtcatgt

SEQ ID NO: 592094 - DNA, 120 bp, Artificial Sequence
  ENSG00000173275_44 (sequence is synthesized)
acagctcttgagcccttgaaatatggccaatacaaattgagatctgctgtaagtatgaaatacacaccacatgcagaagacttggtatgaaaaaagtaggtgaaatatctcactaataat

SEQ ID NO: 592095 - DNA, 120 bp, Artificial Sequence
  ENSG00000173275_45 (sequence is synthesized)
tgttcatattgattacatgttgaaatcctgattgtttgcactggattaagtaacacgtactattaagattggccttactttttaaaaaatttattcatatggccactagaaaatttaaaa

SEQ ID NO: 592096 - DNA, 120 bp, Artificial Sequence
  ENSG00000173276_0 (sequence is synthesized)
gacgtcaaattcaagatggatggaatcacagcggcagcggcggctgcggcgcgcgcgagccgagtgtgagcggaaaggggcccggcgtctgcctcgagactgaagaccgaagacatgaag

SEQ ID NO: 592097 - DNA, 120 bp, Artificial Sequence
  ENSG00000173276_1 (sequence is synthesized)
tagaaacaatccaggaaggctttgggaagctatttgtgtgcgaggatcaaagtgataaactcaagccatggagggattactgcattacatcaaccctgcacacgccatttctctcctaag

SEQ ID NO: 592098 - DNA, 120 bp, Artificial Sequence
  ENSG00000173276_2 (sequence is synthesized)
tgccctgaatgaggagcgtctcaaaggacagctgtgtgatgtgctgctgattgttggagaccaaaagttccgagctcataaaaacgtcttggctgccagcagcgaatactttcagagttt

SEQ ID NO: 592099 - DNA, 120 bp, Artificial Sequence
  ENSG00000173276_3 (sequence is synthesized)
attcacaaataaggaaaatgagtcacaaactgtatttcagcttgacttctgtgagccagatgcttttgataatgttttaaactacatttattcttcctctctatttgttgagaagagcag

SEQ ID NO: 592100 - DNA, 120 bp, Artificial Sequence
  ENSG00000173276_4 (sequence is synthesized)
ccttgctgctgtgcaagaacttggctatagtcttgggatttcctttctgactaacatcgtttctaaaacacctcaagccccctttccaacgtgtcctaatagaaaaaaagtgtttgtaga

SEQ ID NO: 592101 - DNA, 120 bp, Artificial Sequence
  ENSG00000173276_5 (sequence is synthesized)
agatgatgaaaacagttctcaaaagagaagtgtcattgtttgtcaaagtagaaacgaagcgcaaggaaaaactgttagtcaaaatcaacccgatgtaagccatacttcccggccctctcc

SEQ ID NO: 592102 - DNA, 120 bp, Artificial Sequence
  ENSG00000173276_6 (sequence is synthesized)
tagcattgcagtcaaggccaataccaataagccacatgtcccaaaaccaatagaaccacttcataatttgtcattaactgaaaagagttggccgaaagatagttctgtggtatatgcaaa

SEQ ID NO: 592103 - DNA, 120 bp, Artificial Sequence
  ENSG00000173276_7 (sequence is synthesized)
gtctcttgagcattctggatctttggatgatcctaatagaatcagtttggtgaaaagaaatgcagtgttgccttcaaagcctctgcaagacagagaagctatggatgataaaccaggtgt

SEQ ID NO: 592104 - DNA, 120 bp, Artificial Sequence
  ENSG00000173276_8 (sequence is synthesized)
gagtggtcagcttccaaaaggaaaagctctagagctggctttgaagagaccacggccacctgttttgtctgtttgtagctcatcagagactccctatctattaaaagaaactaacaaagg

SEQ ID NO: 592105 - DNA, 120 bp, Artificial Sequence
  ENSG00000173276_9 (sequence is synthesized)
aaatggtcaaggtgaagatagaaacttgttgtactattcaaagttaggcttagtgatcccatccagtggatctggttctggaaaccaaagcattgacaggagtggcccacttgttaagag

SEQ ID NO: 592106 - DNA, 120 bp, Artificial Sequence
  ENSG00000173276_10 (sequence is synthesized)
tctcctcagacggtcattgtcgatggatagccaggttcctgtctattcaccttccatagatttgaaatcttcccagggatcatcttcggtgtccagtgatgcaccagggaatgtgttgtg

SEQ ID NO: 592107 - DNA, 120 bp, Artificial Sequence
  ENSG00000173276_11 (sequence is synthesized)
tgctttatctcagaagtcatctttaaaagattgtagtgaaaaaacagccctagatgacaggcctcaagtgctacaaccgcatcgcctcaggtcctttagtgcttctcagtcaacagacag

SEQ ID NO: 592108 - DNA, 120 bp, Artificial Sequence
  ENSG00000173276_12 (sequence is synthesized)
ggagggagcttcccctgtgactgaggtgcgcataaagactgagcccagcagcccgctgtcggacccctcggacatcatccgcgtcactgtgggagatgcggcaacaacagcagctgcctc

SEQ ID NO: 592109 - DNA, 120 bp, Artificial Sequence
  ENSG00000173276_13 (sequence is synthesized)
atcttcgtcggtcacaagagacctgtctctgaaaacagaagatgaccaaaaagacatgagcagactcccagcaaaaaggaggttccaagcggaccgaagattgccgtttaagaagttaaa

SEQ ID NO: 592110 - DNA, 120 bp, Artificial Sequence
  ENSG00000173276_14 (sequence is synthesized)
ggtgaatgagcacgggtctcctgtgtcagaagataattttgaggaaggctcaagccctactctccttgatgcagattttccagattctgatttgaataaagacgaatttggtgagttgga

SEQ ID NO: 592111 - DNA, 120 bp, Artificial Sequence
  ENSG00000173276_15 (sequence is synthesized)
ggggacgagaccaaacaaaaaatttaaatgcaaacattgccttaagatctttagatcaacagcaggtcttcaccgtcatgttaacatgtaccataacccagaaaagccctacgcttgtga

SEQ ID NO: 592112 - DNA, 120 bp, Artificial Sequence
  ENSG00000173276_16 (sequence is synthesized)
catctgtcacaagaggtttcacaccaacttcaaagtgtggacacactgtcagacccaacacggcatagtgaagaacccatcaccagcctctagttcacatgctgttttggatgaaaaatt

SEQ ID NO: 592113 - DNA, 120 bp, Artificial Sequence
  ENSG00000173276_17 (sequence is synthesized)
ccaaagaaagctgattgacatagtgagagagagagaaattaagaaggccctgatcattaagttaaggcgcggcaagcctggttttcagggacagagtagctcccaagcacagcaagtcat

SEQ ID NO: 592114 - DNA, 120 bp, Artificial Sequence
  ENSG00000173276_18 (sequence is synthesized)
caagaggaacttgagatctcgagccaaaggagcttacatttgtacttactgcggaaaagcgtaccgctttctctctcaatttaagcagcatataaaaatgcatccaggagaaaaacccct

SEQ ID NO: 592115 - DNA, 120 bp, Artificial Sequence
  ENSG00000173276_19 (sequence is synthesized)
tggagtaaataaagttgctaaaccaaaagagcatgctcctcttgcaagtccagtagaaaacaaggaggtttaccagtgccgcctctgtaatgctaagctctcttctctcctagagcaagg

SEQ ID NO: 592116 - DNA, 120 bp, Artificial Sequence
  ENSG00000173276_20 (sequence is synthesized)
aagccacgagcggctgtgccggaacgcggccgtctgcccttactgcagcctcaggtttttctcgcccgagctgaagcaagaacacgagagcaagtgtgagtataagaagctgacctgcct

SEQ ID NO: 592117 - DNA, 120 bp, Artificial Sequence
  ENSG00000173276_21 (sequence is synthesized)
cgagtgcatgcgcaccttcaagtcctctttcagcatctggcggcaccaggttgaagtccataatcagaacaacatggcacccaccgaaaacttttctttgcccgttttggaccacaatgg

SEQ ID NO: 592118 - DNA, 120 bp, Artificial Sequence
  ENSG00000173276_22 (sequence is synthesized)
tgatgtgactggttcttcaaggccccaatcccagcctgagcccaacaaagtaaaccacatcgtcaccacaaaagacgacaacgtgttcagtgattcttcagaacaagttaacttcgactc

SEQ ID NO: 592119 - DNA, 120 bp, Artificial Sequence
  ENSG00000173276_23 (sequence is synthesized)
ggaagattcctcttgtcttcccgaagaccttagtctttccaagcaactgaaaatccaagtcaaagaggagcctgtggaggaggctgaagaagaggcacccgaggccagcacagcccccaa

SEQ ID NO: 592120 - DNA, 120 bp, Artificial Sequence
  ENSG00000173276_24 (sequence is synthesized)
agaagcgggtcctagcaaagaagccagcctgtggccctgcgagaagtgtgggaagatgttcacggtgcataagcagctggagcgtcaccaggagcttctgtgctctgtgaaaccatttat

SEQ ID NO: 592121 - DNA, 120 bp, Artificial Sequence
  ENSG00000173276_25 (sequence is synthesized)
ttgtcacgtgtgcaacaaagcttttcgcactaattttcgactctggagtcacttccaatcgcacatgtctcaggcttcagaggaatcggcacataaggaatctgaggtgtgccctgttcc

SEQ ID NO: 592122 - DNA, 120 bp, Artificial Sequence
  ENSG00000173276_26 (sequence is synthesized)
cacaaactctccctctccaccacctctgccaccgccaccaccactgcccaagatccagcctctggagcctgacagccccacaggcctgtccgaaaacccaactccagccacagaaaaact

SEQ ID NO: 592123 - DNA, 120 bp, Artificial Sequence
  ENSG00000173276_27 (sequence is synthesized)
gtttgtgccccaagaatcagacacccttttttaccatgccccacccctttcagcaatcacatttaaaagacagtttatgtgtaaactttgccacaggacattcaagactgcatttagtct

SEQ ID NO: 592124 - DNA, 120 bp, Artificial Sequence
  ENSG00000173276_28 (sequence is synthesized)
ttggagtcacgaacaaacacacaattgaaagaccaacactttttacctatgggaggcagtccccagatttcaacctgaattgtgaaatgtgtcataagaaacaaaatattttttaaacaa

SEQ ID NO: 592125 - DNA, 120 bp, Artificial Sequence
  ENSG00000173276_29 (sequence is synthesized)
gaataataaaggttggagattgttacgcttgaaattaagttggaggcaaattgataattacttagtaatgtccttaactttagaaatacagcttttaaaatattgtggttctggacctta

SEQ ID NO: 592126 - DNA, 120 bp, Artificial Sequence
  ENSG00000173276_30 (sequence is synthesized)
caagaacaagatggtttgatttcattaatgttgaaattggattagtcttgattgtgtgcatggttcctcattccatggtgtcagtataatcatttaattgaggtttttggttttttattg

SEQ ID NO: 592127 - DNA, 120 bp, Artificial Sequence
  ENSG00000173276_31 (sequence is synthesized)
ctgtcgaagtattccttcttttaattattttagacacttgagttctagttaaatcttaaccatgttcttaagtccaaaataggaagaagtggagtagtttgcagtattgatttatatctt

SEQ ID NO: 592128 - DNA, 120 bp, Artificial Sequence
  ENSG00000173276_32 (sequence is synthesized)
agactactttagcaataaaagataaatctcaactttaataagttatcctgacacttgataaaaataaatatttggtattttgtggtcatgtaaaacttctttttgtatgaaaattgtgag

SEQ ID NO: 592129 - DNA, 120 bp, Artificial Sequence
  ENSG00000173276_33 (sequence is synthesized)
aaatttaaatcagcaatagtaacacttagatttttataaactaacaaaaacttgctctcagtcaatataataaatgatagttaaactctaaggaagacctgggaaatgaaaacaatttat

SEQ ID NO: 592130 - DNA, 120 bp, Artificial Sequence
  ENSG00000173276_34 (sequence is synthesized)
ggaagtcccctacagtcagtttataagggcttcagtagtgatagacattgttataaaaacttgtaccatgttacatgtacactgcaccacagtctaaattcagaccagcatttgaaggac

SEQ ID NO: 592131 - DNA, 120 bp, Artificial Sequence
  ENSG00000173276_35 (sequence is synthesized)
tgcacatatttcatttcctctgatttatgctgtcacaaattgaaaatctgagtgtagttaggacaaaaaacaaagctaaccatatggcactaattttgattttaacattagtgtaacaaa

SEQ ID NO: 592132 - DNA, 120 bp, Artificial Sequence
  ENSG00000173276_36 (sequence is synthesized)
taaggtcgggacatatatttacatagatcccagacactcaagaattagcacagctgatgtaaaattctaaattaccatttacttccagatagagcagaggagaaacacctcactgcagtt

SEQ ID NO: 592133 - DNA, 120 bp, Artificial Sequence
  ENSG00000173276_37 (sequence is synthesized)
tcaacatgctttccaagaacaatatatacgacatatacattttcctgcctctctcttgtgacaatttctgttagaatttgttgggggtctgatggttaaaatcatgggcaaggccattct

SEQ ID NO: 592134 - DNA, 120 bp, Artificial Sequence
  ENSG00000173276_38 (sequence is synthesized)
ctacatcattgcttaatatttcaaaaataggtattagagcactatcagtggtccaaaattagttttagctacttattttgctccatgggttttgggcttttcaaagaatactatgtataa

SEQ ID NO: 592135 - DNA, 120 bp, Artificial Sequence
  ENSG00000173276_39 (sequence is synthesized)
tttgtaattgaaagcctttcagtaggatatccaaagttcaatgtgtttcaaaagggaaaacttttacttgtgggggtgggagttagatgtattaaaaaaacgaaactacaaaatcctttt

SEQ ID NO: 592136 - DNA, 120 bp, Artificial Sequence
  ENSG00000173276_40 (sequence is synthesized)
aagaaagtaataccaatttagactctagtttgtgttacgaggtattctttcaaattttttttaaaagccaactactgtcattaagaaataattttagatttgtgctctagcagaaaataa

SEQ ID NO: 592137 - DNA, 120 bp, Artificial Sequence
  ENSG00000173276_41 (sequence is synthesized)
ctctgtacccatcaatcttattgccaacattccataccagtggtaggaaagatattctcattttttttattgaaccagacatttttataaaatactgattgactttgtacattatggata

SEQ ID NO: 592138 - DNA, 120 bp, Artificial Sequence
  ENSG00000173276_42 (sequence is synthesized)
ttatatatgaaattttgccttgtattctttcacttgaaaaaactccaaaattccacaatattttagtagttaacttcctattctttcttaaatttgatggagaagggaaaataaattgca

SEQ ID NO: 592139 - DNA, 120 bp, Artificial Sequence
  ENSG00000173276_43 (sequence is synthesized)
gttattgattcttgccatctttgttttcttaaagaaatctatgcattttaaggataaaactaaagcatatgggtttacatgaaacatcaggatggattattgtacattgaattcattccg

SEQ ID NO: 592140 - DNA, 120 bp, Artificial Sequence
  ENSG00000173276_44 (sequence is synthesized)
cgtataatgtggtatttcttactctgtccatcttggtagctgtcacttcaaaagaagacagtttccctgagtaatcatcacctacatggccattagagtatctatcggtgataattccat

SEQ ID NO: 592141 - DNA, 120 bp, Artificial Sequence
  ENSG00000173276_45 (sequence is synthesized)
gatacagagtatcttggcattataaattcagtatcccaggacctaaacctttatgctacattttcgaagattttttaaaaataatattgttaatcagtaaaaaaaaaaaatatttttgat

SEQ ID NO: 592142 - DNA, 120 bp, Artificial Sequence
  ENSG00000173276_46 (sequence is synthesized)
ctaaacataggttctgcatatctgttagattttaaaaatgactggtgttttgtcttcacatttttgtctaagcaaggaatataagatttcaaataaaattttgaaccaaaaacatttata

SEQ ID NO: 592143 - DNA, 120 bp, Artificial Sequence
  ENSG00000173276_47 (sequence is synthesized)
atgccgttctggtttttctattactttttatactgtactttaaaagcattaggctgaaagagtttattttggtggtcaaaaaaaatatgcttccactcatgtaactattttaaatgttaa

SEQ ID NO: 592144 - DNA, 120 bp, Artificial Sequence
  ENSG00000173276_48 (sequence is synthesized)
gaagtaaaataatgaaagatatgttaattactttattcagtaaagttttttaagaatgtttatctcagccagtaggcaaatacttggtgtaaaacaagttggtcttaaattgttgcaact

SEQ ID NO: 592145 - DNA, 120 bp, Artificial Sequence
  ENSG00000173276_49 (sequence is synthesized)
cattagctagtgaagatattcatgtaaatatattttaggattgtaattaattttgaaaatgtagaaagctctttattccatgtaagtatgcaggatgcctgcttttttatgcagttgtgg

SEQ ID NO: 592146 - DNA, 120 bp, Artificial Sequence
  ENSG00000173276_50 (sequence is synthesized)
aaagaatgtaaaatgttttaatatattctttgttaatctgagaacttgatactgaatcgtttatgtgggagaaggaaggagtaacataaaacatgtttttatcactcaaagtaagcaatg

SEQ ID NO: 592147 - DNA, 120 bp, Artificial Sequence
  ENSG00000173276_51 (sequence is synthesized)
gaggtaacaaatattgtgcattttaacagtaatatttgaagatttgtagaatattcacctttaaaactagttagtatgcatttataattttaccagaatatacaactaacaattcaacag

SEQ ID NO: 592148 - DNA, 120 bp, Artificial Sequence
  ENSG00000173276_52 (sequence is synthesized)
tgatgttctttgcatttgtggggagatgtgtgatgttcttggttttctggtttggaatggaacgtttatagccttgcctgtaaaaatgtgccccagcacttaatgagtgaccgtttgaat

SEQ ID NO: 592149 - DNA, 120 bp, Artificial Sequence
  ENSG00000173276_53 (sequence is synthesized)
ccatatgtagtcccattggtgctaatgagagtagctgctgtgaaacaggaataaaatgtgtctgttcacggaggtgcggtgtggatgcacctacaaggccaactctctgatcagggtgag

SEQ ID NO: 592150 - DNA, 120 bp, Artificial Sequence
  ENSG00000173276_54 (sequence is synthesized)
ggagagatggaagaattaacagatctaaagttggcctttgttgtctcaaattgggtttgtacacacatgcatgcatgtgtgtatacaactgtaatctggaacttcaggaagtaaaattat

SEQ ID NO: 592151 - DNA, 120 bp, Artificial Sequence
  ENSG00000173276_55 (sequence is synthesized)
ttgaagtttcttagtaaaaagtaattaggtataattccaaatagatttctgtataaattgtatctaactggattacaagtcagtttgacaatttacgatgtctcagtgatgtttctgcaa

SEQ ID NO: 592152 - DNA, 120 bp, Artificial Sequence
  ENSG00000173276_56 (sequence is synthesized)
taattgtgaaatgcattattgatttaaataatgctgacacgtactctttaaaagtgttctttaacactgactactaaactttaagttttaaaaaataggttttcatttatggctttttgt

SEQ ID NO: 592153 - DNA, 120 bp, Artificial Sequence
  ENSG00000173276_57 (sequence is synthesized)
ggttttagcactttaagaagtttaattttttgtaatttttaatatgctctttcagtgtatctcagcgggtactccagcttgtggcattcccatgtgactggggagaagacaaaattggtg

SEQ ID NO: 592154 - DNA, 120 bp, Artificial Sequence
  ENSG00000173276_58 (sequence is synthesized)
tttagattctggaggagaaaaaatgagttacaatgtcaggtgtttttaaaaattccttttagagacagtcttttgggaaccaaagtattttactgtaaatctttaaaataacagaattca

SEQ ID NO: 592155 - DNA, 120 bp, Artificial Sequence
  ENSG00000173276_59 (sequence is synthesized)
gtgctctttcatttgttaatgctgtccagatttttcacacagttatactcagttaatactagttttcagaacattagtccaaggctatttcaagttttccattgaatatatgcttatggt

SEQ ID NO: 592156 - DNA, 120 bp, Artificial Sequence
  ENSG00000173276_60 (sequence is synthesized)
taaaagaaaaacgaatggttttataattctgtgtattttgtcatatgccttagcagagtaagtcatttttccattttacttaggaataagctttttcgaactgaaaattcatggtaaaat

SEQ ID NO: 592157 - DNA, 120 bp, Artificial Sequence
  ENSG00000173276_61 (sequence is synthesized)
aggatttctatctaatgttaatccattgcttatttgtattcaattccattgtctacagtttgcttaaatgttgactaagaatgattggagtcaataaatttgtactgtattttgcttcga

SEQ ID NO: 592158 - DNA, 120 bp, Artificial Sequence
  ENSG00000173276_62 (sequence is synthesized)
acagtcttgctggattatctcgtgatcgtcagcagttgtgattttccccctttttacttacattcttgatggatggagcattttatatttttagataaactcaagccatggagggattac

SEQ ID NO: 592159 - DNA, 120 bp, Artificial Sequence
  ENSG00000173276_63 (sequence is synthesized)
gcgatgacctcatccctggtgtgggatgacgtcaaattcaagatggatggaatcacagcggcagcggcggctgcggcgcgcgcgagccgagtgtgagcggaaaggggcccggcgtctgcc

SEQ ID NO: 592160 - DNA, 120 bp, Artificial Sequence
  ENSG00000173276_64 (sequence is synthesized)
aaacagatgtgggagcagggacgagagttgtggagtttaagtaccatgctggacctgaggatatactgtgatggaaccgttcagtaggtacctgagaggctggagcctcaagagtctaaa

SEQ ID NO: 592161 - DNA, 120 bp, Artificial Sequence
  ENSG00000173276_65 (sequence is synthesized)
cagagatacagatttgggaatcatcgtccagtagtgattaaagtcacaaggtctaatagaaaaagcaaagaatactgccacgttttggggctctgtaacggatgctggagaaataaagat

SEQ ID NO: 592162 - DNA, 120 bp, Artificial Sequence
  ENSG00000173276_66 (sequence is synthesized)
gtcaaattcaagatggatggaatcacagcggcagcggcggctgcggcgcgcgcgagccgagtgtgagcggaaaggggcccggcgtctgcctcgagactgaagaccgagcccccgcagacc

SEQ ID NO: 592163 - DNA, 120 bp, Artificial Sequence
  ENSG00000173281_0 (sequence is synthesized)
acacaccgacgctcacgtagtcgcgcttgccacaaccctgcgggctctccgatgcggcgagcgagctggggagggggcttctccgcggcccaaaagcctgttcatctagccccatgatgg

SEQ ID NO: 592164 - DNA, 120 bp, Artificial Sequence
  ENSG00000173281_1 (sequence is synthesized)
ctgtggacatcgagtacagatacaactgcatggctccttccttgcgccaagagaggtttgcctttaagatctcaccaaagcccagcaaaccactgaggccttgtattcagctgagcagca

SEQ ID NO: 592165 - DNA, 120 bp, Artificial Sequence
  ENSG00000173281_2 (sequence is synthesized)
agaatgaagccagtggaatggtggccccggctgtccaggagaagaaggtgaaaaagcgggtgtccttcgcagacaaccaggggctggccctgacaatggtcaaagtgttctcggaattcg

SEQ ID NO: 592166 - DNA, 120 bp, Artificial Sequence
  ENSG00000173281_3 (sequence is synthesized)
atgacccgctagatatgccattcaacatcaccgagctcctagacaacattgtgagcttgacgacagcagagagcgagagctttgttctggatttttcccagccctctgcagattacttag

SEQ ID NO: 592167 - DNA, 120 bp, Artificial Sequence
  ENSG00000173281_4 (sequence is synthesized)
actttagaaatcgacttcaggccgaccacgtctgccttgagaactgtgtgctcaaggacaaggccattgcaggcactgtgaaggttcagaacctcgcatttgagaagaccgtgaaaataa

SEQ ID NO: 592168 - DNA, 120 bp, Artificial Sequence
  ENSG00000173281_5 (sequence is synthesized)
ggatgacgttcgacacctggaagagctacacagactttccttgtcagtacgtgaaggacacttatgccggttcagacagggacacgttctccttcgacatcagcttgcccgagaagattc

SEQ ID NO: 592169 - DNA, 120 bp, Artificial Sequence
  ENSG00000173281_6 (sequence is synthesized)
agtcttatgaaagaatggagtttgctgtgtactacgagtgcaatggacagacgtactgggacagcaacagaggcaagaactataggatcatccgggctgagttaaaatctacccagggaa

SEQ ID NO: 592170 - DNA, 120 bp, Artificial Sequence
  ENSG00000173281_7 (sequence is synthesized)
tgaccaagccccacagtggaccggatttgggaatatcctttgaccagttcggaagccctcggtgttcctatggtctgtttccagagtggccaagttacttaggatatgaaaagctagggc

SEQ ID NO: 592171 - DNA, 120 bp, Artificial Sequence
  ENSG00000173281_8 (sequence is synthesized)
cctactactagtgactgcaggtgacagggcgtggcggagctgccacagacaagcctagctctgctcactgtgcagtggagatggaaggccagggaggagcaacgtggaacttccatgagg

SEQ ID NO: 592172 - DNA, 120 bp, Artificial Sequence
  ENSG00000173281_9 (sequence is synthesized)
ccccgtttgggaaaataaaaggatcctcttcacttctttcttaaacagcaaatccagccaggttcagattacacaaccagtgtctcactcaaaggagcagtggtggctggcgcgctttcg

SEQ ID NO: 592173 - DNA, 120 bp, Artificial Sequence
  ENSG00000173281_10 (sequence is synthesized)
cactgtggcagccacgagagtctgtgcacgtctgtgctggaaagggtatggatgggaatcaagcctatgccagtgctgatgaagctggaggagtctctcctctgctctccactcagatgt

SEQ ID NO: 592174 - DNA, 120 bp, Artificial Sequence
  ENSG00000173281_11 (sequence is synthesized)
gggacatcagtcgccaaaagccactcagccccagccacctcgcgtgagaccctcactgttcattgtgttcatctttgggtgctctctgccagccaggcctttcctgcaagctgctgtgct

SEQ ID NO: 592175 - DNA, 120 bp, Artificial Sequence
  ENSG00000173281_12 (sequence is synthesized)
tccccgtccacgtgtatctctgctgtgacacactgagctgacgcacatttccagtgcagctgcagaagagaaatgggattggctcttgttttctgcaagttcatgttttgcattttatgt

SEQ ID NO: 592176 - DNA, 120 bp, Artificial Sequence
  ENSG00000173281_13 (sequence is synthesized)
tcttccacaattgatctgatgttcaggaaaagataataaaggcaaattagttagtggttgagacaggcatttcctcctcccgcttcttgaccccacagatgtattccagcagagagcaac

SEQ ID NO: 592177 - DNA, 120 bp, Artificial Sequence
  ENSG00000173281_14 (sequence is synthesized)
acaccagtcatcaaaacccactggctcctgtgcggtgtcacagattgcagggttctgacaaggcaggacagtcaagagtggggacactttcagcttctacttttgccttctagggggagc

SEQ ID NO: 592178 - DNA, 120 bp, Artificial Sequence
  ENSG00000173281_15 (sequence is synthesized)
tttctaagtccccacatttaccccgagtcaccggaaaaatctgatttttcccccgaaagctcaatgactttaacgtgcttggctggtttgtctcattctttatgaaagaattttggggcc

SEQ ID NO: 592179 - DNA, 63 bp, Artificial Sequence
  ENSG00000173281_16 (sequence is synthesized)
acagtgaaccgagatcacaccactgcattcccgcctgggcagcagagcgagactccgtctcaa

SEQ ID NO: 592180 - DNA, 120 bp, Artificial Sequence
  ENSG00000173281_17 (sequence is synthesized)
tgcattcccgcctgggcagcagagcgagactccgtctcaaacagaaaaaaaaagagaattttgaatctcctttcccaaagagtcatcttttctgctgtgtttaggacatttgatttgcat

SEQ ID NO: 592181 - DNA, 120 bp, Artificial Sequence
  ENSG00000173281_18 (sequence is synthesized)
atccaatatctcctcgaaaccttcagaaaatggttttatcgtgactgtgattcacactatctagaacactttaccagcacccagggacatggacttgggtgttcttatttatggtgtgta

SEQ ID NO: 592182 - DNA, 120 bp, Artificial Sequence
  ENSG00000173281_19 (sequence is synthesized)
tgtaaagagataggggagaaaaacctcacccaagttcttatacgttattttaaacgtttgccaactctgaaatttcagagattcattgttcttaaccatattggactaaagtctgttggt

SEQ ID NO: 592183 - DNA, 120 bp, Artificial Sequence
  ENSG00000173281_20 (sequence is synthesized)
ctgttggttagtgctgttgtaaaagagacctctggggccgagtgtggtggcttatgcctgtaatccctgcactttgggaagccaaggcgggcagctcacctgaggtcaggcgttcaagac

SEQ ID NO: 592184 - DNA, 120 bp, Artificial Sequence
  ENSG00000173281_21 (sequence is synthesized)
tgcagtgagccgagatcacgtcactgcatttcagcctgagcgacagagtgaaactgtctcaaaaaagagagacttccgggacagtcattatcagataggccccaaacctgtgatttttct

SEQ ID NO: 592185 - DNA, 120 bp, Artificial Sequence
  ENSG00000173281_22 (sequence is synthesized)
aacctgtgatttttcttgggcaagattggtgtttacttaggggtgctttaaaaatatatttttacaagtatacttgtaggaagttggttttttattttctatttttgtttgtttttggag

SEQ ID NO: 592186 - DNA, 120 bp, Artificial Sequence
  ENSG00000173281_23 (sequence is synthesized)
tttggttaaacgactcttttattttctgttttgccttatcttactaaagtgaagttttcctaaggcaagcaagaagaggagtggaagcacagttgcctggatttggaggcagagttgtca

SEQ ID NO: 592187 - DNA, 120 bp, Artificial Sequence
  ENSG00000173281_24 (sequence is synthesized)
ggcttttcaagctaagagtcttgtgcttggattttccagattaatttgaaaagacctcccatttgtggctttgtacataaccaacaggcagatactgagtgccttggctcctagagtttt

SEQ ID NO: 592188 - DNA, 120 bp, Artificial Sequence
  ENSG00000173281_25 (sequence is synthesized)
gtggttgggttaggttgtttttgttgttgttttgttttggttttgttttcatttctgaagtttaagatgccttgactttttaaatgctcttaaggctattcgatgtaattcttactccta

SEQ ID NO: 592189 - DNA, 120 bp, Artificial Sequence
  ENSG00000173281_26 (sequence is synthesized)
aaactggctgttcttagcctgaaatctaatgctttgttttttgtacctctcccaggtgggtaacactctaggatgacatgatgttataattttaggggaaatcacatttttaccttatgc

SEQ ID NO: 592190 - DNA, 120 bp, Artificial Sequence
  ENSG00000173281_27 (sequence is synthesized)
tgttactgggcagaaccacgttttatgtaaacataccagacatcgggtaacagacagtactttaaatgttataaatttggtgatcagaactattaatagcataaatcgaactcaaatgga

SEQ ID NO: 592191 - DNA, 120 bp, Artificial Sequence
  ENSG00000173281_28 (sequence is synthesized)
agcaaaactgatttcatgcaggtcctgaattttactttgccttaagaagtgccctccccacaatgcaggagaggcacagagtgcactgtcattgacatgttacccgactaaggatcactc

SEQ ID NO: 592192 - DNA, 120 bp, Artificial Sequence
  ENSG00000173281_29 (sequence is synthesized)
tgttcataagaaaaaggcctgaagtgactctgtttaataaagtcagtttaattttatctaataatgatcttaagacattcccatgtcaaaatttgaaatatggtaattcagtgataacta

SEQ ID NO: 592193 - DNA, 120 bp, Artificial Sequence
  ENSG00000173281_30 (sequence is synthesized)
tctcttctaaagcagccgtaaaccctccccactacccgtctttctcccagctcaccctggctttttttgctgggggtgctggatgcaagcccccagccagcacacctgggatgctcaccc

SEQ ID NO: 592194 - DNA, 120 bp, Artificial Sequence
  ENSG00000173281_31 (sequence is synthesized)
tgccgcacagttcagaaggcaagtcctcacctgctcgcaaagacccttcttctccaataaaagactctacttgcctgagtttcctcatcagggctgtcattcagtgatgtatgggggtct

SEQ ID NO: 592195 - DNA, 120 bp, Artificial Sequence
  ENSG00000173281_32 (sequence is synthesized)
gaagaatactgccttctatctgtcttctgtttaccacttgctcctctgctaccctcctgccgcaaacagtcttcttccttttggcccagttctgtcccgtgaaattctcagaaggcctcg

SEQ ID NO: 592196 - DNA, 120 bp, Artificial Sequence
  ENSG00000173281_33 (sequence is synthesized)
ggagctgcgctgatgtattctctccttgtttgatagctcatcatcagtagataagcctacacacttcagagggtgacaggtttcttacttggagacttcactgcaccttgacttgtagat

SEQ ID NO: 592197 - DNA, 120 bp, Artificial Sequence
  ENSG00000173281_34 (sequence is synthesized)
ttgccttcagacagctcttggttatggttacaagtggcccccgagtcccagaatctttcccaggttgccccagaaagaccagccacctgtcacaggtgcagttgtccggcaatagggaag

SEQ ID NO: 592198 - DNA, 120 bp, Artificial Sequence
  ENSG00000173281_35 (sequence is synthesized)
caacttcatttttgttttatatttattccctcaagtgccctgaggagcatttgcaaactgggtacaataaataagctggattatacaaagatatttaataaataagctttcagtatctat

SEQ ID NO: 592199 - DNA, 120 bp, Artificial Sequence
  ENSG00000173281_36 (sequence is synthesized)
tggaagacatgaagcatttgagtgggtttctttatttaaaaaattattctactggagctggtgagaaataatgaagctgtacagttctccagaaattaaaacaatgtcagagtcaatggg

SEQ ID NO: 592200 - DNA, 120 bp, Artificial Sequence
  ENSG00000173281_37 (sequence is synthesized)
agaatttaatttacctttaagatttcattttaatggtggcaaaattatacattcttagaagatgtaaatttggaactgttaggagattgctctgtggttttgatcttttcaaaccatttt

SEQ ID NO: 592201 - DNA, 120 bp, Artificial Sequence
  ENSG00000173281_38 (sequence is synthesized)
ctttttgaaaaaaggcattagttgtagtcatggacattaaatgggccatatatgcttatcaatcaaaaaagtgttccttttttggaactgcccattttctggatcttccctctcaatgga

SEQ ID NO: 592202 - DNA, 120 bp, Artificial Sequence
  ENSG00000173281_39 (sequence is synthesized)
taggggatgaaaaccttggttgccttttatttgtttcctcttctaaaatttctcacctgaatgtagtcctgggagagtcccgatcacgtctctcctgacatgttcactgaaatcggagac

SEQ ID NO: 592203 - DNA, 120 bp, Artificial Sequence
  ENSG00000173281_40 (sequence is synthesized)
aagaagttacatggatgatgggatcttatagggtcacacaaagacaatttggcagcttatcttaatttcctgcagtgagacaacacatgtggaactgggaaggacagctgttgttacgag

SEQ ID NO: 592204 - DNA, 120 bp, Artificial Sequence
  ENSG00000173281_41 (sequence is synthesized)
cagtttttcctggtcatggttgtaaagctctgtaacccacattgtaaagccgtgaatgtttttagtcttgttgacgagtttttagagactgctggacctctgagggctttgagagtgcag

SEQ ID NO: 592205 - DNA, 120 bp, Artificial Sequence
  ENSG00000173281_42 (sequence is synthesized)
ctgtgatgatgtttcactattacttcagtgtgaatgtagaaccaaggactcatcttcattttatacctaaaagtgccttgtcaagaaatttttgcatgttttaaaagataaatatttttg

SEQ ID NO: 592206 - DNA, 120 bp, Artificial Sequence
  ENSG00000173281_43 (sequence is synthesized)
tacacagagttcaaggggaaatgcactttaaaaatcccaagaatggatgttctttgtgtggtatgagaggttggtttgtatctcaaaagcaaaaatgtaataaaggaagacaaaacaaaa

SEQ ID NO: 592207 - DNA, 120 bp, Artificial Sequence
  ENSG00000173281_44 (sequence is synthesized)
aaagttaaagggggcagcgcggccgcggggagctcgagtcccgggtgactgctggagggaggaggtgaccgcgcagctctcgtgcacggacggacttcgccgcccgcggggggcgcgaac

SEQ ID NO: 592208 - DNA, 120 bp, Artificial Sequence
  ENSG00000173281_45 (sequence is synthesized)
ccgagcccgggcccagctcctgccgtcacggcagctgtccctgttcccccagggcgtatgctgccgcgggctggcgcgtctgccctcgggacttatgagctgaacccgcctgttcatcta

SEQ ID NO: 592209 - DNA, 120 bp, Artificial Sequence
  ENSG00000173285_0 (sequence is synthesized)
tttcccgtacatttccactctcctttctggatcctggtttctacctctgtccctgactctcctttatagaagtgctctccatggagcaagtcaataagactgtggtgagagagttcgtcg

SEQ ID NO: 592210 - DNA, 120 bp, Artificial Sequence
  ENSG00000173285_1 (sequence is synthesized)
tcctcggcttctcatccctggccaggctgcagcagctgctctttgttatcttcctgctcctctacctgttcactctgggcaccaatgcaatcatcatttccaccattgtgctggacagag

SEQ ID NO: 592211 - DNA, 120 bp, Artificial Sequence
  ENSG00000173285_2 (sequence is synthesized)
cccttcatactcccatgtacttcttccttgccatcctttcttgctctgagatttgctatacctttgtcattgtacccaagatgctggttgacctgctgtcccagaagaagaccatttctt

SEQ ID NO: 592212 - DNA, 120 bp, Artificial Sequence
  ENSG00000173285_3 (sequence is synthesized)
tcctgggctgtgccatccaaatgttttccttcctcttctttggctcctctcactccttcctgctggcagccatgggctatgatcgctatatggccatctgtaacccactgcgctactcag

SEQ ID NO: 592213 - DNA, 120 bp, Artificial Sequence
  ENSG00000173285_4 (sequence is synthesized)
aaccagctccatcacttcttctgtgacatctcccctgtccttaaactggcatctcagcactccggcttcagtcagctggtcatattcatgcttggtgtatttgccttggtcattcctctg

SEQ ID NO: 592214 - DNA, 120 bp, Artificial Sequence
  ENSG00000173285_5 (sequence is synthesized)
ctacttatcctagtctcctacatccgcatcatctctgccattctaaaaatcccttcctccgttggaagatacaagaccttctccacctgtgcctcccatctcattgtggtaactgttcac

SEQ ID NO: 592215 - DNA, 120 bp, Artificial Sequence
  ENSG00000173285_6 (sequence is synthesized)
tacagttgtgcctctttcatctacttaaggcccaagactaattacacttcaagccaagacaccctaatatctgtgtcatacaccatccttaccccattgttcaatccaatgatttatagt

SEQ ID NO: 592216 - DNA, 120 bp, Artificial Sequence
  ENSG00000173285_7 (sequence is synthesized)
ctgagaaataaggaattcaaatcagccctacgaagaacaatcggccaaactttctatcctcttagttaaagagctattttttaaactactaatgcctagtacatgccaggcagaacgtgt

SEQ ID NO: 592217 - DNA, 120 bp, Artificial Sequence
  ENSG00000173285_8 (sequence is synthesized)
cttatctggagaagctgggagtcctgatagatggaggaggctagctctgttgattcagatgagagtttctatctcaaggcagcttccctctcatttgctgttatttcctcaggctctgat

SEQ ID NO: 592218 - DNA, 120 bp, Artificial Sequence
  ENSG00000173285_9 (sequence is synthesized)
ttgtggcagtggtgctacttgtcaggagactgccaaatactgaatagctgcttctctctaaattagaagggagagagcaatcaggcattttaatgggggaatgaagaattccatcaaata

SEQ ID NO: 592219 - DNA, 120 bp, Artificial Sequence
  ENSG00000173285_10 (sequence is synthesized)
agacagtctggctttctactctccatgatactttaacaagactaatcagatatgggaacagagcacacagttccataacaaatttaattatattttactgctttaaatattgctaattta

SEQ ID NO: 592220 - DNA, 120 bp, Artificial Sequence
  ENSG00000173285_11 (sequence is synthesized)
aaaactaatatgagagcaaagatgcatctaaactgatgagagctgtgtcttgaagtagagagcttggatacatcaggaaagaaaagatgtatccaaaaaaaaaaaaagaaagaaaaaaga

SEQ ID NO: 592221 - DNA, 120 bp, Artificial Sequence
  ENSG00000173285_12 (sequence is synthesized)
aaaaaaaaaggaaaacagcaggaaatccatctatccgtacttttcttttcctaaagacaacagaaaactttggtcccacacattctgctacaaatcttggtggtcctttttgtccccaat

SEQ ID NO: 592222 - DNA, 120 bp, Artificial Sequence
  ENSG00000173285_13 (sequence is synthesized)
ttcttcctttgtttgaggtggaaccactttatggttctcttcctgatgcacatgtatgtccttcacatactagtgtgtcttagcccccacatttgttcctgagacaccatactaatttgc

SEQ ID NO: 592223 - DNA, 120 bp, Artificial Sequence
  ENSG00000173285_14 (sequence is synthesized)
tctcttcaaggaagctactagcattgcctacttgctgaaatatctcaagtaattccaagcaaagggcttgagttaatattaatagaaggctagattcctagaatgaccagaaaactcatg

SEQ ID NO: 592224 - DNA, 120 bp, Artificial Sequence
  ENSG00000173285_15 (sequence is synthesized)
gaaaaccctccagtgactccctttgccctacaagataatgccaagggtccttcattgtcatgaatctatcatctagtttccacctacctcttcagtattatcatttctaattttgttatt

SEQ ID NO: 592225 - DNA, 120 bp, Artificial Sequence
  ENSG00000173285_16 (sequence is synthesized)
ctccattttctatatgccttttgtacactctgaagctaaccaactatttgcttgttttaaaacaaataaatgtgatgaacaaaataaatgtggtctctgccctcataggccttattgcct

SEQ ID NO: 592226 - DNA, 120 bp, Artificial Sequence
  ENSG00000173285_17 (sequence is synthesized)
ggttcaagatagtcccagtaaacagaaaaatgagggaaaataccttaccagtttaagttgattctctgaagaaaaagtgcatgcaggcgatagaggagagaatactaagataaacctaat

SEQ ID NO: 592227 - DNA, 120 bp, Artificial Sequence
  ENSG00000173285_18 (sequence is synthesized)
ttagatcgaatggcatagggttggtttcccagagaaactgagagttaacctgcatgtaacctgaagggtaattaaaagtcttcaggtaaaggggatatcctttaggacagaagaaacaat

SEQ ID NO: 592228 - DNA, 120 bp, Artificial Sequence
  ENSG00000173285_19 (sequence is synthesized)
gtgtacaaaacccctgaagcaagaactggatgagttggagacaagcaaagaaggcctgtataaatgctgttttaaaaatgcttttcaattgacaaaattatatatatttatggtgtaaaa

SEQ ID NO: 592229 - DNA, 120 bp, Artificial Sequence
  ENSG00000173285_20 (sequence is synthesized)
cttgaatgatgggtagtgtttgagaaagcctctttctgtgcctcccatggagatcagtgatggcatttctgcaggcattttaatgggggaatgaagaattccatcaaatatctggaaatg

SEQ ID NO: 592230 - DNA, 120 bp, Artificial Sequence
  ENSG00000173285_21 (sequence is synthesized)
cttgaatgatgggtagtgtttgagaaagcctctttctgtgcctcccatggagatcagtgatggcatttctggcattttaatgggggaatgaagaattccatcaaatatctggaaatgcct

SEQ ID NO: 592231 - DNA, 120 bp, Artificial Sequence
  ENSG00000173285_22 (sequence is synthesized)
ttctctctaaattagaagggagagagcaatgatcatcctgtcttttctggattactgcaaaaacttcaagtcccttggtccccaatccattcttcacactgctgccagggaagtcttagg

SEQ ID NO: 592232 - DNA, 120 bp, Artificial Sequence
  ENSG00000173302_0 (sequence is synthesized)
gacccctgtggggcagatcaacactcaaggcaggtgcagaatcaacaacctgtgacaaagccagccatccctgccaggaagcatgggggatgagctggcaccttgccctgtgggcactac

SEQ ID NO: 592233 - DNA, 120 bp, Artificial Sequence
  ENSG00000173302_1 (sequence is synthesized)
agcttggccggccctgatccagctcatcagcaagacaccctgcatgccccaagcagccagcaacacttccttgggcctgggggacctcagggtgcccagctccatgctgtactggctttt

SEQ ID NO: 592234 - DNA, 120 bp, Artificial Sequence
  ENSG00000173302_2 (sequence is synthesized)
ccttccctcaagcctgctggctgcagccacactggctgtcagccccctgctgctggtgaccatcctgcggaaccaacggctgcgacaggagccccactacctgctcccggctaacatcct

SEQ ID NO: 592235 - DNA, 120 bp, Artificial Sequence
  ENSG00000173302_3 (sequence is synthesized)
gctctcagacctggcctacattctcctccacatgctcatctcctccagcagcctgggtggctgggagctgggccgcatggcctgtggcattctcactgatgctgtcttcgccgcctgcac

SEQ ID NO: 592236 - DNA, 120 bp, Artificial Sequence
  ENSG00000173302_4 (sequence is synthesized)
cagcaccatcctgtccttcaccgccattgtgctgcacacctacctggcagtcatccatccactgcgctacctctccttcatgtcccatggggctgcctggaaggcagtggccctcatctg

SEQ ID NO: 592237 - DNA, 120 bp, Artificial Sequence
  ENSG00000173302_5 (sequence is synthesized)
gagcaaggagcttcatacatcctaccaccaagcatgggcacccagccgggatgtggcctcctggtcattgttacctacacctccattctgtgcgttctgttcctctgcacagctctcatt

SEQ ID NO: 592238 - DNA, 120 bp, Artificial Sequence
  ENSG00000173302_6 (sequence is synthesized)
gccaactgtttctggaggatctatgcagaggccaagacttcaggcatctgggggcagggctattcccgggccaggggcaccctgctgatccactcagtgctgatcacattgtacgtgagc

SEQ ID NO: 592239 - DNA, 120 bp, Artificial Sequence
  ENSG00000173302_7 (sequence is synthesized)
acaggggtggtgttctccctggacatggtgctgaccaggtaccaccacattgactctgggactcacacatggctcctggcagctaacagtgaggtactcatgatgcttccccgtgccatg

SEQ ID NO: 592240 - DNA, 120 bp, Artificial Sequence
  ENSG00000173302_8 (sequence is synthesized)
ctcacatacctgtacctgctccgctaccggcagctgttgggcatggtccggggccacctcccatccaggaggcaccaggccatctttaccatttcctagagttcttgagtccacagtctg

SEQ ID NO: 592241 - DNA, 120 bp, Artificial Sequence
  ENSG00000173302_9 (sequence is synthesized)
gcaagctgaggttaaaaatcatatgttgaatgcagcagtgtccacttatgactaacttcttagaacagcacaatataatagtggaattgggcctttcagaagacctcaactgatgatttt

SEQ ID NO: 592242 - DNA, 120 bp, Artificial Sequence
  ENSG00000173320_0 (sequence is synthesized)
agaaacagctgtgcagagccgtgccatctaaagagctgtggacctgaatgcagcgtagcgggctggcggtgacttacaccgggactccagagggagagaggaagcgctgcaggccacttg

SEQ ID NO: 592243 - DNA, 120 bp, Artificial Sequence
  ENSG00000173320_1 (sequence is synthesized)
cattgcgtcttccaggctgcgtggacccggcgccccggcgtgtgcggttgtgggggagctcgccgtggcctcccctccctctggctttagcttcctttggggttggcgcaggtgggccag

SEQ ID NO: 592244 - DNA, 120 bp, Artificial Sequence
  ENSG00000173320_2 (sequence is synthesized)
gcagcgcaccgcagatctccccgttcccacgaaggctggctcgctgtctctctccgagcgggagggaccatcctaaaaatatgtaaatatccaagcgctggctccaggctggggcagctg

SEQ ID NO: 592245 - DNA, 120 bp, Artificial Sequence
  ENSG00000173320_3 (sequence is synthesized)
ccaaggtccccgcgccgccgccgggtgttttacatgaaaatgagaagcctgatgggaaccgcgttctaacttaaggcagcctggtgattagcatgagactgggcggctgtcctgcttcct

SEQ ID NO: 592246 - DNA, 120 bp, Artificial Sequence
  ENSG00000173320_4 (sequence is synthesized)
gcccttcaatagccgttccgcgcgctcgcgccggagcagcgctgccgccgcgcgggggtcgatcgcaggctcggcgtccttggcagccatggctccggcgccgcctcggccagtaagtag

SEQ ID NO: 592247 - DNA, 120 bp, Artificial Sequence
  ENSG00000173320_5 (sequence is synthesized)
gagcatgcatgtgtagggggcacatgcgtgtcggcgcacccacccagccatccacccgcgcgcacgcacagcgcccggagcctcggcaaggggaagattgacgaggcgctgcagtcgcgg

SEQ ID NO: 592248 - DNA, 120 bp, Artificial Sequence
  ENSG00000173320_6 (sequence is synthesized)
ggacgacgcgggctcttcctggattccgcaggagcccgcccgccgcagctgctgtctgcagagcctgctcggatcctgtgcacacgcgccccccgctcgagcctctgtgatgaagactgt

SEQ ID NO: 592249 - DNA, 120 bp, Artificial Sequence
  ENSG00000173320_7 (sequence is synthesized)
ctcccggggactgcagcggaggcagagccagccagcgccggggactgcgggccgtgcggctgataggcccgcggggacacgactcggacactgtcatccccacgcctcgcgctgagctgc

SEQ ID NO: 592250 - DNA, 120 bp, Artificial Sequence
  ENSG00000173320_8 (sequence is synthesized)
ccggcgcggagggtctgccgccgcccctccggcctcccgcacgcccgatcccgggtcagccccggaggcctcggctgcctcatttgtttgggtcttttgtgccgtggctcccagttggcc

SEQ ID NO: 592251 - DNA, 120 bp, Artificial Sequence
  ENSG00000173320_9 (sequence is synthesized)
aagcactcctgcgctgaatcgggccattgtctgcgctcccattgccttcacgctgcaagtctcggcgcccccaccccgcccgccccctccccgcctcctcccggccggggagcctcctaa

SEQ ID NO: 592252 - DNA, 120 bp, Artificial Sequence
  ENSG00000173320_10 (sequence is synthesized)
cgtgcctttccccccaggaatctggaagctataagccgggcggattgcaaatgaagtgtaatgcattgtgggacgtgtgtaaaatcggagccttcgccgtgggggtgtgggggggcgtgg

SEQ ID NO: 592253 - DNA, 120 bp, Artificial Sequence
  ENSG00000173320_11 (sequence is synthesized)
ggagggccggacccgccgctggcggtgtagacgccgacgaggaggggctgggaaaatgtgcgcagagtccgcccgggtcgtgcccgccgtagacggatgaaggagcgcgctgcgccccgg

SEQ ID NO: 592254 - DNA, 120 bp, Artificial Sequence
  ENSG00000173320_12 (sequence is synthesized)
cgctgaggccccgaggatcggggcggcaggtcgccctccccaccatgaagaagacccggagcacaaccttgcggcgagcctggcctagctcggatttctcggaccgggcctcggaccgca

SEQ ID NO: 592255 - DNA, 120 bp, Artificial Sequence
  ENSG00000173320_13 (sequence is synthesized)
tgaggtcccgcagcgagaaggactaccgcctgcacaagcgtttccccgcggccttcgcgccccaggcttcgcggggctacatgacatcaggtgatgtatcacccatcagtatgtctccca

SEQ ID NO: 592256 - DNA, 120 bp, Artificial Sequence
  ENSG00000173320_14 (sequence is synthesized)
tcagtcagtctcagtttattccactcggggagatcctctgcttggccatctcagcaatgaactcggcaagaaagcctgtcacccaagaagcactgatggagcacctgaccacgtgcttcc

SEQ ID NO: 592257 - DNA, 120 bp, Artificial Sequence
  ENSG00000173320_15 (sequence is synthesized)
caggtgttccaacgccaagccaagaaattctgcggcacacgctgaacacgctggtacgggagaggaagatctacccaactccagatggctacttcatcgtgaccccacagacttatttca

SEQ ID NO: 592258 - DNA, 120 bp, Artificial Sequence
  ENSG00000173320_16 (sequence is synthesized)
taactccttccctcataagaactaacagtaaatggtaccatttggacgagaggatacctgaccggtctcagtgcacctctccgcaacccgggaccatcacgccctctgcctcaggctgtg

SEQ ID NO: 592259 - DNA, 120 bp, Artificial Sequence
  ENSG00000173320_17 (sequence is synthesized)
tcagggaaaggacattgccccgaaaccactgcgactcttgccactgctgcagagaagacgtgcacagcacgcatgcacccaccctgcaaaggaagtctgccaaggactgcaaagaccctt

SEQ ID NO: 592260 - DNA, 120 bp, Artificial Sequence
  ENSG00000173320_18 (sequence is synthesized)
actgtcccccttctctgtgccaggtgccacccactgaaaagagcaaaagtactgtaaatttttcctataagacagaaactctctcaaaacctaaagatagtgaaaagcagtcaaaaaaat

SEQ ID NO: 592261 - DNA, 120 bp, Artificial Sequence
  ENSG00000173320_19 (sequence is synthesized)
tcgggctaaagttattccggttaagttttaaaaaagacaagaccaaacagctggccaatttttctgcccagtttcctcctgaagagtggcccctgcgagacgaggacacgccagctacga

SEQ ID NO: 592262 - DNA, 120 bp, Artificial Sequence
  ENSG00000173320_20 (sequence is synthesized)
tccctcgggaagtagagatggaaatcattaggcgcattaacccagacctgaccgtggaaaatgtcatgcggcacaccgcgctcatgaagaaactggaagaagaaaaggcccagaggagta

SEQ ID NO: 592263 - DNA, 120 bp, Artificial Sequence
  ENSG00000173320_21 (sequence is synthesized)
aagccgggtcctctgcccatcacagcggaaggagtaaaaagagtaggactcatcggaagtcccatggaaagtctcggtctcacagcaagacacgggtgtctaaaggagacccttccgacg

SEQ ID NO: 592264 - DNA, 120 bp, Artificial Sequence
  ENSG00000173320_22 (sequence is synthesized)
gttcacatctggatatcccagctgaaagagagtatgacttttgtgatcctcttaccagggtgcccagggagggctgcttcatcattgaacacaaaggagataacttcatcatgcacagca

SEQ ID NO: 592265 - DNA, 120 bp, Artificial Sequence
  ENSG00000173320_23 (sequence is synthesized)
acacaaacgtgctcgagtcccacttccccatgacaccagaatgggatgtgtctggtgaattggctaaaaggagaactgagatgccttttcctgaaccttctaggggaagctcccactcaa

SEQ ID NO: 592266 - DNA, 120 bp, Artificial Sequence
  ENSG00000173320_24 (sequence is synthesized)
aagtgcaccgaagccacagccatacacaggaccggaggtccaggaatgagagatccaacaaagccaaggagagatccaggtcgatggataactccaaaggccctctgggtgcttcttctc

SEQ ID NO: 592267 - DNA, 120 bp, Artificial Sequence
  ENSG00000173320_25 (sequence is synthesized)
tagggacgccggaagaccttgctgaaggctgcagccaagacgaccagacccccagccaatcctacattgacgacagtactttaaggcctgcacagaccgttagtctccaaagggctcaca

SEQ ID NO: 592268 - DNA, 120 bp, Artificial Sequence
  ENSG00000173320_26 (sequence is synthesized)
tttcgtccacaagctataaagaggtgtgtattccagagatagtcagtggcagcaaggaaccgtccagcgcttgcagccttttggagccaggaaaaccacccgagagtttgccatcctatg

SEQ ID NO: 592269 - DNA, 120 bp, Artificial Sequence
  ENSG00000173320_27 (sequence is synthesized)
gcgaactcaactcttgtccaacaaaaacagccacagatgactatttccagtgcaacacctctagtgagacggtgctcacggcaccatcacctctgggaaagaataaggaggaccatgaca

SEQ ID NO: 592270 - DNA, 120 bp, Artificial Sequence
  ENSG00000173320_28 (sequence is synthesized)
ctctgactttggcagaaggggtgaaaaagctctccccttctgataggcaggtcccccactcctccagggagcctgtggggcacaaggaggagtcaccaaaagggccgggtgggggccccg

SEQ ID NO: 592271 - DNA, 120 bp, Artificial Sequence
  ENSG00000173320_29 (sequence is synthesized)
ctgcttcgggaggagtggctgaagggatcgccaacggacgcctcgtccagcaccatggtgccgagcccagcagcttggacaagaggaaagagatatttagcaaagacacactgttcaaac

SEQ ID NO: 592272 - DNA, 120 bp, Artificial Sequence
  ENSG00000173320_30 (sequence is synthesized)
ctcttcacagcaccttgtctgtaaacagctatcacaagtcgagcctgtccctcctcaaatctcacccgaagacacctgctgacacattgccaggccgatgtgagaaactggaaccgtccc

SEQ ID NO: 592273 - DNA, 120 bp, Artificial Sequence
  ENSG00000173320_31 (sequence is synthesized)
tggggacctcggcggcacaagccatgcctgcttcccagcgtcagcaggagtcaggagggaaccaggaagcctcttttgactattacaacgtctctgatgatgacgactctgaggaagggg

SEQ ID NO: 592274 - DNA, 120 bp, Artificial Sequence
  ENSG00000173320_32 (sequence is synthesized)
caaacaagaacacagaggaggagaaaaatagagaggacgtaggcaccatgcagtggctcctcgagcgggagaaggaaagagacttgcagaggaaatttgaaaagaacctcacccttcttg

SEQ ID NO: 592275 - DNA, 120 bp, Artificial Sequence
  ENSG00000173320_33 (sequence is synthesized)
ctccaaaagaaaccgacagcagcagcaaccagagagccacccattcagcccggctcgacagcatggacagcagcagcatcacagtggacagtggattcaactccccacgtactcgggaga

SEQ ID NO: 592276 - DNA, 120 bp, Artificial Sequence
  ENSG00000173320_34 (sequence is synthesized)
gcctggcttccaacacatcaagcattgttgaaagtaaccgtcgtcagaaccccgctttgagcccggcccatggtggagctggtccagccttcaacttccgagcgagcgcggagcccccga

SEQ ID NO: 592277 - DNA, 120 bp, Artificial Sequence
  ENSG00000173320_35 (sequence is synthesized)
caaatgaagctgagaagctacagaaaccttccaactgcttgcaagcttctgttactagcgtgtgattgtccttctgcctcagatcttctgtctcattcgatacagcaaagtttacgacac

SEQ ID NO: 592278 - DNA, 120 bp, Artificial Sequence
  ENSG00000173320_36 (sequence is synthesized)
tgggactgatgtttacatctttggaaagacaagcatctcaaccacagtttttgtgtttacttaaactgtgctgctaagtagggctagggcaaaaaaacaaaaaatctttatttcagagta

SEQ ID NO: 592279 - DNA, 120 bp, Artificial Sequence
  ENSG00000173320_37 (sequence is synthesized)
ttgcttttcacatttatggctctgtagcaactgagtaacagtaggggtgatatgtatacttttgcttcactaattgtatctgagcacacataggaaagtctagacactgtaagtgtaata

SEQ ID NO: 592280 - DNA, 120 bp, Artificial Sequence
  ENSG00000173320_38 (sequence is synthesized)
cgcattttcaatgtcatgcagttgccaattccattttaaaatgccacagatgcgtgttgctcccagtctgtggttaaacggtgccacagaactgatccttgacacttccaaaaaaaaaaa

SEQ ID NO: 592281 - DNA, 120 bp, Artificial Sequence
  ENSG00000173320_39 (sequence is synthesized)
atttaaaaaaaaaaaacaaaaaacaaaactaagctaccacgaaatgtcaaatgcaagggtccaccttgagggaaatagatgccaaactaactagaagggaccccggccctttgtgtgtga

SEQ ID NO: 592282 - DNA, 120 bp, Artificial Sequence
  ENSG00000173320_40 (sequence is synthesized)
ccccggccctttgtgtgtgaattgtttatgcaccagtcatttttcactgtgagttttcgtgacactattttgcaggagcccatggaagtgtgtgagaaggggtcgcaatggagatcactg

SEQ ID NO: 592283 - DNA, 120 bp, Artificial Sequence
  ENSG00000173320_41 (sequence is synthesized)
ggagtgaatgttttcagggttttgttttgaagtgtcacagatgcttgtctgatttttttaaccttccgtgatcacaaacaggaatataggcctttgaatctgaagtggacaaaggaaagc

SEQ ID NO: 592284 - DNA, 120 bp, Artificial Sequence
  ENSG00000173320_42 (sequence is synthesized)
aatttccagtctggctggggcacagcattaggtgattgaaaaggtgatgtggacttgtaaaaggtgttactcaaatattgaaggaagagaatttcctccttgtgatacttaggatgaccc

SEQ ID NO: 592285 - DNA, 120 bp, Artificial Sequence
  ENSG00000173320_43 (sequence is synthesized)
agagtagggcctgaggatgttattctttctaatggaaggacataaatctattttatgtagttttaaatagaatgcctaaattaggctgtgggagataatttttagtggttgtaggaaaga

SEQ ID NO: 592286 - DNA, 120 bp, Artificial Sequence
  ENSG00000173320_44 (sequence is synthesized)
gcaaatttagggagtgttgaacttcaggccttttattcctgggaagatatgtatagagaaaacttttaaaataatttttgattagaaatatacatgtgcccatgtaataaacaacagaat

SEQ ID NO: 592287 - DNA, 120 bp, Artificial Sequence
  ENSG00000173320_45 (sequence is synthesized)
gtgctcattctgctagtgcggtataatccgaatttgtactcccctaaaatttatcagaataacaattatgcatacatgaactatgccagagtaatgtttacagatactttgtaaccaatt

SEQ ID NO: 592288 - DNA, 120 bp, Artificial Sequence
  ENSG00000173320_46 (sequence is synthesized)
tcaggaggcgtttttagctggatgtgtagttaattagaccaacttatttccaaatggtttgttaacattttgctttggtttacaatgtcatgttgaacacaaagaagacccagcagcaaa

SEQ ID NO: 592289 - DNA, 120 bp, Artificial Sequence
  ENSG00000173320_47 (sequence is synthesized)
gggatgaccaataatttcatcttatagcaaggagacattccaacgttcccatgttttattttctgagaacagtgggacagatctgtagtaatggaatattatttgcaaaagggttacata

SEQ ID NO: 592290 - DNA, 120 bp, Artificial Sequence
  ENSG00000173320_48 (sequence is synthesized)
tgacacaagtaagtgttctgacataaagttttatttagttcagtggcatgtgctgttgggagccatacaccataaaatatatatatcccaaaataaatctagaatattttcacctccaat

SEQ ID NO: 592291 - DNA, 120 bp, Artificial Sequence
  ENSG00000173320_49 (sequence is synthesized)
ttcagtaattggcatatgatttgtgagacgcatctgtttttgtatgaggtttaatcactagcaatctgtttaaagaatccagtcctatacacagttggactcattcttgaaacctttaaa

SEQ ID NO: 592292 - DNA, 120 bp, Artificial Sequence
  ENSG00000173320_50 (sequence is synthesized)
tgctccctcatagtttttcagttatttggaagttgcattgggtcaaactgaactccttgagtttggtgtaaattccttttttctgcttattatagtgaaacttcagcatgtttcttagta

SEQ ID NO: 592293 - DNA, 120 bp, Artificial Sequence
  ENSG00000173320_51 (sequence is synthesized)
aactcccataccattgaaatgcttaagccagttggctttcagtctcatgccttatttcctccaaggcatgcctcaacgcattgtttgtctcattgcttaaatatgtccagaaggaatgat

SEQ ID NO: 592294 - DNA, 120 bp, Artificial Sequence
  ENSG00000173320_52 (sequence is synthesized)
catgtatctaatagactacatagttggttcccttggggagttatatatcatacagttactaaatatttgtctaaattcattttttccaaaaacctgctctcaaatttttcttctactctc

SEQ ID NO: 592295 - DNA, 120 bp, Artificial Sequence
  ENSG00000173320_53 (sequence is synthesized)
agttcataaataatataaccattgaaacaacacatcagcctctagctgatcctctgaaagtagccattgaaataatcgaatactgtgtgaacaggaaaggaaagcgttacctttaagaga

SEQ ID NO: 592296 - DNA, 120 bp, Artificial Sequence
  ENSG00000173320_54 (sequence is synthesized)
agctttaaaataggaatttattgatatttcacaagatataggtttacagaagacattattcaaataaatatgtacactatttgcctgatgctatggggtacataattttttaaaaactcc

SEQ ID NO: 592297 - DNA, 120 bp, Artificial Sequence
  ENSG00000173320_55 (sequence is synthesized)
cttagaccagcagccattagtgtagaaatgatggactttaaaggtgataccatgtaagcagatgttgcatataaaaatattcctgcctgaatctgatcgagattcttgaatgggggagga

SEQ ID NO: 592298 - DNA, 120 bp, Artificial Sequence
  ENSG00000173320_56 (sequence is synthesized)
gtggcagccggcagcacattgcaaatgtcattcgaggtcacggtgaggctctcggtcccggaacagtgggggcctcgccaggcgttgccagtatccctttcctcctgtaaaatcatagct

SEQ ID NO: 592299 - DNA, 120 bp, Artificial Sequence
  ENSG00000173320_57 (sequence is synthesized)
ttgtgttacacgactgcttatccagtcttagggtttagcagctgaaaggtttacaaaactgaatctggttgaatctctgtgaaagggtcaacacatctgtcggcattttgcacacttatg

SEQ ID NO: 592300 - DNA, 120 bp, Artificial Sequence
  ENSG00000173320_58 (sequence is synthesized)
tattattatgatacaacatattactttatggtaatttttatttttacatataactacctccataaatttgatgaaatggcagccgtgtgttaaagtgtatcgttcagaagagcaaagttg

SEQ ID NO: 592301 - DNA, 120 bp, Artificial Sequence
  ENSG00000173320_59 (sequence is synthesized)
aacacttccttcaacattagggcatggcgtgctgtgtgtgtcagtgattgcctctgtggactcatgactttccatcgccatggctttctcttacgccgctgtttggctttcagatgtaat

SEQ ID NO: 592302 - DNA, 120 bp, Artificial Sequence
  ENSG00000173320_60 (sequence is synthesized)
cctgtcttctcctctcttccccacgaaagcgcactcgattttgttaggaatgaacggaagtttaaaaattcttgtgcccacccccgccctccacccattcctgttaaaagttctctggcg

SEQ ID NO: 592303 - DNA, 120 bp, Artificial Sequence
  ENSG00000173320_61 (sequence is synthesized)
aagagccaatgggtgaacgtaattgaaagagctatttactcttttggaaatctgatttgaagtctaagttttcagtaacagaagacacacaagcaatgtggactgccaagcttgaagcac

SEQ ID NO: 592304 - DNA, 120 bp, Artificial Sequence
  ENSG00000173320_62 (sequence is synthesized)
ttcgggctctgccttcactcgcatgctaccatgtcgagcccaaactccactttaattaaaagagctgtgctgtgaattccacaacttctgttaaataatttgtattccattatatatatt

SEQ ID NO: 592305 - DNA, 120 bp, Artificial Sequence
  ENSG00000173320_63 (sequence is synthesized)
ttgcacatctcaggggaccataatgaacatatgaaaggggggggggtgccatcaaatagagaaaacaaatagaagaggtgaatggagactagctggataaaaataacaaattacttcttc

SEQ ID NO: 592306 - DNA, 120 bp, Artificial Sequence
  ENSG00000173320_64 (sequence is synthesized)
tctgatgttgtgaaggtcaggttcaggaagcatcaattcacagttaatccggagtaacaatgatctgaacaccagctgttcccaggtccctctttttcatagcccaaccagcatctaaaa

SEQ ID NO: 592307 - DNA, 120 bp, Artificial Sequence
  ENSG00000173320_65 (sequence is synthesized)
tgtaaatttaaattacattgcagtcaccatggggagaagaaacctgttcagtggaagcagaagcattgttccttttttaggttggcgcagctttgcaaaactctacccaggataaaccac

SEQ ID NO: 592308 - DNA, 120 bp, Artificial Sequence
  ENSG00000173320_66 (sequence is synthesized)
ttatcaccaccaagtgtacttgaaaataaagtttttaacttaaattacaagcatattgctcataatacaatagtgatcattttttgaaagtcttgccatttataacatgggcagtatttg

SEQ ID NO: 592309 - DNA, 120 bp, Artificial Sequence
  ENSG00000173320_67 (sequence is synthesized)
gagcttcatttaaaaaccaacaacaaccgataatgactttgcacgattcactttgggatctcaaagtgcttccaaagcattcagatttacaaacaattcacaagacaggtcatctttgta

SEQ ID NO: 592310 - DNA, 120 bp, Artificial Sequence
  ENSG00000173320_68 (sequence is synthesized)
atacgcatacttacaacgaattaacaaaaggagtgacttaagattctccaggaacacagtggcagctattgatgatctgttttctatctgtttgatagagcatcatgagaaatcacaaaa

SEQ ID NO: 592311 - DNA, 120 bp, Artificial Sequence
  ENSG00000173320_69 (sequence is synthesized)
tacaatgctatttttctgatgtgtgctaataaagtcaaagaaaacaaatacatcttgacacttttgtccattttcattaaaaaaaaaaaagttcagggtgtttggaattttacatctcag

SEQ ID NO: 592312 - DNA, 120 bp, Artificial Sequence
  ENSG00000173320_70 (sequence is synthesized)
cacaccttactggtatcaatggataaagcgggtgattgacagatccacccaaatgccactgcagtcagaagcagatctggacacacccttgtttacagtttcatattgggttgctatagt

SEQ ID NO: 592313 - DNA, 120 bp, Artificial Sequence
  ENSG00000173320_71 (sequence is synthesized)
tcccgtgctaaatcaccagctttcaggaacatgactgctcctggcagtggaaggtgctgaaacagaaattttaattaaaaactttatcaagtactcttcacagtgctgcttggcaccata

SEQ ID NO: 592314 - DNA, 120 bp, Artificial Sequence
  ENSG00000173320_72 (sequence is synthesized)
gaaaatcagtacaatatatcgagccctactttggaggagctggatttctgagggagctgatccagttctaagtgtcttctcgaattaggagatagatgatctttgatggggatctcctcc

SEQ ID NO: 592315 - DNA, 120 bp, Artificial Sequence
  ENSG00000173320_73 (sequence is synthesized)
gtcaccacaggccagtcacagaaccaactagccacgtgctgccagacctcagtgggcccaagcaggagcaatctcttctatcccccatctcccccaggaccatcccgcccattgtcaacg

SEQ ID NO: 592316 - DNA, 120 bp, Artificial Sequence
  ENSG00000173320_74 (sequence is synthesized)
tcatccagggctcttctggtagtgagtgacttttctgcacatgtttagggcttgggggagctagaacacaggaaacatgaatgcaaaaggcatggaaaacactgttttgctttgggttag

SEQ ID NO: 592317 - DNA, 120 bp, Artificial Sequence
  ENSG00000173320_75 (sequence is synthesized)
taaaatgtgggcaggacaaagattactattggtctgagctttgccaagtgagatagaatcaactgtcaccccattcctttcccagaaggtcttatggtattaaggatacatccagtattt

SEQ ID NO: 592318 - DNA, 120 bp, Artificial Sequence
  ENSG00000173320_76 (sequence is synthesized)
tcccacagatttttattcaggcgatgtttcataaattacatatatgaaaacattcattattacatttccttgtgtgtttcaaacagacattggcaccttcctattgagttaattctctgc

SEQ ID NO: 592319 - DNA, 120 bp, Artificial Sequence
  ENSG00000173320_77 (sequence is synthesized)
atcttttgcagcagcagcccacaaggagattcccagagatggctcccctaacacacagtcctgtgattttacagttctatgacttacagttgatgattcacaagattcaggattctacaa

SEQ ID NO: 592320 - DNA, 120 bp, Artificial Sequence
  ENSG00000173320_78 (sequence is synthesized)
gactcaagggggaactaaactttcttacgattgtacatgatcagttatagggctgtaatcattaattgttggcttcaaatgtggacacacacacacacacatcatgccaaggagggaatg

SEQ ID NO: 592321 - DNA, 120 bp, Artificial Sequence
  ENSG00000173320_79 (sequence is synthesized)
gggtgtttcaagtcaggcagcgatgattctggaaggttggaaatgtaaggttagaagcttggctggtcttagtaaacttgttcccttgctcccaccaagaagaggtaccaaatgtgagac

SEQ ID NO: 592322 - DNA, 120 bp, Artificial Sequence
  ENSG00000173320_80 (sequence is synthesized)
ctgagatctcctccaatatctgtcctctgcagttccgggaaactaatcatgaagtacacatgcagcagctcctccacttcctttcctccgaggtcctcctttccattctcccacctagat

SEQ ID NO: 592323 - DNA, 120 bp, Artificial Sequence
  ENSG00000173320_81 (sequence is synthesized)
actgacacaccgccacggtttccacattggaagggcagaacactgtgcagtatcgtgcacacttgctgggttaggaatagagctgccctagggtcaccttcatgcaagtattgacagcta

SEQ ID NO: 592324 - DNA, 120 bp, Artificial Sequence
  ENSG00000173320_82 (sequence is synthesized)
caaattaaagtccttagagcagttgacacagatactacgttctagaagagaattaaatttaaacgtcaagtttaaagggatcataattctgcaggtatctttctctgagtgactgaatgt

SEQ ID NO: 592325 - DNA, 120 bp, Artificial Sequence
  ENSG00000173320_83 (sequence is synthesized)
gactattgcattagggtaaatgaattaagacgtgcaagtgggatttactgtatgttagaaaggagttttgcagccaagactgccttgaataaaatgtgtttgcactgaaaaaaaatttta

SEQ ID NO: 592326 - DNA, 120 bp, Artificial Sequence
  ENSG00000173320_84 (sequence is synthesized)
aattacttggtctctggttgctgtaaaggtcatccaagatggatgttctgtttatattgtatagtatttcatatgaaataattacagttcatgaaatgtcttccctaatgttactgattt

SEQ ID NO: 592327 - DNA, 120 bp, Artificial Sequence
  ENSG00000173320_85 (sequence is synthesized)
ataacagcacatttgtaacatggtttttatcgtgtcagtgtaccatactgtaaatgatgattacttgtcatgcttagtataataacttaaaagaaaaaaaaggacagggatttttgtaag

SEQ ID NO: 592328 - DNA, 120 bp, Artificial Sequence
  ENSG00000173320_86 (sequence is synthesized)
tctatatttgaaagtccctccctatggtgatactgtgttcatgttgtttatgtagtgttgtgtgaaatatccattttggattgtgttactttttaagatattaaataacatttggttata

SEQ ID NO: 592329 - DNA, 120 bp, Artificial Sequence
  ENSG00000173320_87 (sequence is synthesized)
atgcctgggaagatggagaagtttctgcagatcgcgcctcactccctggccatcgtcctgggcccggcagaggcgccggcgggggaaaggccaggggcagcccggcccgcgcccccggcc

SEQ ID NO: 592330 - DNA, 120 bp, Artificial Sequence
  ENSG00000173320_88 (sequence is synthesized)
cagccccgccagctcgcccggcaccacatcggctacgagatcttcgccgacttcaaagccgagaacatgcagcacttctggaacaagaaggtcacggccgcggtggccgagaccttcttc

SEQ ID NO: 592331 - DNA, 120 bp, Artificial Sequence
  ENSG00000173320_89 (sequence is synthesized)
ctgggctggatcgacgagcaggtcctgctgatccagggcaaggaggaacatctggaggcgctgcgcgaaggctggacgcgccgggccctgcggccgccctcgggcttccacatccgctgc

SEQ ID NO: 592332 - DNA, 120 bp, Artificial Sequence
  ENSG00000173320_90 (sequence is synthesized)
agagcaaccagggaagggacgaaatgtctgaaggtagaaatgaattgcattaggatttattttaatgcagcctggaaacacacaactttaaatctctgggctgcttaaggagatcccaca

SEQ ID NO: 592333 - DNA, 120 bp, Artificial Sequence
  ENSG00000173320_91 (sequence is synthesized)
cctttccttggagggaaaaagaaaaagaggattgaaaaatatacagactacagctatctttaatgtttaagttagctatcaggaaactcgaaatagtgaatgtaataaaatgttgacagc

SEQ ID NO: 592334 - DNA, 120 bp, Artificial Sequence
  ENSG00000173320_92 (sequence is synthesized)
cggtaactctggactagaacgacatctttggcaccaaaggaaatcgagagaataaaagcagcagtcgtcaggatttgaaggaagccacagattattaccatctgtacattttacagacct

SEQ ID NO: 592335 - DNA, 120 bp, Artificial Sequence
  ENSG00000173320_93 (sequence is synthesized)
cttacaaaaaccagaaacccaggacccagactggagtgtgatgtatcacccatcagtatgtctcccatcagtcagtctcagtttattccactcggggagatcctctgcttggccatctca

SEQ ID NO: 592336 - DNA, 120 bp, Artificial Sequence
  ENSG00000173327_0 (sequence is synthesized)
gtcggagccgtcggggccaaaggagacggggccaggaacaggcagtctcggcccaactgcggacgctccctccaccccctgcgcaaaaagacccaaccggagttgaggcgctgcccctga

SEQ ID NO: 592337 - DNA, 120 bp, Artificial Sequence
  ENSG00000173327_1 (sequence is synthesized)
aggccccaccttacacttggcgggggccggagccaggctcccaggactgctccagaaccgagggaagctcgggtccctccaagctagccatggtgaggcgccggaggccccggggcccca

SEQ ID NO: 592338 - DNA, 120 bp, Artificial Sequence
  ENSG00000173327_2 (sequence is synthesized)
cccccccggcctgaccacactgccctgggtgccctcctccagaagcccgagatgcggggggccgggagacaacactcctggctccccagagaggcgtgggtctggggctgagggccaggg

SEQ ID NO: 592339 - DNA, 120 bp, Artificial Sequence
  ENSG00000173327_3 (sequence is synthesized)
cccggatgcccaggttccgggactagggccttggcagccagcgggggtggggaccacgggcacccagagaaggtcctccacacatcccagcgccggctcccggccatggagcccttgaag

SEQ ID NO: 592340 - DNA, 120 bp, Artificial Sequence
  ENSG00000173327_4 (sequence is synthesized)
agcctcttcctcaagagccctctagggtcatggaatggcagtggcagcgggggtggtgggggcggtggaggaggccggcctgaggggtctccaaaggcagcgggttatgccaacccggtg

SEQ ID NO: 592341 - DNA, 120 bp, Artificial Sequence
  ENSG00000173327_5 (sequence is synthesized)
tggacagccctgttcgactacgagcccagtgggcaggatgagctggccctgaggaagggtgaccgtgtggaggtgctgtcccgggacgcagccatctcaggagacgagggctggtgggcg

SEQ ID NO: 592342 - DNA, 120 bp, Artificial Sequence
  ENSG00000173327_6 (sequence is synthesized)
ggccaggtgggtggccaggtgggcatcttcccgtccaactatgtgtctcggggtggcggcccgcccccctgcgaggtggccagcttccaggagctgcggctggaggaggtgatcggcatt

SEQ ID NO: 592343 - DNA, 120 bp, Artificial Sequence
  ENSG00000173327_7 (sequence is synthesized)
ggaggctttggcaaggtgtacaggggcagctggcgaggtgagctggtggctgtgaaggcagctcgccaggaccccgatgaggacatcagtgtgacagccgagagcgttcgccaggaggcc

SEQ ID NO: 592344 - DNA, 120 bp, Artificial Sequence
  ENSG00000173327_8 (sequence is synthesized)
cggctcttcgccatgctggcacaccccaacatcattgccctcaaggctgtgtgcctggaggagcccaacctgtgcctggtgatggagtatgcagccggtgggcccctcagccgagctctg

SEQ ID NO: 592345 - DNA, 120 bp, Artificial Sequence
  ENSG00000173327_9 (sequence is synthesized)
gccgggcggcgcgtgcctccccatgtgctggtcaactgggctgtgcagattgcccgtgggatgcactacctgcactgcgaggccctggtgcccgtcatccaccgtgatctcaagtccaac

SEQ ID NO: 592346 - DNA, 120 bp, Artificial Sequence
  ENSG00000173327_10 (sequence is synthesized)
aacattttgctgctgcagcccattgagagtgacgacatggagcacaagaccctgaagatcaccgactttggcctggcccgagagtggcacaaaaccacacaaatgagtgccgcgggcacc

SEQ ID NO: 592347 - DNA, 120 bp, Artificial Sequence
  ENSG00000173327_11 (sequence is synthesized)
tacgcctggatggctcctgaggttatcaaggcctccaccttctctaagggcagtgacgtctggagttttggggtgctgctgtgggaactgctgaccggggaggtgccataccgtggcatt

SEQ ID NO: 592348 - DNA, 120 bp, Artificial Sequence
  ENSG00000173327_12 (sequence is synthesized)
gactgccttgctgtggcctatggcgtagctgttaacaagctcacactgcccatcccatccacctgccccgagcccttcgcacagcttatggccgactgctgggcgcaggacccccaccgc

SEQ ID NO: 592349 - DNA, 120 bp, Artificial Sequence
  ENSG00000173327_13 (sequence is synthesized)
aggcccgacttcgcctccatcctgcagcagttggaggcgctggaggcacaggtcctacgggaaatgccgcgggactccttccattccatgcaggaaggctggaagcgcgagatccagggt

SEQ ID NO: 592350 - DNA, 120 bp, Artificial Sequence
  ENSG00000173327_14 (sequence is synthesized)
gcggcgcgcgagcagcggtcacaggcggagcagctgcggcggcgcgagcacctgctggcccagtgggagctagaggtgttcgagcgcgagctgacgctgctgctgcagcaggtggaccgc

SEQ ID NO: 592351 - DNA, 120 bp, Artificial Sequence
  ENSG00000173327_15 (sequence is synthesized)
gagcgaccgcacgtgcgccgccgccgcgggacattcaagcgcagcaagctccgggcgcgcgacggcggcgagcgtatcagcatgccactcgacttcaagcaccgcatcaccgtgcaggcc

SEQ ID NO: 592352 - DNA, 120 bp, Artificial Sequence
  ENSG00000173327_16 (sequence is synthesized)
tcacccggccttgaccggaggagaaacgtcttcgaggtcgggcctggggattcgcccacctttccccggttccgagccatccagttggagcctgcagagccaggccaggcatggggccgc

SEQ ID NO: 592353 - DNA, 120 bp, Artificial Sequence
  ENSG00000173327_17 (sequence is synthesized)
cagtccccccgacgtctggaggactcaagcaatggagagcggcgagcatgctgggcttggggtcccagttcccccaagcctggggaagcccagaatgggaggagaaggtcccgcatggac

SEQ ID NO: 592354 - DNA, 120 bp, Artificial Sequence
  ENSG00000173327_18 (sequence is synthesized)
gaagccacatggtacctggattcagatgactcatcccccttaggatctccttccacacccccagcactcaatggtaaccccccgcggcctagcctggagcccgaggagcccaagaggcct

SEQ ID NO: 592355 - DNA, 120 bp, Artificial Sequence
  ENSG00000173327_19 (sequence is synthesized)
gtccccgcagagcgcggtagcagctctgggacgcccaagctgatccagcgggcgctgctgcgcggcaccgccctgctcgcctcgctgggccttggccgcgacctgcagccgccgggaggc

SEQ ID NO: 592356 - DNA, 120 bp, Artificial Sequence
  ENSG00000173327_20 (sequence is synthesized)
ccaggacgcgagcgcggggagtccccgacaacaccccccacgccaacgcccgcgccctgcccgaccgagccgcccccttccccgctcatctgcttctcgctcaagacgcccgactccccg

SEQ ID NO: 592357 - DNA, 120 bp, Artificial Sequence
  ENSG00000173327_21 (sequence is synthesized)
cccactcctgcacccctgttgctggacctgggtatccctgtgggccagcggtcagccaagagcccccgacgtgaggaggagccccgcggaggcactgtctcacccccaccggggacatca

SEQ ID NO: 592358 - DNA, 120 bp, Artificial Sequence
  ENSG00000173327_22 (sequence is synthesized)
cgctctgctcctggcaccccaggcaccccacgttcaccacccctgggcctcatcagccgacctcggccctcgccccttcgcagccgcattgatccctggagctttgtgtcagctgggcca

SEQ ID NO: 592359 - DNA, 120 bp, Artificial Sequence
  ENSG00000173327_23 (sequence is synthesized)
cggccttctcccctgccatcaccacagcctgcaccccgccgagcaccctggaccttgttcccggactcagaccccttctgggactccccacctgccaaccccttccaggggggcccccag

SEQ ID NO: 592360 - DNA, 120 bp, Artificial Sequence
  ENSG00000173327_24 (sequence is synthesized)
gactgcagggcacagaccaaagacatgggtgcccaggccccgtgggtgccggaagcggggccttgagtgggccaggccactcccccgagctccagctgccttaggaggagtcacagcata

SEQ ID NO: 592361 - DNA, 120 bp, Artificial Sequence
  ENSG00000173327_25 (sequence is synthesized)
cactggaacaggagctgggtcagcctctgcagctgcctcagtttccccagggaccccacccccctttgggggtcaggaacactacactgcacaggaagccttcacactggaagggggacc

SEQ ID NO: 592362 - DNA, 120 bp, Artificial Sequence
  ENSG00000173327_26 (sequence is synthesized)
tgcgcccccacatctgaaacctgtaggtccccccagctcacctgccctactggggcccaacactgtacccagctggttgggaggaccagagcctgtctcagggaattgcctgctggggtg

SEQ ID NO: 592363 - DNA, 120 bp, Artificial Sequence
  ENSG00000173327_27 (sequence is synthesized)
atgcagggaggaggggaggtgcagggaagaggggccggcctcagctgtcaccagcacttttgaccaagtcctgctactgcggcccctgccctagggcttagagcatggacctcctgccct

SEQ ID NO: 592364 - DNA, 120 bp, Artificial Sequence
  ENSG00000173327_28 (sequence is synthesized)
gggggtcatctggggccagggctctctggatgccttcctgctgccccagccagggttggagtcttagcctcgggatccagtgaagccagaagccaaataaactcaaaagctgtctcccca

SEQ ID NO: 592365 - DNA, 120 bp, Artificial Sequence
  ENSG00000173327_29 (sequence is synthesized)
agtgggcggggccggccggcgccagggcatctccgactcagacgagtagctttccttatccagacccaggggctcaagaaagcagtgaggctggtcacagtctcacagccatcgtgccgc

SEQ ID NO: 592366 - DNA, 120 bp, Artificial Sequence
  ENSG00000173327_30 (sequence is synthesized)
tccctatgtggcctgggagctggccttgggcccctgcaggttggggtcctggctctacttcatcacaaacctgaaccctgctccccccaacccaaatcccagacttcaagcaccgcatca

SEQ ID NO: 592367 - DNA, 120 bp, Artificial Sequence
  ENSG00000173327_31 (sequence is synthesized)
tttatggatgagaaaagtgaaaaaagtaacttgttacacagttaataagtggaagagccagaatcaaactcaggcagttggtgtcagtgtctgtactaattactaagcagcaaacttcag

SEQ ID NO: 592368 - DNA, 120 bp, Artificial Sequence
  ENSG00000173327_32 (sequence is synthesized)
cccaagggctagatgagatgccccaccccactgttggccccaagacccaaacccatctatcttgcccaaagctcaccctgggaatggtacagggcccagcctgctccccatactctaaag

SEQ ID NO: 592369 - DNA, 120 bp, Artificial Sequence
  ENSG00000173327_33 (sequence is synthesized)
attctccaggcccacgagtcacaggactgaccagccagcccggcctgggcctgacctcccccagttctccccaaaaggactccccctcccaagtgggagacctggcccaggcctcccaga

SEQ ID NO: 592370 - DNA, 120 bp, Artificial Sequence
  ENSG00000173327_34 (sequence is synthesized)
aaggagaagtagggaccacgggaggaaagcggaagaggtgtgagctgcccaggccactcccaagccccacagaggccagcccagggagggagctggtggccaggtccctatcagaggcca

SEQ ID NO: 592371 - DNA, 120 bp, Artificial Sequence
  ENSG00000173327_35 (sequence is synthesized)
gggagccctaaaggggcactgagagcttcccccagtttcggggtctctggcccattctcctctgggtgacccctgacctcccatgcctgggatctacatcagacaccagaacagcagttc

SEQ ID NO: 592372 - DNA, 120 bp, Artificial Sequence
  ENSG00000173327_36 (sequence is synthesized)
gagttgggacagttgaaagcacagagaggagcttggagagaaagcagaggatggggcttagcagctggcagagccaggagcggggaggtagcagaaagaccacaagtacaaagaagtcct

SEQ ID NO: 592373 - DNA, 120 bp, Artificial Sequence
  ENSG00000173327_37 (sequence is synthesized)
agcccttcgcacagcttatggccggtaagaggacggggagggcaggtgaggtacagagctccctggcccaggacacatccacccacggaccccttcttattctgtccccgctgcacgccg

SEQ ID NO: 592374 - DNA, 72 bp, Artificial Sequence
  ENSG00000173327_38 (sequence is synthesized)
tgtctctactaaaaatgcaaaattagtcgggcgtggtggcacatgcccataatcccactactcgggaggctg

SEQ ID NO: 592375 - DNA, 90 bp, Artificial Sequence
  ENSG00000173327_39 (sequence is synthesized)
aactctatctttgtctgacctcaagtaggtcctcaagatctagaccaagtcacctctgtgcccccaggacccagccaggatgtccgtcag

SEQ ID NO: 592376 - DNA, 120 bp, Artificial Sequence
  ENSG00000173327_40 (sequence is synthesized)
gatttcgctcccagcggcgtctacttccgggtcagagctcagacctagggtgtagagaacaaccttccgtaacaggcaggaatagtcgaaataggatagcgtcgtctttcttaaagtgac

SEQ ID NO: 592377 - DNA, 120 bp, Artificial Sequence
  ENSG00000173327_41 (sequence is synthesized)
aggctcaaagcaattggggcagccctatccagaagttgtgagggcgactcagctattctgaatccaatcctgggcaaagttctggacaagtctcaggtttctgccaatggggaagggata

SEQ ID NO: 592378 - DNA, 120 bp, Artificial Sequence
  ENSG00000173327_42 (sequence is synthesized)
tgaagaagcggattgtttcccaggtgaggagaagaagagagccttaggcaatccactccaagagcttgaggtgcagccagttccgtctgtcctccagtcttccccaccccatccaactag

SEQ ID NO: 592379 - DNA, 84 bp, Artificial Sequence
  ENSG00000173327_43 (sequence is synthesized)
ttccgtctgtcctccagtcttccccaccccatccaactagctctacgaggcagagctttctcgtcctcatatcatatatgaaaa

SEQ ID NO: 592380 - DNA, 80 bp, Artificial Sequence
  ENSG00000173327_44 (sequence is synthesized)
ctgcgccattgcatgaaaaaagaaagaaaataatgaggctcagaatcgatggatcgcacagtcccacaacttcgcagcca

SEQ ID NO: 592381 - DNA, 120 bp, Artificial Sequence
  ENSG00000173327_45 (sequence is synthesized)
cagaatcgatggatcgcacagtcccacaacttcgcagccaagaccagactcgggttcacccccttcccaagtgtggttctgtaaccccgttttgctgccgccgatgcggatgcagagggc

SEQ ID NO: 592382 - DNA, 120 bp, Artificial Sequence
  ENSG00000173327_46 (sequence is synthesized)
agagatggcccatccttagcagagaccaacctccaccctaggcagcagagcacgcagctgggggcttttctttctagatctcaaaagcctgctgtgatgggggatctggttctgcccttt

SEQ ID NO: 592383 - DNA, 120 bp, Artificial Sequence
  ENSG00000173327_47 (sequence is synthesized)
ccctctctgcctctcctggcccgcctacccgggaactccccgcctggagcctctgggaggggagcggtgcaggccgcccgcgtcatctgatgctgtttcctgcaggagggagaagagcgg

SEQ ID NO: 592384 - DNA, 120 bp, Artificial Sequence
  ENSG00000173327_48 (sequence is synthesized)
cagagggcagaggtggctgcctaaatctagggctgggccaagtccagggacagggacccaaaccacttggctcctagttgcttttgggtgaagtggcagtaagggggtgggggttgggag

SEQ ID NO: 592385 - DNA, 120 bp, Artificial Sequence
  ENSG00000173327_49 (sequence is synthesized)
ctcatgcccctctccgccccccagctccttattctctgtcagaccttattcttggaggcggagcccactcactatcccctcttcctccccgcccccaggctccctgccttaggtctagcc

SEQ ID NO: 592386 - DNA, 120 bp, Artificial Sequence
  ENSG00000173327_50 (sequence is synthesized)
tgttacctctgaactccccaagcagcattaattttacttatttttttttagtcaaataattgtatgacactatgtactactaattttctaaatgctttgctaatattaatttcttgcaat

SEQ ID NO: 592387 - DNA, 120 bp, Artificial Sequence
  ENSG00000173327_51 (sequence is synthesized)
tcagcatgccactcggtgagggccgggccccggggcgtcccccgccattggctgcgggggtgggggtggagccaggcctgtgtgctcaccgcgctgggattggtttagggtgttgtgggt

SEQ ID NO: 592388 - DNA, 120 bp, Artificial Sequence
  ENSG00000173327_52 (sequence is synthesized)
cccaccctagggggtcccagctgaccaggggtgcccatgggctcaagctagcccccaaacagagccccaggcacccagcagagtcttcctgcgccagcttcagaagtccttgaccccagc

SEQ ID NO: 592389 - DNA, 120 bp, Artificial Sequence
  ENSG00000173327_53 (sequence is synthesized)
ctgcagctgcggtttggacaagttaagaaattggtatctctcaggtgggccataagcatcctgcccagccatggctcccacctcaaggaagtcctctggaagctcgtgctcctcatcttc

SEQ ID NO: 592390 - DNA, 120 bp, Artificial Sequence
  ENSG00000173327_54 (sequence is synthesized)
tcctcccctaaattcatgttcgtggagttggtgctctgtcctcccctcccgtcgtcatgggcagctcctccagaacagatatctcagagagggaagccctccttggcagtcaaggctaag

SEQ ID NO: 592391 - DNA, 120 bp, Artificial Sequence
  ENSG00000173327_55 (sequence is synthesized)
gccagggctggaattctggcctagccctccctggcttcatgacctctagctggttactccaactcggagcctcaatttcagaatctgtaaaaagggagagtgaaacagctcaacagcttg

SEQ ID NO: 592392 - DNA, 120 bp, Artificial Sequence
  ENSG00000173327_56 (sequence is synthesized)
ggcaagcccgacctgcgatccccaacccacagcgggtcctcagccatggagatggacatttgagggctggatcgccaagagggcctagcctgaaatcagtgcttgggatgggagtgctgg

SEQ ID NO: 592393 - DNA, 120 bp, Artificial Sequence
  ENSG00000173327_57 (sequence is synthesized)
gctaagggagactccatctcccatcatttcaagcccccgacacgctgcccatcatggcccaagagaagtgagtgacagcttcagagggtttcctggtgcacgcagcatttagagagagaa

SEQ ID NO: 592394 - DNA, 120 bp, Artificial Sequence
  ENSG00000173327_58 (sequence is synthesized)
ggcatggaagcaggacccagcacacagcagggaccaggagcaggggcctcctagagcccagagtgcaggctggagagcagcagtaggaaatgcaggaggggccaggctcagtgtggtcac

SEQ ID NO: 592395 - DNA, 120 bp, Artificial Sequence
  ENSG00000173327_59 (sequence is synthesized)
tggaaaagcatgagacattcttagaggggggtcaacgtggatattttgagcctcctggcctgggctgaccatggacaaggggcttgcaggaaacagagtgctgagccccagatatccaag

SEQ ID NO: 592396 - DNA, 120 bp, Artificial Sequence
  ENSG00000173327_60 (sequence is synthesized)
ttcttgccaggactgggggagccaggagaggcctgccaaccatcctacccactcttctcatccctggtagggtgcggttcccacctctcagcctcaaccctgggctctaactatctaggg

SEQ ID NO: 592397 - DNA, 120 bp, Artificial Sequence
  ENSG00000173327_61 (sequence is synthesized)
acccccgctacctgccccaatctgagggggattccccgaaggcacagggggaggggactcccatcttctgtttttcctccgttttctttccagaaaaaatggaacaatagcccaggcccc

SEQ ID NO: 592398 - DNA, 120 bp, Artificial Sequence
  ENSG00000173327_62 (sequence is synthesized)
tgctccccaccctccccactgcttcctgcgtttcctgctgcccctgagccggcttcctgtccctgctccagcccctgctccctccctagcccagctgcctgcaggggaggaaagagcttg

SEQ ID NO: 592399 - DNA, 120 bp, Artificial Sequence
  ENSG00000173327_63 (sequence is synthesized)
gggtggaggacttgcgggaggaaggagcctggaactgctcccctactcccctctagttcccctgcttccctctcagagtctgggaggtggtggtaaagggcaggcaaggtgccctcagcc

SEQ ID NO: 592400 - DNA, 120 bp, Artificial Sequence
  ENSG00000173327_64 (sequence is synthesized)
gggcctcagattccccacctgaaaaaggtggagagtggccacccggcctgagatactggaacagcactttgccagtctggggtgccacaagtggctagagacaggccaagaagcagcaag

SEQ ID NO: 592401 - DNA, 120 bp, Artificial Sequence
  ENSG00000173327_65 (sequence is synthesized)
tgttggtcttcaaaggggaaggtgggccctggcaccaggggaggtgcccatttccactccacccactgccccagcctgctgtgtttcccctttggaatgagcttgtcgtcgggggcttgc

SEQ ID NO: 592402 - DNA, 120 bp, Artificial Sequence
  ENSG00000173327_66 (sequence is synthesized)
taaatgctcaggtccccgcctccagcagccagaccagaggctgttttgaagttggcagtaaggagtgacagaggagggagaggagggcggagatacgataagtgctttaggacaactggc

SEQ ID NO: 592403 - DNA, 120 bp, Artificial Sequence
  ENSG00000173327_67 (sequence is synthesized)
ctttaggatgcttctgccaggtggcagcccccatgcaaaaactttaaaagtgtggtcttgtttcatgctcgtgacagccatctgaggagggttttgttgtcatcctcagcttgatgaagt

SEQ ID NO: 592404 - DNA, 120 bp, Artificial Sequence
  ENSG00000173327_68 (sequence is synthesized)
gttcaggactcagctccaaggtctggctcagaggagtgggtagattttgagaccattctctggattaggaaaaattgcaggaaaatctactgggcatgccgggatagtaaaggtggtcat

SEQ ID NO: 592405 - DNA, 120 bp, Artificial Sequence
  ENSG00000173327_69 (sequence is synthesized)
ggagggcacctggacatcaggtagagctgctgaaccaatttgtctggcctggagttgcaaatgtggaagatgccagtggggagagggagctggtacctggaagaggctgagtcagccagg

SEQ ID NO: 592406 - DNA, 120 bp, Artificial Sequence
  ENSG00000173327_70 (sequence is synthesized)
ggcagtgggcagaggttgaggagaggtcatgctctgagaagcaccagcgccgaaatggctgaaggtggaggacacagaaacagagccaagcagccaggggctgtgggggctgaggacggt

SEQ ID NO: 592407 - DNA, 120 bp, Artificial Sequence
  ENSG00000173327_71 (sequence is synthesized)
ggggcagcggggacagctggcagcagtgccagatgcctcctcaaggcccaggtggcctggccagcagcaggatcagggcttgttgctttaagccctgaaaaatgagcaccctggttctgc

SEQ ID NO: 592408 - DNA, 120 bp, Artificial Sequence
  ENSG00000173327_72 (sequence is synthesized)
cacctcctctgggaagtcttccctgactcaccaggctgtattaggtgcccttcccatctgccccaccccctgtgccctatgctgcccccatgacagccgtgtcacacagggcaggagagc

SEQ ID NO: 592409 - DNA, 120 bp, Artificial Sequence
  ENSG00000173327_73 (sequence is synthesized)
tgagaggtgtgccctgacatgggtccagaaacatggttgacttgatattgcttctcttccacagtgcagttggctgtaacctgaaaagtagaggggcccttcagacccttcatgactcta

SEQ ID NO: 592410 - DNA, 120 bp, Artificial Sequence
  ENSG00000173327_74 (sequence is synthesized)
tgactttgtcctctttctattcctcgaaaacttctctcatttgagccattcctgtcctggtgagagatatgcaagttgctgcttctcctctttgtaccaagtacggtggccccatttggg

SEQ ID NO: 592411 - DNA, 120 bp, Artificial Sequence
  ENSG00000173327_75 (sequence is synthesized)
ttaaagccatgagcccctgccaagtctgaccatccacgcctacatttaccccaagctcctcctttgtggccaagaaccatcactttcttggaccccaccctttctcttcccttccagctg

SEQ ID NO: 592412 - DNA, 120 bp, Artificial Sequence
  ENSG00000173327_76 (sequence is synthesized)
cattggtaggtatcttttggagtctttgctttgggagtggctgcacttgccacagtgtgatgtgggcactaggggcctgtggtacctgctgggcttcttttctcaccaagagcttccctc

SEQ ID NO: 592413 - DNA, 120 bp, Artificial Sequence
  ENSG00000173327_77 (sequence is synthesized)
ttgctccccactctaaggggggttctgattcacgctcctgcctcaacaaaatgacaggagactcacagatctctcttgaaatcaaagccataaatgtccagagctgccaccttgccagtt

SEQ ID NO: 592414 - DNA, 120 bp, Artificial Sequence
  ENSG00000173327_78 (sequence is synthesized)
ttgcttcagtgtaatattagggaaaagctagaacactggtttcagagccacacagaccaggttgtaatctctgctgtatttgttgtatgacctctgccaagtcatttccctgcttggttt

SEQ ID NO: 592415 - DNA, 120 bp, Artificial Sequence
  ENSG00000173327_79 (sequence is synthesized)
cctcatctgtgaaacatgaaaaatattatttagctcataaatggttttgagtgctggggttgagtgtgaaatgtttggcctcggccaggtgcagtggcctgtaatcccagcactttggga

SEQ ID NO: 592416 - DNA, 120 bp, Artificial Sequence
  ENSG00000173334_0 (sequence is synthesized)
acactcactcacagtcactctctctgagcgcgtctcgctcgctctcatacacgcccggagcccaggagcgctcaggatcccgagcgccgcgaaaaagttcccccggcttttgctggagac

SEQ ID NO: 592417 - DNA, 120 bp, Artificial Sequence
  ENSG00000173334_1 (sequence is synthesized)
tcatcgctttgggaagtgcatttgcttcgtggctccgccgagcctgctgaatcctgtcctcgcggctcgggaccccgggatcgctgaccgctgccgccgccgcctctgcctcccggacta

SEQ ID NO: 592418 - DNA, 120 bp, Artificial Sequence
  ENSG00000173334_2 (sequence is synthesized)
tcggcagcctcggcaacaatagtggcggccgcccccagcgaggctccgggagcccttgcctgcgggggtccggggactcgagccggcctccgcctcccggacgcacagccagcgtggtcc

SEQ ID NO: 592419 - DNA, 120 bp, Artificial Sequence
  ENSG00000173334_3 (sequence is synthesized)
ccgcgtgcaacgcgagcgccggggagtggctcctgctttgcccctcgtgggggccgagccaagaccagtctgcaaactccatcccgccggctggaagaagtcgcggagccggcaccaaac

SEQ ID NO: 592420 - DNA, 120 bp, Artificial Sequence
  ENSG00000173334_4 (sequence is synthesized)
ccgcagcgtcttcccgcgcggatcccgggacttaaaaagccggggccaccccggcccaggacgggatgcgggtcggtccggtgcgctctgccatgagcggcgcctcgcagccccgcggcc

SEQ ID NO: 592421 - DNA, 120 bp, Artificial Sequence
  ENSG00000173334_5 (sequence is synthesized)
cggccctgctcttcccagccacccgaggcgtcccggccaaacgcctgctggacgccgacgacgcggcggctgtggcggccaagtgcccgcgcctctccgagtgctccagccccccggact

SEQ ID NO: 592422 - DNA, 80 bp, Artificial Sequence
  ENSG00000173334_6 (sequence is synthesized)
gccgctccgggggccggcggaggctccgggagcgcgccggggcccagccgcatcgccgactacctgctgctgcccctagc

SEQ ID NO: 592423 - DNA, 120 bp, Artificial Sequence
  ENSG00000173334_7 (sequence is synthesized)
tagccgagcgcgagcatgtgtcccgggcgctgtgcatccacactggacgcgagctgcgctgcaaggtgtttcccattaaacactaccaggacaaaatcaggccttacatccagctgccat

SEQ ID NO: 592424 - DNA, 120 bp, Artificial Sequence
  ENSG00000173334_8 (sequence is synthesized)
cgcacagcaacattactggcattgtggaagtgatccttggggaaaccaaggcctatgtcttctttgagaaggactttggggacatgcactcctatgtgcgaagccggaagaggctgcggg

SEQ ID NO: 592425 - DNA, 120 bp, Artificial Sequence
  ENSG00000173334_9 (sequence is synthesized)
aagaggaagccgcccggctcttcaagcagattgtctccgccgtcgcccactgccaccagtcagccatcgtgctgggggacctgaagcttaggaagttcgtcttctccacggaggagagaa

SEQ ID NO: 592426 - DNA, 120 bp, Artificial Sequence
  ENSG00000173334_10 (sequence is synthesized)
cccagcttagactagaaagtctagaagacacacacataatgaagggggaagatgatgctttgtcagacaaacatggctgcccagcctacgtgagccctgagatcctcaacaccactggga

SEQ ID NO: 592427 - DNA, 120 bp, Artificial Sequence
  ENSG00000173334_11 (sequence is synthesized)
cctactccggaaaggctgcggacgtttggagcctgggggtgatgctctacacccttctggttggacgataccccttccatgactcagaccccagtgcccttttctccaaaattcggcgtg

SEQ ID NO: 592428 - DNA, 120 bp, Artificial Sequence
  ENSG00000173334_12 (sequence is synthesized)
gacagttctgcattcctgagcacatttcccccaaagccaggtgcctcattcgcagcctcttgagacgggagccctccgagagactcactgcccccgagatcctactgcacccctggtttg

SEQ ID NO: 592429 - DNA, 120 bp, Artificial Sequence
  ENSG00000173334_13 (sequence is synthesized)
agtccgtcttggaacccgggtacatcgactcagaaataggaacttcagaccagattgttccagagtaccaggaggacagtgacattagttccttcttctgctaatccccaaaacctcaga

SEQ ID NO: 592430 - DNA, 120 bp, Artificial Sequence
  ENSG00000173334_14 (sequence is synthesized)
gcctcctcttctctgttgggatgagtgactttattgatttgagcagcatatgctgtgattggctgccctgcaaatttgtttcccttaaggaaccctcaccaactatctctgctggatttg

SEQ ID NO: 592431 - DNA, 120 bp, Artificial Sequence
  ENSG00000173334_15 (sequence is synthesized)
ggagttccgcatcttttgtggagggcagagtatggacatcttacacccggtggtcaagtgtgtaataaacttgagcattcgaatgggagaaaaagcaaatcgcacaatgacatattttga

SEQ ID NO: 592432 - DNA, 120 bp, Artificial Sequence
  ENSG00000173334_16 (sequence is synthesized)
gtaataaccgtatttttcacagggtgacaaattgggccaataaatctgccatctttgaactcatctttggtggctagactgctacggcagcttctctgatgggaaagttccttttttggc

SEQ ID NO: 592433 - DNA, 120 bp, Artificial Sequence
  ENSG00000173334_17 (sequence is synthesized)
ttaacactcaccctttcttcacactcacatttaccaatgactctgctccgtttttggagcagactgttttaagttgctcaggagcctgatggaaccatgaaccgagactcttctctgttt

SEQ ID NO: 592434 - DNA, 120 bp, Artificial Sequence
  ENSG00000173334_18 (sequence is synthesized)
cctgccaagacctcatctgcactaatgccttctccctgaccttgacacttccccctttagctataaaagcacttaccagccgaacgtggaacagtatcacaaaagattccatctcccaac

SEQ ID NO: 592435 - DNA, 120 bp, Artificial Sequence
  ENSG00000173334_19 (sequence is synthesized)
gatttcagaactctgagctcagagagactccagattttaaaaaataatttgagtgcttggaaactattagctttttaagttccttccaaatatgttagtacctaccctttactttttccc

SEQ ID NO: 592436 - DNA, 120 bp, Artificial Sequence
  ENSG00000173334_20 (sequence is synthesized)
caagaccatctcagggtggagcattctgtctaagagaagaaagataaggaggctcccacccacctctcccaagagcagacattaaacatctttgtgctttgaagagagtgaattttggat

SEQ ID NO: 592437 - DNA, 120 bp, Artificial Sequence
  ENSG00000173334_21 (sequence is synthesized)
agtcttgtgattctcagactaacttccagaattatactttaacccctcccagatatggtccgcctttggcattgtgtgtacatctgcagttttgcatggtgggttgttaatatttcaaat

SEQ ID NO: 592438 - DNA, 120 bp, Artificial Sequence
  ENSG00000173334_22 (sequence is synthesized)
gtgtggtttatgaatacgtctgtataatcggcttctggagtgaaacagcaaaccccaaatcttcaaagttggaaggaactttaaaaatcatccggtccaatctctttcctctttctgcca

SEQ ID NO: 592439 - DNA, 120 bp, Artificial Sequence
  ENSG00000173334_23 (sequence is synthesized)
cctcccaaggcagaaatcccctcttcagcttcttttgtaggtgggaatccagcctctgttagatatgtccagagatggaaactcactcccctacaaaagatggagcttaatggagaaatt

SEQ ID NO: 592440 - DNA, 120 bp, Artificial Sequence
  ENSG00000173334_24 (sequence is synthesized)
gcaactttcattaaaaaacaaattcagatgaaatatcagtaactgtcttggacagtgctgaaatcaggtggttaaacgggtaaacaaaatatactgtattttgagaaatggcacaaaaac

SEQ ID NO: 592441 - DNA, 120 bp, Artificial Sequence
  ENSG00000173334_25 (sequence is synthesized)
aggcagtcatctttaagggctatgcctaggcaaactactaacatgcattgtgagaatgccgtgtatacctcacgtactgtgtactttgtacatatattttaccttttatacctatgttcg

SEQ ID NO: 592442 - DNA, 120 bp, Artificial Sequence
  ENSG00000173334_26 (sequence is synthesized)
attttgttttgttttgttttgttctggctttgaggcttgttttgttgtctgtgtctgtctgaataacctgcgtgtctaaaaccacgtgaaatgtgaatgattattggcaatattaccttg

SEQ ID NO: 592443 - DNA, 120 bp, Artificial Sequence
  ENSG00000173334_27 (sequence is synthesized)
acagaatcatgggactttgagaagagggaggacagaggcctctgtcgcactaacgctctcgtggttgctcgactgttgtatctgtgatacattatccgactaaggactctgggctggcag

SEQ ID NO: 592444 - DNA, 120 bp, Artificial Sequence
  ENSG00000173334_28 (sequence is synthesized)
ggccttctgccgggaaagctagaaacactaggttcttcctgtacatacgtgtatatatgtgaacagtgagatggccgtttctgacttgtagagaaattttaataaacctggtttcgtaaa

SEQ ID NO: 592445 - DNA, 120 bp, Artificial Sequence
  ENSG00000173334_29 (sequence is synthesized)
ctttctgtgttgagcactttgggtctgcaggaggcacatgcacgtccagggactgcttttcagctcctggacaggccaggggcttccttctatcagccactcaactagtgtggcctgcaa

SEQ ID NO: 592446 - DNA, 120 bp, Artificial Sequence
  ENSG00000173334_30 (sequence is synthesized)
acaggaaagggccacagagggtggggggtttgcttagctctcaggagctgacagaagatgggaacatgtacaggagacagttctttcaaatcatctgtgtgaaagcgggtgtttcccatt

SEQ ID NO: 592447 - DNA, 120 bp, Artificial Sequence
  ENSG00000173334_31 (sequence is synthesized)
accagtcagccatcgtgctgggggacctgaagcttaggaagttcgtcttctccacggaggagaggtgagcggccgccacagcttctcctgtggccttttggaaccaaagcggaggtgcag

SEQ ID NO: 592448 - DNA, 120 bp, Artificial Sequence
  ENSG00000173334_32 (sequence is synthesized)
ctactgcccaacccgaatgaaatttcagacgcatgatcaagcccagtttaatagggaggaaaaaaaaaccttttcttctccatgactggggctaagagctgttctgggacaagcatgtgt

SEQ ID NO: 592449 - DNA, 120 bp, Artificial Sequence
  ENSG00000173335_0 (sequence is synthesized)
ggagcctgcatcatgtcgagtccgcagaggaggaaggctatgccctgggcactgtcactgcttctcatgggcttccagctcctggtgacttatgcctggtgttctgaagaggaaatgggt

SEQ ID NO: 592450 - DNA, 120 bp, Artificial Sequence
  ENSG00000173335_1 (sequence is synthesized)
ggtaataataaaatagtccaggatcctatgttcctcgccacagtggagtttgccttgaacactttcaacgtgcagagcaaggaggagcatgcctacaggctgttgcgcgtcctgagttca

SEQ ID NO: 592451 - DNA, 120 bp, Artificial Sequence
  ENSG00000173335_2 (sequence is synthesized)
tggagggaggatagcatggacagaaagtggcgaggtaagatggtgttctccatgaatctgcaactgcgccaaaccgtatgtaggaaatttgaagatgacattgacaactgcccttttcaa

SEQ ID NO: 592452 - DNA, 120 bp, Artificial Sequence
  ENSG00000173335_3 (sequence is synthesized)
gaaagcctggagctgaacaacgtaagacagggcatcagctttcctcaggtccacagctgtggatgctgcatggggtgtggtgtgggcacaggagcagctgacaaagccattccgagggac

SEQ ID NO: 592453 - DNA, 120 bp, Artificial Sequence
  ENSG00000173335_4 (sequence is synthesized)
aaagggaagtgagcccacagcaggctgtaccaggctgccctgcttgtgccttagtgggaagcccagtgaggcattaagcccaggggttcactttcaggcccctggccaatctgagtttcc

SEQ ID NO: 592454 - DNA, 120 bp, Artificial Sequence
  ENSG00000173335_5 (sequence is synthesized)
tgattctgccctctgacaccattgcagctgcctgcacctgggccacatggccttcagaaccttctctctggtcttcctccccacttcttccctgccttctagagaaagagcctggagaca

SEQ ID NO: 592455 - DNA, 120 bp, Artificial Sequence
  ENSG00000173335_6 (sequence is synthesized)
ggtttccctaccctgccctagacccaaaagtggtggaggctgagaagaagccccactgccctcgctcctaggccctgctgagctgcagcacctgctctaggggacgagctccaagcaaag

SEQ ID NO: 592456 - DNA, 120 bp, Artificial Sequence
  ENSG00000173335_7 (sequence is synthesized)
cctggctctgggaaaacttcccattcttagtcaacccccttattgtaagattaacaaataggtaactaattgcctaagtctgggaactgcttccactgggacaaaacattctcctgctgc

SEQ ID NO: 592457 - DNA, 120 bp, Artificial Sequence
  ENSG00000173335_8 (sequence is synthesized)
tcttggatgcagggatcacaccaggacagcctggggttcccctgaggggcacgggctggaggaggaggcatggcacaagtgaccctggctaaggagggagggagcctcaaatcacgttgt

SEQ ID NO: 592458 - DNA, 120 bp, Artificial Sequence
  ENSG00000173335_9 (sequence is synthesized)
agttcaggattggcctcaggctcaggctagacctgaaggccagagccacgtggcacaattgctggccccaggaatgggcaaggtggagatggaacctgtgttgagggcagatgccacaag

SEQ ID NO: 592459 - DNA, 120 bp, Artificial Sequence
  ENSG00000173335_10 (sequence is synthesized)
attcccgaacctccccaaaccccgccctactgtctcttcctgtttgttccctcggaccttcagctgcttcttcactgttgaaaccatgccctggaagacatattttgaactcctgaacaa

SEQ ID NO: 592460 - DNA, 120 bp, Artificial Sequence
  ENSG00000173335_11 (sequence is synthesized)
gacctgctcagaggggctctcctgagtggaagccactcacatgcctggccacatgctgccccctcccccgtggacaccagctgttcccaggagttgacatatcagtggctgagcagctcc

SEQ ID NO: 592461 - DNA, 120 bp, Artificial Sequence
  ENSG00000173335_12 (sequence is synthesized)
gtgcatatttgttctcttattttgcaagtgtctgaggttttatgacttggcattttagaaaatcctcactgtccaggttcctcaagtagaataggtcattaaacatcagcatttgcagaa

SEQ ID NO: 592462 - DNA, 120 bp, Artificial Sequence
  ENSG00000173338_0 (sequence is synthesized)
atccccaccatcccagctgctgtgaaatgggcaaatgtcttgcctccaggacctgggaagggtgatgcagctcacctccctcctgttcacaccccagccaccccagccatcccagccggg

SEQ ID NO: 592463 - DNA, 120 bp, Artificial Sequence
  ENSG00000173338_1 (sequence is synthesized)
tcccagccacccacacagcacctcctcctggccccgccctgcccagcccctcccaggtgcctgaggtggagccgccagttcccacagcaccccagcggcctgccatggggggtctaaggc

SEQ ID NO: 592464 - DNA, 120 bp, Artificial Sequence
  ENSG00000173338_2 (sequence is synthesized)
cctggtcccgatacgggctcctggttgtggcccacttgctggccctggggcttggggctgtggtgttccaggccctggaggggcctcctgcatgcaggcttcaggctgagctcagggcag

SEQ ID NO: 592465 - DNA, 120 bp, Artificial Sequence
  ENSG00000173338_3 (sequence is synthesized)
agctggcagccttccaggcagagcatagggcctgcctgccacccggagctctggaagagctgctgggcactgccctggccacccaggcccatggggtctccaccctgggcaacagctcag

SEQ ID NO: 592466 - DNA, 120 bp, Artificial Sequence
  ENSG00000173338_4 (sequence is synthesized)
agggcaggacctgggaccttccctcagccctgctcttcgctgccagcatcctcaccaccacaggttatggccacatggccccactatcgccaggcggaaaggccttctgcatggtctatg

SEQ ID NO: 592467 - DNA, 120 bp, Artificial Sequence
  ENSG00000173338_5 (sequence is synthesized)
tggcagctgtcaccggccagggctgcgctgctgcaggcagttgcactgggactgctggtggccagcagctttgtgctgctgccagcgctggtgctgtggggccttcagggcgactgcagc

SEQ ID NO: 592468 - DNA, 120 bp, Artificial Sequence
  ENSG00000173338_6 (sequence is synthesized)
ctgctgggggccgtctacttctgcttcagctcgctcagcaccattggcctggaggacttgctgcccggccgcggccgcagcctgcaccccgtgatttaccacctgggccagctcgcactt

SEQ ID NO: 592469 - DNA, 120 bp, Artificial Sequence
  ENSG00000173338_7 (sequence is synthesized)
cttggttacttgcttctaggactcttggccatgctgctggcagtggagaccttctctgagctgccgcaggtccgtgccatggggaagttcttcagacccagtggtcctgtgactgctgag

SEQ ID NO: 592470 - DNA, 120 bp, Artificial Sequence
  ENSG00000173338_8 (sequence is synthesized)
gaccaaggtggcatcctagggcaggatgaactggctctgagcaccctgccgcccgcggccccagcttcaggacaagcccctgcttgctgaagcgtcaggtgaccgagttcagctccgtaa

SEQ ID NO: 592471 - DNA, 120 bp, Artificial Sequence
  ENSG00000173338_9 (sequence is synthesized)
ggtggcggcacctgaggaggaagcagccaggagtggctggggaagaatctggagatggagccgcggtgagggtgggcgggaggcctcagaggatactgttaatcataaaatgagcaacga

SEQ ID NO: 592472 - DNA, 120 bp, Artificial Sequence
  ENSG00000173338_10 (sequence is synthesized)
cctgcaccccgtgatttaccacctgggccagctcgcacttcttggtggagggacctcactccagggcacggcgtgggaggggtagtcgaagagctctggtggcagcgttgagaaggggga

SEQ ID NO: 592473 - DNA, 120 bp, Artificial Sequence
  ENSG00000173338_11 (sequence is synthesized)
cgtgtgggggaagggggaagaggagcctggactaggactcccataaatcactggggggctgggccttgcaggtggagggacctcactccagggcacggcgtgggaggggtagtcgaagag

SEQ ID NO: 592474 - DNA, 120 bp, Artificial Sequence
  ENSG00000173338_12 (sequence is synthesized)
ctctggtggcagcgttgagaagggggtgagtggtgccagttgccagggcaagtcactgcgctgggaggtgggcggggagcatcaccagaacccaggcgctgccccagcaccttctcctcc

SEQ ID NO: 592475 - DNA, 120 bp, Artificial Sequence
  ENSG00000173349_0 (sequence is synthesized)
agcttttcctttctgccaccgccttgtccaagatggcggacctccaccgccagctgcaggagtacctggcgcaggggaaagctggcggcccggcggccgcggagccgctgctcgccgcgg

SEQ ID NO: 592476 - DNA, 80 bp, Artificial Sequence
  ENSG00000173349_1 (sequence is synthesized)
agaaggcggaggagcccggggaccggccggcggaggagtggctgggccgcgcgggcttgcgctggacgtgggcgcggagc

SEQ ID NO: 592477 - DNA, 120 bp, Artificial Sequence
  ENSG00000173349_2 (sequence is synthesized)
gcgtgacgcgcgggcagcggctggcggcgggcggcgggtgcctgctgctggctgcactgtgtttcggcctagccgcgctctacgcaccggtgttgctgctgcgcgcgcgcaagttcgcgc

SEQ ID NO: 592478 - DNA, 120 bp, Artificial Sequence
  ENSG00000173349_3 (sequence is synthesized)
tgctctggtcactgggctcggcgctggcgttggcgggaagcgcgctgctgcggggcggcgcggcgtgcggacgcctgctgcgctgcgaagaagcgccgtcccggcccgcgctgctctaca

SEQ ID NO: 592479 - DNA, 120 bp, Artificial Sequence
  ENSG00000173349_4 (sequence is synthesized)
tacatggcagcgctgggcgccacgctgttcgccgcgctgggccttcgcagcacgctgctcacggtgctgggcgcgggcgcgcaggtggccgcgctgctggccgcgctggttgggctgctg

SEQ ID NO: 592480 - DNA, 120 bp, Artificial Sequence
  ENSG00000173349_5 (sequence is synthesized)
ggcaccgcgctgcgcctcgcactgggtcgcctgggccgcggcgccggcctcgccaaggtgctgcccgtgtgaggacctcgcgccctcgccgctggggaagtacgcggagccagcgccgtc

SEQ ID NO: 592481 - DNA, 120 bp, Artificial Sequence
  ENSG00000173349_6 (sequence is synthesized)
gcgccgtcggagaccgcgccggccgagctgaggactgcacgccgctgtgcggaagcccgtggcgaaggccctgccctaacagcctgcgagtctaatccgggagcggctgctgccagcgga

SEQ ID NO: 592482 - DNA, 120 bp, Artificial Sequence
  ENSG00000173349_7 (sequence is synthesized)
ggcgacagcagcgttgggagctcctcgatgtcagctttttgtgctggacttggcacacgctctgaaaactgagattttgtcattgaactggtgacaggatgtgagacggttattagaagt

SEQ ID NO: 592483 - DNA, 120 bp, Artificial Sequence
  ENSG00000173349_8 (sequence is synthesized)
tgctttcgaagtaactgtggtcttaggttcggctgagtaaagaaaaaggatttttcttcgagttagctgctcttgtgatttttctcaggctgttttgtcattttaaaatccagtggtaga

SEQ ID NO: 592484 - DNA, 120 bp, Artificial Sequence
  ENSG00000173349_9 (sequence is synthesized)
tgtagcttagcgacggtagttttttgttttggctatactaagacttggaaattattctctccagtgtcagcgaatccagaagggtatcagattaaacaccgaattcagccactggacttt

SEQ ID NO: 592485 - DNA, 120 bp, Artificial Sequence
  ENSG00000173349_10 (sequence is synthesized)
taaaagtacttaagatggtttatctcgggttttttcttcagttaacaaaatcataaatatggtgccttataacatgaaaggaaaattagttgtgtatttcacgacgaaagcgacggacca

SEQ ID NO: 592486 - DNA, 120 bp, Artificial Sequence
  ENSG00000173349_11 (sequence is synthesized)
aaagaaatttcctgccccaagaagcatgggatccaggaaggggcgcgtagatgcttaacggtctcttcggaaatcctgcaaatagaaagataattctagatccggaatacctgtatctgg

SEQ ID NO: 592487 - DNA, 120 bp, Artificial Sequence
  ENSG00000173349_12 (sequence is synthesized)
tggaaaccatggatttctacaagctcgaattattcctcattgtatagcctgctttgtaaactagtttacaatttgcaggctgatcttaagatttttttatatctaattgctgctgccttc

SEQ ID NO: 592488 - DNA, 120 bp, Artificial Sequence
  ENSG00000173349_13 (sequence is synthesized)
attttaggttcagcagttacttttaactaccttaatttattgccagaaggtatgagcctaacattctgatgagtccagaaaactacgttttgtcagtagcaatacactaggaagtaaaat

SEQ ID NO: 592489 - DNA, 120 bp, Artificial Sequence
  ENSG00000173349_14 (sequence is synthesized)
atatttagaatttaaacattgtgtgccagtggtcctcgcgcttgactgcacatcagttacttgaagagccacacctcagatcaatgcagtcagaacctgggaagtaggtcccagacatca

SEQ ID NO: 592490 - DNA, 120 bp, Artificial Sequence
  ENSG00000173349_15 (sequence is synthesized)
ttctacgttccccaagtttgaggaccacttttctgtgcattggcttgcacaatttgaaagtaatgcttttcctgagctggatcccagtgttgccttaacagggtgtctgtcgtgccgcag

SEQ ID NO: 592491 - DNA, 120 bp, Artificial Sequence
  ENSG00000173349_16 (sequence is synthesized)
tagagcactgctgcttcctccaaccccaaaatttatgttcctaagtaagtcaggtccctaagccccgtcccaagaagtgacacaagtggccaacatccacactgtaggcttgcaggctac

SEQ ID NO: 592492 - DNA, 120 bp, Artificial Sequence
  ENSG00000173349_17 (sequence is synthesized)
ccgccctgagatttggtaaagaacactgccttgttccccatcagtaaacaaggttacctacctcaggaggctgcttgtgagagagcaaatgcagtatcttcagaatgatttattttttta

SEQ ID NO: 592493 - DNA, 120 bp, Artificial Sequence
  ENSG00000173349_18 (sequence is synthesized)
attaattgtaaagacttgtgccattggctgctctttctagtcccctaaatttctgttctagttttaaatttctctagaacttgcaatagttgggggttttataatgatgttttacaatgt

SEQ ID NO: 592494 - DNA, 82 bp, Artificial Sequence
  ENSG00000173349_19 (sequence is synthesized)
ttgcaatagttgggggttttataatgatgttttacaatgtttatttcttaaataaaaacttaaaaattcaacatttctcagc

SEQ ID NO: 592495 - DNA, 120 bp, Artificial Sequence
  ENSG00000173349_20 (sequence is synthesized)
gcctgggcaacacagttaaaccccatcgccacagaaaatcttcaaaaaatttgccagatatggtggcacacaactgtgatcccagctacttggggtggggctgaggtgggaagatcactt

SEQ ID NO: 592496 - DNA, 120 bp, Artificial Sequence
  ENSG00000173349_21 (sequence is synthesized)
gagcccaggaggttgaggctgcagtgaactgtgatcacaccactgcaccacagcctaggcaacagcgagaccttgtctcaaaaattttttctcaaatcaaacatcattgaaaatctactt

SEQ ID NO: 592497 - DNA, 120 bp, Artificial Sequence
  ENSG00000173349_22 (sequence is synthesized)
tttataagcttcaaatcacaacatctagtatgtatgctgacagtgatgtttttaaatgccatatatatttaataagtataatgtagaggtttattgtttaaatgaattcactctcaaaat

SEQ ID NO: 592498 - DNA, 120 bp, Artificial Sequence
  ENSG00000173349_23 (sequence is synthesized)
gtgatctgtcaagtccagtagagcttcaaggtaaaatgaaaatttttaaatgtgatctggttatctgcttactgagatactatgtttctaaagttaaagcccaaaataatgaaaattttt

SEQ ID NO: 592499 - DNA, 120 bp, Artificial Sequence
  ENSG00000173349_24 (sequence is synthesized)
ccactagaatctcagggaaaaaaagtctaatcttgatatgggtttggtctctggatccggttttagcttcatgaaatttgattacagtttctctctctttaagctataccagttgggggt

SEQ ID NO: 592500 - DNA, 120 bp, Artificial Sequence
  ENSG00000173349_25 (sequence is synthesized)
gagtgaagaaatacccataacctaaagcaatcttgagcctcctaatagcatgtttatggtggagcgctgattaaataagctgtaatttcaaagttaaaaaaaaaatagtctctagattct

SEQ ID NO: 592501 - DNA, 120 bp, Artificial Sequence
  ENSG00000173349_26 (sequence is synthesized)
aacactgaaaagcagtgtatatggctgacattttctcactccacagaaatcaattagcttttgctgttttttacattcatagagaaccagttaaattttcatatcctgttaaactatatc

SEQ ID NO: 592502 - DNA, 120 bp, Artificial Sequence
  ENSG00000173349_27 (sequence is synthesized)
agtatgccttttctaagcaaccattgaaacttccagcaccagcggccaggtactgtggctcagatctgcaatcccagcactttgggaggccacagcaggtggaccgcttgagcccaggag

SEQ ID NO: 592503 - DNA, 120 bp, Artificial Sequence
  ENSG00000173349_28 (sequence is synthesized)
tttgaaaccagcatagacaaagtggtgaaactccatctctacaaaaaacacacacacaaaaaattagctgggcatggtggcatatgcctgtagtcctagctactagggaggctgaggcag

SEQ ID NO: 592504 - DNA, 89 bp, Artificial Sequence
  ENSG00000173349_29 (sequence is synthesized)
ctggggaaaagaaaaaaagaaacttccagcaccactaaatttgccaaataaatttgactgatgccaaaactgaagctgccaatgtaatg

SEQ ID NO: 592505 - DNA, 120 bp, Artificial Sequence
  ENSG00000173349_30 (sequence is synthesized)
aaatttgactgatgccaaaactgaagctgccaatgtaatgaaatgttaaggtggccataggacagtccttttaataaaagcttccatgtaaaaccaaaataaaggtcagtatagaaagta

SEQ ID NO: 592506 - DNA, 120 bp, Artificial Sequence
  ENSG00000173369_0 (sequence is synthesized)
gcccttcccgcctctggggaagggaacttccgcttcggaccgagggcagtaggctctcggctcctggtcccactgctgctcagcccagtggcctcacaggacaccagcttcccaggaggc

SEQ ID NO: 592507 - DNA, 120 bp, Artificial Sequence
  ENSG00000173369_1 (sequence is synthesized)
gtctgacacagtatgatgatgaagatcccatggggcagcatcccagtactgatgttgctcctgctcctgggcctaatcgatatctcccaggcccagctcagctgcaccgggcccccagcc

SEQ ID NO: 592508 - DNA, 120 bp, Artificial Sequence
  ENSG00000173369_2 (sequence is synthesized)
atccctggcatcccgggtatccctgggacacctggccccgatggccaacctgggaccccagggataaaaggagagaaagggcttccagggctggctggagaccatggtgagttcggagag

SEQ ID NO: 592509 - DNA, 120 bp, Artificial Sequence
  ENSG00000173369_3 (sequence is synthesized)
aagggagacccagggattcctgggaatccaggaaaagtcggccccaagggccccatgggccctaaaggtggcccaggggcccctggagccccaggccccaaaggtgaatcgggagactac

SEQ ID NO: 592510 - DNA, 120 bp, Artificial Sequence
  ENSG00000173369_4 (sequence is synthesized)
gtgatcaccaacatgaacaacaattatgagccccgcagtggcaagttcacctgcaaggtgcccggtctctactacttcacctaccacgccagctctcgagggaacctgtgcgtgaacctc

SEQ ID NO: 592511 - DNA, 120 bp, Artificial Sequence
  ENSG00000173369_5 (sequence is synthesized)
atgcgtggccgggagcgtgcacagaaggtggtcaccttctgtgactatgcctacaacaccttccaggtcaccaccggtggcatggtcctcaagctggagcagggggagaacgtcttcctg

SEQ ID NO: 592512 - DNA, 120 bp, Artificial Sequence
  ENSG00000173369_6 (sequence is synthesized)
caggccaccgacaagaactcactactgggcatggagggtgccaacagcatcttttccgggttcctgctctttccagatatggaggcctgacctgtgggctgcttcacatccaccccggct

SEQ ID NO: 592513 - DNA, 120 bp, Artificial Sequence
  ENSG00000173369_7 (sequence is synthesized)
ccccctgccagcaacgctcactctacccccaacaccaccccttgcccaaccaatgcacacagtagggcttggtgaatgctgctgagtgaatgagtaaataaactcttcaaggccaaggga

SEQ ID NO: 592514 - DNA, 120 bp, Artificial Sequence
  ENSG00000173369_8 (sequence is synthesized)
gcccttcccgcctctggggaagggaacttccgcttcggaccgagggcagtaggctctcggctcctggtcccactgctgctcagcccagtggcctcacaggacaccagcttcccagccctg

SEQ ID NO: 592515 - DNA, 120 bp, Artificial Sequence
  ENSG00000173369_9 (sequence is synthesized)
tcaggttgaaatcagcattgccaagaggctcagagaggttaaggcacttgcctgaggttatgcagccggtagcagatggggctttaaagtcaagtgggcctgactccatgttgcggaaag

SEQ ID NO: 592516 - DNA, 120 bp, Artificial Sequence
  ENSG00000173369_10 (sequence is synthesized)
agcaggtacaattatggtcccatcctatagcagagaaaattggggctcccttgactgacaacacatcaactggcaagtggcagaggcgggattggaatcaaaggctctgactgtaagcca

SEQ ID NO: 592517 - DNA, 120 bp, Artificial Sequence
  ENSG00000173372_0 (sequence is synthesized)
actcctgctgggcagcccacagggtccctgggcggagggcaggagcatccagttggagttgacaacaggaggcagaggcatcatggagggtccccggggatggctggtgctctgtgtgct

SEQ ID NO: 592518 - DNA, 120 bp, Artificial Sequence
  ENSG00000173372_1 (sequence is synthesized)
ggccatatcgctggcctctatggtgaccgaggacttgtgccgagcaccagacgggaagaaaggggaggcaggaagacctggcagacgggggcggccaggcctcaagggggagcaagggga

SEQ ID NO: 592519 - DNA, 120 bp, Artificial Sequence
  ENSG00000173372_2 (sequence is synthesized)
gccgggggcccctggcatccggacaggcatccaaggccttaaaggagaccagggggaacctgggccctctggaaaccccggcaaggtgggctacccagggcccagcggccccctcggagc

SEQ ID NO: 592520 - DNA, 120 bp, Artificial Sequence
  ENSG00000173372_3 (sequence is synthesized)
ccgtggcatcccgggaattaaaggcaccaagggcagcccaggaaacatcaaggaccagccgaggccagccttctccgccattcggcggaaccccccaatggggggcaacgtggtcatctt

SEQ ID NO: 592521 - DNA, 120 bp, Artificial Sequence
  ENSG00000173372_4 (sequence is synthesized)
tcaccaaccaggaagaaccgtaccagaaccactccggccgattcgtctgcactgtacccggctactactacttcaccttccaggtgctgtcccagtgggaaatctgcctgtccatcgtct

SEQ ID NO: 592522 - DNA, 120 bp, Artificial Sequence
  ENSG00000173372_5 (sequence is synthesized)
cctcctcaaggggccaggtccgacgctccctgggcttctgtgacaccaccaacaaggggctcttccaggtggtgtcagggggcatggtgcttcagctgcagcagggtgaccaggtctggg

SEQ ID NO: 592523 - DNA, 120 bp, Artificial Sequence
  ENSG00000173372_6 (sequence is synthesized)
ttgaaaaagaccccaaaaagggtcacatttaccagggctctgaggccgacagcgtcttcagcggcttcctcatcttcccatctgcctgagccagggaaggaccccctcccccacccacct

SEQ ID NO: 592524 - DNA, 120 bp, Artificial Sequence
  ENSG00000173372_7 (sequence is synthesized)
ctctggcttccatgctccgcctgtaaaatgggggcgctattgcttcagctgctgaagggagggggctggctctgagagccccaggactggctgccccgtgacacatgctctaagaagctc

SEQ ID NO: 592525 - DNA, 120 bp, Artificial Sequence
  ENSG00000173372_8 (sequence is synthesized)
gtttcttagacctcttcctggaataaacatctgtgtctgtgtctgctgaacatgagcttcagttgctactcggagcattgagagggaggcctaagaataataacaatccagtgcttaaga

SEQ ID NO: 592526 - DNA, 120 bp, Artificial Sequence
  ENSG00000173372_9 (sequence is synthesized)
ccaggaggctgggcagctgaggcagggagggagggaaataactgtgcctgattctaggacagggatgggggtgcagcactgatccaggacccagaatggaggcatcatggagggtccccg

SEQ ID NO: 592527 - DNA, 120 bp, Artificial Sequence
  ENSG00000173376_0 (sequence is synthesized)
acactccccacttccagccgcgagagagtggagctaactgagcagcgcacccgccacggccgctgccgccccgtgcgcccggctctcccagcaccccgcgcggcgctccagccaggcgcc

SEQ ID NO: 592528 - DNA, 120 bp, Artificial Sequence
  ENSG00000173376_1 (sequence is synthesized)
tgtgcgactagcggcggccggcgaagcccgcgccagccccgcgggtcgctgcggcatcctcccgccgcccagcccccgcacgctccctgcagtttaaaaggacctcccgccgcttctcgg

SEQ ID NO: 592529 - DNA, 120 bp, Artificial Sequence
  ENSG00000173376_2 (sequence is synthesized)
cgctgccccgggattccccagccccgcgcggctccctactccacttcgcagcaacttcggcgaccgcgcgccgcccgccctcgcccgcctttgaagtttgctgtgccgaccgcaaagttg

SEQ ID NO: 592530 - DNA, 120 bp, Artificial Sequence
  ENSG00000173376_3 (sequence is synthesized)
ggacacttcagcggattgaatttttctcttttatctgcctccgtccccgccctccaggcttctcgttcctggatattggtgcttagcatcttggcagggtccggggacgtggactatttc

SEQ ID NO: 592531 - DNA, 120 bp, Artificial Sequence
  ENSG00000173376_4 (sequence is synthesized)
gcacaccacaccacggggagggatttttttctattttccctacgaaaaacagatctttttaaggatggtgctgctccactggtgcctgctgtggctcctgtttccactcagctcaaggac

SEQ ID NO: 592532 - DNA, 120 bp, Artificial Sequence
  ENSG00000173376_5 (sequence is synthesized)
ccagaagttacccacccgggatgaggaactttttcagatgcagatccgggacaaggcattttttcatgattcgtcagtaattccagatggagctgaaattagcagttatctctttagaga

SEQ ID NO: 592533 - DNA, 120 bp, Artificial Sequence
  ENSG00000173376_6 (sequence is synthesized)
tacacctaagaggtatttctttgtggttgaagaagacaatactccattatcagtcacagtgacgccctgtgatgcgcctttggagtggaagctgagcctccaggagctgccagaggacag

SEQ ID NO: 592534 - DNA, 120 bp, Artificial Sequence
  ENSG00000173376_7 (sequence is synthesized)
gagcggggaaggctcaggtgatctggaacctcttgagcagcagaagcagcagatcattaatgaggaaggcactgagttattctcctacaaaggcaatgatgttgagtattttatatcgtc

SEQ ID NO: 592535 - DNA, 120 bp, Artificial Sequence
  ENSG00000173376_8 (sequence is synthesized)
tagttccccatccggtttatatcagttggatcttctttcaacagagaaagacacacatttcaaagtatatgccaccacaactccagaatctgatcagccataccctgagttaccctatga

SEQ ID NO: 592536 - DNA, 120 bp, Artificial Sequence
  ENSG00000173376_9 (sequence is synthesized)
cccaagagtagatgtgacctcactggggcgcaccacggtcactttggcctggaaaccaagccccactgcctctttgctgaaacaacccattcagtactgtgtggtcatcaacaaagagca

SEQ ID NO: 592537 - DNA, 120 bp, Artificial Sequence
  ENSG00000173376_10 (sequence is synthesized)
caatttcaaaagtctctgtgcagtggaagcaaaactgagtgcagatgatgcttttatgatggcaccgaaacctggtctggacttcagcccctttgactttgcccactttggatttccttc

SEQ ID NO: 592538 - DNA, 120 bp, Artificial Sequence
  ENSG00000173376_11 (sequence is synthesized)
tgataattcaggtaaagaacgcagtttccaggcaaagccttctccaaaactggggcgtcatgtctactccaggcccaaggttgatattcagaaaatctgcataggaaacaagaacatctt

SEQ ID NO: 592539 - DNA, 120 bp, Artificial Sequence
  ENSG00000173376_12 (sequence is synthesized)
gacacgcagtactactttgatgtatttgtggtcaacatcaacagcaacatgagcaccgcttatgtaggtacctttgccaggaccaaggaagaagccaaacagaagacagtcgagctaaaa

SEQ ID NO: 592540 - DNA, 120 bp, Artificial Sequence
  ENSG00000173376_13 (sequence is synthesized)
gatgggaagataacagatgtatttgttaaaaggaagggagcaaagtttctacggtttgctccagtctcttctcaccaaaaagtcaccttctttattcactcttgtctggatgctgtccaa

SEQ ID NO: 592541 - DNA, 120 bp, Artificial Sequence
  ENSG00000173376_14 (sequence is synthesized)
atccaagtgagaagagatgggaaacttcttctgtctcagaatgtggaaggcattcagcagtttcagcttagaggaaaacctaaagctaaatacctcgttcgactgaaaggaaacaagaaa

SEQ ID NO: 592542 - DNA, 120 bp, Artificial Sequence
  ENSG00000173376_15 (sequence is synthesized)
ggagcatctatgttgaaaattctagctaccacaaggcctactaagcagtcatttccctctcttcctgaagacacaagaatcaaagcctttgacaagctccgtacctgttcctcagccacc

SEQ ID NO: 592543 - DNA, 120 bp, Artificial Sequence
  ENSG00000173376_16 (sequence is synthesized)
gtggcttggctaggcactcaggaaaggaacaagttttgcatctacaaaaaagaagtggatgataactacaatgaagaccagaagaaaagagagcaaaaccaatgtctaggaccagatata

SEQ ID NO: 592544 - DNA, 120 bp, Artificial Sequence
  ENSG00000173376_17 (sequence is synthesized)
aggaagaagtcagaaaaggtcctctgtaaatatttccacagtcaaaacctgcagaaagcagtgaccacagaaacaattaaaggtcttcagcctggcaaatcttacctgctggatgtttat

SEQ ID NO: 592545 - DNA, 120 bp, Artificial Sequence
  ENSG00000173376_18 (sequence is synthesized)
gtcataggacatggggggcactctgtaaagtatcagagtaaggttgtgaaaactagaaagttctgttagttaccttcttatagagatatattatgtagaactccaggagggacattaaat

SEQ ID NO: 592546 - DNA, 120 bp, Artificial Sequence
  ENSG00000173376_19 (sequence is synthesized)
cactttaagtataaactgactactcccacagttgagagaagttgtgacctgtacttgtactatggaaggaaggatatcaacgtgtgtatattgatgtttatataagtaactcttgaagga

SEQ ID NO: 592547 - DNA, 120 bp, Artificial Sequence
  ENSG00000173376_20 (sequence is synthesized)
gacttgttctagcgtgccccatggtacctagtgtgtgtctgatgccggttggtgtcaaagatagagggcttcttgaaggaacttgccattccttgctttgaccactgcatgaactgcttc

SEQ ID NO: 592548 - DNA, 120 bp, Artificial Sequence
  ENSG00000173376_21 (sequence is synthesized)
taaattattttattacctaaaaatttaaaatatgccattcattgcacacacccacaaatgcaaatcattcctctctgtagatgctaggatatatataaattattttataaattcttgttt

SEQ ID NO: 592549 - DNA, 120 bp, Artificial Sequence
  ENSG00000173376_22 (sequence is synthesized)
taaatgtcagtgtttctatgattgtaaactattaaattcttttcctattaaagtacagatctaatctaagtattattaagttgatagccctctagtcagttatattgctattgtaaattc

SEQ ID NO: 592550 - DNA, 120 bp, Artificial Sequence
  ENSG00000173376_23 (sequence is synthesized)
ttgtttgttgagtaaaatgtttaaatactatatgtatctcatgtacaaagttgacatacattatattcatgtacataaaattaaagagattagattatatactgttcattttcccaagca

SEQ ID NO: 592551 - DNA, 120 bp, Artificial Sequence
  ENSG00000173376_24 (sequence is synthesized)
gagagacagggtctctctttgttgtccaggttcagcttcaagtaatcttacagcctcagcatcccaaagtgctaggataacaggcatgagccatgacacccagccaaatattcttactgg

SEQ ID NO: 592552 - DNA, 120 bp, Artificial Sequence
  ENSG00000173376_25 (sequence is synthesized)
agagtttccctctattgtgcaccccggtctgcttgacagtgtgatggtcccgcgtgcgcgtctcctgggttttgcagctttgtcgggggctcggtgggcctccttcattctccccgagtg

SEQ ID NO: 592553 - DNA, 120 bp, Artificial Sequence
  ENSG00000173376_26 (sequence is synthesized)
ctttttaaggtaagtggggagaggaaagcaatgccccagagacccgacgccttagcccgccaccctgagacctagcacaaggagcgttcacgcccgaagggtcatccgagatgggggctc

SEQ ID NO: 592554 - DNA, 120 bp, Artificial Sequence
  ENSG00000173376_27 (sequence is synthesized)
gaggcacgcgcccccaaatcttcaaggcccaagaagcttctcaagggcgccctatccgtaggagctgagggcatgaggggcaggagcaggatggtgctgctccactggtgcctgctgtgg

SEQ ID NO: 592555 - DNA, 120 bp, Artificial Sequence
  ENSG00000173389_0 (sequence is synthesized)
acccttcctgcctatgctatggctggatgaacacagatgtgaggggatttgaaccatctacaatcaatccatatgtgaccaatggaggagaagcagccccaaaagacgaaggaaccctca

SEQ ID NO: 592556 - DNA, 120 bp, Artificial Sequence
  ENSG00000173389_1 (sequence is synthesized)
aaagaagatgagcctcagcagaaggagatgccaacccatttgtccttaggagcagagtcaaaggcagaggctaaaactccagttctggttgagacacagacagtggacaatgccaatgag

SEQ ID NO: 592557 - DNA, 120 bp, Artificial Sequence
  ENSG00000173389_2 (sequence is synthesized)
agccctcagtgcctgcatcattcagtgctggtggcggctgatactgtccaagattctgaagaagaggcggcaggcagcgctagaggccttctcccggaaggagtgggcagcagtcacact

SEQ ID NO: 592558 - DNA, 120 bp, Artificial Sequence
  ENSG00000173389_3 (sequence is synthesized)
gcagtcccaggcccgcatgtggcgcatccgcagacgctattgccaggtgctcaatgctgttcgcatcatccaggcttactggaggtgccgctcctgtgcttcccgggggttcatcaaggg

SEQ ID NO: 592559 - DNA, 120 bp, Artificial Sequence
  ENSG00000173389_4 (sequence is synthesized)
ccagtacagagtcacagccaaccagctgcatctccagctggagatcttgctggactcagggccttgcattgtgacagagtgtattcccttctcaataaaggaatgaagtggtcttttcca

SEQ ID NO: 592560 - DNA, 120 bp, Artificial Sequence
  ENSG00000173389_5 (sequence is synthesized)
cgaaggaaccctcaaaagaagatgagcctcagcagaaggagatgccaacccatttgtccttaggagcagagtcaaaggcagagcaaggcaaggtacttctatagaagggtgcgcccttac

SEQ ID NO: 592561 - DNA, 120 bp, Artificial Sequence
  ENSG00000173391_0 (sequence is synthesized)
agtttgttgaagttcgtgactgcttcactctctcattcttagcttgaatttggaaatgacttttgatgacctaaagatccagactgtgaaggaccagcctgatgagaagtcaaatggaaa

SEQ ID NO: 592562 - DNA, 120 bp, Artificial Sequence
  ENSG00000173391_1 (sequence is synthesized)
aaaagctaaaggtcttcagtttctttactctccatggtggtgcctggctgctgcgactctaggggtcctttgcctgggattagtagtgaccattatggtgctgggcatgcaattatccca

SEQ ID NO: 592563 - DNA, 120 bp, Artificial Sequence
  ENSG00000173391_2 (sequence is synthesized)
ggtgtctgacctcctaacacaagagcaagcaaacctaactcaccagaaaaagaaactggagggacagatctcagcccggcaacaagcagaagaagcttcacaggagtcagaaaacgaact

SEQ ID NO: 592564 - DNA, 120 bp, Artificial Sequence
  ENSG00000173391_3 (sequence is synthesized)
caaggaaatgatagaaacccttgctcggaagctgaatgagaaatccaaagagcaaatggaacttcaccaccagaatctgaatctccaagaaacactgaagagagtagcaaattgttcagc

SEQ ID NO: 592565 - DNA, 120 bp, Artificial Sequence
  ENSG00000173391_4 (sequence is synthesized)
tccttgtccgcaagactggatctggcatggagaaaactgttacctattttcctcgggctcatttaactgggaaaagagccaagagaagtgcttgtctttggatgccaagttgctgaaaat

SEQ ID NO: 592566 - DNA, 120 bp, Artificial Sequence
  ENSG00000173391_5 (sequence is synthesized)
taatagcacagctgatctggacttcatccagcaagcaatttcctattccagttttccattctggatggggctgtctcggaggaaccccagctacccatggctctgggaggacggttctcc

SEQ ID NO: 592567 - DNA, 120 bp, Artificial Sequence
  ENSG00000173391_6 (sequence is synthesized)
tttgatgccccacttatttagagtccgaggcgctgtctcccagacatacccttcaggtacctgtgcatatatacaacgaggagctgtttatgcggaaaactgcattttagctgccttcag

SEQ ID NO: 592568 - DNA, 120 bp, Artificial Sequence
  ENSG00000173391_7 (sequence is synthesized)
tatatgtcagaagaaggcaaacctaagagcacagtgaatttgaaggctctggaagaaaagaaaaaagtctttgagttttattctggaatttaagctattctttgtcacttgggtgccaaa

SEQ ID NO: 592569 - DNA, 120 bp, Artificial Sequence
  ENSG00000173391_8 (sequence is synthesized)
catgagagcccagaaaactgtcatttagctggctgcagaactcctttgcagaaactggggttccaggagcctggcacctttatgtcaacatttttgattctagctacctgtattatttca

SEQ ID NO: 592570 - DNA, 120 bp, Artificial Sequence
  ENSG00000173391_9 (sequence is synthesized)
cctagcttgtcccaagcttccctgccagcctgaagtccattttcccctttttattttaaaatttgactcctcttcaagcttgaaaaccctctgaactcagtcttctttacctcattatca

SEQ ID NO: 592571 - DNA, 120 bp, Artificial Sequence
  ENSG00000173391_10 (sequence is synthesized)
agtgcaggcagagagcaaaaaggggaaatatgtctgggaaaaagtgcacgtgaagaaacaaagaaggacagaggccattccgaaatcaagaaactcatgttcttaactttaaaaaaggta

SEQ ID NO: 592572 - DNA, 90 bp, Artificial Sequence
  ENSG00000173391_11 (sequence is synthesized)
cgaaatcaagaaactcatgttcttaactttaaaaaaggtatcaatccttggtttttaaactgtggtccatctccagactctaccacttac

SEQ ID NO: 592573 - DNA, 120 bp, Artificial Sequence
  ENSG00000173391_12 (sequence is synthesized)
agtaattagtaagtgagtggtcttttctgtaagctaatccacaacctgttaccacttcctgaatcagttattatttcttcatttttttttctaccagaggacagattaatagatttaacc

SEQ ID NO: 592574 - DNA, 120 bp, Artificial Sequence
  ENSG00000173391_13 (sequence is synthesized)
cttcacaacagttcttgttagaatcatgggatgtgtggcccagaggtaagaatagaatttctttccctaaagaacataccttttgtagatgaactcttctcaactctgttttgctatgct

SEQ ID NO: 592575 - DNA, 120 bp, Artificial Sequence
  ENSG00000173391_14 (sequence is synthesized)
ataattccgaaacatacaagacaaaaaaaatgaagacactcaatctagaacaaactaagccaggtatgcaaatatcgctgaatagaaacagatggaattagaaatatatcttctattttt

SEQ ID NO: 592576 - DNA, 120 bp, Artificial Sequence
  ENSG00000173391_15 (sequence is synthesized)
aggcttctatttcctttccacccactcttcacaggctattctactttaaaggaagcctttttattttgctgcacacaatctagcaggaatctttttttttttttaagagctgtgtcatcc

SEQ ID NO: 592577 - DNA, 120 bp, Artificial Sequence
  ENSG00000173391_16 (sequence is synthesized)
ttatgtaggcaagagatgtttgcttttgttaaaagctttattgagatataattaacataaaataaactgaacatatttaaagtgtactatttgataagttttcacaccttgtggagaaca

SEQ ID NO: 592578 - DNA, 120 bp, Artificial Sequence
  ENSG00000173391_17 (sequence is synthesized)
tgcatactacaattaagagagtgaacatatccatcatccctcaaagtgtcacaatgctcctcctgatgactcctccccagaaaaccaccaatcggctttcattttgcattttgtagtttt

SEQ ID NO: 592579 - DNA, 120 bp, Artificial Sequence
  ENSG00000173391_18 (sequence is synthesized)
atgtgaatggaatcatatagtatgtcttttttttttgtctggcttctttcactttgcataattattttgagattcatatgtctccatcttgatgctcgtatgaattcattcttttaaatg

SEQ ID NO: 592580 - DNA, 120 bp, Artificial Sequence
  ENSG00000173391_19 (sequence is synthesized)
ttgaatattcccttgtatggatataccacaattcatttacccatttacttgttgatgacatttgggttgttttagttttgggatattacaaataaagctgctgtgaacatttgtgtacaa

SEQ ID NO: 592581 - DNA, 120 bp, Artificial Sequence
  ENSG00000173391_20 (sequence is synthesized)
acaagtgtttgcaatgttcctgacattaaacaaaatactgcaggaatattcaagaacctccaaatctgtaacttctgagtaaatctgggtcatttttcagcagcttatctattgtcaaaa

SEQ ID NO: 592582 - DNA, 120 bp, Artificial Sequence
  ENSG00000173401_0 (sequence is synthesized)
ctggtccgcgcagtcagggcatcctccgcatcctccacatccttccatggctctgaagaataaattcagttgtttatggatcttgggtctgtgtttggtagccactacatcttccaaaat

SEQ ID NO: 592583 - DNA, 120 bp, Artificial Sequence
  ENSG00000173401_1 (sequence is synthesized)
cccatccatcactgacccacactttatagacaactgcatagaagcccacaacgaatggcgtggcaaagtcaaccctcccgcggccgacatgaaatacatgatttgggataaaggtttagc

SEQ ID NO: 592584 - DNA, 120 bp, Artificial Sequence
  ENSG00000173401_2 (sequence is synthesized)
aaagatggctaaagcatgggcaaaccagtgcaaatttgaacataatgactgtttggataaatcatataaatgctatgcagcttttgaatatgttggagaaaatatctggttaggtggaat

SEQ ID NO: 592585 - DNA, 120 bp, Artificial Sequence
  ENSG00000173401_3 (sequence is synthesized)
aaagtcattcacaccaagacatgccattacggcttggtataatgaaacccaattttatgattttgatagtctatcatgctccagagtctgtggccattatacacagttagtttgggccaa

SEQ ID NO: 592586 - DNA, 120 bp, Artificial Sequence
  ENSG00000173401_4 (sequence is synthesized)
tcaactgcaatatttgtatgcaactacggacctgcaggaaattttgcaaatatgcctccttacgtaagaggagaatcttgctctctctgctcaaaagaagagaaatgtgtaaagaacctc

SEQ ID NO: 592587 - DNA, 120 bp, Artificial Sequence
  ENSG00000173401_5 (sequence is synthesized)
tgcaaaaatccatttctgaagccaacggggagagcacctcagcagacagcctttaatccattcagcttaggttttcttcttctgagaatcttttaatgtcatttatatacaaaagaaatt

SEQ ID NO: 592588 - DNA, 120 bp, Artificial Sequence
  ENSG00000173401_6 (sequence is synthesized)
ctcaaatgttaaaataaaggaatagtttattgcttaatataacttatcatcactttgcttctttactgaatcttctacactcttgcctgatacctaaatttaatgtttgtttttaactca

SEQ ID NO: 592589 - DNA, 120 bp, Artificial Sequence
  ENSG00000173401_7 (sequence is synthesized)
aaaaatgtactgtagtatggaaaatggatagcagtagaataaagtcttaagattattttttaattacaaatccatatgtgtatcaaaagtgttccactctttaattttctaatgagaatg

SEQ ID NO: 592590 - DNA, 120 bp, Artificial Sequence
  ENSG00000173401_8 (sequence is synthesized)
gattatcattttagttatagtacatttagagaactaaagacttttcacatatcaaatagtttccttagataccaatagtttcctttatgaataccatcaacatcattcagaaacaaaatg

SEQ ID NO: 592591 - DNA, 120 bp, Artificial Sequence
  ENSG00000173401_9 (sequence is synthesized)
cagctctatatgcatttcttgaatgagtcttttaaaactaattttgttgagggttccctgtagggccactgcatgtcaaaaggggttaaccacccagacattcccactcagtccccagtc

SEQ ID NO: 592592 - DNA, 120 bp, Artificial Sequence
  ENSG00000173402_0 (sequence is synthesized)
aggcagaagccggcggcgcgcggacagccagtcggcgccgcgcggagctggccgctggattggctgcaacactcgcgtgtcaggcggttgctaggctccggccgcgcgccccgcccttgc

SEQ ID NO: 592593 - DNA, 120 bp, Artificial Sequence
  ENSG00000173402_1 (sequence is synthesized)
gctcagcgccctctcaccgcccggtacgtgctcgcgcgaaggctgcggcgcggcgctcgcgcctcttaggcttggcggtggcggcggcggcagcttcgcgccgaatccccggggagcggc

SEQ ID NO: 592594 - DNA, 120 bp, Artificial Sequence
  ENSG00000173402_2 (sequence is synthesized)
ggtggcggcgtcctggggccaggaggagcgaacacctgccgcggtcctcccgccggcgctgggctctgtgtgctccgggatggagcaggtgtgcagagggtgagaacccagctctgggac

SEQ ID NO: 592595 - DNA, 120 bp, Artificial Sequence
  ENSG00000173402_3 (sequence is synthesized)
caagtcacttgcttccttacttagcaagactatcgacttgagcaaacttggacctgggatgaggatgtctgtgggcctctcgctgctgctgcccctctcggggaggacctttctcctcct

SEQ ID NO: 592596 - DNA, 120 bp, Artificial Sequence
  ENSG00000173402_4 (sequence is synthesized)
gctctctgtggttatggctcagtcccactggcccagtgaaccctcagaggctgtcagggactgggaaaaccagcttgaggcatccatgcactcagtgctctcagacctccacgaggctgt

SEQ ID NO: 592597 - DNA, 120 bp, Artificial Sequence
  ENSG00000173402_5 (sequence is synthesized)
tcccacagtggttggcattcctgatggcacggctgtcgtcgggcgctcatttcgagtgaccattccaacagatttgattgcctccagtggagatatcatcaaggtatcagcggcagggaa

SEQ ID NO: 592598 - DNA, 120 bp, Artificial Sequence
  ENSG00000173402_6 (sequence is synthesized)
ggaggctttgccatcttggctgcactgggactcacagagccacaccctggagggcctcccccttgacactgataagggtgtgcattacatttcagtgagcgctacacggctgggggccaa

SEQ ID NO: 592599 - DNA, 120 bp, Artificial Sequence
  ENSG00000173402_7 (sequence is synthesized)
cgggagccacatcccccagacctccagtgtgttctccatcgaggtctaccctgaagaccacagtgagctgcagtcggtgaggacagcctccccagaccctggtgaggtggtatcatctgc

SEQ ID NO: 592600 - DNA, 120 bp, Artificial Sequence
  ENSG00000173402_8 (sequence is synthesized)
ctgtgctgcggatgaacctgtgactgttttgacggtgattttggatgccgacctcaccaagatgaccccaaagcaaaggattgacctcctgcacaggatgcggagcttctcagaagtaga

SEQ ID NO: 592601 - DNA, 120 bp, Artificial Sequence
  ENSG00000173402_9 (sequence is synthesized)
gcttcacaacatgaaattagtgccggtggtgaataacagactatttgacatgtcggccttcatggctggcccgggaaatgcaaaaaaggtggtggagaatggggcccttctctcctggaa

SEQ ID NO: 592602 - DNA, 120 bp, Artificial Sequence
  ENSG00000173402_10 (sequence is synthesized)
gctgggctgctccctgaaccagaacagtgtgcctgacattcatggtgtagaggcccctgccagggagggcgcaatgtctgctcagcttggctaccctgtggtgggttggcacatcgccaa

SEQ ID NO: 592603 - DNA, 120 bp, Artificial Sequence
  ENSG00000173402_11 (sequence is synthesized)
taagaagccccctcttcccaaacgcgtccggaggcagatccatgctacacccacacctgtcactgccattgggcccccaaccacggctatccaggagcccccatccaggatcgtgccaac

SEQ ID NO: 592604 - DNA, 120 bp, Artificial Sequence
  ENSG00000173402_12 (sequence is synthesized)
ccccacatctccagccattgctcctccaacagagaccatggctcctccagtcagggatcctgttcctgggaaacccacggtcaccatccggactcgaggcgccattattcaaaccccaac

SEQ ID NO: 592605 - DNA, 120 bp, Artificial Sequence
  ENSG00000173402_13 (sequence is synthesized)
cctaggccccatccagcctactcgggtgtcagaagctggcaccacagttcctggccagattcgcccaacgatgaccattcctggctatgtggagcctactgcagttgctacccctcccac

SEQ ID NO: 592606 - DNA, 120 bp, Artificial Sequence
  ENSG00000173402_14 (sequence is synthesized)
aaccaccaccaagaagccacgagtatccacaccaaaaccagcaacgccttcaactgactccaccaccaccacgactcgcaggccaaccaagaaaccacggacaccccggccagtgccccg

SEQ ID NO: 592607 - DNA, 120 bp, Artificial Sequence
  ENSG00000173402_15 (sequence is synthesized)
ggtcaccaccaaagtttccatcaccagattggaaactgcctcaccgcctactcgtattcgcaccaccaccagtggagtgccccgtggcggagaacccaaccagcgcccagagctcaagaa

SEQ ID NO: 592608 - DNA, 120 bp, Artificial Sequence
  ENSG00000173402_16 (sequence is synthesized)
ccatattgacagggtagatgcctgggttggcacctactttgaggtgaagatcccgtcagacactttctatgaccatgaggacaccaccactgacaagctgaagctgaccctgaaactgcg

SEQ ID NO: 592609 - DNA, 120 bp, Artificial Sequence
  ENSG00000173402_17 (sequence is synthesized)
ggagcagcagctggtgggcgagaagtcctgggtacagttcaacagcaacagccagctcatgtatggccttcccgacagcagccacgtgggcaaacacgagtatttcatgcatgccacaga

SEQ ID NO: 592610 - DNA, 120 bp, Artificial Sequence
  ENSG00000173402_18 (sequence is synthesized)
caaggggggcctgtcggctgtggatgccttcgagatccacgtccacaggcgcccccaaggggatagggctcctgcaaggttcaaggccaagtttgtgggtgacccggcactggtgttgaa

SEQ ID NO: 592611 - DNA, 120 bp, Artificial Sequence
  ENSG00000173402_19 (sequence is synthesized)
tgacatccacaagaagattgccttggtaaagaaactggccttcgcctttggagaccgaaactgtagcaccatcaccctgcagaatatcacccggggctccatcgtggtggaatggaccaa

SEQ ID NO: 592612 - DNA, 120 bp, Artificial Sequence
  ENSG00000173402_20 (sequence is synthesized)
caacacactgcccttggagccctgccccaaggagcagatcgctgggctgagccgccggatcgctgaggatgatggaaaacctcggcctgccttctccaacgccctagagcctgactttaa

SEQ ID NO: 592613 - DNA, 120 bp, Artificial Sequence
  ENSG00000173402_21 (sequence is synthesized)
ggccacaagcatcactgtgacgggctctggcagttgtcggcacctacagtttatccctgtggtaccacccaggagagtgccctcagaggcgccgcccacagaagtgcctgacagggaccc

SEQ ID NO: 592614 - DNA, 120 bp, Artificial Sequence
  ENSG00000173402_22 (sequence is synthesized)
tgagaagagcagtgaggatgatgtctacctgcacacagtcattccggccgtggtggtcgcagccatcctgctcattgctggcatcattgccatgatctgctaccgcaagaagcggaaggg

SEQ ID NO: 592615 - DNA, 120 bp, Artificial Sequence
  ENSG00000173402_23 (sequence is synthesized)
agcttacccttgaggaccaggccaccttcatcaagaagggggtgcctatcatctttgcagacgaactggacgactccaagcccccaccctcctccagcatgccactcattctgcaggagg

SEQ ID NO: 592616 - DNA, 120 bp, Artificial Sequence
  ENSG00000173402_24 (sequence is synthesized)
agaaggctcccctaccccctcctgagtaccccaaccagagtgtgcccgagaccactcctctgaaccaggacaccatgggagagtacacgcccctgcgggatgaggatcccaatgcgcctc

SEQ ID NO: 592617 - DNA, 120 bp, Artificial Sequence
  ENSG00000173402_25 (sequence is synthesized)
cctaccagcccccaccgcccttcacagcacccatggagggcaagggctcccgtcccaagaacatgaccccataccggtcacctcctccctatgtcccaccttaacccgcaagcgcctggg

SEQ ID NO: 592618 - DNA, 120 bp, Artificial Sequence
  ENSG00000173402_26 (sequence is synthesized)
tggaggcagggtagggcaggggcctggagacgacatggtgttgtctgtggagaccggtggcctgcagaccattgcccaccgggagccgacacctgacctagcacacactgacacaggggc

SEQ ID NO: 592619 - DNA, 120 bp, Artificial Sequence
  ENSG00000173402_27 (sequence is synthesized)
ctggacaagcccgccctctctggtcctcccaaaccccaaagcagctggagagactttggggacttttttatttttattttttgcctaacagcttttggtttgttcatagagaattcttcg

SEQ ID NO: 592620 - DNA, 120 bp, Artificial Sequence
  ENSG00000173402_28 (sequence is synthesized)
cttcatttttgatggctggctctgaaagcaccatgtggagtggaggtggagggagcgaggaaccatgaatgaactcgcaggcagtgccgggcggccccctggctctctgcgttttgcctt

SEQ ID NO: 592621 - DNA, 120 bp, Artificial Sequence
  ENSG00000173402_29 (sequence is synthesized)
taacactaactgtactgttttttctattcacgtgtgtctagctgcaggatgtaacatggaaaacagtaactaaagattaaattcaaaggactttcagaagttaaggttaagtttttacgt

SEQ ID NO: 592622 - DNA, 120 bp, Artificial Sequence
  ENSG00000173402_30 (sequence is synthesized)
ttaatctgctgtttacctaaacttgtatgtataatttttgggtgggtatggggaattgctttgctaaaaataagctcccagggtgtttcaaacttagagaagaccaagggacagtatttt

SEQ ID NO: 592623 - DNA, 120 bp, Artificial Sequence
  ENSG00000173402_31 (sequence is synthesized)
ttatcaaaggaatactattttttcacactacgtcaacttggttgctctgataccccagagcctgattgggggcctcccggccctggctcacgccaagtccctggtgctgggtttgctctc

SEQ ID NO: 592624 - DNA, 120 bp, Artificial Sequence
  ENSG00000173402_32 (sequence is synthesized)
ccgctgttgccaggggctggaagctggaggggtctcttgggccatggacatccccacttccagcccatgtacactagtggcccacgaccaaggggtcttcatttccatgaaaaagggact

SEQ ID NO: 592625 - DNA, 120 bp, Artificial Sequence
  ENSG00000173402_33 (sequence is synthesized)
ccaagaggcagtggtggctgtggcccccaactttggtgctccagggtgggccagctgcttgtgggggcacctgggaggtcaaaggtctccaccacatcaacctattttgttttacccttt

SEQ ID NO: 592626 - DNA, 120 bp, Artificial Sequence
  ENSG00000173402_34 (sequence is synthesized)
ttctgtgcattgtttttttttttcctcctaaaaggaatatcacggttttttgaaacactcagtgggggacattttggtgaagatgcaatatttttatgtcatgtgatgctctttcctcac

SEQ ID NO: 592627 - DNA, 120 bp, Artificial Sequence
  ENSG00000173402_35 (sequence is synthesized)
ttgaccttggccgctttgtcctaacagtccacagtcctgccccgacccaccccatcccttttctctggcactccagtcccaggccttgggcctgaactactggaaaaggtctggcggctg

SEQ ID NO: 592628 - DNA, 120 bp, Artificial Sequence
  ENSG00000173402_36 (sequence is synthesized)
gggaggagtgccagcaatagttcataataaaaatctgttagctctcaaagctaattttttactaaagtttttatacagcctcaaattgttttattaaaaaaaagatttaaaatggtgatg

SEQ ID NO: 592629 - DNA, 120 bp, Artificial Sequence
  ENSG00000173402_37 (sequence is synthesized)
cttacagcagtttgtacgagctcttaagtgttgattccatggaactgacggctttgcttgttttgattcttttccccctacttttcctaatggtttaaattctggaattacactggggtt

SEQ ID NO: 592630 - DNA, 120 bp, Artificial Sequence
  ENSG00000173402_38 (sequence is synthesized)
cttttgccttttttagcagaacatccgtccgtccatctgcatctctgtcccatgactcaggggcgcccactctgcttcgattctcctcctgtggaagaaaccattttgagcatgactttt

SEQ ID NO: 592631 - DNA, 120 bp, Artificial Sequence
  ENSG00000173402_39 (sequence is synthesized)
cttgatgtctgaagcgttattttgggtactttttagggaggaatgcctttcgcaataatgtatccattccctgattgagggtgggtgggtggacccaggctccctttgcacacagagcag

SEQ ID NO: 592632 - DNA, 120 bp, Artificial Sequence
  ENSG00000173402_40 (sequence is synthesized)
ctacttctaagccatatcgactgttttgcagaggatttgtgtgtgctgcctcaggaggggagggctggtaggagggggggagaggtctctgtcctactgctctccagagggcatttcccc

SEQ ID NO: 592633 - DNA, 120 bp, Artificial Sequence
  ENSG00000173402_41 (sequence is synthesized)
ttgcgccttctcccacagggcccagcccctctcccctgccccagtccccagggggtactctggagtgagcagtgcccctgtgggggagcctgtaaatgcgggctcagtggaccactggtg

SEQ ID NO: 592634 - DNA, 120 bp, Artificial Sequence
  ENSG00000173402_42 (sequence is synthesized)
actgggctcatgcctccaagtcagagtttccctggtgccccagagacaggagcacaagtgggatctgacctggtgagattatttctgatgacctcatcaaaaaataaacaattcccaatg

SEQ ID NO: 592635 - DNA, 120 bp, Artificial Sequence
  ENSG00000173402_43 (sequence is synthesized)
ttccaggtgagggctttgaaaggccttccaaacagctccgtcgcccctagcaactccaccattgggcactgccatgcagagacgtggctggcccagaatggcctgttgccatagcaactg

SEQ ID NO: 592636 - DNA, 120 bp, Artificial Sequence
  ENSG00000173402_44 (sequence is synthesized)
gaggcgatggggcagtgaacagaataacaacagcaacaatgcctttgcaggcagcctgctcccctgagcgctgggctggtgatggtcgttggactctgtgagatggagagccaatctcac

SEQ ID NO: 592637 - DNA, 120 bp, Artificial Sequence
  ENSG00000173402_45 (sequence is synthesized)
attcaagtgttcaccaaccactgatgtgtttttatttccttctatatgattttaagatgtgttttctgcattctgtaaagaaacatatcaaactaaataaaagcagtgtctttattacaa

SEQ ID NO: 592638 - DNA, 79 bp, Artificial Sequence
  ENSG00000173402_46 (sequence is synthesized)
ctgggattacaggtgtgagccaccgcggctggtcaaaattttttttttttggtactttttttgcagaggcggggtttcg

SEQ ID NO: 592639 - DNA, 120 bp, Artificial Sequence
  ENSG00000173402_47 (sequence is synthesized)
ctcccatagtgctgggactacaggcgggagcacagcacctagccccttccttttcttgtctctgtgaatgaggtttggagccgagacactgaagtatagataattgcaaaaaggctctgt

SEQ ID NO: 592640 - DNA, 120 bp, Artificial Sequence
  ENSG00000173402_48 (sequence is synthesized)
gccggctgagccttccgcggaacacctgctgctgctcgctgttcggcccggggcggggacacggccgcggacgtccttgtgggctctgtgtgctccgggatggagcaggtgtgcagaggg

SEQ ID NO: 592641 - DNA, 120 bp, Artificial Sequence
  ENSG00000173402_49 (sequence is synthesized)
acagttcaggcggatggagatcccaccaacccacagcttaattcttcagatgctttatcttcatttctcatgtatcttcagttggcttctaatgctctgtgtgctccgggatggagcagg

SEQ ID NO: 592642 - DNA, 120 bp, Artificial Sequence
  ENSG00000173402_50 (sequence is synthesized)
ttggaatctttttgccataaattctaaggccactgctctccaggaagataaggcttttaaagcagcctagcactagaaggtgaggcacacgactgtctatcccagatggctgcactggcc

SEQ ID NO: 592643 - DNA, 120 bp, Artificial Sequence
  ENSG00000173402_51 (sequence is synthesized)
taggacagacggttcttcccccagtacgtcaagaccctggagggtgcaagctacagaacagctgggctcctgcattcctcccagaccctgtcttcagtaggacaacaggcaacaaactta

SEQ ID NO: 592644 - DNA, 120 bp, Artificial Sequence
  ENSG00000173402_52 (sequence is synthesized)
tatatttaatggatcagctacatttccagtgctaaggagttgcacgaaactgttggtttctgtataagagaccatgggggtaagaggcttgatccaactcggggtagatgtttttgacag

SEQ ID NO: 592645 - DNA, 120 bp, Artificial Sequence
  ENSG00000173402_53 (sequence is synthesized)
taactcctggaggatagtatgtgactgaaccactggaattgctcaagtctaaacctgcttttctttttttttcaggctctgtgtgctccgggatggagcaggtgtgcagagggtgagaac

SEQ ID NO: 592646 - DNA, 120 bp, Artificial Sequence
  ENSG00000173402_54 (sequence is synthesized)
gcgaacacctgccgcggtcctcccgccggcgctggggccactgctctccaggaagataaggcttttaaagcagcctagcactagaaggtgaggctctgtgtgctccgggatggagcaggt

SEQ ID NO: 592647 - DNA, 120 bp, Artificial Sequence
  ENSG00000173402_55 (sequence is synthesized)
gagcggcggtggcggcgtcctggggccaggaggagcgaacacctgccgcggtcctcccgccggcgctggggattctcattctgtctcccatgctggagtgcagtggcgcggtcttggctc

SEQ ID NO: 592648 - DNA, 120 bp, Artificial Sequence
  ENSG00000173402_56 (sequence is synthesized)
cttgcgctcagcgccctctcaccgcccgggccactgctctccaggaagataaggcttttaaagcagcctagcactagaaggctctgtgtgctccgggatggagcaggtgtgcagagggtg

SEQ ID NO: 592649 - DNA, 120 bp, Artificial Sequence
  ENSG00000173402_57 (sequence is synthesized)
tttatatatttttaagtactggatggggaggtggagtagcagctccaaggtacttttcagtggtggccttaatctgctgatgcatggaaggtgtgttcttcttccagatagccctgggat

SEQ ID NO: 592650 - DNA, 120 bp, Artificial Sequence
  ENSG00000173404_0 (sequence is synthesized)
ggaggggggaccgagccagtgccgtgccctcgggccgcgccaacatgccccgcggcttcctggtgaagcgcagcaagaagtccacgcccgtttcctaccgggtccgcggcggcgaggacg

SEQ ID NO: 592651 - DNA, 80 bp, Artificial Sequence
  ENSG00000173404_1 (sequence is synthesized)
tcctaccgggtccgcggcggcgaggacggcgaccgcgcactgctgctctcgcccagctgcgggggcgcccgcgccgagcc

SEQ ID NO: 592652 - DNA, 120 bp, Artificial Sequence
  ENSG00000173404_2 (sequence is synthesized)
gccgcagccacccccgcagggcccgcgggccgcgcacttcggcaaccccgaggctgcgcaccccgcgccgctctacagtcccacgcggcccgtgagccgcgagcacgagaagcacaagta

SEQ ID NO: 592653 - DNA, 120 bp, Artificial Sequence
  ENSG00000173404_3 (sequence is synthesized)
tgagccgcgagcacgagaagcacaagtacttcgaacgcagcttcaacctgggctcgccggtctcggccgagtccttccccacgcccgccgcgctgctcggagggggcggcggcggcggcg

SEQ ID NO: 592654 - DNA, 80 bp, Artificial Sequence
  ENSG00000173404_4 (sequence is synthesized)
cgagcggagctggcggaggcggcacctgcggcggcgacccgctgctcttcgcgcccgccgagctcaagatgggcacggcg

SEQ ID NO: 592655 - DNA, 120 bp, Artificial Sequence
  ENSG00000173404_5 (sequence is synthesized)
gccgccctgcggcccccgggaaagcggcccccgccccctaccgccgcggagccgcccgccaaggcagtcaaggccccgggcgccaagaagcccaaggccatccgcaagctgcacttcgag

SEQ ID NO: 592656 - DNA, 120 bp, Artificial Sequence
  ENSG00000173404_6 (sequence is synthesized)
gccatccgcaagctgcacttcgaggacgaggtgaccacgtcgcccgtgctggggctcaagatcaaggagggcccggtggaggcgccgcggggccgcgcggggggcgcggcgcggccgctg

SEQ ID NO: 592657 - DNA, 120 bp, Artificial Sequence
  ENSG00000173404_7 (sequence is synthesized)
agttcatctgccagctgtgcaaggaggagtacgccgacccgttcgcgctggcgcagcacaaatgctcgcgcatcgtgcgtgtggagtaccgctgtcccgagtgcgccaaggtcttcagct

SEQ ID NO: 592658 - DNA, 120 bp, Artificial Sequence
  ENSG00000173404_8 (sequence is synthesized)
agtaccgctgtcccgagtgcgccaaggtcttcagctgcccggccaacctggcctcgcaccgccgctggcacaaaccgcggcccgcgcccgccgccgcccgcgcgccggagccagaagcag

SEQ ID NO: 592659 - DNA, 120 bp, Artificial Sequence
  ENSG00000173404_9 (sequence is synthesized)
gcagcgaccgggacacgccgagccccggcggcgtgtccgagtcgggctccgaggacgggctctacgagtgccatcactgcgccaagaagttccgccgccaggcctacctacgcaagcacc

SEQ ID NO: 592660 - DNA, 120 bp, Artificial Sequence
  ENSG00000173404_10 (sequence is synthesized)
gacgagaaggcgccccaggaggcggccggcgacggcgagggggccggcgtgctgggcctgagtgcgtccgccgagtgccacctgtgcccagtgtgcggagagtcgttcgccagcaagggc

SEQ ID NO: 592661 - DNA, 120 bp, Artificial Sequence
  ENSG00000173404_11 (sequence is synthesized)
gctcaggagcgccacctgcgcctgctgcacgccgcccaggtgttcccctgcaagtactgcccggccaccttctacagctcgcccggccttacgcggcacatcaacaagtgccacccatcc

SEQ ID NO: 592662 - DNA, 120 bp, Artificial Sequence
  ENSG00000173404_12 (sequence is synthesized)
gaaaacagacaggtgatcctcctgcaggtgcccgtgcgcccggcctgctagagcgcgccctccaccccggcccccgaactgtgccttcgcttggagacccacaaagagagtgcgccctgc

SEQ ID NO: 592663 - DNA, 120 bp, Artificial Sequence
  ENSG00000173404_13 (sequence is synthesized)
actccccgaacccgagtccgcgctgggggagcctcgcccccgcccccaccgggtgaaagtgtcgtctccgcttctctcggtgtggcgtgacggtaaccccatactctccttttgactcct

SEQ ID NO: 592664 - DNA, 120 bp, Artificial Sequence
  ENSG00000173404_14 (sequence is synthesized)
tttggaacccccacttttacgttgtgtccctccgcctcccccatggcgcaacaggagtcagtctctttctgtacaagggagaaaagctgtacgcgtttgtctcgtggttggaagcctccc

SEQ ID NO: 592665 - DNA, 120 bp, Artificial Sequence
  ENSG00000173404_15 (sequence is synthesized)
cttggcggggagaagctttttttcttgctagtattcgctgtgttcatggtctagaaatgcggtctggtctcgcctcgcctaccaatctctgctctctatgtatgtagcgtacgggttgtt

SEQ ID NO: 592666 - DNA, 120 bp, Artificial Sequence
  ENSG00000173404_16 (sequence is synthesized)
ttgggtgaatcttgaggaataaatgcctttatatttcacaggctgtaaattgaacttcccacacgattagctttattatggcttgtgaactgctggagtctggctttacctttttgtatg

SEQ ID NO: 592667 - DNA, 120 bp, Artificial Sequence
  ENSG00000173404_17 (sequence is synthesized)
tgaacaaatcaaattgcttaaaaaagagttttctttagtatagccacaaatgccttgaactgttgtctgggattgttttgtggggggagggaagggagtgttccgaagatgctgtagtaa

SEQ ID NO: 592668 - DNA, 120 bp, Artificial Sequence
  ENSG00000173404_18 (sequence is synthesized)
ctgcctcagtgtttcacgtaagactttttggtttgatcatctttgttgaggtaggactatcagttccctctaaatgtatatgttgatttatgagtaattgttatttattctttatttatt

SEQ ID NO: 592669 - DNA, 120 bp, Artificial Sequence
  ENSG00000173404_19 (sequence is synthesized)
tatattaattatgaagattatgatattatttgattgcagatttttttggcgcgctgccccctccccaccctgccactcttgacattccactgtgcgttttagaagagagcctttttctaa

SEQ ID NO: 592670 - DNA, 120 bp, Artificial Sequence
  ENSG00000173404_20 (sequence is synthesized)
agggatctgcttaaagttttaacttttatacctatctgagtgaattacagacaacctatcatttattctgcttcgagggtccccagggcccttgtacaaccgacagctcttacttttaaa

SEQ ID NO: 592671 - DNA, 120 bp, Artificial Sequence
  ENSG00000173404_21 (sequence is synthesized)
tgcaatctcttttctacatacattattttcttaattgttagctatttatagaaagcttcaatagaactgtttcaactgtataactatttactattcaaataaaatattttcaaagtcaaa

SEQ ID NO: 592672 - DNA, 120 bp, Artificial Sequence
  ENSG00000173406_0 (sequence is synthesized)
ctcgcccgggcttccccgggctgcagagcgcgcctgagtgccgccgcccgccgggcatggggagccgcttcctgggcggctgcggcagcggaggaggatgctctgggctaggcgagcact

SEQ ID NO: 592673 - DNA, 120 bp, Artificial Sequence
  ENSG00000173406_1 (sequence is synthesized)
taggcgagcactcaaaaagagtgaatgaaatgtgcagctcagagtgtcatttctgaagggaggagtctttctcttggagaagagtcctcaatgagcctggccgaggcccgggatctgtgt

SEQ ID NO: 592674 - DNA, 120 bp, Artificial Sequence
  ENSG00000173406_2 (sequence is synthesized)
gaagtggactaaggattaagtaggatgtcaactgagacagaacttcaagtagctgtgaaaaccagcgccaagaaagactccagaaagaaaggtcaggatcgcagtgaagccactttgata

SEQ ID NO: 592675 - DNA, 120 bp, Artificial Sequence
  ENSG00000173406_3 (sequence is synthesized)
aagaggtttaaaggtgaaggggtccggtacaaagccaaattgatcgggattgatgaagtttccgcagctcggggagacaagttatgtcaagattccatgatgaaactcaagggcgttgtt

SEQ ID NO: 592676 - DNA, 120 bp, Artificial Sequence
  ENSG00000173406_4 (sequence is synthesized)
gctggcgctcgttccaaaggagaacacaaacagaaaatctttttaaccatctcctttggaggaatcaaaatctttgatgagaagacaggggcccttcagcatcatcatgctgttcatgaa

SEQ ID NO: 592677 - DNA, 120 bp, Artificial Sequence
  ENSG00000173406_5 (sequence is synthesized)
atatcctacattgcaaaggacattacagatcaccgggcctttggatatgtttgtgggaaggaagggaatcacagatttgtggccataaaaacagcccaggcggctgaacctgttattctg

SEQ ID NO: 592678 - DNA, 120 bp, Artificial Sequence
  ENSG00000173406_6 (sequence is synthesized)
gacttgagagatctctttcaactcatttatgaattgaagcaaagagaagaattagaaaaaaaggcacaaaaggataagcagtgtgaacaagctgtgtaccagacaatattggaagaggat

SEQ ID NO: 592679 - DNA, 120 bp, Artificial Sequence
  ENSG00000173406_7 (sequence is synthesized)
gttgaagatcctgtgtaccagtacattgtgtttgaggctggacacgagccaatccgtgatcccgaaacggaagaaaacatttatcaggttcccaccagccaaaagaaggaaggtgtttat

SEQ ID NO: 592680 - DNA, 120 bp, Artificial Sequence
  ENSG00000173406_8 (sequence is synthesized)
gatgtgccaaaaagtcaacctgtaagtgctgtgacccaattagaactttttggggacatgtccacaccccctgatataacctctccccccactcctgcaactccaggtgatgcctttatc

SEQ ID NO: 592681 - DNA, 120 bp, Artificial Sequence
  ENSG00000173406_9 (sequence is synthesized)
ccatcttcatctcagacccttccagcgagtgcagatgtgtttagttctgtacctttcggcactgctgctgtaccctcaggttacgttgcaatgggcgctgtcctcccgtccttctggggt

SEQ ID NO: 592682 - DNA, 120 bp, Artificial Sequence
  ENSG00000173406_10 (sequence is synthesized)
cagcagcccctcgtccaacagcagatggtcatgggtgcccagccaccagtcgctcaggtgatgccgggggctcagcccatcgcatggggccagccgggtctctttcctgccactcagcag

SEQ ID NO: 592683 - DNA, 120 bp, Artificial Sequence
  ENSG00000173406_11 (sequence is synthesized)
ccctggccaactgtggccgggcagtttccgccagccgccttcatgcccacacaaactgttatgcctttgccagctgccatgttccaaggtcccctcaccccccttgccaccgtcccaggc

SEQ ID NO: 592684 - DNA, 120 bp, Artificial Sequence
  ENSG00000173406_12 (sequence is synthesized)
acgagtgactccaccaggtcaagtccacagaccgacaagcccaggcagaaaatgggcaaagaaacgtttaaggatttccagatggcccagcctccgcccgtgccctcccgcaaacccgac

SEQ ID NO: 592685 - DNA, 120 bp, Artificial Sequence
  ENSG00000173406_13 (sequence is synthesized)
cagccctccctcacctgtacctcagaggccttctccagttacttcaacaaagtcggggtggcacaggatacagacgactgtgatgactttgacatctcccagttgaatttgacccctgtg

SEQ ID NO: 592686 - DNA, 120 bp, Artificial Sequence
  ENSG00000173406_14 (sequence is synthesized)
acttctaccacaccatcgaccaactcacctccaaccccagcccctagacagagctctccatccaaatcatctgcatcccatgccagtgatcctaccacagatgacatctttgaagagggc

SEQ ID NO: 592687 - DNA, 120 bp, Artificial Sequence
  ENSG00000173406_15 (sequence is synthesized)
tttgaaagtcccagcaaaagcgaagagcaagaagctcctgatggatcacaggcctcatccaacagtgatccatttggtgagcccagtggggagcccagtggtgataatataagtccacag

SEQ ID NO: 592688 - DNA, 120 bp, Artificial Sequence
  ENSG00000173406_16 (sequence is synthesized)
gccggtagctagatagcgcaggtctgggagccagagcctctgtacgcgcagatcaacagacctaagaaatagcatcgatgcgagctcgtggtgggtgctcaagactggcatggacatcag

SEQ ID NO: 592689 - DNA, 120 bp, Artificial Sequence
  ENSG00000173406_17 (sequence is synthesized)
catcacgacaggctctcttgtattctttcacctcttcccacaagaaattcatgattgcccaatggaactcgctcagaagagggaactaagcatttttggcaaccaatggcagatatctat

SEQ ID NO: 592690 - DNA, 120 bp, Artificial Sequence
  ENSG00000173406_18 (sequence is synthesized)
ggcagcacacaaaaaaagtatagaaagatccacccaacattaaatcagaaatcaagcaaatgcttacccaacaaatatttgagccctcatagctgggtttaagatgactcagtgtgcaaa

SEQ ID NO: 592691 - DNA, 120 bp, Artificial Sequence
  ENSG00000173406_19 (sequence is synthesized)
attattaattccctttttatttctctacctgttgaccactgttgagacaccaaatttggagtgacaggcatcagaggattacaacagggttggaactgacttctttaagcaaaagcaaag

SEQ ID NO: 592692 - DNA, 120 bp, Artificial Sequence
  ENSG00000173406_20 (sequence is synthesized)
ggtcttctgtgaccacaatatcgtcatccatatgccttttcacataggatgatgtgttttttgtcactccatggggcctggtctgccattttcccccctttcctttttttgtcatgtttg

SEQ ID NO: 592693 - DNA, 120 bp, Artificial Sequence
  ENSG00000173406_21 (sequence is synthesized)
aaaattaataggtgtacaaatttttgtattgcttttgactttttttagatatgggtgaagaaatctaactggggagaaaaaaagcctcagtgaaatgaattaacttgaaattacaagaca

SEQ ID NO: 592694 - DNA, 120 bp, Artificial Sequence
  ENSG00000173406_22 (sequence is synthesized)
cattatgatcacgaatgttgccaaaacagtcctttagctattctgcatcctggtgaagaaagacagctttcagtacgaaccttcattctgtgagtaggaaaagacatcagatcccattga

SEQ ID NO: 592695 - DNA, 120 bp, Artificial Sequence
  ENSG00000173406_23 (sequence is synthesized)
tgagaaagatgaaaaatgcatctgatttcttaagaagctctaaactctaagtacaataaaatgatattttttatttttccgatatcttgctgctgtgttgctatgcagacaagtgtcttc

SEQ ID NO: 592696 - DNA, 120 bp, Artificial Sequence
  ENSG00000173406_24 (sequence is synthesized)
tccacgtgccattttcaaagaaaagtcatttgccaaataattctggtacaattctggtaatgtggttttggatcttaaaaaccaactttctaatggaacaatggtggcataaatattcag

SEQ ID NO: 592697 - DNA, 120 bp, Artificial Sequence
  ENSG00000173406_25 (sequence is synthesized)
aataacaaactgattctgtggtccaaatggttcatctctatctctttttgtacatcagaaaattcaaatgggatttttattttataacttgaaaaaaaaaccttaccattaaactcttta

SEQ ID NO: 592698 - DNA, 120 bp, Artificial Sequence
  ENSG00000173406_26 (sequence is synthesized)
aatatttaagggaaatggctttaaggagttctaatgaaaaaaaattgtcttttttttgtaaatataaatgttaatgaaaatgatttttaataatgccattacactgtagagaaggtagca

SEQ ID NO: 592699 - DNA, 120 bp, Artificial Sequence
  ENSG00000173406_27 (sequence is synthesized)
gattgagtgcaaggtgtgacaaacttgatggatggggctcactttccagacgttattctggagcatatggtaggaagctggagtgcagggacagctggcaggagcagttggccaatcagc

SEQ ID NO: 592700 - DNA, 120 bp, Artificial Sequence
  ENSG00000173406_28 (sequence is synthesized)
agctagtgaacgggaagggagcacgtgactccatcatctagcctttccacgagagtccccaccctacgtgcaacacaagaaaaagacaattcacattctgaagaattcagattctgaaac

SEQ ID NO: 592701 - DNA, 120 bp, Artificial Sequence
  ENSG00000173406_29 (sequence is synthesized)
tctcccacctccccactcccacctacccccgatataaatcactggactgtttgtacgtgaaacagaagaggctaagcttcctttttttacacttatgagacaaaaagtgcagtgtttggt

SEQ ID NO: 592702 - DNA, 120 bp, Artificial Sequence
  ENSG00000173406_30 (sequence is synthesized)
tcgtatgtttagcacatgattttcataaagaatctatatatttttgccctacagagaattgttatacaggtcaagtgtgttttcctgatgttcctatgcagttacagtatgttgaaagtg

SEQ ID NO: 592703 - DNA, 120 bp, Artificial Sequence
  ENSG00000173406_31 (sequence is synthesized)
ttttaacactaagaagaaaactttaaagattcatgtgattaattggatttgaggataattattattatttggtttttagatttgaaaagtagaatttccattgagacaattgatttgaat

SEQ ID NO: 592704 - DNA, 120 bp, Artificial Sequence
  ENSG00000173406_32 (sequence is synthesized)
aggcctgcatttgattcttcatatcaatagaaactaaaatgatttgggagattcatttgaaaaatgattgtatacttgttcacaaagcgaaaagtgatacatgaaggtaatggttatcat

SEQ ID NO: 592705 - DNA, 120 bp, Artificial Sequence
  ENSG00000173406_33 (sequence is synthesized)
ttaaagcccacattttacactatcaggtcacaggagtctaatttttttttcagttagataaactgaccaaacgtctattcaagaatatatgtcaatatcatcctaatgtggaaggtccga

SEQ ID NO: 592706 - DNA, 120 bp, Artificial Sequence
  ENSG00000173406_34 (sequence is synthesized)
agaaccagaaaagtgagaagggccgtttacctccctctgtagctatcacctgttggtccacagagtttcttgagaaatgagcaaacattttatgattaggtaaccctttcacatgaacgg

SEQ ID NO: 592707 - DNA, 120 bp, Artificial Sequence
  ENSG00000173406_35 (sequence is synthesized)
gaagatgggaaaggtggaatgaccataagagttggcctgagaccagtttgttttctggggatttggtaagataggcagttcccatgggaaattgcttaaattgctttgttgcctatgatt

SEQ ID NO: 592708 - DNA, 120 bp, Artificial Sequence
  ENSG00000173406_36 (sequence is synthesized)
tgattctaaacaagtggtgctatcttctccctcaatatggctgtcttgagtttgtcttgcagtatcacaccattataccaattctttgggttgcttctgacacattcaaagtgaactctg

SEQ ID NO: 592709 - DNA, 120 bp, Artificial Sequence
  ENSG00000173406_37 (sequence is synthesized)
gctgatgttgctgtttcaggtataccatctggagttaatttcctagcagaaggtgaaagtccaggagaattgtcctctttcattgaacatgattgaaaatgtaactggctctgaacttca

SEQ ID NO: 592710 - DNA, 120 bp, Artificial Sequence
  ENSG00000173406_38 (sequence is synthesized)
agaagatagatgcccaagtgatgcattaaagtaagggaaataaagtcaagtttttcaactgccatccatattctcattggcagaattctgatttttttccaagcactgtttggtgagcct

SEQ ID NO: 592711 - DNA, 120 bp, Artificial Sequence
  ENSG00000173406_39 (sequence is synthesized)
ggaagcaccgtatcctgtcccaggagtacagtgaaatttccaagcaagagctgaggtgccaataccaaaagaccatggggagtctgcacggttctggttagatcaatagaaaatccatgt

SEQ ID NO: 592712 - DNA, 120 bp, Artificial Sequence
  ENSG00000173406_40 (sequence is synthesized)
gtacaactgttaattcctcatcctccactagcactaaatttgtcactttaaattttgaaaccagggaaacaccacctgtcattctgtccccattctccatagctcttcaatctttacatg

SEQ ID NO: 592713 - DNA, 120 bp, Artificial Sequence
  ENSG00000173406_41 (sequence is synthesized)
ccgcaagacttttttgatagctcgtactcatcccagtgtctcctgaaaccccatcatgtaatgtactgggcaccttcttttaaacaaatgtttactctgtgggtttggttcatttcaatt

SEQ ID NO: 592714 - DNA, 120 bp, Artificial Sequence
  ENSG00000173406_42 (sequence is synthesized)
tctgcgttctgacacatatttttttaataaagatgagaaagagaaaatgactgttgcagtacctttctagacctactttaactttacctcagatgacagtttgttaacatatatggacac

SEQ ID NO: 592715 - DNA, 120 bp, Artificial Sequence
  ENSG00000173406_43 (sequence is synthesized)
attatttttaactttatgtacaatgcattcaacagaacagcaaaatttttagaaattttccattaatttctgtaacacaccatgtaaaactgttacaaataaacatgtttgagaacaaca

SEQ ID NO: 592716 - DNA, 120 bp, Artificial Sequence
  ENSG00000173406_44 (sequence is synthesized)
tcagtccagaccctgggcaccccccttttgccaggatcgtccccacccagcctggacacattgactgaactgttttctaggacactggattcaggtcaggtattacctccaccaagaagc

SEQ ID NO: 592717 - DNA, 120 bp, Artificial Sequence
  ENSG00000173406_45 (sequence is synthesized)
tcctgctcatcattgcatgtgaactactggagataactatctatatacatatatcacatctcctaatatgcgaagcacaaagtaggaactcaataaacatcaaacatcccacttccttgg

SEQ ID NO: 592718 - DNA, 120 bp, Artificial Sequence
  ENSG00000173406_46 (sequence is synthesized)
cagtggatagcatgaaactgtttattggcactaacctacggatagttaatcagactgattggttctctgtttccttcttctgagatttttacatgtgaataaaagtagatggactgagaa

SEQ ID NO: 592719 - DNA, 120 bp, Artificial Sequence
  ENSG00000173406_47 (sequence is synthesized)
acaagctgtgtaccaggtatacctgtgaatttatccttgcgctggagatcgggccttcaaataaacacatgtaaaaactgacagtcaggccttctcttcctgctgccaagtagaaataaa

SEQ ID NO: 592720 - DNA, 120 bp, Artificial Sequence
  ENSG00000173406_48 (sequence is synthesized)
cgaagatgaaagattcctgtgtaaattacaggacccaaagcaagccattagaaattattccttattctcttaaactctagacatgttagatgaagtgaaatctcgaatccagagaaagat

SEQ ID NO: 592721 - DNA, 120 bp, Artificial Sequence
  ENSG00000173406_49 (sequence is synthesized)
ttcaggggtggaggacccaagaaacacaattgcttttgctgttgttaacagtgcgggtggaggtgggagtggctctaaggattttgacttttttgtgttttttctaccttgatggcccac

SEQ ID NO: 592722 - DNA, 120 bp, Artificial Sequence
  ENSG00000173406_50 (sequence is synthesized)
ataatctaattaaggtagcataatatagagccagaagtcaggtggtatttacaaggtacagaagagatcttggactcaaaaggcatggagtccagtcctatttagctggaaaatctgtgg

SEQ ID NO: 592723 - DNA, 120 bp, Artificial Sequence
  ENSG00000173406_51 (sequence is synthesized)
cttatatcatctccaaccatggtaaaatgaggacagcaccatgaagatgaaatgaaagcacaaaagagaaggtatttggcaaaccatgacagtcgttgttagaaaggaaatgtcaaatga

SEQ ID NO: 592724 - DNA, 120 bp, Artificial Sequence
  ENSG00000173406_52 (sequence is synthesized)
gtgcacaaagagggacccgaggggaccctcctaaaaaactgcaagatcctttcctttcactgttgctatgttctgacaaggtttgttgtcttcctgttaaatgggaggtgagtgtggagt

SEQ ID NO: 592725 - DNA, 120 bp, Artificial Sequence
  ENSG00000173406_53 (sequence is synthesized)
agaaagcgagttgtttgggcctcaggcctcaacctccacttgaagcctacacaagctcacctttgctaccctgcagagaaggcaaaaggagttaatgatgaaatgtcagaaaggcccttg

SEQ ID NO: 592726 - DNA, 120 bp, Artificial Sequence
  ENSG00000173406_54 (sequence is synthesized)
gtgccagagccattttgtcagaaacctgaagaatccactgactgcaaaacctggagagagaccaagattatttctgagggtgagggctgccagcccctccaggagcaaatttccataaaa

SEQ ID NO: 592727 - DNA, 120 bp, Artificial Sequence
  ENSG00000173406_55 (sequence is synthesized)
actaacagaagtttggccggcatcggtatcttgggatttggagatccgcttctcccttcttgcctctgcctcggcccccttcacagtctgtaaaagtttgatcccagagctgaatgtttt

SEQ ID NO: 592728 - DNA, 120 bp, Artificial Sequence
  ENSG00000173406_56 (sequence is synthesized)
tctgcggtgtcaccgctttcgcttctgcttgatatatgtttaatagaccatacagcagaaaattggaggccgaagctgacaaaattggactactgcttgctgcaaaggcttgtgcagaca

SEQ ID NO: 592729 - DNA, 120 bp, Artificial Sequence
  ENSG00000173406_57 (sequence is synthesized)
taagagccagttcagtgttttggcagcaaatggagttcgttgatagcctgcatggccaacccaagatgccagaatggttatctacacacccttctcatggcaatcgagttgagtacttgg

SEQ ID NO: 592730 - DNA, 120 bp, Artificial Sequence
  ENSG00000173406_58 (sequence is synthesized)
atagacttatacctcagatttggtgagtcttgaatgcccctgaaaaccattctgctccatttcaaaagtacttcccagtcttcgtattttacctaaatgcaaattcactgccttggagag

SEQ ID NO: 592731 - DNA, 120 bp, Artificial Sequence
  ENSG00000173406_59 (sequence is synthesized)
tgtgagtccaagaagaaatcctttgggctatttccttggcttctctccatgacgattcctgactcgtggccccggcaatcttgggaagacatcatccagcttcttcagtccagaccctgg

SEQ ID NO: 592732 - DNA, 120 bp, Artificial Sequence
  ENSG00000173406_60 (sequence is synthesized)
gcaccccccttttgccaggatcgtccccacccagcctggacacattgactgaactgttttctaggacactgcactcagcaagacatggtggtgagccctgactctcagtcttcatgattg

SEQ ID NO: 592733 - DNA, 120 bp, Artificial Sequence
  ENSG00000173406_61 (sequence is synthesized)
cctgtaagtaatggctattcgtttgaggattttgaagaacggtttgctgcagccaccccgaacagaaacctgcccacagactttgatgagatttttgaggcaacgaaggctgtgacccaa

SEQ ID NO: 592734 - DNA, 120 bp, Artificial Sequence
  ENSG00000173409_0 (sequence is synthesized)
agttgagtggaaatgggcaacggcgggcggagcggcctgcagcaggggaaggggaacgtggatggggtggcagcgactcctactgctgcctcggcctcctgccagtacaggtgcatcgaa

SEQ ID NO: 592735 - DNA, 120 bp, Artificial Sequence
  ENSG00000173409_1 (sequence is synthesized)
tgcaaccaggaggccaaagagttgtaccgagactataaccacggtgtgctgaagataaccatctgtaaatcctgccagaaacctgtagacaaatatatcgagtatgatcctgttatcatc

SEQ ID NO: 592736 - DNA, 120 bp, Artificial Sequence
  ENSG00000173409_2 (sequence is synthesized)
ttgattaatgctatattgtgcaaagctcaggcctacagacatattcttttcaatactcaaataaatatccatggaaaactctgcatattttgtttgctttgtgaagcatacctgaggtgg

SEQ ID NO: 592737 - DNA, 120 bp, Artificial Sequence
  ENSG00000173409_3 (sequence is synthesized)
tggcagcttcaagattccaaccagaatactgcccctgatgacttgatcagatatgctaaggaatgggatttctatagaatgtttgcgattgctgctttagaacaaactgcctattttatt

SEQ ID NO: 592738 - DNA, 120 bp, Artificial Sequence
  ENSG00000173409_4 (sequence is synthesized)
ggcatttttaccttcctgtgggtagaacggcccatgacggcaaaaaaaaagcccaacttcattttgctgctgaaagcattattattatctagctacggaaaactcttgctgattccagct

SEQ ID NO: 592739 - DNA, 120 bp, Artificial Sequence
  ENSG00000173409_5 (sequence is synthesized)
ctctccttcttggccgtgttgagtggcttactgctggaaagcatcatggtctacttcttccagagtatggaatgggatgttggaagtgattatgccatctttaaatctcaggacttctga

SEQ ID NO: 592740 - DNA, 120 bp, Artificial Sequence
  ENSG00000173409_6 (sequence is synthesized)
agagttttattcttcttcactatctgtggcatgaccagctgtatctgaaagagaaaagacatgaaatataaaccaacctcctcatttctgttgagtaaaatgaagcaaagattggaaaca

SEQ ID NO: 592741 - DNA, 120 bp, Artificial Sequence
  ENSG00000173409_7 (sequence is synthesized)
ctttctgaaaaagaaagcaatgataatagcggtggatacccacccccacaaatgcacccaagagacaagccatttacatacagatattcacagtcacacatagaaacacccacatggaca

SEQ ID NO: 592742 - DNA, 120 bp, Artificial Sequence
  ENSG00000173409_8 (sequence is synthesized)
caaggaatgttgctgcagagactgaatgacatgcaacaggtgaaggtttatacgttatacacaaggccaggtaagcgctcataattcacacataataaaacatctaggtttcattccttt

SEQ ID NO: 592743 - DNA, 120 bp, Artificial Sequence
  ENSG00000173409_9 (sequence is synthesized)
gacatgtttatatctttttaatttaaatgttgttactggcttaaaatattttgtgttcttacaatagaaacgcttttaataaagtctttcagaataaaccaagtttttgtaaattttcaa

SEQ ID NO: 592744 - DNA, 120 bp, Artificial Sequence
  ENSG00000173409_10 (sequence is synthesized)
ttcaataattaaggtaatctttaaaattggatgatccaaaaataagtgataatgaaaaccactgagttatatactttgcaagggtaaattacatctgaataaagctgtaattaaaaacaa

SEQ ID NO: 592745 - DNA, 120 bp, Artificial Sequence
  ENSG00000173409_11 (sequence is synthesized)
aagtgaagactttccaaaaactccagtttgcagtgcttactttttccgttgacctccgagtgctcagcttaacacctacagcagtcacgtgcccaagaacttctgacattgccccagggt

SEQ ID NO: 592746 - DNA, 120 bp, Artificial Sequence
  ENSG00000173409_12 (sequence is synthesized)
cgaggagcagggtcctctgatacagtctttagttcggtagttgacattcccgcccgggatctttgcatgaatatctgtactgatagagaactcagctacccgacagcgcttttctcatac

SEQ ID NO: 592747 - DNA, 83 bp, Artificial Sequence
  ENSG00000173409_13 (sequence is synthesized)
tgcagccccccccaggtagctggaaccacagaacaaactgcctattttattggcatttttaccttcctgtgggtagaacggcc

SEQ ID NO: 592748 - DNA, 120 bp, Artificial Sequence
  ENSG00000173418_0 (sequence is synthesized)
cttggcgaacggtcttcggaagcggcggcggcgcgatgaccacgctacgggcctttacctgcgacgacctgttccgcttcaacaacattaacttggatccacttacagaaacttatggga

SEQ ID NO: 592749 - DNA, 120 bp, Artificial Sequence
  ENSG00000173418_1 (sequence is synthesized)
ttcctttctacctacaatacctcgcccactggccagagtatttcattgttgcagaggcacctggtggagaattaatgggttatattatgggtaaagcagaaggctcagtagctagggaag

SEQ ID NO: 592750 - DNA, 120 bp, Artificial Sequence
  ENSG00000173418_2 (sequence is synthesized)
aatggcacgggcacgtcacagctctgtctgttgccccagaatttcgacgccttggtttggctgctaaacttatggagttactagaggagatttcagaaagaaagggtggattttttgtgg

SEQ ID NO: 592751 - DNA, 120 bp, Artificial Sequence
  ENSG00000173418_3 (sequence is synthesized)
atctctttgtaagagtatctaaccaagttgcagttaacatgtacaagcagttgggctacagtgtatataggacggtcatagagtactattcggccagcaacggggagcctgatgaggacg

SEQ ID NO: 592752 - DNA, 120 bp, Artificial Sequence
  ENSG00000173418_4 (sequence is synthesized)
gacattgaataaccctgggcagtggttcttaggcagatactctagatgctttatggacaatattattttcattggatgattctggagctctattaggagaaaagtaatcattttaggtct

SEQ ID NO: 592753 - DNA, 120 bp, Artificial Sequence
  ENSG00000173418_5 (sequence is synthesized)
taaagacttcaagaaaatacaggttatcaatttattttaaatctcattgtttccagttagcaatatcatacctattaaagctgttcattgtaacaaaattcaatcaaaaaggcagctagg

SEQ ID NO: 592754 - DNA, 120 bp, Artificial Sequence
  ENSG00000173418_6 (sequence is synthesized)
tcagaaggaaacataccactctcatggttcatagtattcactgtatgtatgctagggaaaagacttgctccagtctcctcctcagttctgtgcctgagaaccactgctgcatatatttgt

SEQ ID NO: 592755 - DNA, 120 bp, Artificial Sequence
  ENSG00000173418_7 (sequence is synthesized)
ttttaaattttgtattgaactgttaattgaagctttaaaagcatatatgaaatgtataaatctaagatgtataatacattattgactctatgaatgttttctgaagtttgttagtcattt

SEQ ID NO: 592756 - DNA, 120 bp, Artificial Sequence
  ENSG00000173418_8 (sequence is synthesized)
acgacctgggcttctcgccctgccctactgcttgctggttcgtggccgggccgcgcctcttctgggcagagggcaccgccgacggccaggccgcagagggggcttgcgaggatcggaagc

SEQ ID NO: 592757 - DNA, 120 bp, Artificial Sequence
  ENSG00000173418_9 (sequence is synthesized)
tggtcagcagctgttgggatgtgtacatcgtgaagcccacctggtggccgtggttaaattgtatccaaatgaaatgacactgatcactgcgtcccctgcagcagatgctgtctcagtcat

SEQ ID NO: 592758 - DNA, 120 bp, Artificial Sequence
  ENSG00000173418_10 (sequence is synthesized)
ggttagtgtttgcaagtttagttactgtagctgcgcaccccggtgtacacacctttcctctgtgaggagtcacggcagatcttaggggaggctcgctgtgcccagagccctggatgcagt

SEQ ID NO: 592759 - DNA, 120 bp, Artificial Sequence
  ENSG00000173418_11 (sequence is synthesized)
ttctttggattcgagttaaggccagacctctgatttgcagtaacttggatccacttacagaaactgtatccttttttacaaaaaaaaaaaagttgaatgaagatttactgagaataaaga

SEQ ID NO: 592760 - DNA, 120 bp, Artificial Sequence
  ENSG00000173418_12 (sequence is synthesized)
aaacagaaatgaaaggaaaacagaggagtactgaaaagtttaaaaacttgtaggtcaggaaacatcataagcaacactgaaagcaattttaaaaagtgaaactgagaacaagagttgtct

SEQ ID NO: 592761 - DNA, 120 bp, Artificial Sequence
  ENSG00000173418_13 (sequence is synthesized)
ctgttccgcttcaacaacattcctggatccactttaaaaaaacaacagggcggtatgtgaaaactaaggacaaagtggttccgattcaagtgtcaggaagatggaaagaactatgggata

SEQ ID NO: 592762 - DNA, 120 bp, Artificial Sequence
  ENSG00000173418_14 (sequence is synthesized)
cggcgcgatgaccacgctacgggcctttacctgcgacgacctgttccgcttcaacaacatgtgagtgacacgcgcctagggccagccgctcttggccgggcctcgcttcccggccccgcc

SEQ ID NO: 592763 - DNA, 120 bp, Artificial Sequence
  ENSG00000173418_15 (sequence is synthesized)
gcgccttcccggccggaccccaagcccggacggggacccgcgagaaccaccccccgccggccaacgtgggcgcctccctggggccacagggtccagggagaggtgggcctggagtcgacg

SEQ ID NO: 592764 - DNA, 120 bp, Artificial Sequence
  ENSG00000173418_16 (sequence is synthesized)
gggcctggagtcgacgcacgccggccttggcgaccttggccgaggtgctcaaactttgtctctggaccctgcgagctggcaggttctggggcagcgctcgggcctccgctcgtggtcgct

SEQ ID NO: 592765 - DNA, 74 bp, Artificial Sequence
  ENSG00000173421_0 (sequence is synthesized)
gcttttccttcatctccaaagtcctctaaactgacagggtctcattctgtcgcccaggctggagtgtacgatcc

SEQ ID NO: 592766 - DNA, 120 bp, Artificial Sequence
  ENSG00000173421_1 (sequence is synthesized)
tcccgcctcagcctccgagtagctgggaccacaggggcccggttcgatgtccccatctgcccacggcgcctctcgtgccagctgctccgcctgtcctgcccttgctcagaccacccaagt

SEQ ID NO: 592767 - DNA, 120 bp, Artificial Sequence
  ENSG00000173421_2 (sequence is synthesized)
atcatctgtgctctggcccctggccaccagttccaccccacatgctgtcctcacaggtggcgccttgccattcctggggaccagggcctccttgttctggtcatacacagtggagtgtag

SEQ ID NO: 592768 - DNA, 120 bp, Artificial Sequence
  ENSG00000173421_3 (sequence is synthesized)
gtcgagcgacaagtataactataagaaatgaattttaatgtctggaatatcaaagagatgctcagtattccttcaggctctgggaacaagaagtcatccaactggaataataatcaaaat

SEQ ID NO: 592769 - DNA, 120 bp, Artificial Sequence
  ENSG00000173421_4 (sequence is synthesized)
gattattccagtctcagtgattcccagttcctctttggatctcagttctgtccagaaaattcagaaaccctatcagcacccttggactttggtgcccacttgagacattcaaaacagtca

SEQ ID NO: 592770 - DNA, 120 bp, Artificial Sequence
  ENSG00000173421_5 (sequence is synthesized)
caacagaactatctggagggtgaacctagcattttcacaaagtaccagacaaagccccagctgttcggaggagatataaaagatggaggtttatttcctcctcctttgtcagttggaaaa

SEQ ID NO: 592771 - DNA, 120 bp, Artificial Sequence
  ENSG00000173421_6 (sequence is synthesized)
tcaaaaggcctcttggaacagtttgaggagaaaaagaaaagggcaaaagacaaatgtgacagtgagactctatacaactttgtttctaatgttagagaaagcattctcaggttgcagacg

SEQ ID NO: 592772 - DNA, 120 bp, Artificial Sequence
  ENSG00000173421_7 (sequence is synthesized)
tctgtggaaaagtctgaggaccatctcagttcaagaagccaatctattttggattctttggagactgtggccaagacattacaagagactatacaggcccagaatgacctggtgtttgag

SEQ ID NO: 592773 - DNA, 120 bp, Artificial Sequence
  ENSG00000173421_8 (sequence is synthesized)
gcagtccaggacaaaggcaacatggagcaggccatccttgagatgaagaaaagatttgaagctagacaaggagagtttatagaaatgaagtccaacctgaagcaccttgaagttttagtt

SEQ ID NO: 592774 - DNA, 120 bp, Artificial Sequence
  ENSG00000173421_9 (sequence is synthesized)
gctcagcagagtcaggaattccagcagctgtgtgagcagctaggccagctgaatgtgcccagtgtcctagcagagctgaagagattgatctcagtgcctccagtgaaagacagtgcttct

SEQ ID NO: 592775 - DNA, 120 bp, Artificial Sequence
  ENSG00000173421_10 (sequence is synthesized)
cctgctgcatggaatcctggtatgggctccctacagcctggagaatttgatgtctggggtgaaggagcaaagaatgatgatctccaagaagaggctgcactgccagcatttgggtcccat

SEQ ID NO: 592776 - DNA, 120 bp, Artificial Sequence
  ENSG00000173421_11 (sequence is synthesized)
gaaagaaataggcatgtaaaggacaaggtggtgcagactaactgcaagaactgggctgttactaaaacaggtgccaagaaccatggttccagcgtcccaggccataagattcccagtgac

SEQ ID NO: 592777 - DNA, 120 bp, Artificial Sequence
  ENSG00000173421_12 (sequence is synthesized)
agggacctggtttcccaaggagcctcacagctcacatcattggagataaacttttcaaccagcattaagaatgcctgccaaaaatatcaagcccaaagtatgtttttgtgtgacccacgt

SEQ ID NO: 592778 - DNA, 120 bp, Artificial Sequence
  ENSG00000173421_13 (sequence is synthesized)
gaacatttggtgattaaacagaaagatgggactgtagaaatgcgggggaaagacaagaagcagcagcccaggaaggcccacagggcccacagaggcaggctcatagccagcaagcaaaaa

SEQ ID NO: 592779 - DNA, 120 bp, Artificial Sequence
  ENSG00000173421_14 (sequence is synthesized)
caaatcccaatccagacctgtaaattcaattccaaatatcagagtcctcagcctgcaatttctgtccctcaaagccccttcctggggcagcaggaaccccgtgctcagcctctgcatctg

SEQ ID NO: 592780 - DNA, 120 bp, Artificial Sequence
  ENSG00000173421_15 (sequence is synthesized)
cagtgtcccaggagccccagaaaaccagtctgccctattctgggaggaacagtcatgcccaataagacagtaagggcagtgcagggaagactcttgcagctcagcaggtgctcttcccaa

SEQ ID NO: 592781 - DNA, 120 bp, Artificial Sequence
  ENSG00000173421_16 (sequence is synthesized)
gacaactggctactttccagcagttcccagggggaccaccagatgagctggttcagtgacctcaatctcggatgttcagagacccctctatgcaaggaggcaggaaagaatttgctctat

SEQ ID NO: 592782 - DNA, 120 bp, Artificial Sequence
  ENSG00000173421_17 (sequence is synthesized)
gacctgggttttgatagcagtgatgatgatggcttctgaccagtccacagttgatttattggtctcagctagaaagagaaattgcaggacatttgggctggccaacagcagaaagtccct

SEQ ID NO: 592783 - DNA, 120 bp, Artificial Sequence
  ENSG00000173421_18 (sequence is synthesized)
gaagcctgccaagtacccagggtcagaggccctgctgaggtggggcaatgagcacgagggcagggaaggtccagcattctgggtaccaggtgctgcccctgacaaggattaagtgcatcc

SEQ ID NO: 592784 - DNA, 120 bp, Artificial Sequence
  ENSG00000173421_19 (sequence is synthesized)
ttatttattggaatgaaatgtgaaaatggtgctgatgaaaactgaggcagcagcctggttgtggggcatctggagcagggtgcctgtactttggcgaaaggcaggcaggcctccttatgg

SEQ ID NO: 592785 - DNA, 120 bp, Artificial Sequence
  ENSG00000173421_20 (sequence is synthesized)
aatactgtgtagcagaagggctctcataaaactgttgcggtggcagcatgactccaaacaacatttttgggtctttaaaatattccctacacatgaccaatacattttcaggcctcagga

SEQ ID NO: 592786 - DNA, 120 bp, Artificial Sequence
  ENSG00000173421_21 (sequence is synthesized)
gccacttatgctaccagaatgtttgcattttttgatcagtagacatattacaggacaccctaaatcttcttgtgaacagagaaaataaaatgataagcctgccagtgaaagaggtgacat

SEQ ID NO: 592787 - DNA, 120 bp, Artificial Sequence
  ENSG00000173421_22 (sequence is synthesized)
tcactagcaaatgtccagagcatatcactgctcacaagccatttttcttcctggttgctttttcccttgtcctgtttttcaagcactttcttaaaactaataatattgtagaccttgtat

SEQ ID NO: 592788 - DNA, 120 bp, Artificial Sequence
  ENSG00000173421_23 (sequence is synthesized)
ttctgaagagcagtgggcttatatgggactttggctttccatttttatcttgctgaagtttttgagtttttgcaacacaagtattttttgttatcagaaataagataaaacatttaaaag

SEQ ID NO: 592789 - DNA, 120 bp, Artificial Sequence
  ENSG00000173421_24 (sequence is synthesized)
ggggggaggggctgaggagccggatggggccgtgggtctgggttcaggataccagcggtcctcccgggctttcccgggacgttggtcttgtagtccctcccctgccctttctttccctat

SEQ ID NO: 592790 - DNA, 120 bp, Artificial Sequence
  ENSG00000173421_25 (sequence is synthesized)
gcgcttatccttggagagcagttttcatccgattcgcaggggtccgcgacctcctatcccagatccccgcctggagttgaggagtgagaccgggaacaagaagtcatccaactggaataa

SEQ ID NO: 592791 - DNA, 120 bp, Artificial Sequence
  ENSG00000173421_26 (sequence is synthesized)
acgtctgtggaaaagtctgaggaccatctcagttcaagaagccaatctattttggattctttggagactgtggccaagacatgtgagtgcctcatgtttgaggtatcagcagagggcact

SEQ ID NO: 592792 - DNA, 120 bp, Artificial Sequence
  ENSG00000173421_27 (sequence is synthesized)
ggtgaatgatgaacatgaactttctgaccccagcctggtttccagtggtgaggttcctcacagggtttcagatgagaggatgggtatatagggttagtcctgaagagatgtggagcacac

SEQ ID NO: 592793 - DNA, 120 bp, Artificial Sequence
  ENSG00000173421_28 (sequence is synthesized)
gtagtgaggcccacctctatgtgacaatgctctggtcccatgatgccttttgtgaggcactaatcccccacctggtaaccatgttgcctcagggcaggtagctctgctaggtttctcatc

SEQ ID NO: 592794 - DNA, 120 bp, Artificial Sequence
  ENSG00000173421_29 (sequence is synthesized)
tcactgcctgaagtgagtcagcaacatccttgagtctcaaattgctgcctgtgctgtctatagacactgactgcccccttaggagttagaaatactgtagtacctgctgctcttcttgct

SEQ ID NO: 592795 - DNA, 86 bp, Artificial Sequence
  ENSG00000173421_30 (sequence is synthesized)
aggagttagaaatactgtagtacctgctgctcttcttgctgccttggtttcagtgagagctgtgttgtgaatcacagcatcattct

SEQ ID NO: 592796 - DNA, 120 bp, Artificial Sequence
  ENSG00000173421_31 (sequence is synthesized)
acttatagtttgtggtttataaaatcctgtgctccaccaattagtggtttacatttagatgaaaccatggcccttgccctataaacagaagagagtaaatatacagttctccttgggtga

SEQ ID NO: 592797 - DNA, 120 bp, Artificial Sequence
  ENSG00000173421_32 (sequence is synthesized)
atacttctctagaaccacctgtttcctagcaaaacgatgagctgatgactatgcatctgtacttgtttgcatttgtctgtgtgtttattttataaacaagttgaaatcaacttacacaaa

SEQ ID NO: 592798 - DNA, 120 bp, Artificial Sequence
  ENSG00000173431_0 (sequence is synthesized)
caagactcccccatgatgacctattcatccacctacctcctcactctgttccactgtctcccttaagagagatggcaccggccagagcaggatgctgccccctgctgctgctgcttctgg

SEQ ID NO: 592799 - DNA, 120 bp, Artificial Sequence
  ENSG00000173431_1 (sequence is synthesized)
ggctgtgggtggcagaggtcctagtcagagccaagcccaaggacatgacatcatctcagtggtttaaaactcagcatgtgcagcccagccctcaagcatgcaactcagccatgagcatca

SEQ ID NO: 592800 - DNA, 120 bp, Artificial Sequence
  ENSG00000173431_2 (sequence is synthesized)
caccttcctgcacgagcccttctccagtgtggccatcacctgccagacccccaacatagcctgcaagaatagctgtaaaaactgccaccagagccacgggcccatgtccctgaccatggg

SEQ ID NO: 592801 - DNA, 120 bp, Artificial Sequence
  ENSG00000173431_3 (sequence is synthesized)
tgagctcacctcagggaagtacccaaactgcaggtacaaagagaagcacctgaacacaccttacatagtggcctgtgaccctccacaacagggtgacccagggtacccacttgttcctgt

SEQ ID NO: 592802 - DNA, 120 bp, Artificial Sequence
  ENSG00000173431_4 (sequence is synthesized)
gcacttggataaagttgtctaagccctggtgcccacgttccacctcacactctgcagactgtatgctgctgcttttcctccctccagttcgttattaatccttgctccccactgcaaatg

SEQ ID NO: 592803 - DNA, 120 bp, Artificial Sequence
  ENSG00000173432_0 (sequence is synthesized)
agggacccgcagctcagctacagcacagatcagcaccatgaagcttctcacgggcctggttttctgctccttggtcctgggtgtcagcagccgaagcttcttttcgttccttggcgaggc

SEQ ID NO: 592804 - DNA, 120 bp, Artificial Sequence
  ENSG00000173432_1 (sequence is synthesized)
ttttgatggggctcgggacatgtggagagcctactctgacatgagagaagccaattacatcggctcagacaaatacttccatgctcgggggaactatgatgctgccaaaaggggacctgg

SEQ ID NO: 592805 - DNA, 120 bp, Artificial Sequence
  ENSG00000173432_2 (sequence is synthesized)
agaatatccagagattctttggccatggtgcggaggactcgctggctgatcaggctgccaatgaatggggcaggagtggcaaagaccccaatcacttccgacctgctggcctgcctgaga

SEQ ID NO: 592806 - DNA, 120 bp, Artificial Sequence
  ENSG00000173432_3 (sequence is synthesized)
aatactgagcttcctcttcactctgctctcaggagatctggctgtgaggccctcagggcagggatacaaagcggggagagggtacacaatgggtatctaataaatacttaagaggtggaa

SEQ ID NO: 592807 - DNA, 120 bp, Artificial Sequence; identical to SEQ ID NO: 310651
  ENSG00000173432_4 (sequence is synthesized)

SEQ ID NO: 592808 - DNA, 120 bp, Artificial Sequence
  ENSG00000173432_5 (sequence is synthesized)
aggcagggacccgcagctcagctacagcacagatcagttatcctggggcatacagccataccattctgaaggtgtcttatctcctctgatctagagagcaccatgaagcttctcacgggc

SEQ ID NO: 592809 - DNA, 120 bp, Artificial Sequence; identical to SEQ ID NO: 468018
  ENSG00000173436_0 (sequence is synthesized)

SEQ ID NO: 592810 - DNA, 120 bp, Artificial Sequence
  ENSG00000173436_1 (sequence is synthesized)
cgtgaagataggtactggttttggattaggaattgttttctcacttaccttctttaaaagaagaatgtggccattagccttcggttctggcatgggattaggaatggcttattccaactg

SEQ ID NO: 592811 - DNA, 120 bp, Artificial Sequence
  ENSG00000173436_2 (sequence is synthesized)
tcagcatgatttccaggctccatatcttctacatggaaaatatgtcaaagagcaggagcagtgacttcacctgagaacatcccagcgggaggacaagagaaatcatgtttattcctcagg

SEQ ID NO: 592812 - DNA, 120 bp, Artificial Sequence
  ENSG00000173436_3 (sequence is synthesized)
aatactgaagtgccctggagtaagctgccattcttctgtaacaatgttatcagtaatgctttaaactccagcacctggttatgcatttgaaaccaagtctgtttcttgttttgtattttc

SEQ ID NO: 592813 - DNA, 120 bp, Artificial Sequence
  ENSG00000173436_4 (sequence is synthesized)
tctctggaagttgtaaggaggtggtcttaaataaattaaacaaaaagaggaagtccattgcatggcctttgtttcttcacctttggtctctgagcatgaggaggactgtgtgtgaactgc

SEQ ID NO: 592814 - DNA, 120 bp, Artificial Sequence
  ENSG00000173436_5 (sequence is synthesized)
cagcagctgtagccacctgctcacagcctctctgagaaccccctgaaaccagttgttgggtatccttcccatttgccccctcaggcgtagttttcagaactgcttccacctcgtaatcag

SEQ ID NO: 592815 - DNA, 120 bp, Artificial Sequence
  ENSG00000173436_6 (sequence is synthesized)
aagttgaagattgctgctgcgtggcctgatggagatgactgatgtcttaaggcgcctttccttctgtggcacctcttcgtgtgttctcacctggggacctggcagggcacatctccgctg

SEQ ID NO: 592816 - DNA, 120 bp, Artificial Sequence
  ENSG00000173436_7 (sequence is synthesized)
tgcctactgcaaggcggtcccactgctgctgtattagcaggggaagaatcctggctgtgtggatggcccactccattgaagtcaagtcctgcagcttcatagagcttgagacagtccaag

SEQ ID NO: 592817 - DNA, 120 bp, Artificial Sequence
  ENSG00000173436_8 (sequence is synthesized)
cttcagctctggagggcggaggaaagctcatggcatacccacctggccggaggagcccgattggggttaattttatcttcacgtagcagctgaagtttgaggacaaaagggccacttctg

SEQ ID NO: 592818 - DNA, 120 bp, Artificial Sequence
  ENSG00000173436_9 (sequence is synthesized)
atgcccctctgagtttgttcctgtggtttcacttgaaccagggatgctagatgcaaaagtcatattttagcaatttcttcagacgatatacagaaccccagcgctcagccgttcttattt

SEQ ID NO: 592819 - DNA, 120 bp, Artificial Sequence
  ENSG00000173436_10 (sequence is synthesized)
ctttttccttatcgtagaattaagatagggagagcccgatcccacttgcccctgtatcctgtaaatgttgatttatcatctactgtaagcgaggcactgttgtaagcagcagagataaat

SEQ ID NO: 592820 - DNA, 120 bp, Artificial Sequence
  ENSG00000173436_11 (sequence is synthesized)
ggataaatagacacaggcttctgccttcaaggagcttagagtctgatggaaagacagacgtgcaaacacaactctgaaagaagtgttttaatggagaagagaggtgtaggcaaagtacac

SEQ ID NO: 592821 - DNA, 120 bp, Artificial Sequence
  ENSG00000173436_12 (sequence is synthesized)
tgagaacaaaggagaaggagcaactatgtctccctaggatggccccacaggcgacggaatgcctgcgctgggacccgaagttgactgggaatcccagacagaaggagggtagcctctgtg

SEQ ID NO: 592822 - DNA, 120 bp, Artificial Sequence
  ENSG00000173436_13 (sequence is synthesized)
tttgctcaggatcatgtaatgcatattatagctgggaaatcgcaagtagttcagcatagccagggtgtgtaggggcaggggaaaggcatggagggggaggctgggcaatagggtacaact

SEQ ID NO: 592823 - DNA, 120 bp, Artificial Sequence
  ENSG00000173436_14 (sequence is synthesized)
catgtctgactccagttctggaacattgattagaccttagttcttgcaagtgctatagtgagtacattcagggtagcaaataccctccctcagcctccccactcccttttccagaaaggt

SEQ ID NO: 592824 - DNA, 120 bp, Artificial Sequence
  ENSG00000173436_15 (sequence is synthesized)
ctaggctctgccctgcaaactgtccaggctcctctgccctctgggcttgttttcctctttattgctacttggctgtttttcacttggtcctcttcattctatgattaaggcaacccatat

SEQ ID NO: 592825 - DNA, 120 bp, Artificial Sequence
  ENSG00000173436_16 (sequence is synthesized)
atgattaaggcaacccatataattgaaagaaaaataatgtgcagcctgtttcatcccttccacttgttttcttactatttatttatttatttctgagatggaattttgctcttgttgccc

SEQ ID NO: 592826 - DNA, 77 bp, Artificial Sequence
  ENSG00000173436_17 (sequence is synthesized)
attttccttccccaatttttctgtcattttcccatcctcattcaggcagagagaagaataacatgcccccttccaaa

SEQ ID NO: 592827 - DNA, 120 bp, Artificial Sequence
  ENSG00000173436_18 (sequence is synthesized)
tcattcaggcagagagaagaataacatgcccccttccaaaaaagacaaaacacaaggtagccacaaattccctagacacattagaaaaatagggagtggagaggggcattggaatgaaag

SEQ ID NO: 592828 - DNA, 120 bp, Artificial Sequence
  ENSG00000173436_19 (sequence is synthesized)
ttctctatctcattagctgttaggctttaggcatttatttggatggatccctttggcaccttggaagcaccactgaagtgctctgagaaaggggtcagctgtctgagggaatagttctgg

SEQ ID NO: 592829 - DNA, 120 bp, Artificial Sequence
  ENSG00000173436_20 (sequence is synthesized)
atagaggccacaggaagcactggccagttgctttagttctagatagctttgtattcccgccttgttgcccttagcggaggctggcccaaagcacacttgatcttgtccccactccctgcc

SEQ ID NO: 592830 - DNA, 120 bp, Artificial Sequence
  ENSG00000173436_21 (sequence is synthesized)
cccatctcagatcaaccttcagaaagtcccggcttgttggcaaaggcacacattctgtgttactcttaagtttcattagaaattcaagtcctctggggccctgttcccttgtgggcttgt

SEQ ID NO: 592831 - DNA, 120 bp, Artificial Sequence
  ENSG00000173436_22 (sequence is synthesized)
gcaactgactttgtttcttgtctgcctttctggaaccaaatccaaggaaattcatgggtttggggagacagcgatgggaacccagcagggcacaggatgctaggataaagctgtggcgcc

SEQ ID NO: 592832 - DNA, 120 bp, Artificial Sequence
  ENSG00000173436_23 (sequence is synthesized)
ccaaaagtggcctgctctgccaacatacataaatacatacagtctgagcttgacactgtataatttggcccagaacaatatgtattttgagctcatttaggtgaatgactttggcattcc

SEQ ID NO: 592833 - DNA, 120 bp, Artificial Sequence
  ENSG00000173436_24 (sequence is synthesized)
atgtacccactaggggaagctttatcaggctgcatttgccttatgcagaagtatgcctttgttctgagaaatggcctcagaacacactgttgagctgtctcctttagtgagtgtcatcct

SEQ ID NO: 592834 - DNA, 120 bp, Artificial Sequence
  ENSG00000173436_25 (sequence is synthesized)
ctcatccatttcaaaagattgcagatgccgtcttgaagtcctgcttgtaagaaatgcaggggttgggaatggaggagatgacgatgtagttttgcttttagttttcccaaacctgtttac

SEQ ID NO: 592835 - DNA, 120 bp, Artificial Sequence
  ENSG00000173436_26 (sequence is synthesized)
attttttaaaaatgtaaccaacccataattgcattttacttgtcgtggttcgatctgattgtattgtcgaaggactatttttgaacctgtccaaataaactctgcaaagtatttccacaa

SEQ ID NO: 592836 - DNA, 89 bp, Artificial Sequence
  ENSG00000173436_27 (sequence is synthesized)
ccatgttgcccaggctggtcttgaactcagggtccaaacgatccacctaccttggcctcccaacgtgccccatcttgataatttcatac

SEQ ID NO: 592837 - DNA, 120 bp, Artificial Sequence
  ENSG00000173436_28 (sequence is synthesized)
gctccatatcttctacatggaaaatatgtcaaagtatgtacagaatatatatttctctttccttcagaagaaaaagatttctcctgagccctgaagaattctttagactgtttgtaatga

SEQ ID NO: 592838 - DNA, 120 bp, Artificial Sequence
  ENSG00000173436_29 (sequence is synthesized)
gtaaaccatgtgtgtcattgtggcaccactctcagatactaattgctctttggccttcagtgatgtcatcactgctttggtgctaaagtctcccctgtgccttcagatgcgtatgtacgt

SEQ ID NO: 592839 - DNA, 120 bp, Artificial Sequence
  ENSG00000173436_30 (sequence is synthesized)
ctattataatcactcgtgtttagcataggtgttgtatagctgagttaaatagctttcttaagcctgtactttaggcagtggtcctttaaaaaagtaatcttcaaggatcttttcaccctg

SEQ ID NO: 592840 - DNA, 120 bp, Artificial Sequence
  ENSG00000173436_31 (sequence is synthesized)
aggcttgaataatatcttaatagaaaattatcatatgattttgtcctgtaggaagaggcatttatttataaatacccttgcccccattactatcttaagaaaagcagttctaggccaggc

SEQ ID NO: 592841 - DNA, 120 bp, Artificial Sequence
  ENSG00000173436_32 (sequence is synthesized)
aggcccgggcgccgtggaccccggcctgccctgcagaatgcttcgcacgcacagcacccacggcggcagcctcgagaagggcccgcagagcagcgcgctgccttctgggcacaccgatgc

SEQ ID NO: 592842 - DNA, 120 bp, Artificial Sequence
  ENSG00000173436_33 (sequence is synthesized)
ccgcccttccctcgctggctcctaggcggcctccctagaagcggcaactgagaaggcacagcaccgggaccaccccatccctgatggagagctcccctcgctccccaaaggctgcaaaga

SEQ ID NO: 592843 - DNA, 120 bp, Artificial Sequence
  ENSG00000173436_34 (sequence is synthesized)
cgcgggggccggccgagaggaaagctggaggcgcgggtggggaacatgtctgagtcggagctcggcaggaagtgggaccggtgtctggcggatgcggtcgtgaagatagaatcctggtaa

SEQ ID NO: 592844 - DNA, 120 bp, Artificial Sequence
  ENSG00000173436_35 (sequence is synthesized)
gcaagagtgaggtcatcacagggaccatgcaagaagaggcgcagctgtgtggcactgaagccggcagccggccttttccaccactccctggctcctcgctttcctggcatcagagctgat

SEQ ID NO: 592845 - DNA, 120 bp, Artificial Sequence
  ENSG00000173436_36 (sequence is synthesized)
ccgtgaaatggagagtcaggtgaaggaatttgcccacggtcacagctaacaaatggcaaaattagggattttacccagcttttctggggtcaagtcccatgttccttcttcgatgctaat

SEQ ID NO: 592846 - DNA, 120 bp, Artificial Sequence
  ENSG00000173436_37 (sequence is synthesized)
tttgttacccaaatgtgatatttttgtgtggtaatcttagggtatttaagaggatttaggattgtgtctttgaatgaaaacattgaggaataagattgtaagctccatgagagcagggat

SEQ ID NO: 592847 - DNA, 120 bp, Artificial Sequence
  ENSG00000173436_38 (sequence is synthesized)
gttttctggtttagtcactgccccatccccagcccctaaaagagtgcttaataaaaattgttgagagtgagtcaataaatgaaacagtttataagttaccatttcacctctgaattcagc

SEQ ID NO: 592848 - DNA, 120 bp, Artificial Sequence
  ENSG00000173436_39 (sequence is synthesized)
tcggagcgcgggggccggccgagaggaaagctggaggcgcgggtggggaacatgtctgagtcggagctcggcaggaagtgggaccggtgtctggcggatgcggtcgtgaagatagtagag

SEQ ID NO: 592849 - DNA, 80 bp, Artificial Sequence
  ENSG00000173442_0 (sequence is synthesized)
aggaaacggcgcgctcccagctccgcgctcgccacccgacgcgccccaggcgaccccgcagactcagccagaccaccctg

SEQ ID NO: 592850 - DNA, 80 bp, Artificial Sequence
  ENSG00000173442_1 (sequence is synthesized)
ggtcggagcctgggacacctccgcacggacggggcgggcggcgcggacaggccatggggacccgggccgggccagcggtg

SEQ ID NO: 592851 - DNA, 120 bp, Artificial Sequence
  ENSG00000173442_2 (sequence is synthesized)
ggcgggggccatgacctcggtgtggaagcgcctgcagcgcgtgggcaagcgggcggccaagttccagttcgtggcctgttaccacgagctagtgttggagtgcaccaagaaatggcagcc

SEQ ID NO: 592852 - DNA, 120 bp, Artificial Sequence
  ENSG00000173442_3 (sequence is synthesized)
agataagctggtggtggtatggacccgtcggaaccgacgcatctgctccaaggcccacagctggcagccgggcatccagaacccataccggggcaccgtggtgtggatggtacctgagaa

SEQ ID NO: 592853 - DNA, 120 bp, Artificial Sequence
  ENSG00000173442_4 (sequence is synthesized)
tgtggacatctctgtgaccctctacagggacccccacgtggaccagtatgaggccaaagagtggacatttattattgaaaatgagtctaaggggcagcggaaggtgctggccacggccga

SEQ ID NO: 592854 - DNA, 120 bp, Artificial Sequence
  ENSG00000173442_5 (sequence is synthesized)
ggtggacctggcccgccatgcagggcccgtgcctgtccaagtcccagtgaggctgcggctgaagccaaagtcagtgaaggtggtgcaggctgagctgagcctcactctttccggggtgct

SEQ ID NO: 592855 - DNA, 120 bp, Artificial Sequence
  ENSG00000173442_6 (sequence is synthesized)
gctgcgggagggccgtgccacggacgatgacatgcagagtctcgcaagcctcatgagtgtgaagcctagtgatgtgggcaacttggatgactttgctgagagtgatgaagatgaggctca

SEQ ID NO: 592856 - DNA, 120 bp, Artificial Sequence
  ENSG00000173442_7 (sequence is synthesized)
tggcccaggagccccggaggcccgggctcgagtcccccagccagatccctctcgagagctgaagacgctttgtgaggaggaggaggaaggccaaggacgaccccagcaggcagttgccag

SEQ ID NO: 592857 - DNA, 120 bp, Artificial Sequence
  ENSG00000173442_8 (sequence is synthesized)
cccttctaatgctgaggataccagcccagcccctgtgagtgctcctgcacccccagccagaacctcccgaggccaggggtcagaacgagctaatgaagcggggggccaggtaggccctga

SEQ ID NO: 592858 - DNA, 120 bp, Artificial Sequence
  ENSG00000173442_9 (sequence is synthesized)
ggccccaaggcccccggaaacctcaccagagatgaggtcttcaaggcagccagcccaggacacggcccccaccccagcccctcggctccggaaaggctctgatgccctccggcccccagt

SEQ ID NO: 592859 - DNA, 120 bp, Artificial Sequence
  ENSG00000173442_10 (sequence is synthesized)
cccccagggggaagatgaggtccccaaagcctcaggggctcctccagcaggattgggctctgctagggagacccaggcccaggcatgccctcaggaagggacagaagcccatggagctag

SEQ ID NO: 592860 - DNA, 120 bp, Artificial Sequence
  ENSG00000173442_11 (sequence is synthesized)
gctgggcccgagcattgaggataaaggttctggagacccttttggaaggcagagactcaaggctgaagagatggacactgaggacaggccagaggccagtggggtggacactgagccaag

SEQ ID NO: 592861 - DNA, 120 bp, Artificial Sequence
  ENSG00000173442_12 (sequence is synthesized)
gtcaggaggcagagaggcaaacactaagaggtcaggagtcagagctggggaggctgaagagagttcagcagtttgtcaagtggatgctgagcagaggtcaaaggtgagacatgtggacac

SEQ ID NO: 592862 - DNA, 120 bp, Artificial Sequence
  ENSG00000173442_13 (sequence is synthesized)
taagggaccagaggcgacaggggtgatgcctgaggcaagatgcagggggacccctgaggctcctccaaggggctctcaggggaggctgggagtcaggaccagggatgaggctccctcagg

SEQ ID NO: 592863 - DNA, 120 bp, Artificial Sequence
  ENSG00000173442_14 (sequence is synthesized)
cctgagcctgcccccagcggagcctgcagggcactctgggcaacttggtgacctcgagggggccagggctgctgcaggccaggagagagagggtgcagaagtgaggggtggagcacctgg

SEQ ID NO: 592864 - DNA, 120 bp, Artificial Sequence
  ENSG00000173442_15 (sequence is synthesized)
tattgaggggacaggcctggagcagggcccttctgttggagcaataagcaccaggccccaggtgagcagctggcagggggccctgttatcaactgcccagggggcaatatccaggggtct

SEQ ID NO: 592865 - DNA, 120 bp, Artificial Sequence
  ENSG00000173442_16 (sequence is synthesized)
gggaggctgggaggcagaagctgggggttcaggggacctggaaacagagactgaggtggtagggttggaggtgctgggaacccaggagaaagaagttgaggggtcagggttcccagagac

SEQ ID NO: 592866 - DNA, 120 bp, Artificial Sequence
  ENSG00000173442_17 (sequence is synthesized)
taggacactagaaattgagatattgggggccttggagaaagaagcagcaagatcaagggtcctggagtcagaggttgctgggacagcacagtgtgagggactggagacccaggaaacaga

SEQ ID NO: 592867 - DNA, 120 bp, Artificial Sequence
  ENSG00000173442_18 (sequence is synthesized)
ggtgggggtcatagagaccccagggacagagactgaggtattggggacccagaaaacagaagctgggggttcaggagttttgcagacaagaactacgatagcagagactgaggtactggt

SEQ ID NO: 592868 - DNA, 120 bp, Artificial Sequence
  ENSG00000173442_19 (sequence is synthesized)
gacccaggagatatctggggatttagggccactgaagatagaagatacaatacagtctgagatgctggggacccaggagacagaggtggaagcttctagggtaccagagtcagaggctga

SEQ ID NO: 592869 - DNA, 120 bp, Artificial Sequence
  ENSG00000173442_20 (sequence is synthesized)
ggggacagaagctaaaatattagggacccaggagataacagctagggattcaggggtcagagagatagaagcagagatagcagagtctgacatattggtagcccaggagatagaggtggg

SEQ ID NO: 592870 - DNA, 120 bp, Artificial Sequence
  ENSG00000173442_21 (sequence is synthesized)
gttctgggaatagagactggggcagcagaaggtgcgatattggggacccaagagatagcatctagggattcaggggtcccagggttagaagctgatacaacagggatccaggtgaaagag

SEQ ID NO: 592871 - DNA, 120 bp, Artificial Sequence
  ENSG00000173442_22 (sequence is synthesized)
gttgggggttcagaggttccagagatagcgactgggacagcagaaactgagatattggggacccaagagatagcatctaggagttcaggggtcccagggctagaatctgaggtagctggg

SEQ ID NO: 592872 - DNA, 120 bp, Artificial Sequence
  ENSG00000173442_23 (sequence is synthesized)
gcccaggagacagaggtcgggggttcagggatctcagggcccgaggctggaatggcagaggcccgagtactgatgacccgtaagacagaaattatagttccagaggctgagaaggaagag

SEQ ID NO: 592873 - DNA, 120 bp, Artificial Sequence
  ENSG00000173442_24 (sequence is synthesized)
gctcagacttcgggggtccaggaagcagagactagagttgggagtgctctcaaatatgaggctttaagggccccagtcactcagccaagagttttaggatcccaggaagcaaaagcagag

SEQ ID NO: 592874 - DNA, 120 bp, Artificial Sequence
  ENSG00000173442_25 (sequence is synthesized)
atttcaggagtacaagggtcagagactcaagttctgagagtccaggaggcagaggctggggtttgggggatgtcagagggcaaatctggggcttggggggcccaggaagcagagatgaag

SEQ ID NO: 592875 - DNA, 120 bp, Artificial Sequence
  ENSG00000173442_26 (sequence is synthesized)
gttttagagtctccagagaacaaatctggtacttttaaggcccaggaagcggaggctggggtcttgggaaatgagaaggggaaagaagctgagggaagcctcacagaggccagcctgcct

SEQ ID NO: 592876 - DNA, 120 bp, Artificial Sequence
  ENSG00000173442_27 (sequence is synthesized)
gaagcacaggtggccagtggggcaggggctggggcgcccagggcctcttccccagagaaggctgaagaggacaggaggctgccgggcagccaggcaccacctgccctggtcagctccagc

SEQ ID NO: 592877 - DNA, 120 bp, Artificial Sequence
  ENSG00000173442_28 (sequence is synthesized)
cagtccctgctggagtggtgccaggaagtcaccactggctaccgtggcgtccgcatcaccaacttcaccacatcctggcgcaacggcttggccttctgtgccatcctgcaccgattctac

SEQ ID NO: 592878 - DNA, 120 bp, Artificial Sequence
  ENSG00000173442_29 (sequence is synthesized)
ccagacaagattgactatgcctcgctagacccactcaacatcaagcagaacaacaagcaggccttcgatggcttcgcggctctgggcgtgtcgcggctgctggagcccgcggacatggtg

SEQ ID NO: 592879 - DNA, 120 bp, Artificial Sequence
  ENSG00000173442_30 (sequence is synthesized)
ctactgtcggtgcccgacaagctcatcgtcatgacgtacctgtgccagatccgcgccttctgcaccgggcaggagctgcagctggtacaactggagggcggcggcggcgccggcacgtac

SEQ ID NO: 592880 - DNA, 80 bp, Artificial Sequence
  ENSG00000173442_31 (sequence is synthesized)
gtaccgcgtgggcagcgcccagcccagcccgcccgacgacctggacgccggaggcctggcgcagcggctgcgcggtcacg

SEQ ID NO: 592881 - DNA, 80 bp, Artificial Sequence
  ENSG00000173442_32 (sequence is synthesized)
cgggccgcgcctccaaggacggcggggccgaggccccccgagagtcgcgacccgcggaggtcccggccgaggggctggtg

SEQ ID NO: 592882 - DNA, 120 bp, Artificial Sequence
  ENSG00000173442_33 (sequence is synthesized)
cgggcggcggcggcgtgaggctgcgacggccctcggtcaacggggagcccgggtcggtgcccccgccccgcgcgcacggctccttctcccacgtgcgcgacgcggacctgctcaagaaga

SEQ ID NO: 592883 - DNA, 120 bp, Artificial Sequence
  ENSG00000173442_34 (sequence is synthesized)
gacctgctcaagaagaggcgctcgcggctgcggaacagcagctcgttctcgatggacgatccggacgcgggagccatgggagctgcggctgcagaaggccaggcccctgaccccagccct

SEQ ID NO: 592884 - DNA, 120 bp, Artificial Sequence
  ENSG00000173442_35 (sequence is synthesized)
gccccaggcccacccacagctgcagactctcaacagccccctggtgggagttccccctcggaggaaccacccccaagcccaggggaggaggctgggctgcaacggttccaggacacaagt

SEQ ID NO: 592885 - DNA, 120 bp, Artificial Sequence
  ENSG00000173442_36 (sequence is synthesized)
cagtacgtgtgtgcagagctgcaggccctggaacaggagcagaggcagatagatgggcgggcggctgaggtggagatgcagctgaggagcctcatggagtcaggtgccaacaagctgcag

SEQ ID NO: 592886 - DNA, 120 bp, Artificial Sequence
  ENSG00000173442_37 (sequence is synthesized)
gaggaggtgctgatccaggagtggttcaccctggtcaacaagaagaacgctctcatccggaggcaggaccagctgcagctgctcatggaggagcaggacttggagcgaaggttcgagctg

SEQ ID NO: 592887 - DNA, 120 bp, Artificial Sequence
  ENSG00000173442_38 (sequence is synthesized)
ctgagccgcgagctgcgggccatgctggccatcgaagactggcagaaaacgtccgctcagcagcaccgagagcagctcctactggaggagctggtgtcgctggtgaaccagcgcgatgag

SEQ ID NO: 592888 - DNA, 120 bp, Artificial Sequence
  ENSG00000173442_39 (sequence is synthesized)
ctagtccgggacctggaccacaaggagcggatcgccctggaggaggacgagcgcctggagcgcggcctggaacagcggcgccgcaagctgagccggcagttgagccggcgggagcgctgc

SEQ ID NO: 592889 - DNA, 80 bp, Artificial Sequence
  ENSG00000173442_40 (sequence is synthesized)
gtgctgagctgaggccgccggcccgggtggcccataacttctcgcgtccccggcgtccgccgccgccccgggcctgcgct

SEQ ID NO: 592890 - DNA, 120 bp, Artificial Sequence
  ENSG00000173442_41 (sequence is synthesized)
ctaggggccgccggcgcccttccccgtacagggcagggcggatccccgaccccacgggcggggcggccgccgtatttatttgtcaccgagggtgtgtgcgcgctcgcggcgggtgcgggg

SEQ ID NO: 592891 - DNA, 120 bp, Artificial Sequence
  ENSG00000173442_42 (sequence is synthesized)
tcctccccgacggcacggccgggccggcggcctcggggagagggatgcctgggcactaccgccccgcgctggcttgccctcctgttctccagagcaataaagttggacgagactacccca

SEQ ID NO: 592892 - DNA, 120 bp, Artificial Sequence
  ENSG00000173442_43 (sequence is synthesized)
gcccagcaaagggctggacatggcagccagataagctggtggtggtatggacccgtcggaaccgacgcatctgctccaaggcccacagctggcagccgggcatccagaacccataccggg

SEQ ID NO: 592893 - DNA, 120 bp, Artificial Sequence
  ENSG00000173442_44 (sequence is synthesized)
gtggaatgggatcgggtggggtggggggctcagcttgaaggagccccctcatcccctcctctctcaggatgccctggctctcttaccccatcttccctgggccgcatggagctggacacc

SEQ ID NO: 592894 - DNA, 120 bp, Artificial Sequence
  ENSG00000173442_45 (sequence is synthesized)
tctaagctgattttctgggctgactttgaggtgtggctgctggtgacctctgatcttgtctgggggccactgaccttttaggtgaccttggcagataaccctggatctagaaaccctttt

SEQ ID NO: 592895 - DNA, 120 bp, Artificial Sequence
  ENSG00000173442_46 (sequence is synthesized)
acctggccccaaggctctagccagtggtctctggtgacccctgcaagctcagagatggggctgttgtgtgccaggcatgagcttccccaagaggcagagggcatacatcccatttataca

SEQ ID NO: 592896 - DNA, 120 bp, Artificial Sequence
  ENSG00000173442_47 (sequence is synthesized)
ggacccagcctctgaccagcacactctctgcagtgactatgcctcgctagacccactcaacatcaagcagaacaacaagcaggtgagatggggtgggggactgcctggagggaaggaggg

SEQ ID NO: 592897 - DNA, 120 bp, Artificial Sequence
  ENSG00000173442_48 (sequence is synthesized)
tctggagagccaggctctcagtgtcagatttggagaaagtggactgccgggcccagcagtggcttctggaagttctgccactttttacccctttggtcattaaattgtttgttttcctta

SEQ ID NO: 592898 - DNA, 120 bp, Artificial Sequence
  ENSG00000173442_49 (sequence is synthesized)
ccgagatcgtgccactgcactccagcctttacagtaaggaaaacagaagcccagagagatctgatctggttcccatgtggggtccgaagccactctgcggccattgcctttgtcatcctg

SEQ ID NO: 592899 - DNA, 120 bp, Artificial Sequence
  ENSG00000173442_50 (sequence is synthesized)
ccattgcctttgtcatcctgcagggtggagacagctttgcctcccttttgcgtttgggatttttcagaataactgtagccagtgcttcctgtttatgagtactgttcatccaaataatcc

SEQ ID NO: 592900 - DNA, 120 bp, Artificial Sequence
  ENSG00000173442_51 (sequence is synthesized)
cgataatgtggtctggagactagaggatagctctgcggtcagccctgccctcgggaactgctggggaggtgggatggggtcagggagtggccagagccctgggcactctctccctacgcc

SEQ ID NO: 592901 - DNA, 120 bp, Artificial Sequence
  ENSG00000173442_52 (sequence is synthesized)
agctgaagacgctttgtgaggaggaggaggaaggccaaggacgaccccagcaggcagttgccagcccttctaatgctgaggataccagcccagcccctgcaccacctgccctggtcagct

SEQ ID NO: 592902 - DNA, 120 bp, Artificial Sequence
  ENSG00000173442_53 (sequence is synthesized)
agcaggacttggagcgaaggttcgagctgctgagccgcgagctgcgggccatgctggccatcgaaggtgggacatgggctcaggggccgggaggcaagacagagccagggtggaggcggc

SEQ ID NO: 592903 - DNA, 120 bp, Artificial Sequence
  ENSG00000173451_0 (sequence is synthesized)
agtcggccatattaataaagagaaagggaaggctgaccgtccttcgcctccgcccccacatacacaccccttcttcccactccgctctcacgactaagctctcacgattaaggcacgcct

SEQ ID NO: 592904 - DNA, 120 bp, Artificial Sequence
  ENSG00000173451_1 (sequence is synthesized)
gcctcgattgtccagcctctgccagaagaaagcttagcagccagcgcctcagtagagacctaagggcgctgaatgagtgggaaagggaaatgccgaccaattgcgctgcggcgggctgtg

SEQ ID NO: 592905 - DNA, 120 bp, Artificial Sequence
  ENSG00000173451_2 (sequence is synthesized)
ccactacctacaacaagcacattaacatcagcttccacaggtttcctttggatcctaaaagaagaaaagaatgggttcgcctggttaggcgcaaaaattttgtgccaggaaaacacactt

SEQ ID NO: 592906 - DNA, 120 bp, Artificial Sequence
  ENSG00000173451_3 (sequence is synthesized)
ttctttgttcaaagcactttgaagcctcctgttttgacctaacaggacaaactcgacgacttaaaatggatgctgttccaaccatttttgatttttgtacccatataaagtctatgaaac

SEQ ID NO: 592907 - DNA, 120 bp, Artificial Sequence
  ENSG00000173451_4 (sequence is synthesized)
tcaagtcaaggaatcttttgaagaaaaacaacagttgttctccagctggaccatctaatttaaaatcaaacattagtagtcagcaagtactacttgaacacagctatgcctttaggaatc

SEQ ID NO: 592908 - DNA, 120 bp, Artificial Sequence
  ENSG00000173451_5 (sequence is synthesized)
ctatggaggcaaaaaagaggatcattaaactggaaaaagaaatagcaagcttaagaagaaaaatgaaaacttgcctacaaaaggaacgcagagcaactcgaagatggatcaaagccacgt

SEQ ID NO: 592909 - DNA, 120 bp, Artificial Sequence
  ENSG00000173451_6 (sequence is synthesized)
gtttggtaaagaatttagaagcaaatagtgtattacctaaaggtacatcagaacacatgttaccaactgccttaagcagtcttcctttggaagattttaagatccttgaacaagatcaac

SEQ ID NO: 592910 - DNA, 120 bp, Artificial Sequence
  ENSG00000173451_7 (sequence is synthesized)
aagataaaacactgctaagtctaaatctaaaacagaccaagagtaccttcatttaaatttagcttgcacagagcttgatgcctatccttcattcttttcagaagtaaagataattatggc

SEQ ID NO: 592911 - DNA, 120 bp, Artificial Sequence
  ENSG00000173451_8 (sequence is synthesized)
acttatgccaaaattcattatttaataaagttttacttgaagtaacattactgaatttgtgaagacttgattacaaaagaataaaaaacttcatatggaaattttatttgaaaatgagtg

SEQ ID NO: 592912 - DNA, 120 bp, Artificial Sequence
  ENSG00000173451_9 (sequence is synthesized)
gaagtgccttacattagaattacggacttaaaaattttgctaataaattgtgtgtttgaaaggtgttttttgtttttgtctttttaaactactgttaaaagaacagcttatgataagtaa

SEQ ID NO: 592913 - DNA, 120 bp, Artificial Sequence
  ENSG00000173451_10 (sequence is synthesized)
tatgtttaacttagagaagaattttttcctgtaccaaagttggcatattgcattctaaataagatgctaaataagagttaaccaacattcaacatgaccttaaaactgctgggttttgta

SEQ ID NO: 592914 - DNA, 120 bp, Artificial Sequence
  ENSG00000173451_11 (sequence is synthesized)
ttaattaaattataattggcactgtgatttgaaaaatttatagaaaaaaaggtacagggcaagtttttaaattaaaactttctatattttgttttaccagtaaaagtgagcttatcatgg

SEQ ID NO: 592915 - DNA, 120 bp, Artificial Sequence
  ENSG00000173451_12 (sequence is synthesized)
cctctctcataagaatgattttaaaataggttgtaaaatattttgaaaatatttgaatgtgaagtaccattgagtcatccaaactaggtaaggcctcaagtactttaaactagtaaaatc

SEQ ID NO: 592916 - DNA, 120 bp, Artificial Sequence
  ENSG00000173451_13 (sequence is synthesized)
tagtagctgataatattcacctaagtaagtgttgtaaaataattcagagttcaggacctagcttagataaatgtatactactctttttctcataataaaaatcttacatttccaacttca

SEQ ID NO: 592917 - DNA, 120 bp, Artificial Sequence
  ENSG00000173451_14 (sequence is synthesized)
aaattggtgcttccatatttgttgataaccaaaactcctaaggttttttgttttctttttaactactttccaaatgcatactatacctcagaaatagtgtatcaatatagtgggcttttt

SEQ ID NO: 592918 - DNA, 120 bp, Artificial Sequence
  ENSG00000173451_15 (sequence is synthesized)
ttttcctcttcataaacccacagtaaaatttaatcacaggaaactacttatatcttcacactttgtattgataacttaaaatggcatcagtttatcttagacatcagcttgctttttatc

SEQ ID NO: 592919 - DNA, 120 bp, Artificial Sequence
  ENSG00000173451_16 (sequence is synthesized)
tccttttttagtgagtgaaatagagcaactagcatgcctgtgttcccagctacttgggaggctaaggtgggaagatcaattgaacctaggaggttgaggctatagtgagctgtgattgca

SEQ ID NO: 592920 - DNA, 120 bp, Artificial Sequence
  ENSG00000173451_17 (sequence is synthesized)
ctccagcctgggcaatggagtgagactcctgtctctaaaacagcaacaacaaaaataaagcaaccatagtgcataagggaaattaaatgttccctatagaaatatgtgtatgtctgtgat

SEQ ID NO: 592921 - DNA, 120 bp, Artificial Sequence
  ENSG00000173451_18 (sequence is synthesized)
ataggaaccctttgcttcaaacagctttgttgaaatcatgtaaaaatttgttaatagagaatcaagttatttaactcaacttatttaattcaagcttgtgatactaacatacaaaggtag

SEQ ID NO: 592922 - DNA, 120 bp, Artificial Sequence
  ENSG00000173451_19 (sequence is synthesized)
cataaaccaagtcataaattgctgtaatctttcctgtaaagtaatagctacttcatgatttttttaaaaatttcatttttttgctatttaggattgcatttgcttggctcctagtaacaa

SEQ ID NO: 592923 - DNA, 120 bp, Artificial Sequence
  ENSG00000173451_20 (sequence is synthesized)
ttcttttacagtattagcactctctttactaaggaatgcctcccaaggaaatgcaaaggtaggaaaagtctcttagaatgcccatgaggtatttaaaacagatatttatgaaaatctttt

SEQ ID NO: 592924 - DNA, 120 bp, Artificial Sequence
  ENSG00000173451_21 (sequence is synthesized)
tgtgaatgttataaatcttgctagttattttatctttatcttaagtattagatgtagttccttggaattgtcattacatatttatttttttctagtatggtttcaaataactttttgcca

SEQ ID NO: 592925 - DNA, 120 bp, Artificial Sequence
  ENSG00000173451_22 (sequence is synthesized)
acatataatcatcatcaaacattcactgaccatatctattttataactcaaaataagttggacaaataatcattttaataaaaactattttttccaagtataaccactgtcatgtggttc

SEQ ID NO: 592926 - DNA, 120 bp, Artificial Sequence
  ENSG00000173451_23 (sequence is synthesized)
acccttcaccccagatacaaaacacttatttgtgtagcccagttcccatctacagtaataccttgaaaccttaataaattttaaaaatcataaaaataaaatattgtaaaatacaacaaa

SEQ ID NO: 592927 - DNA, 120 bp, Artificial Sequence
  ENSG00000173451_24 (sequence is synthesized)
ttttggacaaggttacttcatcttcattcattattacctgacagtattaaactactactcaataattttagagtaaacttttctgtgttttctccgtgattttcattgtgctgtcctgac

SEQ ID NO: 592928 - DNA, 120 bp, Artificial Sequence
  ENSG00000173451_25 (sequence is synthesized)
aacatgctccaaactctttgcatcaaattgttttattaacatacatttgtctaccttaaaactagctttattcacagagaaaaacctaaaaggagtctattaaaatgctgctttcagttt

SEQ ID NO: 592929 - DNA, 120 bp, Artificial Sequence
  ENSG00000173451_26 (sequence is synthesized)
gatagttttttttttaatcactctgaccataaactaactgaaattataatggattttttttcctctcccggtcacaacacagatcttctgttcatttgttctctgtctactgggcaccaa

SEQ ID NO: 592930 - DNA, 120 bp, Artificial Sequence
  ENSG00000173451_27 (sequence is synthesized)
cctctacaaagaaccagccaaaggctaggtacttgatataaaaaggaatattacattattttctgccctcaagttgctctatctcctgaaagaaacaagtaatatttataatacaatatg

SEQ ID NO: 592931 - DNA, 120 bp, Artificial Sequence
  ENSG00000173451_28 (sequence is synthesized)
ataaatgctacaaaagaaatagctgtaaagtcctttggtaaatgctgttgaattggaattcagtaagaactataaactgtagacctttttataatcaaatgcttttgtcttgaaacaaaa

SEQ ID NO: 592932 - DNA, 120 bp, Artificial Sequence
  ENSG00000173451_29 (sequence is synthesized)
cagattcctccttatattgacttagcaaaggaggtacaaggacattggcatttgacctgaattatggtgttttattgaatgagctataagacaacatttttaccctttaaaatgaacact

SEQ ID NO: 592933 - DNA, 120 bp, Artificial Sequence
  ENSG00000173451_30 (sequence is synthesized)
gaacaaatgtgttaatggtatctttgttaaaaggaaaacatagctataaataaaatactacatcgaaatccagcactggagttcatttgaaatttgatattttgtgtaaaataacaaacc

SEQ ID NO: 592934 - DNA, 120 bp, Artificial Sequence
  ENSG00000173451_31 (sequence is synthesized)
tattaacacagatttttaaaataactcagaatcgtataaagcactttggtacttatttgttctcttttcccttacattctgtgtggtaggtggtattatctctgatttacacatgaagac

SEQ ID NO: 592935 - DNA, 120 bp, Artificial Sequence
  ENSG00000173451_32 (sequence is synthesized)
atccttgttaatgcaatttatttattcattcgggcatttactgtgtgccaacttgcaaaaggaatagaaatgtctgtgatctagatagttctagattgaacatagattttctgccaacaa

SEQ ID NO: 592936 - DNA, 120 bp, Artificial Sequence
  ENSG00000173451_33 (sequence is synthesized)
atcctctctgctgttcacattatcctttgtttaacgtatgaaccaggttactaaaataggataaatcatgtgtcttaaaatatgaaaatagtaaagtctttgaggtcacttgatcttctc

SEQ ID NO: 592937 - DNA, 120 bp, Artificial Sequence
  ENSG00000173451_34 (sequence is synthesized)
taagtagactttataatattgtgttttatctcatttctcaatattagaatacgggtagattttaattttgctataatataggaaatggttcatctttgtaccaaaatattgcattcttct

SEQ ID NO: 592938 - DNA, 120 bp, Artificial Sequence
  ENSG00000173451_35 (sequence is synthesized)
gatatttagacagttggaaactttctaaaattgaggattttgtagtgtatactaaataattgcatattcaaaaaaatgtattctgagtatggtgatattaaacatttttccccaaggaaa

SEQ ID NO: 592939 - DNA, 120 bp, Artificial Sequence
  ENSG00000173451_36 (sequence is synthesized)
tactaccaagtctagtttcaagctatcaatatgacatcactgattatggagttggaaagagatgtgcagtttcacactattttagtatttccaccatacagatacaacagacaaccttaa

SEQ ID NO: 592940 - DNA, 120 bp, Artificial Sequence
  ENSG00000173451_37 (sequence is synthesized)
attcagagacctaacttagtcttggaaagtcaaagaacactttttcaaaggatgtgacatttcaaatgagaccaaaggatgacagattgggtcctgtgtgctacttaagtttcctttgga

SEQ ID NO: 592941 - DNA, 120 bp, Artificial Sequence
  ENSG00000173451_38 (sequence is synthesized)
taagggcgctgaatgagtgggaaagggaaatgccgaccaattgcgctgcggcgggctgtgccactacctacaacaagcacattaacatcagcttccacagaccgggccttgacatgaatg

SEQ ID NO: 592942 - DNA, 120 bp, Artificial Sequence
  ENSG00000173451_39 (sequence is synthesized)
acgccgtaagggagaaagagatcttcccaatcagcaatcaccgtaaaagcctgctgtgttcccgttaaaattaggaaattctcactagatgaattgacatgggaggcatttagatttcta

SEQ ID NO: 592943 - DNA, 120 bp, Artificial Sequence
  ENSG00000173451_40 (sequence is synthesized)
agtgcaaaagataacctttctgttcttactagaatagagtaataaaaagaacctaggttttcttttgtttgctggaagaaaaatcaaaattctttagttctgtcaaaccagaactcttga

SEQ ID NO: 592944 - DNA, 120 bp, Artificial Sequence
  ENSG00000173451_41 (sequence is synthesized)
aagcactttgaacaatgcctggaaaataacaggtactctgtaaatgtttaccttctctgcaagtgcctgccacgtgcccgaagaaaagacacattaaaaagttaagtgacaccagtcctg

SEQ ID NO: 592945 - DNA, 120 bp, Artificial Sequence
  ENSG00000173451_42 (sequence is synthesized)
attttatatattttatatacctaacaacgtatatgttagtatgtagaaattatatccttgacctttttccctacctattacgaactgtacttttattaaaagctgccacttaaaaaaaat

SEQ ID NO: 592946 - DNA, 120 bp, Artificial Sequence
  ENSG00000173452_0 (sequence is synthesized)
gaggaagaggacgacgacgagggagaagaaacccagacggaaagaggccatcagacaaggtcgctttttctggcgacaaagcaactgcaaggagcgtggtgctgaatatcatccgcccgc

SEQ ID NO: 592947 - DNA, 120 bp, Artificial Sequence
  ENSG00000173452_1 (sequence is synthesized)
tctgcctggggacccagagacttgcagaagcacttcgcattgccacgaaaacaaaggagaggtgacgaacgggagagggagagagaaactcggagcggttccctttggatctccgggaag

SEQ ID NO: 592948 - DNA, 120 bp, Artificial Sequence
  ENSG00000173452_2 (sequence is synthesized)
caaagctcctctcctcggcaataaaacagaagggaccctgtgaaagggtctagtaggctgaggagggcgcgggtttccctgcggagatttgggacgcggcagaactctggacagcgcctg

SEQ ID NO: 592949 - DNA, 120 bp, Artificial Sequence
  ENSG00000173452_3 (sequence is synthesized)
gggagcaaggctcggagctccctgggctcctccaggttttccgctgcttaaaagccccggtaccggtgtgcaatcttcgcaccaccgaacccaggaagatccttctacgatccctatctg

SEQ ID NO: 592950 - DNA, 120 bp, Artificial Sequence
  ENSG00000173452_4 (sequence is synthesized)
aacgtgccagggggtggagcagctcctttgcctctggcccagccagggaaggtcttcgtttctggaaatccagcccttgtggataatgcctcgctcttgaagaaagaaaagttttgggat

SEQ ID NO: 592951 - DNA, 120 bp, Artificial Sequence
  ENSG00000173452_5 (sequence is synthesized)
ctggtagggggtggaaggggtaaggaggatagtggaagaaaaaaaggtagatggttgatttccctctctgatctggaaggaagatgaccgaggaaggatgtgcaccagcggtcagattat

SEQ ID NO: 592952 - DNA, 120 bp, Artificial Sequence
  ENSG00000173452_6 (sequence is synthesized)
tgggagcctcttggtgctctccgtgctggagatagggctgggggtgtccagcgtggccgtgggggcggtcagcttcagcctggccctccgagagcacaagccgcagctcggagactcgtc

SEQ ID NO: 592953 - DNA, 120 bp, Artificial Sequence
  ENSG00000173452_7 (sequence is synthesized)
cccgtttcttctttgtggcatttgtggaatattgtgtgccaaaaaaaaatcaggacttgtcatgatcctcttttcagcctgctgtatctgtggacttattgggggcatcctgaattttca

SEQ ID NO: 592954 - DNA, 120 bp, Artificial Sequence
  ENSG00000173452_8 (sequence is synthesized)
gttcctccgggcagtcacaaagaaaacttcctccctatacccactgcaccttgcctccatgtctctcgcgtgcattgggatcgggggctgcactctctcttcctggctcacttgtcgact

SEQ ID NO: 592955 - DNA, 120 bp, Artificial Sequence
  ENSG00000173452_9 (sequence is synthesized)
agccagttatgaacagaggaggatgttctcagaaagggagcattccctgcatcactctcatgaaatggctgagaaagaaataacagacaacatgagcaatggaggaccacagctgatatt

SEQ ID NO: 592956 - DNA, 120 bp, Artificial Sequence
  ENSG00000173452_10 (sequence is synthesized)
taatggaagagtgtaatcaatgttttaaagaattgaacactttttaggattttcatgaggcaatgagacaccaaaggactagaaaataaaacagtttttgcatttgcatttatctctcct

SEQ ID NO: 592957 - DNA, 120 bp, Artificial Sequence
  ENSG00000173452_11 (sequence is synthesized)
gagcatccactaaaattattcttcctaaaaaatatattgcctcactggtttctccacccttttttatggggtaaaaaactttccagaaacattctagtacaataatttcaagaggctttc

SEQ ID NO: 592958 - DNA, 120 bp, Artificial Sequence
  ENSG00000173452_12 (sequence is synthesized)
cagattgttctaaagaagacttttcaggaaaaagagataataaaacagaaataaaatgcatattctatacaaacactatttgactagcatgattattatatttgtaatgacatatttcat

SEQ ID NO: 592959 - DNA, 120 bp, Artificial Sequence
  ENSG00000173452_13 (sequence is synthesized)
atgagtaattgaaaagtgcaaatatcaagaaataaaaataacttattgacgtctttgttctgaaagacagatggcttcaaggatgctacaattcaaaacctcagtaatgccttgttataa

SEQ ID NO: 592960 - DNA, 120 bp, Artificial Sequence
  ENSG00000173452_14 (sequence is synthesized)
aaacattgtaattattttcaacttgtgaatgaaatatatttcataatttatttgtaaatgacaaaaaacctcaagcataaaaaagagactttttagagagagagaatactaatctatatg

SEQ ID NO: 592961 - DNA, 120 bp, Artificial Sequence
  ENSG00000173452_15 (sequence is synthesized)
gtatttttgcatttttgcacaaagagtgaaaagttatatgtgaatatcatttaagaaaataaacatgttttgatcatactgtgcagattgatctgcatgttcatgaatgagcctaagaat

SEQ ID NO: 592962 - DNA, 120 bp, Artificial Sequence
  ENSG00000173452_16 (sequence is synthesized)
atgtgtgtatacatactgtaaatatagaacatgtatacagcatatattatagcatacatgaatgtaaataggtattagaaaagaaattgtgatgctgtgggggtattattaagattctac

SEQ ID NO: 592963 - DNA, 120 bp, Artificial Sequence
  ENSG00000173452_17 (sequence is synthesized)
tccaatagaaatgggaaggcaattgctcaaggcccttctatgcccacaaaatcacatgtttaatttctactaaaattgcccatttttcttcttttaattaggttttgtgtaaatatcatt

SEQ ID NO: 592964 - DNA, 120 bp, Artificial Sequence
  ENSG00000173452_18 (sequence is synthesized)
cattgtgggtgatatttatgaagatgagtgatctgaatagtgtagtatacagatagactacttatttgactatttcactatgattatagtatttatgtatagcaattaaaattaatttat

SEQ ID NO: 592965 - DNA, 120 bp, Artificial Sequence
  ENSG00000173452_19 (sequence is synthesized)
gaacatgactttaatgacatacttccgtatttataaagatatcatgacttaaaattattgatgatattgatatttcaaacaccttgcagtccagttaaatgatacaaaagggcagatgat

SEQ ID NO: 592966 - DNA, 120 bp, Artificial Sequence
  ENSG00000173452_20 (sequence is synthesized)
gtaaccccccaacaatgaagttataattacctttgctgtaatctaatttaggtgttttgttttacgattctcatgaaataatataggcagtccatatataagaaagcctatatccaaaga

SEQ ID NO: 592967 - DNA, 120 bp, Artificial Sequence
  ENSG00000173452_21 (sequence is synthesized)
tcctgaaagaattctttgaggaaaaagtgaaaagataggctaacatttgtatagctagattcaatcctttcctctaataatggaatgttaaaatagcaaacaagaacaacacatataagt

SEQ ID NO: 592968 - DNA, 120 bp, Artificial Sequence
  ENSG00000173452_22 (sequence is synthesized)
gaaaaaacaacatatatctgaatatatttatcagaatataacctctggcaacagacaaagaaatctatcatttttaaatacataactctcactatattgtatacttttctttttcctcaa

SEQ ID NO: 592969 - DNA, 120 bp, Artificial Sequence
  ENSG00000173452_23 (sequence is synthesized)
atctaatcaattttcaagtcattttttatgagttacttgttgaaccataggtaaattaaaatatttactgttcagtatgagaatataatttataaacaaaacatgagttttaattgtgct

SEQ ID NO: 592970 - DNA, 120 bp, Artificial Sequence
  ENSG00000173452_24 (sequence is synthesized)
aacacagtaatgatcattcaagttaatgaaaatttgaaggtcttttatagcaacatgatcatcgtttaacctatttaaatcagctcacttaaaattctggctgtcatctattcaacagaa

SEQ ID NO: 592971 - DNA, 120 bp, Artificial Sequence
  ENSG00000173452_25 (sequence is synthesized)
ataactggactctgcttgtttggtgcactttttgaagtctcccaattcctttggataacttcattgcctagtagattacagaagttgtccataaatgcaacctcatatagtgaatcaaca

SEQ ID NO: 592972 - DNA, 120 bp, Artificial Sequence
  ENSG00000173452_26 (sequence is synthesized)
tcataactattcattcaatgccacaaacaggcatgatctttgccaatgaaaatctaaattacatcatgaagatatttgtgtgtgtatggtcctcctgaattcatgcaaggatgtagtttt

SEQ ID NO: 592973 - DNA, 120 bp, Artificial Sequence
  ENSG00000173452_27 (sequence is synthesized)
gtactgaaagaataaacactgactctaattttcagtagcatttctctataaacatgcttgttcaatacaaaattataatacatcagaaaaatgttgtaatgccttttgaactgatctata

SEQ ID NO: 592974 - DNA, 120 bp, Artificial Sequence
  ENSG00000173452_28 (sequence is synthesized)
acataacacattaaaggacaaaaggagacatatcactgctttgatgtatagttaaaaagagatgccatcatcacaattattcaaatagtttacagtgtatgtttaaccaagtatagatat

SEQ ID NO: 592975 - DNA, 120 bp, Artificial Sequence
  ENSG00000173452_29 (sequence is synthesized)
atttttaaatatgattatttctacctagtattttcagaattgagtttagaatgatttacttgggatgtgcggcgattcttttttagataagtgggggatgttaggaagacattgttcaag

SEQ ID NO: 592976 - DNA, 120 bp, Artificial Sequence
  ENSG00000173452_30 (sequence is synthesized)
tgcttgaaactttaatttggacaatacattgaaccacatgctggaatgttttaagtgactaccttatagttttagtatgagcctacccttggaagaaagtaaggtgatactaaattagaa

SEQ ID NO: 592977 - DNA, 120 bp, Artificial Sequence
  ENSG00000173452_31 (sequence is synthesized)
aaactatgtgaaactggagtggtggtatactttggaccatatcaaataggtagagtattataagcataaaagaataaaattgggctcgctttggaaattttaaacatatatgtgtatgtg

SEQ ID NO: 592978 - DNA, 120 bp, Artificial Sequence
  ENSG00000173452_32 (sequence is synthesized)
tgtatatatatgcatatacatacacatatgtgtatatacacacacacaatggtttggaagtggaacaggaaatgataactctactgacatgtctataataaaatgatgtgctttgaaact

SEQ ID NO: 592979 - DNA, 120 bp, Artificial Sequence
  ENSG00000173456_0 (sequence is synthesized)
acacaagatggcggcgcccagcggagtaggggctgcgcttggggtttgctgaagctggctgcctctcccactccccttttgggtgcaaagcgccgctagcgggaagacgggggccgggcg

SEQ ID NO: 592980 - DNA, 120 bp, Artificial Sequence
  ENSG00000173456_1 (sequence is synthesized)
gggacaggggcacctgcgtagctggactgagagcctgcgcccagcttacatcgaccccacccggccccggcccgacccgacgcgacccgatccgatccgatcccattccatccgttcctc

SEQ ID NO: 592981 - DNA, 120 bp, Artificial Sequence
  ENSG00000173456_2 (sequence is synthesized)
gtctcctcccggtctgacccgttgcccggccgtggttcgccacaccaggcatccaaagctgaggtcgctcctacggcctgggctcgccttcgctttagagatgtttggcctcttccctcc

SEQ ID NO: 592982 - DNA, 120 bp, Artificial Sequence
  ENSG00000173456_3 (sequence is synthesized)
caaacagcccatcttcaaaacctggactcttggactggcacctggccacctttccctctaccaagactccacttccgtcttacccacttcttcctcagattcttggtaccccctgggttg

SEQ ID NO: 592983 - DNA, 120 bp, Artificial Sequence
  ENSG00000173456_4 (sequence is synthesized)
gagactgctcattttccttccaaattaatcccagaccccctaaaatattgacaaccttgacaaccccccaaccgaggagccagactttgttttggactaacttccatagccctatcatgg

SEQ ID NO: 592984 - DNA, 120 bp, Artificial Sequence
  ENSG00000173456_5 (sequence is synthesized)
aggcagtgtacctggtagtgaatgggttgggcctggtgctggacgtgctgaccttggtgttggacctcaacttcctgctggtgtcctccctcctggcttccctggcctggctcctggcct

SEQ ID NO: 592985 - DNA, 120 bp, Artificial Sequence
  ENSG00000173456_6 (sequence is synthesized)
tcgtctacaacctgccgcacacggtactgactagtcttctgcacttgggccgcggagtcttgctttcattgctggccttgatcgaagccgtggtccggttcacatgtgggggcttgcagg

SEQ ID NO: 592986 - DNA, 120 bp, Artificial Sequence
  ENSG00000173456_7 (sequence is synthesized)
ccttgtgtactctgctgtatagctgctgctctggcctagagagcctaaagctcctggggcacctggcctctcatggggcactgcggagcagggagatactgcaccggggcgtcctcaatg

SEQ ID NO: 592987 - DNA, 120 bp, Artificial Sequence
  ENSG00000173456_8 (sequence is synthesized)
tggtctccagtggccatgctttgctgcgccaggcctgtgacatctgtgccattgccatgagcctggtggcttatgtgatcaacagcctggtcaacatctgcctcatcggcactcagaacc

SEQ ID NO: 592988 - DNA, 120 bp, Artificial Sequence
  ENSG00000173456_9 (sequence is synthesized)
tcttttccctggtgctggccctgtgggatgcagtgaccgggcctctgtggaggatgacggacgtagtggctgccttcctagcccacatttccagcagtgctgtggccatggccatcctcc

SEQ ID NO: 592989 - DNA, 120 bp, Artificial Sequence
  ENSG00000173456_10 (sequence is synthesized)
tttggacaccctgccaactagccctggagctgctggcctcagctgcccgcctcctggccagctttgtgcttgtcaatctcactggcttggtgttgctagcttgtgtgctggcagtgacgg

SEQ ID NO: 592990 - DNA, 120 bp, Artificial Sequence
  ENSG00000173456_11 (sequence is synthesized)
accctgaggctggctacccaggcactcagccagctccatgcccggccatcctaccaccgtcttcgagaggatgtcatgcggctctctcgcctagcactgggctcagaggcctggcgccga

SEQ ID NO: 592991 - DNA, 120 bp, Artificial Sequence
  ENSG00000173456_12 (sequence is synthesized)
gtctggagccgcagtctgcagctggcgagttggccaaaccggggaggggcacctggagctccccagggtgaccctatgagggtattctcagttaggacccggagacaggacactcttcct

SEQ ID NO: 592992 - DNA, 120 bp, Artificial Sequence
  ENSG00000173456_13 (sequence is synthesized)
gaagcggggcgcagatcagaggcagaagaggaggaggccaggaccatcagagtgacacctgtcaggggccgagagaggctcaatgaggaggagcctccaggtgggcaagacccttggaaa

SEQ ID NO: 592993 - DNA, 120 bp, Artificial Sequence
  ENSG00000173456_14 (sequence is synthesized)
ttgctgaaggagcaagaggagcggaagaagtgtgtcatctgccaggaccagagcaagacagtgttgctcctgccctgccggcatctgtgcctgtgccaggcctgcactgaaatcctgatg

SEQ ID NO: 592994 - DNA, 120 bp, Artificial Sequence
  ENSG00000173456_15 (sequence is synthesized)
cgccaccccgtctaccaccgcaattgcccgctctgccgccggggcatcctgcagaccctcaatgtctacctctgaagcctccttccctgcctgcccacccctccatgctccacgcaggca

SEQ ID NO: 592995 - DNA, 120 bp, Artificial Sequence
  ENSG00000173456_16 (sequence is synthesized)
ctcacgctaggacagcattaacacctcatctccgggtcctggtctgaatcccctcctacccctgtggccatcctgccatacatccaggacattgagttggaagactatgatctgggtggg

SEQ ID NO: 592996 - DNA, 120 bp, Artificial Sequence
  ENSG00000173456_17 (sequence is synthesized)
ggcaggataacatggcttctctttacccagtgggtcccttcgatgctgagggtggtgagtatgtcactatgcaagggccctgagactatttgctgtgggctctcctccagcctgcccagg

SEQ ID NO: 592997 - DNA, 120 bp, Artificial Sequence
  ENSG00000173456_18 (sequence is synthesized)
gcccacccagatgcctctggggttacccctgtctgcttctggtttttctgttggagatctataggtccttttcctgcctccttcacatttcctccccagcttttgcggccacaacacatc

SEQ ID NO: 592998 - DNA, 120 bp, Artificial Sequence
  ENSG00000173456_19 (sequence is synthesized)
agtgtcatttgggtgttttggcaactcaggggccttcggatgatcttaaacctttgtgttcagccagagcccctgtgccctggtaggcgttggggttagtatctctcgggtgccctcaga

SEQ ID NO: 592999 - DNA, 120 bp, Artificial Sequence
  ENSG00000173456_20 (sequence is synthesized)
gccacctctgcctgtgatcgtctgatgaggctccctcccaacctgatccaaaagccagtctcaggagtttacccctgggatgggggatgcatctgcacctgactttggggccacgtgccc

SEQ ID NO: 593000 - DNA, 120 bp, Artificial Sequence
  ENSG00000173456_21 (sequence is synthesized)
tgtggcaccccagctcactgggagtctcaggagggataaccggatttctgctctttcccctgtcactcccacatcacacagaaaaatggcattcctctctgtctctccctggcatggaga

SEQ ID NO: 593001 - DNA, 120 bp, Artificial Sequence
  ENSG00000173456_22 (sequence is synthesized)
gggcagactgtgcacatttcactagggtccaaatacagaagggcccagggcccaggggcttgcagcttcgtgaggggtctctggcccagtttccaatgaataaagttctcttgacagctc

SEQ ID NO: 593002 - DNA, 80 bp, Artificial Sequence
  ENSG00000173457_0 (sequence is synthesized)
gagacagagaaagcgcttcggcggctgcagctcgggcggcggccgcgggggacaaagggcgggcggatcggcggggaggg

SEQ ID NO: 593003 - DNA, 80 bp, Artificial Sequence
  ENSG00000173457_1 (sequence is synthesized)
ccgcggagccgcgcggagcggagccggcgagctaacccgagccagccggcgggcgtcccggaggcggtggcgcagggagg

SEQ ID NO: 593004 - DNA, 80 bp, Artificial Sequence
  ENSG00000173457_2 (sequence is synthesized)
caccgcggggggcgcggcgttggcggccccggcccccgggccgggcagtggcggcccaggaccacgcgtctactttcaga

SEQ ID NO: 593005 - DNA, 120 bp, Artificial Sequence
  ENSG00000173457_3 (sequence is synthesized)
cagagcccccccggggccgcaggagagggcccgggcggggcggacgatgagggcccagtgaggcgccaagggaaggtcaccgtcaagtatgaccgcaaggagctacggaagcgcctcaac

SEQ ID NO: 593006 - DNA, 120 bp, Artificial Sequence
  ENSG00000173457_4 (sequence is synthesized)
gcgcctctacgactgccaggaagaggagatcccagaactggagattgacgtggatgagctcctggacatggagagtgacgatgcccgggctgccagggtcaaggagctgctggttgactg

SEQ ID NO: 593007 - DNA, 120 bp, Artificial Sequence
  ENSG00000173457_5 (sequence is synthesized)
ttacaaacccacagaggccttcatttctggcctgctggacaagatccggggcatgcagaagctgagcacaccccagaagaagtgacggtccccgacccaggagaacggtggctcccacag

SEQ ID NO: 593008 - DNA, 120 bp, Artificial Sequence
  ENSG00000173457_6 (sequence is synthesized)
gacaatcgctgccccccaacctcgtagcaacagcaataccgggggaccctgcggccaggcctggtgccatgagcagggctcctcgtgcccctggcccaggggtctcttcccctgccccct

SEQ ID NO: 593009 - DNA, 120 bp, Artificial Sequence
  ENSG00000173457_7 (sequence is synthesized)
cagttttccacttttggggttttttattgttattaaactgatgggactttttgtgtttttatattgactctgcggcgcgggccctttaataaagctaggatacgcctttggtgcagctaa

SEQ ID NO: 593010 - DNA, 120 bp, Artificial Sequence
  ENSG00000173457_8 (sequence is synthesized)
gggcttcctggggagggtgtggcagggtggtgggcatcccctccctcaccaaagcatgggctctttgtttcctctttgccaggcctgggtccttcccagtgacccctcagccttcacttc

SEQ ID NO: 593011 - DNA, 120 bp, Artificial Sequence
  ENSG00000173457_9 (sequence is synthesized)
ctcctcactcccggggagctgtgacaggtgtttgggggaggggaggggggtatgataagctgggacagctgcacccaccggtgctctggtgagatggggggcccggatgttggggagaca

SEQ ID NO: 593012 - DNA, 120 bp, Artificial Sequence
  ENSG00000173457_10 (sequence is synthesized)
catctgctgggttcccagcccaaggtccccaaccctggctgtctggccttgtctgtcaccccccgtgcccactggcagggacaggaagctcccccccccaccccgctttgggcagtttgc

SEQ ID NO: 593013 - DNA, 120 bp, Artificial Sequence
  ENSG00000173457_11 (sequence is synthesized)
ccccaggtcaagcctagtgtcctccagacgcctcaaggggtagcctgagccttgggcaagaggcaagggggctatcctgggctggcagcggcaggaggtctcaccgcctggtgcccgctg

SEQ ID NO: 593014 - DNA, 120 bp, Artificial Sequence
  ENSG00000173464_0 (sequence is synthesized)
gagcaggcatgggtgggtcacaggctttggagagcactctctgtcctgatcttttcagttgagagacttcagctgttcattgctcatttggacttagttcaagaattttgggtgtcacca

SEQ ID NO: 593015 - DNA, 120 bp, Artificial Sequence
  ENSG00000173464_1 (sequence is synthesized)
ggtaaacagagccctcagcatctgaatagaaactgaacaggaacagaagagattacactacatctgagatggagacctttcctctgctgctgctcagcctgggcctggttcttgcagaag

SEQ ID NO: 593016 - DNA, 120 bp, Artificial Sequence
  ENSG00000173464_2 (sequence is synthesized)
catcagaaagcacaatgaagataattaaagaagaatttacagacgaagagatgcaatatgacatggcaaaaagtggccaagaaaaacagaccattgagatattaatgaacccgatcctgt

SEQ ID NO: 593017 - DNA, 120 bp, Artificial Sequence
  ENSG00000173464_3 (sequence is synthesized)
gatgatatgtcttccacattactgacattcagaagtttacattataatgaccccaagggaaacagttcgggtaatgacaaagagtgttgcaatgacatgacagtctggagaaaagtttca

SEQ ID NO: 593018 - DNA, 120 bp, Artificial Sequence
  ENSG00000173464_4 (sequence is synthesized)
gaagcaaacggatcgtgcaagtggagcaataacttcatccgcagctccacagaagtgatgcgcagggtccacagggcccccagctgcaagtttgtacagaatcctggcataagctgctgt

SEQ ID NO: 593019 - DNA, 120 bp, Artificial Sequence
  ENSG00000173464_5 (sequence is synthesized)
gagagcctagaactggaaaatacagtgtgccagttcactacaggcaaacaattccccaggtgccaataccatagtgttacctcattagagaagatattgacagtgctgacaggtcattct

SEQ ID NO: 593020 - DNA, 120 bp, Artificial Sequence
  ENSG00000173464_6 (sequence is synthesized)
ctgatgagctggttagtttgtggctctaagttgtaaatcccacagagctttaggactagggtcttactaaagaaggacctcttcttgttcattcttgtttaaacctttccttaatatcta

SEQ ID NO: 593021 - DNA, 120 bp, Artificial Sequence
  ENSG00000173464_7 (sequence is synthesized)
caggaacagttagacacaacagcagaaactcccaggaaacaaacacgatttcacttttagctctgcaacaaagtggaatcttcctctacaggatcaacttgccgaaggaactgaagagat

SEQ ID NO: 593022 - DNA, 120 bp, Artificial Sequence
  ENSG00000173464_8 (sequence is synthesized)
ctagagactcatacagtgacctagagcaggcatgggtgggtcacaggctttggagagcactctctgtcctgatcttttcagttgagagacttcagctgttcattgctcatttggacttag

SEQ ID NO: 593023 - DNA, 120 bp, Artificial Sequence
  ENSG00000173464_9 (sequence is synthesized)
ttcaaggtcatgtcaaagaagaaggtgcacttacgctagttgttagctctgtcttttgtaaccatcaagttccatgcgattgatcagatttaggagggggcgttgggggataatcgtaag

SEQ ID NO: 593024 - DNA, 120 bp, Artificial Sequence
  ENSG00000173464_10 (sequence is synthesized)
ttctctctctatctctctctctgtgtggggggagggtggggagggtgtaaaacaaactgaatttcatcctagctcagctataaagccaagaaacagaatccacctaactaggcagaatta

SEQ ID NO: 593025 - DNA, 120 bp, Artificial Sequence
  ENSG00000173464_11 (sequence is synthesized)
agccccgtgccaggcaaggcgggtcaccgggcagcgtcggggccctcttctgcctcggggtctcttcacggagggcgccctgcggcgacagctttcgccggccgcgcgcacggcggtcgg

SEQ ID NO: 593026 - DNA, 120 bp, Artificial Sequence
  ENSG00000173464_12 (sequence is synthesized)
tacctgttaaggacgagatgccttccgaccaccggataactcgggacggtccctgatttgcctgctccctgtccaacagcatcttcggctcactcggaagtgaaaacatgcaatttcatg

SEQ ID NO: 593027 - DNA, 120 bp, Artificial Sequence
  ENSG00000173464_13 (sequence is synthesized)
ttataacatgcaatttcatgtcataaattattcccactgacgcctgaacatttttcctaaaagggatctgcagtcacaaggcgccgccttccggaatttagaagagattacactacatct

SEQ ID NO: 593028 - DNA, 120 bp, Artificial Sequence
  ENSG00000173464_14 (sequence is synthesized)
cacaggctttggagagcactctctgtcctgatcttttcagttgagagacttcagctgttcattgctcatttggacttagttcaaggtcatgtcaaagaagaagaattttgggtgtcacca

SEQ ID NO: 593029 - DNA, 120 bp, Artificial Sequence
  ENSG00000173465_0 (sequence is synthesized)
ggtgacaacggcaacatggccctgaacggagctgaagtcgacgacttctcctgggagcccccgactgaggcggagacgaaggtgctgcaggcgcgacgggagcggcaagatcgcatctcc

SEQ ID NO: 593030 - DNA, 120 bp, Artificial Sequence
  ENSG00000173465_1 (sequence is synthesized)
cggctcatgggcgactatctgctgcgcggttaccgcatgctgggcgagacgtgtgcggactgcgggacgatcctcctccaagacaaacagcggaaaatctactgcgtggcttgtcaggaa

SEQ ID NO: 593031 - DNA, 120 bp, Artificial Sequence
  ENSG00000173465_2 (sequence is synthesized)
ctcgactcagacgtggataaagataatcccgctctgaatgcccaggctgccctctcccaagctcgggagcaccagctggcctcagcctcagagctccccctgggctctcgacctgcgccc

SEQ ID NO: 593032 - DNA, 120 bp, Artificial Sequence
  ENSG00000173465_3 (sequence is synthesized)
tcaaggcagcccaggggccacctgctcctgctgtgcctccaaatacagatgtcatggcctgcacacagacagccctcttgcagaagctgacctgggcctctgctgaactgggctctagca

SEQ ID NO: 593033 - DNA, 120 bp, Artificial Sequence
  ENSG00000173465_4 (sequence is synthesized)
cctccctggagactagcatccagctgtgtggccttatccgcgcatgtgcggaggccctgcgcagcctgcagcagctacagcactaagagaagcccctgagaaaaaccctctagaaaaaca

SEQ ID NO: 593034 - DNA, 120 bp, Artificial Sequence
  ENSG00000173465_5 (sequence is synthesized)
gctgttcctctgtgtggtttgtttttttcctggttccaagtgtgcatgccagccccagctccactcacctttttccagcttttggcctcttcacctctccactctgctctccttgacgcc

SEQ ID NO: 593035 - DNA, 120 bp, Artificial Sequence
  ENSG00000173465_6 (sequence is synthesized)
cttcctgtgagcccggcggtgacaacggcaacatggccctgaacggagctggtgaggacctgggcggcaggggtttgtggctgtgaggtacgggaggcagcccactccggcaagaccccc

SEQ ID NO: 593036 - DNA, 80 bp, Artificial Sequence
  ENSG00000173465_7 (sequence is synthesized)
tgaggagctggggaaggaacaaagcgaggcctgcgggcggcggctgggctccggcggggccgcggggtgcggggcctgcg

SEQ ID NO: 593037 - DNA, 120 bp, Artificial Sequence
  ENSG00000173465_8 (sequence is synthesized)
cagaggcgccgggcggggcgggctgcgctttggccgggctcccaccgctgccgcgcggcctcagcggcctccttaatgcgagcgggggctcgtggcgggagctggagcgcgtctacagcc

SEQ ID NO: 593038 - DNA, 120 bp, Artificial Sequence
  ENSG00000173465_9 (sequence is synthesized)
ctccttaatgcgagcgggggctcgtggcgggagctggagcgcgtctacagccagcgcagccgcatccacgacgagctgagccgcgccgcccgcgccccggacgggccccgccacgccgcc

SEQ ID NO: 593039 - DNA, 120 bp, Artificial Sequence
  ENSG00000173465_10 (sequence is synthesized)
ccccggccctcccctctggaccccattgccggcgtctcattccggccccgtgtgctttttggtccgtagacgatcctcctccaagacaaacagcggaaaatctactgcgtggcttgtcag

SEQ ID NO: 593040 - DNA, 120 bp, Artificial Sequence
  ENSG00000173465_11 (sequence is synthesized)
tgccaagacctgagcttctgccaggacctgtcatcctccctccattcggacagctcctacccaccggatgcgggcctgtctgacgacgaggagcctcccgatgccagcctgcctcctgac

SEQ ID NO: 593041 - DNA, 120 bp, Artificial Sequence
  ENSG00000173465_12 (sequence is synthesized)
cccagacgcacaatgcccgtgaccagtggctgcaggatgccttccacatcagcctctgaagggctggggggcagggggcatgcacccatgcaaaaggctcagaaactccccctccggcaa

SEQ ID NO: 593042 - DNA, 120 bp, Artificial Sequence
  ENSG00000173465_13 (sequence is synthesized)
gccctcagacttcggagcctgcgccttcccccctaccgcctcacctcacaggagggccaggcatgtattcctcagaggcgaaactgccaaactctttctcctgtcttgggttggctggca

SEQ ID NO: 593043 - DNA, 120 bp, Artificial Sequence
  ENSG00000173465_14 (sequence is synthesized)
ctggggcgggcatctagggtacagcctctgctcatggcactgggcctccagttcttccacatgtgtgcacccccagcttggccaaccctcagccttgcggtggggcccgaagcatcttcc

SEQ ID NO: 593044 - DNA, 120 bp, Artificial Sequence
  ENSG00000173467_0 (sequence is synthesized)
atccagaatacatttccaacaagagcactggccaagtcagcttcttctgagagagtctctagaagacatgatgctacactcagctttgggtctctgcctcttactcgtcacagtttcttc

SEQ ID NO: 593045 - DNA, 120 bp, Artificial Sequence
  ENSG00000173467_1 (sequence is synthesized)
caaccttgccattgcaataaaaaaggaaaagaggcctcctcagacactctcaagaggatggggagatgacatcacttgggtacaaacttatgaagaaggtctcttttatgctcaaaaaag

SEQ ID NO: 593046 - DNA, 120 bp, Artificial Sequence
  ENSG00000173467_2 (sequence is synthesized)
taagaagccattaatggttattcatcacctggaggattgtcaatactctcaagcactaaagaaagtatttgcccaaaatgaagaaatacaagaaatggctcagaataagttcatcatgct

SEQ ID NO: 593047 - DNA, 120 bp, Artificial Sequence
  ENSG00000173467_3 (sequence is synthesized)
cactgataagaatttatcacctgatgggcaatatgtgcctagaatcatgtttgtagacccttctttaacagttagagctgacatagctggaagatactctaacagattgtacacatatga

SEQ ID NO: 593048 - DNA, 120 bp, Artificial Sequence
  ENSG00000173467_4 (sequence is synthesized)
gcctcgggatttacccctattgatagaaaacatgaagaaagcattaagacttattcagtcagagctataagagatgatggaaaaaagccttcacttcaaagaagtcaaatttcatgaaga

SEQ ID NO: 593049 - DNA, 120 bp, Artificial Sequence
  ENSG00000173467_5 (sequence is synthesized)
aaacctctggcacattgacaaatactaaatgtgcaagtatatagattttgtaatattactatttagtttttttaatgtgtttgcaatagtcttattaaaataaatgttttttaaatctga

SEQ ID NO: 593050 - DNA, 120 bp, Artificial Sequence
  ENSG00000173467_6 (sequence is synthesized)
gtaattagcatatgcatcacctgaaacatatcatttctttctggtgggaacactcaaaatcctctctactagctttttaaatatatacaataaactattgttaactgtatgtaccctata

SEQ ID NO: 593051 - DNA, 120 bp, Artificial Sequence
  ENSG00000173467_7 (sequence is synthesized)
gtgctgtagaatactactcaaacttattcctcctatctagctatatttttgcatctattaatcaacctctccttatccttccagctctgaaccctccccagcttctaataaccagagttc

SEQ ID NO: 593052 - DNA, 80 bp, Artificial Sequence
  ENSG00000173473_0 (sequence is synthesized)
agtggcggctacgcgcgcgggggtgcgcgcgggaacgaccgggaaacaccgcgagggccggggtgggccaggctgtgggg

SEQ ID NO: 593053 - DNA, 120 bp, Artificial Sequence
  ENSG00000173473_1 (sequence is synthesized)
gggccggggacagcggtaggcgccacgggctcggggattgcggcggcagccgcaggcctagctgtttatcgacggaaggatgggggcccggccaccaagttttgggagagcccggagacg

SEQ ID NO: 593054 - DNA, 120 bp, Artificial Sequence
  ENSG00000173473_2 (sequence is synthesized)
gtgtcccagctggattcggtgcgggtctggctgggcaagcactacaagaagtatgttcatgcggatgctcctaccaataaaacactggctgggctggtggtgcagcttcttcagttccag

SEQ ID NO: 593055 - DNA, 120 bp, Artificial Sequence
  ENSG00000173473_3 (sequence is synthesized)
gaagatgcctttgggaagcatgtcaccaacccggccttcaccaaactccctgcaaagtgtttcatggatttcaaagctggaggcgccttatgtcacattcttggggctgcttacaagtat

SEQ ID NO: 593056 - DNA, 120 bp, Artificial Sequence
  ENSG00000173473_4 (sequence is synthesized)
aaaaatgaacagggatggcggaggtttgacctacagaacccatctcgaatggatcgtaatgtggaaatgtttatgaacattgaaaaaacattggtgcagaacaattgtttgaccagaccc

SEQ ID NO: 593057 - DNA, 120 bp, Artificial Sequence
  ENSG00000173473_5 (sequence is synthesized)
aacatctacctcattccagacattgatctgaagttggctaacaaattgaaagatatcatcaaacgacatcagggaacatttacggatgagaagtcaaaagcttcccaccacatttaccca

SEQ ID NO: 593058 - DNA, 120 bp, Artificial Sequence
  ENSG00000173473_6 (sequence is synthesized)
tattcttcctcacaagacgatgaagaatggttgagaccggtgatgagaaaagagaagcaagtgttagtgcattggggcttttacccagacagctatgatacttgggtccatagtaatgat

SEQ ID NO: 593059 - DNA, 120 bp, Artificial Sequence
  ENSG00000173473_7 (sequence is synthesized)
gttgatgctgaaattgaagatccaccaattccagaaaaaccatggaaggttcatgtgaaatggattttggacactgatattttcaatgaatggatgaatgaggaggattatgaggtggat

SEQ ID NO: 593060 - DNA, 120 bp, Artificial Sequence
  ENSG00000173473_8 (sequence is synthesized)
gaaaataggaagcctgtgagttttcgtcagcggatttcaaccaagaatgaagagccagtcagaagtccagaaagaagagatagaaaagcatcagctaatgctcgaaagaggaaacattcg

SEQ ID NO: 593061 - DNA, 120 bp, Artificial Sequence
  ENSG00000173473_9 (sequence is synthesized)
ccttcgcctccccctccgacaccaacagaatcacggaagaagagtgggaagaaaggccaagctagcctttatgggaagcgcagaagtcagaaagaggaagatgagcaagaagatctaacc

SEQ ID NO: 593062 - DNA, 120 bp, Artificial Sequence
  ENSG00000173473_10 (sequence is synthesized)
aaggatatggaagacccaacacctgtacccaatatagaagaagtagtacttcccaaaaatgtgaacctaaagaaagatagtgaaaatacacctgttaaaggaggaactgtagcggatcta

SEQ ID NO: 593063 - DNA, 120 bp, Artificial Sequence
  ENSG00000173473_11 (sequence is synthesized)
gatgagcaggatgaagaaacagtcacagcaggaggaaaggaagatgaagatcctgccaaaggtgatcagagtcgatcagttgaccttggggaagataatgtgacagagcagaccaatcac

SEQ ID NO: 593064 - DNA, 120 bp, Artificial Sequence
  ENSG00000173473_12 (sequence is synthesized)
attattattcctagttatgcatcatggtttgattataactgtattcatgtgattgaacggcgtgctcttcctgagttcttcaatggaaaaaacaaatccaagactccagaaatatacttg

SEQ ID NO: 593065 - DNA, 120 bp, Artificial Sequence
  ENSG00000173473_13 (sequence is synthesized)
gcatatcgaaattttatgattgacacgtatcgtctaaacccccaagagtatttaactagcactgcttgtcggaggaacttgactggagatgtgtgtgctgtgatgagggtccatgccttt

SEQ ID NO: 593066 - DNA, 120 bp, Artificial Sequence
  ENSG00000173473_14 (sequence is synthesized)
ttagagcagtggggactcgttaattaccaagttgacccggaaagtagacccatggcaatgggacctcctcctactcctcattttaatgtattagctgataccccctctgggcttgtgcct

SEQ ID NO: 593067 - DNA, 120 bp, Artificial Sequence
  ENSG00000173473_15 (sequence is synthesized)
ctgcatcttcgatcacctcaggttcctgctgctcaacagatgctaaattttcctgagaaaaacaaggaaaaaccagttgatttgcagaactttggtctccgtactgacatttactccaag

SEQ ID NO: 593068 - DNA, 120 bp, Artificial Sequence
  ENSG00000173473_16 (sequence is synthesized)
aaaacattagcaaagagtaaaggtgctagtgctggaagagaatggactgaacaggagacccttctactcctggaggccctggagatgtacaaggatgattggaacaaagtgtcggaacat

SEQ ID NO: 593069 - DNA, 120 bp, Artificial Sequence
  ENSG00000173473_17 (sequence is synthesized)
gttggaagtcgtactcaggatgaatgcatcctccactttttgagacttcccattgaggacccataccttgagaattcagatgcttcccttgggcctttggcctaccagcctgtccccttc

SEQ ID NO: 593070 - DNA, 120 bp, Artificial Sequence
  ENSG00000173473_18 (sequence is synthesized)
agtcagtcaggaaatccagttatgagtactgttgcttttttggcatctgtggtggaccctcgcgtggcatctgctgcagcaaaagcggctttggaggagttttctcgggtccgggaggag

SEQ ID NO: 593071 - DNA, 120 bp, Artificial Sequence
  ENSG00000173473_19 (sequence is synthesized)
gtaccactggaattggttgaagctcatgtcaagaaagtacaagaagcagcacgagcctctgggaaagtggatcccacctacggtctggagagcagctgcattgcaggcacagggcccgat

SEQ ID NO: 593072 - DNA, 120 bp, Artificial Sequence
  ENSG00000173473_20 (sequence is synthesized)
gagccagagaagcttgaaggagctgaagaggaaaaaatggaagccgaccctgatggtcagcagcctgaaaaggcagaaaataaagtggaaaatgaaacggatgaaggtgataaagcacaa

SEQ ID NO: 593073 - DNA, 120 bp, Artificial Sequence
  ENSG00000173473_21 (sequence is synthesized)
gatggagaaaatgaaaaaaatagtgaaaaggaacaggatagtgaagtgagtgaggataccaaatcagaagaaaaggagactgaagagaacaaagaactcactgatacatgtaaagaaaga

SEQ ID NO: 593074 - DNA, 120 bp, Artificial Sequence
  ENSG00000173473_22 (sequence is synthesized)
gaaagtgatactgggaagaagaaagtagaacatgaaatttccgaaggaaatgttgccacagccgcagcagctgctcttgcctcagcggctaccaaagccaagcacctggctgcagtggaa

SEQ ID NO: 593075 - DNA, 120 bp, Artificial Sequence
  ENSG00000173473_23 (sequence is synthesized)
gaaagaaagatcaagtccctggtagctctcttggttgagacacaaatgaagaaactagagatcaaacttcgacattttgaagagctggaaactatcatggacagagagaaagaagctcta

SEQ ID NO: 593076 - DNA, 120 bp, Artificial Sequence
  ENSG00000173473_24 (sequence is synthesized)
gaacaacagaggcagcagttgcttactgaacgccaaaacttccacatggaacagctgaagtatgctgaattacgagcacgacagcaaatggaacagcagcagcatggccagaaccctcaa

SEQ ID NO: 593077 - DNA, 120 bp, Artificial Sequence
  ENSG00000173473_25 (sequence is synthesized)
caggcacaccagcactcaggaggacctggcctggccccacttggagcagcagggcaccctggcatgatgcctcatcaacagccccctccctaccctctgatgcaccaccagatgccacca

SEQ ID NO: 593078 - DNA, 120 bp, Artificial Sequence
  ENSG00000173473_26 (sequence is synthesized)
ggccctacccctcctggcatgccaccaatgccaggaaacatcttaggaccccgggtacccctgacagcacctaacggcatgtatccccctccaccacagcagcagccaccgccaccacca

SEQ ID NO: 593079 - DNA, 120 bp, Artificial Sequence
  ENSG00000173473_27 (sequence is synthesized)
cctgcagatggggtccctccgcctcctgctcctggcccgccagcctcagctgctccttagcctggaagatgcagggaacctccacgcccaccaccatgagctggagtggggatgacaaga

SEQ ID NO: 593080 - DNA, 120 bp, Artificial Sequence
  ENSG00000173473_28 (sequence is synthesized)
cttgtgttcctcaactttcttgggtttctttcaggatttttcttctcacagctccaagcacgtgtcccgtgcctccccactcctcttaccacccctctctctgacactttttgtgttggg

SEQ ID NO: 593081 - DNA, 120 bp, Artificial Sequence
  ENSG00000173473_29 (sequence is synthesized)
tcctcagccaacactcaaggggaaacctgtagtgacagtgtgccctggtcatccttaaaataacctgcatctcccctgtcctggtgtgggagtaagctgacagtttctctgcaggtcctg

SEQ ID NO: 593082 - DNA, 120 bp, Artificial Sequence
  ENSG00000173473_30 (sequence is synthesized)
tcaactttagcatgctatgtctttaccatttttgctctcttgcagttttttgctttgtcttatgcttctatggataatgctatataatcattatctttttatctttctgttattattgtt

SEQ ID NO: 593083 - DNA, 120 bp, Artificial Sequence
  ENSG00000173473_31 (sequence is synthesized)
ttaaaggagagcatcctaagttaataggaaccaaaaaataatgatgggcagaagggggggaatagccacaggggacaaaccttaaggcattataagtgaccttatttctgcttttctgag

SEQ ID NO: 593084 - DNA, 120 bp, Artificial Sequence
  ENSG00000173473_32 (sequence is synthesized)
ctaagaatggtgctgatggtaaagtttgagacttttgccacacacaaatttgtgaaaattaaacgagatgtggaaggagaacctcagtgattttattccctagtgaggcctctgagggcc

SEQ ID NO: 593085 - DNA, 120 bp, Artificial Sequence
  ENSG00000173473_33 (sequence is synthesized)
tccacactgcctggcagaacataccactgaactagtatgtgctagaggagggcacaaacatccgctccttccctaggcctgctggctctggttttctatgcagatgattcattggattgg

SEQ ID NO: 593086 - DNA, 120 bp, Artificial Sequence
  ENSG00000173473_34 (sequence is synthesized)
gggtgagtgttttgtttttctgggggcagtgtgagctttgagggttggaatattgggaggcattccttagtttcctcaactagcctggaaagttaggagtctagggtaattacccccaat

SEQ ID NO: 593087 - DNA, 120 bp, Artificial Sequence
  ENSG00000173473_35 (sequence is synthesized)
gagtctagcctactattcactgctttgtgtgcatttttttctccctctttaaaaaaccctttaaaagaaaaaaaaaagtagatagtgctaaatattttagctcatgaaacttggttagga

SEQ ID NO: 593088 - DNA, 120 bp, Artificial Sequence
  ENSG00000173473_36 (sequence is synthesized)
tggctgggggtacaagtccccaaactacctcttgttacagtagccagggagtggaatttcgtcaaccggtacttttaaggttaggatgggacgggaaaagtgaagcaggatattagctcc

SEQ ID NO: 593089 - DNA, 120 bp, Artificial Sequence
  ENSG00000173473_37 (sequence is synthesized)
ttataccttctcccttccatttctgagatctcacattccatctatcacagggttttcaaagagatgctgagggtaacaaggaactcacttggcagtcagagcatcatgctttgaggtttg

SEQ ID NO: 593090 - DNA, 120 bp, Artificial Sequence
  ENSG00000173473_38 (sequence is synthesized)
gggtgctcaggctgggagggtagaatgccattccagaggacaagccacaaaaatgccttaatttgagctcgtatttacccctgctgataagtgacttgagagttcccggttttttcctct

SEQ ID NO: 593091 - DNA, 120 bp, Artificial Sequence
  ENSG00000173473_39 (sequence is synthesized)
tgtccttccctcccttctgtccttccatgtgtggggaaagggtgtttttggtagagcttggtttccaaagcgcctggctttctcacttcacattctcaagtggcagtttcattatttaga

SEQ ID NO: 593092 - DNA, 120 bp, Artificial Sequence
  ENSG00000173473_40 (sequence is synthesized)
atgcaaggtggacatcttttggatatctttttctatatattttctaaagctttacatatgagagggtatagggaggtgtttataaaacacttgagaacttttttccttaatatcagaaag

SEQ ID NO: 593093 - DNA, 120 bp, Artificial Sequence
  ENSG00000173473_41 (sequence is synthesized)
caaaaaaataaaaccacaattgagatttgcctttcaaaccctcaggtttgcctctaaccaggtgtccctggtcaccatcagagtactggaatacgggaaccgaggagaccttggtccttt

SEQ ID NO: 593094 - DNA, 120 bp, Artificial Sequence
  ENSG00000173473_42 (sequence is synthesized)
tgtttttgttctggactcttgggagtggaaatgagaatgagtttattcctactggagcttagttccaatgcatttggctccagaaagaccccagtgccttttgacaatggccagggtttt

SEQ ID NO: 593095 - DNA, 120 bp, Artificial Sequence
  ENSG00000173473_43 (sequence is synthesized)
acctacttcctgccagtctttcccaaaggaaactcattccaaatacttcttttttcccctggagtccgagaaggaaaatggaattctggttcatactgtggtcccttgtaacctcaggtc

SEQ ID NO: 593096 - DNA, 120 bp, Artificial Sequence
  ENSG00000173473_44 (sequence is synthesized)
tttaatgtgatcactttcaaatttaaaagatccaggtggaaatatttttactatagtaataattctacaaaatacctgaattcttaacactgttatatttcagtataagtggtggctttt

SEQ ID NO: 593097 - DNA, 120 bp, Artificial Sequence
  ENSG00000173473_45 (sequence is synthesized)
tcttttcatgtctttgatctggttttattcctgtaattcagccacctgattttgtgaggggggggaataatatgtggtttttgtacaaacatgtttctcagtgtgttgttattttggaaa

SEQ ID NO: 593098 - DNA, 120 bp, Artificial Sequence
  ENSG00000173473_46 (sequence is synthesized)
aaatgaggggagggagtttggcaagaatggagaaaatgaatgaagaaggcctaatctctctctttttcagtgaataaatggaacaccatttctggattctagtcccattctctgcattca

SEQ ID NO: 593099 - DNA, 120 bp, Artificial Sequence
  ENSG00000173473_47 (sequence is synthesized)
tacaccagtttcttcatatatcctatgaagaacctaaacatttggccccacctggtcttggtttgatcagcagttaaaattctgtgactcgggcttccttcccgactgcccaccttcatg

SEQ ID NO: 593100 - DNA, 120 bp, Artificial Sequence
  ENSG00000173473_48 (sequence is synthesized)
atgtgtaaggaacatacattttgagggtacctcacccactgttcatttgcatggtcaaagtgaaaatgagtggaagttctccaaaaatgatggccaacatcctggcacctccaggtgtga

SEQ ID NO: 593101 - DNA, 120 bp, Artificial Sequence
  ENSG00000173473_49 (sequence is synthesized)
gaaatagctttgcttggtgaatgggataatgtttgtcaggatgcagtttagacagtcccaagttggaggcaggccttgagggcagaagattctgtgaaccttgggggacagcttttgggt

SEQ ID NO: 593102 - DNA, 120 bp, Artificial Sequence
  ENSG00000173473_50 (sequence is synthesized)
actcacagatataaaccctgtgcagaaaaaaagaagtgattgttttcaggatgcttataaatcgagtgaagcaaaagaagaggattctgtgtctgccatgagatgaacgccctgctcttc

SEQ ID NO: 593103 - DNA, 120 bp, Artificial Sequence
  ENSG00000173473_51 (sequence is synthesized)
acgaaggtgtgcctctaataaagagagccaaagccagctgggtctcaccagattcctatactttctcaaggatgttgggggaggttaatcctttatcgaaactaaagactggtttataaa

SEQ ID NO: 593104 - DNA, 120 bp, Artificial Sequence
  ENSG00000173473_52 (sequence is synthesized)
agtttgcaaatactcctttcagaacagtgttcatatctcatttgcatagcattccatggtacacaggaaattgtatctagtttcgttttttgttttggggggttttttttggtgtttgtt

SEQ ID NO: 593105 - DNA, 120 bp, Artificial Sequence
  ENSG00000173473_53 (sequence is synthesized)
agggcgatcagggctcaccgcaggctcaacctctcaggctgaagtgatcctcccaccccagcctcctggataggattgcaggcaaagtgtttcatggatttcaaagctggaggcgcctta

SEQ ID NO: 593106 - DNA, 120 bp, Artificial Sequence
  ENSG00000173473_54 (sequence is synthesized)
cccaggctggagtgcagtggcctgatggtagctcagtgcagcctctacctcccaggctcaggcgatcctcttaccttcagtcctgaatagctgggactaagggcgtgtgccaccatgcct

SEQ ID NO: 593107 - DNA, 76 bp, Artificial Sequence
  ENSG00000173473_55 (sequence is synthesized)
caggctcaggcgatcctcttaccttcagtcctgaatagctgggactaacaatgggctttcaccatgttgtccaggc

SEQ ID NO: 593108 - DNA, 86 bp, Artificial Sequence
  ENSG00000173473_56 (sequence is synthesized)
ctcaaactcctgacctctgattacaggcatgaaccaccgcgaccgacctactgtttgtcttttaaagtgatcttgagcatatgttc

SEQ ID NO: 593109 - DNA, 120 bp, Artificial Sequence
  ENSG00000173473_57 (sequence is synthesized)
cctactgtttgtcttttaaagtgatcttgagcatatgttctacaaataatgaaggtgtacaacctcagaaactgtttgctatcagtagctataatcagtcttgtttatatttcatatact

SEQ ID NO: 593110 - DNA, 120 bp, Artificial Sequence
  ENSG00000173473_58 (sequence is synthesized)
aaaaaccggcgctcactagggcagaatgcagcctacggaggatggcggaagaggcggctgaggccgcaggacgtgctattccaagtatgttcatgcggatgctcctaccaataaaacact

SEQ ID NO: 593111 - DNA, 120 bp, Artificial Sequence
  ENSG00000173473_59 (sequence is synthesized)
agtaaccatgagagtatcacatccaaaagagagcacataggaaggttgggtgaacttgaaatgttaacatctgaggaactattacaaggacaagagaggctcgttttacctggggaagac

SEQ ID NO: 593112 - DNA, 120 bp, Artificial Sequence
  ENSG00000173473_60 (sequence is synthesized)
tcagacagccatagaaagtatttttagatatctaaaggcctgccaaacatagaggggattacatgtgtccaagtgagcccaaagagcagtagccctactgcgggaagattgcaaggaaag

SEQ ID NO: 593113 - DNA, 120 bp, Artificial Sequence
  ENSG00000173480_0 (sequence is synthesized)
agtagcggctgtgtatcggtgacgcgggtgtttccccagtttgtggcccctgagtgctggggggggaccgcggtgactgaacctagaaggtggagaggaatcgtcctcggtgcccagagg

SEQ ID NO: 593114 - DNA, 120 bp, Artificial Sequence
  ENSG00000173480_1 (sequence is synthesized)
cggctctgcagccccgtgacggcgaccactgctcccgggccgtgcttccccaagtagtccgatggcagcggctgcgccgaggcgcccgactcagcagggcactgtgacctttgaagatgt

SEQ ID NO: 593115 - DNA, 120 bp, Artificial Sequence
  ENSG00000173480_2 (sequence is synthesized)
ggctgtgaacttttcccaggaggagtggtgtcttcttagtgaggctcagaggtgcttgtaccgtgatgtgatgctagagaacctggctctcatatcctcgctgggttgttggtgtggatc

SEQ ID NO: 593116 - DNA, 120 bp, Artificial Sequence
  ENSG00000173480_3 (sequence is synthesized)
aaaagatgaggaggcaccttgtaagcagagaatttctgtacaaagagagtctcagagcaggactcctagggcaggtgtttctcctaagaaggctcacccctgtgaaatgtgtggcctcat

SEQ ID NO: 593117 - DNA, 120 bp, Artificial Sequence
  ENSG00000173480_4 (sequence is synthesized)
cttggaggatgtttttcactttgctgaccaccaggaaactcatcacaagcagaagctgaacaggagtggagcatgtggaaaaaacttggatgacactgcataccttcatcagcaccagaa

SEQ ID NO: 593118 - DNA, 120 bp, Artificial Sequence
  ENSG00000173480_5 (sequence is synthesized)
gcagcatattggagagaaattctacagaaagagtgtcagagaagcatcgtttgtaaagaaacgtaagctcagggtgtcacaggagccatttgtcttccgcgagtttgggaaggacgttct

SEQ ID NO: 593119 - DNA, 120 bp, Artificial Sequence
  ENSG00000173480_6 (sequence is synthesized)
gcccagttcaggattgtgccaagaagcagctgctgtagagaagacagacagtgaaactatgcatggcccaccctttcaggagggaaaaactaattacagttgtggaaaacgcacaaaagc

SEQ ID NO: 593120 - DNA, 120 bp, Artificial Sequence
  ENSG00000173480_7 (sequence is synthesized)
cttcagcaccaaacactcagttattccacaccagaaacttttcactagagatggatgttatgtgtgcagtgattgtggaaaatcctttagcagatatgtcagcttcagtaatcatcagcg

SEQ ID NO: 593121 - DNA, 120 bp, Artificial Sequence
  ENSG00000173480_8 (sequence is synthesized)
agatcacactgcaaaaggaccttatgattgtggagagtgtgggaaatcttatagtcgaaagagcagccttattcaacatcagcgagtccacactggaaagacagcttatccctgtgagga

SEQ ID NO: 593122 - DNA, 120 bp, Artificial Sequence
  ENSG00000173480_9 (sequence is synthesized)
gtgcgggaaatcttttagtcagaagggcagccttattagccatcagcgtgttcacactggagaaaggccttatgagtgtagagaatatgggaaatcttttggtcaaaagggtaacctcat

SEQ ID NO: 593123 - DNA, 120 bp, Artificial Sequence
  ENSG00000173480_10 (sequence is synthesized)
tcaacatcagcaaggtcacactggagagagagcttatcactgtggggaatgtgggaaatcttttcgtcagaagttctgctttattaaccatcagcgtgttcacactggagaaaggcctta

SEQ ID NO: 593124 - DNA, 120 bp, Artificial Sequence
  ENSG00000173480_11 (sequence is synthesized)
caagtgtggagaatgtggaaaatcttttggtcaaaagggcaacctcgttcaacatcagcgaggtcatactggagaaaggccctatgagtgcaaggaatgtgggaaatcatttaggtacag

SEQ ID NO: 593125 - DNA, 120 bp, Artificial Sequence
  ENSG00000173480_12 (sequence is synthesized)
atcccacctcactgaacaccagagacttcacactggggaaagaccttacaattgtagggaatgtgggaaattatttaacaggaagtatcatcttctcgttcatgagagagttcacactgg

SEQ ID NO: 593126 - DNA, 120 bp, Artificial Sequence
  ENSG00000173480_13 (sequence is synthesized)
agaaaggccatatgcgtgtgaggtatgtgggaaattatttggtaataagaactgcgtgactatacatcagaggattcacactggagaaaggccgtatgaatgcaatgaatgtgggaaatc

SEQ ID NO: 593127 - DNA, 120 bp, Artificial Sequence
  ENSG00000173480_14 (sequence is synthesized)
atttctttccagctctgcgcttcatgttcataaaagagttcattctggacaaaagccttataagtgcagtgaatgtggaaaatcctttgctgaatgttccagtctcattaaacacaggag

SEQ ID NO: 593128 - DNA, 120 bp, Artificial Sequence
  ENSG00000173480_15 (sequence is synthesized)
aattcacactggagaaaggccttatgaatgtaccaaatgtggaaaaacatttcagcgaagctctaccctccttcatcatcagagttcacacaggagaaaggccttatgagtgcagtgaat

SEQ ID NO: 593129 - DNA, 120 bp, Artificial Sequence
  ENSG00000173480_16 (sequence is synthesized)
atgggaaatcgtttgctgaaacatcccgtctcattaaacacaggagagttcatactggagaaaggccttatgagtgctgtcaatctgggaaacatcagaatgtctgctctccttggtctt

SEQ ID NO: 593130 - DNA, 120 bp, Artificial Sequence
  ENSG00000173480_17 (sequence is synthesized)
ccaaggagctgagattacgagtacaccacaccatgcccggccaaatacttggttttcagtaccacaagagctatgagctggttatccacttcatgtggaatcataagtgtccccaagtga

SEQ ID NO: 593131 - DNA, 120 bp, Artificial Sequence
  ENSG00000173480_18 (sequence is synthesized)
cgtatagattgctgggcagtgaaacagttaagatgtcaccgtagcttgctttctattcaacatctttctaagattaccttactatttcttttgttccaagtttgtatttcctcagagttc

SEQ ID NO: 593132 - DNA, 120 bp, Artificial Sequence
  ENSG00000173480_19 (sequence is synthesized)
tcacatatggaaaggatacacactttgtagaaacaagaactttatgttatccaagttctgggatagccatgagctccaattacctcagagctccgagtcctctactcagtacccgttgag

SEQ ID NO: 593133 - DNA, 120 bp, Artificial Sequence
  ENSG00000173480_20 (sequence is synthesized)
atttatgtgttctgaggcttttgtcttctagctacttacttcattctccatgggtaacgtcattcatccacattaactaatttcctcactccaagctcttttctggagataatctccagt

SEQ ID NO: 593134 - DNA, 120 bp, Artificial Sequence
  ENSG00000173480_21 (sequence is synthesized)
ccctgtgcagacactgtcattgcactttctgctgaaatggtagtttcttgccagcaaggtgagattatggaatccagaatcttttttcaggggccacatgcccatttccccacttgcatg

SEQ ID NO: 593135 - DNA, 120 bp, Artificial Sequence
  ENSG00000173480_22 (sequence is synthesized)
aatgtcgacactgtagccacagttttggccgtaaatgtgaatttggcaagtaaccactgttcccaaattgggaaatgtcccagtcagaagaagattatctgggacactgatactgacagg

SEQ ID NO: 593136 - DNA, 120 bp, Artificial Sequence
  ENSG00000173480_23 (sequence is synthesized)
gagatgggacattctgagggacccggaggcagggagccacctcctcagcttccctgagggctgcctagaatctctcttgtttcctctcactctgaattattcttcctctcatgactgacc

SEQ ID NO: 593137 - DNA, 120 bp, Artificial Sequence
  ENSG00000173480_24 (sequence is synthesized)
aaacacatggaacctcacaaagtccattttaagagctttatcttgtgaagtgaagaacatgaagatagtttgaatcaaagttattgagtggacacttaatgtctttataacattttttac

SEQ ID NO: 593138 - DNA, 120 bp, Artificial Sequence
  ENSG00000173480_25 (sequence is synthesized)
atatgtgtttgtgttttttggggagcataatttgcaaatggaatatctgttattttactaagatgcttcatggatacaagagttaaaacttcctgtcccatttagtgaaacaaaaggtta

SEQ ID NO: 593139 - DNA, 120 bp, Artificial Sequence
  ENSG00000173480_26 (sequence is synthesized)
tttagtgaaacaaaaggttaagaaatgtggataaagcttgtaagttagaaatggcaagataatcagctatatgaagaatctcagctgggtgttttggctcaggcctgtaatcccagcact

SEQ ID NO: 593140 - DNA, 67 bp, Artificial Sequence
  ENSG00000173480_27 (sequence is synthesized)
cactttgggaggctgaggtgggtggcttacaaggtcaggagttcaagaccaagcatagtggtgggtg

SEQ ID NO: 593141 - DNA, 81 bp, Artificial Sequence
  ENSG00000173480_28 (sequence is synthesized)
aaaaaaaaaaaaaaaaaaaatctcaatccctaaatgttaccttttataacagcaggttatatgggcttagatattatccct

SEQ ID NO: 593142 - DNA, 85 bp, Artificial Sequence
  ENSG00000173480_29 (sequence is synthesized)
tatttttagtagagatgggctttcactacgttagccaggctggtctcaaacttgtgacctcatgatccacccctgccacggcact

SEQ ID NO: 593143 - DNA, 120 bp, Artificial Sequence
  ENSG00000173480_30 (sequence is synthesized)
acggcactcggcttatccctagaaatcctatgatagcatgatgtataggcacctaaaggcatggcacttgagaaatgtgaataagattgtaagttacaaatagcaaggtacagtcagatg

SEQ ID NO: 593144 - DNA, 120 bp, Artificial Sequence
  ENSG00000173480_31 (sequence is synthesized)
ttaacagtctcagcccctaaatgtcaccttgtattacagcatgttatataagcacatacaggcacatacatgaaatagtgatacttcattctcagtaatatttttcatccttctcactgg

SEQ ID NO: 593145 - DNA, 120 bp, Artificial Sequence
  ENSG00000173480_32 (sequence is synthesized)
aaagatctttgatgatttttaatcaacataggagtttcaatgatatctagaagtttaaaagggctcgttcaaacaaattatgaccatacaccctgaagagtatgtgtctgtctcttgtgg

SEQ ID NO: 593146 - DNA, 120 bp, Artificial Sequence
  ENSG00000173480_33 (sequence is synthesized)
tgtaaatttttattttattacacccaattatgttcccacaaaacctttataattgggaaattaaggagccttcctcggaaatggaggttgcaatcagctgagatggtaccactgcactct

SEQ ID NO: 593147 - DNA, 120 bp, Artificial Sequence
  ENSG00000173480_34 (sequence is synthesized)
agcctgggcaaaagagcaaggccctgcctcaaaaaaaacaaaacttttttcttcataaactacagtttatataggcaaaactttcagtactaagcaattttagtctctgcaggctcttgt

SEQ ID NO: 593148 - DNA, 120 bp, Artificial Sequence
  ENSG00000173480_35 (sequence is synthesized)
cttgaattaatacaacttttgttaattctcttatgaagttaaatcttcctgcttgtatgcaacttatatgttgaaatttttttgtacaaaagattcatacatctttcctgtttgaaatta

SEQ ID NO: 593149 - DNA, 120 bp, Artificial Sequence
  ENSG00000173480_36 (sequence is synthesized)
ggagatggacggagccgggaggatggaacctgtctggaacaaagtgtgaggtggagctctccctggaagagtaagcaggccgagggctgtgcattcaagcagggcactgtgacctttgaa

SEQ ID NO: 593150 - DNA, 120 bp, Artificial Sequence
  ENSG00000173480_37 (sequence is synthesized)
atgtggctgtgaacttttcccaggaggagtggtgtcttcttagtgaggctcagaggtgcttgtaccgtgatgtgatgctagagaacctggctctcatatcctcgctggattgtcctctgc

SEQ ID NO: 593151 - DNA, 120 bp, Artificial Sequence
  ENSG00000173480_38 (sequence is synthesized)
ccatgttggagggtctgcctggataagccgtatctttttctgaggcctgcagcattaagatgggttaaggaatggaacgtttgtgcatcggcaaaagctgcagaaaccagtgcatccgcc

SEQ ID NO: 593152 - DNA, 120 bp, Artificial Sequence
  ENSG00000173480_39 (sequence is synthesized)
ctttgattaagttaaaaggaccagggaggttagtatgtgctctcatatgagtaatatagaaaggggaatgtctttgttgtactgcttgttgtaaagaatgaaataaaagattaagttgtt

SEQ ID NO: 593153 - DNA, 120 bp, Artificial Sequence
  ENSG00000173482_0 (sequence is synthesized)
gcggcgtagagaagctcgcagccctccggagcctcagcgatctcctggctcgcttttcccgcagccgccgagcagcgcaggcccggcgactccgggtgcagctggccctgtgcggtgaca

SEQ ID NO: 593154 - DNA, 120 bp, Artificial Sequence
  ENSG00000173482_1 (sequence is synthesized)
tcgccgtccggcgccaggctcgaagccgcctggccgcgcccgcggggtcgcaggccgctggtcccgcccggccgcgctcacaaactactcgcggctcgtgacccgggacaaacttctggc

SEQ ID NO: 593155 - DNA, 120 bp, Artificial Sequence
  ENSG00000173482_2 (sequence is synthesized)
ggcggcgcagcctcttccacagtcaccctccccagagccagctaccaaaatagaagacgcggccggggcgaggaggtgggcggggggagcccggtggccgctcctccccgcgcggctgac

SEQ ID NO: 593156 - DNA, 80 bp, Artificial Sequence
  ENSG00000173482_3 (sequence is synthesized)
cgcgcggctgacgcccgcttcggcggcggtagtggctgtggccgcggggccgcccccagccgagctcccggaggcgctcg

SEQ ID NO: 593157 - DNA, 80 bp, Artificial Sequence
  ENSG00000173482_4 (sequence is synthesized)
cgccgggcggccgtgacgtgagcgctcccttcagccggcctgcggggcaccgccagtcagtcggggagcaagagccccgc

SEQ ID NO: 593158 - DNA, 120 bp, Artificial Sequence
  ENSG00000173482_5 (sequence is synthesized)
ggaacgcgcgcggccacggccacggccaccgccacggccacggccggcagctcgggtcccgggtcccgggcaggggaaggggagaggcggcgagctcagcaaccggaaccgagggaagat

SEQ ID NO: 593159 - DNA, 120 bp, Artificial Sequence
  ENSG00000173482_6 (sequence is synthesized)
ggagaggcggcgagctcagcaaccggaaccgagggaagattttggctccgcgggctcgccctccgctccctctgccagcggcgccagacgccgagtggggccagggacaggggaggagga

SEQ ID NO: 593160 - DNA, 120 bp, Artificial Sequence
  ENSG00000173482_7 (sequence is synthesized)
cccaggaccctgtgcccgcgcccctggagccgctggagttcggacttctgcaactgttggcactttgggggcttggcttagcgctctgctgtttacccgtctctcctcgctgcctcggaa

SEQ ID NO: 593161 - DNA, 120 bp, Artificial Sequence
  ENSG00000173482_8 (sequence is synthesized)
ccaaagctcccggccccctccgccctcgcgcgcccacccaccgccgccggggagcggcccggcccgcactcagcaccatgaggggacttgggacttgcctggcgactttggccggacttt

SEQ ID NO: 593162 - DNA, 120 bp, Artificial Sequence
  ENSG00000173482_9 (sequence is synthesized)
tgctaactgcggcgggcgagacgttctcaggtggctgcctctttgatgagccgtatagcacatgtggatatagtcaatctgaaggtgatgacttcaattgggagcaagtgaacaccttga

SEQ ID NO: 593163 - DNA, 120 bp, Artificial Sequence
  ENSG00000173482_10 (sequence is synthesized)
ctaaaccgacttctgatccatggatgccatcaggttctttcatgctggtgaatgcctctgggagacctgaggggcagagagcccacctgctcttaccccaacttaaagaaaatgacaccc

SEQ ID NO: 593164 - DNA, 120 bp, Artificial Sequence
  ENSG00000173482_11 (sequence is synthesized)
actgcatcgattttcactattttgtgtccagcaagagtaattctcctccggggttactcaatgtctacgtgaaggtcaataacgggccactggggaatcctatctggaatatatctggag

SEQ ID NO: 593165 - DNA, 120 bp, Artificial Sequence
  ENSG00000173482_12 (sequence is synthesized)
acccaacacgtacatggaacagggcagaactggccattagtactttctggcctaacttttatcaggtgatttttgaagtgataacttctggacatcaaggctatctcgctatcgatgagg

SEQ ID NO: 593166 - DNA, 120 bp, Artificial Sequence
  ENSG00000173482_13 (sequence is synthesized)
tgaaggtgttaggacatccatgtaccaggactcctcacttcctgcggattcagaatgtggaagttaatgctggccagtttgctaccttccagtgcagtgccatcggcaggaccgtggcag

SEQ ID NO: 593167 - DNA, 120 bp, Artificial Sequence
  ENSG00000173482_14 (sequence is synthesized)
gagacaggctctggttacagggcattgatgtgcgagatgctcctctgaaggaaatcaaggtgaccagctcccgacgcttcattgcttcatttaatgttgtgaataccaccaaacgagatg

SEQ ID NO: 593168 - DNA, 120 bp, Artificial Sequence
  ENSG00000173482_15 (sequence is synthesized)
ctggaaagtaccgctgcatgattcgcactgaaggaggtgttggaatatcaaactatgcagagttggtagttaaagaaccacccgttcctattgccccacctcagctcgcctctgtaggag

SEQ ID NO: 593169 - DNA, 120 bp, Artificial Sequence
  ENSG00000173482_16 (sequence is synthesized)
ccacctacctgtggatacagctcaacgccaactccatcaatggggatgggcccattgtggcccgagaggtggagtactgcacggccagtgggagctggaatgaccggcagccagtcgatt

SEQ ID NO: 593170 - DNA, 120 bp, Artificial Sequence
  ENSG00000173482_17 (sequence is synthesized)
ccacgagctataaaattggacaccttgacccagatacagaatatgagattagtgtgctcctgaccaggccaggggagggtggcactggctctcctggtccagctctcaggacaagaacaa

SEQ ID NO: 593171 - DNA, 120 bp, Artificial Sequence
  ENSG00000173482_18 (sequence is synthesized)
agtgtgctgatcccatgcgaggcccaagaaaactagaagtagtggaggtcaaatctcggcaaatcactatccgctgggagccatttggatataatgtaactcgttgccacagttataatc

SEQ ID NO: 593172 - DNA, 120 bp, Artificial Sequence
  ENSG00000173482_19 (sequence is synthesized)
tcactgtccactactgttaccaagttggaggacaagaacaagtgcgagaagaagtaagctgggatacagaaaactcacaccctcaacacacgatcactaacctgtcaccatacaccaatg

SEQ ID NO: 593173 - DNA, 120 bp, Artificial Sequence
  ENSG00000173482_20 (sequence is synthesized)
tcagtgtgaaactgatcctcatgaacccagagggccggaaggaaagccaagaactcatagtgcagacagatgaagacctcccaggtgctgttcccactgaatccatacaaggaagtacct

SEQ ID NO: 593174 - DNA, 120 bp, Artificial Sequence
  ENSG00000173482_21 (sequence is synthesized)
ttgaagagaagatatttcttcagtggagagaaccaactcaaacatatggtgtaatcactttatatgagatcacctacaaagcagtcagttcctttgacccagaaatagatttatccaatc

SEQ ID NO: 593175 - DNA, 120 bp, Artificial Sequence
  ENSG00000173482_22 (sequence is synthesized)
agagtggaagagtttcaaagctgggaaatgaaacccattttctgttttttggactgtatccggggaccacatactcctttaccatccgagctagcacagctaagggttttgggcctccag

SEQ ID NO: 593176 - DNA, 120 bp, Artificial Sequence
  ENSG00000173482_23 (sequence is synthesized)
caacaaaccagttcaccaccaaaatatcagcaccctctatgccagcttatgaacttgagacacctttgaatcaaactgacaataccgtgacagtcatgctgaaacctgcccacagcagag

SEQ ID NO: 593177 - DNA, 120 bp, Artificial Sequence
  ENSG00000173482_24 (sequence is synthesized)
gagcacctgtcagtgtctatcaaatagttgttgaggaagaacgtcctcgaagaactaaaaagacgacagaaatcttaaagtgctacccagtgccaattcacttccagaatgcttctctgc

SEQ ID NO: 593178 - DNA, 120 bp, Artificial Sequence
  ENSG00000173482_25 (sequence is synthesized)
tactggaacactccccttctcccctataaaagctacagaatttatttccaagctgctagtagagccaatggggaaaccaaaatagactgtgtccaagtggccacaaaaggagctgccact

SEQ ID NO: 593179 - DNA, 120 bp, Artificial Sequence
  ENSG00000173482_26 (sequence is synthesized)
ccgaaaccagtcccagaacccgagaaacagacagaccatacagttaaaattgctggagtcatcgcgggcatcttgctgttcgtgattatatttcttggagttgtgttggtaatgaagaaa

SEQ ID NO: 593180 - DNA, 120 bp, Artificial Sequence
  ENSG00000173482_27 (sequence is synthesized)
aggaaactggccaagaagcggaaagagaccatgagcagcacccgacaggagatgactgtgatggtgaactcaatggacaagagctatgctgagcagggcacaaactgcgacgaggctttc

SEQ ID NO: 593181 - DNA, 120 bp, Artificial Sequence
  ENSG00000173482_28 (sequence is synthesized)
tcattcatggacacgcacaatctgaatgggagatctgtgtcttcaccatcgtccttcacaatgaaaacaaatacactgagcacatcggtgcctaattcctattacccagatgaaacccac

SEQ ID NO: 593182 - DNA, 120 bp, Artificial Sequence
  ENSG00000173482_29 (sequence is synthesized)
acaatggccagcgataccagcagcctggtgcagtcccatacttacaagaagcgagagccggccgacgtgccctatcagactgggcagctccaccccgccatccgggtggcagacctcctt

SEQ ID NO: 593183 - DNA, 120 bp, Artificial Sequence
  ENSG00000173482_30 (sequence is synthesized)
cagcacatcacacagatgaagtgtgcggagggctacggcttcaaggaggaatacgagagcttctttgaagggcagtctgcaccatgggactcggctaagaaagatgagaacagaatgaag

SEQ ID NO: 593184 - DNA, 120 bp, Artificial Sequence
  ENSG00000173482_31 (sequence is synthesized)
aacagatacgggaatatcattgcatacgatcattcccgagtgaggctgcagacaatagaaggagacacaaactcagactatatcaatggcaattatatcgatggttatcatcgacccaat

SEQ ID NO: 593185 - DNA, 120 bp, Artificial Sequence
  ENSG00000173482_32 (sequence is synthesized)
cattacattgctacccaagggccaatgcaggaaaccatctatgacttctggaggatggtgtggcacgaaaacactgcaagtatcatcatggtgaccaatcttgtggaagtgggaagggtc

SEQ ID NO: 593186 - DNA, 120 bp, Artificial Sequence
  ENSG00000173482_33 (sequence is synthesized)
aaatgctgcaaatactggccagatgacacagagatatataaagacattaaagttaccctaatagaaacagaactactggcagaatatgtgataagaacatttgctgttgaaaagagaggt

SEQ ID NO: 593187 - DNA, 120 bp, Artificial Sequence
  ENSG00000173482_34 (sequence is synthesized)
gtgcatgaaatccgagagatcagacagtttcacttcactggctggccggatcatggggtcccctaccatgccaccggcctgctgggattcgtgcggcaagtcaagtccaagagcccgccc

SEQ ID NO: 593188 - DNA, 120 bp, Artificial Sequence
  ENSG00000173482_35 (sequence is synthesized)
agtgcaggcccactggtggtgcactgcagtgctggtgcagggaggactggctgtttcatcgtcattgatatcatgttggacatggccgaaagggaaggggtcgtagacatctacaactgc

SEQ ID NO: 593189 - DNA, 120 bp, Artificial Sequence
  ENSG00000173482_36 (sequence is synthesized)
gtcagggagctgcggtcacggagggtgaacatggtgcaaacagaggagcagtatgtgtttatccacgatgcgatcctggaagcctgtctttgtggggacacctctgtgcctgcttcccaa

SEQ ID NO: 593190 - DNA, 120 bp, Artificial Sequence
  ENSG00000173482_37 (sequence is synthesized)
gttaggtctctgtattatgacatgaacaaactggatccacagacaaactcaagccagattaaagaggaattccggacgctaaacatggtgacaccaacgctgcgagtagaggactgcagc

SEQ ID NO: 593191 - DNA, 120 bp, Artificial Sequence
  ENSG00000173482_38 (sequence is synthesized)
atcgcactgttgccccggaaccatgagaaaaaccggtgcatggacatcctgcccccagaccgctgcctgcccttcctcatcaccatcgatggggagagcagcaactacatcaatgctgcc

SEQ ID NO: 593192 - DNA, 120 bp, Artificial Sequence
  ENSG00000173482_39 (sequence is synthesized)
ctcatggacagctataaacagccttcagcttttatagtcacccagcatcctttgccaaacacagtgaaagacttttggagactggtcctggattatcactgcacatccgtagttatgcta

SEQ ID NO: 593193 - DNA, 120 bp, Artificial Sequence
  ENSG00000173482_40 (sequence is synthesized)
aatgatgtggatcctgcccagttgtgtccacagtactggccagaaaacggagtacacagacacggccccatccaggtggaatttgtctctgctgacctggaagaggacatcatcagcagg

SEQ ID NO: 593194 - DNA, 120 bp, Artificial Sequence
  ENSG00000173482_41 (sequence is synthesized)
atattccgcatttacaatgccgccagaccccaagatggatatcggatggtgcagcaattccagttcctgggctggccgatgtacagggacacaccagtgtctaagcgctccttcttgaag

SEQ ID NO: 593195 - DNA, 120 bp, Artificial Sequence
  ENSG00000173482_42 (sequence is synthesized)
ctcattcgccaggtggacaagtggcaagaggagtacaatggcggggaaggccgcacggttgtgcactgcttgaacgggggaggccgcagtgggacgttctgcgccatcagcatcgtatgt

SEQ ID NO: 593196 - DNA, 120 bp, Artificial Sequence
  ENSG00000173482_43 (sequence is synthesized)
gagatgctccggcaccagagaaccgtggatgtctttcacgctgtgaagacactgaggaacaacaagcccaacatggtcgacctcctggatcagtacaagttctgctacgaggtggccctg

SEQ ID NO: 593197 - DNA, 120 bp, Artificial Sequence
  ENSG00000173482_44 (sequence is synthesized)
gaatacttgaattctggctgatggtgtaaacagctctgcaaacaatccctttcataccacaaagccaagacgttccatggtatttgtgcaaaagagatgaagacttctcaatatgcttat

SEQ ID NO: 593198 - DNA, 120 bp, Artificial Sequence
  ENSG00000173482_45 (sequence is synthesized)
tttgctttgcataattggctctttttaagagcccaagaaagtgtttctaaaattgcttgcactgcccaatcccagtaatgctgctgcctgacagaaacacacacacagccacagttgcca

SEQ ID NO: 593199 - DNA, 120 bp, Artificial Sequence
  ENSG00000173482_46 (sequence is synthesized)
aatcccgtactccttgccaccggcttcctagagcagcgtagacagctggtaaactgaagagcacaactatattcttatgaaggaatttgtacctttggggtattattttgtggcccgtga

SEQ ID NO: 593200 - DNA, 120 bp, Artificial Sequence
  ENSG00000173482_47 (sequence is synthesized)
ccctcgttattgttacagctgagtgtatgtttttgttctgtggagaatgctatctggcattatggtaatatattattttaggtaatatttgtactttaacatgttgcataatatatgctt

SEQ ID NO: 593201 - DNA, 120 bp, Artificial Sequence
  ENSG00000173482_48 (sequence is synthesized)
atgtagctttccaggactaacagataaatgtgtaatgaacaaagatatgttgtatgagtcgtcgtttctgtcagatttgtattgtttccaagggaaaagcttgggggaggactcagttca

SEQ ID NO: 593202 - DNA, 120 bp, Artificial Sequence
  ENSG00000173482_49 (sequence is synthesized)
caaaatgcaaaactcaacgatcagattcacggacccagagcttttccatgtgtttatattgtaaatatttttgatttcatcaaattatttattcattaaaagaaatttttgtgaagcaca

SEQ ID NO: 593203 - DNA, 120 bp, Artificial Sequence
  ENSG00000173482_50 (sequence is synthesized)
gtgctgtggcccaatcctgtgcgtgtctcctcttcaggctcctgccggagcatgcttctctaatcttaccatttatcactgacccttcggtgaaactctcttctgtttaaatttaccagg

SEQ ID NO: 593204 - DNA, 120 bp, Artificial Sequence
  ENSG00000173482_51 (sequence is synthesized)
gtacactttgtaatacttgggaccaagaatttgaagatagtaatcagacaaatcaaacaactagtagtagtggagagacacgtagccctacaggaaggggtagaattatcattaaaaaca

SEQ ID NO: 593205 - DNA, 120 bp, Artificial Sequence
  ENSG00000173482_52 (sequence is synthesized)
aagaactttgtagctcaaaggtctctgcactacatccaccaagcattcatggaaaacctgggacgtaaatagggaactgtgcttgggaagtacagagataaaacaattctggccccacct

SEQ ID NO: 593206 - DNA, 120 bp, Artificial Sequence
  ENSG00000173482_53 (sequence is synthesized)
cgcaaggagcttacagccttaaaaagaatgatcatagaaactgttaggtacaaatggaaacttcttgctaaatacaagaactactaaaatgttacatgacccaagagaatgggccaatgc

SEQ ID NO: 593207 - DNA, 120 bp, Artificial Sequence
  ENSG00000173482_54 (sequence is synthesized)
cccagacccatttgtgccaactgcaattttagagcttctttgaagggcagtctgcaccatgggactcggctaagaaagatgagaacagaatgaagaacagatacgggaatatcattgcat

SEQ ID NO: 593208 - DNA, 120 bp, Artificial Sequence
  ENSG00000173482_55 (sequence is synthesized)
aagacattaaagttaccctaatagaaacagaactactggcagaatatgtgataagaacatttgctgttgaaaagggaggggccggaggtgaagcaaactgcagtccatccagagaagtgt

SEQ ID NO: 593209 - DNA, 120 bp, Artificial Sequence
  ENSG00000173482_56 (sequence is synthesized)
tatcaaagtacaaaacttctgtacagcaaaggaaacaatcaacaaagagaaaaagcaacctacagaatgagagcatatatttgaagaccgtatatctgataagagggttaatattcaaga

SEQ ID NO: 593210 - DNA, 120 bp, Artificial Sequence
  ENSG00000173482_57 (sequence is synthesized)
tatataagaaattcatacaactcaatagcaaaaaaaaaaaaatccttaagaatgagcaaataacctgatacatttttccaaggaagatatacaaatggtcaataggtataataaaaggtg

SEQ ID NO: 593211 - DNA, 77 bp, Artificial Sequence
  ENSG00000173482_58 (sequence is synthesized)
aggaagatatacaaatggtcaataggtataataaaaggtgattaacatcactaatcatcatttcagaatgacaaatc

SEQ ID NO: 593212 - DNA, 120 bp, Artificial Sequence
  ENSG00000173482_59 (sequence is synthesized)
tttctcactgcccaagctgaagctgcctgggaggaagggctgagcatgcctagcccagccccttctttggggagctgactgcctatgggaaccctctccctccatcctggcattgatgtg

SEQ ID NO: 593213 - DNA, 120 bp, Artificial Sequence
  ENSG00000173482_60 (sequence is synthesized)
agatccggatccctcctcccagctccaagcctgctgatgttcaaccaccctacaaggagccccccaagctttctcccagcctagaggctggacaccagcggggctctcagggttcatgat

SEQ ID NO: 593214 - DNA, 120 bp, Artificial Sequence
  ENSG00000173482_61 (sequence is synthesized)
ccagacccatttgtgccaactgcaattttagccacgttgtagtgatccaggtgccatttcagcaacagcaacatagctacacacttgtgtaccacctttcataccatgcatccccaggtg

SEQ ID NO: 593215 - DNA, 120 bp, Artificial Sequence
  ENSG00000173482_62 (sequence is synthesized)
ctttgcgatgcagatagaagtgaggttcccaaaccaggccctgctcatcaagcacccttggactaaattttcttcagagctgaacttctccgtaaaaaataaataacatatgaataacta

SEQ ID NO: 593216 - DNA, 120 bp, Artificial Sequence
  ENSG00000173482_63 (sequence is synthesized)
accagaattaacaatgaatctttcagcaccacactcaatttcaattggaaacactgctcagtcttcacctttatttaggatgaatgtttttggttttgttttcctttttttcttcttcag

SEQ ID NO: 593217 - DNA, 120 bp, Artificial Sequence
  ENSG00000173482_64 (sequence is synthesized)
ttgatctatccaagatctcagccaaaccttgcaactgtgtcatagttagaaatccaactgcctgactagagcttgtttaagggaaaagaattcagaatattcagcaccttgctatgtttt

SEQ ID NO: 593218 - DNA, 120 bp, Artificial Sequence
  ENSG00000173482_65 (sequence is synthesized)
ttttttctttttttccttttctttttgttgttgttagaacaaagttgagacaatttgatatactgatggggattcttcttgctagcctagcttcagtctggcttttttttccctcatgca

SEQ ID NO: 593219 - DNA, 120 bp, Artificial Sequence
  ENSG00000173482_66 (sequence is synthesized)
gccttggtccctgggctccctcctgcatctccccatttcagggccaagggcacaaggaatccaggcaattatctgttcaagtgatctacctggcattccctgttccttccctccctccct

SEQ ID NO: 593220 - DNA, 120 bp, Artificial Sequence
  ENSG00000173482_67 (sequence is synthesized)
cccttccccctttttgtttttcctctcataaacaaaccaaacaaacccaggagttttccaggtaacagaatcaagagcccaaatttgcacacttttctgtattaagggacccaaaaaagt

SEQ ID NO: 593221 - DNA, 120 bp, Artificial Sequence
  ENSG00000173482_68 (sequence is synthesized)
ctctgttaagtgctcagactttcaataccatttccttttattatctcttttaaactagctggtaaccagagcaagaccgctcctgagaatagtggctgaagggttatctctgtgcacttt

SEQ ID NO: 593222 - DNA, 120 bp, Artificial Sequence
  ENSG00000173482_69 (sequence is synthesized)
gttcttctcccagggtcctgggaagaacagaagcctcctgaccctaaaaattctgcccagtgtctggcgtcctggggatttgcccattttgtgaagtactgtatactaactagtaactct

SEQ ID NO: 593223 - DNA, 120 bp, Artificial Sequence
  ENSG00000173482_70 (sequence is synthesized)
gtaagtggaaattcaaggtatatcgggaatttccattttttcagaagcaatgttacatcctgctcttaggacattcgtatttttactcatatttgattgttttaagtaggcgtcacaccg

SEQ ID NO: 593224 - DNA, 120 bp, Artificial Sequence
  ENSG00000173482_71 (sequence is synthesized)
accacctggaaaatgattcatgaagtgaagtgaagaagaagtaagaatcccttacatttagatggtgcatttaagtttatgaaagcctctgggaaacctaatcccatttttttagctaac

SEQ ID NO: 593225 - DNA, 120 bp, Artificial Sequence
  ENSG00000173482_72 (sequence is synthesized)
atcgtaataatttatcttttaatgtactttatagtcaatcaaatgttgccactcgcatttctcacttggatcttccattttcaggtgttgtttactggtagtgtgctgtttttgggaatc

SEQ ID NO: 593226 - DNA, 120 bp, Artificial Sequence
  ENSG00000173482_73 (sequence is synthesized)
aatctgttggacaagaggttgttgaaaaaaaataattaaaggtcatatttatgtatagaaaaaaccgaattaactgtaataagaggctttttaaacttcccatataactaaagattaata

SEQ ID NO: 593227 - DNA, 120 bp, Artificial Sequence
  ENSG00000173482_74 (sequence is synthesized)
ataaatatgataagactctaccaatgaattttaagaaaagtcagtgccaaatcagaattagaggccccatatttacactgtgaactcattgaagatatatatgagaacagctctctgtac

SEQ ID NO: 593228 - DNA, 120 bp, Artificial Sequence
  ENSG00000173482_75 (sequence is synthesized)
ttctaagaggtttcataatcatattaacttttatgttctgaaataagaacttctaagtacttttatgttttgaattaagaacttccagacttcttgtcttcacagtaatgccaagttttt

SEQ ID NO: 593229 - DNA, 120 bp, Artificial Sequence
  ENSG00000173482_76 (sequence is synthesized)
ctggaccttctttgcactattattttgaccagcaaatcctaccatagacaaaattctgctcattcctcatgtgaaatactgagttccaagtgagtaggatcagaatgacagaggtcttca

SEQ ID NO: 593230 - DNA, 120 bp, Artificial Sequence
  ENSG00000173482_77 (sequence is synthesized)
gccacagttttcatggtgctgcagtgcgtgtggtggtttgtattgggtccgattggttttaatcaatctgtgtaatatttggcattgcaccccagtctcctagcacttgagcccttggac

SEQ ID NO: 593231 - DNA, 120 bp, Artificial Sequence
  ENSG00000173482_78 (sequence is synthesized)
cgtgtttctctctggaggaactgtctccactctcttgatgatgtggggctaaaattgataccgtctttcctccttctctggttctctaaagttagtaactcgttccatctccttctccag

SEQ ID NO: 593232 - DNA, 120 bp, Artificial Sequence
  ENSG00000173486_0 (sequence is synthesized)
agcaccaccggggttgactccgggggcgcggcgaggagagacatgaggctgagctggttccgggtcctgacagtactgtccatctgcctgagcgccgtggccacggccacgggggccgag

SEQ ID NO: 593233 - DNA, 120 bp, Artificial Sequence
  ENSG00000173486_1 (sequence is synthesized)
ggcaaaaggaagctgcagatcggggtcaagaagcgggtggaccactgtcccatcaaatcgcgcaaaggggatgtcctgcacatgcactacacggggaagctggaagatgggacagagttt

SEQ ID NO: 593234 - DNA, 120 bp, Artificial Sequence
  ENSG00000173486_2 (sequence is synthesized)
agggggaaaagcgcaagctggtgatcccatccgagctagggtatggagagcggggagctcccccaaagattccaggtggtgcaaccctggtgttcgaggtggagctgctcaaaatagagc

SEQ ID NO: 593235 - DNA, 120 bp, Artificial Sequence
  ENSG00000173486_3 (sequence is synthesized)
aggtggagctgctcaaaatagagcgacgaactgagctgtaaccagactggggaggggcagggggagaggcccccatcagggaccagactgttccaaaaaaaaaacaaaaaacaaaaacaa

SEQ ID NO: 593236 - DNA, 120 bp, Artificial Sequence
  ENSG00000173486_4 (sequence is synthesized)
gggtgagcaaaggggcgggtccctggctgctgtggcctcccctgaccccctccccccgctgctggggtcctcggccaagcccccttctcactggactgagacatgaggctgagctggttc

SEQ ID NO: 593237 - DNA, 120 bp, Artificial Sequence
  ENSG00000173486_5 (sequence is synthesized)
atggccccgggcgtcctcgcgggggtggtctccgtggtggccgggcttggggacgccgtaggccgagaactccaccgggagaggtggtgtgggtggagcgggctcggcggccagcagaca

SEQ ID NO: 593238 - DNA, 120 bp, Artificial Sequence
  ENSG00000173486_6 (sequence is synthesized)
cagggccagtctgggtgccccggagacccccaagggctcagagttggggcggcgccccgggcggaagcacagggccaggctggggggtatctcccgaggacccgggctcctcggagccac

SEQ ID NO: 593239 - DNA, 120 bp, Artificial Sequence
  ENSG00000173486_7 (sequence is synthesized)
gtggaaggcggagcccggcggcggggggcggagctaggagggtcgggggacggagcctggctcttgaaggaggagctggaggaggtgaaaggcggagcctcggggtcggaagcagagggg

SEQ ID NO: 593240 - DNA, 120 bp, Artificial Sequence
  ENSG00000173486_8 (sequence is synthesized)
gacggagcggaggcgctgggggcggggcttcagccggtgagtggcgtggctacggctccggaaaaggggtctagttctgtcgaaggcggggctgcaggcccgggggcggtaccgcgtcct

SEQ ID NO: 593241 - DNA, 120 bp, Artificial Sequence
  ENSG00000173486_9 (sequence is synthesized)
ggcagctgggtgtggcgtgagtggggccgcccagtcggggcaactgcagtgcagccagatagggtctggactttgcgtaaagggacaggcgggaactgaagagcggaggtggggactggg

SEQ ID NO: 593242 - DNA, 120 bp, Artificial Sequence
  ENSG00000173486_10 (sequence is synthesized)
gggtgagtcatgggggaatgggcttgggagtgggggcgtgcatggccaccgcccaggaggtaagctgtgggaggcaagccccagggatacaagacaagggccctgggtgctgccatgggc

SEQ ID NO: 593243 - DNA, 120 bp, Artificial Sequence
  ENSG00000173486_11 (sequence is synthesized)
ctgggaccaggggctgctggggatgtgtgagggggaaaagcgcaagctggtgatcccatccgagctaggtaagaggcccctcctgagggtgcagagcgagtttggggtgtgtgactggga

SEQ ID NO: 593244 - DNA, 120 bp, Artificial Sequence
  ENSG00000173486_12 (sequence is synthesized)
agggtgaaagctgcttcagcttttcattggtcttcaccgtatccattcattacaatacatgcctcctccaagtttggctgtgtctagcagtgagtacagggcaagatcattgaagcactc

SEQ ID NO: 593245 - DNA, 120 bp, Artificial Sequence
  ENSG00000173511_0 (sequence is synthesized)
ccccggcgggcaccatgagccctctgctccgccgcctgctgctcgccgcactcctgcagctggcccccgcccaggcccctgtctcccagcctgatgcccctggccaccagaggaaagtgg

SEQ ID NO: 593246 - DNA, 120 bp, Artificial Sequence
  ENSG00000173511_1 (sequence is synthesized)
tgtcatggatagatgtgtatactcgcgctacctgccagccccgggaggtggtggtgcccttgactgtggagctcatgggcaccgtggccaaacagctggtgcccagctgcgtgactgtgc

SEQ ID NO: 593247 - DNA, 120 bp, Artificial Sequence
  ENSG00000173511_2 (sequence is synthesized)
agcgctgtggtggctgctgccctgacgatggcctggagtgtgtgcccactgggcagcaccaagtccggatgcagatcctcatgatccggtacccgagcagtcagctgggggagatgtccc

SEQ ID NO: 593248 - DNA, 120 bp, Artificial Sequence
  ENSG00000173511_3 (sequence is synthesized)
tggaagaacacagccagtgtgaatgcagacctaaaaaaaaggacagtgctgtgaagccagacagccccaggcccctctgcccacgctgcacccagcaccaccagcgccctgacccccgga

SEQ ID NO: 593249 - DNA, 120 bp, Artificial Sequence
  ENSG00000173511_4 (sequence is synthesized)
acgccgcagcttcctccgttgccaagggcggggcttagagctcaacccagacacctgcaggtgccggaagctgcgaaggtgacacatggcttttcagactcagcagggtgacttgcctca

SEQ ID NO: 593250 - DNA, 120 bp, Artificial Sequence
  ENSG00000173511_5 (sequence is synthesized)
gaggctatatcccagtgggggaacaaagaggagcctggtaaaaaacagccaagcccccaagacctcagcccaggcagaagctgctctaggacctgggcctctcagagggctcttctgcca

SEQ ID NO: 593251 - DNA, 120 bp, Artificial Sequence
  ENSG00000173511_6 (sequence is synthesized)
tcccttgtctccctgaggccatcatcaaacaggacagagttggaagaggagactgggaggcagcaagaggggtcacataccagctcaggggagaatggagtactgtctcagtttctaacc

SEQ ID NO: 593252 - DNA, 120 bp, Artificial Sequence
  ENSG00000173511_7 (sequence is synthesized)
actctgtgcaagtaagcatcttacaactggctcttcctcccctcactaagaagacccaaacctctgcataatgggatttgggctttggtacaagaactgtgacccccaaccctgataaaa

SEQ ID NO: 593253 - DNA, 120 bp, Artificial Sequence
  ENSG00000173511_8 (sequence is synthesized)
cccagacacctgcagctgctggcacctggagctgtataagcaagtccaacattctaactcaggagtcagatacaggagggacaatgccagcagaggatgtcaagggctgtggtgaggggt

SEQ ID NO: 593254 - DNA, 80 bp, Artificial Sequence
  ENSG00000173511_9 (sequence is synthesized)
cggctcctccggccgcctccgctgcgctgcgctgcgctgcctgcacccagggctcgggagggggccgcggaggagtcgcc

SEQ ID NO: 593255 - DNA, 120 bp, Artificial Sequence
  ENSG00000173511_10 (sequence is synthesized)
gtgaatgcagacctaaaaaaaaggacagtgctgtgaagccagacagggctgccactccccaccaccgtccccagccccgttctgttccgggctgggactctgcccccggagcaccctccc

SEQ ID NO: 593256 - DNA, 120 bp, Artificial Sequence
  ENSG00000173517_0 (sequence is synthesized)
tgcagtaaacattgctatcttcagaaattaaggaatgagaggcaaggaagaaaggacattcatcttggaaagacccaaagcaccttgaaatttggaaggaatgttttgctagctgctaaa

SEQ ID NO: 593257 - DNA, 120 bp, Artificial Sequence
  ENSG00000173517_1 (sequence is synthesized)
accacctttgtcaccagaatgaatgaagtgcttcagatttaaataattgatcattcttagaagagctgctgtaacacataggggaagtgaaaactaacagatgaaagttttgtcatgcac

SEQ ID NO: 593258 - DNA, 120 bp, Artificial Sequence
  ENSG00000173517_2 (sequence is synthesized)
tgaaagaaaagcattgtctgtgaagttctatttttaaaaatgtctgcttgtaacacctttactgaacatgtttggaaacctggtgaatgcaagaattgctttaaacctaaaagtttgcac

SEQ ID NO: 593259 - DNA, 120 bp, Artificial Sequence
  ENSG00000173517_3 (sequence is synthesized)
cagcttcccccagaccctgagaaggcacccatcacccatggcaatgtgaaaactaatgccaatcacagtaacaaccaccgcatcaggaacacgggcaatttccggcctcctgtggctaaa

SEQ ID NO: 593260 - DNA, 120 bp, Artificial Sequence
  ENSG00000173517_4 (sequence is synthesized)
aaacccactatagctgtgaagcccactatgatagtggcagatgggcaaagtatatgtggtgagcttagcatccaagaacactgtgagaacaaacctgtcatcatagggtggaaccgaaac

SEQ ID NO: 593261 - DNA, 120 bp, Artificial Sequence
  ENSG00000173517_5 (sequence is synthesized)
agagctgccttgagtcagaaaccacttaacaataataatgaagatgatgaaggaattagccatgttcctaagccttatggcaataatgatagtgcaaagaagatgtcagataacaataat

SEQ ID NO: 593262 - DNA, 120 bp, Artificial Sequence
  ENSG00000173517_6 (sequence is synthesized)
ggactaactgaagtgttaaaggagatagcaggcttggatactgcccctcagataagaggaaatgaaacaaactccagagaaacattcttgggaagaataaatgattgctataaacgatca

SEQ ID NO: 593263 - DNA, 120 bp, Artificial Sequence
  ENSG00000173517_7 (sequence is synthesized)
ttggaaagaaagcttccaccaagttgcatgataggtgggataaaggaaactcagggcaagcatgttattctgagtgggagcacagaagtgattagtaatgaagggggccggttctgttac

SEQ ID NO: 593264 - DNA, 120 bp, Artificial Sequence
  ENSG00000173517_8 (sequence is synthesized)
ccagagttttccagtggcgaggagagtgaagaggatgtacttttcagtaacatggaggaggagcacgagagttgggatgagagtgatgaagagctgttggccatggagattcgcatgaga

SEQ ID NO: 593265 - DNA, 120 bp, Artificial Sequence
  ENSG00000173517_9 (sequence is synthesized)
gggcaacctcgctttgccaacttcagagcaaacacattgtctcctgttcgattctttgtggacaaaaaatggaataccatccccctgcgaaacaagtctctgcagagaatctgtgctgtg

SEQ ID NO: 593266 - DNA, 120 bp, Artificial Sequence
  ENSG00000173517_10 (sequence is synthesized)
gactatgatgacagctatgatgaaatcctgaatggttatgaggaaaattctgtggtctcttatggacaaggaagcattcagagcatggtgtcatctgactccacatcaccagattcttct

SEQ ID NO: 593267 - DNA, 120 bp, Artificial Sequence
  ENSG00000173517_11 (sequence is synthesized)
ttaacagaagaatcacgttctgagacagccagtagtttatcccagaagatttgtaatgggggattatctcctggtaacccaggagattctaaggacatgaaggaaattgagcccaattat

SEQ ID NO: 593268 - DNA, 120 bp, Artificial Sequence
  ENSG00000173517_12 (sequence is synthesized)
gaaagtccctctagtaataatcaggataaagattcatcacaggcttccaaaagctcaataaaagttccagagacccacaaagcagtccttgctctccgattagaagagaaagatggcaag

SEQ ID NO: 593269 - DNA, 120 bp, Artificial Sequence
  ENSG00000173517_13 (sequence is synthesized)
attgctgtacaaactgagaaggaagaaagtaaagcctctacagatgttgctgggcaagcagtaaccataaaccttgtccccacagaagagcaagcaaaaccttaccgagttgtgaacctg

SEQ ID NO: 593270 - DNA, 120 bp, Artificial Sequence
  ENSG00000173517_14 (sequence is synthesized)
gaacagccattgtgcaagccatatactgtcgtggatgtgtcagcagccatggccagtgagcacctcgagggccctgttaacagccccaagacaaaaagctcatcctctactccaaactct

SEQ ID NO: 593271 - DNA, 120 bp, Artificial Sequence
  ENSG00000173517_15 (sequence is synthesized)
ccagttacatcatcttcattgacaccaggacaaataagtgcccatttccaaaaatccagtgcaattcgataccaagaagtatggacttctagcaccagtccacgacaaaagatacctaaa

SEQ ID NO: 593272 - DNA, 120 bp, Artificial Sequence
  ENSG00000173517_16 (sequence is synthesized)
gtagaactaattactagtggaactggaccaaatgttcctccaaggaaaaactgtcacaaatcagcacctacatcacccacagctacaaacatttcctccaaaaccatccctgttaagtca

SEQ ID NO: 593273 - DNA, 120 bp, Artificial Sequence
  ENSG00000173517_17 (sequence is synthesized)
cctaatttgtctgaaattaaatttaatagttataacaatgctggtatgccaccttttccaattatcattcatgacgagccaacttatgctcggagttccaaaaatgctatcaaagttccc

SEQ ID NO: 593274 - DNA, 120 bp, Artificial Sequence
  ENSG00000173517_18 (sequence is synthesized)
attgttatcaatccaaatgcatatgacaatctagctatctacaaaagttttctgggaacaagtggagaactctcagtgaaggaaaaaaccacaagtgtaataagccatacttatgaagaa

SEQ ID NO: 593275 - DNA, 120 bp, Artificial Sequence
  ENSG00000173517_19 (sequence is synthesized)
atagaaacagaaagcaaagtgcctgataacaccactagcaaaaccactgactgtcttcaaactaaagggttttcaaacagcacagagcataaaaggggctcagtggctcagaaggttcaa

SEQ ID NO: 593276 - DNA, 120 bp, Artificial Sequence
  ENSG00000173517_20 (sequence is synthesized)
gagtttaacaactgtctcaacagaggtcagtcttcaccacagagaagctatagttccagccacagctccccagcaaagatccagagagccactcaagagcctgtggccaaaatagaaggc

SEQ ID NO: 593277 - DNA, 120 bp, Artificial Sequence
  ENSG00000173517_21 (sequence is synthesized)
actcaggagtctcagatggtgggcagcagcagcaccagagagaaagcaagcacagtgctttctcagattgtggcttcaatccaacccccacagtctcctccagaaacacctcaatctggc

SEQ ID NO: 593278 - DNA, 120 bp, Artificial Sequence
  ENSG00000173517_22 (sequence is synthesized)
cctaaagcttgcagtgtggaagagctttatgccattcctccagatgctgatgttgctaagagcacacctaagagtacgccagtccggcccaaatctctctttacatctcagcctagtggt

SEQ ID NO: 593279 - DNA, 120 bp, Artificial Sequence
  ENSG00000173517_23 (sequence is synthesized)
gaggctgaagcacctcagaccacagacagtcctaccaccaaagtacagaaagacccatccataaagccagtcaccccctctccctccaaattagtgactagcccccaaagtgagccacca

SEQ ID NO: 593280 - DNA, 120 bp, Artificial Sequence
  ENSG00000173517_24 (sequence is synthesized)
gctccctttcccccgccacgctctacttcttctccttaccatgcaggtaaccttttgcagaggcatttcaccaactggaccaagccaaccagccctaccaggtcaacagaagctgaatca

SEQ ID NO: 593281 - DNA, 120 bp, Artificial Sequence
  ENSG00000173517_25 (sequence is synthesized)
gttttgcactctgaaggcagcaggcgggcagctgatgcaaaacctaagcgctggatatcatttaaaagcttcttccgccgtcggaaaacagatgaggaggatgacaaagagaaagagcga

SEQ ID NO: 593282 - DNA, 120 bp, Artificial Sequence
  ENSG00000173517_26 (sequence is synthesized)
gagaaagggaaactggtgggcctggatggcacagtcattcacatgctgcctcctcctccagttcagcgccatcactggttcacagaggcgaaaggagagtccagtgagaaaccagccatt

SEQ ID NO: 593283 - DNA, 120 bp, Artificial Sequence
  ENSG00000173517_27 (sequence is synthesized)
gtcttcatgtacaggtgcgaccctgctcaaggccagctcagtgtggatcagagcaaggctaggacagaccaggcagcagtcatggagaagggtagagcagagaatgcattactacaggac

SEQ ID NO: 593284 - DNA, 120 bp, Artificial Sequence
  ENSG00000173517_28 (sequence is synthesized)
tcagagaagaagaggagtcattcttctccatcacagattcctaaaaagattctcagtcacatgacccatgaagtaacagaggatttttctcctcgggatccaagaactgttgttgggaag

SEQ ID NO: 593285 - DNA, 120 bp, Artificial Sequence
  ENSG00000173517_29 (sequence is synthesized)
caagatggcaggggctgcacttcagtcacaacagcattgtccctacctgaactggaaagggaagatggaaaagaagacatttcagatcctatggacccgaacccttgtagtgcaacatac

SEQ ID NO: 593286 - DNA, 120 bp, Artificial Sequence
  ENSG00000173517_30 (sequence is synthesized)
agcaacttagggcaatctagagcagccatgatacctcccaagcagccacgacagcccaagggagctgtggacgatgccatcgcctttggagggaaaacagaccaagaagcacccaatgct

SEQ ID NO: 593287 - DNA, 120 bp, Artificial Sequence
  ENSG00000173517_31 (sequence is synthesized)
tcccaacctacaccacccccactgccaaagaagatgatcataagagccaatacagagccaatctccaaggacctccaaaaatccatggaaagtagtctttgtgtcatggctaatcccacc

SEQ ID NO: 593288 - DNA, 120 bp, Artificial Sequence
  ENSG00000173517_32 (sequence is synthesized)
tatgatatcgaccccaactgggatgccagcagtgctggttcttccatcagctatgaactcaaaggactggacattgagtcttatgactccttggaaaggcctttgcgcaaggagagacct

SEQ ID NO: 593289 - DNA, 120 bp, Artificial Sequence
  ENSG00000173517_33 (sequence is synthesized)
gtcccctcagcagcaaacagcatttccagcttaaccactctcagtattaaggatagattttccaacagcatggaatccctctccagccggcgtgggccctcttgcagacagggccgaggc

SEQ ID NO: 593290 - DNA, 120 bp, Artificial Sequence
  ENSG00000173517_34 (sequence is synthesized)
atccagaagccgcagagacaagcactttatcgaggacttgagaatcgggaggaagtagtgggtaaaatccgaagccttcatacagatgccttgaagaaactggctgttaaatgcgaagac

SEQ ID NO: 593291 - DNA, 120 bp, Artificial Sequence
  ENSG00000173517_35 (sequence is synthesized)
cttttcatggctgggcagaaagaccagctccgttttggagtggacagctggtcagacttcaggctaaccagtgacaaaccatgttgtgaggcaggtgatgcggtttactatactgcttca

SEQ ID NO: 593292 - DNA, 120 bp, Artificial Sequence
  ENSG00000173517_36 (sequence is synthesized)
tatgcaaaagatccacttaataactatgcagtcaagatctgtaagagcaaagctaaagaatctcagcagtattatcacagcttggctgtccggcagagtctggctgtccattttaacatt

SEQ ID NO: 593293 - DNA, 120 bp, Artificial Sequence
  ENSG00000173517_37 (sequence is synthesized)
cagcaggactgtggtcatttccttgctgaagtccctaaccgtctgcttccctgggaggatccagatgaccctgaaaaggatgaggatgacatggaagagactgaagaagacgccaaagga

SEQ ID NO: 593294 - DNA, 120 bp, Artificial Sequence
  ENSG00000173517_38 (sequence is synthesized)
gaaacggatgggaaaaacccaaagccctgttctgaagcagcatcatcccagaaagagaatcagggagtcatgagcaagaagcagaggagccacgttgtggtcatcaccagggaggttcca

SEQ ID NO: 593295 - DNA, 120 bp, Artificial Sequence
  ENSG00000173517_39 (sequence is synthesized)
tgtcttactgtggctgattttgtgcgagactctctggcccagcatgggaaaagccctgatttgtatgagaggcaggtgtgtctgctgctcttacagctatgctctggtcttgagcacctc

SEQ ID NO: 593296 - DNA, 120 bp, Artificial Sequence
  ENSG00000173517_40 (sequence is synthesized)
aaaccctaccatgtcactcactgcgatctacgcctagagaacctgctacttgtccactaccagcctggggggactgcccaaggctttgggcctgcagagcccagccccacctcatcttat

SEQ ID NO: 593297 - DNA, 120 bp, Artificial Sequence
  ENSG00000173517_41 (sequence is synthesized)
cccactaggcttatagtgagcaacttctctcaggccaagcagaagagccatctggtggaccccgagatcctccgggaccagtctcgccttgccccagagatcataacagctacccagtat

SEQ ID NO: 593298 - DNA, 120 bp, Artificial Sequence
  ENSG00000173517_42 (sequence is synthesized)
aaaaagtgtgatgagttccagacaggcatcctcatctatgagatgctgcacctacccaacccctttgatgagaacccagagctgaaggagagggaatacacacgagcagacctgcctcgc

SEQ ID NO: 593299 - DNA, 120 bp, Artificial Sequence
  ENSG00000173517_43 (sequence is synthesized)
atcccattccgctccccctactcccggggtctgcagcagctggccagctgcctcctgaatcccaacccttctgagcggatcctcatttcagacgccaaaggcatcctccagtgtctgctc

SEQ ID NO: 593300 - DNA, 120 bp, Artificial Sequence
  ENSG00000173517_44 (sequence is synthesized)
tggggcccccgcgaagatctcttccagactttcaccgcctgccctagcctagtacagaggaacaccctgctccaaaactggctagacatcaagcgaacactgctcatgatcaagtttgct

SEQ ID NO: 593301 - DNA, 120 bp, Artificial Sequence
  ENSG00000173517_45 (sequence is synthesized)
gagaagtccctggacagggaaggtggaatcagccttgaggactggctttgtgctcagtatttggcttttgccactacagactccctcagttgtattgtgaaaattctgcagcaccgttaa

SEQ ID NO: 593302 - DNA, 120 bp, Artificial Sequence
  ENSG00000173517_46 (sequence is synthesized)
tgtgtacctggatgatgcttttactacatcttcaccttcttcatgtcacccatgcacttcccctccctagtgctcactccaaattcaaggaaagaagaaaggcaaacctctatccctgtc

SEQ ID NO: 593303 - DNA, 120 bp, Artificial Sequence
  ENSG00000173517_47 (sequence is synthesized)
ccttgaaacaccttctatcctaatagtcccataaatgcaggtaaaaatgaaaatccatattcttgaagggacagcttctttggtatgaactcagccagtgagctgtgtccatttcctcca

SEQ ID NO: 593304 - DNA, 120 bp, Artificial Sequence
  ENSG00000173517_48 (sequence is synthesized)
taattctggatatcacctatctttttagcaccaagtatttattctcactagcagtagacagacttaaccagtctctaccacgacccagtagactctgacaacagactcttcctttaaggt

SEQ ID NO: 593305 - DNA, 120 bp, Artificial Sequence
  ENSG00000173517_49 (sequence is synthesized)
gtcaacaactgacttactaggcaggactgccatccttagcatcagcccagttttggttaccagggactatatcttttgttccaggagagagtagaaagaaaaggagagatcccatccttg

SEQ ID NO: 593306 - DNA, 120 bp, Artificial Sequence
  ENSG00000173517_50 (sequence is synthesized)
ggtcatagacccattttcattgccattatctgtaagtatgtgcactgcatggaggacagccctaatagtctcccctctgctgccactgcctgattctccactctgtccccacttgccagt

SEQ ID NO: 593307 - DNA, 120 bp, Artificial Sequence
  ENSG00000173517_51 (sequence is synthesized)
gaagtttggatttatcagccacttgtggcccattacagagctgacccaaggtggtgtcaccaatgcctcagcagggtggagtgcagttcagagcttataaatagctggcagggcatgagg

SEQ ID NO: 593308 - DNA, 120 bp, Artificial Sequence
  ENSG00000173517_52 (sequence is synthesized)
agatgattttcttgcatgtgcaattctctaggggccatcaggaaacagagtttaaagtaccctttgattactgtcagaactgtcagcatttgcagttttccccgagcagtaattggccag

SEQ ID NO: 593309 - DNA, 120 bp, Artificial Sequence
  ENSG00000173517_53 (sequence is synthesized)
ctcccttctatcagtagccagtgttaactagtttaccaaatgctgtaaacaattgccctgaatgaaatagctgtcagtggagctctaagatctcctttagagggcacagtgaggtgggct

SEQ ID NO: 593310 - DNA, 120 bp, Artificial Sequence
  ENSG00000173517_54 (sequence is synthesized)
gttgggatggccgtaggcaggggagaggaagaaggccactgatgagactgctgacctcctcagaaggttgacctcttctagagagactgcctcccagtgtttaagtggctcattgctcct

SEQ ID NO: 593311 - DNA, 120 bp, Artificial Sequence
  ENSG00000173517_55 (sequence is synthesized)
tctgactctgtaaaatggctctggaggacagctcacaggaattctgattgctgaggtgggtgattgagagctgttcaccatgtgtgcagcctgtgctccccttctatggatatgtgtgca

SEQ ID NO: 593312 - DNA, 120 bp, Artificial Sequence
  ENSG00000173517_56 (sequence is synthesized)
atttttgtatgtatttttttagctgtatattacagtgtttatgttgcaacttcacctgaagcgagtctacagaaaccctcccccttcttcccttggcacatatttgcgctaagagatgag

SEQ ID NO: 593313 - DNA, 88 bp, Artificial Sequence
  ENSG00000173517_57 (sequence is synthesized)
catgttcacctgtgcttgttttattcaaaactgtgagtatgtgtttactttgaccttgaaatcccaagagtcactcgaacaatgtgtg

SEQ ID NO: 593314 - DNA, 120 bp, Artificial Sequence
  ENSG00000173517_58 (sequence is synthesized)
tttgaccttgaaatcccaagagtcactcgaacaatgtgtgtgtacacttgtgtgcccatgtgtgcgtgcacacgcatgctggaagtagaggccaggcctctagaaaagcaacctgtggca

SEQ ID NO: 593315 - DNA, 120 bp, Artificial Sequence
  ENSG00000173517_59 (sequence is synthesized)
gggttgacagacatgttctctgtgcctagtgagtgagtgagccctgaggcccctcatctaccagtgcagagtttccttaaagccaagactgactgtgcagtattacttacatagcacatt

SEQ ID NO: 593316 - DNA, 120 bp, Artificial Sequence
  ENSG00000173517_60 (sequence is synthesized)
agtggccttggaaatttctaaacttttaacatttttaacagcttttcatgtgattcatgtataacaaagaggatcaggaaaggaaaataatgtattttattgtgctcttattactttttt

SEQ ID NO: 593317 - DNA, 120 bp, Artificial Sequence
  ENSG00000173517_61 (sequence is synthesized)
aagtgattgtaatatgtgaggctctatttggagaatgtcccttatcccctggccagcaatataggactcacaggaaagaaggctggttagcccacaaagagtcttgcctcctctagccag

SEQ ID NO: 593318 - DNA, 120 bp, Artificial Sequence
  ENSG00000173517_62 (sequence is synthesized)
agtgcagggctctgctcctaggaatggccatggagtgggcatgctgctgcaggccagcagtctgctcttggtgtcctgtggcatggccgcgccttgccttgaaggttggtgtttggttca

SEQ ID NO: 593319 - DNA, 120 bp, Artificial Sequence
  ENSG00000173517_63 (sequence is synthesized)
tcttagcatagaacatgtgcacataactccttgcctgattatgcactgaagggcagcacacagaccactgaccatgtcagccagcacattcccttaacctcccccacctcccatcttgca

SEQ ID NO: 593320 - DNA, 120 bp, Artificial Sequence
  ENSG00000173517_64 (sequence is synthesized)
atgtcttgcatattgagatataccttctcaatgtcatgttcgtggtgccttgcccatgtaaatttcaatgttgactatttaatgaggttacatatttaatgctgaatgtttcctggtccc

SEQ ID NO: 593321 - DNA, 120 bp, Artificial Sequence
  ENSG00000173517_65 (sequence is synthesized)
tctatttgttatgtctctacttatctttttttttctttctctttttctgttatgatttggatccagtcttcactttaactctatggtataataagcatggacacctccactaccattatc

SEQ ID NO: 593322 - DNA, 120 bp, Artificial Sequence
  ENSG00000173517_66 (sequence is synthesized)
ttacagcactggtaaaccaagcacctcttcatatcagatgtttttagtactgtttttatattcagatttgttaagggcaaaagatgaatgcaaactagccagagaaaagcctcaggcttc

SEQ ID NO: 593323 - DNA, 120 bp, Artificial Sequence
  ENSG00000173517_67 (sequence is synthesized)
ccagagacaggtggctagattaatttttctctgggtgatggccaaagaatgtgagatagagagggaagggggtgttacaggttagagcagaatagagaaagaaactatatttctaggcaa

SEQ ID NO: 593324 - DNA, 120 bp, Artificial Sequence
  ENSG00000173517_68 (sequence is synthesized)
aaagtactacatgagttggtcttcagaatatttttccaaaaaaatgaaattcagtcagtttaacattatcacaaatatttttcattttaattgtggtaggacctttgaatttgttcatca

SEQ ID NO: 593325 - DNA, 120 bp, Artificial Sequence
  ENSG00000173517_69 (sequence is synthesized)
actggaaagaaatcctaccctctgtagacacatacacacacatttatatatctatgtgtttgaattgtgactagtatagcactttacattttctcaagtaacaggaagttattgccttca

SEQ ID NO: 593326 - DNA, 120 bp, Artificial Sequence
  ENSG00000173517_70 (sequence is synthesized)
atattgattggaaattgttttctattgaagtctatactgtagagttttccatttatattgagagtttgaacaattaagctcctattggaacttttccttaagccacatgagcatgaacaa

SEQ ID NO: 593327 - DNA, 120 bp, Artificial Sequence
  ENSG00000173517_71 (sequence is synthesized)
tctctgtgacacttgggtgctagagaaacacaacagtggctaaagtagccaagagcaagactgaatgtatagcagagtgccttgttagagtggtaacctagtcttggaagcaattcagtg

SEQ ID NO: 593328 - DNA, 120 bp, Artificial Sequence
  ENSG00000173517_72 (sequence is synthesized)
gatgtttcataaagaggactagaacttcaagaagcctcctgtgctggctgaggtgagcccttttggtatatgtacactactgggttgcctagaagccaattcatgaagaataacagcagg

SEQ ID NO: 593329 - DNA, 120 bp, Artificial Sequence
  ENSG00000173517_73 (sequence is synthesized)
atgagaaaaagagtcactgtaacctgtggaacaacaacgtaagaatcaccaacccctaggctgagctagaactggaagccaggaatatggcaatgagtttcaagatttgccctcagaaga

SEQ ID NO: 593330 - DNA, 120 bp, Artificial Sequence
  ENSG00000173517_74 (sequence is synthesized)
tgaactgggtgaggtatgggttgaggtgagggcacaagcactcatcctacctaccctgctgctgttgaggagctagaagtaaaacatattggttaggattttaacagttggagtagcctc

SEQ ID NO: 593331 - DNA, 120 bp, Artificial Sequence
  ENSG00000173517_75 (sequence is synthesized)
ccattatcagattaagtgggggtcacttttgcttccaaactcagaataagtttgtaaacatgggaaagtctaagccaagagatctaaagctctagaaatattaatgacatttctgggagt

SEQ ID NO: 593332 - DNA, 71 bp, Artificial Sequence
  ENSG00000173517_76 (sequence is synthesized)
tgacatttctgggagtaaaactactaaaaattatatcttaaaagtttctagtagtatgaagttcgcgaggt

SEQ ID NO: 593333 - DNA, 89 bp, Artificial Sequence
  ENSG00000173517_77 (sequence is synthesized)
agattgagcaacttcgtctcaaaaaaaagtttccaggaaagatctttgggtcctactaagcgtctcaattttgagttatgaatactttg

SEQ ID NO: 593334 - DNA, 120 bp, Artificial Sequence
  ENSG00000173517_78 (sequence is synthesized)
gtcctactaagcgtctcaattttgagttatgaatactttggttcagggaagtaacctgacatttggttttgctggaattagggttttcgctagatttgactgcaattaggatttcttcta

SEQ ID NO: 593335 - DNA, 120 bp, Artificial Sequence
  ENSG00000173517_79 (sequence is synthesized)
gattttaccagcagtgatctgaaaaagtacaggctagtcacagaaatagagatggatttaggatactacactatatttcaaatgattctagatgtgtaaatatagtatgaacattcttgg

SEQ ID NO: 593336 - DNA, 120 bp, Artificial Sequence
  ENSG00000173517_80 (sequence is synthesized)
agaggggtgagacaaactggacttgctgggccaaccctggcatgtttttcattctcctcactagttgacaaggattgaaaattccgctccagcctaatgagtgaacaggatggctgccca

SEQ ID NO: 593337 - DNA, 120 bp, Artificial Sequence
  ENSG00000173517_81 (sequence is synthesized)
caaaaccaagttattagctttatgtcatcgaagctcatattctcaaaggcccaaagtgctgtgccgagacaaatccaagtgctgctcttgctgaagtgcgcactgaagtccagctgtccg

SEQ ID NO: 593338 - DNA, 120 bp, Artificial Sequence
  ENSG00000173517_82 (sequence is synthesized)
tgcttacagcagtgccaaaagtggggattccatggaccaaaaacggtgccataagggaagccagaagagttgcagtgcaagatcctgggagagattataccaaagaaatcaagccttttt

SEQ ID NO: 593339 - DNA, 120 bp, Artificial Sequence
  ENSG00000173517_83 (sequence is synthesized)
atcctgatgcttctaagatgatgagggtgagctgtgacagatgctgtgggaggggagttcacatacattccatgtcaaggcatttagctgataaatccatcctcagaaaagcaccttttt

SEQ ID NO: 593340 - DNA, 120 bp, Artificial Sequence
  ENSG00000173517_84 (sequence is synthesized)
aaaaagaagtccattttgtatattagaagatgatgatgatgatgaagatgaagaaagccctggcagatacaaagttcctcagtatttaaggagaaggatctcttccatgtccccttgaca

SEQ ID NO: 593341 - DNA, 120 bp, Artificial Sequence
  ENSG00000173517_85 (sequence is synthesized)
tgactgtggctattgcccaaacctcagcttgagaacatcatataatactgagagcggaagatttttttaaagagatatggtagtttaaataggtttgtttaaagaactcttgggaaattt

SEQ ID NO: 593342 - DNA, 120 bp, Artificial Sequence
  ENSG00000173517_86 (sequence is synthesized)
cttaacaaattgtaattgtttttataaaccttcctacagagttgtgtaccattcatcatcaccatcatttaatatctgtaagtgcccagaaggtacaaggtgctatacagccgttaaaca

SEQ ID NO: 593343 - DNA, 120 bp, Artificial Sequence
  ENSG00000173517_87 (sequence is synthesized)
ccccctccctgcaactgtttaaaattagaatagatttttgcatcaaccactgctagaagctttccccacctaggtgggctgcaagggcctgcattcccaacatcccattacatgtttccc

SEQ ID NO: 593344 - DNA, 120 bp, Artificial Sequence
  ENSG00000173517_88 (sequence is synthesized)
actccagaaagtctctgggtttattccagctttttatcttgacgtgtcccattcacccccatggtttggtttggtttggttttgttttttaaatcaagaaagtttcagggaatcaaaaga

SEQ ID NO: 593345 - DNA, 120 bp, Artificial Sequence
  ENSG00000173517_89 (sequence is synthesized)
ggtcggacattttttaacctagcagaagtacagagtcatatattttgctacgaatattgttgtagtacagaaaacccactttgcccgttagtgtgtggatagtatgtgtgtgtccgcact

SEQ ID NO: 593346 - DNA, 120 bp, Artificial Sequence
  ENSG00000173517_90 (sequence is synthesized)
catgataacttgaatgttgaaccagacatagggttcatttttgaaaggttaaaccacactgtttcaggaacttgctccaaatactacttggttatcccttcctttaccagttagaactaa

SEQ ID NO: 593347 - DNA, 120 bp, Artificial Sequence
  ENSG00000173517_91 (sequence is synthesized)
agagtgtgatgtatgaacacactgggttgggattttctgttgaggatatgcagggcattttggcatgaggcaaatacagaagcaagatttcattctacttggtgatttgaatcatgacag

SEQ ID NO: 593348 - DNA, 120 bp, Artificial Sequence
  ENSG00000173517_92 (sequence is synthesized)
tcctcattccaatctctctttaattctctctggccctgcccacactctgtatttgaaaatcttgtttttgctctttccggagcttcacccctctacttacatattgtaaagttgtataaa

SEQ ID NO: 593349 - DNA, 120 bp, Artificial Sequence
  ENSG00000173517_93 (sequence is synthesized)
tctatcattgaaaggtcctctctgccagcagtggtgccaccctttggtttgctgtggtactttgctgtgtactccgtggcatcatgttactgtgtaaataaattcattttaatacacact

SEQ ID NO: 593350 - DNA, 120 bp, Artificial Sequence
  ENSG00000173517_94 (sequence is synthesized)
ggtggactcggccgcggcgagtagttagttagttgttgttagtcagtgtcagttgctcggcggcggcggccgtggtcaccaggaaggggacgggacggacggtgatggtggtcgccgcgg

SEQ ID NO: 593351 - DNA, 120 bp, Artificial Sequence
  ENSG00000173517_95 (sequence is synthesized)
cagacatggttatgtcttgtccccccagggtaggtgccctgtccataacacaggaaatgatggctttcagcctgtgtgtcttctgcactctgggtcctcatcccctgctgacatggatta

SEQ ID NO: 593352 - DNA, 120 bp, Artificial Sequence
  ENSG00000173517_96 (sequence is synthesized)
tatttctctttattccctgtctaatctgaggaaatcaggccccaaagagaaagcaaaggcattctgcttttcccagacctcagaaggctgcaggtttgctgtgtgagatcgccctctggt

SEQ ID NO: 593353 - DNA, 120 bp, Artificial Sequence
  ENSG00000173517_97 (sequence is synthesized)
gagcagtcacctgcaggcttcctgggtttgtactgcatgttgagaggcttggttagctggctctggctgaccctctccgtggaaatcagagctattcaggtaatatgagcggggacaggg

SEQ ID NO: 593354 - DNA, 120 bp, Artificial Sequence
  ENSG00000173517_98 (sequence is synthesized)
cctggtactgcatcatctgcaagattcgcatgcctttgacacagtgatacacaggggcctcacaaaggcagacaagctaatgtgtggacacttcagcagcgcagaggaggcctcctggct

SEQ ID NO: 593355 - DNA, 120 bp, Artificial Sequence
  ENSG00000173517_99 (sequence is synthesized)
taagcaggaagagtcagcagtggtagcaacaactgccgcattatgagaggagaatagatgaaaaggcaaacatgtagatcctaaatttagagcagattttagagcaccaaaccctttaca

SEQ ID NO: 593356 - DNA, 120 bp, Artificial Sequence
  ENSG00000173517_100 (sequence is synthesized)
gtggacactgtctccaacccggtgtctctgctcttctccactagcaagcactctggaatttgcagatgctgtttttaaggcataccccagaagagtggctgccagacttgaggtttatgt

SEQ ID NO: 593357 - DNA, 120 bp, Artificial Sequence
  ENSG00000173517_101 (sequence is synthesized)
tgctgaggagcaacataacagaacccatgttggtgtggacccaaaagctctctgtgtgttgcctgggcccaggaggaagggtcaacagcaagcctgaccagacaatccccagggacacag

SEQ ID NO: 593358 - DNA, 120 bp, Artificial Sequence
  ENSG00000173517_102 (sequence is synthesized)
gccctgcctgctgcagctgtgtagcctgcttgctggagaagagcctagagaacttcccttctagttgtcagcacaacacactggcttctgggggaaaggaagcaaagaaaaaagtaggca

SEQ ID NO: 593359 - DNA, 120 bp, Artificial Sequence
  ENSG00000173517_103 (sequence is synthesized)
gttggggttgggaggtcacagaaacagagcgtaccaggaccgggctgctgtgtgaagctctgctggcctgagtggtcaccgtgtgtgccaggccaggtctcactaatgcaggactccata

SEQ ID NO: 593360 - DNA, 120 bp, Artificial Sequence
  ENSG00000173517_104 (sequence is synthesized)
acaactgattcagtactgactgagtgattaaattaaatattaaaagctgaaggggccactgcccttatacgaaggctgaagtgtaacaaaagctccactgggagttttgcctagaccttt

SEQ ID NO: 593361 - DNA, 90 bp, Artificial Sequence
  ENSG00000173517_105 (sequence is synthesized)
atcgggggtctgaaggaactccccatacctccatgatttagcaggagacaagattaagggtaatcaccccagcacttggacccatttaga

SEQ ID NO: 593362 - DNA, 120 bp, Artificial Sequence
  ENSG00000173517_106 (sequence is synthesized)
tgaaggaactccccatacctccatgatttagcaggagacaagattaagggtaatcaccccagcacttggacccatttagattaagtaaacttactgaggctccagaggaaggtcttcaag

SEQ ID NO: 593363 - DNA, 65 bp, Artificial Sequence
  ENSG00000173517_107 (sequence is synthesized)
tagtcccagctactcaggagggtgtccactgcactgcagcctgggtgacagaacaagactccatc

SEQ ID NO: 593364 - DNA, 67 bp, Artificial Sequence
  ENSG00000173517_108 (sequence is synthesized)
gtggagtttgcagtgagccgagattgctccactgcactggtcacttatgtctttagatgaatgcaca

SEQ ID NO: 593365 - DNA, 79 bp, Artificial Sequence
  ENSG00000173517_109 (sequence is synthesized)
tccttctctcccggttcatctgcatctcgttactgggccgcaaaaataagcagcctgacccccagtttggtccagaaac

SEQ ID NO: 593366 - DNA, 120 bp, Artificial Sequence
  ENSG00000173517_110 (sequence is synthesized)
gcaaaaataagcagcctgacccccagtttggtccagaaacacctggagccctgaaaggatacaggccagtggatggtgggaccagttcaggattgcccaagccagactccaggtgaggtg

SEQ ID NO: 593367 - DNA, 120 bp, Artificial Sequence
  ENSG00000173517_111 (sequence is synthesized)
gaacaaggccagaaaaaacactaagtttctattcttcagtgggatcactttgtcctttggtgtaactggagagcctggagataaattatcctattccccttccccatcacatcacccagc

SEQ ID NO: 593368 - DNA, 120 bp, Artificial Sequence
  ENSG00000173517_112 (sequence is synthesized)
gtgggattcattcctgagaattccattagtggtcctcagtgatgccatcctgtctgactctgggttgtccggaggtgatgggccactgacagttggatggggcctttggcagctccatgc

SEQ ID NO: 593369 - DNA, 120 bp, Artificial Sequence
  ENSG00000173517_113 (sequence is synthesized)
ctgcagagtgttgtctttcaacctaagccacagagaatcttgatttctttcctgcccggagtgaattggtgtggggagctctccattgcctggggttgtaagtgtgtaccttctgctcca

SEQ ID NO: 593370 - DNA, 120 bp, Artificial Sequence
  ENSG00000173517_114 (sequence is synthesized)
ggaactctttgcctcctctccaaggcctagcaaattatgcttccttataagtgagttcgcactctcttctacaagggaaagaacttcattagtgccataggagccaagaactgcagttgg

SEQ ID NO: 593371 - DNA, 120 bp, Artificial Sequence
  ENSG00000173517_115 (sequence is synthesized)
cagatcacaagttgttgttaagagcagctcaaggcaattacagctgaaacttaaaaactggatttcacactgggtgggggggtaggagggaatttgttgccaagatccagttctctcaaa

SEQ ID NO: 593372 - DNA, 120 bp, Artificial Sequence
  ENSG00000173517_116 (sequence is synthesized)
ctctcaaatttgcaaacctctaaaaggaaataggctttttggacacaaactgacttccttgagatcccagataaacctctgtacaggtatgtgcgcgcacgcgcgcacacacacacacac

SEQ ID NO: 593373 - DNA, 120 bp, Artificial Sequence
  ENSG00000173517_117 (sequence is synthesized)
acacacacacacacacaccaactaatggctcccttgccctctgggagctgcatggaagcaaccagaaagctgagtgataatgctgtgagggcttctgaggaatctgcaattataaggacc

SEQ ID NO: 593374 - DNA, 120 bp, Artificial Sequence
  ENSG00000173517_118 (sequence is synthesized)
agggtcctctagagaagtaactctcatgcaggaagtggggggtatagggacttgggttttccccaccaggaccacccaatgctcaccagcccacacttgagctggagtcaaagatagagc

SEQ ID NO: 593375 - DNA, 120 bp, Artificial Sequence
  ENSG00000173517_119 (sequence is synthesized)
aaaaaactccaagcctatggttcatctttgcccagggttgggggatgggaggcaaattgtacctcaggtaaagagaatgtggagggataaagtcaccaggccccccagggaggggcaaag

SEQ ID NO: 593376 - DNA, 120 bp, Artificial Sequence
  ENSG00000173517_120 (sequence is synthesized)
ttgaatgccttgaagagctgagatgctcctcttccagggtgaaggagtctgtctctagaaagccagccctgggggtgctttcccatgaactagcttaacagcttaattttatcttcacaa

SEQ ID NO: 593377 - DNA, 120 bp, Artificial Sequence
  ENSG00000173517_121 (sequence is synthesized)
tctggtgaggtggtttctagaattatccccattttacccttgtgaaaacaagtcagagagggtttgtttgccccagatccttagtaagggaactacgatttgtcatccagcaaccgtact

SEQ ID NO: 593378 - DNA, 120 bp, Artificial Sequence
  ENSG00000173517_122 (sequence is synthesized)
ccacctcccagcttcctggagtgagggacagtcctccctcactctctagctgtcaccccagtatcatcagtggcttcttggtgtccaaagaagaaaaatccaattgctgagtctgtgtcc

SEQ ID NO: 593379 - DNA, 120 bp, Artificial Sequence
  ENSG00000173517_123 (sequence is synthesized)
tccacctctcatgcttattgctgaccagatgttgcagcagctccactctccaggctggcctgggagacatgcattgaaattctctgcacccgcatcgttcctgttctttttctctctgtt

SEQ ID NO: 593380 - DNA, 120 bp, Artificial Sequence
  ENSG00000173517_124 (sequence is synthesized)
cttcagggccccattcagccaagaagcttttgggatgatagccatctgaaatcaccaactcactccccagcttcagctcctggcctggtgtgtgtgtgtgtctgtgtgtgtgcacctccc

SEQ ID NO: 593381 - DNA, 120 bp, Artificial Sequence
  ENSG00000173517_125 (sequence is synthesized)
ttctcgtgagctcctccagggaggccatggctttagctgctctgcctgctgtccttggtgtctgactcaactaacaggaagagaggaggaagagaaccacccctggctgctccactgggc

SEQ ID NO: 593382 - DNA, 120 bp, Artificial Sequence
  ENSG00000173517_126 (sequence is synthesized)
caggccctggtccaggctttcccacacattaacctcatttgctctccactacagccattttacagatgaggaaactcagagtgggtaagaaacttgcctaaagctgcatagctggtaagt

SEQ ID NO: 593383 - DNA, 120 bp, Artificial Sequence
  ENSG00000173517_127 (sequence is synthesized)
ggtagagctgagattcaaacctaggcttgaagccagttctccccaccaccatacgagtctttgtctattggcttgtttttgtgccagcggataggcccaggcctatgggtgtttgctcca

SEQ ID NO: 593384 - DNA, 120 bp, Artificial Sequence
  ENSG00000173517_128 (sequence is synthesized)
attgtgacagactggggtagccaaggagtgcttcctgatgtgggcagagagtgtgagtgagaagaaagcgctggctaggctgagcagtcagatctgtagcttccctgtagggccagcacc

SEQ ID NO: 593385 - DNA, 120 bp, Artificial Sequence
  ENSG00000173517_129 (sequence is synthesized)
tttccctgtcagaccttcactgaactcctatgggatcgccaggccaacacaaggcattagcactggccgtctttgagacatttcctctcaaggcccctgagcagacttgcctgtttgctc

SEQ ID NO: 593386 - DNA, 120 bp, Artificial Sequence
  ENSG00000173517_130 (sequence is synthesized)
tccatcttccctacagaggggcctcccaggactgcttctggaaccacaaaggcaactaagtggccaacagctgccacagagcaactgacaaccttcttttcctttttgtctttttctttc

SEQ ID NO: 593387 - DNA, 120 bp, Artificial Sequence
  ENSG00000173517_131 (sequence is synthesized)
tttttggttaataatctgctttccattcacctaccccctccactcccaccctgtcatggtaaatcagggttgtaaagtcctcaacccctaagagctccatgcttgagcaaatatatacaa

SEQ ID NO: 593388 - DNA, 120 bp, Artificial Sequence
  ENSG00000173517_132 (sequence is synthesized)
gacatacgcatatagctgtagggttccactctcttacaaaaattagatcttattgtgtacaatactctgcaaattgcttttcttacttaacaatatatatcattggccaggtgtggtggc

SEQ ID NO: 593389 - DNA, 120 bp, Artificial Sequence
  ENSG00000173517_133 (sequence is synthesized)
cattggccaggtgtggtggctcacgcatataatcccagcactttgggaggatcacttgagctcaaaagttagaccagcctgggcaacatgttgaaactccatctctacaaaaaaatacaa

SEQ ID NO: 593390 - DNA, 120 bp, Artificial Sequence
  ENSG00000173517_134 (sequence is synthesized)
catacacctgtggtcccagctattcaggaagctgaggagggaggatcactcgagcccaggaggtcgaggccacagtgagccgtgaactgcactccagcctggggaacaaagtgagatcct

SEQ ID NO: 593391 - DNA, 120 bp, Artificial Sequence
  ENSG00000173517_135 (sequence is synthesized)
acaaaaacaaaaacaaaagcaaaaaaatcatggacaaagtatttcttaaaaggtagcttctcgcactaaaaataatagcattacataacatacatatatacaaattttattattattatt

SEQ ID NO: 593392 - DNA, 120 bp, Artificial Sequence
  ENSG00000173517_136 (sequence is synthesized)
ttattatttccacttcttcaggcgttcagtcacatagggatgactaaacaacaaaatatgagaaactactgagaagtataaaagatgcacagatacagagatgaactatcaggttgtctc

SEQ ID NO: 593393 - DNA, 120 bp, Artificial Sequence
  ENSG00000173517_137 (sequence is synthesized)
aaattttagtgaaatttgaattttaaatctcaatgggttttttttctggagtgaaaaactttacaaaatggttttcagagtcagttggaggaacgaatacatgaaaaacccagaaatttt

SEQ ID NO: 593394 - DNA, 120 bp, Artificial Sequence
  ENSG00000173517_138 (sequence is synthesized)
tgaaattgaaggcataattgagcatatgaaaaagctatgatcaataaaacagtgtgatacaggtacaagaaaaaacagatcaatgtaatagaataggtaacctaaaaatagtatcagtat

SEQ ID NO: 593395 - DNA, 120 bp, Artificial Sequence
  ENSG00000173517_139 (sequence is synthesized)
gaaactagtatatgtaatataggataagtaagacatcactatatgagaagggaaggaagtttatccaatgtgctggtacaattggttagctatttggaaaatattaatcttcatactata

SEQ ID NO: 593396 - DNA, 120 bp, Artificial Sequence
  ENSG00000173517_140 (sequence is synthesized)
agctaatacaaatccaaacagatcaaacagagttacatgccacaaaggaaagaaaaatctcaagaactagaagaatgccaagtcaatgcatgttttatctcttgttgagaaaggactttg

SEQ ID NO: 593397 - DNA, 120 bp, Artificial Sequence
  ENSG00000173517_141 (sequence is synthesized)
taagctaagagacggtggaaggtgtctgaaagggaaagatcaataggtttgactaaaggtgataaacctttgtccatggaaaacagcagaaacaaaattgaaaagtaaataacccagaaa

SEQ ID NO: 593398 - DNA, 120 bp, Artificial Sequence
  ENSG00000173517_142 (sequence is synthesized)
aaagatttcaacacatataacagacataggattaaaattctgagttataaagagctgatacaaatcattaggaacataaaacactaatagatgagaacagagaagtcacagaagaaccca

SEQ ID NO: 593399 - DNA, 120 bp, Artificial Sequence
  ENSG00000173517_143 (sequence is synthesized)
aatgtttaagctttctagaaacaagagaaataacctaaggtggcatatctaaaaaaaaattttaacagctttttctgattgattataaaaataatgcctgtttacagtagaaaatgtgga

SEQ ID NO: 593400 - DNA, 120 bp, Artificial Sequence
  ENSG00000173517_144 (sequence is synthesized)
aggtaaaattgacccactaggtcaccatctagaaatgaccaccattaacatttactgtatatcctgcaactgttgtttactctgcctttttctttttaaattaagatcatattgttggca

SEQ ID NO: 593401 - DNA, 120 bp, Artificial Sequence
  ENSG00000173517_145 (sequence is synthesized)
tctcattttccacctatcaaattaacaaagctttttttttaaagcttatactccatgctggtgacagggtatacagttcagtcaatgttggtgcaattgaattggatggaaaggggcttg

SEQ ID NO: 593402 - DNA, 120 bp, Artificial Sequence
  ENSG00000173517_146 (sequence is synthesized)
attcatcctgtcctggggtgttgggcaagggctgaccccagtagtcagcatggtggtgggtaatagagatttcagatctccaaggtcaaagtgacagagtcaccaggggagcttttcaaa

SEQ ID NO: 593403 - DNA, 120 bp, Artificial Sequence
  ENSG00000173517_147 (sequence is synthesized)
aggaaagaccacccaagtccagtgactccaagaccccctcctccccagggtccttcagctattctgagcttgtaaggggcctctctgcctgaatctggatttagctccaggttccacctc

SEQ ID NO: 593404 - DNA, 120 bp, Artificial Sequence
  ENSG00000173517_148 (sequence is synthesized)
tgacaaactgtgtcctcagccattctctgagccttggttttgatggggattcctacctcacagggtcattgtcaggatgaaaggacacagtctagcaagtgtatttagtccactgccagg

SEQ ID NO: 593405 - DNA, 120 bp, Artificial Sequence
  ENSG00000173517_149 (sequence is synthesized)
caatagtaagtgctcaaatattgttgatcaaaaaggcaaactctgagtgggtatttactttctgtttttataaccaaggactcatcgggggatttttgctgaacaaagatactgtgaatt

SEQ ID NO: 593406 - DNA, 120 bp, Artificial Sequence
  ENSG00000173517_150 (sequence is synthesized)
caaatctcggcctcgtaagaatcagaaaactgcttgcagcttttgagtggcaatttctccagctttccaaatatctcctggctgaatttcagaaagcctggttaacagtcgtttctctga

SEQ ID NO: 593407 - DNA, 120 bp, Artificial Sequence
  ENSG00000173517_151 (sequence is synthesized)
acacctcctacctgccgatggtgacatagcacatcagaggcagaaatgggtccatgcctctgaatccaagcctgccttcctccctacacaacctggaccctttattgggggagagtcagg

SEQ ID NO: 593408 - DNA, 120 bp, Artificial Sequence
  ENSG00000173517_152 (sequence is synthesized)
cacagtggtaaactgacaagggacagggctgcgatgggaagtggggggtgaggatgaaagcagctgttgagggcccctctagctctgggccggtgtgctctttagagggtgtctgtgtcc

SEQ ID NO: 593409 - DNA, 120 bp, Artificial Sequence
  ENSG00000173517_153 (sequence is synthesized)
cgaagcaccccctccctccctcagcaaggggctggcccaggccctcacccttcctcggagcctgctgcccacatcagagccctcatttcagctcccctcatgacactgccttgcataata

SEQ ID NO: 593410 - DNA, 120 bp, Artificial Sequence
  ENSG00000173517_154 (sequence is synthesized)
aatgcttcagttgaatgtactttattttggggaaagtcattaaactccttttgtggaaacattttaattgaattagattgttttctgattgtaatagatgttaattaattgagtgggccg

SEQ ID NO: 593411 - DNA, 120 bp, Artificial Sequence
  ENSG00000173517_155 (sequence is synthesized)
agtgtccttggatgtagctggcttctctcagtttaattaggaggtgaatgtggacttatttctttttgctatgagtctgtggtttaaatttatcttttcagctaataaagtgatcaggcg

SEQ ID NO: 593412 - DNA, 120 bp, Artificial Sequence
  ENSG00000173517_156 (sequence is synthesized)
acatttctttgtggtttatctaaaaaccaaaggaaaagaatacttgagatccatttgtaaggaaagaaaaggaagcaacaacataatgcccagagttggagccaattaaaccagacgagt

SEQ ID NO: 593413 - DNA, 120 bp, Artificial Sequence
  ENSG00000173517_157 (sequence is synthesized)
ctcctgcctcagcctcccaagcagctgggtctacagtgagactaattacatccttcaatgaagtaccattttgtgagaaagtgagaattcaatgatttatgaaaaaatccaagaaggaga

SEQ ID NO: 593414 - DNA, 120 bp, Artificial Sequence
  ENSG00000173517_158 (sequence is synthesized)
tgatttatgaaaaaatccaagaaggagaaacaaacattttctaatatgaaagtagtaatgactacagctatataaataacagtaacaaagagtaaacattgctatcttcagaaattaagg

SEQ ID NO: 593415 - DNA, 120 bp, Artificial Sequence
  ENSG00000173517_159 (sequence is synthesized)
ttcgctgttttgtctcctagttgaattcttttagaagaagggaaaaacctcttgagatgtgactgtttccatctattttctgcttgccaggaaaagaatacttgagatccatttgtaagg

SEQ ID NO: 593416 - DNA, 120 bp, Artificial Sequence
  ENSG00000173517_160 (sequence is synthesized)
tttggaccattggagttacaaattttaagtcacatcagaaaaacgttctgatgtttactaggcatgtattaaacacctgcacccatgagccctgtgccaagtgctaagggttattaacac

SEQ ID NO: 593417 - DNA, 120 bp, Artificial Sequence
  ENSG00000173517_161 (sequence is synthesized)
tgctttgagggactcacctggggggaaagaggtgaacttgttaattatttcagtgtaatataaatacagtgatagagatatacacatggtatatttttaatattacacagaggagggtgt

SEQ ID NO: 593418 - DNA, 120 bp, Artificial Sequence
  ENSG00000173517_162 (sequence is synthesized)
caaaagatacctttctggagataattcctgaactgatttaactagctgacaaaggggagaaagaatattccaatcagagacaacaatatgagcaaaatcatggagatgcatgtaggcacc

SEQ ID NO: 593419 - DNA, 120 bp, Artificial Sequence
  ENSG00000173517_163 (sequence is synthesized)
acaaacatttagtgttgctgaaatgtgaagtggagagttagccagtgtcatgcatttcaggctaaaaccttagactttttgctgtttatgttagtgagccatcaaaggtttttaagcaga

SEQ ID NO: 593420 - DNA, 120 bp, Artificial Sequence
  ENSG00000173517_164 (sequence is synthesized)
ggaataacacaattagatttgttttttaaaacatccatcctgcaggctgccatgtgtatgtggattatttggtagcaggaaatttggtagttagatactattgcaggatcacacaaaggc

SEQ ID NO: 593421 - DNA, 120 bp, Artificial Sequence
  ENSG00000173517_165 (sequence is synthesized)
atgagaaagggaggcctcaactaagatagtgggaggggggacagtagacagatttgagagatatttaagacgaaaaatacacaagattggataatgtaaagaatctataatgtatcccag

SEQ ID NO: 593422 - DNA, 120 bp, Artificial Sequence
  ENSG00000173517_166 (sequence is synthesized)
atttctggcttggatcaagcagactcaaaaaagtaaagatccctgttattggaggtatataggcagaggctgatggaccatctctcagagatattgtgaggaggatgctgcactgcaaag

SEQ ID NO: 593423 - DNA, 120 bp, Artificial Sequence
  ENSG00000173517_167 (sequence is synthesized)
tccttgaatgctcagtgacttcttacctgtctcccttgagtgccacacactttccttccttctgaaaagcaaagcctgaggcagaataaggatttctcagtgctcttcttccatgaagtc

SEQ ID NO: 593424 - DNA, 120 bp, Artificial Sequence
  ENSG00000173517_168 (sequence is synthesized)
aggagagaggtgagtagcctggactactacatgcagagcacaagcaagattcatatgaactactgaccaatccttagactgtttggaaaccagtggcatctatcattgaagtttttttac

SEQ ID NO: 593425 - DNA, 120 bp, Artificial Sequence
  ENSG00000173517_169 (sequence is synthesized)
ctcatttctcatctcctttcttctttgtccttttcctttgtcaggttattctaaggaaaaataattctaacactagctagtgtacttggaaataaaggagtccctaagaaggccagaaaa

SEQ ID NO: 593426 - DNA, 120 bp, Artificial Sequence
  ENSG00000173517_170 (sequence is synthesized)
ttatggtaacactgtgggagataatactttaatatctctttttgggaaacacaatcataacaacccatatgcagttgaaaatacattgtgtaagaagaagacttccattctaagttccag

SEQ ID NO: 593427 - DNA, 120 bp, Artificial Sequence
  ENSG00000173517_171 (sequence is synthesized)
aagctttttgtgatttgggagtaggggaaacatactatagtttacctaaactactatcttggataccgttttcaacttggaacagattttatcatcaaacagcttattggacttttccca

SEQ ID NO: 593428 - DNA, 120 bp, Artificial Sequence
  ENSG00000173517_172 (sequence is synthesized)
ttatttgatattttgtgaggcatattataaaatgaaaatgtactgtttacttactgtataccctcagacagcataatatatcagaaattataatatcttctagacattcttattaaacca

SEQ ID NO: 593429 - DNA, 120 bp, Artificial Sequence
  ENSG00000173517_173 (sequence is synthesized)
aaatttctttcatgatagcctcagtaaaatatttaatttttactaattgtaccatgtttgatggcatctctataaatttttattagctgacattagttaaaattattttatttcgggagc

SEQ ID NO: 593430 - DNA, 71 bp, Artificial Sequence
  ENSG00000173517_174 (sequence is synthesized)
gtcctatgcttgcagcaccgaggctgggggaggggcgcctgccgttgcccaggcttgattaggtaaacaaa

SEQ ID NO: 593431 - DNA, 61 bp, Artificial Sequence
  ENSG00000173517_175 (sequence is synthesized)
ggcagactgacacctcacatggtcaccaaaatccactgttctacagccaccgctgttctgc

SEQ ID NO: 593432 - DNA, 120 bp, Artificial Sequence
  ENSG00000173517_176 (sequence is synthesized)
agtgtcagttgctcggcggcggcggccgtggtcaccaggaaggggacgggacggacggtgatggtggtcgccgcggcggcgtgtgcgcccctcaggaaaagaatacttgagatccatttg

SEQ ID NO: 593433 - DNA, 120 bp, Artificial Sequence
  ENSG00000173517_177 (sequence is synthesized)
taaggaagtggcaagtaataaggtctatgagttgatttaattttggttttcatttattcctggattaagaataagcataattgacttttaatatccttgtgtttatcaaccacatacgtt

SEQ ID NO: 593434 - DNA, 120 bp, Artificial Sequence
  ENSG00000173517_178 (sequence is synthesized)
agactggaagaatatgggaattttttaacacattttcaggtgctaagttttttatatcttttaagattgcataagaaccatttctgtttgtaagtagcactctgtggccatcatctatct

SEQ ID NO: 593435 - DNA, 120 bp, Artificial Sequence
  ENSG00000173517_179 (sequence is synthesized)
ttataactgcattccaagattagaatagtattaaagtgatcttactgcactgaacaaggtttatagccctggatctttggcttaagtagcctactgcattctggtgaatgcagaggaact

SEQ ID NO: 593436 - DNA, 120 bp, Artificial Sequence
  ENSG00000173517_180 (sequence is synthesized)
ttagcatagaaaagcaaatccataacaccttaatagcaataaataatgtgttgttttggaatgtgatggtagtgtgaggaagaaacaggatcaaatgaataaatggtggtactgttcttt

SEQ ID NO: 593437 - DNA, 120 bp, Artificial Sequence
  ENSG00000173517_181 (sequence is synthesized)
ccctcactgtaaatgaaataaagctcttccagcaattctttttgttttttatgaaggtgttatctctatatgcattacttattttaagggaatatttgtttttttattgctgtctctttc

SEQ ID NO: 593438 - DNA, 120 bp, Artificial Sequence
  ENSG00000173517_182 (sequence is synthesized)
tgtcctccttccaagtgttgtggaaaaaaatggagggtggtaagcaagcaatttatagttatttagcatgtgggtgaaataggagaagttgagtattgagactgagacccagtagtataa

SEQ ID NO: 593439 - DNA, 120 bp, Artificial Sequence
  ENSG00000173517_183 (sequence is synthesized)
tattcagttcagctagacagattgcatacccaaatcagttctctaggcattcattttcttgaataccttaataactatttattgatcacctattctgtgcaaggtatataataaatattt

SEQ ID NO: 593440 - DNA, 120 bp, Artificial Sequence
  ENSG00000173517_184 (sequence is synthesized)
atctcaaatccttataaatttgctatattcttcagatgaggaaactgaaaacccgggaagttaagaattgaacagagtcacaaagctagtgcttttcagagctggaattcaaacctcgat

SEQ ID NO: 593441 - DNA, 120 bp, Artificial Sequence
  ENSG00000173517_185 (sequence is synthesized)
ctctcattctaaagcatgtatcctccttataattttgcattcttaaacacaagatcaataaaaattgttatattctcacttgtaatcattcacataaatacatatgtttaggaagcctaa

SEQ ID NO: 593442 - DNA, 120 bp, Artificial Sequence
  ENSG00000173530_0 (sequence is synthesized)
agtgtagctgcgagaacctttgcacgcgcacaaactacggggacgatttctgattgatttttggcgctttcgatccaccctcctcccttctcatgggactttggggacaaagcgtcccga

SEQ ID NO: 593443 - DNA, 120 bp, Artificial Sequence
  ENSG00000173530_1 (sequence is synthesized)
ccgcctcgagcgctcgagcagggcgctatccaggagccaggacagcgtcgggaaccagaccatggctcctggaccccaagatccttaagttcgtcgtcttcatcgtcgcggttctgctgc

SEQ ID NO: 593444 - DNA, 120 bp, Artificial Sequence
  ENSG00000173530_2 (sequence is synthesized)
cggtccgggttgactctgccaccatcccccggcaggacgaagttccccagcagacagtggccccacagcaacagaggcgcagcctcaaggaggaggagtgtccagcaggatctcatagat

SEQ ID NO: 593445 - DNA, 120 bp, Artificial Sequence
  ENSG00000173530_3 (sequence is synthesized)
cagaatatactggagcctgtaacccgtgcacagagggtgtggattacaccattgcttccaacaatttgccttcttgcctgctatgtacagtttgtaaatcaggtcaaacaaataaaagtt

SEQ ID NO: 593446 - DNA, 120 bp, Artificial Sequence
  ENSG00000173530_4 (sequence is synthesized)
cctgtaccacgaccagagacaccgtgtgtcagtgtgaaaaaggaagcttccaggataaaaactcccctgagatgtgccggacgtgtagaacagggtgtcccagagggatggtcaaggtca

SEQ ID NO: 593447 - DNA, 120 bp, Artificial Sequence
  ENSG00000173530_5 (sequence is synthesized)
gtaattgtacgccccggagtgacatcaagtgcaaaaatgaatcagctgccagttccactgggaaaaccccagcagcggaggagacagtgaccaccatcctggggatgcttgcctctccct

SEQ ID NO: 593448 - DNA, 120 bp, Artificial Sequence
  ENSG00000173530_6 (sequence is synthesized)
atcactaccttatcatcatagtggttttagtcatcattttagctgtggttgtggttggcttttcatgtcggaagaaattcatttcttacctcaaaggcatctgctcaggtggtggaggag

SEQ ID NO: 593449 - DNA, 120 bp, Artificial Sequence
  ENSG00000173530_7 (sequence is synthesized)
gtcccgaacgtgtgcacagagtccttttccggcggcgttcatgtccttcacgagttcctggggcggaggacaatgcccgcaacgagaccctgagtaacagatacttgcagcccacccagg

SEQ ID NO: 593450 - DNA, 120 bp, Artificial Sequence
  ENSG00000173530_8 (sequence is synthesized)
tctctgagcaggaaatccaaggtcaggagctggcagagctaacaggtgtgactgtagagttgccagaggagccacagcgtctgctggaacaggcagaagctgaagggtgtcagaggagga

SEQ ID NO: 593451 - DNA, 120 bp, Artificial Sequence
  ENSG00000173530_9 (sequence is synthesized)
ggctgctggttccagtgaatgacgctgactccgctgacatcagcaccttgctggatgcctcggcaacactggaagaaggacatgcaaaggaaacaattcaggaccaactggtgggctccg

SEQ ID NO: 593452 - DNA, 120 bp, Artificial Sequence
  ENSG00000173530_10 (sequence is synthesized)
aaaagctcttttatgaagaagatgaggcaggctctgctacgtcctgcctgtgaaagaatctcttcaggaaaccagagcttccctcatttaccttttctcctacaaagggaagcagcctgg

SEQ ID NO: 593453 - DNA, 120 bp, Artificial Sequence
  ENSG00000173530_11 (sequence is synthesized)
aagaaacagtccagtacttgacccatgccccaacaaactctactatccaatatggggcagcttaccaatggtcctagaactttgttaacgcacttggagtaatttttatgaaatactgcg

SEQ ID NO: 593454 - DNA, 120 bp, Artificial Sequence
  ENSG00000173530_12 (sequence is synthesized)
atactgcgtgtgataagcaaacgggagaaatttatatcagattcttggctgcatagttatacgattgtgtattaagggtcgttttaggccacatgcggtggctcatgcctgtaatcccag

SEQ ID NO: 593455 - DNA, 120 bp, Artificial Sequence
  ENSG00000173530_13 (sequence is synthesized)
taggctgaggcaggtggattgcttgagctcgggagtttgagaccagcctcatcaacacagtgaaactccatctcaatttaaaaagaaaaaaagtggttttaggatgtcattctttgcagt

SEQ ID NO: 593456 - DNA, 120 bp, Artificial Sequence
  ENSG00000173530_14 (sequence is synthesized)
tactggtgtgtgcatttaatgacatctaactacagatgccgcacagccacaatgctttgccttatagttttttaactttagaacgggattatcttgttattacctgtattttcagtttcg

SEQ ID NO: 593457 - DNA, 120 bp, Artificial Sequence
  ENSG00000173530_15 (sequence is synthesized)
gatatttttgacttaatgatgagattatcaagacgtagccctatgctaagtcatgagcatatggacttacgagggttcgacttagagttttgagctttaagataggattattggggctta

SEQ ID NO: 593458 - DNA, 120 bp, Artificial Sequence
  ENSG00000173530_16 (sequence is synthesized)
cccccaccttaattagagaaacatttatattgcttactactgtaggctgtacatctcttttccgatttttgtataatgatgtaaacatggaaaaactttaggaaatgcacttattaggct

SEQ ID NO: 593459 - DNA, 120 bp, Artificial Sequence
  ENSG00000173530_17 (sequence is synthesized)
gtttacatgggttgcctggatacaaatcagcagtcaaaaatgactaaaaatataactagtgacggagggagaaatcctccctctgtgggaggcacttactgcattccagttctccctcct

SEQ ID NO: 593460 - DNA, 120 bp, Artificial Sequence
  ENSG00000173530_18 (sequence is synthesized)
gcgccctgagactggaccagggtttgatggctggcagcttctcaaggggcagcttgtcttacttgttaattttagaggtatatagccatatttatttataaataaatatttatttattta

SEQ ID NO: 593461 - DNA, 120 bp, Artificial Sequence
  ENSG00000173530_19 (sequence is synthesized)
tttataagtagatgtttacatatgcccaggattttgaagagcctggtatctttgggaagccatgtgtctggtttgtcgtgctgggacagtcatgggactgcatcttccgacttgtccaca

SEQ ID NO: 593462 - DNA, 120 bp, Artificial Sequence
  ENSG00000173530_20 (sequence is synthesized)
gcagatgaggacagtgagaattaagttagatccgagactgcgaagagcttctctttcaagcgccattacagttgaacgttagtgaatcttgagcctcatttgggctcagggcagagcagg

SEQ ID NO: 593463 - DNA, 120 bp, Artificial Sequence
  ENSG00000173530_21 (sequence is synthesized)
tgtttatctgccccggcatctgccatggcatcaagagggaagagtggacggtgcttgggaatggtgtgaaatggttgccgactcaggcatggatgggcccctctcgcttctggtggtctg

SEQ ID NO: 593464 - DNA, 120 bp, Artificial Sequence
  ENSG00000173530_22 (sequence is synthesized)
tgaactgagtccctgggatgccttttagggcagagattcctgagctgcgttttagggtacagattccctgtttgaggagcttggcccctctgtaagcatctgactcatctcagagatatc

SEQ ID NO: 593465 - DNA, 120 bp, Artificial Sequence
  ENSG00000173530_23 (sequence is synthesized)
aattcttaaacactgtgacaacaggatctaaaatggctgacacatttgtccttgtgtcacgttccattattttatttaaaaacctcagtaatcgttttagcttctttccagcaaactctt

SEQ ID NO: 593466 - DNA, 120 bp, Artificial Sequence
  ENSG00000173530_24 (sequence is synthesized)
ctccacagtagcccagtcgtggtaggataaattacggatatagtcattctaggggtttcagtcttttccatctcaaggcattgtgtgttttgttccgggactggtttggctgggacaaag

SEQ ID NO: 593467 - DNA, 120 bp, Artificial Sequence
  ENSG00000173530_25 (sequence is synthesized)
ttagaactgcctgaagttcgcacattcagattgttgtgtccatggagttttaggaggggatggcctttccggtcttcgcacttccatcctctcccacttccatctggcgtcccacacctt

SEQ ID NO: 593468 - DNA, 120 bp, Artificial Sequence
  ENSG00000173530_26 (sequence is synthesized)
gtcccctgcacttctggatgacacagggtgctgctgcctcctagtctttgcctttgctgggccttctgtgcaggagacttggtctcaaagctcagagagagccagtccggtcccagctcc

SEQ ID NO: 593469 - DNA, 120 bp, Artificial Sequence
  ENSG00000173530_27 (sequence is synthesized)
tttgtcccttcctcagaggccttccttgaagatgcatctagactaccagccttatcagtgtttaagcttattcctttaacataagcttcctgacaacatgaaattgttggggttttttgg

SEQ ID NO: 593470 - DNA, 120 bp, Artificial Sequence
  ENSG00000173530_28 (sequence is synthesized)
cgttggttgatttgtttaggttttgctttatacccgggccaaatagcacataacacctggttatatatgaaatactcatatgtttatgaccaaaataaatatgaaacctcatattaaaaa

SEQ ID NO: 593471 - DNA, 120 bp, Artificial Sequence
  ENSG00000173531_0 (sequence is synthesized)
gaagctggggcaagtaattttccccaatttacagggaaaaaccgaaattcagaaaagtttaatgtcacccaggggctggagcccagacctctggcagctctcactttcacaatgcccttg

SEQ ID NO: 593472 - DNA, 120 bp, Artificial Sequence
  ENSG00000173531_1 (sequence is synthesized)
ggctgactaggctgcagaggggtttcaccccaaccccagggcacctcaagtgtccccaccaaaccttcctaacacctgtccactaagctgtactaggcccttgcaactgacctatgggac

SEQ ID NO: 593473 - DNA, 120 bp, Artificial Sequence
  ENSG00000173531_2 (sequence is synthesized)
ctgaggcctggcccctcatggctcctgtcaccaggtctcaggtcagggtccagcaggccctgagctgacgtgtggagccagagccacccaatcccgtagggacaggtttcacaacttccc

SEQ ID NO: 593474 - DNA, 120 bp, Artificial Sequence
  ENSG00000173531_3 (sequence is synthesized)
ggatggggctgtggtgggtcacagtgcagcctccagccagaaggatggggtggctcccactcctgctgcttctgactcaatgcttaggggtccctgggcagcgctcgccattgaatgact

SEQ ID NO: 593475 - DNA, 120 bp, Artificial Sequence
  ENSG00000173531_4 (sequence is synthesized)
tccaagtgctccggggcacagagctacagcacctgctacatgcggtggtgcccgggccttggcaggaggatgtggcagatgctgaagagtgtgctggtcgctgtgggcccttaatggact

SEQ ID NO: 593476 - DNA, 120 bp, Artificial Sequence
  ENSG00000173531_5 (sequence is synthesized)
gccgggccttccactacaacgtgagcagccatggttgccaactgctgccatggactcaacactcgccccacacgaggctgcggcgttctgggcgctgtgacctcttccagaagaaagact

SEQ ID NO: 593477 - DNA, 120 bp, Artificial Sequence
  ENSG00000173531_6 (sequence is synthesized)
acgtacggacctgcatcatgaacaatggggttgggtaccggggcaccatggccacgaccgtgggtggcctgccctgccaggcttggagccacaagttcccaaatgatcacaagtacacgc

SEQ ID NO: 593478 - DNA, 120 bp, Artificial Sequence
  ENSG00000173531_7 (sequence is synthesized)
ccactctccggaatggcctggaagagaacttctgccgtaaccctgatggcgaccccggaggtccttggtgctacacaacagaccctgctgtgcgcttccagagctgcggcatcaaatcct

SEQ ID NO: 593479 - DNA, 120 bp, Artificial Sequence
  ENSG00000173531_8 (sequence is synthesized)
gccgggaggccgcgtgtgtctggtgcaatggcgaggaataccgcggcgcggtagaccgcacggagtcagggcgcgagtgccagcgctgggatcttcagcacccgcaccagcaccccttcg

SEQ ID NO: 593480 - DNA, 120 bp, Artificial Sequence
  ENSG00000173531_9 (sequence is synthesized)
agccgggcaagttcctcgaccaaggtctggacgacaactattgccggaatcctgacggctccgagcggccatggtgctacactacggatccgcagatcgagcgagagttctgtgacctcc

SEQ ID NO: 593481 - DNA, 120 bp, Artificial Sequence
  ENSG00000173531_10 (sequence is synthesized)
gcgggcgtaccttgccagcgttgggacgcgcaaatcccgcatcagcaccgatttacgccagaaaaatacgcgtgcaaagaccttcgggagaacttctgccggaaccccgacggctcagag

SEQ ID NO: 593482 - DNA, 120 bp, Artificial Sequence
  ENSG00000173531_11 (sequence is synthesized)
gcgccctggtgcttcacactgcggcccggcatgcgcgcggccttttgctaccagatccggcgttgtacagacgacgtgcggccccaggactgctaccacggcgcaggggagcagtaccgc

SEQ ID NO: 593483 - DNA, 120 bp, Artificial Sequence
  ENSG00000173531_12 (sequence is synthesized)
ggcacggtcagcaagacccgcaagggtgtccagtgccagcgctggtccgctgagacgccgcacaagccgcagttcacgtttacctccgaaccgcatgcacaactggaggagaacttctgc

SEQ ID NO: 593484 - DNA, 120 bp, Artificial Sequence
  ENSG00000173531_13 (sequence is synthesized)
cggaacccagatggggatagccatgggccctggtgctacacgatggacccaaggaccccattcgactactgtgccctgcgacgctgcgctgatgaccagccgccatcaatcctggacccc

SEQ ID NO: 593485 - DNA, 120 bp, Artificial Sequence
  ENSG00000173531_14 (sequence is synthesized)
ccagaccaggtgcagtttgagaagtgtggcaagagggtggatcggctggatcagcggcgttccaagctgcgcgtggttgggggccatccgggcaactcaccctggacagtcagcttgcgg

SEQ ID NO: 593486 - DNA, 120 bp, Artificial Sequence
  ENSG00000173531_15 (sequence is synthesized)
aatcggcagggccagcatttctgcggggggtctctagtgaaggagcagtggatactgactgcccggcagtgcttctcctcctgccatatgcctctcacgggctatgaggtatggttgggc

SEQ ID NO: 593487 - DNA, 120 bp, Artificial Sequence
  ENSG00000173531_16 (sequence is synthesized)
accctgttccagaacccacagcatggagagccaagcctacagcgggtcccagtagccaagatggtgtgtgggccctcaggctcccagcttgtcctgctcaagctggagagatctgtgacc

SEQ ID NO: 593488 - DNA, 120 bp, Artificial Sequence
  ENSG00000173531_17 (sequence is synthesized)
ctgaaccagcgtgtggccctgatctgcctgccccctgaatggtatgtggtgcctccagggaccaagtgtgagattgcaggctggggtgagaccaaaggtacgggtaatgacacagtccta

SEQ ID NO: 593489 - DNA, 120 bp, Artificial Sequence
  ENSG00000173531_18 (sequence is synthesized)
aatgtggccttgctgaatgtcatctccaaccaggagtgtaacatcaagcaccgaggacgtgtgcgggagagtgagatgtgcactgagggactgttggcccctgtgggggcctgtgagggt

SEQ ID NO: 593490 - DNA, 120 bp, Artificial Sequence
  ENSG00000173531_19 (sequence is synthesized)
gactacgggggcccacttgcctgctttacccacaactgctgggtcctggaaggaattataatccccaaccgagtatgcgcaaggtcccgctggccagctgtcttcacgcgtgtctctgtg

SEQ ID NO: 593491 - DNA, 120 bp, Artificial Sequence
  ENSG00000173531_20 (sequence is synthesized)
tttgtggactggattcacaaggtcatgagactgggttaggcccagccttgatgccatatgccttggggaggacaaaacttcttgtcagacataaagccatgtttcctctttatgcctgta

SEQ ID NO: 593492 - DNA, 120 bp, Artificial Sequence
  ENSG00000173531_21 (sequence is synthesized)
gaaccttggggaggggcgtggcttggccggggaggtaagaggggctgggcgtgacctgagagcataccccgtggagtaccgtacacctgggaaaggcgggtttggtcccagccccagagg

SEQ ID NO: 593493 - DNA, 120 bp, Artificial Sequence
  ENSG00000173531_22 (sequence is synthesized)
gatctcagctctcgctcggggcccgacctatctcggtccatctaagggtccgaggcacagccccgccaagaggccacaactgtcagctgcttccgcgggaagggtgagggctaccggggc

SEQ ID NO: 593494 - DNA, 120 bp, Artificial Sequence
  ENSG00000173531_23 (sequence is synthesized)
ttgggacgtgctgctgcgggtgagacgggaggaaggtagtcacgggctcaaggctggaggctggcgggctagggctgagtggagcgcctgcttagagaccttcgggagaacttctgccgg

SEQ ID NO: 593495 - DNA, 120 bp, Artificial Sequence
  ENSG00000173531_24 (sequence is synthesized)
gccgcacaagccgcagtgagtccctggtgctcccggccccgccagggccctaaccctggggcggcatgctttggtgtctgggaccagagcctggaaatggttgagactaccctgccacga

SEQ ID NO: 593496 - DNA, 120 bp, Artificial Sequence
  ENSG00000173531_25 (sequence is synthesized)
gcttgggggctacagagccgggctggaagcctggaaccggagggccggggcgaggtctcggcctgatggctgcccgcacccgccacagactgctaccacggcgcaggggagcagtaccgc

SEQ ID NO: 593497 - DNA, 120 bp, Artificial Sequence
  ENSG00000173531_26 (sequence is synthesized)
cagagaggagctgaggttgtgtcctctgtggttatcccactgggggctgggaatctatccctgcccccagaggtcctagccagaagatggcaggtctagcatctgtcccaggagtctgtt

SEQ ID NO: 593498 - DNA, 120 bp, Artificial Sequence
  ENSG00000173531_27 (sequence is synthesized)
gtttggggacccagtctcatcccaccttcccccttccccaggcaagctaacaagtgagccttggggcaatggactgagagtcacaaatgacctagcagagcttctctcccagccatatgc

SEQ ID NO: 593499 - DNA, 120 bp, Artificial Sequence
  ENSG00000173531_28 (sequence is synthesized)
acgcgcactggcccgcgcccagcctccgctaggggaccccctccatggcttcccaccgggttgttccaggcctcagcttcgccgaaaggcctcaccacctccgacctccgcctgctctgg

SEQ ID NO: 593500 - DNA, 120 bp, Artificial Sequence
  ENSG00000173531_29 (sequence is synthesized)
ggatgctcccagccctgctgcggcagaacgcgacatgctaaccggaatccctaggccgcctgtctcctacccatacttagaggccccgctcagacggtccttaaaacgtctgaaaggccg

SEQ ID NO: 593501 - DNA, 120 bp, Artificial Sequence
  ENSG00000173531_30 (sequence is synthesized)
ttcctgccagagtccctgctacctgttacctccacccctatttagtcctagtggacagcctcgctcaccttccctgggatgacacttctggcggctgagatgagcgagcctctctgggct

SEQ ID NO: 593502 - DNA, 120 bp, Artificial Sequence
  ENSG00000173531_31 (sequence is synthesized)
taggatgagaaaaaagtcggggagccagaggctcagtgggcatggggcagtgaccttgccctcttgagcacagctgggaagccctaggaacacatagacattgcccacttaggcctctat

SEQ ID NO: 593503 - DNA, 120 bp, Artificial Sequence
  ENSG00000173531_32 (sequence is synthesized)
tagcacgtctgctctagcactgaagcagtgtcaggaccacacagatgcacgcacacagcaggcagtgacccctcctgagcctgatctacccctctaacctagcatatgcctttgtgcagg

SEQ ID NO: 593504 - DNA, 120 bp, Artificial Sequence
  ENSG00000173531_33 (sequence is synthesized)
tgagagcccagatttggagtctgaatgcctagccagggcccctggctgggtaatgtgatggctctgagccttagcattctcatttgagagatgaggtggggcaagcttcatcacccactg

SEQ ID NO: 593505 - DNA, 120 bp, Artificial Sequence
  ENSG00000173531_34 (sequence is synthesized)
ctctcacagagcgtatgtgttagatctgagcccggtgcctgggccactaaacagaggcaccggtgataactaccaagtctgggcctgcttcccaggggaaatttttttcacaagtatctg

SEQ ID NO: 593506 - DNA, 120 bp, Artificial Sequence
  ENSG00000173531_35 (sequence is synthesized)
tgcagggggctagactggcccttgaaagtgcatacagggtccatcccagaagccttgtagctttgatcccctgaatgaacaaagtgtggacatgccaatacacattactgacatgtatgc

SEQ ID NO: 593507 - DNA, 120 bp, Artificial Sequence
  ENSG00000173531_36 (sequence is synthesized)
caaaagggtggaggggaggcagtgttgaagctgggggcagcgctcgccattgaatgacttccaagtgctccggggcacagagctacagcacctgctacatgcggtggtgcccgggccttg

SEQ ID NO: 593508 - DNA, 120 bp, Artificial Sequence
  ENSG00000173535_0 (sequence is synthesized)
ggagcaggctcaggatgggcctccagtgcctcctctggagctcactacccagactacagcagcgcagtgggcagcgcctcagctccttccccttctgctgcctacagcctggacaggacc

SEQ ID NO: 593509 - DNA, 120 bp, Artificial Sequence
  ENSG00000173535_1 (sequence is synthesized)
cggaatcaaaccgcaggccctgggtcaccgctgccggaaagagccagttcctgtccgtccatgcacccaccaccaaaacccaggccttcctggaggtgctaggggaggccatgccccttt

SEQ ID NO: 593510 - DNA, 120 bp, Artificial Sequence
  ENSG00000173535_2 (sequence is synthesized)
tctgagtgcttggaagtgactgctgcaagtgacaagtgaccacgccttttcccccgcgggtataaattcagaggcgctgcgctccgattctggcagtgcagctgtgggaacctctccacg

SEQ ID NO: 593511 - DNA, 120 bp, Artificial Sequence
  ENSG00000173535_3 (sequence is synthesized)
cgcacgaactcagccaacgatttctgatagatttttgggagtttgaccagagatgcaaggggtgaaggagcgcttcctaccgttagggaactctggggacagagcgccccggccgcctga

SEQ ID NO: 593512 - DNA, 120 bp, Artificial Sequence
  ENSG00000173535_4 (sequence is synthesized)
tggccgaggcagggtgcgacccaggacccaggacggcgtcgggaaccataccatggcccggatccccaagaccctaaagttcgtcgtcgtcatcgtcgcggtcctgctgccagtcctagc

SEQ ID NO: 593513 - DNA, 120 bp, Artificial Sequence
  ENSG00000173535_5 (sequence is synthesized)
ttactctgccaccactgcccggcaggaggaagttccccagcagacagtggccccacagcaacagaggcacagcttcaagggggaggagtgtccagcaggatctcatagatcagaacatac

SEQ ID NO: 593514 - DNA, 120 bp, Artificial Sequence
  ENSG00000173535_6 (sequence is synthesized)
tggagcctgtaacccgtgcacagagggtgtggattacaccaacgcttccaacaatgaaccttcttgcttcccatgtacagtttgtaaatcagatcaaaaacataaaagttcctgcaccat

SEQ ID NO: 593515 - DNA, 120 bp, Artificial Sequence
  ENSG00000173535_7 (sequence is synthesized)
tccggaatgaaaactccccagagatgtgccggaagtgtagcaggtgccctagtggggaagtccaagtcagtaattgtacgtcctgggatgatatccagtgtgttgaagaatttggtgcca

SEQ ID NO: 593516 - DNA, 120 bp, Artificial Sequence
  ENSG00000173535_8 (sequence is synthesized)
atgccactgtggaaaccccagctgctgaagagacaatgaacaccagcccggggactcctgccccagctgctgaagagacaatgaacaccagcccggggactcctgccccagctgctgaag

SEQ ID NO: 593517 - DNA, 120 bp, Artificial Sequence
  ENSG00000173535_9 (sequence is synthesized)
agacaatgaccaccagcccggggactcctgccccagctgctgaagagacaatgaccaccagcccggggactcctgccccagctgctgaagagacaatgatcaccagcccggggactcctg

SEQ ID NO: 593518 - DNA, 120 bp, Artificial Sequence
  ENSG00000173535_10 (sequence is synthesized)
cctcttctcattacctctcatgcaccatcgtagggatcatagttctaattgtgcttctgattgtgtttgtttgaaagacttcactgtggaagaaattccttccttacctgaaaggttcag

SEQ ID NO: 593519 - DNA, 120 bp, Artificial Sequence
  ENSG00000173535_11 (sequence is synthesized)
gtaggcgctggctgagggcggggggcgctggacactctctgccctgcctccctctgctgtgttcccacagacagaaacgcctgcccctgccccaagtcctggtgtctccagcctggctct

SEQ ID NO: 593520 - DNA, 120 bp, Artificial Sequence
  ENSG00000173535_12 (sequence is synthesized)
atcttcctccttgtgatcgtcccatccccacatcccgtgcaccccccaggaccctggtctcatcagtccctctcctggagctgggggtccacacatctcccagccaagtccaagagggca

SEQ ID NO: 593521 - DNA, 120 bp, Artificial Sequence
  ENSG00000173535_13 (sequence is synthesized)
gggccagttcctcccatcttcaggcccagccaggcagggggcagtcggctcctcaactgggtgacaagggtgaggatgagaagtggtcacgggatttattcagccttggtcagagcagaa

SEQ ID NO: 593522 - DNA, 120 bp, Artificial Sequence
  ENSG00000173535_14 (sequence is synthesized)
tagatgctgaatggatgacaagaccaagcctggaagagtggatttctctgtctcaattccagtgagggccaaaaaagaagtttccccaccactgtcagcctctgggaattctgtggtgac

SEQ ID NO: 593523 - DNA, 120 bp, Artificial Sequence
  ENSG00000173540_0 (sequence is synthesized)
gttcggggccagcagccgtctacccggtgtcgcgttctgtgttgtggcggccctggatccggcgtcagggcgaccgggcggacgaggtggagccagagtctgtcaggcgggttggtgaag

SEQ ID NO: 593524 - DNA, 120 bp, Artificial Sequence
  ENSG00000173540_1 (sequence is synthesized)
ggcgcggggccgggcacggcgttgggagtgcgcggcagggaccggccaggcgggctgcaggcacctcagagcccgggacaccccctcaacgtccgcaggcgcgatgaaggcactgatctt

SEQ ID NO: 593525 - DNA, 120 bp, Artificial Sequence
  ENSG00000173540_2 (sequence is synthesized)
agtggggggctatgggacgcggctacggccgctgacgctgagcaccccgaagccactggtggacttctgcaataagcccatcttgctgcaccaagtggaggcgctagccgcggcaggcgt

SEQ ID NO: 593526 - DNA, 120 bp, Artificial Sequence
  ENSG00000173540_3 (sequence is synthesized)
ggaccacgtgatcctggccgtgagctacatgtcgcaggtgctggagaaggaaatgaaggcacaggagcagaggctgggaatccgaatctccatgtcccatgaagaggagcctttggggac

SEQ ID NO: 593527 - DNA, 120 bp, Artificial Sequence
  ENSG00000173540_4 (sequence is synthesized)
agctgggcccctggcgctggcccgtgacctactctctgagactgcagaccctttcttcgtcctcaacagtgacgtgatctgcgatttccccttccaagccatggtgcagttccaccggca

SEQ ID NO: 593528 - DNA, 120 bp, Artificial Sequence
  ENSG00000173540_5 (sequence is synthesized)
ccatggccaggagggctccatcctggtgaccaaggtggaggaaccctccaagtacggtgtggtggtgtgtgaggctgacacaggccgcattcaccggttcgtggagaagccacaggtgtt

SEQ ID NO: 593529 - DNA, 120 bp, Artificial Sequence
  ENSG00000173540_6 (sequence is synthesized)
ggcatgtacatcctgagccctgcagtgctgcagcgcatccagctgcagcctacgtccattgagaaggaggtcttccccattatggccaaggaggggcagctatatgccatggagttacag

SEQ ID NO: 593530 - DNA, 120 bp, Artificial Sequence
  ENSG00000173540_7 (sequence is synthesized)
ggcttctggatggacattgggcagcccaaggacttcctcactggcatgtgcctcttcctgcagtcactgaggcagaagcagcctgagcggctgtgctcaggccctggcattgtgggcaac

SEQ ID NO: 593531 - DNA, 120 bp, Artificial Sequence
  ENSG00000173540_8 (sequence is synthesized)
gtgctggtggacccaagtgcccgcatcggccagaactgcagcattggccccaatgtgagcctgggacctggcgtggtggtcgaagatggtgtgtgtatccggcggtgcacggtgctgcgg

SEQ ID NO: 593532 - DNA, 120 bp, Artificial Sequence
  ENSG00000173540_9 (sequence is synthesized)
gatgcccggatccgttcccattcctggcttgagtcctgcattgtgggctggcgctgccgcgtgggtcagtgggtacgcatggagaacgtgacagtgctgggtgaggacgtcatagttaat

SEQ ID NO: 593533 - DNA, 120 bp, Artificial Sequence
  ENSG00000173540_10 (sequence is synthesized)
gatgagctctacctcaacggagccagcgtgctgccccacaagtctattggcgagtcagtgccagagcctcgtatcatcatgtgaggggatgcagtggggctggccgagccccggttttcc

SEQ ID NO: 593534 - DNA, 120 bp, Artificial Sequence
  ENSG00000173540_11 (sequence is synthesized)
catcagcaaggggagtgctggcctgacacatcagaagaccctggacttgtcattatttgtctggggggcactgggtgaagctgaagctgttggacacctgccttctcatgtggacatcat

SEQ ID NO: 593535 - DNA, 120 bp, Artificial Sequence
  ENSG00000173540_12 (sequence is synthesized)
ctggcaggatccctgctgggcacaccccacaaaccccactccctcaagaagggccagggccagggctgtatggaataataatttaatgctcactgtggccctgactgaaagtcaagctca

SEQ ID NO: 593536 - DNA, 120 bp, Artificial Sequence
  ENSG00000173540_13 (sequence is synthesized)
gagttcggggccagcagccgtctacccggtgtcgcgttctgtgttgtggcggccctggatccggcgtcagggcgaccgggcggacgaggtggagccagagtctgtcaggcgggcgcgatg

SEQ ID NO: 593537 - DNA, 120 bp, Artificial Sequence
  ENSG00000173540_14 (sequence is synthesized)
agaagggcaaagggagctcataaatagggcccagcctggctctgggttcaaaggtggaggttccaggatggcacaggctgtgagggctaggcagctgaggaggtagtactcgtattggct

SEQ ID NO: 593538 - DNA, 120 bp, Artificial Sequence
  ENSG00000173540_15 (sequence is synthesized)
cccttctcccagtcctctacagacacgatggtggttttgcagaagaagcagtccttgttgttcatcaggtgctggttgatacaggctctacaacaggggaggggatgaggactgccctgc

SEQ ID NO: 593539 - DNA, 120 bp, Artificial Sequence
  ENSG00000173540_16 (sequence is synthesized)
atgtacctactgctctccccaccaccaagctgtggggcccacttacttgcaggacttgtggccacagggctggaacacagcagagatggggtgggcatagcagatggggcagaggtcctc

SEQ ID NO: 593540 - DNA, 120 bp, Artificial Sequence
  ENSG00000173540_17 (sequence is synthesized)
ctcactggtgggctgcagggaggagagtgaagggtgggctggagttggatgcctggctatgtggatgtccgttgtgcctgtgtaggagtgcacacatattcaagtggcatggacctgtgc

SEQ ID NO: 593541 - DNA, 120 bp, Artificial Sequence
  ENSG00000173540_18 (sequence is synthesized)
accgtgttcccactcaccagggaggcagctgctgcctgggcagatgcagaggtcaggtgcgccagcatctgttccacttgggccagctcatcggcactgatataatccgcatctggggag

SEQ ID NO: 593542 - DNA, 120 bp, Artificial Sequence
  ENSG00000173540_19 (sequence is synthesized)
tggtaggtagtgtcaagtcagaggtagctgaggatgtgatgcctcttgaatattcccagcctaggactttgctgttcttaaggctcctgacccgacccagccccagatttccctgacctg

SEQ ID NO: 593543 - DNA, 120 bp, Artificial Sequence
  ENSG00000173540_20 (sequence is synthesized)
ccccaccagcccactcacagctctgcagggagaagcgcttccggtcaggggctggcagagcagtgccaggtgctgggggctctggctgtcccaggagatagcatattgagcgtagctgga

SEQ ID NO: 593544 - DNA, 120 bp, Artificial Sequence
  ENSG00000173540_21 (sequence is synthesized)
agcagggatctgccaggagcactgatgtggcttgctctctcctaggtaggggagggtgcaagggcagtcagaaggcttggggcctggctaaaagtctctcttgggattgccaatgaggag

SEQ ID NO: 593545 - DNA, 120 bp, Artificial Sequence
  ENSG00000173540_22 (sequence is synthesized)
tgccatggctcgtacatgatcaccccccctgcatcctttccgtctccctgcttcccaaaccccaagtcctgtattctagtaaggtgccacacagcctgttttttttttttttttcttgag

SEQ ID NO: 593546 - DNA, 120 bp, Artificial Sequence
  ENSG00000173540_23 (sequence is synthesized)
gcgtgagccaccgcgcccggcctggggtaccactttaagaaggctcaggcgaaccaccttaagatagtgagagtctgcctgccccataatattatcagtccttcaaagtcacttcaaata

SEQ ID NO: 593547 - DNA, 120 bp, Artificial Sequence
  ENSG00000173540_24 (sequence is synthesized)
acggggactttggggttggccttgctccccatctggcggtcatgcggggccattgggcacaaagggatgtagccgccccgcctcctcaaacgggaaccaataggagcccgggccccgccc

SEQ ID NO: 593548 - DNA, 120 bp, Artificial Sequence
  ENSG00000173540_25 (sequence is synthesized)
ctggggggagtatttaggagccgatcaggaactcgcttggagagggctagcgaagccgaagggagcgcggctaagagtgccgcaccgcctcacaacctgggaaccggagagtaggggccg

SEQ ID NO: 593549 - DNA, 120 bp, Artificial Sequence
  ENSG00000173540_26 (sequence is synthesized)
tcggctggcaagaacccgccgtgcctcctcggcaagggccatccggtgccacccatgtcgcactagagcagaagagggtgagtcctggaactgcaacctgcacagagctgctctgtactg

SEQ ID NO: 593550 - DNA, 120 bp, Artificial Sequence
  ENSG00000173540_27 (sequence is synthesized)
tccctggtggtcgccgccatgacctggttggtgctgctggggacactgctctgcatgctgcgcgttgggttaggcaccccggactccgagggtttcccgccccgtgcgctccacaactgc

SEQ ID NO: 593551 - DNA, 120 bp, Artificial Sequence
  ENSG00000173540_28 (sequence is synthesized)
ccctacaaatgtatctgcgctgccgacctgctaagctgcactggcctagggctgcaggacgtgccagccgagttacctgccgctactgcggacctcgacctgagccacaacgcgctccag

SEQ ID NO: 593552 - DNA, 120 bp, Artificial Sequence
  ENSG00000173540_29 (sequence is synthesized)
cgcctgcgccccggctggttggcgcccctcttccagctgcgcgccctgcacctagaccacaacgaactagatgcgctgggtcgcggcgtcttcgtcaacgccagcggcctgaggctgctc

SEQ ID NO: 593553 - DNA, 120 bp, Artificial Sequence
  ENSG00000173540_30 (sequence is synthesized)
gatctatcatctaacacgttgcgggcgcttggccgccacgacctcgacgggctgggggcgctggagaagctgcttctgttcaataaccgcttggtgcacttggacgagcatgccttccac

SEQ ID NO: 593554 - DNA, 120 bp, Artificial Sequence
  ENSG00000173540_31 (sequence is synthesized)
ggcctgcgcgcgctcagccatctctacctgggctgcaacgaactcgcctcgttctccttcgaccacctgcacggtctgagcgccacccacctgcttactctggacctctcctccaaccgg

SEQ ID NO: 593555 - DNA, 120 bp, Artificial Sequence
  ENSG00000173540_32 (sequence is synthesized)
ctgggacacatctccgtacctgagctggccgcgctgccggccttcctcaagaacggcctctacttgcacaacaaccctttgccttgcgactgccgcctctaccacctgctacagcgctgg

SEQ ID NO: 593556 - DNA, 120 bp, Artificial Sequence
  ENSG00000173540_33 (sequence is synthesized)
caccagcggggcctgagcgccgtgcgcgactttgcgcgcgagtacgtatgcttggccttcaaggtacccgcgtcccgcgtgcgcttcttccagcacagccgcgtctttgagaactgctcg

SEQ ID NO: 593557 - DNA, 120 bp, Artificial Sequence
  ENSG00000173540_34 (sequence is synthesized)
tcggccccagctcttggcctagagcggccggaagagcacctgtacgcgctggtgggtcggtccctgaggctttactgcaacaccagcgtcccggccatgcgcattgcctgggtttcgccg

SEQ ID NO: 593558 - DNA, 120 bp, Artificial Sequence
  ENSG00000173540_35 (sequence is synthesized)
cagcaggagcttctcagggcgccaggatcccgcgatggcagcatcgcggtgctggccgacggcagcttggccataggcaacgtacaggagcagcatgcgggactcttcgtgtgcctggcc

SEQ ID NO: 593559 - DNA, 120 bp, Artificial Sequence
  ENSG00000173540_36 (sequence is synthesized)
actgggccccgcctgcaccacaaccagacgcacgagtacaacgtgagcgtgcactttccgcgcccagagcccgaggctttcaacacaggcttcaccacactgctgggctgtgccgtgggc

SEQ ID NO: 593560 - DNA, 120 bp, Artificial Sequence
  ENSG00000173540_37 (sequence is synthesized)
cttgtgctcgtgctgctctacctgttcgccccaccctgccgctgctgccgccgtgcctgccgctgccgccgctggccccaaacacccagcccgctccaagagctgagcgcacagtcctca

SEQ ID NO: 593561 - DNA, 120 bp, Artificial Sequence
  ENSG00000173540_38 (sequence is synthesized)
gtactcagcaccacaccgccagacgcacccagccgcaaggccagcgtccacaagcacgtagtctttctggagccaggccggaggggcctcaatggccgcgtgcagctggcagtagctgag

SEQ ID NO: 593562 - DNA, 120 bp, Artificial Sequence
  ENSG00000173540_39 (sequence is synthesized)
gaattcgatctctacaaccctggaggcctgcagctgaaggctggctctgagtccgccagctccataggctccgagggtcccatgacaacctagactgcccagggctcccccacccaggcc

SEQ ID NO: 593563 - DNA, 120 bp, Artificial Sequence
  ENSG00000173540_40 (sequence is synthesized)
cccaccctcttgctgctcgccctgctccctgcttcggtccagagaactggcagatactggtgggaagcactgtgcctggccccccagcttcctgtatgggcctcgaaacacaatgggcct

SEQ ID NO: 593564 - DNA, 120 bp, Artificial Sequence
  ENSG00000173540_41 (sequence is synthesized)
tctcgctcactggtagagacaggggttgtggtccccaacctgccttctgctctgcccctgcacaggacccaaaggccccaggccctgcaaggtgtgctagttcctgctttcccgcggact

SEQ ID NO: 593565 - DNA, 120 bp, Artificial Sequence
  ENSG00000173540_42 (sequence is synthesized)
tcctagtgcccaaatgccctgtgaggctgagagacccaggcccctgtggctttcaacacagcacagctgtggaagtggctgtgttcttctacagcctgtggaagaacccctgtagcagag

SEQ ID NO: 593566 - DNA, 120 bp, Artificial Sequence
  ENSG00000173540_43 (sequence is synthesized)
cctcccgtccaccctcaggggctgagacagctctcgaggagtggtgctcaagagctgacgcagggccacctccccttcccaagggggtgggagggagtgggcccacagggaaaagaaggc

SEQ ID NO: 593567 - DNA, 120 bp, Artificial Sequence
  ENSG00000173540_44 (sequence is synthesized)
ggctctgaaggaagatctcgcccacaccccaggacagaaagaggaaacaagcccgccctctggtgaaatgggactccctccatccaccaacacccaacctcctgaaagcttcacaacttc

SEQ ID NO: 593568 - DNA, 120 bp, Artificial Sequence
  ENSG00000173540_45 (sequence is synthesized)
acgcagagtccggtgggcaggcaccaggcaggaaaggctcctcaagaggttcctggtggtctggcctaagccccagccagaggccctgctctctctggcctggggcatccacccgttgtt

SEQ ID NO: 593569 - DNA, 120 bp, Artificial Sequence
  ENSG00000173540_46 (sequence is synthesized)
ctgaaggcagagcccattctgtgggctcacaagacacagtgaaggggatcatggcctgcacccctgcttttcagcagtaaaaagcccgaaaagcctggcgagcatggccgagctgggagg

SEQ ID NO: 593570 - DNA, 120 bp, Artificial Sequence
  ENSG00000173540_47 (sequence is synthesized)
gccgagccggaactccacgtccctcgagagcaggagcctcttaagggctggcactggtctcagcctaatggctgaggcggtaccctggcttcatatgcatctcactgctcccactgcagg

SEQ ID NO: 593571 - DNA, 120 bp, Artificial Sequence
  ENSG00000173540_48 (sequence is synthesized)
ggggcagggaaggggggtctgggagcccttcatgtgtgggggccgagctgggggcccccatggccatcctggacctcgctgctccagagtttaataaaggtagcacatgcttattgctag

SEQ ID NO: 593572 - DNA, 120 bp, Artificial Sequence
  ENSG00000173540_49 (sequence is synthesized)
gtaaggcgccaggtcttctctctcttgacactttcaccctccatgcccagcctcccatgccccctagccttcatctgccttcggatgttatggatacagagctgtgcagtatgtatcttt

SEQ ID NO: 593573 - DNA, 120 bp, Artificial Sequence
  ENSG00000173540_50 (sequence is synthesized)
aagcacttggggcagagtctcttgagatctggaacggcatgtgtatcaaggcttaggaacactggactaggtccgaggtccccttccttgcattcaggtgaccaaggtggaggaaccctc

SEQ ID NO: 593574 - DNA, 120 bp, Artificial Sequence
  ENSG00000173542_0 (sequence is synthesized)
gagcgctacccacttccgccccctccccctgccattggaactagctgagccgaactagttgcggccaccgagcagccggctctcggcacctcctcctccgcctccctgtctcctgttcca

SEQ ID NO: 593575 - DNA, 120 bp, Artificial Sequence
  ENSG00000173542_1 (sequence is synthesized)
ttcgcctttcctcttctttcctggcccacgccgctccgaggcctcgcgaccgccgagcctgcagcctgccccgcggccaacatgagcttcttgtttggtagtcgctcttctaaaactttt

SEQ ID NO: 593576 - DNA, 120 bp, Artificial Sequence
  ENSG00000173542_2 (sequence is synthesized)
aaaccaaagaagaacattccagagggttctcaccagtatgagctcttaaaacacgcagaagccacacttggcagtggcaaccttcggatggctgtcatgcttcctgaaggggaagatctc

SEQ ID NO: 593577 - DNA, 120 bp, Artificial Sequence
  ENSG00000173542_3 (sequence is synthesized)
aatgaatgggttgcagttaacactgtggatttcttcaatcagatcaacatgctttatggaactatcacagacttctgtacagaagagagttgtccagtgatgtcagctggcccaaaatat

SEQ ID NO: 593578 - DNA, 120 bp, Artificial Sequence
  ENSG00000173542_4 (sequence is synthesized)
gagtatcattgggcagatggaacgaacataaagaaacctattaagtgctctgcaccaaagtatattgattacttgatgacttgggttcaggaccagttggatgatgagacgttatttcca

SEQ ID NO: 593579 - DNA, 120 bp, Artificial Sequence
  ENSG00000173542_5 (sequence is synthesized)
tcaaaaattggtgtcccgttcccaaagaatttcatgtctgtggcaaaaactatactcaaacgcctctttagggtttatgctcacatttatcatcagcattttgaccctgtgatccagctt

SEQ ID NO: 593580 - DNA, 120 bp, Artificial Sequence
  ENSG00000173542_6 (sequence is synthesized)
caggaggaagcacatctaaatacatctttcaagcactttattttttttgtccaggaattcaaccttattgatagaagagaacttgcaccactccaagaactgattgaaaaactcacctca

SEQ ID NO: 593581 - DNA, 120 bp, Artificial Sequence
  ENSG00000173542_7 (sequence is synthesized)
aaagacagataaaaggatgcagagctgtgcaaattgttcctcaaatgaagcagtgtggagtgtattggggattttgttatattttgtttttatctggattgtttttgtcctaggtttggg

SEQ ID NO: 593582 - DNA, 120 bp, Artificial Sequence
  ENSG00000173542_8 (sequence is synthesized)
ggcgggggcttgtttgggttcctttttctttattctgattatgtgaaaccatattctattgctaggggaagccaagaaccattctctatacacttgataagggtaaatttatcttagtgt

SEQ ID NO: 593583 - DNA, 120 bp, Artificial Sequence
  ENSG00000173542_9 (sequence is synthesized)
ttttaaacttggttttggttacttgaggagttttttaataatattgtgtgctgcaagaaagtgcttgttgattgaactgccgatggattggtttctgtgtggtataaattgtggcccatt

SEQ ID NO: 593584 - DNA, 120 bp, Artificial Sequence
  ENSG00000173542_10 (sequence is synthesized)
tatgaagtccccaaaagagttatgtttttaagtgccttggcaggctcacttctgaggtgcaaaacatagatatagaactgaacagggcttgaaacaatattaggattactacccagggca

SEQ ID NO: 593585 - DNA, 120 bp, Artificial Sequence
  ENSG00000173542_11 (sequence is synthesized)
cttactggtgcatgttgtaacatatctatgataaaagccatagtttacctaaaatggtgatttccagcctttactgctttgaagaaacagaatttgtaaaggtatgcatgtagaacataa

SEQ ID NO: 593586 - DNA, 120 bp, Artificial Sequence
  ENSG00000173542_12 (sequence is synthesized)
aaaatatttcttaattattttttatattgatggtaatatattacgttcaacaatgcttaaagctctacaagcaggtcttttcccacctcttgatatctgtgatactgaaacttgaggatg

SEQ ID NO: 593587 - DNA, 120 bp, Artificial Sequence
  ENSG00000173542_13 (sequence is synthesized)
ttgaaatgtattacattttggcttctttctacatgttaactgcactgtagatgtaaaaattcaggttatatataggattgccatcttcagaggtgatgctgaactgtgaggtttcctagt

SEQ ID NO: 593588 - DNA, 120 bp, Artificial Sequence
  ENSG00000173542_14 (sequence is synthesized)
aattgccaaatgagccgtaagtctgcagaattcccttctactttgaagagaaggggataggaatgtatatttggctgggggcatggagatgttcgtatgtatgaggagttagggatgggg

SEQ ID NO: 593589 - DNA, 120 bp, Artificial Sequence
  ENSG00000173542_15 (sequence is synthesized)
agtcaagttctagaaagttttgtctgaaaacctttgaatagaatggcatgaagattttaatcaattacttataaacaaagtcttagagacttccttttaggaatcaacttccatgagaag

SEQ ID NO: 593590 - DNA, 120 bp, Artificial Sequence
  ENSG00000173542_16 (sequence is synthesized)
ttaaaaataaattattaattttaggtacagacattaaacatggaatttaaggactgttgggggaaattgatcacttcttagcatttccattcagtgaatggagctgatgtttgcctgtca

SEQ ID NO: 593591 - DNA, 120 bp, Artificial Sequence
  ENSG00000173542_17 (sequence is synthesized)
ttttaagatgataccataccttctttggttattataggtccagtttgaagcattctgacttctggtttttccaccctgaaaggaaatgtttttctttgcagcagtattagataatgaaaa

SEQ ID NO: 593592 - DNA, 120 bp, Artificial Sequence
  ENSG00000173542_18 (sequence is synthesized)
atgctaattcagtagttattaacttctaaattttattcgccatgactttctagtgaattattaccataaataacaatttcagaaacttagtttttagaataaatattaatttttccactt

SEQ ID NO: 593593 - DNA, 120 bp, Artificial Sequence
  ENSG00000173542_19 (sequence is synthesized)
cagttttattctagaaaataccctttttagaaatccagttttagttttgtcattttcgataaatctttcttcagttagaaatatatatccttccttcagttgaaacatatacctttttca

SEQ ID NO: 593594 - DNA, 120 bp, Artificial Sequence
  ENSG00000173542_20 (sequence is synthesized)
catctaggaagaaatgcttgctctgaaatagtatagattaaaaacactcagtagaaaagaatctaaaattaaatgaatttgttttgccattaaagtagagcagtgatacaatttaatgcc

SEQ ID NO: 593595 - DNA, 120 bp, Artificial Sequence
  ENSG00000173542_21 (sequence is synthesized)
attacaattatgttgactagaaactgcctttttctccacttcatttctagcaattatttaccaagtaccaacagtagaagtaacaggaaagcctggcagagttaaatatcttggacattt

SEQ ID NO: 593596 - DNA, 120 bp, Artificial Sequence
  ENSG00000173542_22 (sequence is synthesized)
attggtaaagcttatttataaactgcagtcagagctagttaatttccttaaatctttttgtattcagatagataatatgaatcattatgggttgattcagaaataaaatttgtgaggtga

SEQ ID NO: 593597 - DNA, 120 bp, Artificial Sequence
  ENSG00000173542_23 (sequence is synthesized)
ttttgaatcttgtccatataggaaaatgaagcacagaattactcagtcttccatattgtatttgacttcatatcaatctagtaaaaaaggagttgcaatagccaagtatagagagaatag

SEQ ID NO: 593598 - DNA, 120 bp, Artificial Sequence
  ENSG00000173542_24 (sequence is synthesized)
tgaaaaattaatcttgccctttcaagccttatacagtagtacactgtacttgtttttagtagtaagacctactttcccactatatgtagatagtttgttttcactgtgccagaatctcag

SEQ ID NO: 593599 - DNA, 120 bp, Artificial Sequence
  ENSG00000173542_25 (sequence is synthesized)
gtgcctgcttagagtatttctttaatcacagtcactgggaagtaaggagatgtatatatgtgtatatatggtaacaaagcatagcagttctctaggggagaggcctggcattgcacatgg

SEQ ID NO: 593600 - DNA, 120 bp, Artificial Sequence
  ENSG00000173542_26 (sequence is synthesized)
tgttacatggctacaagtaaggaaaaaatcagaaagtgaaagaactgatgtaataaaaggttgatttggttggttcccatgaaagttagtaagatgcccttttaaatataaggatcagtg

SEQ ID NO: 593601 - DNA, 120 bp, Artificial Sequence
  ENSG00000173542_27 (sequence is synthesized)
ctttgttctgcagcagagtttgctgataaatgtctgttggattctttttggatttctttaattaatttgtaagtaaccaagataattattttcccccttgctctctatattaatacgtag

SEQ ID NO: 593602 - DNA, 120 bp, Artificial Sequence
  ENSG00000173542_28 (sequence is synthesized)
ctataaagcaacagttggttttcttatcctttgataaaagcatcccataaaatataaagtagtaagttaacatagtattattgtcacacacaatgctttttttggttaaatgttgatacg

SEQ ID NO: 593603 - DNA, 120 bp, Artificial Sequence
  ENSG00000173542_29 (sequence is synthesized)
caatgttttggaattactttaattgatggagtagtggtggtagagagaaattaataacaaaaagagtgaaaatattttaattagcagtagatggtgctactggctttcatttgctgactt

SEQ ID NO: 593604 - DNA, 120 bp, Artificial Sequence
  ENSG00000173542_30 (sequence is synthesized)
gattattccctttctcttaaaaaccatggcattagactgcactaaattaacaagcatgttagttgctggtagaggttttggaggttaatttaccttaaattggaagacttttaattgcag

SEQ ID NO: 593605 - DNA, 120 bp, Artificial Sequence
  ENSG00000173542_31 (sequence is synthesized)
tctctttctaccttccctctgttagtcatttgtaaattctaaatggtcaccataaaatgtattaggtaggagaagatacgttttatgtataatatatctcagactgagttactgcctgtc

SEQ ID NO: 593606 - DNA, 120 bp, Artificial Sequence
  ENSG00000173542_32 (sequence is synthesized)
ttatcaggatggataaaacactacagtctcttatcaggaaatagagatgatgtggatatttatatattacatatataaccaccagactccattttatatattagcattttccttgcttat

SEQ ID NO: 593607 - DNA, 120 bp, Artificial Sequence
  ENSG00000173542_33 (sequence is synthesized)
gggaaaatagcaaaacaacatttcatttatacttttgtttacccctctctgagacaggttttgataaccactgaaatggtagaatatgtgagatacaaatattgagttgtagaactttct

SEQ ID NO: 593608 - DNA, 120 bp, Artificial Sequence
  ENSG00000173542_34 (sequence is synthesized)
ttttaaggtgaataagtcatgccttaacatccaaataagagttcatcttcagagtggttcttttgggagcactgtttattccagctatactgcaaaagtataatgtttttggaactgttc

SEQ ID NO: 593609 - DNA, 120 bp, Artificial Sequence
  ENSG00000173542_35 (sequence is synthesized)
tagagcataccatgaaaagcagtttgttattatgcaggaaaatcagtttcatcattttagttacactaaacacttttggcagcttaatatgacctttttaaattttttttatttttttta

SEQ ID NO: 593610 - DNA, 120 bp, Artificial Sequence
  ENSG00000173542_36 (sequence is synthesized)
tacaggtgtgagccaccacagccagccagtatgacctatcttaatcatcagctcaactgtaatttaaatttggctgttctctggagctaaaccattagggaagttcaaaggaatgtgcca

SEQ ID NO: 593611 - DNA, 120 bp, Artificial Sequence
  ENSG00000173542_37 (sequence is synthesized)
agggaagttcaaaggaatgtgccatgatttccgaatttgcacaagagaatgttttaagcattggtagcataattgaataaaagaatagtttcctgatgtcactattttgaagtggaaatt

SEQ ID NO: 593612 - DNA, 120 bp, Artificial Sequence
  ENSG00000173542_38 (sequence is synthesized)
atcacttggatgtggaggttttactttttaaaaacattcagcttaattaccttaccttaattaccttagttagatatactaatggaaaaaaaccaagtcctttctctagaacttgttttc

SEQ ID NO: 593613 - DNA, 120 bp, Artificial Sequence
  ENSG00000173542_39 (sequence is synthesized)
tatttttgttccttttcatgaaaacttctcaatttaattttaactactgtaggatagtattgattgaatggatactatggaaaagtggatccaatatttaagatagaagtagtttaagga

SEQ ID NO: 593614 - DNA, 120 bp, Artificial Sequence
  ENSG00000173542_40 (sequence is synthesized)
gacaacagcctttactgccatttttttttaaatgttttcactcagatgaacaatttgactttaataaaagactggagatttttgtacaaagaaataggaataagtttcatatactaatta

SEQ ID NO: 593615 - DNA, 120 bp, Artificial Sequence
  ENSG00000173542_41 (sequence is synthesized)
tgctgagttttaagcctacatatcacaaaatatttagaattgtataaccttttcatatatttataacttttaatgtctttttaaaagatgtgggaccaaaaatatatttataatttggaa

SEQ ID NO: 593616 - DNA, 120 bp, Artificial Sequence
  ENSG00000173542_42 (sequence is synthesized)
atgtgactgcataccaataagaaaacttaccttattttgaaatttatctgggatattaaagaatctaccaattcttaaaaacacagatttatactttaagcttattttaaaattaaagaa

SEQ ID NO: 593617 - DNA, 120 bp, Artificial Sequence
  ENSG00000173542_43 (sequence is synthesized)
tatataccaattcttagaaacactttaaggactactcttaaataacttaaatatcagagttttgttgtaatattaaaatttaccgtggaaatcactgttgttcagctatcaccttaattg

SEQ ID NO: 593618 - DNA, 120 bp, Artificial Sequence
  ENSG00000173542_44 (sequence is synthesized)
tgtatgatatgataaatgtttagcagtaaagctatcttaagatttaatggaaaagtttaatttgaagatgtaacaaaaattctgaccacagttgattctgaatttttaaggctttcctaa

SEQ ID NO: 593619 - DNA, 120 bp, Artificial Sequence
  ENSG00000173542_45 (sequence is synthesized)
taggctgatcacagagaataatccattttgaaggtataaaactgcactgtatgtctgtcacttgtagctgaactgattcacattttgacaaaagagagaaaatacaaaaatgagttttgc

SEQ ID NO: 593620 - DNA, 120 bp, Artificial Sequence
  ENSG00000173542_46 (sequence is synthesized)
aaatgtaataactttttctgcatatagaactaaataattgaaaaatatgggctatagttctcaaaggtagatagtaaaatcactggctttttccagctgtatgtttttccactgtgcgtg

SEQ ID NO: 593621 - DNA, 120 bp, Artificial Sequence
  ENSG00000173542_47 (sequence is synthesized)
tacacacacactggaaaataattaggctgattttgcaggtcttcattgttagagattctgaagtatttactgtcaattcataggtttcagtttatttaggaaattagtgtttgacagctt

SEQ ID NO: 593622 - DNA, 120 bp, Artificial Sequence
  ENSG00000173542_48 (sequence is synthesized)
taggtttcagtttatttaggaaattagtgtttgacagctttttttaaattatttcactgaagctgagattattagtgatacaaagttaaaatttcaatatttaatttctctatatattat

SEQ ID NO: 593623 - DNA, 120 bp, Artificial Sequence
  ENSG00000173542_49 (sequence is synthesized)
tctgatttaatattaaatttgtataggtgggcgtttcttaccattttgcacaagtttttgtttttctgaaatacttaattgtgcaggttgtaaaaaagattagtgcattttcattttaag

SEQ ID NO: 593624 - DNA, 120 bp, Artificial Sequence
  ENSG00000173542_50 (sequence is synthesized)
gatgctttgctccttaaattgttcgacagaaatgactttttagggaaagtagtttttttggagctactaacttgtatttattattgtacatgcataaccagggtggtgagggcactaatc

SEQ ID NO: 593625 - DNA, 120 bp, Artificial Sequence
  ENSG00000173542_51 (sequence is synthesized)
ttgtaggaaacacttacttgatgttttatttgaacttttcctataggtttaacttttactgcatagaattaacactaggaacagtgtcatgaaatctgggttgaaggagaatacagtata

SEQ ID NO: 593626 - DNA, 120 bp, Artificial Sequence
  ENSG00000173542_52 (sequence is synthesized)
tatgagaacacttaaagttcaaatagaaatcatttctgaagacaaaagcagaggaatattgtcagtgccaagtaatggaagaataagggcggcatttacactgtgcaagtattgagaaga

SEQ ID NO: 593627 - DNA, 120 bp, Artificial Sequence
  ENSG00000173542_53 (sequence is synthesized)
gtgcataaagacagggaactactctcatggagacagtttctctcttataatcaagtaactagaaggggaaaaatcatctaagttatgaaatccaacataggcgctatattacaaactgtg

SEQ ID NO: 593628 - DNA, 120 bp, Artificial Sequence
  ENSG00000173542_54 (sequence is synthesized)
ccggattatgcaaattgtagttgttactgatcaaagtttaattgcttcatttttgtttaaaaagggatactgatgtcagaaaatctgtaatatgttttattcaaaagatgtaaataatgt

SEQ ID NO: 593629 - DNA, 120 bp, Artificial Sequence
  ENSG00000173542_55 (sequence is synthesized)
atacagacttgtatgtgatgggatgggaaatatttaaattctaggtgtttttttttttttaaagaagaaactcaatgtttataagaaaaaaatgaataaatagttacgtttggccatgaa

SEQ ID NO: 593630 - DNA, 120 bp, Artificial Sequence
  ENSG00000173542_56 (sequence is synthesized)
tgtcggattatgaaagactcaaaataaagaactggaggcaaagaagagttctcagcctgaagttgactggaactttcagttaacaagtatttatcgaatacctgatctgtagtgttggac

SEQ ID NO: 593631 - DNA, 120 bp, Artificial Sequence
  ENSG00000173542_57 (sequence is synthesized)
tataattaatttttgtaagggggatccatcatgatttatcttttatatgtttatagaattttcctccctctttccactatatctagttggagagttctttatggctgtgttgatatatgt

SEQ ID NO: 593632 - DNA, 120 bp, Artificial Sequence
  ENSG00000173542_58 (sequence is synthesized)
atatgttacgcagttcccaagaagaggcacaaaagtttgttaacccagtggtaaaataagcaagtgatcctgtgtgaattgagcttttcccctttaacttagtgcttttaaatgcttaat

SEQ ID NO: 593633 - DNA, 120 bp, Artificial Sequence
  ENSG00000173542_59 (sequence is synthesized)
tagctgaaagtataggtttattagaaaataaatgatctccctctcttaaggtaattatttttgatgatattctagattaaagtatcactgagtttattttcagacaatgatagcattttt

SEQ ID NO: 593634 - DNA, 120 bp, Artificial Sequence
  ENSG00000173542_60 (sequence is synthesized)
ttatgatcatcattgagaataaacttacttccctgaagtaagggaaaggcttaagaagccctttcagtagaaagttctagatggagggttattcctattctaggaaccatggtaaattac

SEQ ID NO: 593635 - DNA, 120 bp, Artificial Sequence
  ENSG00000173542_61 (sequence is synthesized)
ttaccatacataacatatatttttaatcttatgcacttacaggtgttctatgtttttcataccaaatttatcatgaacattaaggtaaaccctctattttattttatttattttaatcta

SEQ ID NO: 593636 - DNA, 120 bp, Artificial Sequence
  ENSG00000173542_62 (sequence is synthesized)
tacccacctcggcctcccaaagtactgggaaccctctctataattttaaatgatgagatcagtatatctaggatagtaacaaaatctggcccaaaaaacagaatggatattgagtagatt

SEQ ID NO: 593637 - DNA, 120 bp, Artificial Sequence
  ENSG00000173542_63 (sequence is synthesized)
gctaataacatctgccacagttgtatctacttatttagggaagttcatatggcttctatccagtgttatttagtaatatatttgtgatcaaaagggagtttgaatttatgacccacaata

SEQ ID NO: 593638 - DNA, 120 bp, Artificial Sequence
  ENSG00000173542_64 (sequence is synthesized)
tgaatcttacagattcagatattaagctatgtgagaagaaaacaagatttgaggggttgctgtatcatcggctgagtgactttgcttttttgtatttacttttaagggcagacttatcaa

SEQ ID NO: 593639 - DNA, 120 bp, Artificial Sequence
  ENSG00000173542_65 (sequence is synthesized)
gtagaaattgtttacgtttagatagtcatgtttttgccttctcaaacttctgacaactgattgtctcaaaaagctaagaatctgctcctgtaatgttagaactttttgacattttacgat

SEQ ID NO: 593640 - DNA, 120 bp, Artificial Sequence
  ENSG00000173542_66 (sequence is synthesized)
tttttttgaaaaaaaaatgtgacaacaatataaatagttgttgttatggagtactttaaacatatttattgaatgcattaaccacttggaacttttttaataaaagagcaatttttcaag

SEQ ID NO: 593641 - DNA, 120 bp, Artificial Sequence
  ENSG00000173542_67 (sequence is synthesized)
atggtgcaatgttcaaagtactcaagatgaatttgaggaacttacaatgtctcagaaaaatggtgggaatgttcttcagatgatgtatgagaaacctgaacgatggtcttttaccttcca

SEQ ID NO: 593642 - DNA, 120 bp, Artificial Sequence
  ENSG00000173545_0 (sequence is synthesized)
agtgacaatcaggaagtcggcgtgtcgagtggctcttcctggctgctgaggcgggttaaggtctgagggtcttgtggggccacggcgctgatcaccaggtgtttggcttggtcggttctt

SEQ ID NO: 593643 - DNA, 120 bp, Artificial Sequence
  ENSG00000173545_1 (sequence is synthesized)
atttctcgcctggcaatggcgacgtacacctgcataacttgccgggtggcgttccgcgacgcggacatgcagcgggcccactataagacggactggcaccgctacaacctgcggcggaag

SEQ ID NO: 593644 - DNA, 120 bp, Artificial Sequence
  ENSG00000173545_2 (sequence is synthesized)
gtggccagcatggccccagtgaccgccgagggcttccaggagcgagtgcgggcgcagcgggccgtcgcggaggaggagagcaagggctcggccacctactgcaccgtttgcagtaagaag

SEQ ID NO: 593645 - DNA, 120 bp, Artificial Sequence
  ENSG00000173545_3 (sequence is synthesized)
tttgcctctttcaacgcctacgagaaccacctcaagtcccggcgtcacgttgagctggagaagaaggccgtgcaggcagtgaatcggaaagtggagatgatgaatgaaaagaacttggag

SEQ ID NO: 593646 - DNA, 120 bp, Artificial Sequence
  ENSG00000173545_4 (sequence is synthesized)
aaaggactgggcgtggacagtgtggacaaggatgccatgaacgcggccatccagcaggccatcaaggcccagccgtccatgtctcccaagaaggcgcccccagcgcctgcaaaggaggcc

SEQ ID NO: 593647 - DNA, 120 bp, Artificial Sequence
  ENSG00000173545_5 (sequence is synthesized)
aggaatgtcgtggccgtgggtactggtggccgtgggacccacgaccgagacccgagtgagaaaccaccccggctccagtggtttgaacagcaggcgaagaagttggcaaagcagcaggag

SEQ ID NO: 593648 - DNA, 120 bp, Artificial Sequence
  ENSG00000173545_6 (sequence is synthesized)
gaggacagcgaggaggaggaagaggacctggatggagacgattgggaagatattgattctgatgaagaattggaatgtgaggatactgaagcaatggacgatgtggtggagcaggatgca

SEQ ID NO: 593649 - DNA, 120 bp, Artificial Sequence
  ENSG00000173545_7 (sequence is synthesized)
ccccttggtgccatccctatcacggactgcttattttgttcccatcattccagctcgctgatgaagaatgtggctcacatgaccaaagaccacagtttctttattcctgatatagaatat

SEQ ID NO: 593650 - DNA, 120 bp, Artificial Sequence
  ENSG00000173545_8 (sequence is synthesized)
ctttcagatattaagggactgattaaatacttgggagagaaagttggtgttggcaagatttgcttgtggtgcaacgagaaagggaagtccttctactccacagaagctgtacaggcacat

SEQ ID NO: 593651 - DNA, 120 bp, Artificial Sequence
  ENSG00000173545_9 (sequence is synthesized)
atgaatgacaaaagccactgtaagctcttcacagatggcgatgctgctttggaatttgcagacttctatgattttaggagtagctatccagatcacaaggaaggggaggaccccaataag

SEQ ID NO: 593652 - DNA, 120 bp, Artificial Sequence
  ENSG00000173545_10 (sequence is synthesized)
gctgaggagttgccctcagaaaagaacttggaatatgatgatgaaaccatggaattgattctgccttctggtgccagagtgggtcatcgctccttgatgagatactacaaacagcgattt

SEQ ID NO: 593653 - DNA, 120 bp, Artificial Sequence
  ENSG00000173545_11 (sequence is synthesized)
ggcttgtcaagagctgtggcagttgccaaaaatcggaaggccgtgggccgagtacttcagcagtacagagccctgggatggactggcagcacaggagcggctcttatgcgagagcgagac

SEQ ID NO: 593654 - DNA, 120 bp, Artificial Sequence
  ENSG00000173545_12 (sequence is synthesized)
atgcagtatgtccaaaggatgaaatcaaaatggatgctgaagacaggaatgaagaacaatgccaccaagcagatgcactttcgggtccaagtgagattctgagagtctgctgggattgag

SEQ ID NO: 593655 - DNA, 120 bp, Artificial Sequence
  ENSG00000173545_13 (sequence is synthesized)
caatcatctcctgcccaagtttcctccttgccctgaggaccagtgaaagacagatcataggagagacccttttgctgctacttcattcgttctgacctaataataaaagttagaaccata

SEQ ID NO: 593656 - DNA, 120 bp, Artificial Sequence
  ENSG00000173546_0 (sequence is synthesized)
gcgcccaggagcagagccgcgctcgctccactcagctcccagctcccaggactccgctggctcctcgcaagtcctgccgcccagcccgccgggatgcagtccgggccgcggcccccactt

SEQ ID NO: 593657 - DNA, 120 bp, Artificial Sequence
  ENSG00000173546_1 (sequence is synthesized)
ccagcccccggcctggccttggctttgaccctgactatgttggccagacttgcatccgcggcttccttcttcggtgagaaccacctggaggtgcctgtggccacggctctgaccgacata

SEQ ID NO: 593658 - DNA, 120 bp, Artificial Sequence
  ENSG00000173546_2 (sequence is synthesized)
gacctgcagctgcagttctccacgtcccagcccgaagccctccttctcctggcagcaggcccagctgaccacctcctgctgcagctctactctggacgcctgcaggtcagacttgttctg

SEQ ID NO: 593659 - DNA, 120 bp, Artificial Sequence
  ENSG00000173546_3 (sequence is synthesized)
ggccaggaggagctgaggctgcagactccagcagagacgctgctgagtgactccatcccccacactgtggtgctgactgtcgtagagggctgggccacgttgtcagtcgatgggtttctg

SEQ ID NO: 593660 - DNA, 120 bp, Artificial Sequence
  ENSG00000173546_4 (sequence is synthesized)
aacgcctcctcagcagtcccaggagcccccctagaggtcccctatgggctctttgttgggggcactgggacccttggcctgccctacctgaggggaaccagccgacccctgaggggttgc

SEQ ID NO: 593661 - DNA, 120 bp, Artificial Sequence
  ENSG00000173546_5 (sequence is synthesized)
ctccatgcagccaccctcaatggccgcagcctcctccggcctctgacccccgatgtgcatgagggctgtgctgaagagttttctgccagtgatgatgtggccctgggcttctctgggccc

SEQ ID NO: 593662 - DNA, 120 bp, Artificial Sequence
  ENSG00000173546_6 (sequence is synthesized)
cactctctggctgccttccctgcctggggcactcaggacgaaggaaccctagagtttacactcaccacacagagccggcaggcacccttggccttccaggcagggggccggcgtggggac

SEQ ID NO: 593663 - DNA, 120 bp, Artificial Sequence
  ENSG00000173546_7 (sequence is synthesized)
ttcatctatgtggacatatttgagggccacctgcgggccgtggtggagaagggccagggtaccgtattgctccacaacagtgtgcctgtggccgatgggcagccccatgaggtcagtgtc

SEQ ID NO: 593664 - DNA, 120 bp, Artificial Sequence
  ENSG00000173546_8 (sequence is synthesized)
cacatcaatgctcaccggctggaaatctccgtggaccagtaccctacgcatacttcgaaccgaggagtcctcagctacctggagccacggggcagtctccttctcggggggctggatgca

SEQ ID NO: 593665 - DNA, 120 bp, Artificial Sequence
  ENSG00000173546_9 (sequence is synthesized)
gaggcctctcgtcacctccaggaacaccgcctgggcctgacaccagaggccaccaatgcctccctgctgggctgcatggaagacctcagtgtcaatggccagaggcgggggctgcgggaa

SEQ ID NO: 593666 - DNA, 120 bp, Artificial Sequence
  ENSG00000173546_10 (sequence is synthesized)
gctttgctgacgcgcaacatggcagccggctgcaggctggaggaggaggagtatgaggacgatgcctatggacattatgaagctttctccaccctggcccctgaggcttggccagccatg

SEQ ID NO: 593667 - DNA, 120 bp, Artificial Sequence
  ENSG00000173546_11 (sequence is synthesized)
gagctgcctgagccatgcgtgcctgagccagggctgcctcctgtctttgccaatttcacccagctgctgactatcagcccactggtggtggccgaggggggcacagcctggcttgagtgg

SEQ ID NO: 593668 - DNA, 120 bp, Artificial Sequence
  ENSG00000173546_12 (sequence is synthesized)
aggcatgtgcagcccacgctggacctgatggaggctgagctgcgcaaatcccaggtgctgttcagcgtgacccgaggggcacgccatggcgagctcgagctggacatcccgggagcccag

SEQ ID NO: 593669 - DNA, 120 bp, Artificial Sequence
  ENSG00000173546_13 (sequence is synthesized)
gcacgaaaaatgttcaccctcctggacgtggtgaaccgcaaggcccgcttcatccacgatggctctgaggacacctccgaccagctggtgctggaggtgtcggtgacggctcgggtgccc

SEQ ID NO: 593670 - DNA, 120 bp, Artificial Sequence
  ENSG00000173546_14 (sequence is synthesized)
atgccctcatgccttcggaggggccaaacatacctcctgcccatccaggtcaaccctgtcaatgacccaccccacatcatcttcccacatggcagcctcatggtgatcctggaacacacg

SEQ ID NO: 593671 - DNA, 120 bp, Artificial Sequence
  ENSG00000173546_15 (sequence is synthesized)
cagaagccgctggggcctgaggttttccaggcctatgacccggactctgcctgtgagggcctcaccttccaggtccttggcacctcctctggcctccccgtggagcgccgagaccagcct

SEQ ID NO: 593672 - DNA, 120 bp, Artificial Sequence
  ENSG00000173546_16 (sequence is synthesized)
ggggagccggcgaccgagttctcctgccgggagttggaggccggcagcctagtctatgtccaccgcggtggtcctgcacaggacttgacgttccgggtcagcgatggactgcaggccagc

SEQ ID NO: 593673 - DNA, 120 bp, Artificial Sequence
  ENSG00000173546_17 (sequence is synthesized)
cccccggccacgctgaaggtggtggccatccggccggccatacagatccaccgcagcacagggttgcgactggcccaaggctctgccatgcccatcttgcccgccaacctgtcggtggag

SEQ ID NO: 593674 - DNA, 120 bp, Artificial Sequence
  ENSG00000173546_18 (sequence is synthesized)
accaatgccgtggggcaggatgtgagcgtgctgttccgcgtcactggggccctgcagtttggggagctgcagaagcagggggcaggtggggtggagggtgctgagtggtgggccacacag

SEQ ID NO: 593675 - DNA, 120 bp, Artificial Sequence
  ENSG00000173546_19 (sequence is synthesized)
gcgttccaccagcgggatgtggagcagggccgcgtgaggtacctgagcactgacccacagcaccacgcttacgacaccgtggagaacctggccctggaggtgcaggtgggccaggagatc

SEQ ID NO: 593676 - DNA, 120 bp, Artificial Sequence
  ENSG00000173546_20 (sequence is synthesized)
ctgagcaatctgtccttcccagtgaccatccagagagccactgtgtggatgctgcggctggagccactgcacactcagaacacccagcaggagaccctcaccacagcccacctggaggcc

SEQ ID NO: 593677 - DNA, 120 bp, Artificial Sequence
  ENSG00000173546_21 (sequence is synthesized)
accctggaggaggcaggcccaagccccccaaccttccattatgaggtggttcaggctcccaggaaaggcaaccttcaactacagggcacaaggctgtcagatggccagggcttcacccag

SEQ ID NO: 593678 - DNA, 120 bp, Artificial Sequence
  ENSG00000173546_22 (sequence is synthesized)
gatgacatacaggctggccgggtgacctatggggccacagcacgtgcctcagaggcagtcgaggacaccttccgtttccgtgtcacagctccaccatatttctccccactctataccttc

SEQ ID NO: 593679 - DNA, 120 bp, Artificial Sequence
  ENSG00000173546_23 (sequence is synthesized)
cccatccacattggtggtgacccagatgcgcctgtcctcaccaatgtcctcctcgtggtgcctgagggtggtgagggtgtcctctctgctgaccacctctttgtcaagagtctcaacagt

SEQ ID NO: 593680 - DNA, 120 bp, Artificial Sequence
  ENSG00000173546_24 (sequence is synthesized)
gccagctacctctatgaggtcatggagcggccccgccatgggaggttggcttggcgtgggacacaggacaagaccactatggtgacatccttcaccaatgaagacctgttgcgtggccgg

SEQ ID NO: 593681 - DNA, 120 bp, Artificial Sequence
  ENSG00000173546_25 (sequence is synthesized)
ctggtctaccagcatgatgactccgagaccacagaagatgatatcccatttgttgctacccgccagggcgagagcagtggtgacatggcctgggaggaggtacggggtgtcttccgagtg

SEQ ID NO: 593682 - DNA, 120 bp, Artificial Sequence
  ENSG00000173546_26 (sequence is synthesized)
gccatccagcccgtgaatgaccacgcccctgtgcagaccatcagccggatcttccatgtggcccggggtgggcggcggctgctgactacagacgacgtggccttcagcgatgctgactcg

SEQ ID NO: 593683 - DNA, 120 bp, Artificial Sequence
  ENSG00000173546_27 (sequence is synthesized)
ggctttgctgacgcccagctggtgcttacccgcaaggacctcctctttggcagtatcgtggccgtagatgagcccacgcggcccatctaccgcttcacccaggaggacctcaggaagagg

SEQ ID NO: 593684 - DNA, 120 bp, Artificial Sequence
  ENSG00000173546_28 (sequence is synthesized)
cgagtactgttcgtgcactcaggggctgaccgtggctggatccagctgcaggtgtccgacgggcaacaccaggccactgcgctgctggaggtgcaggcctcggaaccctacctccgtgtg

SEQ ID NO: 593685 - DNA, 120 bp, Artificial Sequence
  ENSG00000173546_29 (sequence is synthesized)
gccaacggctccagccttgtggtccctcaaggaggccagggcaccatcgacacggccgtgctccacctggacaccaacctcgacatccgcagtggggatgaggtccactaccacgtcaca

SEQ ID NO: 593686 - DNA, 120 bp, Artificial Sequence
  ENSG00000173546_30 (sequence is synthesized)
gctggccctcgctggggacagctagtccgggctggtcagccagccacagccttctcccagcaggacctgctggatggggccgttctctatagccacaatggcagcctcagcccccgcgac

SEQ ID NO: 593687 - DNA, 120 bp, Artificial Sequence
  ENSG00000173546_31 (sequence is synthesized)
accatggccttctccgtggaagcagggccagtgcacacggatgccaccctacaagtgaccattgccctagagggcccactggccccactgaagctggtccggcacaagaagatctacgtc

SEQ ID NO: 593688 - DNA, 120 bp, Artificial Sequence
  ENSG00000173546_32 (sequence is synthesized)
ttccagggagaggcagctgagatcagaagggaccagctggaggcagcccaggaggcagtgccacctgcagacatcgtattctcagtgaagagcccaccgagtgccggctacctggtgatg

SEQ ID NO: 593689 - DNA, 120 bp, Artificial Sequence
  ENSG00000173546_33 (sequence is synthesized)
gtgtcgcgtggcgccttggcagatgagccacccagcctggaccctgtgcagagcttctcccaggaggcagtggacacaggcagggtcctgtacctgcactcccgccctgaggcctggagc

SEQ ID NO: 593690 - DNA, 120 bp, Artificial Sequence
  ENSG00000173546_34 (sequence is synthesized)
cgctggatgtggcctcaggcctgggtgctcccctcgagggcgtccttgtggagctggaggtgctgcccgctgccatcccactagaggcgcaaaacttcagcgtccctgagggtggcagcc

SEQ ID NO: 593691 - DNA, 120 bp, Artificial Sequence
  ENSG00000173546_35 (sequence is synthesized)
tcaccctggcccctccactgctccgtgtctccgggccctacttccccactctcctgggcctcagcctgcaggtgctggagccaccccagcatggagccctgcagaaggaggacggacctc

SEQ ID NO: 593692 - DNA, 120 bp, Artificial Sequence
  ENSG00000173546_36 (sequence is synthesized)
aagccaggaccctcagcgccttctcctggagaatggtggaagagcagctgatccgctacgtgcatgacgggagcgagacactgacagacagttttgtcctgatggctaatgcctccgaga

SEQ ID NO: 593693 - DNA, 120 bp, Artificial Sequence
  ENSG00000173546_37 (sequence is synthesized)
tggatcgccagagccatcctgtggccttcactgtcactgtcctgcctgtcaatgaccaaccccccatcctcactacaaacacaggcctgcagatgtgggagggggccactgcgcccatcc

SEQ ID NO: 593694 - DNA, 120 bp, Artificial Sequence
  ENSG00000173546_38 (sequence is synthesized)
ctgcggaggctctgaggagcacggacggcgactctgggtctgaggatctggtctacaccatcgagcagcccagcaacgggcgggtagtgctgcggggggcgccgggcactgaggtgcgca

SEQ ID NO: 593695 - DNA, 120 bp, Artificial Sequence
  ENSG00000173546_39 (sequence is synthesized)
gcttcacgcaggcccagctggacggcgggctcgtgctgttctcacacagaggaaccctggatggaggcttccgcttccgcctctctgacggcgagcacacttcccccggacacttcttcc

SEQ ID NO: 593696 - DNA, 120 bp, Artificial Sequence
  ENSG00000173546_40 (sequence is synthesized)
gagtgacggcccagaagcaagtgctcctctcgctgaagggcagccagacactgactgtctgcccagggtccgtccagccactcagcagtcagaccctcagggccagctccagcgcaggca

SEQ ID NO: 593697 - DNA, 120 bp, Artificial Sequence
  ENSG00000173546_41 (sequence is synthesized)
ctgacccccagctcctgctctaccgtgtggtgcggggcccccagctaggccggctgttccacgcccagcaggacagcacaggggaggccctggtgaacttcactcaggcagaggtctacg

SEQ ID NO: 593698 - DNA, 120 bp, Artificial Sequence
  ENSG00000173546_42 (sequence is synthesized)
ctgggaatattctgtatgagcatgagatgccccccgagcccttttgggaggcccatgataccctagagctccagctgtcctcgccgcctgcccgggacgtggccgccacccttgctgtgg

SEQ ID NO: 593699 - DNA, 120 bp, Artificial Sequence
  ENSG00000173546_43 (sequence is synthesized)
ctgtgtcttttgaggctgcctgtccccagcgccccagccacctctggaagaacaaaggtctctgggtccccgagggccagcgggccaggatcaccgtggctgctctggatgcctccaatc

SEQ ID NO: 593700 - DNA, 120 bp, Artificial Sequence
  ENSG00000173546_44 (sequence is synthesized)
tcttggccagcgttccatcaccccagcgctcagagcatgatgtgctcttccaggtcacacagttccccagccggggccagctgttggtgtccgaggagcccctccatgctgggcagcccc

SEQ ID NO: 593701 - DNA, 120 bp, Artificial Sequence
  ENSG00000173546_45 (sequence is synthesized)
acttcctgcagtcccagctggctgcagggcagctagtgtatgcccacggcggtgggggcacccagcaggatggcttccactttcgtgcccacctccaggggccagcaggggcctccgtgg

SEQ ID NO: 593702 - DNA, 120 bp, Artificial Sequence
  ENSG00000173546_46 (sequence is synthesized)
ctggaccccaaacctcagaggcctttgccatcacggtgagggatgtaaatgagcggccccctcagccacaggcctctgtcccactccggctcacccgaggctctcgtgcccccatctccc

SEQ ID NO: 593703 - DNA, 120 bp, Artificial Sequence
  ENSG00000173546_47 (sequence is synthesized)
gggcccagctgagtgtggtggacccagactcagctcctggggagattgagtacgaggtccagcgggcaccccacaacggcttcctcagcctggtgggtggtggcctggggcccgtgaccc

SEQ ID NO: 593704 - DNA, 120 bp, Artificial Sequence
  ENSG00000173546_48 (sequence is synthesized)
gcttcacgcaagccgatgtggattcagggcggctggccttcgtggccaacgggagcagcgtggcaggcatcttccagctgagcatgtctgatggggccagcccacccctgcccatgtccc

SEQ ID NO: 593705 - DNA, 120 bp, Artificial Sequence
  ENSG00000173546_49 (sequence is synthesized)
tggctgtggacatcctaccatccgccatcgaggtgcagctgcgggcacccctggaggtgccccaagctttggggcgctcctcactgagccagcagcagctccgggtggtttcagatcggg

SEQ ID NO: 593706 - DNA, 120 bp, Artificial Sequence
  ENSG00000173546_50 (sequence is synthesized)
aggagccagaggcagcataccgcctcatccagggaccccagtatgggcatctcctggtgggcgggcggcccacctcggccttcagccaattccagatagaccagggcgaggtggtctttg

SEQ ID NO: 593707 - DNA, 120 bp, Artificial Sequence
  ENSG00000173546_51 (sequence is synthesized)
ccttcaccaacttctcctcctctcatgaccacttcagagtcctggcactggctaggggtgtcaatgcatcagccgtagtgaacgtcactgtgagggctctgctgcatgtgtgggcaggtg

SEQ ID NO: 593708 - DNA, 120 bp, Artificial Sequence
  ENSG00000173546_52 (sequence is synthesized)
ggccatggccccagggtgccaccctgcgcctggaccccaccgtcctagatgctggcgagctggccaaccgcacaggcagtgtgccgcgcttccgcctcctggagggaccccggcatggcc

SEQ ID NO: 593709 - DNA, 120 bp, Artificial Sequence
  ENSG00000173546_53 (sequence is synthesized)
gcgtggtccgcgtgccccgagccaggacggagcccgggggcagccagctggtggagcagttcactcagcaggaccttgaggacgggaggctggggctggaggtgggcaggccagagggga

SEQ ID NO: 593710 - DNA, 120 bp, Artificial Sequence
  ENSG00000173546_54 (sequence is synthesized)
gggcccccggccccgcaggtgacagtctcactctggagctgtgggcacagggcgtcccgcctgctgtggcctccctggactttgccactgagccttacaatgctgcccggccctacagcg

SEQ ID NO: 593711 - DNA, 120 bp, Artificial Sequence
  ENSG00000173546_55 (sequence is synthesized)
tggccctgctcagtgtccccgaggccgcccggacggaagcagggaagccagagagcagcacccccacaggcgagccaggccccatggcatccagccctgagcccgctgtggccaagggag

SEQ ID NO: 593712 - DNA, 120 bp, Artificial Sequence
  ENSG00000173546_56 (sequence is synthesized)
gcttcctgagcttccttgaggccaacatgttcagcgtcatcatccccatgtgcctggtacttctgctcctggcgctcatcctgcccctgctcttctacctccgaaaacgcaacaagacgg

SEQ ID NO: 593713 - DNA, 120 bp, Artificial Sequence
  ENSG00000173546_57 (sequence is synthesized)
gcaagcatgacgtccaggtcctgactgccaagccccgcaacggcctggctggtgacaccgagacctttcgcaaggtggagccaggccaggccatcccgctcacagctgtgcctggccagg

SEQ ID NO: 593714 - DNA, 120 bp, Artificial Sequence
  ENSG00000173546_58 (sequence is synthesized)
ggccccctccaggaggccagcctgacccagagctgctgcagttctgccggacacccaaccctgcccttaagaatggccagtactgggtgtgaggcctggcctgggcccagatgctgatcg

SEQ ID NO: 593715 - DNA, 120 bp, Artificial Sequence
  ENSG00000173546_59 (sequence is synthesized)
ggccagggacaggcttgcccatgtcccgggccccattgcttccatgcctggtgctgtctgagtatccccagagcaagagagacctggagacaccaggggtggagggtcctgggagatagt

SEQ ID NO: 593716 - DNA, 120 bp, Artificial Sequence
  ENSG00000173546_60 (sequence is synthesized)
cccaggggtccgggacagagtggagtcaagagctggaacctccctcagctcactccgagcctggagaactgcaggggccaaggtggaggcaggcttaagttcagtcctcctgccctggag

SEQ ID NO: 593717 - DNA, 120 bp, Artificial Sequence
  ENSG00000173546_61 (sequence is synthesized)
ctggtttgggctgtcaaaaccagggtaacctcctacatgggtcatgactctgggtcctgggtctgtgaccttgggtaagtcgcgcctgacccaggctgctaagagggcaaggagaaggaa

SEQ ID NO: 593718 - DNA, 120 bp, Artificial Sequence
  ENSG00000173546_62 (sequence is synthesized)
gtaccctggggagggaagggacagaggaagctattcctggcttttccactccaacccaggccaccctttgtctctgccccagagttgagaaaaaaacttcctcccctggttttttaggga

SEQ ID NO: 593719 - DNA, 120 bp, Artificial Sequence
  ENSG00000173546_63 (sequence is synthesized)
gatggtatcccctggagtagagggcaagaggagagagcgcctccagtctagaaggcataagccaataggataatatattcagggtgcagggtgggtaggttgctctggggatgggtttat

SEQ ID NO: 593720 - DNA, 120 bp, Artificial Sequence
  ENSG00000173546_64 (sequence is synthesized)
ttaagggagattgcaaggaagctatttaacatggtgctgagctagccaggactgatggagcccctgggggtgtgggatggaggagggtctgcagccagttcattcccagggccccatctt

SEQ ID NO: 593721 - DNA, 120 bp, Artificial Sequence
  ENSG00000173546_65 (sequence is synthesized)
gatgggccaagggctaaacatgcatgtgtcagtggctttggagcaggttaggctggggctcatcgagggtctcaggccgaggccactgcggtgccagtgcccccctgaggactagggcag

SEQ ID NO: 593722 - DNA, 120 bp, Artificial Sequence
  ENSG00000173546_66 (sequence is synthesized)
gcagctgggggcacttggttccatggagcctggataaacagtgctttggaggctctggacagctgtgtggtgtttgtgtcttaactatgcactgggcccttgtctgcgtcggcttgcata

SEQ ID NO: 593723 - DNA, 120 bp, Artificial Sequence
  ENSG00000173546_67 (sequence is synthesized)
cagagggcccctggggtcggccctccggcctggcctcagccagtgggatggacagggccaggcaggcctctgaacttccacctcctggggcctcccagacctcctgtgcccccacctgtg

SEQ ID NO: 593724 - DNA, 120 bp, Artificial Sequence
  ENSG00000173546_68 (sequence is synthesized)
tgggcaggtgggccagtcttcgggtgatgggaccaaaccccttcagttcagtagagaaaggctaggtcctctacaaagagctgcaagacaaaaattaaaataaatgctccccaccctaga

SEQ ID NO: 593725 - DNA, 120 bp, Artificial Sequence
  ENSG00000173548_0 (sequence is synthesized)
ggaatcgcctttttgttttggagctgccttctcgctggcggagcggagggtctgcgagcgccggggaaggcaggctgggggcgcagcccgccccccactggccgggccccgcagggcgga

SEQ ID NO: 593726 - DNA, 120 bp, Artificial Sequence
  ENSG00000173548_1 (sequence is synthesized)
gaggaggacggacggacagacggctggccgcgccatctgctcgccggagctcactctccaaactccaaactgttgagtgtgtgcgtgcacgcgagggtggtgatcgggggtcgtaagtcc

SEQ ID NO: 593727 - DNA, 120 bp, Artificial Sequence
  ENSG00000173548_2 (sequence is synthesized)
cgggtgaggaaccggtttctgctggggttacctttggacggggttcctgggattcagagcagggtcagcgtcaggctcagaaactgctgaggaattaggcaaacaaaagagaccactcag

SEQ ID NO: 593728 - DNA, 120 bp, Artificial Sequence
  ENSG00000173548_3 (sequence is synthesized)
cgagtggctagaagtcgcccgacagcctcgtcgcgccccctccttcctccggggttggggctggccacttctggggcggggagagggcgcccgagccggcgggggctccggctgcgcagc

SEQ ID NO: 593729 - DNA, 120 bp, Artificial Sequence
  ENSG00000173548_4 (sequence is synthesized)
cggggtcgaagagttggcggcctgttgtgtaagcctcagtccttgttttcccggcctggctcgttgtgaagccggacacatccacccttggactcgattcaggcggctgctgcttttctc

SEQ ID NO: 593730 - DNA, 120 bp, Artificial Sequence
  ENSG00000173548_5 (sequence is synthesized)
cttgcccctcttggattttccggatttttgaaaacccagtggcccaggagcaagaggaggaaggaggaaggggcagatctgcagaggaatgtgagagcctcccaaagcgagagccgccaa

SEQ ID NO: 593731 - DNA, 120 bp, Artificial Sequence
  ENSG00000173548_6 (sequence is synthesized)
aagaatctgggagccagagggacagccgagccctgcccgggtttctggaatggtggtttcagagtgagtctcttctattttagaacgttgttccagtggaaagtgtcgaatttttcccct

SEQ ID NO: 593732 - DNA, 120 bp, Artificial Sequence
  ENSG00000173548_7 (sequence is synthesized)
cgcagggcagatttctccaggtcacttgacttttcttctgggagtaggagttaggagagattcccctctaaccccccagaggctgctaagggaggaggagactgtggacatgagccctcc

SEQ ID NO: 593733 - DNA, 120 bp, Artificial Sequence
  ENSG00000173548_8 (sequence is synthesized)
ctgctcacaagcatatgcccggagacctgatagggcagtttctgggccatggacattgctttgaagagggggagactggacagcatctgtgggtgctgagaccccaccttaggacctgag

SEQ ID NO: 593734 - DNA, 120 bp, Artificial Sequence
  ENSG00000173548_9 (sequence is synthesized)
agattgaactgtgtaagcgccattcagctgcgagtgcattcttggactgccttgtgagcatccccggtctgggcaggaccctctccttcccatctttctataccacccagcccagccatg

SEQ ID NO: 593735 - DNA, 120 bp, Artificial Sequence
  ENSG00000173548_10 (sequence is synthesized)
gcactgaaaggccgagccctctatgactttcacagtgagaacaaggaggaaatcagcatccagcaggatgaggacctggtcatctttagcgagacctcactggatggctggctgcagggc

SEQ ID NO: 593736 - DNA, 120 bp, Artificial Sequence
  ENSG00000173548_11 (sequence is synthesized)
cagaacagccgtggggagacagggctctttcctgcctcttatgtggagatcgtccgttctggcatcagcaccaaccatgctgactactccagcagccctgcaggctctcccggagcccag

SEQ ID NO: 593737 - DNA, 120 bp, Artificial Sequence
  ENSG00000173548_12 (sequence is synthesized)
gtgagcttgtacaacagccccagtgtggccagcccagctaggagtggtgggggcagtggcttcctctcaaaccagggtagctttgaggaggatgatgatgatgactgggatgactgggac

SEQ ID NO: 593738 - DNA, 120 bp, Artificial Sequence
  ENSG00000173548_13 (sequence is synthesized)
gacggatgcacagtggtggaggagccacgggctggtgggctgggcaccaacgggcaccctcccctcaacctctcctaccctggtgcctaccccagccagcacatggccttccggcccaag

SEQ ID NO: 593739 - DNA, 120 bp, Artificial Sequence
  ENSG00000173548_14 (sequence is synthesized)
ccaccactggagcggcaggacagcctggcatctgccaagcgaggcagtgtggtgggccgtaacctcaaccgtttctcatgctttgtgcgttctggagtggaggccttcatcctgggtgat

SEQ ID NO: 593740 - DNA, 120 bp, Artificial Sequence
  ENSG00000173548_15 (sequence is synthesized)
gtgcccatgatggccaagatcgctgagacatactccattgaaatgggccctcgtggcccccagtggaaggccaatccccacccatttgcctgctctgtggaggaccccacaaaacagacc

SEQ ID NO: 593741 - DNA, 120 bp, Artificial Sequence
  ENSG00000173548_16 (sequence is synthesized)
aaattcaagggcatcaaaagctacatctcctacaagctcacacccacccatgctgcctcacccgtctaccggcgctacaaacactttgactggctctataaccgcctgctacacaagttc

SEQ ID NO: 593742 - DNA, 120 bp, Artificial Sequence
  ENSG00000173548_17 (sequence is synthesized)
actgtcatctcggtgccccacctgcctgagaagcaggccactggccgcttcgaggaggacttcatcgaaaagcggaagcggagactcatcctctggatggaccacatgaccagccaccct

SEQ ID NO: 593743 - DNA, 120 bp, Artificial Sequence
  ENSG00000173548_18 (sequence is synthesized)
gtgctctcccagtacgaaggcttccagcatttcctcagctgcctggatgacaagcagtggaagatgggcaaacgccgggcggagaaggatgagatggtgggtgccagcttcctgctcacc

SEQ ID NO: 593744 - DNA, 120 bp, Artificial Sequence
  ENSG00000173548_19 (sequence is synthesized)
ttccagatccccaccgagcaccaggacttgcaggacgtggaagatcgcgtggacactttcaaggccttcagtaagaagatggacgacagcgtcctgcagctcagcactgtggcatcagag

SEQ ID NO: 593745 - DNA, 120 bp, Artificial Sequence
  ENSG00000173548_20 (sequence is synthesized)
ctggtgcgtaaacatgtggggggcttccgcaaggaattccagaagctgggcagtgccttccaggccatcagtcattccttccagatggacccccccttttgctctgaggccctcaacagt

SEQ ID NO: 593746 - DNA, 120 bp, Artificial Sequence
  ENSG00000173548_21 (sequence is synthesized)
gccatttctcacacgggccgtacctatgaagccatcggggagatgtttgctgagcagcccaagaatgacctcttccagatgctggacacactgtctctctaccagggcctgctctccaac

SEQ ID NO: 593747 - DNA, 120 bp, Artificial Sequence
  ENSG00000173548_22 (sequence is synthesized)
ttccctgacatcatccatctacaaaaaggcgccttcgccaaggtgaaggagagccaacgcatgagtgacgagggccgcatggtgcaggacgaggcagacggcattcgcaggcgctgccgc

SEQ ID NO: 593748 - DNA, 120 bp, Artificial Sequence
  ENSG00000173548_23 (sequence is synthesized)
gtggtgggtttcgccctgcaggccgagatgaaccacttccaccagcgccgtgagctcgacttcaagcacatgatgcagaactacttgcgccagcagatcctcttctaccagcgggtgggc

SEQ ID NO: 593749 - DNA, 120 bp, Artificial Sequence
  ENSG00000173548_24 (sequence is synthesized)
cagcagctggagaagaccctgcgcatgtatgacaacctctgaccgcgtgtgcctgggccccctccttcccctgggcctggtcactgcagtgtaccccactttcccgacctccctatacca

SEQ ID NO: 593750 - DNA, 120 bp, Artificial Sequence
  ENSG00000173548_25 (sequence is synthesized)
gcagtgactgggggaggggtcagcggtgggggagataagcggcctgtcctgcctcctgggagaaggagctttcaaggagtcatgggtgcccctgggaaattccccactccttagaagtgg

SEQ ID NO: 593751 - DNA, 120 bp, Artificial Sequence
  ENSG00000173548_26 (sequence is synthesized)
ggcacagcaggggtgagaatagagtcaggagccctcgaggccaaggcctgggctgccggtcagtcagtgaaggtcaggccagggtctcagcctcccctagagcctattttgcttgctcac

SEQ ID NO: 593752 - DNA, 120 bp, Artificial Sequence
  ENSG00000173548_27 (sequence is synthesized)
ctggccactgctgccttatccattcagcagacaccgaggcctgctgcacccttgggtcggatgctgggcacccagggctgtgacatgcctgctcttcaggagtcctcagtgaaggtcggg

SEQ ID NO: 593753 - DNA, 120 bp, Artificial Sequence
  ENSG00000173548_28 (sequence is synthesized)
gtcagacacagacagagtcaatgcagtatgactgatgtttaagtgagggatttctggaagctcatagaagggaccacagcattccactggtcagggaagactccatagagtaggcaacat

SEQ ID NO: 593754 - DNA, 120 bp, Artificial Sequence
  ENSG00000173548_29 (sequence is synthesized)
ttgggcagtgttttgaagaatgacaagggcctgccagacagtacatgggggagaaggactttcaggggagaggaacagcatgggcaaagttatggaggcatgcaaacatctccctcttct

SEQ ID NO: 593755 - DNA, 120 bp, Artificial Sequence
  ENSG00000173548_30 (sequence is synthesized)
ctcccttactttccaagcaagttaggtacgctttccatggggattctggcctgtgtggtaggaagggatctcccttgctcccatgttgctggctgtccgtacatcaccctgtcccctgca

SEQ ID NO: 593756 - DNA, 120 bp, Artificial Sequence
  ENSG00000173548_31 (sequence is synthesized)
ggagggggctacaggccatctccctcctgtaggcctctgactcccctccacttttgggccctcagcttatctcgggcaggggaccattgcagcatcctcccctcctcggactcaaggtgc

SEQ ID NO: 593757 - DNA, 120 bp, Artificial Sequence
  ENSG00000173548_32 (sequence is synthesized)
tgaggtataagccctgggccccagatccctggtgacaccttcctggagaagactctcaaaagtgactgtatatttgagttcaccagcaataactccccacactcgaagcaggtccaaacc

SEQ ID NO: 593758 - DNA, 120 bp, Artificial Sequence
  ENSG00000173548_33 (sequence is synthesized)
gggcctgcttgcccagccatgcgagggattccatgcccacctgccctctgtctgcctcgctggaatgtgggcccctgctccccgtcaggttgtgctgtctctgacctatgtttacatccc

SEQ ID NO: 593759 - DNA, 120 bp, Artificial Sequence
  ENSG00000173548_34 (sequence is synthesized)
cgaggggtttctgcctcctccccacccaggtcagggtgtggtccagcagcttgctgtggggtgctgacatgtgtcaccactgccccccttgcccccgggggggtcatggtctcctcctgg

SEQ ID NO: 593760 - DNA, 120 bp, Artificial Sequence
  ENSG00000173548_35 (sequence is synthesized)
atgctgctccttgaatcttttttcttgataaaccttttacaattaagataacacaagcatgactttttctgtttggatcccagaaaggcggagggcaggagaaggatagagccctaattg

SEQ ID NO: 593761 - DNA, 120 bp, Artificial Sequence
  ENSG00000173548_36 (sequence is synthesized)
ctcctgagagccattggatgagattctgaggtcgtggtgggcacaaattttccacagaacctcaaaagttcaggggagggctatgctggtggaaggtgccagcaggcaggaggagctaga

SEQ ID NO: 593762 - DNA, 120 bp, Artificial Sequence
  ENSG00000173548_37 (sequence is synthesized)
ggcggctgtggacccctgggtggatccatccctccctagaacgcactcttgtctctaaaacaggtggagtgctgcccaggggactggctgtactgccttgtgatctggggctgagggttg

SEQ ID NO: 593763 - DNA, 120 bp, Artificial Sequence
  ENSG00000173548_38 (sequence is synthesized)
tatgaggaagggacaggacgctgtgccctaggacaattaatagatggtggctcctctccccaaggagccatgccctggccttgcccttgaaaagccctagtccaggggagggaagtgggg

SEQ ID NO: 593764 - DNA, 120 bp, Artificial Sequence
  ENSG00000173548_39 (sequence is synthesized)
gactcagaagctgtgtctcttccccaaaccgtcctgggtacccagccctgcggaggctcccacattggaaactgaagaggacgctggctgttgggggtgccctgatcaggatgagcggac

SEQ ID NO: 593765 - DNA, 120 bp, Artificial Sequence
  ENSG00000173548_40 (sequence is synthesized)
cttgctcttggatctgttcatccacagatgagaggagggtactggttgagacttggctctcctttggaggcaatggggacttggtggagggagggcttccagggtcaaggccgtcaggga

SEQ ID NO: 593766 - DNA, 120 bp, Artificial Sequence
  ENSG00000173548_41 (sequence is synthesized)
aggttggctagaccagggaccagggagcttgtgcaggaagatggagaagggccagcaggtgcggtgggggaaggggcgggcaggactccctgttcagggcatagcgtcctcagaggaact

SEQ ID NO: 593767 - DNA, 120 bp, Artificial Sequence
  ENSG00000173548_42 (sequence is synthesized)
tctggaatgggtccccctggcccttggtcaacattaggtcagatttgggactttctgaggaattttcccctctctccaccctgccccattttctaacccatccgaggaacttcccgccct

SEQ ID NO: 593768 - DNA, 120 bp, Artificial Sequence
  ENSG00000173548_43 (sequence is synthesized)
taacctcttctcagctctgccatccatgtagccatctgcagaaggggctctgagcagtgggggctgggccaggccgaggcagggctggtgggaatgctcctcctaacccatggtgcctgg

SEQ ID NO: 593769 - DNA, 120 bp, Artificial Sequence
  ENSG00000173548_44 (sequence is synthesized)
aaagtcccctgctcatgcttcctgctctgggaacagtgttgtcctctgtgtgccttccttgagaggggaccacctcccaggccttccatcctcagggtgaggccatcagtctgatacttt

SEQ ID NO: 593770 - DNA, 120 bp, Artificial Sequence
  ENSG00000173548_45 (sequence is synthesized)
tctcaggagggacttggatccaggagaagcatcaggaagtggagtcttgggataatgccaggcctgctcctggtatcctgaggtctctgggctggggcaggtgtgtgtgtggcagggagg

SEQ ID NO: 593771 - DNA, 120 bp, Artificial Sequence
  ENSG00000173548_46 (sequence is synthesized)
gaggctgtcctggccctcctctctcttttctttctgcctctatgggggtgggggtattgggggaacttggggccgttctggggtagctaagcccctttcagcaggagattgggggaccag

SEQ ID NO: 593772 - DNA, 120 bp, Artificial Sequence
  ENSG00000173548_47 (sequence is synthesized)
tgttgggggcatcctggtgatggccgattcctgcctcgtcacatgccaggcagatgttcccgactcggctggacccagctgcctcgtttcctcccttactttgctctgagggggtggaaa

SEQ ID NO: 593773 - DNA, 120 bp, Artificial Sequence
  ENSG00000173548_48 (sequence is synthesized)
acaaggcttctctttctgccctggacagctaccagcacccggggtaggggatcccctggtcaccagtcttggcccagtacaggaaaaggaatccgctttgtggccacagatgggggctgg

SEQ ID NO: 593774 - DNA, 120 bp, Artificial Sequence
  ENSG00000173548_49 (sequence is synthesized)
ggatggaagcagacctcagatcctgcatctcttcacccgctggacacaggagggctatgaaccactgtgccgtggctgcaccactggctggagcagagccaggcctgggagaggcaggtg

SEQ ID NO: 593775 - DNA, 120 bp, Artificial Sequence
  ENSG00000173548_50 (sequence is synthesized)
gccccatcggcccctgctctgcaccacccctcccagatgacagagccatatgtcttccacgtgtctacacactcacagactcacgaatgtaatcgctcagtctcacaacaagcacacgca

SEQ ID NO: 593776 - DNA, 120 bp, Artificial Sequence
  ENSG00000173548_51 (sequence is synthesized)
gtcacacacctgcccacaggcacatacgccacataagcatgcctgtatgctcacacagtcatactgccacacgctattacacattcacagccacagccacacatgccttgccatccattc

SEQ ID NO: 593777 - DNA, 120 bp, Artificial Sequence
  ENSG00000173548_52 (sequence is synthesized)
aaagcaccagtggctactttgtcagacacagccacaccacagtcctatgcacatggtcatagcctcacacagtgacacatactcgggcacacaccgccacaaagccatgcttgcacagag

SEQ ID NO: 593778 - DNA, 120 bp, Artificial Sequence
  ENSG00000173548_53 (sequence is synthesized)
caaaggtgtcataagcatctctgtgcctggactgcacctgcatgacctcccagggtccccacctcatcagagattaaggagagctttgcttggagacaccacccctggagggggtgtctc

SEQ ID NO: 593779 - DNA, 120 bp, Artificial Sequence
  ENSG00000173548_54 (sequence is synthesized)
caagggggagtagagccagtcacaagcaccacatacaggcacacagcctgaggtctagggatgcaattgggatgactggataccaccaagttcagctccttattgaacagatgggcgcct

SEQ ID NO: 593780 - DNA, 120 bp, Artificial Sequence
  ENSG00000173548_55 (sequence is synthesized)
gaggcccagggagcagtggtggctggccttatcacccagcagggcaggggatactctggggccagagcctggctctgggcagactctgtttcctggccctgccctcccctgggccaatcc

SEQ ID NO: 593781 - DNA, 120 bp, Artificial Sequence
  ENSG00000173548_56 (sequence is synthesized)
tctgggccaggctgcctctgaaggcccctggctgaaccgatccagcagagctccaggcagctcccttctcaagctagagctgagctgcagtggccacgggagccggagccaggatgcggt

SEQ ID NO: 593782 - DNA, 120 bp, Artificial Sequence
  ENSG00000173548_57 (sequence is synthesized)
gggcagggcctaggcctgggcgggaggaacattcctgcaccatctcctccccaagcatgtgaggacccagcccgccctgcccgcctgcccgctgactcaggcctccaggagccaagcctg

SEQ ID NO: 593783 - DNA, 120 bp, Artificial Sequence
  ENSG00000173548_58 (sequence is synthesized)
ctcagctcccccacccaccctaacctgcttccccactagttcggctctggttcccctctccactggctggggcaggagaagacggtgagccctggtaggaagaccatggggaaaaatcaa

SEQ ID NO: 593784 - DNA, 120 bp, Artificial Sequence
  ENSG00000173548_59 (sequence is synthesized)
acctcaccaccccccgacatagctcagaagggctgattgtgaaacccagctctgttcaacatagttgaacacaaactttttttttcttttggtttggttttgttttgttggtcaaacccc

SEQ ID NO: 593785 - DNA, 120 bp, Artificial Sequence
  ENSG00000173548_60 (sequence is synthesized)
agtgcagtgcagtctgtttaagaagtagtgtcgcatagctgtggcctggatctgctcagcagccccagtaggcagcatttattccctttcgcaacaaagagactgagacttggccagagg

SEQ ID NO: 593786 - DNA, 120 bp, Artificial Sequence
  ENSG00000173548_61 (sequence is synthesized)
gaagatgggacctgcctaggttcacacagggaatctctggcggggctggactcaaacccagctccctgccatcactccttagagtcacactgatgaactcatttagggccaaaggaagaa

SEQ ID NO: 593787 - DNA, 120 bp, Artificial Sequence
  ENSG00000173548_62 (sequence is synthesized)
ggggaggcagatttcccctctagatgagtgaagggataggaggctggtgaacccaacggctgaaatgtgaagggtgagagggtagggtgagtccccccagccctgagggatgaagggtct

SEQ ID NO: 593788 - DNA, 120 bp, Artificial Sequence
  ENSG00000173548_63 (sequence is synthesized)
gaagatggcactgcacggtgacagctgcagtgactcaggagctccgtttacaaaggaacatgagtgaggaacataacttaatttttttttatatctgacctgaatttctgttttcctccc

SEQ ID NO: 593789 - DNA, 120 bp, Artificial Sequence
  ENSG00000173548_64 (sequence is synthesized)
ccattccccacatggtagaagtgtaatctcacatcaatttggggaccctttctttccccagggatgtgtagaacttttggggatggcacatttgaagaccttagggagctttgcatttta

SEQ ID NO: 593790 - DNA, 120 bp, Artificial Sequence
  ENSG00000173548_65 (sequence is synthesized)
aaggctgaatcccacactctatcatacatattaatatttacctgcattccacattaaagggttcagtttatgacttgtgtcctgtcttgtagatacttaattaaacggtattaattttga

SEQ ID NO: 593791 - DNA, 120 bp, Artificial Sequence
  ENSG00000173557_0 (sequence is synthesized)
aggctcgctgtactcgcgcacccaccatggcctcccgcagcgcgggcaccctactgaccgagttcaatgccgcctacgtgccccctggactcatgcccgggtaccagggccacgtcccca

SEQ ID NO: 593792 - DNA, 120 bp, Artificial Sequence
  ENSG00000173557_1 (sequence is synthesized)
ctgtggccttctcctttggcgctccctacggcaccaccaccctcaagtacttccaggaccaccgcaacagagccatggagaagagccacactcccttcagccaaggcggccatttcccca

SEQ ID NO: 593793 - DNA, 120 bp, Artificial Sequence
  ENSG00000173557_2 (sequence is synthesized)
tacgaatttctaccagatggtccagcagcatcggaagtactatcaagacaagacgggcacagtgcctcgagtcccctactttgcgatgcccgtgagggagccggaacggtaccccctccc

SEQ ID NO: 593794 - DNA, 120 bp, Artificial Sequence
  ENSG00000173557_3 (sequence is synthesized)
caccgtcctgcctcctctgtgcccaaagaagaagtggcaccttttaagactagcccccgagaacctgaagacctaccagaccttcccatcagggaagagggtctctccacaggagcggaa

SEQ ID NO: 593795 - DNA, 120 bp, Artificial Sequence
  ENSG00000173557_4 (sequence is synthesized)
aaagagagactgctactttgagttcagagcatgagacttttagttcagagcagagcctgatgcctgagatcctgggtcgtgaccagcctggcttgcttggaataaaatctttagccatga

SEQ ID NO: 593796 - DNA, 120 bp, Artificial Sequence
  ENSG00000173557_5 (sequence is synthesized)
ttcatctacgcagtcaagaaacgcacccatggggcacctgctctcggccaggcatgcacagcacacagactgagaaatgagttgaggatcttgccctaaaacgtgcagtgcagagagtga

SEQ ID NO: 593797 - DNA, 120 bp, Artificial Sequence
  ENSG00000173557_6 (sequence is synthesized)
tggttacagagcaagggggtcagggcattggcagcctcaggggggatggtggtagcctgaatgggcgaatcaggaagagtgctttcccggccagatgcactgggagtttgggagaagctc

SEQ ID NO: 593798 - DNA, 120 bp, Artificial Sequence
  ENSG00000173557_7 (sequence is synthesized)
cgtaagcttagtgggcctgaatctgcggactgatgccccgcctgcaaaggcagcctggcagctacactagtcctaacgtgggcgccgatgcagagcgcagtaaggagctgctgccctctg

SEQ ID NO: 593799 - DNA, 120 bp, Artificial Sequence
  ENSG00000173557_8 (sequence is synthesized)
gtggatacagagggcactacaccgagcaggaatctcccccggtcccgttcacatttggaaaatgttctcctaaggactttctgtccatctaactaaataggaaagttccttgcctcctgc

SEQ ID NO: 593800 - DNA, 120 bp, Artificial Sequence
  ENSG00000173557_9 (sequence is synthesized)
ccctctctgcttttatctaggagagctcctttctccagggaaggcccactctgccctgaaagatgacttgggtactgtggtttctgtgctctctccttcctgaagcgcaggcagggggat

SEQ ID NO: 593801 - DNA, 120 bp, Artificial Sequence
  ENSG00000173557_10 (sequence is synthesized)
tttagctccatgccaaccactcccggcttgcctcagagtcctaagattcaccatcatccttactgataaaacagcatctgttttcataagtttaatggtttttaaagaaacaggcttcac

SEQ ID NO: 593802 - DNA, 120 bp, Artificial Sequence
  ENSG00000173557_11 (sequence is synthesized)
tgcatctaaaagttcctttttgcaagtcagacaggatcattttacaaaaaagggaacgtgaggctcattgatcgcctggggaacttgtgctgcgtggcctggatggttggaggcagagct

SEQ ID NO: 593803 - DNA, 120 bp, Artificial Sequence
  ENSG00000173557_12 (sequence is synthesized)
tggaaaggaagcagcatctcccatcaccacctctaggactcgggggctctctctaatcttggaatggctctgagccagtccatccctagagtatagtgggactctcctggggacaggtat

SEQ ID NO: 593804 - DNA, 120 bp, Artificial Sequence
  ENSG00000173557_13 (sequence is synthesized)
cctcttgagatggctctggccaggatctgccccccatccccatcactgtggggagagcgggacatctcaactctgttccttcttcaggttgcctggccacttgcactgctgctgacagtt

SEQ ID NO: 593805 - DNA, 120 bp, Artificial Sequence
  ENSG00000173557_14 (sequence is synthesized)
tcacaacgaacgcaaagggccaaccaggtggttgggagaagagggtcagtgacaggcctggggcaagcccctccctcccggaatcccctccatcagcaccatcaccatttcttagaacat

SEQ ID NO: 593806 - DNA, 120 bp, Artificial Sequence
  ENSG00000173557_15 (sequence is synthesized)
ttgttgtgtgtttactccttgtccagagcttcacatgcattactgcatttattcctcaagtcaaagctaagagggggataccaccactgggccattcttaaatatgcacacttctagcag

SEQ ID NO: 593807 - DNA, 120 bp, Artificial Sequence
  ENSG00000173557_16 (sequence is synthesized)
gagttaggaccagagtccgtcccaggtctgtctgacatctgtgtcctcactcttaaccactgtgccattatgtaaatacaggttattcccaccccaagtccagggggacttatcaggtgt

SEQ ID NO: 593808 - DNA, 120 bp, Artificial Sequence
  ENSG00000173557_17 (sequence is synthesized)
taaactgacgagtagccggcaggtcagcttgagctggaaagtgggcacgtggggctgtgggtgggcacgcaccaccttccttccctggcacactgcataacaccagtcccatcctcaccc

SEQ ID NO: 593809 - DNA, 120 bp, Artificial Sequence
  ENSG00000173557_18 (sequence is synthesized)
ccaggctcgctgtactcgcgcacccaccatggcctcccgcagcgcgggcaccctactgaccgagttcaatgccgcctacgtgccccctggactcatgcccggatgccatgggttgactct

SEQ ID NO: 593810 - DNA, 120 bp, Artificial Sequence
  ENSG00000173559_0 (sequence is synthesized)
agtcgctgtttgggacgctgggtgtgcggtgttctgtctccgctcccgtttcgctgtcacagcccgttccttcccggagcccgggacaggctgggcgcgcgcccgtgtgagtgagcggga

SEQ ID NO: 593811 - DNA, 120 bp, Artificial Sequence
  ENSG00000173559_1 (sequence is synthesized)
ctcagggcagaagtgtcccctcactgcgtttttttttccttttatccaaagaacggggcagttagtacgcttgccttcctgtcgcccggttgggagcggggttggtgtgcggagtggttc

SEQ ID NO: 593812 - DNA, 120 bp, Artificial Sequence
  ENSG00000173559_2 (sequence is synthesized)
ttttttttttttttttctttttttaggctcagtgctgtccgggctggtttgcccggtccctgactaacggctttctgccccttctctcgccacccctgcccaaggtcgcccctctgcctt

SEQ ID NO: 593813 - DNA, 120 bp, Artificial Sequence
  ENSG00000173559_3 (sequence is synthesized)
tctcgccacccctgcccaaggtcgcccctctgccttcgcccctgtcccgggagggtgggaagctttgaccccgccctgcccactcgcgtctccgcagccgtagccgcgcctgtcccaata

SEQ ID NO: 593814 - DNA, 120 bp, Artificial Sequence
  ENSG00000173559_4 (sequence is synthesized)
tgaatagggtcaacgacccacttatttttataagagatattaagcccggactgaaaaacttaaatgtcgtctttattgtcctggagataggacgcgtgaccaaaaccaaagacggccatg

SEQ ID NO: 593815 - DNA, 120 bp, Artificial Sequence
  ENSG00000173559_5 (sequence is synthesized)
aagtgagatcgtgcaaagtagcagataaaacgggcagcatcactatttccgtgtgggatgagatcggaggtcttatacagccaggggatattattcggttgaccagagggtatgcatcca

SEQ ID NO: 593816 - DNA, 120 bp, Artificial Sequence
  ENSG00000173559_6 (sequence is synthesized)
tgtggaaaggatgtctgacactttatactggaaggggtggtgaacttcaaaaaattggggaattttgtatggtttattcagaagtgccaaatttcagtgaacccaacccagattatcgag

SEQ ID NO: 593817 - DNA, 120 bp, Artificial Sequence
  ENSG00000173559_7 (sequence is synthesized)
gacagcagaacaaaggggcacagagtgaacagaagaataattccatgaatagtaatatgggtacaggtacatttggaccagtgggaaatggtgttcacactggccctgaatcaagggaac

SEQ ID NO: 593818 - DNA, 120 bp, Artificial Sequence
  ENSG00000173559_8 (sequence is synthesized)
accagttttcacatgctggcagaagcaatggccggggacttataaatccacaactacaaggaacagctagtaatcaaacagtgatgaccacaataagtaatggcagggaccctcggagag

SEQ ID NO: 593819 - DNA, 120 bp, Artificial Sequence
  ENSG00000173559_9 (sequence is synthesized)
cctttaaaagatgacctatgctaaatactcatgtgtagtttttatactacatgccctacttgaacacttattgcacttttatttattgttaactgtgaaaagtacgtcctttattgggtt

SEQ ID NO: 593820 - DNA, 120 bp, Artificial Sequence
  ENSG00000173559_10 (sequence is synthesized)
tccttttatattcttggtttgttaagaagaatggtttgtttttatagcaaaactgttaagctgctcgagtctcctgttgaagaatgggaacactgaaaagtaggggcatttatttttaga

SEQ ID NO: 593821 - DNA, 120 bp, Artificial Sequence
  ENSG00000173559_11 (sequence is synthesized)
gtaaaaagattattggatagcctttaaaaaacctgcacccatttcatgggtgagttacttaagacatcagctttatagcctctatgagtctatcttctgtataagttttgtaatatttaa

SEQ ID NO: 593822 - DNA, 120 bp, Artificial Sequence
  ENSG00000173559_12 (sequence is synthesized)
cataaggcttaatgggagatgttcttttgtcttgtattcagatattgccaactaaagcaataaccatcaaaaaacacaagaacttgtcaatgctagcagtaatttttgagtgtttgtggc

SEQ ID NO: 593823 - DNA, 120 bp, Artificial Sequence
  ENSG00000173559_13 (sequence is synthesized)
tctcggaatgattgacttcgttcagtgactactattaagattttccaaggactgactcatcccaaatttttgttgtattaccaaaaaaacagattccttatcagaatttggaatagaatg

SEQ ID NO: 593824 - DNA, 120 bp, Artificial Sequence
  ENSG00000173559_14 (sequence is synthesized)
tgatctctattgcaacaagtaattttaaaagaaagctacatttattttagagtagtgctcctaacatgtattatcaactttgtggattacattggaggaaaatttaaaactggggccttg

SEQ ID NO: 593825 - DNA, 120 bp, Artificial Sequence
  ENSG00000173559_15 (sequence is synthesized)
aatatttattttttgaaactaccatgttaaatactgaagtataatttgggggagttataaagttatgataaacattcatctgattattttaaacaatagttgtggtagataaacatactg

SEQ ID NO: 593826 - DNA, 120 bp, Artificial Sequence
  ENSG00000173559_16 (sequence is synthesized)
gaggtgagtcaaattgaattcatatagtaacatgcagtctgaagtcctagttacttaataggtactcagcctggagtgaaaatcctgggtactgactttgagaggagtgagtgtgcatgt

SEQ ID NO: 593827 - DNA, 120 bp, Artificial Sequence
  ENSG00000173559_17 (sequence is synthesized)
tgtcaaagtttctgaacacagttcacatagccttattagcaaaagttttaagaaatggctctatcaaagaagcaattgcagctttattcagaaatataaaagtggaatttatgtacatgt

SEQ ID NO: 593828 - DNA, 120 bp, Artificial Sequence
  ENSG00000173559_18 (sequence is synthesized)
cataagtggtacccacttcccctttttactgtagggtggataactcttaggatttaactctttgaatattatctcttgaataaagcatgtgttaatgttaacaaacctacgtaatttttg

SEQ ID NO: 593829 - DNA, 120 bp, Artificial Sequence
  ENSG00000173559_19 (sequence is synthesized)
ccctttcaatgacttacagtggagagccagtacatcttaactactgttgtagtgatggtatcaacctcatggttacttagctctgcatttgttgctttgttttttttccacttcaaatca

SEQ ID NO: 593830 - DNA, 120 bp, Artificial Sequence
  ENSG00000173559_20 (sequence is synthesized)
caaaataagtagattttgttttctgaaaactccatagcatttgaatacaaaaagttgtgccagattgtttgccctaattcactgtgtttaacaaatatttcagtacacactatgtattag

SEQ ID NO: 593831 - DNA, 120 bp, Artificial Sequence
  ENSG00000173559_21 (sequence is synthesized)
gcactgtgtggaaagtgttaaggggtagacaaaataccgaataatctccacaagtttatttgtggtctatagtacttttgtaactggggttacaaaaattatagaaatttttttcctttg

SEQ ID NO: 593832 - DNA, 120 bp, Artificial Sequence
  ENSG00000173559_22 (sequence is synthesized)
ttcatatgcatattcatgattataatttggctttgtttgtgattaatgttttcttaagattttcacattatagaatacctcaaaagaagttgtctaaggactgggatagagagtatgttt

SEQ ID NO: 593833 - DNA, 120 bp, Artificial Sequence
  ENSG00000173559_23 (sequence is synthesized)
cataaaattgtagatgtttagaatttttaaaaaccctacaaattagtatatgattgttttatataagtaagataggagcaacactttaaattatttgtgggagaatacagcattaaaggt

SEQ ID NO: 593834 - DNA, 120 bp, Artificial Sequence
  ENSG00000173559_24 (sequence is synthesized)
gattttaaaagaaaaaaatttggaattttagaaaatttaaatgctgtcaggtatggaatgctgggcttccaatcctggcctcattgtctcctcacctgtgatgttggatgagttattaca

SEQ ID NO: 593835 - DNA, 120 bp, Artificial Sequence
  ENSG00000173559_25 (sequence is synthesized)
cttgaaatgtctttaagccttaggttccacaagtatgaaaacaagtaagtaacagtatcctttctagacttgtttaagatttccatgtaagtaattataatgacttctgacacataataa

SEQ ID NO: 593836 - DNA, 120 bp, Artificial Sequence
  ENSG00000173559_26 (sequence is synthesized)
tgtcgtcttataccccaacagtaggaaaaaaatgcagaattcagtatgaaagtattgttaccctttaacacagtggtccccaacctttttggcaccagagaccagtctcctggaagacag

SEQ ID NO: 593837 - DNA, 120 bp, Artificial Sequence
  ENSG00000173559_27 (sequence is synthesized)
tttttccgtgggatcgggggatggttttgggatgaaactgttccacctcaggtcatcagtcattagttagattctcataaggagcgtgcaacctcaatcccttgcatactcatttcacaa

SEQ ID NO: 593838 - DNA, 120 bp, Artificial Sequence
  ENSG00000173559_28 (sequence is synthesized)
tctgacaggaggtggagctcaggcagtaagtctccctcgcccgccactcacctgctgggcgttcctgttcctagcaggccagaattgatactgatctaggggttggggacccctgcttaa

SEQ ID NO: 593839 - DNA, 120 bp, Artificial Sequence
  ENSG00000173559_29 (sequence is synthesized)
agaattgatactgatctaggggttggggacccctgcttaacatgttgagattaaatggagaaagacttaagcttttacttttgtgattgacacttgcttcaataatgtaaccttgttctg

SEQ ID NO: 593840 - DNA, 120 bp, Artificial Sequence
  ENSG00000173559_30 (sequence is synthesized)
tgtttttatcatttattaacaaatttcttttttcttaagggaagcctccaaaatcaaagaaaagtgagttacaatccataatgaatatttgccttaccagcctactggaacacattcatc

SEQ ID NO: 593841 - DNA, 120 bp, Artificial Sequence
  ENSG00000173559_31 (sequence is synthesized)
aagaacttaagaggaagaaagttttctgccttcctccttcctagtgctctcagctatcaactttgaaataagtttaaacaacacctactgaaaacaaaaaccacttagtataaaaatatc

SEQ ID NO: 593842 - DNA, 120 bp, Artificial Sequence
  ENSG00000173559_32 (sequence is synthesized)
ccccaccagaattgggtcccccatatcatttctacaaaacagttctggagtggatcaaagtctcatcagatcagcttgccccttcttgtttgggcaggttctaggagaagctgctgtaat

SEQ ID NO: 593843 - DNA, 120 bp, Artificial Sequence
  ENSG00000173559_33 (sequence is synthesized)
acaaaaactgaaagatgaaatcgtaaagctagataatgataatgatatttagtggggaaggctacagtatgttttcccataggcatttaaacactcactttttccaacgctttatacttt

SEQ ID NO: 593844 - DNA, 120 bp, Artificial Sequence
  ENSG00000173559_34 (sequence is synthesized)
gtccctatagcctttgtaattttaactttgatgacagtttaacttaggataacctgaatatgggtattactgttagtcatttgtatttttatcatttaacattttaaatgaatgtttaat

SEQ ID NO: 593845 - DNA, 120 bp, Artificial Sequence
  ENSG00000173559_35 (sequence is synthesized)
ttgctgggttgagtaatgccaagggaatgatgctaaaaacaaatagatgtgaggttagtaaaagattaaagttacaatttatgatacgagaacttcttaactataggaaagtaggtaaat

SEQ ID NO: 593846 - DNA, 120 bp, Artificial Sequence
  ENSG00000173559_36 (sequence is synthesized)
gaccctaaaaggttttctcagaaggtaaaagttttacatcagtctgaagacatataactctaacatttcagtttagttactgaaatgactttttctggtgtcattgagatactggctgtt

SEQ ID NO: 593847 - DNA, 120 bp, Artificial Sequence
  ENSG00000173559_37 (sequence is synthesized)
tgttccaagccattttaggctgagaatgactcttaaggtcttctaatgcatttcagagggttctagaaacaacaaactgaacatgatatgaaactaacaacatagaatgccccccaaaca

SEQ ID NO: 593848 - DNA, 120 bp, Artificial Sequence
  ENSG00000173559_38 (sequence is synthesized)
aattcctctaacctcactgagtttacttgccctattactattttttttttttaagatcttctgtctcttgtttttgttttatcccttacctgatgaaagtgaacatttctagtggagaaa

SEQ ID NO: 593849 - DNA, 120 bp, Artificial Sequence
  ENSG00000173559_39 (sequence is synthesized)
gaagatcacagttctctaatatgggcattaagagaggggtacagctagaggggaggtgaaaacctgcctccactggggtgaaaaacagtgtgctgaggtttcagccagtgattacactgg

SEQ ID NO: 593850 - DNA, 120 bp, Artificial Sequence
  ENSG00000173559_40 (sequence is synthesized)
gtaatcaaccagtcccatgtttcacaaaggagttgtaatgattaacagttcaggtatgcttctgaggaaatctaattgagacctttggaaaatagcattgttatgaatggtgtggtgtta

SEQ ID NO: 593851 - DNA, 120 bp, Artificial Sequence
  ENSG00000173559_41 (sequence is synthesized)
cgccctgagggaaaagctagaaaaacattttacttttcaagtgtatttaaattacatccaaatgtttcagtgtgctttactggagactgcctgagtttggaattcaaatattgtaaccaa

SEQ ID NO: 593852 - DNA, 120 bp, Artificial Sequence
  ENSG00000173559_42 (sequence is synthesized)
attactccaggtttctgaactaaaatgatctattgatgtttctcaaagtatagatcacagagtaagaaaagaggaaatcaagtctggtttatgacaaacttttttccatgttaacattgg

SEQ ID NO: 593853 - DNA, 120 bp, Artificial Sequence
  ENSG00000173559_43 (sequence is synthesized)
acccaaagatgttactaagagctttttactactgtgagagaaccagcgtgatgtgaagacaacgaacattttaagaagtttgactagtagacatttcgtttaagtcttttggagggtctt

SEQ ID NO: 593854 - DNA, 120 bp, Artificial Sequence
  ENSG00000173559_44 (sequence is synthesized)
ggttgacaacccacaattttattgtggctccccaggctttgagaacgtgtgggcttggatgatcattgttgacctataaaagagcacaggtctcttgagagtttattgacacactactga

SEQ ID NO: 593855 - DNA, 120 bp, Artificial Sequence
  ENSG00000173559_45 (sequence is synthesized)
tcagacccccacaatatgtctcaacctctgttgaagggctagtgatgtttaaaaaaacctgttatttccaatcagaaattgaagttatgtctcttactccatcaaaatttatgcttttca

SEQ ID NO: 593856 - DNA, 120 bp, Artificial Sequence
  ENSG00000173559_46 (sequence is synthesized)
gcattgggtaagtctagtttcttggtttgtatattaaatgcatattgagtaaaattcttagtgatttagaaaccatctacatgaggcttcccaggaacttgttaaaagtacaggttgcac

SEQ ID NO: 593857 - DNA, 120 bp, Artificial Sequence
  ENSG00000173559_47 (sequence is synthesized)
ctctgcattactagaataacatcagtgtacatttgggagatctgcatttgaaaccctgaggttgtctgcctcctgcccttgagatcttcccttgtattgaaattatatatatatatatat

SEQ ID NO: 593858 - DNA, 120 bp, Artificial Sequence
  ENSG00000173559_48 (sequence is synthesized)
atatattttttttttttcccctcagtttcttttacctttgtgaggctaatatatgctgacgtgttggattgtaaaacaaaaaattgtgcttaaaagaatgtccctccagagggcagaatt

SEQ ID NO: 593859 - DNA, 120 bp, Artificial Sequence
  ENSG00000173559_49 (sequence is synthesized)
caattcgaggatcagatattaattgggaggtcacatgactttccttgagcctatctagataaaagtaaaatgctttttttcctacgtttttgaaaatttagagtttattgttgctcatct

SEQ ID NO: 593860 - DNA, 120 bp, Artificial Sequence
  ENSG00000173559_50 (sequence is synthesized)
cagcaaattaatgttaccagcatcttctgccttcctcctgtccctcaattccctactttactaaaagaaggctggccaaattgaaaagtagttgagttggagacttgataaatacttttg

SEQ ID NO: 593861 - DNA, 120 bp, Artificial Sequence
  ENSG00000173559_51 (sequence is synthesized)
aaaatacttagagaaaccacccttcatcttccacgtaaagatctcagttctgtacagagaggcaactacaatgagtattttctgcaagtaacatggaaatcatgatttgattgccatgtg

SEQ ID NO: 593862 - DNA, 120 bp, Artificial Sequence
  ENSG00000173559_52 (sequence is synthesized)
tttctaatgttcagtattaaatgtttatagccctcgtaggaaacaaacttctgacctaagttgctggactacttgaatagaaaggtagtcagcacaactagtgccatctactgggtcatt

SEQ ID NO: 593863 - DNA, 120 bp, Artificial Sequence
  ENSG00000173559_53 (sequence is synthesized)
gctgcatagtttctgtctgtttagaaatctggcttagtttaacacgtgggggaaatggttctgttccaatgaatagcgatttttgcctgatagtggtgttaagtatgatatggaaaatcc

SEQ ID NO: 593864 - DNA, 120 bp, Artificial Sequence
  ENSG00000173559_54 (sequence is synthesized)
ttaaggggcagttgggccatttgtttagtttatgaacaatcaacactgacattaaatttcagttaagtagatgaaaccctgaactgcccctaaagctatagaaaatatgggaaaggttgc

SEQ ID NO: 593865 - DNA, 120 bp, Artificial Sequence
  ENSG00000173559_55 (sequence is synthesized)
caagttttgtattctcatcacatttgtcaatattgttggtgagaagtgtaaactgttaaaaatgccttttggtgagtggtggtttggtaaaaacaattgaagtagaacacgacactgccc

SEQ ID NO: 593866 - DNA, 120 bp, Artificial Sequence
  ENSG00000173559_56 (sequence is synthesized)
ttagaaatttcattcctttacccaatggtatttggtaaaatcctggccaaatgactgctgctgttgtaattatgtgagctttgcagaacataacctattttaaatgccagaatgtgcttc

SEQ ID NO: 593867 - DNA, 120 bp, Artificial Sequence
  ENSG00000173559_57 (sequence is synthesized)
catgaagaagaacatggttttgggctgaggagatcttggtttgagtcctggatctatttactggctccaggaccatgaacctcgttataaaatgatagtggggctatgtactcatagtgt

SEQ ID NO: 593868 - DNA, 120 bp, Artificial Sequence
  ENSG00000173559_58 (sequence is synthesized)
taggaggactatgtgagctaatgtatgcaaaacatctgctccatatctaagggtcaacaaatgttaagccctttctccatcagcattggaaataagttaaaatactgttcatttctccat

SEQ ID NO: 593869 - DNA, 120 bp, Artificial Sequence
  ENSG00000173559_59 (sequence is synthesized)
gccattattagaaaacaatcttctataatttaaaatctgaaatattaagcaatttatgtgaattattacaattatgttcttttttaaacagtcaaaccaagtttttcctgtcttgtctgg

SEQ ID NO: 593870 - DNA, 120 bp, Artificial Sequence
  ENSG00000173559_60 (sequence is synthesized)
gcacagacaagcacttatgctgacggtttaccgtgacagcatgtagggttgggtcttcattacaaagatctgcccactagctgagtacactggtgtttttccattcacctctgcccagca

SEQ ID NO: 593871 - DNA, 120 bp, Artificial Sequence
  ENSG00000173559_61 (sequence is synthesized)
ggacaagatgatgaaagtacagagaacttgtgggtccaggtttgtgtcagaaaggaggttagtggcttgcttagggccaggcagagggcacattggaaggaattctctgttcccggtgac

SEQ ID NO: 593872 - DNA, 120 bp, Artificial Sequence
  ENSG00000173559_62 (sequence is synthesized)
agcccttggaattgctgtgcacccagagttgcggagtaatttattggcttctgataactatagtattggataacttcccaacattttattaaaaattttaaacatataggcatgttgaaa

SEQ ID NO: 593873 - DNA, 120 bp, Artificial Sequence
  ENSG00000173559_63 (sequence is synthesized)
gaatttatactcaccacctagattttgccactatcacatatctgtgcatcctattaatacatttttaattattatttttttgagacagagtttcttttactcaggctggattgcaatggt

SEQ ID NO: 593874 - DNA, 89 bp, Artificial Sequence
  ENSG00000173559_64 (sequence is synthesized)
tctcagctcactgcaacctctgcctccaagattgaggcgattctcccacctcaggctcctgaatagctgggactacagaggggaggtaa

SEQ ID NO: 593875 - DNA, 120 bp, Artificial Sequence
  ENSG00000173559_65 (sequence is synthesized)
agccattaatgcatttttaatatatttttagtcaattgcagacatcgtacaattttccctaaacgttgcaacatgcctattcattacagttcagtatttttcaggattttttttttttgt

SEQ ID NO: 593876 - DNA, 120 bp, Artificial Sequence
  ENSG00000173559_66 (sequence is synthesized)
aaaatttacaaagaaatgtggaaatcttagttgtgcattagttgagttttaacaaatacctaggctttatcgcaacctctatcaagatacagaacattgctgtcattctagaagcctctg

SEQ ID NO: 593877 - DNA, 120 bp, Artificial Sequence
  ENSG00000173559_67 (sequence is synthesized)
taatgtgccttccccagtcaatctctttttccatggccccagcagccatcattctttcaatactttaaaaaacattcttatctgaagggaaatttcatatgtgccaaagtcatctctaga

SEQ ID NO: 593878 - DNA, 120 bp, Artificial Sequence
  ENSG00000173559_68 (sequence is synthesized)
tttctccaagtcttaaccatgccagagtacagccaaacctagcccttcatgcatctcaaataaagttctaagatcttggtattttattcttccctgtttcaacttagctccaactctttt

SEQ ID NO: 593879 - DNA, 120 bp, Artificial Sequence
  ENSG00000173559_69 (sequence is synthesized)
tttcttttttccatcaagatttaaacctgtcatccttgacatttggggcagaaactgctgaaatgaaggaggacttgccatcaaagaactggctgaaaggagttagcacaccactcctct

SEQ ID NO: 593880 - DNA, 120 bp, Artificial Sequence
  ENSG00000173559_70 (sequence is synthesized)
gccctgaacagttctaagcaagaggaggagcctgtggcagggcgtgatatgaagtcctcagagatagagtgccaagagtagagggagtatcctggaacttcagtgtttgcaggtcagttg

SEQ ID NO: 593881 - DNA, 120 bp, Artificial Sequence
  ENSG00000173559_71 (sequence is synthesized)
ctcagttcttcagaagatattgattcttaggctctaattttcttaaggtatgagctgaactgaagtgctctctcctccttaggattttgtactccaaggttggcattcagaatccgcata

SEQ ID NO: 593882 - DNA, 120 bp, Artificial Sequence
  ENSG00000173559_72 (sequence is synthesized)
gccagagagtgtaagttacttgtcaagtaaagacaccccgccccccgctacaaccccccaccctgagtctacagggaaatattcctgagtgaaacagactaaaaaaatatagtcatgtgt

SEQ ID NO: 593883 - DNA, 120 bp, Artificial Sequence
  ENSG00000173559_73 (sequence is synthesized)
tctttcccagtccatgtgcacgtgcacgtatatacacgaacacatgacacattatcactgccatcagaggtgtttctgcattgaactccacatatctgagtcacatgcatatcaggtctt

SEQ ID NO: 593884 - DNA, 120 bp, Artificial Sequence
  ENSG00000173559_74 (sequence is synthesized)
tgcttttctttctcatcaattgtttaaggattctctccttccacttctttaatgggctgcctatactttgttgagcactaactatatgccaagtactatgctagtgagttacctatgaaa

SEQ ID NO: 593885 - DNA, 120 bp, Artificial Sequence
  ENSG00000173559_75 (sequence is synthesized)
gaccctgagagggaggttttgttatccccatgggaaggattgagtagtttgcatgagatcacacaactaggcggtgactgagtccaacacaccaaagcctatactattacagttgagcaa

SEQ ID NO: 593886 - DNA, 120 bp, Artificial Sequence
  ENSG00000173559_76 (sequence is synthesized)
tagtgaaacattgaggctgctgctgacagtggatggtgcttcatagaggatatagaattggagttagttttgaaagggagtgtatgcagaggggaagatggagaacaaaatatggaattt

SEQ ID NO: 593887 - DNA, 120 bp, Artificial Sequence
  ENSG00000173559_77 (sequence is synthesized)
gactaatttacatttttacctgagattagtcatactttaaatgtcaacttattacaaacccaattagtcaaatttaagtctacagaagtggtatcagatcaacagggaaattatggactc

SEQ ID NO: 593888 - DNA, 120 bp, Artificial Sequence
  ENSG00000173559_78 (sequence is synthesized)
ttgggtattgggataactggatactctccctaaccaccacacaaacagtaaaaaaccatgggtgaattctattaagaatggagaaaattttccaaaaatggctcaaagtccagaagcatt

SEQ ID NO: 593889 - DNA, 120 bp, Artificial Sequence
  ENSG00000173559_79 (sequence is synthesized)
aaaggaaagattgatcaatttgactacatttacatgttaaaaaataaaatgacaactgggaaaaacatttgtaacatcacaaagggctaatattcctaacataaaaagaacttgtataaa

SEQ ID NO: 593890 - DNA, 120 bp, Artificial Sequence
  ENSG00000173559_80 (sequence is synthesized)
tagagaagacaaaacacactatggaaaagtgggcaaaagatatggacagttcacagaaaaaaagttcaaatggcccttaagtatataaaaagatgctcaacttcactcataatgaaagat

SEQ ID NO: 593891 - DNA, 120 bp, Artificial Sequence
  ENSG00000173559_81 (sequence is synthesized)
ataaaaagatgctcaacttcactcataatgaaagatgtaaattaaaataccaccaagataacattcttcacttttagattggaaaaaatatgaaagtttggccgggcgcggtggctcacg

SEQ ID NO: 593892 - DNA, 120 bp, Artificial Sequence
  ENSG00000173559_82 (sequence is synthesized)
ggttgcagtgagccgagattgcacctctgcactccaacctgggcgacgagagtgtaactctgtctcaaaaaagaaaatattctcttggtaacactattggaataggaacattcactgatg

SEQ ID NO: 593893 - DNA, 120 bp, Artificial Sequence
  ENSG00000173559_83 (sequence is synthesized)
ttggaataggaacattcactgatggaggaaatgcaaaactgtataatctctgttataggggaatttggcaattttacatttaaatttgccttgtgacccagcaatcctgctatattattc

SEQ ID NO: 593894 - DNA, 120 bp, Artificial Sequence
  ENSG00000173559_84 (sequence is synthesized)
ctttcatattgctataaaaaaatctgaggctgggtaatttataaagaaaggaggtattttttttcatggttcttcaggctgtatacaagcagggctgttagcatctgctcagcttctgat

SEQ ID NO: 593895 - DNA, 120 bp, Artificial Sequence
  ENSG00000173559_85 (sequence is synthesized)
gaggcccaggaagcttttggtcttggtggaagagaagaggagccagcatattacatgacgagaggaagcaagagagataccaggctcttttaagcaaccagttctcatgtgaacgcattg

SEQ ID NO: 593896 - DNA, 120 bp, Artificial Sequence
  ENSG00000173559_86 (sequence is synthesized)
ctactgagaaagtgccaaaccattcacgagggatccactacctagacccaaacacctccccctaggccccgtctccaacagcggggatcatatttcaacatgagacttcgaggagacaaa

SEQ ID NO: 593897 - DNA, 120 bp, Artificial Sequence
  ENSG00000173559_87 (sequence is synthesized)
tatccaaaccatatcgcccacgtttaggaatgtctctccatggtagatgatttgcaaatagacggtggtatacccattccatggaagcagggaaatatgtttgcacgtctttggttagtc

SEQ ID NO: 593898 - DNA, 120 bp, Artificial Sequence
  ENSG00000173559_88 (sequence is synthesized)
ctcttcttttctactgacagtgggcttgtccatgtgtcctgcatgatcaaaatgacaatagcaaacttgatggccacagaagattgaaaagtgcttgggcattgagcttgctctctcttg

SEQ ID NO: 593899 - DNA, 120 bp, Artificial Sequence
  ENSG00000173559_89 (sequence is synthesized)
aagtgcttggagccctgagactgccatgagaccacataaatgatcactagctagcctgctggaggatgagaggtcacttgagaaaccttggctcacagcctgcttacaccagacacatgg

SEQ ID NO: 593900 - DNA, 120 bp, Artificial Sequence
  ENSG00000173559_90 (sequence is synthesized)
atgagtctgtcttagactatccagctccagctgagttgccagctgacttcagtcacatgagtgagaacaacagaaggacagcactgagctctgccaaaattgctgacctacagaatcttg

SEQ ID NO: 593901 - DNA, 120 bp, Artificial Sequence
  ENSG00000173559_91 (sequence is synthesized)
agctaatgaatgattgtagctttatgccattaagttctgaggcagtgtgctatacatagcaaaagctaactgatacaaaactaaagatacaatggcacaaacatgaaaagacatgttcac

SEQ ID NO: 593902 - DNA, 120 bp, Artificial Sequence
  ENSG00000173559_92 (sequence is synthesized)
cgaagcattgcctataatagttaaagactggaaacgactcagatgtccaccaactcaggagtggttgaacctactacagtgcattcaccccgtggaatactaagcagctccaacaggggt

SEQ ID NO: 593903 - DNA, 120 bp, Artificial Sequence
  ENSG00000173559_93 (sequence is synthesized)
aggaaatttgtatactttcataaaatgatctttaggatatattgttaagtgaaaaaaacaaggtgtagaatagttaatagagtatgctacctcttatttaataaagggagaatataaata

SEQ ID NO: 593904 - DNA, 120 bp, Artificial Sequence
  ENSG00000173559_94 (sequence is synthesized)
gtgttcatcagtcgctgtttgggacgctgggtgtgcggtgttctgtctccgctcccgtttcgctgtcacagcccgttccttcccggagcccgggacaggctgggcgcgcgcccgtgacgc

SEQ ID NO: 593905 - DNA, 120 bp, Artificial Sequence
  ENSG00000173559_95 (sequence is synthesized)
tccatacactactaccctggtaatgatctccaccctgacctggaggagccatcctctctaggggtgtaagattttgtatggtttattcagaagtgccaaatttcagtgaacccaacccag

SEQ ID NO: 593906 - DNA, 120 bp, Artificial Sequence
  ENSG00000173559_96 (sequence is synthesized)
tttaaatacaaaatagaatgttatatatcttgtagacagtcaaatatttgatgttttatgggacataatcatttgggaagtttttgttgtaaatgaagagttagtttgttgctattaatt

SEQ ID NO: 593907 - DNA, 120 bp, Artificial Sequence
  ENSG00000173559_97 (sequence is synthesized)
tgtttgacacataagttcattcctaaaagttagagatgttacataaagaagggttgaggactttatttcagaagtcatttaattttttctttattttctttcagattttgtatggtttat

SEQ ID NO: 593908 - DNA, 71 bp, Artificial Sequence
  ENSG00000173559_98 (sequence is synthesized)
taccacccagctaatttttatatttttaatagagatgggatttcaccatatgggccaggctagtctcgaac

SEQ ID NO: 593909 - DNA, 120 bp, Artificial Sequence
  ENSG00000173559_99 (sequence is synthesized)
aaattggggagtaagtattaaaatgcattttgtataattgcatatattataaataatatctacggaatgattggtaggtatgaattgtaaacctctttggcttttttgactagtaaactg

SEQ ID NO: 593910 - DNA, 120 bp, Artificial Sequence
  ENSG00000173559_100 (sequence is synthesized)
aatgtctttggtagcttaattgaaaaaataacttcgtgtatacaaatttaacacttgtcagtactgttttctgtggttaaaagtgtcaatttttcctggcaaagagcagtagaagaagct

SEQ ID NO: 593911 - DNA, 120 bp, Artificial Sequence
  ENSG00000173559_101 (sequence is synthesized)
gcagttgagaccagccctagtggaagcatttctgtaggttttagaaatgtgcattttttaggtgtcacaagagccatttgaagtagattctcttttgtagtgattcaccatatacgaagc

SEQ ID NO: 593912 - DNA, 120 bp, Artificial Sequence
  ENSG00000173559_102 (sequence is synthesized)
tagtgattcaccaagtttcaggccataagtttaaattttctttttctatggttatgggtgaatatgtactcatgttaaaaaggacttgcagcaacgaaaactgaagtcctctatttatcc

SEQ ID NO: 593913 - DNA, 120 bp, Artificial Sequence
  ENSG00000173559_103 (sequence is synthesized)
aatgagccaaatcatcagtccattctgtttggttaatgctctgccatctacttaatgcctgtcaaattggaagatatttaaaaagagaagccacaaatggcaccagataaaaaaggaaaa

SEQ ID NO: 593914 - DNA, 120 bp, Artificial Sequence
  ENSG00000173559_104 (sequence is synthesized)
ctgtttgccactgagggaataagatgcttatttggagaacctgtggttaataatgaaggaaaagaaatgatcatgctagcttttaaagatcagaaacacttaacgctttgcctttgttag

SEQ ID NO: 593915 - DNA, 120 bp, Artificial Sequence
  ENSG00000173559_105 (sequence is synthesized)
aagggaagttaggattcacttagagtagcattaatagagttatgtgttatgaaaggtcttagtgtctgttactgaaaggttcaggattctgtcctgaccttcatgtattcatacagaggt

SEQ ID NO: 593916 - DNA, 120 bp, Artificial Sequence
  ENSG00000173559_106 (sequence is synthesized)
gttgataataatggaggtcagttacgtgaaaaaccgttagaggtcactcatttcttaatgactgctctttgtcagggtcagtcgaggatttaccaaaactggttctgatttgtcttcagt

SEQ ID NO: 593917 - DNA, 120 bp, Artificial Sequence
  ENSG00000173559_107 (sequence is synthesized)
gacctggaggagccatcctctctaggggtgtaagatccacagtgatcgatcaaaagagggactgaatgggagtgggtgaatggatcggtgcaaatccattaccactgctggagaaaccac

SEQ ID NO: 593918 - DNA, 120 bp, Artificial Sequence
  ENSG00000173567_0 (sequence is synthesized)
ctccctttcatctggtggccctagcgccacaagctgccgcttaggaagtccctgccgggagcagaagtggagacatcagcaggatggcatcggcaagtcgctcccctcccgggcctcatc

SEQ ID NO: 593919 - DNA, 120 bp, Artificial Sequence
  ENSG00000173567_1 (sequence is synthesized)
tgccaaacgatcatctcctcctccgaagttgtatgcatgacaggcgagtggaaacttcactaaaatgaaggcgattgacacaacagaaggaactccatcctttcgggggcttacgaaaat

SEQ ID NO: 593920 - DNA, 120 bp, Artificial Sequence
  ENSG00000173567_2 (sequence is synthesized)
aataagtttaaaaaaaataggaagggaattccctcgctccatgatcactgagcgctctcctaaggaaaaggaaatctcccggggggtgccgactacgggcggcgggcttaggatgctccc

SEQ ID NO: 593921 - DNA, 120 bp, Artificial Sequence
  ENSG00000173567_3 (sequence is synthesized)
taggatgctcccacgctccccgacccccaatccccaggacccgcaggacctccggaggaacgcccgccagcccgcccggagccacgcggcacaaggtgacacggaccgcgccgcgcgggc

SEQ ID NO: 593922 - DNA, 120 bp, Artificial Sequence
  ENSG00000173567_4 (sequence is synthesized)
tgggcgaggccgggagcagggagaggggcatccgccggcccgcggtaccttgtacttatcaaagccagccagctgctccgggctcacgtattcgtagccagccatgacgacccgaaaact

SEQ ID NO: 593923 - DNA, 120 bp, Artificial Sequence
  ENSG00000173567_5 (sequence is synthesized)
gagcgcccactcggcagcgactcccggctacaaggctgtgacacacaagcaccacaccggctgggcaaggatggcaaagactgggctgcccgagaagggacagagtcaggctggagggga

SEQ ID NO: 593924 - DNA, 120 bp, Artificial Sequence
  ENSG00000173567_6 (sequence is synthesized)
atctggatctgggcagctcctggaccaagagaatggagcaggggaatcagcgctggtctccgtctatgtacatctggactttccagataagacctggccccctgaactctccaggacact

SEQ ID NO: 593925 - DNA, 120 bp, Artificial Sequence
  ENSG00000173567_7 (sequence is synthesized)
gactctccctgctgcctcagcttcctcttccccaaggcctcttctcactggcctcagactcacaacaggtgagtacatgagctgcttcgaggcccagggcttcaagtggaacctgtatga

SEQ ID NO: 593926 - DNA, 120 bp, Artificial Sequence
  ENSG00000173567_8 (sequence is synthesized)
ggtggtgagggtgcccttgaaggcgacagatgtggctcgacttccataccagctgtccatctcctgtgccacctcccctggcttccagctgagctgctgcatccccagcacaaacctggc

SEQ ID NO: 593927 - DNA, 120 bp, Artificial Sequence
  ENSG00000173567_9 (sequence is synthesized)
ctacaccgcggcctggagccctggagagggcagcaaagcttcctccttcaacgagtcaggctctcagtgctttgtgctggctgttcagcgctgcccgatggctgacaccacgtacgcttg

SEQ ID NO: 593928 - DNA, 120 bp, Artificial Sequence
  ENSG00000173567_10 (sequence is synthesized)
tgacctgcagagcctgggcctggctccactcagggtccccatctccatcaccatcatccaggatggagacatcacctgccctgaggacgcctcggtgctcacctggaatgtcaccaaggc

SEQ ID NO: 593929 - DNA, 120 bp, Artificial Sequence
  ENSG00000173567_11 (sequence is synthesized)
tggccacgtggcacaggccccatgtcctgagagcaagaggggcatagtgaggaggctctgtggggctgacggagtctgggggccggtccacagcagctgcacagatgcgaggctcctggc

SEQ ID NO: 593930 - DNA, 120 bp, Artificial Sequence
  ENSG00000173567_12 (sequence is synthesized)
cttgttcactagaaccaagctgctgcaggcaggccagggcagtcctgctgaggaggtgccacagatcctggcacagctgccagggcaggcggcagaggcaagttcaccctccgacttact

SEQ ID NO: 593931 - DNA, 120 bp, Artificial Sequence
  ENSG00000173567_13 (sequence is synthesized)
gaccctgctgagcaccatgaaatacgtggccaaggtggtggcagaggccagaatacagcttgaccgcagagccctgaagaatctcctgattgccacagacaaggtcctagatatggacac

SEQ ID NO: 593932 - DNA, 120 bp, Artificial Sequence
  ENSG00000173567_14 (sequence is synthesized)
caggtctctgtggaccctggcccaagcccggaagccctgggcaggctcgactctcctgctggctgtggagaccctggcatgcagcctgtgcccacaggaccaccccttcgccttcagctt

SEQ ID NO: 593933 - DNA, 120 bp, Artificial Sequence
  ENSG00000173567_15 (sequence is synthesized)
acccaatgtgctgctgcagagccagctgtttggacccacgtttcctgctgactacagcatctccttccctactcggcccccactgcaggctcagattcccaggcactcactggccccatt

SEQ ID NO: 593934 - DNA, 120 bp, Artificial Sequence
  ENSG00000173567_16 (sequence is synthesized)
accttctgccctcaaactatggacaagggctgggggattccctctatgccactcctggcctggtccttgtcatttccatcatggcaggtgaccgggccttcagccagggagaggtcatca

SEQ ID NO: 593935 - DNA, 120 bp, Artificial Sequence
  ENSG00000173567_17 (sequence is synthesized)
tggactttgggaacacagatggttcccctcactgtgtcttctgggatcacagtctcttccagggcagggggggttggtccaaagaagggtgccaggcacaggtggccagtgccagcccca

SEQ ID NO: 593936 - DNA, 120 bp, Artificial Sequence
  ENSG00000173567_18 (sequence is synthesized)
ctgctcagtgcctctgccagcacctcactgccttctccgtcctcatgtccccacacactgttccggaagaacccgctctggcgctgctgactcaagtgggcttgggagcttccatactgg

SEQ ID NO: 593937 - DNA, 120 bp, Artificial Sequence
  ENSG00000173567_19 (sequence is synthesized)
cgctgcttgtgtgcctgggtgtgtactggctggtgtggagagtcgtggtgcggaacaagatctcctatttccgccacgccgccctgctcaacatggtgttctgcttgctggccgcagaca

SEQ ID NO: 593938 - DNA, 120 bp, Artificial Sequence
  ENSG00000173567_20 (sequence is synthesized)
cttgcttcctgggcgccccattcctctctccagggccccgaagcccgctctgccttgctgccgccttcctctgtcatttcctctacctggccacctttttctggatgctggcgcaggccc

SEQ ID NO: 593939 - DNA, 120 bp, Artificial Sequence
  ENSG00000173567_21 (sequence is synthesized)
tggtgttggcccaccagctgctctttgtctttcaccagctggcaaagcaccgagttctccccctcatggtgctcctgggctacctgtgcccactggggttggcaggtgtcaccctggggc

SEQ ID NO: 593940 - DNA, 120 bp, Artificial Sequence
  ENSG00000173567_22 (sequence is synthesized)
tctacctacctcaagggcaatacctgagggagggggaatgctggttggatgggaagggaggggcgttatacaccttcgtggggccagtgctggccatcataggcgtgaatgggctggtac

SEQ ID NO: 593941 - DNA, 120 bp, Artificial Sequence
  ENSG00000173567_23 (sequence is synthesized)
tagccatggccatgctgaagttgctgagaccttcgctgtcagagggacccccagcagagaagcgccaagctctgctgggggtgatcaaagccctgctcattcttacacccatctttggcc

SEQ ID NO: 593942 - DNA, 120 bp, Artificial Sequence
  ENSG00000173567_24 (sequence is synthesized)
tcacctgggggctgggcctggccactctgttagaggaagtctccacggtccctcattacatcttcaccattctcaacaccctccagggcgtcttcatcctattgtttggttgcctcatgg

SEQ ID NO: 593943 - DNA, 120 bp, Artificial Sequence
  ENSG00000173567_25 (sequence is synthesized)
acaggaagatacaagaagctttgcgcaaacgcttctgccgcgcccaagcccccagctccaccatctccctggccacaaatgaaggctgcatcttggaacacagcaaaggaggaagcgaca

SEQ ID NO: 593944 - DNA, 120 bp, Artificial Sequence
  ENSG00000173567_26 (sequence is synthesized)
ctgccaggaagacagatgcttcagagtgaaccacacacggacccatgttcctgcaagggagttgaggctgtgtgcttgaacccaccagatgagccctggcccaatgctctgaactcttcc

SEQ ID NO: 593945 - DNA, 120 bp, Artificial Sequence
  ENSG00000173567_27 (sequence is synthesized)
cgcctcccggagctcagcccttgagaaaggcaggcttatatttcccttagtgacactcatttatcttacagctcaccccttctcatttctaaagtatccagcaagaatagcaggaaaaat

SEQ ID NO: 593946 - DNA, 120 bp, Artificial Sequence
  ENSG00000173567_28 (sequence is synthesized)
tagctaaaggcacctaatgaataagcctgcctttgctccagaaataatcgacagatatcaaagtgcggaataattacaagtaaactttctcaaccagtttttaactacaacaatacatgt

SEQ ID NO: 593947 - DNA, 120 bp, Artificial Sequence
  ENSG00000173567_29 (sequence is synthesized)
tgtgaatgaatatatttgataaaaatggttttaattgacctattcagcgatttctgattatttctttttcaatagttatgaagaaaggatgacttacttgacaggaacctctgatctttc

SEQ ID NO: 593948 - DNA, 120 bp, Artificial Sequence
  ENSG00000173567_30 (sequence is synthesized)
aaacattggagatgaagggcagaatttggtttgtcttttcaagtttaggaaaaggtgaagttaattggtccctctttctttaacctttaaaaaatcaatataaaatgtaagtttcttaac

SEQ ID NO: 593949 - DNA, 120 bp, Artificial Sequence
  ENSG00000173567_31 (sequence is synthesized)
taaaatgtaagtttcttaaccatatccatgtatagaggcattgattgatatgagcacgttgtaagaataggttataaaaatttaaagtttaatataaatttatatcaattaataaagttt

SEQ ID NO: 593950 - DNA, 120 bp, Artificial Sequence
  ENSG00000173567_32 (sequence is synthesized)
atggtctgttcggctgccccactgctgctcctggccacaactcttcccctgctggggtcaccagttgcccaagcatcccaacctgtaagtgagactggggtgagacccagggaaggtctg

SEQ ID NO: 593951 - DNA, 120 bp, Artificial Sequence
  ENSG00000173567_33 (sequence is synthesized)
cagaggcgacaatggggacccctgattgggagagacaaagcatggaatgaaaggatagacagacccttccctgcctgccccatccccctatcttctagctttggccgatggcccaagggc

SEQ ID NO: 593952 - DNA, 120 bp, Artificial Sequence
  ENSG00000173567_34 (sequence is synthesized)
actggcctcagactcacaacagagtgtaatgtcaaccacaaggggaatttctattgtgcttgcctctctggctaccagtggaacaccagcatctgcctccattaccctccttgtcaaagc

SEQ ID NO: 593953 - DNA, 120 bp, Artificial Sequence
  ENSG00000173567_35 (sequence is synthesized)
ctccacaaccaccagccttgtggctgccttgtcttcagccatcccgaacccgggtactgccagttgctgccacctgggtcccctgtcacctgcctccctgcagtccccgggatcctcaac

SEQ ID NO: 593954 - DNA, 120 bp, Artificial Sequence
  ENSG00000173567_36 (sequence is synthesized)
ctgaactcccagctgcagatgcctggtgacacgctgagcctgactctccatctgagccaggaggccaccaacctgagctggttcctgaggcacccagggagccccagtcccatcctcctg

SEQ ID NO: 593955 - DNA, 120 bp, Artificial Sequence
  ENSG00000173567_37 (sequence is synthesized)
cagccagggacacaggtgtctgtgacttccagccacggccaggctgccctcagcgtctccaacatgtcccatcactgggcaggtgagtacatgagctgcttcgaggcccagggcttcaag

SEQ ID NO: 593956 - DNA, 120 bp, Artificial Sequence
  ENSG00000173567_38 (sequence is synthesized)
cccagctccaccatctccctggtgagttgctgccttcagatcctcagctgtgcatccaagagcatgtcagaaggcattccatggccctcctcagaggacatgggcacagccagaagctga

SEQ ID NO: 593957 - DNA, 120 bp, Artificial Sequence
  ENSG00000173567_39 (sequence is synthesized)
tcttccttgcggaaatttgcatcgtgggcttgtagggactgcttcactgagccatggtctgttcggctgccccactgctgctcctggccacaactcttcccctgctggggtcaccagttg

SEQ ID NO: 593958 - DNA, 120 bp, Artificial Sequence
  ENSG00000173567_40 (sequence is synthesized)
ggcaaagtgctggagagaagcctcctctttctatacccagcccacaccaaagggtaggaaacaggtttttctagggtagccattgctagatggctgggagacggtggaaatgtcagagag

SEQ ID NO: 593959 - DNA, 120 bp, Artificial Sequence
  ENSG00000173567_41 (sequence is synthesized)
cagaaagcatagcaccttatcttgctttccaagaaagcaagaagtttcaccaccaccagtccttgacttggtttctctgaaaattccttttcacattatcacacatttaattatcatgag

SEQ ID NO: 593960 - DNA, 120 bp, Artificial Sequence
  ENSG00000173567_42 (sequence is synthesized)
taaactagatacgtgaaaaaagtctgatgaatcggtctttgttaattatgcaattcatggatattttttataaaatgggacgggggcattttctgttaaaataaaaatggttatgctatc

SEQ ID NO: 593961 - DNA, 120 bp, Artificial Sequence
  ENSG00000173567_43 (sequence is synthesized)
cagaaatccttcttggggacagggaatgtccaccaaaggggccatcctgggaccttgcttgctggggttaagcactgggtggcaggcagaggacaggagcaaggctgtggcttggaaagc

SEQ ID NO: 593962 - DNA, 120 bp, Artificial Sequence
  ENSG00000173567_44 (sequence is synthesized)
ccctgccgggagcagaagtggagacatcagcaggatggcatcggcaagtcgctcccctcccgggcctcatctgccaaacgatcatctcctcctccgaagttgtatgcatgacaggacccg

SEQ ID NO: 593963 - DNA, 120 bp, Artificial Sequence
  ENSG00000173567_45 (sequence is synthesized)
ggtgggatttctgtggtatccgcacttgcgtggtgatctggggtataccgttttagtcttgggggtagagtgactgcttgcgaaccagttcagcagtgcctcagtttgaacacacagctg

SEQ ID NO: 593964 - DNA, 120 bp, Artificial Sequence
  ENSG00000173567_46 (sequence is synthesized)
tttgaatgaggattattttcaccttcatgaaactttgagattattggatcaatggtcattcggttttggtgaaagagaaagtcactaggagaaaaaaaaaatcctaagtggaacaagaga

SEQ ID NO: 593965 - DNA, 120 bp, Artificial Sequence
  ENSG00000173572_0 (sequence is synthesized)
atgaacttttctgtaatcacctgccccaacggtggtaccaaccaagggcttctgccttacctgatggccctggatcagtatcagctggaggaattcaagctttgcttggaaccccagcag

SEQ ID NO: 593966 - DNA, 120 bp, Artificial Sequence
  ENSG00000173572_1 (sequence is synthesized)
ctgatggacttctggtcggccccccaggggcacttcccgcgtatcccctgggcaaacttgagagctgccgaccctttgaatctgtcctttcttttggatgaacacttcccaaaaggtcag

SEQ ID NO: 593967 - DNA, 120 bp, Artificial Sequence
  ENSG00000173572_2 (sequence is synthesized)
gcatggaaagtggtcctcggcatcttccagacaatgaatctgacctcactgtgtgagaaagttagagccgagatgaaagagaatgtgcagacccaagagctgcaagatccaacccaggaa

SEQ ID NO: 593968 - DNA, 120 bp, Artificial Sequence
  ENSG00000173572_3 (sequence is synthesized)
gatctagagatgctagaagcagcagcagggaatatgcagacccagggatgccaagatccaaaccaagaagaactagacgagctagaagaagaaacagggaatgtacaggcccagggatgc

SEQ ID NO: 593969 - DNA, 120 bp, Artificial Sequence
  ENSG00000173572_4 (sequence is synthesized)
caagatccaaaccaagaagaaccagagatgctagaggaagcagaccacagaagaaaatacagagagaacatgaaggctgaactactggagacatgggacaacatcagttggcctaaagac

SEQ ID NO: 593970 - DNA, 120 bp, Artificial Sequence
  ENSG00000173572_5 (sequence is synthesized)
cacgtatatatccgtaatacatcaaaggacgaacatgaggaactgcagcgcctactggatcctaataggactagagcccaggcccagacgatagtcttggtggggagggcaggggttggg

SEQ ID NO: 593971 - DNA, 120 bp, Artificial Sequence
  ENSG00000173572_6 (sequence is synthesized)
aagaccaccttggcaatgcaggctatgctgcactgggcaaatggagttctctttcagcaaaggttctcctatgttttctatctcagctgccataaaataaggtacatgaaggaaactacc

SEQ ID NO: 593972 - DNA, 120 bp, Artificial Sequence
  ENSG00000173572_7 (sequence is synthesized)
tttgctgaattgatttctttggattggcccgattttgatgcccccattgaagagttcatgtctcaaccagagaagctcctgtttattattgatggctttgaggaaataatcatatctgag

SEQ ID NO: 593973 - DNA, 120 bp, Artificial Sequence
  ENSG00000173572_8 (sequence is synthesized)
tcacgctctgagagcttggatgatggctcgccatgtacagactggtaccaggagctcccagtgaccaaaatcctacacagcttgttgaagaaagaattggttcccctggctaccttactg

SEQ ID NO: 593974 - DNA, 120 bp, Artificial Sequence
  ENSG00000173572_9 (sequence is synthesized)
atcacgatcaagacctggtttgtgagagatcttaaggcctcattagtgaatccatgctttgtacaaattacagggttcacaggggacgacctacgggtatatttcatgagacactttgat

SEQ ID NO: 593975 - DNA, 120 bp, Artificial Sequence
  ENSG00000173572_10 (sequence is synthesized)
gactcaagtgaagttgagaaaatcctgcagcagctaagaaaaaacgaaactctctttcattcctgcagtgcccccatggtgtgttggaccgtatgttcctgtctgaagcagccgaaggtg

SEQ ID NO: 593976 - DNA, 120 bp, Artificial Sequence
  ENSG00000173572_11 (sequence is synthesized)
aggtattacgatctccagtcaatcactcagactaccaccagtctgtatgcctattttttctccaacttgttctccacagcagaggtagatttggcagatgacagctggccaggacaatgg

SEQ ID NO: 593977 - DNA, 120 bp, Artificial Sequence
  ENSG00000173572_12 (sequence is synthesized)
agggccctctgcagtctggccatagaagggctgtggtctatgaacttcacgtttaacaaagaagacactgagatcgagggcctggaagtgcctttcattgattctctctacgagttcaat

SEQ ID NO: 593978 - DNA, 120 bp, Artificial Sequence
  ENSG00000173572_13 (sequence is synthesized)
atcaatgactgtgggggttgcactactttcacccacctaagtttccaggagttttttgcagccatgtcctttgtgctagaggaacctagagaattccctccccattccacaaagccacaa

SEQ ID NO: 593979 - DNA, 120 bp, Artificial Sequence
  ENSG00000173572_14 (sequence is synthesized)
gagatgaagatgttactgcaacacgtcttgcttgacaaagaagcctactggactccagtggttctgttcttctttggtcttttaaataaaaacatagcaagagaactggaagatactttg

SEQ ID NO: 593980 - DNA, 120 bp, Artificial Sequence
  ENSG00000173572_15 (sequence is synthesized)
cattgtaaaatatctcccagggtaatggaggaattattaaagtggggagaagagttaggtaaggctgaaagtgcctctctccaatttcacattctacgactttttcactgcctacacgag

SEQ ID NO: 593981 - DNA, 120 bp, Artificial Sequence
  ENSG00000173572_16 (sequence is synthesized)
tcccaggaggaagacttcacaaagaagatgttgggtcgtatctttgaagttgaccttaatattttggaggacgaagaactccaagcttcttcattttgcctaaagcactgtaaaaggtta

SEQ ID NO: 593982 - DNA, 120 bp, Artificial Sequence
  ENSG00000173572_17 (sequence is synthesized)
aataagctaaggctttctgttagcagtcacatccttgaaagggacttggaaattctggagacaagcaagtttgattccaggatgcacgcatggaacagcatttgctctacgttggtcaca

SEQ ID NO: 593983 - DNA, 120 bp, Artificial Sequence
  ENSG00000173572_18 (sequence is synthesized)
aatgagaatctgcatgagctagacctgagtaacagcaaacttcatgcttcctctgtgaagggtctctgtcttgcactgaaaaatccaagatgcaaagtccagaaactgacgtgcaaatcg

SEQ ID NO: 593984 - DNA, 120 bp, Artificial Sequence
  ENSG00000173572_19 (sequence is synthesized)
gtaactcctgagtgggttctgcaggacctcattattgcccttcagggtaacagcaagctgacccatctgaacttcagctctaacaagctgggaatgactgtccccctgattcttaaagct

SEQ ID NO: 593985 - DNA, 120 bp, Artificial Sequence
  ENSG00000173572_20 (sequence is synthesized)
ttgagacactcagcttgcaacctcaagtatctgtgcctggagaaatgcaacttgtcggcagccagctgtcaggacctagccttgtttctcaccagcatccaacacgtaactcgattgtgc

SEQ ID NO: 593986 - DNA, 120 bp, Artificial Sequence
  ENSG00000173572_21 (sequence is synthesized)
ctgggatttaatcggctccaagatgatggcataaagctattgtgtgcggccctgactcaccccaagtgtgccttagagagactggagctctggttttgccagctggcagcacccgcttgc

SEQ ID NO: 593987 - DNA, 120 bp, Artificial Sequence
  ENSG00000173572_22 (sequence is synthesized)
aagcacttgtcagatgctctcctgcagaacaggagcctgacacacctgaatctgagcaagaacagcctgagagacgagggagtcaagttcctgtgtgaggccttgggtcgcccagatggt

SEQ ID NO: 593988 - DNA, 120 bp, Artificial Sequence
  ENSG00000173572_23 (sequence is synthesized)
aacctgcagagcctgaatttgtcaggttgttctttcacaagagagggctgtggagagctggctaatgccctcagccataatcataatgtgaaaatcttggatttgggagaaaatgatctt

SEQ ID NO: 593989 - DNA, 120 bp, Artificial Sequence
  ENSG00000173572_24 (sequence is synthesized)
caggatgatggagtgaagctactgtgtgaggctctgaaaccacatcgtgcattgcacacacttgggttggcgaaatgcaatctgacaactgcttgctgccagcatctcttctctgttctc

SEQ ID NO: 593990 - DNA, 120 bp, Artificial Sequence
  ENSG00000173572_25 (sequence is synthesized)
agcagcagtaagagcctggtcaatctgaaccttctaggcaatgaattggatactgatggtgtcaagatgctatgtaaggctttgaaaaagtcgacatgcaggctgcagaaactcgggtaa

SEQ ID NO: 593991 - DNA, 120 bp, Artificial Sequence
  ENSG00000173572_26 (sequence is synthesized)
tctgaaactcaagtgtgcgtgggattttaatgaccttgaagacaagtggtggtggtgatcccacggattagatgccacgtggcttgaccatggatcttgggggaaagccaccaggacatc

SEQ ID NO: 593992 - DNA, 120 bp, Artificial Sequence
  ENSG00000173572_27 (sequence is synthesized)
ctggcctgtgtgtcgctccaatgtcaccatttgtggggacaaatgagctgttccctgcaggaggctttgtcacggttgttggaggccgcccattgcacgcccaggtctggaatcctagtg

SEQ ID NO: 593993 - DNA, 120 bp, Artificial Sequence
  ENSG00000173572_28 (sequence is synthesized)
taatactgtgtctggtaccaagatcataagttggctgtgccttcagtcttgtctatgtcctccttggtgtaatgtttttaattcttggaggtgttgagagaattcaataaagcaaagcat

SEQ ID NO: 593994 - DNA, 120 bp, Artificial Sequence
  ENSG00000173575_0 (sequence is synthesized)
agagctgggaaggaggctctagatggcggctgtgccttagagagagcgcgctctgctccctgcctttgcctcactttacgcaactttccctaactttcgggcagcctcagggggcccccg

SEQ ID NO: 593995 - DNA, 120 bp, Artificial Sequence
  ENSG00000173575_1 (sequence is synthesized)
tagccccctgcctttcctagggacttactggggtcgattcgaacctttttttgggagaaaagcagcttttaggagctttcttttcgtgccttgttggaaagaagcagccgtactgagagc

SEQ ID NO: 593996 - DNA, 120 bp, Artificial Sequence
  ENSG00000173575_2 (sequence is synthesized)
ccaggtcgttgttttttccagcttagaagccatggcgcacctccatttttgtgcgctctcctaatgaggttttttttctttcggacctgttttagtattaattattgctttatttttttg

SEQ ID NO: 593997 - DNA, 120 bp, Artificial Sequence
  ENSG00000173575_3 (sequence is synthesized)
accagttaacatatttgagggttattttatttatttttcgttttttaacggaggattttgcctttatttttaattatttgggatctgatatttttctactagtagataggactcttggtt

SEQ ID NO: 593998 - DNA, 120 bp, Artificial Sequence
  ENSG00000173575_4 (sequence is synthesized)
tggacatactacatggatcagtaaatacctgggcacaggacttcaaagcaaacacagattccccctcccccttaatatttaagaattaaaagatgatgagaaataaggacaaaagccaag

SEQ ID NO: 593999 - DNA, 120 bp, Artificial Sequence
  ENSG00000173575_5 (sequence is synthesized)
aggaggacagttcgctacacagcaatgcatcgagtcactcagcctctgaagaagcttcgggttcagactcaggcagtcagtcggaaagtgagcagggaagtgatccaggaagtggacatg

SEQ ID NO: 594000 - DNA, 120 bp, Artificial Sequence
  ENSG00000173575_6 (sequence is synthesized)
gcagcgagtcgaacagcagctctgaatcttctgagagtcagtcggaatctgagagcgaatcagcaggttccaaatcccagccagtcctcccagaagccaaagagaagccagcctctaaga

SEQ ID NO: 594001 - DNA, 120 bp, Artificial Sequence
  ENSG00000173575_7 (sequence is synthesized)
aggaacggatagctgatgtgaagaagatgtgggaagaatatcctgatgtttatggggtcaggcggtcaaaccgaagcagacaagaaccatcgcgatttaatattaaggaagaggcaagta

SEQ ID NO: 594002 - DNA, 120 bp, Artificial Sequence
  ENSG00000173575_8 (sequence is synthesized)
gcgggtctgagagtgggagcccaaaaagaagaggccagaggcagctgaaaaaacaagaaaaatggaaacaggaaccctcagaagatgaacaggaacaaggcaccagtgcagagagtgagc

SEQ ID NO: 594003 - DNA, 120 bp, Artificial Sequence
  ENSG00000173575_9 (sequence is synthesized)
cagaacaaaaaaaagtaaaagccagaagacctgtccccagaagaacagtgcccaaacctcgtgttaaaaagcagccgaagactcagcgtggaaagagaaaaaagcaagattcttctgatg

SEQ ID NO: 594004 - DNA, 120 bp, Artificial Sequence
  ENSG00000173575_10 (sequence is synthesized)
aggatgatgatgatgacgaagctcccaaaaggcagactcgtcgaagagcggctaaaaacgttagttacaaagaagatgatgactttgagactgactcagatgatctcattgaaatgactg

SEQ ID NO: 594005 - DNA, 120 bp, Artificial Sequence
  ENSG00000173575_11 (sequence is synthesized)
gagaaggagttgatgaacagcaagataatagtgaaactattgaaaaggtcttagattcaagactgggaaagaaaggagccactggagcatctactactgtatatgcgattgaagctaatg

SEQ ID NO: 594006 - DNA, 120 bp, Artificial Sequence
  ENSG00000173575_12 (sequence is synthesized)
gcgaccctagtggtgactttgacactgaaaaggatgaaggtgaaatccagtacctcatcaagtggaagggttggtcttacatccacagcacatgggagagtgaagaatccttacagcaac

SEQ ID NO: 594007 - DNA, 120 bp, Artificial Sequence
  ENSG00000173575_13 (sequence is synthesized)
agaaagtgaagggcctaaaaaaactagagaacttcaagaaaaaagaggacgaaatcaaacaatggttagggaaagtttctcctgaagatgtagaatatttcaattgccaacaggagctgg

SEQ ID NO: 594008 - DNA, 120 bp, Artificial Sequence
  ENSG00000173575_14 (sequence is synthesized)
cttcagagttgaataaacagtatcagatagtagaaagagtaatagctgtgaagacaagtaaatctacattgggtcaaacagattttccagctcatagtcggaagccggcaccctcaaatg

SEQ ID NO: 594009 - DNA, 120 bp, Artificial Sequence
  ENSG00000173575_15 (sequence is synthesized)
agcccgaatatctatgtaaatggatgggactcccctattcagagtgtagctgggaagatgaagccctcattggaaagaaattccagaattgcattgacagcttccacagtaggaacaact

SEQ ID NO: 594010 - DNA, 120 bp, Artificial Sequence
  ENSG00000173575_16 (sequence is synthesized)
caaaaaccatcccaacaagagaatgcaaggccctgaagcagagaccacgatttgtagctttaaagaaacaacctgcatatttaggaggggagaatctggaacttcgagattatcagctag

SEQ ID NO: 594011 - DNA, 120 bp, Artificial Sequence
  ENSG00000173575_17 (sequence is synthesized)
aaggtctaaactggctagctcattcctggtgcaaaaataatagtgtaatccttgctgatgaaatgggcctaggaaagaccatccagaccatatcattcctctcctacctgttccaccaac

SEQ ID NO: 594012 - DNA, 120 bp, Artificial Sequence
  ENSG00000173575_18 (sequence is synthesized)
accagctgtatggcccctttcttatagtcgtccctttatccaccctcacctcatggcagagagagtttgaaatctgggcaccagagattaacgtagtggtttacataggtgacctgatga

SEQ ID NO: 594013 - DNA, 120 bp, Artificial Sequence
  ENSG00000173575_19 (sequence is synthesized)
gcagaaatacgatacgggaatatgaatggattcattcccaaaccaaaagattgaagttcaacgcacttataacaacatatgagatcctcttgaaagataagactgtgctgggcagtatta

SEQ ID NO: 594014 - DNA, 120 bp, Artificial Sequence
  ENSG00000173575_20 (sequence is synthesized)
actgggcctttctgggagtggatgaagcccatcggttgaagaatgatgactctttattgtataaaactctgattgatttcaagtccaaccataggctcctgattacggggacccctcttc

SEQ ID NO: 594015 - DNA, 120 bp, Artificial Sequence
  ENSG00000173575_21 (sequence is synthesized)
agaattccctcaaagagctctggtccttgctgcactttattatgccggagaagtttgaattttgggaagattttgaagaagaccatgggaaggggagagaaaatggctaccagagtcttc

SEQ ID NO: 594016 - DNA, 120 bp, Artificial Sequence
  ENSG00000173575_22 (sequence is synthesized)
ataaggtgctagagcctttccttctccggagagtcaaaaaagatgtggagaaatcccttcctgctaaagtggaacagattctcagggtggagatgtcagcccttcagaaacagtattaca

SEQ ID NO: 594017 - DNA, 120 bp, Artificial Sequence
  ENSG00000173575_23 (sequence is synthesized)
agtggattctgaccaggaattacaaggctcttgccaaaggaacaagaggcagcacatctggttttcttaatattgtgatggaactgaaaaaatgttgcaaccactgctatctgattaaac

SEQ ID NO: 594018 - DNA, 120 bp, Artificial Sequence
  ENSG00000173575_24 (sequence is synthesized)
cccctgaagaaaatgaaagggaaaatggacaggagattcttctgtccctcataaggagcagtgggaagttgattttattagacaaactgttgacaagacttcgagaaagggggaatcgag

SEQ ID NO: 594019 - DNA, 120 bp, Artificial Sequence
  ENSG00000173575_25 (sequence is synthesized)
tgcttatcttctctcagatggtgagaatgttggatatcctggctgaatacctaactattaaacactatcctttccagcgtctggatggttccatcaagggagaaatccgaaaacaggcac

SEQ ID NO: 594020 - DNA, 120 bp, Artificial Sequence
  ENSG00000173575_26 (sequence is synthesized)
tggaccacttcaatgcagatgggtctgaggacttctgtttcctgctctcgacaagggctggtggcctgggaatcaatttggcttcagcggacacagtcgtcatctttgactctgactgga

SEQ ID NO: 594021 - DNA, 120 bp, Artificial Sequence
  ENSG00000173575_27 (sequence is synthesized)
acccccagaatgacttgcaggcacaagcccgagcgcatagaattggtcaaaagaagcaggtaaatatttaccgcttagttacaaaggggactgtggaggaggagatcatagaacgggcca

SEQ ID NO: 594022 - DNA, 120 bp, Artificial Sequence
  ENSG00000173575_28 (sequence is synthesized)
aaaagaagatggtattagatcatctggtgattcagcgcatggacaccactggccggacgatcctggaaaacaactcaggaaggtccaactcaaatccttttaataaagaagagctgacag

SEQ ID NO: 594023 - DNA, 120 bp, Artificial Sequence
  ENSG00000173575_29 (sequence is synthesized)
ctattttgaaatttggagcagaggatctcttcaaagaactggaaggggaggaatcagaacctcaggaaatggatatagatgaaattttgcggttggctgaaacgagagagaatgaagtgt

SEQ ID NO: 594024 - DNA, 120 bp, Artificial Sequence
  ENSG00000173575_30 (sequence is synthesized)
caacaagtgcaacagatgaacttctatcacagtttaaggttgccaactttgcaacaatggaagatgaagaagagctagaagagcgtcctcacaaggactgggatgagatcattccagagg

SEQ ID NO: 594025 - DNA, 120 bp, Artificial Sequence
  ENSG00000173575_31 (sequence is synthesized)
aacaaaggaaaaaagtagaggaggaagagcggcagaaggagctagaagaaatttatatgctgcctcgaattcggagttccactaaaaaggctcagacaaatgacagtgactctgacactg

SEQ ID NO: 594026 - DNA, 120 bp, Artificial Sequence
  ENSG00000173575_32 (sequence is synthesized)
agtctaagaggcaggcccagagatcctctgcttctgagagtgaaacggaagactctgatgatgacaagaagccaaagcgcagagggcgtccgaggagtgtgcggaaggacctcgtggagg

SEQ ID NO: 594027 - DNA, 120 bp, Artificial Sequence
  ENSG00000173575_33 (sequence is synthesized)
gatttactgatgcagagatccgaaggttcatcaaggcttataagaagtttggtctccctcttgaacggctggagtgcatagcacgtgatgctgagctggtagataagtcggtggcagatc

SEQ ID NO: 594028 - DNA, 120 bp, Artificial Sequence
  ENSG00000173575_34 (sequence is synthesized)
tgaagcgcctgggtgaactgatccacaacagctgtgtgtcagcaatgcaggaatacgaagagcagctgaaagaaaatgccagcgagggaaaaggaccagggaaaaggagaggtccaacaa

SEQ ID NO: 594029 - DNA, 120 bp, Artificial Sequence
  ENSG00000173575_35 (sequence is synthesized)
tcaagatatccggagttcaggttaatgtgaaatccattatccaacatgaagaggagtttgagatgctgcataaatctatccctgtggaccctgaagaaaaaaaaaaatactgcttaacct

SEQ ID NO: 594030 - DNA, 120 bp, Artificial Sequence
  ENSG00000173575_36 (sequence is synthesized)
gtcgtgtcaaagctgcacattttgatgtagagtggggggtggaagatgattctcgcctgttgctggggatttatgaacatggctatggaaactgggagttaattaaaacagacccagagc

SEQ ID NO: 594031 - DNA, 120 bp, Artificial Sequence
  ENSG00000173575_37 (sequence is synthesized)
ttaaattaactgacaaaattctgccggtggagacagataaaaagcctcaggggaagcagctacagacccgagcggattacttgttgaagctgctcagaaagggtctggagaagaaggggg

SEQ ID NO: 594032 - DNA, 120 bp, Artificial Sequence
  ENSG00000173575_38 (sequence is synthesized)
aggcattcagataatccatcagaagagggagaagtgaaagatgatggcttggaaaaaagtccaatgaaaaaaaaacagaagaagaaagagaacaaggagaacaaggagaaacaaatgagt

SEQ ID NO: 594033 - DNA, 120 bp, Artificial Sequence
  ENSG00000173575_39 (sequence is synthesized)
tctaggaaagacaaagaaggggacaaggaaagaaagaagtcaaaagataagaaagagaagcctaaaagtggtgatgccaaatcttcgagtaaatcaaagcgatctcagggtcctgtccat

SEQ ID NO: 594034 - DNA, 120 bp, Artificial Sequence
  ENSG00000173575_40 (sequence is synthesized)
attacagcaggaagtgaacctgtccccattggagaggatgaggatgatgatctggaccaggagacattcagcatatgtaaggagaggatgaggcccgtgaaaaaggcactgaaacagctc

SEQ ID NO: 594035 - DNA, 120 bp, Artificial Sequence
  ENSG00000173575_41 (sequence is synthesized)
gacaaacctgacaaggggctcaacgtgcaagaacagctggaacacacccggaactgcctgctgaaaatcggagaccggatagccgagtgccttaaagcctactcagatcaggagcacatc

SEQ ID NO: 594036 - DNA, 120 bp, Artificial Sequence
  ENSG00000173575_42 (sequence is synthesized)
aaactctggaggaggaacctatggatttttgtttccaagtttacagaatttgatgctcgaaaactgcataagttatacaagatggctcataagaaaaggtctcaagaagaagaggagcaa

SEQ ID NO: 594037 - DNA, 120 bp, Artificial Sequence
  ENSG00000173575_43 (sequence is synthesized)
aagaagaaagacgacgtgactgggggtaagaaaccatttcgtccagaggcctcaggctccagccgggactctctgatatctcagtcccatacctcacacaaccttcaccctcagaagcct

SEQ ID NO: 594038 - DNA, 120 bp, Artificial Sequence
  ENSG00000173575_44 (sequence is synthesized)
catttgcctgcctcccatggcccacagatgcatggacacccaagagataactacaatcaccccaacaagagacacttcagtaatgcagatcgaggagactggcagagggaaagaaagttc

SEQ ID NO: 594039 - DNA, 120 bp, Artificial Sequence
  ENSG00000173575_45 (sequence is synthesized)
aactatggtggtggcaacaacaatccaccatggggaagcgacaggcaccatcagtatgagcagcactggtacaaggaccaccattatggggaccggcgacatatggatgcccaccgttcc

SEQ ID NO: 594040 - DNA, 120 bp, Artificial Sequence
  ENSG00000173575_46 (sequence is synthesized)
ggaagctatcgacccaacaacatgtccagaaagaggccttatgaccagtacagcagtgaccgagaccaccggggacacagagattattatgacaggcaccatcatgactccaagcggagg

SEQ ID NO: 594041 - DNA, 120 bp, Artificial Sequence
  ENSG00000173575_47 (sequence is synthesized)
agatccgatgaatttaggcctcaaaattaccaccagcaggatttccgacgaatgtctgatcaccgccccgctatgggctaccatggccagggaccctcagaccattaccgctctttccac

SEQ ID NO: 594042 - DNA, 120 bp, Artificial Sequence
  ENSG00000173575_48 (sequence is synthesized)
acagataaactgggggaatataaacagcctctacccccattgcaccctgcagtctcagatcctcgctcacccccttctcagaaatctcctcacgattccaagtcacccctggatcatagg

SEQ ID NO: 594043 - DNA, 120 bp, Artificial Sequence
  ENSG00000173575_49 (sequence is synthesized)
tctcctttggagagatcactagaacagaaaaacaacccagattataactggaatgttcggaaaacataaaggacagctcgtaaaggagagagtaagagtcaccaaacacgtggatatttt

SEQ ID NO: 594044 - DNA, 120 bp, Artificial Sequence
  ENSG00000173575_50 (sequence is synthesized)
tggtctgatcctacagtagccggttatctagaccagtaagtggagttttggacatgctgctgctgtcaactcactggctgaaggagcacttcaaggaatgggaggcctttcactgggtcc

SEQ ID NO: 594045 - DNA, 120 bp, Artificial Sequence
  ENSG00000173575_51 (sequence is synthesized)
agctctgattcgggtcaccactcctgcactttggcaccccatcccattccagcctagttctggcctcccactttgacgggcacttggaggaggagctgactgtgtgtgtaccagcttcac

SEQ ID NO: 594046 - DNA, 120 bp, Artificial Sequence
  ENSG00000173575_52 (sequence is synthesized)
tgggatgtgtttccccagtcaaggaacaggggatcttcagagtcatgaatgttttcttgccagggtcagtgttcccaggaccttagtgcatggtcggggcaggaactggtgcatggaggc

SEQ ID NO: 594047 - DNA, 120 bp, Artificial Sequence
  ENSG00000173575_53 (sequence is synthesized)
tgctgggacctggtgaacagtgtgtgatttggttgatttggttcactctgacatgatggatgctgctgatggggagtggcgagttggggcaagcgggtggggacaagcataggacttgaa

SEQ ID NO: 594048 - DNA, 120 bp, Artificial Sequence
  ENSG00000173575_54 (sequence is synthesized)
ggggagcaggtacacccctcaaatgtgttcttgggagaagtgatacactcggcctcattatgtgaaacctgtgggtggggttggggtggagaagtagagagagggcaacagcttccacaa

SEQ ID NO: 594049 - DNA, 120 bp, Artificial Sequence
  ENSG00000173575_55 (sequence is synthesized)
ctgcttcatctctgccaacactaatttttcccacactgtctttgtacatttcagagctttggtctcctgagtgggcctccttttcccactgtgccagggaaggtaggtttctctggctga

SEQ ID NO: 594050 - DNA, 120 bp, Artificial Sequence
  ENSG00000173575_56 (sequence is synthesized)
ctgagtactgtgagtgaggcaacactgatgccagcatgggtcttacttgactggggagtaggctgagtgaggggtagggtggggtaggtggggagtagtgtggccagggaactggaatcc

SEQ ID NO: 594051 - DNA, 120 bp, Artificial Sequence
  ENSG00000173575_57 (sequence is synthesized)
ctggtggatttctgattcctgtggtgagaaggaaagctacaggacctggagaaggggatgcagaggcaggcctgctgaccaacttgttgcaatcacaaaggtgggggtcctggtgcaggc

SEQ ID NO: 594052 - DNA, 120 bp, Artificial Sequence
  ENSG00000173575_58 (sequence is synthesized)
agtgaacaggcttctaatgtggggttcagtagtgccagcaagtgggggaaactttcagtattgcgctaggtcaacacttcctgctgcatttccttccctttgcacagcttgaagaaatag

SEQ ID NO: 594053 - DNA, 120 bp, Artificial Sequence
  ENSG00000173575_59 (sequence is synthesized)
agtagacagaatcacacatcatgtggtgggcagatggaaataagtacctgtggtgaacaagtttctactgtagttggagatcattagaattgaattcagtttctcttagaatataatcag

SEQ ID NO: 594054 - DNA, 120 bp, Artificial Sequence
  ENSG00000173575_60 (sequence is synthesized)
gtataaacctaagttaaactttttcccaaacaaggagcatccaaagacacagtgacttgagctatagatagtaaaaatcatacgagagttgaactgagtcaggtttaggaagcaagtttg

SEQ ID NO: 594055 - DNA, 120 bp, Artificial Sequence
  ENSG00000173575_61 (sequence is synthesized)
gttgcatcaattaagcaggctcttttcaattgactgatgctggggccttcagttttattctcagtatagattgccagtattgttaagagtatccaaaggcctttctagatggagacagaa

SEQ ID NO: 594056 - DNA, 120 bp, Artificial Sequence
  ENSG00000173575_62 (sequence is synthesized)
taactgacttgaacatacagtgtgcctgtaagtgtccaggctcagagctggtgaaaacccttctgttgggcgtgtgcagggttaaactcctgaagtaacttgtgaggacttcagtgcttg

SEQ ID NO: 594057 - DNA, 120 bp, Artificial Sequence
  ENSG00000173575_63 (sequence is synthesized)
ctggtgtcctgggcagcaccatgaatgcctttaccaagacatgccaagttggatcccccgaatgaagcagatgtggctgtggtgtgacccttgctccctgctacacagagcatcgcaggg

SEQ ID NO: 594058 - DNA, 120 bp, Artificial Sequence
  ENSG00000173575_64 (sequence is synthesized)
ctggcctgtgtggtttccagatgagggtctgggtcccggaagcttgtgttgagagctcagtggacccaccccgcttgctgaaccctcacagttcttggggttgtccagcctggacttgta

SEQ ID NO: 594059 - DNA, 120 bp, Artificial Sequence
  ENSG00000173575_65 (sequence is synthesized)
gcacacatgtcctgaagcaaagctccggtgactgcatgagccacctggccacagtcctcccatggagggcctgccgtgacgctcagtggagagggcagggcctgtgtctccacttaggcc

SEQ ID NO: 594060 - DNA, 120 bp, Artificial Sequence
  ENSG00000173575_66 (sequence is synthesized)
acacagtgatgaggaaaccacagatggagcttcttgccgataatactgactctagcccatgattgccttgcccaagccaaagaggaaggttaggttggcttgtcgagcccttgagcgttg

SEQ ID NO: 594061 - DNA, 120 bp, Artificial Sequence
  ENSG00000173575_67 (sequence is synthesized)
ggagatggggtgggaaggaggtgagcccctgcagagagttgggtagtgtccttcaggaatgaaaggaggggcaaaggagtcaccagaggtcctgcatttccatcagggtttccacagtca

SEQ ID NO: 594062 - DNA, 120 bp, Artificial Sequence
  ENSG00000173575_68 (sequence is synthesized)
tcagggcttctctcttgagttgctgataggagatgtgagttatgcccagagatgtcttatcgtgaggaaaaagaaacttccttttgttcacatttaggactctcagtgccatatgaagta

SEQ ID NO: 594063 - DNA, 120 bp, Artificial Sequence
  ENSG00000173575_69 (sequence is synthesized)
gcaaaaggcagtatcggccagatcagtgttacattgattctaaaattacagtgtccccattagacaactattttaggtgctggagtatgtttgaagagtgtgctgggaaaaaggaagcat

SEQ ID NO: 594064 - DNA, 120 bp, Artificial Sequence
  ENSG00000173575_70 (sequence is synthesized)
ttcttcattgatttaaatcagtatgaatattatatgcctaaataaaaaatttgcacaggtaaattctctcacttgtgaatgggagaagctgccccaggaatctgtgaggatggtattccc

SEQ ID NO: 594065 - DNA, 120 bp, Artificial Sequence
  ENSG00000173575_71 (sequence is synthesized)
tggagtctggctttgaaagatttcattgttggtagaaataacaggttgagaaagagggagttagcatcacctaaaacctgcacgtgaacaagggttgacatgatacactatggccttaga

SEQ ID NO: 594066 - DNA, 120 bp, Artificial Sequence
  ENSG00000173575_72 (sequence is synthesized)
aaagggccaggtgaaaccccaagctaatcactgcggtctttcagagccggacagacaggtgccagcagagcccggggctcactctcctttcagtcattcctcagcccttcgaagggaagc

SEQ ID NO: 594067 - DNA, 120 bp, Artificial Sequence
  ENSG00000173575_73 (sequence is synthesized)
ccaaacactttgcacgctgtgctgcagacattctggcctggtgtgtctgaaagttgcatcagtcctcacggtgcaaacacagttgatttaggaagtcacacaatgacactgaaatcctac

SEQ ID NO: 594068 - DNA, 120 bp, Artificial Sequence
  ENSG00000173575_74 (sequence is synthesized)
agaccaaaatccacttgtcagcaggagcagcagcccaggcccagcaccagcggtcttccggctcctctgagggctgccacgttgggcgaggggagccatgccaagggtccaggctgcttt

SEQ ID NO: 594069 - DNA, 120 bp, Artificial Sequence
  ENSG00000173575_75 (sequence is synthesized)
aggccatctgtgccccactcatctggggacagatggtttttctttattgtaaaattgtggacttttaaaacctgttgactaaacagtaattaatttatatttgtgaaaaatgccactgtc

SEQ ID NO: 594070 - DNA, 120 bp, Artificial Sequence
  ENSG00000173575_76 (sequence is synthesized)
ctagtgatttctgatgtaaataatgttgtttatatagtatgtattaaattttcctacattgtaaaactgctgtacttttgattcttgtatattaaaaagtgttactgagcatttttagaa

SEQ ID NO: 594071 - DNA, 120 bp, Artificial Sequence
  ENSG00000173575_77 (sequence is synthesized)
ctgtttctggcttctttattgttagatgtcaagaattttttttttcttttttcacacccttattgtatctcaaccaagaaatctttatgctgcatattacagaaataaaagatgattgag

SEQ ID NO: 594072 - DNA, 120 bp, Artificial Sequence
  ENSG00000173575_78 (sequence is synthesized)
ccatcatatttacccattttaataacacaacataggtaagaaacctaaatcgcacggtaggattgcacaaatgacaatgactccttgtaactcttttttaaaagcctaaaagtggtgatg

SEQ ID NO: 594073 - DNA, 120 bp, Artificial Sequence
  ENSG00000173575_79 (sequence is synthesized)
gtaagtaaccctaccatgctagagatttctagaagatttgttgtgtaatatttttatatcgattacttatttctaactattttcgagggggcatcaaattagaaattagtatagtcattc

SEQ ID NO: 594074 - DNA, 120 bp, Artificial Sequence
  ENSG00000173575_80 (sequence is synthesized)
ttggaaatacttccatctttagcagattgtggcactgtttcacggatgaagataaagggaaaagacagtagccaggtgaaattttggggaaactgtaggagaaatcttaaaattctggta

SEQ ID NO: 594075 - DNA, 120 bp, Artificial Sequence
  ENSG00000173575_81 (sequence is synthesized)
tactgataaagaggattggacacatatgtgctgagaaaatattacaaaatgaaatgatgattgccattttgaagtgaaagaaggtgatttaaatatgacattaaagcaaaaggagagaat

SEQ ID NO: 594076 - DNA, 120 bp, Artificial Sequence
  ENSG00000173575_82 (sequence is synthesized)
gaattatttcatggctttgctgacttgtttaatcttgcaatttacataattagaaatagagatatttgagagaatacttgaaaggatttaggcacttttattttattttattttattatt

SEQ ID NO: 594077 - DNA, 90 bp, Artificial Sequence
  ENSG00000173575_83 (sequence is synthesized)
taggcacttgagacagagtttcgctgtgtcgcccaggctggagtgcactggcactatcttggctaactgcaacctctgcctcctgggttt

SEQ ID NO: 594078 - DNA, 89 bp, Artificial Sequence
  ENSG00000173575_84 (sequence is synthesized)
acaggcgtgagccaccatgcccagttgcatttaggcactttaaaagagaagtgaagccagttgcagtggctcacacggcaggattgctt

SEQ ID NO: 594079 - DNA, 120 bp, Artificial Sequence
  ENSG00000173575_85 (sequence is synthesized)
gaggctgaggcggcaggattgcttgagcacaggagtttgaggccaacctggggaagattgtgatacccgttctctaaaaaaaaaaaaaaatagagagcgggaagtgatagaaaaggcgag

SEQ ID NO: 594080 - DNA, 120 bp, Artificial Sequence
  ENSG00000173575_86 (sequence is synthesized)
tgtctttgaattctaagttagaaattaaatatataggcttatttgctagattggctgaataaatcctttccttggaatttattccatcaggaaactgatgtgcttgggtcctcagtaatg

SEQ ID NO: 594081 - DNA, 120 bp, Artificial Sequence
  ENSG00000173575_87 (sequence is synthesized)
aaatatcagacaagtgatacgtctctgagaagttgacattcatgttaatggcactagaattctatctgtgaaaaccagtatttaattgccaaagagtgtgatagggaaaatgtggtcaga

SEQ ID NO: 594082 - DNA, 120 bp, Artificial Sequence
  ENSG00000173575_88 (sequence is synthesized)
gaagcaccaatgtagaagtctctgagctccagtggtcattgaatgggttttaagaggaagttgtggttgttgaactgcatctggcccttgtataatggattggtgctgctggctatacag

SEQ ID NO: 594083 - DNA, 120 bp, Artificial Sequence
  ENSG00000173575_89 (sequence is synthesized)
acaagagggggcccagggtattgccctcctgtgaaaggtatcaagagaaagattcttatagttcaataggagaactactagaccccaggggtgaggagaagaggaatgatgttgacaagt

SEQ ID NO: 594084 - DNA, 120 bp, Artificial Sequence
  ENSG00000173575_90 (sequence is synthesized)
acatcaaggtcaaagtgtgtgtgtcttggctacctcgaagggtattttgactttatctcctaggtattcgtacagctgagtacagtggcattatgaaatagttttatttagaaagcttca

SEQ ID NO: 594085 - DNA, 120 bp, Artificial Sequence
  ENSG00000173575_91 (sequence is synthesized)
ggggtggaagatgattctcgcctgttgctggggatttatgaacatggctatggaaactgggagttaattaaaacagacccagagcttaaattaactgacaaactttaacctagctccagg

SEQ ID NO: 594086 - DNA, 120 bp, Artificial Sequence
  ENSG00000173575_92 (sequence is synthesized)
gattccctgctcctggaaggaggaaatccacgacggctgggatgctctagcagatgaagccacaagcccctcctacctgagttgttctaccctgttaacagcacagattctgccggtgga

SEQ ID NO: 594087 - DNA, 120 bp, Artificial Sequence
  ENSG00000173575_93 (sequence is synthesized)
tttggtctccctcttgaacgagggatgacaaagatgataaagacaggccatccataaaaagactttcaccttcgtgagggagataaagctggagtgcatagcacgtgatgctgagctggt

SEQ ID NO: 594088 - DNA, 120 bp, Artificial Sequence
  ENSG00000173575_94 (sequence is synthesized)
agggagccgcacgccgaggggaaaaggaagggaactctagttgggactttccggtgggcggcttctttcctggacgcgtttgctcctggcagtcttgtccgcccttgcctgtagcggtcc

SEQ ID NO: 594089 - DNA, 120 bp, Artificial Sequence
  ENSG00000173575_95 (sequence is synthesized)
gcaccctgtagtgtgttcttttgcccatttccgggaatggtttatcctctttgagaagcggctgcttttggagaaaaagtgcaggcactatttataaattttaaaggcactatttggaaa

SEQ ID NO: 594090 - DNA, 120 bp, Artificial Sequence
  ENSG00000173575_96 (sequence is synthesized)
tcttaaaatagaaaatttgcccagttttacattttcccttttcataccttagcgtcccttctccccgcccccgttcagtgtgaagagatgagtgggtttaattttgttacaattgaccaa

SEQ ID NO: 594091 - DNA, 120 bp, Artificial Sequence
  ENSG00000173575_97 (sequence is synthesized)
aacgtttgagtgtcagaggcggatacttttattttagtgaaaacctcttgacgggtgttaacagctgtttaatacatggctcataaacaaagggaagattatttgaacttgtccccatgc

SEQ ID NO: 594092 - DNA, 120 bp, Artificial Sequence
  ENSG00000173575_98 (sequence is synthesized)
tttatcttctgaagcttaaaaatgtactgtttgtgcaaatcatgatctgtttcacattccttggagtaccttgttagtgatgaagtaataaagcctctaagatgtttttgttgtatgacc

SEQ ID NO: 594093 - DNA, 120 bp, Artificial Sequence
  ENSG00000173575_99 (sequence is synthesized)
tctgtatattaatttttaaaagtacatatgaatgcattttttgatgtgttctttatgcattttcatattataaattttaaatcatgcagtttaacaaggatgtgattcattatgtggttt

SEQ ID NO: 594094 - DNA, 120 bp, Artificial Sequence
  ENSG00000173575_100 (sequence is synthesized)
tccttcccaatttttacttttctaatttttataaataatacacttttctattaggctagtgaatttgaaagttttgaacatgatgtgttactaatatgctgaattctatttattttattt

SEQ ID NO: 594095 - DNA, 120 bp, Artificial Sequence
  ENSG00000173575_101 (sequence is synthesized)
gactgaaagcatattgagccttgctttagaaaataagttaccaaatttttttgcattgagttgtcacccagtttgtagtgctgtcttaattgaattgcccatgtaaattactagattaaa

SEQ ID NO: 594096 - DNA, 120 bp, Artificial Sequence
  ENSG00000173575_102 (sequence is synthesized)
ttgaggacagaaaagttttttactcatcctaagctgtttttttctggaaagtaatgacaatttgaagaaatgagaacctccagatatatttggcaaattattaaagattcagcactaaaa

SEQ ID NO: 594097 - DNA, 120 bp, Artificial Sequence
  ENSG00000173575_103 (sequence is synthesized)
ggattgctgtctgttttattgtgtttttctaatttggattcgttttttaaagcatgaccttgagattgctaatatgccacaccctaattttttggtagcaatttatgaaagttgagttgt

SEQ ID NO: 594098 - DNA, 120 bp, Artificial Sequence
  ENSG00000173575_104 (sequence is synthesized)
tgtaatgtacagtttttctgtcagtaaatttcagtttttaggtttttgtactgcagaaaaatgaccttgtcggtttagccattgctgcattgcaccattttacatacaaggcaaattttt

SEQ ID NO: 594099 - DNA, 120 bp, Artificial Sequence
  ENSG00000173575_105 (sequence is synthesized)
tctttgaagaatccaggatatctaaacttgtaactgagggccatagagaagccttgtagtagtaaattatagtaaatagacatatcagaaagttatatgaatgaaaaaatgtacatttaa

SEQ ID NO: 594100 - DNA, 120 bp, Artificial Sequence
  ENSG00000173575_106 (sequence is synthesized)
aaacaaaatcacttaaaggaccctttgactgatgcctctcagtttatatttttatgtgactttatatttcttttgatacacttgacattttaggaaattttgatgtgatttatcaaaacc

SEQ ID NO: 594101 - DNA, 120 bp, Artificial Sequence
  ENSG00000173575_107 (sequence is synthesized)
tttacttgatggttagagttcctgcatttatgaaatcaaatctgtaataacagaaatcctggaatactcttaatatatacttctattttgtgtttgttactgtgattaatatttgcagtt

SEQ ID NO: 594102 - DNA, 120 bp, Artificial Sequence
  ENSG00000173575_108 (sequence is synthesized)
gtatattttacatttaaattattttaaggtttgcatttgtatgcttaagacattgatttcctgttggtagatgtattttatcctcacaatttagatgtagctgctttaaatttattgatg

SEQ ID NO: 594103 - DNA, 120 bp, Artificial Sequence
  ENSG00000173575_109 (sequence is synthesized)
gcctgggaggtgaacaagccttcagctgcctttgctatgggaatacagtttccagtcactcagcctctgaagaagcttcgggttcagactcaggcagtcagtcggaaagtgagcagggaa

SEQ ID NO: 594104 - DNA, 120 bp, Artificial Sequence
  ENSG00000173575_110 (sequence is synthesized)
tattctgatactgtgctgtgttctcaatattaggaggtttatctatcacaaaagtgcaactcagatgttctttaacaaatatgcttactagttaaaaagcaacagcagtatgtgagtggg

SEQ ID NO: 594105 - DNA, 120 bp, Artificial Sequence
  ENSG00000173575_111 (sequence is synthesized)
aatctcttttagctgggttgcaatattaaatttttcttctctctgccctttttacttctaagattgctttatatgagataatatggagttaatactttgtgtaatattaatattattttt

SEQ ID NO: 594106 - DNA, 120 bp, Artificial Sequence
  ENSG00000173575_112 (sequence is synthesized)
gctttctcaatagacatattactgaaaataatcattcttcgaatttcttaatttcttaaacagtgaggttgcataacttataaaaaaggaataaaagtaaaggaaaacaagctattttag

SEQ ID NO: 594107 - DNA, 120 bp, Artificial Sequence
  ENSG00000173575_113 (sequence is synthesized)
aagaattatcctaaactgttaccaaactttatttgggcatcatgaatttagaacacagtgacttaagtttatctttgtttagcagatcttttctttatagtaactttttttaaagcacct

SEQ ID NO: 594108 - DNA, 120 bp, Artificial Sequence
  ENSG00000173575_114 (sequence is synthesized)
actgtgtgctagatgttgcgctgggtgctttacgtataatacctgtaatcttcatgatagtcttcaaagctgatggcattctttcctgctactgatgaagaattgactcagagagtctta

SEQ ID NO: 594109 - DNA, 120 bp, Artificial Sequence
  ENSG00000173575_115 (sequence is synthesized)
ccctgggatggaggatctgtctctctctctctctctcctttttttttttttggtggagatgaaggggtgggtctatggtacatcacctgagttgtggggtaaatgtagagagtgtcaatc

SEQ ID NO: 594110 - DNA, 120 bp, Artificial Sequence
  ENSG00000173575_116 (sequence is synthesized)
gagattattatgacaggtatgcaaaaggctgtgagacaccaggtgccaacctttgccaggagctgtttctagggagaaagtgacgtatacatgaatgtatttatctatcaaattactgaa

SEQ ID NO: 594111 - DNA, 120 bp, Artificial Sequence
  ENSG00000173575_117 (sequence is synthesized)
gatctcatcatgcatgtgtcagccacagcgaatcccatgtcttggttataggttttatgttttgttttgtgggtcatagggagcacatttcacctgtgcaggaaaagagttttctgccgt

SEQ ID NO: 594112 - DNA, 120 bp, Artificial Sequence
  ENSG00000173575_118 (sequence is synthesized)
cttttgaggaaatctagtgaagaggtcgccataaaatattagagtcaacaaccaaaattattaagctctgtgcgaggctgtcagccacactaggtatcagggatcccgagatgggtacca

SEQ ID NO: 594113 - DNA, 120 bp, Artificial Sequence
  ENSG00000173575_119 (sequence is synthesized)
gcccacagtccttacctgccacgagcccataattgaagagtcaaagtcttctgaagctgcaccctctttacttcagtacaatgccaccagtagtacgatgagccgaagctttacattgtg

SEQ ID NO: 594114 - DNA, 120 bp, Artificial Sequence
  ENSG00000173575_120 (sequence is synthesized)
agagtagcaagtccagggagagctaaagaggttttatctgtatttcctaatttcaaatcttggataatttaacctcatagcagctttggttttccctgggctgatgatgtgcgtcatttg

SEQ ID NO: 594115 - DNA, 120 bp, Artificial Sequence
  ENSG00000173575_121 (sequence is synthesized)
cactgtaccttgaatttacagtgggaaaatttcatataaacgtgtcaaagtcgtgctttgtttttggaagatctggtaacagcagcccgcattagcagagagctgtagctgagtagctgc

SEQ ID NO: 594116 - DNA, 120 bp, Artificial Sequence
  ENSG00000173575_122 (sequence is synthesized)
cacctcgttgggagactgcccctcgctcccacccttctctattgtctggacccagtgggcatcttgccctgcgttcttctagtaggtctgtatttctatttgatgtcactttccttttgc

SEQ ID NO: 594117 - DNA, 120 bp, Artificial Sequence
  ENSG00000173575_123 (sequence is synthesized)
ctgaaggactttttctgctggtgataaactctttcagtgtttgtatatatgcctgaaaaagtattttgccttcatttttgaaagtagtttttgctgagtgtatacatttttggctttaca

SEQ ID NO: 594118 - DNA, 120 bp, Artificial Sequence
  ENSG00000173575_124 (sequence is synthesized)
gtttctttcagtgctttaaagatgtacctctgctatttacttgcattgttttgtgatgaaaaatctgtcatccttatctttgttcctctttacataatgttccttttaaaaaaaatcact

SEQ ID NO: 594119 - DNA, 120 bp, Artificial Sequence
  ENSG00000173575_125 (sequence is synthesized)
gattatgatgtgccttggtgtatttttccttggtttcttgtgcttggaaatttttgaacttcttggatctgtgggtttattgtttccataaaatttggaaatttttacaatcttcttcaa

SEQ ID NO: 594120 - DNA, 120 bp, Artificial Sequence
  ENSG00000173575_126 (sequence is synthesized)
atattttttctgatcccccactctctcttcttctttggagattctcattacacctatattagcttgcttgaagttgtctcacagctcacttgtattctgttgacttttaaaaaattatgc

SEQ ID NO: 594121 - DNA, 120 bp, Artificial Sequence
  ENSG00000173575_127 (sequence is synthesized)
tttctgtttcactgtggatagtttctattgctacctcttcaagttcactaatactttccttttcaatgtcaagactgctgtgaggcccatccagtgtactttgcattttatacattgtag

SEQ ID NO: 594122 - DNA, 120 bp, Artificial Sequence
  ENSG00000173575_128 (sequence is synthesized)
ttctaaaagttcggaaagttgtttttgggtctttttatatatgttctgtgtctaaccttttaaaacctggaacacagatataacaatggttttgatgtccttgtctgcgaatcttatcac

SEQ ID NO: 594123 - DNA, 120 bp, Artificial Sequence
  ENSG00000173575_129 (sequence is synthesized)
ttgggtcagtttcagttgatacctcctcactgtgggtcttgctcccctggtgctttctgtgcctagtaatttttgtcagatgccagatgtaacatttaccttgttgggtgctggatattt

SEQ ID NO: 594124 - DNA, 120 bp, Artificial Sequence
  ENSG00000173575_130 (sequence is synthesized)
ctgtattcctgtaagtattctggagctttgttatgagttgcaggttatttggaagcagtttcctttttcaggtcttgctgttaagattcgttaggtagaaccagagcagtgctcagtcaa

SEQ ID NO: 594125 - DNA, 120 bp, Artificial Sequence
  ENSG00000173575_131 (sequence is synthesized)
gggctaatgattgcccacccccaaggtaaagagcctcattgcactctacccaattgcgttagtctgttttgcaggaatacctgaggctgggtaatttatagagaaaagagttttatttgg

SEQ ID NO: 594126 - DNA, 120 bp, Artificial Sequence
  ENSG00000173578_0 (sequence is synthesized)
gttcatctggattcatggagtaggcgtttctattcaaacatgcaggctcttttctttatccagggcttgcagcttgattttcaggctgttcttggtttgaaggagttccaccaaggatcc

SEQ ID NO: 594127 - DNA, 120 bp, Artificial Sequence
  ENSG00000173578_1 (sequence is synthesized)
accctaactgcctgcctgactggcttcttccttcctcctctctcactagctgtccccctctggccccctggctctctctgagactcctcccatcctcctcctccagccttctgggcagga

SEQ ID NO: 594128 - DNA, 120 bp, Artificial Sequence
  ENSG00000173578_2 (sequence is synthesized)
caggtgtttcagtttctttaagtgaaatatgaaacagagaagcaccatttctgcctcaagacgcatgtaaagaggtgtagattcagatgctctaaacgtccctgccatctggtccagatg

SEQ ID NO: 594129 - DNA, 120 bp, Artificial Sequence
  ENSG00000173578_3 (sequence is synthesized)
gagtcctcaggcaacccagagagcaccacctttttttactatgaccttcagagccagccgtgtgagaaccaggcctgggtctttgctaccctcgccaccactgtcctatactgcctggtg

SEQ ID NO: 594130 - DNA, 120 bp, Artificial Sequence
  ENSG00000173578_4 (sequence is synthesized)
tttctcctcagcctagtgggcaacagcctggtcctgtgggtcctggtgaagtatgagagcctggagtccctcaccaacatcttcatcctcaacctgtgcctctcagacctggtgttcgcc

SEQ ID NO: 594131 - DNA, 120 bp, Artificial Sequence
  ENSG00000173578_5 (sequence is synthesized)
tgcttgttgcctgtgtggatctccccataccactggggctgggtgctgggagacttcctctgcaaactcctcaatatgatcttctccatcagcctctacagcagcatcttcttcctgacc

SEQ ID NO: 594132 - DNA, 120 bp, Artificial Sequence
  ENSG00000173578_6 (sequence is synthesized)
atcatgaccatccaccgctacctgtcggtagtgagccccctctccaccctgcgcgtccccaccctccgctgccgggtgctggtgaccatggctgtgtgggtagccagcatcctgtcctcc

SEQ ID NO: 594133 - DNA, 120 bp, Artificial Sequence
  ENSG00000173578_7 (sequence is synthesized)
atcctcgacaccatcttccacaaggtgctttcttcgggctgtgattattccgaactcacgtggtacctcacctccgtctaccagcacaacctcttcttcctgctgtccctggggattatc

SEQ ID NO: 594134 - DNA, 120 bp, Artificial Sequence
  ENSG00000173578_8 (sequence is synthesized)
ctgttctgctacgtggagatcctcaggaccctgttccgctcacgctccaagcggcgccaccgcacggtcaagctcatcttcgccatcgtggtggcctacttcctcagctggggtccctac

SEQ ID NO: 594135 - DNA, 120 bp, Artificial Sequence
  ENSG00000173578_9 (sequence is synthesized)
aacttcaccctgtttctgcagacgctgtttcggacccagatcatccggagctgcgaggccaaacagcagctagaatacgccctgctcatctgccgcaacctcgccttctcccactgctgc

SEQ ID NO: 594136 - DNA, 120 bp, Artificial Sequence
  ENSG00000173578_10 (sequence is synthesized)
tttaacccggtgctctatgtcttcgtgggggtcaagttccgcacacacctgaaacatgttctccggcagttctggttctgccggctgcaggcacccagcccagcctcgatcccccactcc

SEQ ID NO: 594137 - DNA, 120 bp, Artificial Sequence
  ENSG00000173578_11 (sequence is synthesized)
cctggtgccttcgcctatgagggcgcctccttctactgaggggcctgtggcggtgcaggcgcaggtgcaggtggacagggactggaatgggggtcatggagaagcgggcctggaaggagc

SEQ ID NO: 594138 - DNA, 120 bp, Artificial Sequence
  ENSG00000173578_12 (sequence is synthesized)
attgcagaacacagcagggtggagacgtctcctccgctgcaggcgtgcagtgaaggtcattcattacaccagtgggtcccgccagcctctcatctgcgggaaagtggcttcctacctggg

SEQ ID NO: 594139 - DNA, 120 bp, Artificial Sequence
  ENSG00000173578_13 (sequence is synthesized)
aattttatactgccatccaaaaaaacatttcttgaactctgagttcatcttgcacgctccttcatttagacatgtgtttctaatcactgtttagttcagaaggttctaagacatgaaagg

SEQ ID NO: 594140 - DNA, 120 bp, Artificial Sequence
  ENSG00000173578_14 (sequence is synthesized)
attctgggaaaggtgcttccttggagactttacagggcctaaagctcattgtgataactgcacgatgctgacaagacaatgcctcccttccctgactgtaaggttgtccctactggttta

SEQ ID NO: 594141 - DNA, 120 bp, Artificial Sequence
  ENSG00000173578_15 (sequence is synthesized)
ttcactttggaggcgcctggctccgtattcctcaggtactgctggatgaggctgtctggaagacaaaagtcgccataccctgagataagcagtcatgttgatatctggattctaaaaatc

SEQ ID NO: 594142 - DNA, 120 bp, Artificial Sequence
  ENSG00000173578_16 (sequence is synthesized)
cacaactagactggagaaatgttctgtatcctggattcaagtcctagcccacgaactggcccttaaaaatttagctcataaatatttgattgaaggaatgaatttaataagtgctacctt

SEQ ID NO: 594143 - DNA, 120 bp, Artificial Sequence
  ENSG00000173578_17 (sequence is synthesized)
ctgcactaagtatttattcagagaatacaaagatgaatgagatacagttgctaccctccaggggccaacagcccagctccaaaggctcacctaccttggtgaacacccaccttggtgaag

SEQ ID NO: 594144 - DNA, 120 bp, Artificial Sequence
  ENSG00000173578_18 (sequence is synthesized)
gcatctagggtggactcctccgacatctcatccttcccaggtggatagtgagctgacttcacatttatcactttgtacctaaagtgtcctcctcctatttggttgatggtggtagctccc

SEQ ID NO: 594145 - DNA, 120 bp, Artificial Sequence
  ENSG00000173578_19 (sequence is synthesized)
cccacccacccacactccaaacctcaagtcctcttggaggcctgtgttttcttttcctcaactcccacagccaggtccaaatgactatgcctgtctagtggctttcagagttgactcatt

SEQ ID NO: 594146 - DNA, 120 bp, Artificial Sequence
  ENSG00000173578_20 (sequence is synthesized)
cttgccattgcatgcccatggtttcatccctgaaacagggcctcacttccttggcatctccccactgctcctctctttccccaccaggctgttctctgcccttacaccaggtgcttcaaa

SEQ ID NO: 594147 - DNA, 120 bp, Artificial Sequence
  ENSG00000173578_21 (sequence is synthesized)
acccttagtggctcctcattacttacaaatgaagtccatacactttagcaaggctttcaaggcctccacaatccgatgccagccaacttttccattcttattccactctaagcctcctcc

SEQ ID NO: 594148 - DNA, 120 bp, Artificial Sequence
  ENSG00000173578_22 (sequence is synthesized)
cacagcagcttgggatccaaccccaaaacaccactggccttctttcagacacatatctccccagtaccctacctctaggcatttgtcatgctgtcacctgggcctggaacatgttctagc

SEQ ID NO: 594149 - DNA, 120 bp, Artificial Sequence
  ENSG00000173578_23 (sequence is synthesized)
tgacaggccagcttctccaggaagccctccctaatctgcaaattagaacattctctgggttgtcgtgggattctgcttgtcccctctaaaataaaacaaccttgtgttgtagttacacac

SEQ ID NO: 594150 - DNA, 120 bp, Artificial Sequence
  ENSG00000173578_24 (sequence is synthesized)
atgcaatgtcttatctccctgccccatcaggctgcaagcttcttgagggcaggaacctggtcttgaaccccagtgttctatcactgtgtgctcagtgggagcaaagaatcaacagctgtt

SEQ ID NO: 594151 - DNA, 120 bp, Artificial Sequence
  ENSG00000173578_25 (sequence is synthesized)
attatccttcagatttatgcttcttggggagccatgccctggggcacactttaccttctttgtcccaggctgcttctctataaatattaacctttctttcctagtctacactctcagaga

SEQ ID NO: 594152 - DNA, 120 bp, Artificial Sequence
  ENSG00000173578_26 (sequence is synthesized)
gtagtagaaagagagtagggtgtagtagtagagagattgcttatctctctctgtggcgatggctatgcttcaccttgccttctagttcatggtacgcatccctgcctctcacactggccc

SEQ ID NO: 594153 - DNA, 120 bp, Artificial Sequence
  ENSG00000173578_27 (sequence is synthesized)
attgcttcacacccaagggcataaataaaagccactctctaaactttgccatgccacaaagacctgggcccaatctgtgaacctgatttggctctggcgtggggatttggaaaagcttcc

SEQ ID NO: 594154 - DNA, 120 bp, Artificial Sequence
  ENSG00000173578_28 (sequence is synthesized)
catgcgattctgacatgcaccttcattaggtacatttggctgcaacttttttaaaaaatgaggagtccagagtcttctacagtcccttgagcagggatttgcacacagaagacactcaat

SEQ ID NO: 594155 - DNA, 120 bp, Artificial Sequence
  ENSG00000173578_29 (sequence is synthesized)
atcttgttattgaataaagtagataccaatgtagccctctggccaacctagagagagcttgtaaggcatttccccttcagttccagatgcaacttcaatgatctatttgccaatggggca

SEQ ID NO: 594156 - DNA, 120 bp, Artificial Sequence
  ENSG00000173578_30 (sequence is synthesized)
gtagatctggaggagtttatcggtctagggaagagccagggcctagttttaataatgaggccagtagcacctgctggacagggctgggcggcataccagtgaagggaaggggctcccatg

SEQ ID NO: 594157 - DNA, 120 bp, Artificial Sequence
  ENSG00000173578_31 (sequence is synthesized)
gacctacctgccagcctacaggtggggccactactcaccaccgatgggagaaacagcataaggaagagataatgaggtagtttgtggtatcagagctaagcctatgggcttctagttggc

SEQ ID NO: 594158 - DNA, 120 bp, Artificial Sequence
  ENSG00000173578_32 (sequence is synthesized)
ctaatctttcaaacacagtttcacactgattcttaacattttgttcaacttttactcagagggcaggctgagccagggagcaaaaaggcaaaggactcctactcacatacccacttagca

SEQ ID NO: 594159 - DNA, 120 bp, Artificial Sequence
  ENSG00000173578_33 (sequence is synthesized)
aaaccaaagcaccttgggctttgaacccacccttcttagaaggcaggtttgggggttgaggccccttgagaagctcacttcaccctctccccatgccatcccattcctacccatcccaag

SEQ ID NO: 594160 - DNA, 120 bp, Artificial Sequence
  ENSG00000173578_34 (sequence is synthesized)
atgcttctcttgtatttctttcagcacatccagccatctccctgggagcgtttcatatctgactctttatacttccagtgatgttttggcatccctaatagactggctcccaaggcagtc

SEQ ID NO: 594161 - DNA, 120 bp, Artificial Sequence
  ENSG00000173578_35 (sequence is synthesized)
tttaatcaggagtcttcccctaatctagctcctcaagaacccaagggaagaggcacaaagagaagtatgaataggaagatagaagggtaacccagtcagagagggagtggcagatgacac

SEQ ID NO: 594162 - DNA, 120 bp, Artificial Sequence
  ENSG00000173578_36 (sequence is synthesized)
tgctgaaaaggagtttccagagagttgcacaccatgagccacgctgtctgtccctgaccacaacctccactggccaccacctcctgggcttcccctccctccacccacagaaaccattgc

SEQ ID NO: 594163 - DNA, 120 bp, Artificial Sequence
  ENSG00000173578_37 (sequence is synthesized)
tcaatctcaactggactcttgcaggcctatctctccctccaaacagagatgtcctggacacagagctgcagacctctaaccactcctggaacataaaaaaacccacggtggttctacagc

SEQ ID NO: 594164 - DNA, 120 bp, Artificial Sequence
  ENSG00000173578_38 (sequence is synthesized)
atttacacctccagtttccctcagacagaatccagaagagaagaacctcgctgatctctgagcggagcatgtctccaagctcaggccagccccagaactccaatggcctcaactggagtg

SEQ ID NO: 594165 - DNA, 120 bp, Artificial Sequence
  ENSG00000173578_39 (sequence is synthesized)
gaaatccctcaaaggcacaaacccagttcctaccatctccctcagtgcctggcaatgtttgtggttggttgagtgagttaacaggagaccatcttttggccttttttctacctctgtttt

SEQ ID NO: 594166 - DNA, 120 bp, Artificial Sequence
  ENSG00000173578_40 (sequence is synthesized)
ctcttactatacttgcctacatctcatcttctggtcaacaccaggtactcaccccatgagcttcttgtgaacttgtctggggcccaccggcctaaacatcatcttttttgtttggaatta

SEQ ID NO: 594167 - DNA, 120 bp, Artificial Sequence
  ENSG00000173578_41 (sequence is synthesized)
agctttgttgaacttttcacaggtttcatttatgcaaatgcctgtgatgggacaaaaaggtctgcaaacatggaaacctggtctaaagatgtccaaagtaaactgtctgtggagtcgaat

SEQ ID NO: 594168 - DNA, 120 bp, Artificial Sequence
  ENSG00000173578_42 (sequence is synthesized)
gacatttgagccctggacctaaactccaaatccaagctctttcccactgtgaccttgggcctctcaaggctcagtttcctcacctataaactgtagagaagccaataacagactcatcca

SEQ ID NO: 594169 - DNA, 120 bp, Artificial Sequence
  ENSG00000173578_43 (sequence is synthesized)
cactatgaggctgtgcataaggtcatgtatgtaaaactacttgctttgttgatcattctgtcccagataagtatgaattattatgcatcatttcattaaacaagaaagcttcactgtgtt

SEQ ID NO: 594170 - DNA, 88 bp, Artificial Sequence
  ENSG00000173578_44 (sequence is synthesized)
ctttaagtgaaatatgaaacagagaagcaccatttctgcctcaagacgcatgtaaagaggtgtagatttctgcagtctcgccctcctg

SEQ ID NO: 594171 - DNA, 120 bp, Artificial Sequence
  ENSG00000173581_0 (sequence is synthesized)
aacggcgggcctcacctggacccggggactcttcaacgaggggcgctagcctggcccgactgggcgagtccccgcgtccctgcccgttccgtcgctcagttccacgacacgctcccctgc

SEQ ID NO: 594172 - DNA, 120 bp, Artificial Sequence
  ENSG00000173581_1 (sequence is synthesized)
cgccccgcctgttcgcgggtgggtgggcgcttccctcggctccccgtgacactttgcagacgctccccggcgccgggcatgggcgccgccgccgtcggtccccgagccggattccgcgag

SEQ ID NO: 594173 - DNA, 120 bp, Artificial Sequence
  ENSG00000173581_2 (sequence is synthesized)
cggtgcccctgaggccctcggctgctggggtccgtaggaagccgcgccatgaatgaccggagcagtcggaggcggacaatgaaggacgatgagaccttcgagatctccattcccttcgat

SEQ ID NO: 594174 - DNA, 120 bp, Artificial Sequence
  ENSG00000173581_3 (sequence is synthesized)
gaggcaccccacctagacccacagatcttttacagtctgagcccctctcggagaaacttcgaggagcctccggaggctgcgtcctccgccctggctctgatgaacagcgtcaagacccag

SEQ ID NO: 594175 - DNA, 120 bp, Artificial Sequence
  ENSG00000173581_4 (sequence is synthesized)
ctgcacatggctctggagaggaactcctggctgcagaagcgcatcgaggacctggaggaagagagggacttcctgcggtgccagctggacaaattcatctcttctgctcggatggaggca

SEQ ID NO: 594176 - DNA, 120 bp, Artificial Sequence
  ENSG00000173581_5 (sequence is synthesized)
gaggaccactgccggatgaagcctgggcccaggcggatggagggggacagccgtggtggggctgggggcgaggcctcggaccctgagtcagcagcctcctccctcagcggagcgtccgaa

SEQ ID NO: 594177 - DNA, 120 bp, Artificial Sequence
  ENSG00000173581_6 (sequence is synthesized)
acggggtcctctgccggtacaagaagatcctgggcaccttccagaagctcaagagcatgtcgcgggccttcgagcaccaccgcgtggacaggaacaccgtggcgctgaccacgcccatcg

SEQ ID NO: 594178 - DNA, 120 bp, Artificial Sequence
  ENSG00000173581_7 (sequence is synthesized)
ccgagctgctcattgtggcccccgagaagctggccgaggtgggcgagttcgacccctccaaggagcgcctgctcgagtactcccgccgctgctttctggccctggacgacgagacgctca

SEQ ID NO: 594179 - DNA, 120 bp, Artificial Sequence
  ENSG00000173581_8 (sequence is synthesized)
agaaggtgcaggcgctcaagaagagcaagctgctgctgcccatcacctaccgcttcaagcggtgatcgcaccacgcctccgcgcctccacccgggccttcctcccccgtggaccccggtg

SEQ ID NO: 594180 - DNA, 120 bp, Artificial Sequence
  ENSG00000173581_9 (sequence is synthesized)
cttcctcccccgtggaccccggtggatgacctgcccctctccccgccgcgcccctgcccctcctcctcgctccctgggttgggggctcccttagccgggcccccaagcgcgacggccccg

SEQ ID NO: 594181 - DNA, 120 bp, Artificial Sequence
  ENSG00000173581_10 (sequence is synthesized)
cgccggcacccccttccgcttgggctgcccagccctgtcctcgccgggccccttcctcctggaaaaccaggcaggcgggtgcccccccctcgagtgggggactgtacagaccccgtctcc

SEQ ID NO: 594182 - DNA, 120 bp, Artificial Sequence
  ENSG00000173581_11 (sequence is synthesized)
gccctggccccgcggaggagctgcccacctgattcccggacagacctccccaactccgcgtgagacagagaattattcagataatttaaattaaaaaacgacgtgaaaatttggaataaa

SEQ ID NO: 594183 - DNA, 120 bp, Artificial Sequence
  ENSG00000173581_12 (sequence is synthesized)
gaatcgttccacgaccgctccccctcccacccgcgggacaaagggcgggggcggggggggcgcacccccacgcgtgacctttccccgtactgcgcacgcgcccagcccccaccaccgggg

SEQ ID NO: 594184 - DNA, 120 bp, Artificial Sequence
  ENSG00000173581_13 (sequence is synthesized)
gtccgcccgcccacgcgagtgcgggggaggggtgtgggggccccgaaggtagaggaggcagcgcgcacgggctggacctcctcctaccctgggaagttggggcagtttccccctgcacct

SEQ ID NO: 594185 - DNA, 120 bp, Artificial Sequence
  ENSG00000173581_14 (sequence is synthesized)
gcctcttccttaggcctggcagtggcccgcgatgagagagggtccttccccttcaggctaggtgtccctggtcaggcgaccccttggggcacccagcaatttagggcttcagcttccttt

SEQ ID NO: 594186 - DNA, 120 bp, Artificial Sequence
  ENSG00000173581_15 (sequence is synthesized)
tccttcgatacccaggagcccacgtccccagctcacttctcccccaggacctaggcggctgggccccctgcccctgactccaggagcccaggagtttgaagcccaggcgcgttttgcctc

SEQ ID NO: 594187 - DNA, 120 bp, Artificial Sequence
  ENSG00000173581_16 (sequence is synthesized)
agtcctggggtccaggctccctcctccctcagaccaggggtccaggccagaaggtccctcctgtctcacttcacctcccccaggatggaccctccagtccatctgcgtctctccatttgt

SEQ ID NO: 594188 - DNA, 120 bp, Artificial Sequence
  ENSG00000173581_17 (sequence is synthesized)
gagctgcccggaagtctcggttccgccgccggcgctcgccaggggaagcccggggccgcccgggacctcggcccgttcctccggacccgagaggccgccgcacggggatggaccctccag

SEQ ID NO: 594189 - DNA, 120 bp, Artificial Sequence
  ENSG00000173581_18 (sequence is synthesized)
gggggtggcctgagaggcccggggaattctctggggtaacccggggcctctcctctccagtgaaggacgatgagaccttcgagatctccattcccttcgatgaggcaccccacctagacc

SEQ ID NO: 594190 - DNA, 120 bp, Artificial Sequence
  ENSG00000173581_19 (sequence is synthesized)
gagaaacttcgagggtgagctgagggggtgtggagggactggagtcagctgggaagccaagccctgagtcccagggtgtgacctggtccccccaccctcgctgtgtccctagagcctccg

SEQ ID NO: 594191 - DNA, 120 bp, Artificial Sequence
  ENSG00000173585_0 (sequence is synthesized)
agaacccacaaagcctgcccctcatcccaggcagagagcaacccagctctttccccagacactgagagctggtggtgcctgctgtcccagggagagttgcatcgccctccacagagcagg

SEQ ID NO: 594192 - DNA, 120 bp, Artificial Sequence
  ENSG00000173585_1 (sequence is synthesized)
cttgcatctgactgacccaccatgacacccacagacttcacaagccctattcctaacatggctgatgactatggctctgaatccacatcttccatggaagactacgttaacttcaacttc

SEQ ID NO: 594193 - DNA, 120 bp, Artificial Sequence
  ENSG00000173585_2 (sequence is synthesized)
actgacttctactgtgagaaaaacaatgtcaggcagtttgcgagccatttcctcccacccttgtactggctcgtgttcatcgtgggtgccttgggcaacagtcttgttatccttgtctac

SEQ ID NO: 594194 - DNA, 120 bp, Artificial Sequence
  ENSG00000173585_3 (sequence is synthesized)
tggtactgcacaagagtgaagaccatgaccgacatgttccttttgaatttggcaattgctgacctcctctttcttgtcactcttcccttctgggccattgctgctgctgaccagtggaag

SEQ ID NO: 594195 - DNA, 120 bp, Artificial Sequence
  ENSG00000173585_4 (sequence is synthesized)
ttccagaccttcatgtgcaaggtggtcaacagcatgtacaagatgaacttctacagctgtgtgttgctgatcatgtgcatcagcgtggacaggtacattgccattgcccaggccatgaga

SEQ ID NO: 594196 - DNA, 120 bp, Artificial Sequence
  ENSG00000173585_5 (sequence is synthesized)
gcacatacttggagggagaaaaggcttttgtacagcaaaatggtttgctttaccatctgggtattggcagctgctctctgcatcccagaaatcttatacagccaaatcaaggaggaatcc

SEQ ID NO: 594197 - DNA, 120 bp, Artificial Sequence
  ENSG00000173585_6 (sequence is synthesized)
ggcattgctatctgcaccatggtttaccctagcgatgagagcaccaaactgaagtcagctgtcttgaccctgaaggtcattctggggttcttccttcccttcgtggtcatggcttgctgc

SEQ ID NO: 594198 - DNA, 120 bp, Artificial Sequence
  ENSG00000173585_7 (sequence is synthesized)
tataccatcatcattcacaccctgatacaagccaagaagtcttccaagcacaaagccctaaaagtgaccatcactgtcctgaccgtctttgtcttgtctcagtttccctacaactgcatt

SEQ ID NO: 594199 - DNA, 120 bp, Artificial Sequence
  ENSG00000173585_8 (sequence is synthesized)
ttgttggtgcagaccattgacgcctatgccatgttcatctccaactgtgccgtttccaccaacattgacatctgcttccaggtcacccagaccatcgccttcttccacagttgcctgaac

SEQ ID NO: 594200 - DNA, 120 bp, Artificial Sequence
  ENSG00000173585_9 (sequence is synthesized)
cctgttctctatgtttttgtgggtgagagattccgccgggatctcgtgaaaaccctgaagaacttgggttgcatcagccaggcccagtgggtttcatttacaaggagagagggaagcttg

SEQ ID NO: 594201 - DNA, 120 bp, Artificial Sequence
  ENSG00000173585_10 (sequence is synthesized)
cgtctatgttgctggagacaacctcaggagcactctccctctgaggggtcttctctgaggtgcatggttcttttggaagaaatgagaaatacagaaacagtttccccactgatgggacca

SEQ ID NO: 594202 - DNA, 120 bp, Artificial Sequence
  ENSG00000173585_11 (sequence is synthesized)
gagagagtgaaagagaaaagaaaactcagaaagggatgaatctgaactatatgattacttgtagtcagaatttgccaaagcaaatatttcaaaatcaactgactagtgcaggaggctgtt

SEQ ID NO: 594203 - DNA, 120 bp, Artificial Sequence
  ENSG00000173585_12 (sequence is synthesized)
gattggctcttgactgtgatgcccgcaattctcaaaggaggactaaggaccggcactgtggagcaccctggctttgccactcgccggagcatcaatgccgctgcctctggaggagccctt

SEQ ID NO: 594204 - DNA, 120 bp, Artificial Sequence
  ENSG00000173585_13 (sequence is synthesized)
ggattttctccatgcactgtgaacttctgtggcttcagttctcatgctgcctcttccaaaaggggacacagaagcactggctgctgctacagaccgcaaaagcagaaagtttcgtgaaaa

SEQ ID NO: 594205 - DNA, 120 bp, Artificial Sequence
  ENSG00000173585_14 (sequence is synthesized)
tgtccatctttgggaaattttctaccctgctcttgagcctgataacccatgccaggtcttatagattcctgatctagaacctttccaggcaatctcagacctaatttccttctgttctcc

SEQ ID NO: 594206 - DNA, 120 bp, Artificial Sequence
  ENSG00000173585_15 (sequence is synthesized)
ttgttctgttctgggccagtgaaggtccttgttctgattttgaaacgatctgcaggtcttgccagtgaacccctggacaactgaccacacccacaaggcatccaaagtctgttggcttcc

SEQ ID NO: 594207 - DNA, 120 bp, Artificial Sequence
  ENSG00000173585_16 (sequence is synthesized)
aatccatttctgtgtcctgctggaggttttaacctagacaaggattccgcttattccttggtatggtgacagtgtctctccatggcctgagcagggagattataacagctgggttcgcag

SEQ ID NO: 594208 - DNA, 120 bp, Artificial Sequence
  ENSG00000173585_17 (sequence is synthesized)
gagccagccttggccctgttgtaggcttgttctgttgagtggcacttgctttgggtccaccgtctgtctgctccctagaaaatgggctggttcttttggccctcttctttctgaggccca

SEQ ID NO: 594209 - DNA, 120 bp, Artificial Sequence
  ENSG00000173585_18 (sequence is synthesized)
ctttattctgaggaatacagtgagcagatatgggcagcagccaggtagggcaaaggggtgaagcgcaggccttgctggaaggctatttacttccatgcttctccttttcttactctatag

SEQ ID NO: 594210 - DNA, 120 bp, Artificial Sequence
  ENSG00000173585_19 (sequence is synthesized)
tggcaacattttaaaagcttttaacttagagattaggctgaaaaaaataagtaatggaattcacctttgcatcttttgtgtctttcttatcatgatttggcaaaatgcatcacctttgaa

SEQ ID NO: 594211 - DNA, 120 bp, Artificial Sequence
  ENSG00000173585_20 (sequence is synthesized)
aatatttcacatattggaaaagtgctttttaatgtgtatatgaagcattaattacttgtcactttctttaccctgtctcaatattttaagtgtgtgcaattaaagatcaaatagatacat

SEQ ID NO: 594212 - DNA, 120 bp, Artificial Sequence
  ENSG00000173585_21 (sequence is synthesized)
cacacactcatcttccctttttagggggtgtgggaaggatccactgtgggggaaggatttatctgtgtggtttcccagggtaagatctctgcctggcaatgcgcattgctgggtaggttg

SEQ ID NO: 594213 - DNA, 120 bp, Artificial Sequence
  ENSG00000173585_22 (sequence is synthesized)
tctgactgacccaccatgacacccacagacttcacatctcctccaggccccgctccagatcaccttccctcgctggcccaggaatccatctccttccaggaccttagcccaggactaaca

SEQ ID NO: 594214 - DNA, 120 bp, Artificial Sequence
  ENSG00000173588_0 (sequence is synthesized)
gagcccgctcctccaggctggtggggcggtgcgatgaggcggcttctgggccatacgtcagcacgtggggtggcgccgcacccctgaggatcccggtccacgcggaggagtggggctttt

SEQ ID NO: 594215 - DNA, 120 bp, Artificial Sequence
  ENSG00000173588_1 (sequence is synthesized)
caccgccgccgccgccgccctcggacctctcccgggatacttcacatttccctagggacgggagcccgaggggtccgttcggccctcttcctctcgctgggccgacaccccgctgtagga

SEQ ID NO: 594216 - DNA, 120 bp, Artificial Sequence
  ENSG00000173588_2 (sequence is synthesized)
ccgtaacccttagtcccaatgcctccgtaagcggagttgagtgggtgcctgtggttggagctgtggaggtgtccccggtggcgagcgcggccagaactgcggtcacttaagttttccgtg

SEQ ID NO: 594217 - DNA, 120 bp, Artificial Sequence
  ENSG00000173588_3 (sequence is synthesized)
tgcgggttgcaaggagcgtgcgtgcgtctggtataatttggcttcctgagattctgccttagcaagaaaggagtgggaaatacccttggaaagaaaactaaaacagtaagaaagccaaaa

SEQ ID NO: 594218 - DNA, 120 bp, Artificial Sequence
  ENSG00000173588_4 (sequence is synthesized)
cttatttttacatggttgtcagcacatttaccgatatggacacttttcccaataattttcctcctggtggagacagtggattgacaggttctcagtcggagttccagaaaatgttaattg

SEQ ID NO: 594219 - DNA, 120 bp, Artificial Sequence
  ENSG00000173588_5 (sequence is synthesized)
atgaaaggttacgatgtgagcatcataaagctaattatcagacactgaaggctgaacacacaaggttgcagaatgaacatgtaaagttacaaaatgaactcaagcacctgtttaatgaaa

SEQ ID NO: 594220 - DNA, 120 bp, Artificial Sequence
  ENSG00000173588_6 (sequence is synthesized)
agcaaactcagcaggaaaaacttcagctcctgcttgaagaactaagaggagaattagtagagaaaactaaagatttagaagaaatgaaactgcagatattaactccacaaaaattggaat

SEQ ID NO: 594221 - DNA, 120 bp, Artificial Sequence
  ENSG00000173588_7 (sequence is synthesized)
tgctaagagcccaaatacaacaagaattagaaactccaatgagagaacgttttaggaatctagatgaagaggtagaaaagtatagagctgtatataataagcttcgctatgaacatacat

SEQ ID NO: 594222 - DNA, 120 bp, Artificial Sequence
  ENSG00000173588_8 (sequence is synthesized)
ttctcaagtcagaatttgaacaccagaaggaagagtatgcacgtattttagatgaaggaaaaataaaatatgaatcagagattgcaagactggaggaagataaagaagaactacgtaacc

SEQ ID NO: 594223 - DNA, 120 bp, Artificial Sequence
  ENSG00000173588_9 (sequence is synthesized)
agctgcttaatgttgatctcacaaaagacagcaaacgagtggaacaacttgctcgagaaaaagtctatttgtgtcaaaaattaaaaggtttagaggctgaagtagcggaattaaaggctg

SEQ ID NO: 594224 - DNA, 120 bp, Artificial Sequence
  ENSG00000173588_10 (sequence is synthesized)
aaaaggagaattctgaggctcaggtggaaaatgcccaaagaatacaggtgcggcagttggctgagatgcaggctacagtcagatccctggaggctgaaaaacaatcagctaatttacggg

SEQ ID NO: 594225 - DNA, 120 bp, Artificial Sequence
  ENSG00000173588_11 (sequence is synthesized)
cagaacgtttggaaaaagagctacaatcaagcagtgaacaaaatacctttttaattaataaattgcataaagctgaacgagaaataaatacattgtccagtaaagtaaaagaacttaaac

SEQ ID NO: 594226 - DNA, 120 bp, Artificial Sequence
  ENSG00000173588_12 (sequence is synthesized)
attcaaacaaactggaaataacagacatcaaactggagacagcaagagctaagagtgagctagaaagagaaaggaataagattcaaagtgaactggatggattacagtcagacaatgaaa

SEQ ID NO: 594227 - DNA, 120 bp, Artificial Sequence
  ENSG00000173588_13 (sequence is synthesized)
agctgttgaacatcacaaagtgctcttagtagaaaaggatcgtgaattaatacgtaaagtacaagctgccaaagaagaaggttatcaaaaacttgtggtattacaagatgaaaagttaga

SEQ ID NO: 594228 - DNA, 120 bp, Artificial Sequence
  ENSG00000173588_14 (sequence is synthesized)
actcgagaacagattagcagatttggagaaaatgaaagtggaacatgatgtctggaggcaatctgaaaaggatcagtatgaagagaaattgcgggcttcacagatggcagaagagatcac

SEQ ID NO: 594229 - DNA, 120 bp, Artificial Sequence
  ENSG00000173588_15 (sequence is synthesized)
caggaaggagcttcagagtgttaggttaaaacttcagcaacaaattgtgactattgaaaatgcagagaaggaaaaaaatgaaaattctgacctaaaacagcaaatcagtagtttgcagat

SEQ ID NO: 594230 - DNA, 120 bp, Artificial Sequence
  ENSG00000173588_16 (sequence is synthesized)
ccaagtgacttcacttgcacagtcagagaatgacttgctgaattcaaaccaaatgctgaaggaaatggtggagagattaaaacaagaatgccgaaattttagaagccaagctgaaaaagc

SEQ ID NO: 594231 - DNA, 120 bp, Artificial Sequence
  ENSG00000173588_17 (sequence is synthesized)
gcaactagaagctgaaaagacattggaagagaaacagatacagtggttggaagaaaagcataagcttcatgagcgtatcacagacagagaagaaaagtacaatcaagctaaggagaaact

SEQ ID NO: 594232 - DNA, 120 bp, Artificial Sequence
  ENSG00000173588_18 (sequence is synthesized)
gcagcgagctgcaattgcccagaaaaagagaaaatctcttcatgaaaacaaattgaaaagactacaagagaaagtagaagtcttggaggcaaagaaagaagaattggaaacagaaaatca

SEQ ID NO: 594233 - DNA, 120 bp, Artificial Sequence
  ENSG00000173588_19 (sequence is synthesized)
ggtcttaaatagacaaaatgttccttttgaagactatacaaggcttcaaaaaagactaaaagatatacagagaagacataatgaatttcgaagtctaattttggttcctaacatgcctcc

SEQ ID NO: 594234 - DNA, 120 bp, Artificial Sequence
  ENSG00000173588_20 (sequence is synthesized)
aacagcatctatcaatcctgttagctttcagtcatcagccatggttccaagcatggaactaccatttcctcctcatatgcaggaggaacaacatcaaagggaactctctctacttcgcaa

SEQ ID NO: 594235 - DNA, 120 bp, Artificial Sequence
  ENSG00000173588_21 (sequence is synthesized)
aagactagaagaactggaaacaacacaaagaaaacaactagaggaacttggatcttccggagaatgatgttcttggagaacaggcagatcaaaagaggtgaagttggtgactcagtaaaa

SEQ ID NO: 594236 - DNA, 120 bp, Artificial Sequence
  ENSG00000173588_22 (sequence is synthesized)
cttgacattttaacctgtggcatttagatactttttactgtttgccaaaacacttgaatgtgcctcaagaaaaggtacctactacatgctgtattgtatgactgtcaggattttaagatt

SEQ ID NO: 594237 - DNA, 120 bp, Artificial Sequence
  ENSG00000173588_23 (sequence is synthesized)
atacaagtgaagcattaaaagagaaattctcagagatatttagaatatttgacaatggtttgagaatgtaaaacaaaaaggaactagttagagtcaagttttaaaatttttactttgttg

SEQ ID NO: 594238 - DNA, 120 bp, Artificial Sequence
  ENSG00000173588_24 (sequence is synthesized)
aatttttttttttggcattttgagtgaaatataactatcattaattctctcttcatctttgagatgcttggccataacagggtccatacacatcttctggtttactatatacaaaaactg

SEQ ID NO: 594239 - DNA, 120 bp, Artificial Sequence
  ENSG00000173588_25 (sequence is synthesized)
tagttgaaaaaagatgacaatttaaaagtcagcctaaagaatgtaaaggtatctatatacaaaaggctaccttttctaaaatctgtgtgcacataattaaagagcttaatttttttttaa

SEQ ID NO: 594240 - DNA, 120 bp, Artificial Sequence
  ENSG00000173588_26 (sequence is synthesized)
atcctatggctgtattaacaagggggccattgattataaaacttgaactcaggtccttttataaacattgttggtatttaactttacttcccattactgtggatctaaccaaataattat

SEQ ID NO: 594241 - DNA, 120 bp, Artificial Sequence
  ENSG00000173588_27 (sequence is synthesized)
gtgttttgtgtccctaagtatgctctcattttttttggtctacacccattggaagcctttttaatgtgacatcttttagaggaattctgctggaataatttcatgttaacgaggctaaag

SEQ ID NO: 594242 - DNA, 120 bp, Artificial Sequence
  ENSG00000173588_28 (sequence is synthesized)
ctcaagtctcccaaattaagtggaatgttcattatcccaaggtgttcatagtcaaaagtcccagttgatagtgaagaaggccaggactgtaattgagcagtccttagcaccatttagcaa

SEQ ID NO: 594243 - DNA, 120 bp, Artificial Sequence
  ENSG00000173588_29 (sequence is synthesized)
actaggtttacttactacataatatagctgcttattcacagcatatacagtgacaccttatctctgaaaaataatttccacggagccacttagaataaaaaaactattataactagaaaa

SEQ ID NO: 594244 - DNA, 120 bp, Artificial Sequence
  ENSG00000173588_30 (sequence is synthesized)
tttccaaattttcaacttaatttagttttaattttggagtacatatgaaatgtttattatatgttgagtgttttgttcattgtaagatttaataactttaaaaaaatcagtcttatgttt

SEQ ID NO: 594245 - DNA, 120 bp, Artificial Sequence
  ENSG00000173588_31 (sequence is synthesized)
gtttttatcatagttattggatacataaatgaattttgtaaatgggatgccatacttcctgatttataaattttaaatctatttatggtgtagttattagtcccaggacattttaagtct

SEQ ID NO: 594246 - DNA, 120 bp, Artificial Sequence
  ENSG00000173588_32 (sequence is synthesized)
ggagaatgtgaggaagataattgggttccaggcttaatttttttcaattaaaaagatttttttatgtagacctcaggccagttcattgtagcctagtgcagagtaggcttatttatttat

SEQ ID NO: 594247 - DNA, 120 bp, Artificial Sequence
  ENSG00000173588_33 (sequence is synthesized)
gtactgggattacaggcatgagccacgcccagccgagtaggcttatttttaagttccagtttaatcttggaacatctgtctcatcagatttcctcattatttatgttgtttctaacttga

SEQ ID NO: 594248 - DNA, 120 bp, Artificial Sequence
  ENSG00000173588_34 (sequence is synthesized)
ctcattatttatgttgtttctaacttgaagtatttaaataagcttacctttggcctgtagctatgcttgagttgatctgtagttgaactcatttcagacagagtttatgatgaatgcctt

SEQ ID NO: 594249 - DNA, 120 bp, Artificial Sequence
  ENSG00000173588_35 (sequence is synthesized)
tcatgttttgaaatggggtctcaccatgttgcccaggctagccttgaactcctgggctcaaatggtcctcctgcctaagcctcctcagtagctgggactacaggtgctaacaccgtgtct

SEQ ID NO: 594250 - DNA, 120 bp, Artificial Sequence
  ENSG00000173588_36 (sequence is synthesized)
ggctgctatgaatgattttttccaattgttaatttctatttattgactcatggatttccatagagttaagaagtaaatttttttaggaacttaaagaatgctgcattttgttttcacttt

SEQ ID NO: 594251 - DNA, 120 bp, Artificial Sequence
  ENSG00000173588_37 (sequence is synthesized)
gagttagatgtgaatttgctttagttattccatctgcaaagtatttgccatttcattgcaaagatttctgaattcattgtacaaacttgaaagtgtccatgttatttatacttctgctag

SEQ ID NO: 594252 - DNA, 120 bp, Artificial Sequence
  ENSG00000173588_38 (sequence is synthesized)
agatctagcaattctgctagaatcaataggttttgaagggttttgtgatttatttcactctgctatcagccagctttttctatgaggcttaggtcacagaacctctttagaggtgaagta

SEQ ID NO: 594253 - DNA, 120 bp, Artificial Sequence
  ENSG00000173588_39 (sequence is synthesized)
agtaaacctctggttatcatccagtttgatctcaactctcaatgttcgaatgagtaaatgtatacagcttttattaaagtttttatatgtgtatgcactaaataaacagtgacaggaaaa

SEQ ID NO: 594254 - DNA, 120 bp, Artificial Sequence
  ENSG00000173588_40 (sequence is synthesized)
agaatggaagttgcatgagaggaggaacctttacctgttttgttcattgttatattccaagttcctagaacagattttggtatacatccagagatcaacactttcctcatactatacact

SEQ ID NO: 594255 - DNA, 120 bp, Artificial Sequence
  ENSG00000173588_41 (sequence is synthesized)
tatcataatgagaaccagtgaagaaataagattaattgaatggaggtagaaaagtatagagctgtatataataagcttcgctatgaacatacatttctcaagtcagaatttgaacaccag

SEQ ID NO: 594256 - DNA, 120 bp, Artificial Sequence
  ENSG00000173588_42 (sequence is synthesized)
tttattttttacttttagagtggctatcattataatgtaatttaaaattatatttgtaaaagtgactattggagtgagtacgaattttgtttataaatctatgataaatgcattctccct

SEQ ID NO: 594257 - DNA, 120 bp, Artificial Sequence
  ENSG00000173588_43 (sequence is synthesized)
gcaattttcagtaagagccatgtctactaacctttgtttctagtattcactgaaaacattcatatctaaacacagtttttggtgagtaaaatattttctatatagttttgttcaaataag

SEQ ID NO: 594258 - DNA, 120 bp, Artificial Sequence
  ENSG00000173588_44 (sequence is synthesized)
atagcagtaatttgttttacatttttgttatacgtgaacacaacctagtttcttgaagtctcaatctttggttgtgtttgtgctctggtgtcaaacaggcattcaataaaatgactcttt

SEQ ID NO: 594259 - DNA, 120 bp, Artificial Sequence
  ENSG00000173588_45 (sequence is synthesized)
aattcagtgaaataaatgaatcatggattcttaataatgccttttgttgggttgtgatttttaggttaaaacttcagcaacaaattgtgactattgaaaatgcagagaaggaaaaaaatg

SEQ ID NO: 594260 - DNA, 120 bp, Artificial Sequence
  ENSG00000173588_46 (sequence is synthesized)
caagaattagaaactccaatgagagaacgttttaggaatctagatgaagtaagtaacttatgttgtttactatgcatttatcctcatgggatcaaagtcttgatgaaaagcatcattccc

SEQ ID NO: 594261 - DNA, 120 bp, Artificial Sequence
  ENSG00000173588_47 (sequence is synthesized)
ctaccccaaaaccctgcagtagttcccccttttactcagtcattgcagtggcctctaaggcttcacaggattgaactcccattacctctctgatctcctttcctttttccacattggcct

SEQ ID NO: 594262 - DNA, 76 bp, Artificial Sequence
  ENSG00000173588_48 (sequence is synthesized)
ttaactccacaaaaattggaattgctaagagcccaaatacaacaagaattagaaactccaatgagagaacgtttta

SEQ ID NO: 594263 - DNA, 67 bp, Artificial Sequence
  ENSG00000173588_49 (sequence is synthesized)
ttatttttatttttaattttatttcttttttaatttttttgcgacagagtctggcgcctctcgggtt

SEQ ID NO: 594264 - DNA, 120 bp, Artificial Sequence
  ENSG00000173588_50 (sequence is synthesized)
ttgccaattatgctgtttacttcttctggtttaatagaaggaaaacacagtggtattaaaactggtcatgagcagcaaaaattcaggaattaaaaaatcagcactaaaaagactacagta

SEQ ID NO: 594265 - DNA, 120 bp, Artificial Sequence
  ENSG00000173588_51 (sequence is synthesized)
cgggttgcaaggagcgtgcgtgcgtctggtatagggaggacacctctggattgaggatcttatgacctactttagaggaagagccagctttagagtttgcccctctgcttatgaaatccc

SEQ ID NO: 594266 - DNA, 120 bp, Artificial Sequence
  ENSG00000173588_52 (sequence is synthesized)
tatggaaaaaaggtataatttggcttcctgagattctgccttagcaagaaaggagtgggaaatacccttggaaagaaaactaaaacagtaagaaagccaaaacttatttttacatggttg

SEQ ID NO: 594267 - DNA, 120 bp, Artificial Sequence
  ENSG00000173597_0 (sequence is synthesized)
gattgctacgttcagatcaaaccttgaacttttttttttctggtgccaggagccttcctgtgctccccattgcctgccagaaccaccaccgtttcccatggttactctacagcagcttca

SEQ ID NO: 594268 - DNA, 120 bp, Artificial Sequence
  ENSG00000173597_1 (sequence is synthesized)
ctgcctgaaaatgaaaactgaacaaagggattaaattgtgagaacaactgtcaatctattatatatttgtacaatctggtattaaaatgctttccccaaaagatattctgcgaaaagatc

SEQ ID NO: 594269 - DNA, 120 bp, Artificial Sequence
  ENSG00000173597_2 (sequence is synthesized)
tgaagttggtccatggttatcccatgacctgtgcttttgcaagcaactgggaaaaaattgaacagttccatagcagaccagatgacattgtgatagccacttatcctaaatcaggtacta

SEQ ID NO: 594270 - DNA, 120 bp, Artificial Sequence
  ENSG00000173597_3 (sequence is synthesized)
cttgggttagtgaaattatagacatgattctaaatgatggagatattgaaaaatgtaagcgaggttttattactgaaaaagttccaatgttggaaatgactctccctggattaagaacat

SEQ ID NO: 594271 - DNA, 120 bp, Artificial Sequence
  ENSG00000173597_4 (sequence is synthesized)
caggtatagaacaattggagaagaatccatcaccccggattgtgaaaacacatctaccgactgatcttcttcctaaatctttctgggaaaacaattgcaagatgatttatctggctcgta

SEQ ID NO: 594272 - DNA, 120 bp, Artificial Sequence
  ENSG00000173597_5 (sequence is synthesized)
atgccaaggatgtttcagtctcatattaccattttgacttaatgaataatttacagccttttcctggtacctgggaagaatatctggagaaattcttaactggaaaagtggcctatggtt

SEQ ID NO: 594273 - DNA, 120 bp, Artificial Sequence
  ENSG00000173597_6 (sequence is synthesized)
cctggtttactcatgttaaaaactggtggaagaaaaaggaagaacacccaatactttttttgtactatgaagatatgaaagagaatccaaaggaggaaatcaagaagatcattagatttc

SEQ ID NO: 594274 - DNA, 120 bp, Artificial Sequence
  ENSG00000173597_7 (sequence is synthesized)
tagagaagaacctgaatgatgagatcttggataggatcatccatcacacctcatttgaagtgatgaaggacaatcctttggtaaattatacacatctaccaactacagtgatggatcata

SEQ ID NO: 594275 - DNA, 120 bp, Artificial Sequence
  ENSG00000173597_8 (sequence is synthesized)
gcaaatccccttttatgcgtaaagggacggctggtgactggaagaattacttcaccgtggcccaaaatgagaaatttgatgctatttatgagacagaaatgtccaaaactgcacttcaat

SEQ ID NO: 594276 - DNA, 120 bp, Artificial Sequence
  ENSG00000173597_9 (sequence is synthesized)
tccgcacagagatttaaagtgtctaaatcacacatctgaagaaataagagattgtctgtagttgattgaaacgagggcagttatgaattgatttgggcaatcaaatgaatttataaagga

SEQ ID NO: 594277 - DNA, 120 bp, Artificial Sequence
  ENSG00000173597_10 (sequence is synthesized)
gaataatatgcttttaatatgttgattcttttcaatgttattaatcagatcccagttttgttcctttgattctgagtttccaaattctctaaggctaaagttcattgttaactttttgta

SEQ ID NO: 594278 - DNA, 120 bp, Artificial Sequence
  ENSG00000173597_11 (sequence is synthesized)
acaaaggaacaatgtaaccacaggctcttcctgcctttttctacactagtactgataagaaagaagggatttattttacttaatctcccatatattatgatttagaattaagttcccctc

SEQ ID NO: 594279 - DNA, 120 bp, Artificial Sequence
  ENSG00000173597_12 (sequence is synthesized)
cctagtaccatggtccaagaaatgctgttttcataatgagactatatttcctaactctgccccaatttccctttgccgaaaatttgacccaggacactgtgttccactgctgtctaccga

SEQ ID NO: 594280 - DNA, 120 bp, Artificial Sequence
  ENSG00000173597_13 (sequence is synthesized)
gtttcaagttgttctctgagtcatagctcatcttcctgcagtgcctctatttggataacaaagttcatgtccccgatcatgtagttcagattttggaaatcttttttctatatcatacct

SEQ ID NO: 594281 - DNA, 120 bp, Artificial Sequence
  ENSG00000173597_14 (sequence is synthesized)
aatgtctaagtctccgaaaggcaaacgcctacaatagtctctgtaggattggttacctgggaactggagctctgttctgaaaagcagccctgagggctgtgacctacttcttatggggag

SEQ ID NO: 594282 - DNA, 120 bp, Artificial Sequence
  ENSG00000173597_15 (sequence is synthesized)
tcctctttttcccaacagacccgtttgaacttcagagaaatcacctactgctgtgttctggtcaccatttgggaacttcagttacttaatcttatatttggatagatttggataccttaa

SEQ ID NO: 594283 - DNA, 120 bp, Artificial Sequence
  ENSG00000173597_16 (sequence is synthesized)
tagcacctttaatatcctagacatgatcataacctctgcaaaatatttcccaatctggtgcccaaggaagactctctaggctgaatctccactctgccctcttgacccaatgttccttct

SEQ ID NO: 594284 - DNA, 120 bp, Artificial Sequence
  ENSG00000173597_17 (sequence is synthesized)
atctccactctgccctcttgacccaatgttccttctacttattattacatgcttatatctatttgtgtggtctctgatctatgttttcttggaacatttatatatatatatatatatata

SEQ ID NO: 594285 - DNA, 87 bp, Artificial Sequence
  ENSG00000173597_18 (sequence is synthesized)
tttattattatactttaagttccaggttacatgtgcacaatgtgcaggtttgttatatatgcatacatgtgccatgttggtgtgctg

SEQ ID NO: 594286 - DNA, 120 bp, Artificial Sequence
  ENSG00000173597_19 (sequence is synthesized)
ccccacaacaggccccagtgtgtgatgttacctttcctgtgtccaagtgttctcatcgttcaattcccaccaatgactaagaacatgaggtgtttggtttttttgttcttgcaatagttt

SEQ ID NO: 594287 - DNA, 77 bp, Artificial Sequence
  ENSG00000173597_20 (sequence is synthesized)
tcatcgttcaattcccaccaatgactaagaacatgaggtgtttggtttttttgttcttgcaatagtttgctgaaaag

SEQ ID NO: 594288 - DNA, 67 bp, Artificial Sequence
  ENSG00000173597_21 (sequence is synthesized)
agggaatgcttccaggttttgcccatgcagtatgatattggctggtggtttgtcatagagggctctc

SEQ ID NO: 594289 - DNA, 120 bp, Artificial Sequence
  ENSG00000173597_22 (sequence is synthesized)
cagctcctgaattcactgattttttgaaggggtttttgtgtctttgtctccttcagttatgctctgatcttaactccagcttggcattagaagtagttgtttatatccccatgtgcagca

SEQ ID NO: 594290 - DNA, 120 bp, Artificial Sequence
  ENSG00000173597_23 (sequence is synthesized)
aagtctttttcctgagatcatatcacatgtgccaagttatatgccaagccatggttctcaagctgaaggtacagtaccctgggcccttacttgttctgaaaggggtgggggtggtggttt

SEQ ID NO: 594291 - DNA, 120 bp, Artificial Sequence
  ENSG00000173597_24 (sequence is synthesized)
tggacatactgttagactttctgagccacaactgaggtagctatggcttatcgtattttgacttcacaggtgaatctccgctgtcagccaggaatagccaggaatagctaaaatagctcc

SEQ ID NO: 594292 - DNA, 120 bp, Artificial Sequence
  ENSG00000173597_25 (sequence is synthesized)
ttaagctgtaacatttctcttttccaaccccagcaaaggattggtctagtggtaacaacaaacctcatagaagtagtacacctattattctggagatacttgcttctatagatttattac

SEQ ID NO: 594293 - DNA, 120 bp, Artificial Sequence
  ENSG00000173597_26 (sequence is synthesized)
aatatgttttataaagtattttagagtatataatttgtgtttatgttccacagaaacatattttataggagttaatcttgactatctaaaggtattgtgaactagttccagctttctcca

SEQ ID NO: 594294 - DNA, 120 bp, Artificial Sequence
  ENSG00000173597_27 (sequence is synthesized)
atacccttgtccacgagaagtaaactaaatcatgtatctatttcctctattatctttattaaataataagttaatgtggcctgaatatatacggatttctgatactatggtctattactg

SEQ ID NO: 594295 - DNA, 120 bp, Artificial Sequence
  ENSG00000173597_28 (sequence is synthesized)
agggaaaaaacaccactaaactatcctctaatctgtgtaatagattagctacactttcttcactagcaagataaaataatttccacattttctagttttactttgtagaaataactctct

SEQ ID NO: 594296 - DNA, 120 bp, Artificial Sequence
  ENSG00000173597_29 (sequence is synthesized)
gtaattggactgtattcaacgaaaacttagtaagttgtaattatgcctcaggtatgtttctatgcactgagtgaagagtggagataaaaatagaatttagattttcctttactttttaaa

SEQ ID NO: 594297 - DNA, 120 bp, Artificial Sequence
  ENSG00000173597_30 (sequence is synthesized)
taggttgttgcctcttatatatttattctatgatgcaaatgtcactatcctaattcctcagtttatgtttaacagcacacagtggcacttctatgattcaaatacatttgataccctttg

SEQ ID NO: 594298 - DNA, 120 bp, Artificial Sequence
  ENSG00000173597_31 (sequence is synthesized)
aaatcaatcagaatactgcaaaattaatttttctaaaacaatgcttttatcgttatttctcctgttgaatcatcagtacaatttccaaatgaaaacacttaaaataatctcatattacaa

SEQ ID NO: 594299 - DNA, 120 bp, Artificial Sequence
  ENSG00000173597_32 (sequence is synthesized)
tctttctctaacagaaccatgatgtaaggacagtgataacaaatatctgacaatgatatgattatttcctcatccatggaaattttccttaataaactaaagggctattttctaaaaagc

SEQ ID NO: 594300 - DNA, 120 bp, Artificial Sequence
  ENSG00000173597_33 (sequence is synthesized)
caaagcattgcttacaagaacttttcatcatgacatggatagacactcagattcatacattcaaagggaagtgtcatgtattccctttcaatccaccctattctattgtgttatcttcct

SEQ ID NO: 594301 - DNA, 120 bp, Artificial Sequence
  ENSG00000173597_34 (sequence is synthesized)
aaattattttctatctacattcttcattctctttcccattgaccctatgttctgtgtgataaaaattgcgtcattggaggcttttgaaggttaagtattatgccccatttcaccattaat

SEQ ID NO: 594302 - DNA, 120 bp, Artificial Sequence
  ENSG00000173597_35 (sequence is synthesized)
caacatacaacccttctccatattttgtaattcctttcatatacagaaaaaaagatactataatttcttcaaaatgcttgatattaatgatatatgggaaaacaattattttgtgcagca

SEQ ID NO: 594303 - DNA, 120 bp, Artificial Sequence
  ENSG00000173597_36 (sequence is synthesized)
atcttcagataactgggaaaggccggggaaaaagagagatactggtggttatcaatgacccatgtataaattgtttttattatgtaagctgtcttcacaaatgtcttcttatgtatgatc

SEQ ID NO: 594304 - DNA, 120 bp, Artificial Sequence
  ENSG00000173597_37 (sequence is synthesized)
attagaactgttttatatatatatgtaaaatttccacattatcgagacattactttcagcagtgaagtaatccttttttaactgccacttaatgaattcaataaaatataatttattgta

SEQ ID NO: 594305 - DNA, 120 bp, Artificial Sequence
  ENSG00000173597_38 (sequence is synthesized)
actagttgagatacaaatccttctatccaagattcactattgaggactaaaaattattgatacacaaaacaacttgaatggatatcaacggaattaccctgaatgaaaaaaaaagctaat

SEQ ID NO: 594306 - DNA, 120 bp, Artificial Sequence
  ENSG00000173597_39 (sequence is synthesized)
ctcaaaaggagaaccctttatcctaagagagcagagggatgaagatccatcttctgtaactttttctgctgaataaaggagccttcctgtgctccccattgcctgccagaaccaccaccg

SEQ ID NO: 594307 - DNA, 120 bp, Artificial Sequence
  ENSG00000173598_0 (sequence is synthesized)
gcatgtgggcttcatttaaacagagcagagggggcggcgcgcggtcgccgcggtgctgctgctcagtgggagcgggtcttcgcaactgtctccgcgtggcgcgcgcctctagccgccctt

SEQ ID NO: 594308 - DNA, 120 bp, Artificial Sequence
  ENSG00000173598_1 (sequence is synthesized)
cccctggcggctacggccggagggagcggaggcgagcgggagtcgggctccatggagagcggcggacaactgggcagaggcggagctttcatctcggcaccctggttccagtgacccgcg

SEQ ID NO: 594309 - DNA, 120 bp, Artificial Sequence
  ENSG00000173598_2 (sequence is synthesized)
cctggttccagtgacccgcgctagcgtcccgtcccgcccgcgtcggagcggccgccggccccgggactgaccggcctcgccgcacctcccgcaccgactagcgctcccgggcgctcctgc

SEQ ID NO: 594310 - DNA, 120 bp, Artificial Sequence
  ENSG00000173598_3 (sequence is synthesized)
cactccccggcggggtggcggcggccgggcccccacggcggcggccggagcagcagcagcagcagcaggagcccgcctctatgatgaagttcaagcccaaccagacgcggacctacgacc

SEQ ID NO: 594311 - DNA, 120 bp, Artificial Sequence
  ENSG00000173598_4 (sequence is synthesized)
gcgagggcttcaagaagcgggcggcgtgcctgtgcttccggagcgagcaggaggacgaggtgctgctggtgagtagcagccggtacccagaccagtggattgtcccaggaggaggaatgg

SEQ ID NO: 594312 - DNA, 120 bp, Artificial Sequence
  ENSG00000173598_5 (sequence is synthesized)
aacccgaggaggaacctggcggtgctgccgtgagggaagtttatgaggaggctggagtcaaaggaaaactaggcagacttctgggcatatttgagcagaaccaagaccgaaagcacagaa

SEQ ID NO: 594313 - DNA, 120 bp, Artificial Sequence
  ENSG00000173598_6 (sequence is synthesized)
catatgtttatgttctaacagtcactgaaatattagaagattgggaagattctgttaatattggaaggaagagagagtggttcaaagtagaagatgctatcaaagttctccagtgtcata

SEQ ID NO: 594314 - DNA, 120 bp, Artificial Sequence
  ENSG00000173598_7 (sequence is synthesized)
aacctgtacatgcagagtatctggaaaagctaaagctgggttgttccccagccaatggaaattctacagtcccttcccttccggataataatgccttgtttgtaaccgctgcacagacct

SEQ ID NO: 594315 - DNA, 120 bp, Artificial Sequence
  ENSG00000173598_8 (sequence is synthesized)
ctgggttgccatctagtgtaagatagagagaactgggtaggcctctcccaccatgtgcagtctcatggggagaggcttctttcgtttcctcgtcaaacatctgattgacgcttgcaaact

SEQ ID NO: 594316 - DNA, 120 bp, Artificial Sequence
  ENSG00000173598_9 (sequence is synthesized)
gtctgaatttgccatgcaaggttttcaaacaatttgcatgtttttcagatgctttcaaatctttttttaaaaaaatagtgtaaaatattttaataagccaaagccatgtggaatttttgt

SEQ ID NO: 594317 - DNA, 120 bp, Artificial Sequence
  ENSG00000173598_10 (sequence is synthesized)
ttagatgccttaactgtgccacaccccacaaccccctatattattttggttgtctatttctcacagcatattttcagttttttgtccatttgacatcagtctgtggtttattttgtcatc

SEQ ID NO: 594318 - DNA, 120 bp, Artificial Sequence
  ENSG00000173598_11 (sequence is synthesized)
agattacttgtgggtatacctaccccaaaattgttttctcattcacagcattagcatattcagcaaatccatctgtggtgggaattaaaaatattattggtattaaagaaatccattcac

SEQ ID NO: 594319 - DNA, 120 bp, Artificial Sequence
  ENSG00000173598_12 (sequence is synthesized)
cccaaaacttgttttacaggattacaattttaattcaaaatttccagatttgggctatttctgtatgatccaataacttattttgtcacagggcttaatttgccatttttggggatttgt

SEQ ID NO: 594320 - DNA, 120 bp, Artificial Sequence
  ENSG00000173598_13 (sequence is synthesized)
cgactcattttgtctgaattttcacaactggtattatgtcactagctacctgatacggctatttcccttataactcaatagtaccttaacacaaagtataactctgtagagttggtgaat

SEQ ID NO: 594321 - DNA, 120 bp, Artificial Sequence
  ENSG00000173598_14 (sequence is synthesized)
attttagggaaatattagcaaaatgcatgtagtaaagacatcttatgaaaactgtattcatggaatttgatttagcatgctcagttgccagttcccattatcgatactctttctttgcag

SEQ ID NO: 594322 - DNA, 120 bp, Artificial Sequence
  ENSG00000173598_15 (sequence is synthesized)
aataccttagaaccgttatttccctcagtgtagattgctcttaaaatgtattcagttatttagtggcccccacaggagtggagtcttgaaatctaattctaaatgccagtcagtgatgat

SEQ ID NO: 594323 - DNA, 120 bp, Artificial Sequence
  ENSG00000173598_16 (sequence is synthesized)
cgcatcacagttgagtgaaatggccttcctgttcagctgttagagactgaagattgttagggcaccttagaatgtctcatcttttctaggttgtcaacaggtactatttgtcacataact

SEQ ID NO: 594324 - DNA, 120 bp, Artificial Sequence
  ENSG00000173598_17 (sequence is synthesized)
aactttcgaggcactggaacatacctgaactaagaattaaatcttttactttatactcacttaaaatcaagaatcccatctaaaacacataggtaccttatctgaaactcttgcacttcc

SEQ ID NO: 594325 - DNA, 120 bp, Artificial Sequence
  ENSG00000173598_18 (sequence is synthesized)
gcacttccccaaccagggcagaaatgaggtgggagaagtttgactaaaatgagggatgggggaaagtaaaagatgtttttttttttttgagactcgctttgtcacccaggctggagtgca

SEQ ID NO: 594326 - DNA, 120 bp, Artificial Sequence
  ENSG00000173598_19 (sequence is synthesized)
atttttttatatagacttcagccctttgtaaatattgtaactggggagtatagagtagaaaaaaagtatagttaaaacatttgttctacaaattaacctttaaaaatataattactgcta

SEQ ID NO: 594327 - DNA, 120 bp, Artificial Sequence
  ENSG00000173598_20 (sequence is synthesized)
aaaatagagtgctgttacacttaaggaaaattagtgccattttggaaatgagatcttgtgccataaatacagctgaactgaatataaatgttcacaaattaatgctgtcaaaggaatgag

SEQ ID NO: 594328 - DNA, 120 bp, Artificial Sequence
  ENSG00000173598_21 (sequence is synthesized)
taaagcagaaaaacttttaaccagcaacatttcaagtacgtagtgtgatcaaacatgatcatccagaatttttatatttttttctttgtacagaggttacatattctgggtgttctttta

SEQ ID NO: 594329 - DNA, 120 bp, Artificial Sequence
  ENSG00000173598_22 (sequence is synthesized)
taaaggaaacattttaaatcccacaaattgacactttctatcttcaatggactaagatttttttggtcagtaatctctgaaatttccttaaattatatacttaacatagcagagaaactg

SEQ ID NO: 594330 - DNA, 120 bp, Artificial Sequence
  ENSG00000173598_23 (sequence is synthesized)
gattgtttttgtatataagactgcttccacctgaaatgctgtcataagtactgggggggtgggggagtgcccatcttgtacatgatattcttagaggtaataaggtaatgatgcatgaat

SEQ ID NO: 594331 - DNA, 120 bp, Artificial Sequence
  ENSG00000173598_24 (sequence is synthesized)
ttattttataaactcttggactatgtatttgacatgtaaaatatgtacagtattaacgtcaaccatctctttaaagttagcctataaatattgttgtataattttctttggtcagaaaca

SEQ ID NO: 594332 - DNA, 120 bp, Artificial Sequence
  ENSG00000173598_25 (sequence is synthesized)
cttggactgaatagtgacactcggtaaggattttcagtgccatttagcaaaacgtctttagtctatgcaactagcaaaaatctgcataatgcaacaacacagttttcacacttcaaattt

SEQ ID NO: 594333 - DNA, 120 bp, Artificial Sequence
  ENSG00000173598_26 (sequence is synthesized)
tacatgaggggttcttcacgattctcctggaacccagtctagcaaaatgagaggaaaggccctagggagatttatttctgttaaatagttaactctgctgagtatgacaaatagtgtcta

SEQ ID NO: 594334 - DNA, 120 bp, Artificial Sequence
  ENSG00000173598_27 (sequence is synthesized)
ctatctcaaccctccaaaatttgcagagtgttgggactgtcatttgtgattttttttttttttttttggtggggtagttgaataaaattgggcagctaaatttttcagttccatgtgcct

SEQ ID NO: 594335 - DNA, 120 bp, Artificial Sequence
  ENSG00000173598_28 (sequence is synthesized)
cccaaataaaaaacagaaaataagtagtttttgtgaattgacttgcagacaaagtagaaactgtgctgcatgatgttattttgtaaacagatgacattttctgaccaggcacatgccatc

SEQ ID NO: 594336 - DNA, 120 bp, Artificial Sequence
  ENSG00000173598_29 (sequence is synthesized)
caattttctgtcaatcacactgttgtataaagcagcagaactgaaggggaaaaatgattgttgtatacactgaattgctttgcatggtctcatttgagataattgatgtaagaatcctga

SEQ ID NO: 594337 - DNA, 120 bp, Artificial Sequence
  ENSG00000173598_30 (sequence is synthesized)
cttttttatatttggaaacatcaaataaaaatggaaaaaatgatcatggctttaaaaaaaaaacaaaaacacacacacatgaactcagatttgcaaaccaggtttctgaaactttgggta

SEQ ID NO: 594338 - DNA, 120 bp, Artificial Sequence
  ENSG00000173598_31 (sequence is synthesized)
aggtgtatgcttttaactttgaaatgtataaacacccagcggaaacgtatacctttcagtgcatagtgcattgtgtgcttaccctgggttgtttaaacttgtgttcaaatattccccctc

SEQ ID NO: 594339 - DNA, 120 bp, Artificial Sequence
  ENSG00000173598_32 (sequence is synthesized)
caagtgaaagcctgtcgggaattccacagtaacacctttactgttctcccattgatgatcatatacgttacctcttcctagcggtacatttgtatgatccttactactggaattaccggg

SEQ ID NO: 594340 - DNA, 120 bp, Artificial Sequence
  ENSG00000173598_33 (sequence is synthesized)
ttaaaaggaaatgcttaccactaagatgtcagtattctcctcatggatattttcagtctcaatgttgccagtctaatagtatagtatgtggttgctttactgctgttctccccacccccg

SEQ ID NO: 594341 - DNA, 120 bp, Artificial Sequence
  ENSG00000173598_34 (sequence is synthesized)
tggagttgtgtcattattttaatgaatgtgagctcttgacttactctagaattctaatacagatactttctgcactagtatcacttttattattgcagttccatttaaaagcataactgg

SEQ ID NO: 594342 - DNA, 120 bp, Artificial Sequence
  ENSG00000173598_35 (sequence is synthesized)
ctaagtcaccgccccacccgccgcattacatttcctaaaacatactgctgccaaagaccaactgtagaatccttaagtcctgttcaagtgtcacttcattttttattaggggtttcttag

SEQ ID NO: 594343 - DNA, 120 bp, Artificial Sequence
  ENSG00000173598_36 (sequence is synthesized)
ggggtttcttagttggagggcatgagaaacttggccctttccaatgttgtcttcacattggagtataagaattctctataggactctttaatttttttttttttttggtagagatggggt

SEQ ID NO: 594344 - DNA, 120 bp, Artificial Sequence
  ENSG00000173598_37 (sequence is synthesized)
cccaggctggtctcaaactcctaggcttaagcagtcctccagcctcagccttctcaaagtgctaggatgattggcatgagccacctcgtctggcctgcaggtctttttaagcatttgctg

SEQ ID NO: 594345 - DNA, 120 bp, Artificial Sequence
  ENSG00000173598_38 (sequence is synthesized)
ttgtgataagagcacaaaacaattttctaatctcaaagagcttatattctagtggggtagagataagtgatttatcttggtgtagttttggcttttttgtttgtttttttgagacagcat

SEQ ID NO: 594346 - DNA, 120 bp, Artificial Sequence
  ENSG00000173598_39 (sequence is synthesized)
gggattatgggcgtgaaccaccgcacctggcctatcttggtgtttttacatccttcagtatttttcaaggttttacagcttttttatctatagacttataccatcttcaaaagcaataca

SEQ ID NO: 594347 - DNA, 120 bp, Artificial Sequence
  ENSG00000173598_40 (sequence is synthesized)
attttatttgtagacgtgatttcccccaccaaatgcacattttatggagctctaggacaaaagtcaggatgaaaagtaatctatcgctggtgctactttaataccttcctgactggtgcc

SEQ ID NO: 594348 - DNA, 120 bp, Artificial Sequence
  ENSG00000173598_41 (sequence is synthesized)
actggctaaattctagcagtacgatgagagggccattaaggcctatcttagcaagcaagacattatagcaaagacctaaacactcaaaggttcaacgtcttctagccagggaactattct

SEQ ID NO: 594349 - DNA, 120 bp, Artificial Sequence
  ENSG00000173598_42 (sequence is synthesized)
ctaattcttccaccttgatatgatttcagcaaattctgataacccggtattactcttaatgcatttttgtaacatttgacaaacatctcccaatatgtagactcccactctcctgatgct

SEQ ID NO: 594350 - DNA, 120 bp, Artificial Sequence
  ENSG00000173598_43 (sequence is synthesized)
aatcagtatcagacaatggaagtaaattttcctgcttttctcaacttttcctcaaattcatgttagtgaagtactttcatttggccatcattatttatcaaccttaagaaacatgcctat

SEQ ID NO: 594351 - DNA, 120 bp, Artificial Sequence
  ENSG00000173598_44 (sequence is synthesized)
tgacgaagtaaatatactaggaattcaacgtatctacgggaatgtggacaaagacatataccaagacaaggcactagagtgaaaagccattaaaataaaatgctcagcagcaaaggattt

SEQ ID NO: 594352 - DNA, 120 bp, Artificial Sequence
  ENSG00000173598_45 (sequence is synthesized)
gtaatggttaacttgcaatatatccatatggtgtaatattacagtcattagaaatgacatttgcgtaaggatctgagtggaaactgatacagcctgtcggagagctactgagtagtattt

SEQ ID NO: 594353 - DNA, 120 bp, Artificial Sequence
  ENSG00000173598_46 (sequence is synthesized)
tatcacagctgcatacataccctttcacccaacagttccactcctgggagtctagtcaacaaatggacaagttgcacaaccaagctatggtcaaatatgtgtgttgtaggatttatgaaa

SEQ ID NO: 594354 - DNA, 120 bp, Artificial Sequence
  ENSG00000173598_47 (sequence is synthesized)
ctggtaccaatttaatattcaaatgtgattaagtcatggcaatctatttactggatactttgtggttaccaaagagctatgtgctgccacagggagtcctttcaatagtgattgaaaaag

SEQ ID NO: 594355 - DNA, 120 bp, Artificial Sequence
  ENSG00000173598_48 (sequence is synthesized)
gcagaacactactagacagaactacctgttttatgcatgtattggcatacactgaaaaagcttagtcacttaaaatgaggttgtacagattgtagattttgtttttaaacgcctgtatgg

SEQ ID NO: 594356 - DNA, 120 bp, Artificial Sequence
  ENSG00000173598_49 (sequence is synthesized)
tttaaaaaatgttttgggaaatagacatgagcagggcagagaactacaacctacaggccaaaccccaccccactgcctgtttgtacggccaacaagtttaaaatttttttaatgttttag

SEQ ID NO: 594357 - DNA, 120 bp, Artificial Sequence
  ENSG00000173598_50 (sequence is synthesized)
gtttttttttttttaaaaaaaatactatgcccatttgtttacaaatcgtctgtgggtgctttctcactacaatggcagaattcagtagttgagacagacctatggtccacaaaggccgaa

SEQ ID NO: 594358 - DNA, 120 bp, Artificial Sequence
  ENSG00000173598_51 (sequence is synthesized)
atatttactgttttaggagaaaaaaacaacatgaattgtaataacttggacttacttggttgctcagtcctgatgtgtcctgttaaaacctaagagaaacagcaccaagttcaatctagt

SEQ ID NO: 594359 - DNA, 120 bp, Artificial Sequence
  ENSG00000173598_52 (sequence is synthesized)
gcaatcagcctatcacatctaagctgcttttgccagatctgatatctactcccgaccttaagccaggagactttgtaaacttactaggttataataaaacttaagaactatcgatattta

SEQ ID NO: 594360 - DNA, 120 bp, Artificial Sequence
  ENSG00000173598_53 (sequence is synthesized)
ctaatctacatcatggaactatttcaaaagcagtcatatggtaagatggatcaggagtctttaaaaataaaactgagaaagaaaaatcatgtgatcaattcagtagtagagacagaggtt

SEQ ID NO: 594361 - DNA, 120 bp, Artificial Sequence
  ENSG00000173598_54 (sequence is synthesized)
ggtatcaagtctatgttcatacacttaccagtgccacccagcagggccatacaagacacatgaaatgagatcagctcaagggtgacaagatgaaactgggagagggccggggagacccga

SEQ ID NO: 594362 - DNA, 120 bp, Artificial Sequence
  ENSG00000173598_55 (sequence is synthesized)
actcttaatattggattccacacaagaggaaaaattttagtccagctcccagcatggcagctaatggcaagttagtaccataaagccaactcttggaatatacctgacttccacgataaa

SEQ ID NO: 594363 - DNA, 120 bp, Artificial Sequence
  ENSG00000173598_56 (sequence is synthesized)
atggagatgagtgcaggggtgagtgtatagttaagaaaacaaacaatatattactagtccaggtggtagatgacagatttttattatttacacttctctcaaattattacattcagcatg

SEQ ID NO: 594364 - DNA, 120 bp, Artificial Sequence
  ENSG00000173598_57 (sequence is synthesized)
ttttgctttttatgttatttaaagtataaaccctcatataattccctaagatgggtggcatgccaagtagctaaatgaaatatcatcccagcccaaaagtacttattcgaatgaaatatt

SEQ ID NO: 594365 - DNA, 120 bp, Artificial Sequence
  ENSG00000173598_58 (sequence is synthesized)
acatttttcttaaataaagcaataaattaggtaccctattatcatggtattttcttttttggccagcttttctagataaggttgtattgctactgcaactaacaaaaaagatgtggcagg

SEQ ID NO: 594366 - DNA, 63 bp, Artificial Sequence
  ENSG00000173598_59 (sequence is synthesized)
cctgcagtgagccaagatcatgccacagcactccagcctaaactacagagctagaaagtggct

SEQ ID NO: 594367 - DNA, 82 bp, Artificial Sequence
  ENSG00000173598_60 (sequence is synthesized)
gaacgcgggaggcagaacctgcagtgagccaagatcatgccacagcactccagcctaaactacagagctagaaagtggctag

SEQ ID NO: 594368 - DNA, 120 bp, Artificial Sequence
  ENSG00000173598_61 (sequence is synthesized)
tcatttcctcgatccaatttagttccacttaggtcactgtgtttataatgtcttttaggacagatttccttccccattctccatcaaacaaccatagcacctgtgacttttatctgttgg

SEQ ID NO: 594369 - DNA, 120 bp, Artificial Sequence
  ENSG00000173598_62 (sequence is synthesized)
tttgtatttaatcttatttttaagtgcttctttgaaattgttttacaagtacattcttggtctagagtaaggttctatatagttggccctccatatccatgggttccacttccgtggatt

SEQ ID NO: 594370 - DNA, 120 bp, Artificial Sequence
  ENSG00000173598_63 (sequence is synthesized)
caaacaaccagacaaaatattccaaaaaacattgtgtctgtagtcaacatgtatatttttgtcattattccttaaacaatagtgtaactatttacatagcacttacattataataggtat

SEQ ID NO: 594371 - DNA, 120 bp, Artificial Sequence
  ENSG00000173598_64 (sequence is synthesized)
tataagtaatctaaatattaacataagcgggaggatttgtgtagattgtatgcatatacaacatcattttattccagagacttgagcatctgcgaatttggatatccaaaggaagtccta

SEQ ID NO: 594372 - DNA, 120 bp, Artificial Sequence
  ENSG00000173598_65 (sequence is synthesized)
gaaccagttcccgacaaataccaagagatgactttactttagacctaagatcttgctagacagcctttgagaggatgaaggataactagagcagaagcaaatcgcagcgaagtagactac

SEQ ID NO: 594373 - DNA, 120 bp, Artificial Sequence
  ENSG00000173598_66 (sequence is synthesized)
aacaatcaagtcaaaaaacataaagctcctatcaacacctcaagattttagaaaagcctcttaacgggcaattttcttttaaataaagactgggtcccactatgttagccaggctggtca

SEQ ID NO: 594374 - DNA, 75 bp, Artificial Sequence
  ENSG00000173598_67 (sequence is synthesized)
cagtcgattttcaggaagccacttaatgttcagattcttttcttctctcccaggactttgcagatgctgctgttc

SEQ ID NO: 594375 - DNA, 120 bp, Artificial Sequence
  ENSG00000173598_68 (sequence is synthesized)
tcttttcttctctcccaggactttgcagatgctgctgttccctctgcctggagatgttcatctggcctgaatccaaaagtctgtccaagttacttctcttttccatgacagagttacaac

SEQ ID NO: 594376 - DNA, 120 bp, Artificial Sequence
  ENSG00000173598_69 (sequence is synthesized)
tatttgtctgtcccccttccccattagagtatatggtccccaaaggaaagccccatgccattcactcaccacctaatcatccccaacaactagtgggcaaacatgaaacacttttgttga

SEQ ID NO: 594377 - DNA, 120 bp, Artificial Sequence
  ENSG00000173598_70 (sequence is synthesized)
ataatgtgtttcctttagcccagggattacaaagtcaaaggcttacaagggggaaggactagcaggtgtgctcggaggggactctagccaactggagagtaactggtgagaagacaatga

SEQ ID NO: 594378 - DNA, 120 bp, Artificial Sequence
  ENSG00000173598_71 (sequence is synthesized)
catgctcttagggtgtctgctactcagatcctctcagttaagtcccgtgcacaaaggtgggtcaggtctactgttgccagatcttcagatcattcaaaagttacccgaattctggatttt

SEQ ID NO: 594379 - DNA, 120 bp, Artificial Sequence
  ENSG00000173598_72 (sequence is synthesized)
catgcaaatctcccaatttttaaaaatgttggcatcaaattcagaatgttttaaccagccacactgtgtgggccagggaaaacaggcccaaaggccaggtgaagctgcagttttcaactg

SEQ ID NO: 594380 - DNA, 120 bp, Artificial Sequence
  ENSG00000173598_73 (sequence is synthesized)
ctgccttggcctctcccagagccccttaagtcctaagaaggctcagtcaacacactggcactcgtttcatcccactggttgagaaagcaagtcttagcaaagtaatgggggagtcttacc

SEQ ID NO: 594381 - DNA, 120 bp, Artificial Sequence
  ENSG00000173598_74 (sequence is synthesized)
aaaactgcaaaggaaaaaaatatgataccatgaaattagaaattcactgcatttgaaatgaaaatgacttatttctgtacttctataactcacaaatttagcagacatcatttagacatt

SEQ ID NO: 594382 - DNA, 120 bp, Artificial Sequence
  ENSG00000173598_75 (sequence is synthesized)
tttgtagtgcaacagatttaaatctggaatttcatggtttgtaaatcactatgtgatactagctataaccatgagcaatattacgggcagtaaatgttgatttctatttcgtttcttgaa

SEQ ID NO: 594383 - DNA, 120 bp, Artificial Sequence
  ENSG00000173598_76 (sequence is synthesized)
acttcttccttcctttctctgggctgatagatgagacaaagggggctcgcccagccccagtttctccatctgggcactcgagaaggcgcctggtccccgggaaggtcccgggccgcgtgc

SEQ ID NO: 594384 - DNA, 120 bp, Artificial Sequence
  ENSG00000173598_77 (sequence is synthesized)
ctttcctccctcactcctttcctccctcacttcttccttcctttctctgggctgatagatgagacaaagggggctcgcccagccccagtttctccatctgggcactcgagaaggcgcctg

SEQ ID NO: 594385 - DNA, 120 bp, Artificial Sequence
  ENSG00000173598_78 (sequence is synthesized)
gtccccgggaaggtcccgggccgcgtaagtctcgcctagcgggagtcaccatcttaacgtgcgaattgagttgaaagccggataaacctcgagtgctcagcgagaggagggtggaaatgg

SEQ ID NO: 594386 - DNA, 120 bp, Artificial Sequence
  ENSG00000173598_79 (sequence is synthesized)
gtccccgggaaggtcccgggccgcctacgtggcgctcccatctggctgttcctgtactgaagttctcagtgctgctggtgagtagcagccggtacccagaccagtggattgtcccaggag

SEQ ID NO: 594387 - DNA, 120 bp, Artificial Sequence
  ENSG00000173599_0 (sequence is synthesized)
caggcagcaggcctcaggcccagacttgggtgttacaggaacagtgtggcctctctggaactctgcagaccaactgccgtgatgctgaagttccgaacagtccatgggggcctgaggctc

SEQ ID NO: 594388 - DNA, 120 bp, Artificial Sequence
  ENSG00000173599_1 (sequence is synthesized)
ctgggaatccgccgaacctccaccgcccccgctgcctccccaaatgtccggcgcctggagtataagcccatcaagaaagtcatggtggccaacagaggtgagattgccatccgtgtgttc

SEQ ID NO: 594389 - DNA, 120 bp, Artificial Sequence
  ENSG00000173599_2 (sequence is synthesized)
cgggcctgcacggagctgggcatccgcaccgtagccatctactctgagcaggacacgggccagatgcaccggcagaaagcagatgaagcctatctcatcggccgcggcctggcccccgtg

SEQ ID NO: 594390 - DNA, 120 bp, Artificial Sequence
  ENSG00000173599_3 (sequence is synthesized)
caggcctacctgcacatcccagacatcatcaaggtggccaaggagaacaacgtagatgcagtgcaccctggctacgggttcctctctgagcgagcggacttcgcccaggcctgccaggat

SEQ ID NO: 594391 - DNA, 120 bp, Artificial Sequence
  ENSG00000173599_4 (sequence is synthesized)
gcaggggtccggtttattgggccaagcccagaagtggtccgcaagatgggagacaaggtggaggcccgggccatcgccattgctgcgggtgttcccgttgtccctggcacagatgccccc

SEQ ID NO: 594392 - DNA, 120 bp, Artificial Sequence
  ENSG00000173599_5 (sequence is synthesized)
atcacgtccctgcatgaggcccacgagttctccaacacctacggcttccccatcatcttcaaggcggcctatgggggtggagggcgtggcatgagggtggtgcacagctacgaggagctg

SEQ ID NO: 594393 - DNA, 120 bp, Artificial Sequence
  ENSG00000173599_6 (sequence is synthesized)
gaggagaattacacccgggcctactcagaggctctggccgcctttgggaatggggcgctgtttgtggagaagttcatcgagaagccacggcacatcgaggtgcagatcttgggggaccag

SEQ ID NO: 594394 - DNA, 120 bp, Artificial Sequence
  ENSG00000173599_7 (sequence is synthesized)
tatgggaacatcctgcacctgtacgagcgagactgctccatccagcggcggcaccagaaggtggtcgagattgcccccgccgcccacctggacccgcagcttcggactcggctcaccagc

SEQ ID NO: 594395 - DNA, 120 bp, Artificial Sequence
  ENSG00000173599_8 (sequence is synthesized)
gactctgtgaaactcgctaaacaggtgggctacgagaacgcaggcaccgtggagttcctggtggacaggcacggcaagcactacttcatcgaggtcaactcccgcctgcaggtggagcac

SEQ ID NO: 594396 - DNA, 120 bp, Artificial Sequence
  ENSG00000173599_9 (sequence is synthesized)
acggtcacagaggagatcaccgacgtagacctggtccatgctcagatccacgtggctgagggcaggagcctacccgacctgggcctgcggcaggagaacatccgcatcaacgggtgtgcc

SEQ ID NO: 594397 - DNA, 120 bp, Artificial Sequence
  ENSG00000173599_10 (sequence is synthesized)
atccagtgccgggtcaccaccgaggaccccgcgcgcagcttccagccggacaccggccgcattgaggtgttccggagcggagagggcatgggcatccgcctggataatgcttccgccttc

SEQ ID NO: 594398 - DNA, 120 bp, Artificial Sequence
  ENSG00000173599_11 (sequence is synthesized)
caaggagccgtcatctcgccccactacgactccctgctggtcaaagtcattgcccacggcaaagaccaccccacggccgccaccaagatgagcagggcccttgcggagttccgcgtccga

SEQ ID NO: 594399 - DNA, 120 bp, Artificial Sequence
  ENSG00000173599_12 (sequence is synthesized)
ggtgtgaagaccaacatcgccttcctgcagaatgtgctcaacaaccagcagttcctggcaggcactgtggacacccagttcatcgacgagaacccagagctgttccagctgcggcctgca

SEQ ID NO: 594400 - DNA, 120 bp, Artificial Sequence
  ENSG00000173599_13 (sequence is synthesized)
cagaaccgggcccaaaagctgttgcactacctcggccatgtcatggtaaacggtccaaccaccccgattcccgtcaaggccagccccagccccacggaccccgttgtccctgcagtgccc

SEQ ID NO: 594401 - DNA, 120 bp, Artificial Sequence
  ENSG00000173599_14 (sequence is synthesized)
ataggcccgcccccggctggtttcagagacatcctgctgcgagaggggcctgagggctttgctcgagctgtgcggaaccacccggggctgctgctgatggacacgaccttcagggacgcc

SEQ ID NO: 594402 - DNA, 120 bp, Artificial Sequence
  ENSG00000173599_15 (sequence is synthesized)
caccagtcactgctggccactcgtgtgcgcacccacgatctcaaaaagatcgccccctatgttgcccacaacttcagcaagctcttcagcatggagaactggggaggagccacgtttgac

SEQ ID NO: 594403 - DNA, 120 bp, Artificial Sequence
  ENSG00000173599_16 (sequence is synthesized)
ggagctccgggagctcatccccaacatccctttccagatgctgctgcggggggccaatgctgtgggctacaccaactacccagacaacgtggtcttcaagttctgtgaagtggccaaaga

SEQ ID NO: 594404 - DNA, 120 bp, Artificial Sequence
  ENSG00000173599_17 (sequence is synthesized)
gaatggcatggatgtcttccgtgtgtttgactccctcaactacttgcccaacatgctgctgggcatggaggcggcaggaagtgccggaggcgtggtggaggctgccatctcatacacggg

SEQ ID NO: 594405 - DNA, 120 bp, Artificial Sequence
  ENSG00000173599_18 (sequence is synthesized)
cgacgtggccgaccccagccgcaccaagtactcactgcagtactacatgggcttggccgaagagctggtgcgagctggcacccacatcctgtgcatcaaggacatggccgggctgctgaa

SEQ ID NO: 594406 - DNA, 120 bp, Artificial Sequence
  ENSG00000173599_19 (sequence is synthesized)
gcccacggcctgcaccatgctggtcagctccctccgggaccgcttccccgacctcccactgcacatccacacccacgacacgtcaggggcaggcgtggcagccatgctggcctgtgccca

SEQ ID NO: 594407 - DNA, 120 bp, Artificial Sequence
  ENSG00000173599_20 (sequence is synthesized)
ggctggagctgatgtggtggatgtggcagctgattccatgtctgggatgacttcacagcccagcatgggggccctggtggcctgtaccagagggactcccctggacacagaggtgcccat

SEQ ID NO: 594408 - DNA, 120 bp, Artificial Sequence
  ENSG00000173599_21 (sequence is synthesized)
ggagcgcgtgtttgactacagtgagtactgggagggggctcggggactgtacgcggccttcgactgcacggccaccatgaagtctggcaactcggacgtgtatgaaaatgagatcccagg

SEQ ID NO: 594409 - DNA, 120 bp, Artificial Sequence
  ENSG00000173599_22 (sequence is synthesized)
gggccagtacaccaacctgcacttccaggcccacagcatggggcttggctccaagttcaaggaggtcaagaaggcctatgtggaggccaaccagatgctgggcgatctcatcaaggtgac

SEQ ID NO: 594410 - DNA, 120 bp, Artificial Sequence
  ENSG00000173599_23 (sequence is synthesized)
gccctcctccaagatcgtgggggacctggcccagtttatggtgcagaatggattgagccgggcagaggccgaagctcaggcggaagagctgtcctttccccgctccgtggtggagttcct

SEQ ID NO: 594411 - DNA, 120 bp, Artificial Sequence
  ENSG00000173599_24 (sequence is synthesized)
gcagggctacatcggtgtcccccatggggggttccccgaaccctttcgctctaaggtactgaaggacctgccaagggtggaggggcggcctggagcctccctccctcccctggatctgca

SEQ ID NO: 594412 - DNA, 120 bp, Artificial Sequence
  ENSG00000173599_25 (sequence is synthesized)
ggcactggagaaggagctggtagaccggcatggggaggaggtgacgccggaagatgtgctctcagcagctatgtaccccgatgtgtttgcccacttcaaggacttcactgccacctttgg

SEQ ID NO: 594413 - DNA, 120 bp, Artificial Sequence
  ENSG00000173599_26 (sequence is synthesized)
ccccctggatagcctgaatactcgcctcttcctgcagggacccaagatcgcagaggagtttgaggtggagctggagcggggcaagacgctgcacatcaaagccctggccgtgagcgacct

SEQ ID NO: 594414 - DNA, 120 bp, Artificial Sequence
  ENSG00000173599_27 (sequence is synthesized)
gaaccgggccggccagaggcaggtcttctttgagctcaatgggcagctgcggtccatcttggtcaaggacacccaggccatgaaggagatgcacttccaccccaaggccctaaaggacgt

SEQ ID NO: 594415 - DNA, 120 bp, Artificial Sequence
  ENSG00000173599_28 (sequence is synthesized)
gaagggccagatcggggcgcccatgcctgggaaggtgatagacatcaaagtggtggcaggggccaaggtggccaagggccagcccctgtgtgtgctcagtgccatgaagatggagactgt

SEQ ID NO: 594416 - DNA, 120 bp, Artificial Sequence
  ENSG00000173599_29 (sequence is synthesized)
ggtgacctcacccatggagggtactgtccgcaaggttcatgtgaccaaggacatgacactggaaggtgacgacctcatcctggagatcgagtgatcttgccccagaccggcagcctggcc

SEQ ID NO: 594417 - DNA, 120 bp, Artificial Sequence
  ENSG00000173599_30 (sequence is synthesized)
atccccaagccttcaacagaagctgtgctgccacggcaggcccaggccagccagtgcccgaggccaggaaggccgggccgtggaggtcctgtccacagctggacaggagagacaccgcct

SEQ ID NO: 594418 - DNA, 120 bp, Artificial Sequence
  ENSG00000173599_31 (sequence is synthesized)
gcggtggttcattcctttcagccatcgtcctttcctccggcggacagctgcttacatgttcatctcttgccaaataagggtcccctcctcactggagactacaagtggtgggtcaggtgg

SEQ ID NO: 594419 - DNA, 120 bp, Artificial Sequence
  ENSG00000173599_32 (sequence is synthesized)
tcctaggacccaggggaggtttaggggtcctatctcctgggggaaggggagatctaagatgtcccaggtcctgggaagtttactcaataaagctggctttcccctgccctccatgctgga

SEQ ID NO: 594420 - DNA, 120 bp, Artificial Sequence
  ENSG00000173599_33 (sequence is synthesized)
gttctctgtcagtggaggcagcagcggtagaggcggcggcgaggactggcgacggcgaggagatagtgtctgccttctggagagctgaccaaacactaaggatgctgaagttccgaacag

SEQ ID NO: 594421 - DNA, 120 bp, Artificial Sequence
  ENSG00000173599_34 (sequence is synthesized)
gttctctgtcagtggaggcagcagcggtagaggcggcggcgaggactggcgacggcgaggagctgccttctagtctcacctgtggacactttgccaaaggagtcgggcctgacggtggaa

SEQ ID NO: 594422 - DNA, 120 bp, Artificial Sequence
  ENSG00000173599_35 (sequence is synthesized)
gatgggaaatggccaaaagaataaaccatttcctcttacttaccgaatgaaaagcttgcttcatcttggcgttcaagactctctaatatgattccacctgttgggctctttcttccattt

SEQ ID NO: 594423 - DNA, 120 bp, Artificial Sequence
  ENSG00000173599_36 (sequence is synthesized)
gttctctgtcagtggaggcagcagcggtagaggcggcggcgaggactggcgacggcgaggagatggagaaactgactaaagcgcctcgcgcgaggtccctgagggttcgaacccaagtct

SEQ ID NO: 594424 - DNA, 120 bp, Artificial Sequence
  ENSG00000173599_37 (sequence is synthesized)
gtcaggatcgggagcccaagttgtccccatcgtactggatgtggctcagctctgcaggaagccgcggcgtatagtgtctgccttctggagagctgaccaaacactaaggatgctgaagtt

SEQ ID NO: 594425 - DNA, 120 bp, Artificial Sequence
  ENSG00000173599_38 (sequence is synthesized)
tcctctactttgtttcagacggggaagctccaggcgcccagacgcagtgattcgcccaaggccgctcattcaggagacagggtcttgctgtcacccacccaggctggagtgcagtggcgc

SEQ ID NO: 594426 - DNA, 87 bp, Artificial Sequence
  ENSG00000173599_39 (sequence is synthesized)
gcgcgatctcggctcactgcagtctcgacctcccgggctcaagcgaccctcctgccacagtcccccagtgctgggactacaggcggt

SEQ ID NO: 594427 - DNA, 90 bp, Artificial Sequence
  ENSG00000173599_40 (sequence is synthesized)
tcaagcgagcggcctgccctgcctcgtctgaaattctaaaaaatcagattgtgtctttattttgtgagaagagctgccttctagtctcac

SEQ ID NO: 594428 - DNA, 120 bp, Artificial Sequence
  ENSG00000173599_41 (sequence is synthesized)
aaagcttgtttggctcctcagttcccaaggcactgctgacttgagctttgcctagggactaaggctctgtagtctaagcttgtcaccctcccctcctcttcagctttctcctggggggac

SEQ ID NO: 594429 - DNA, 120 bp, Artificial Sequence
  ENSG00000173599_42 (sequence is synthesized)
atggatgtggccctttgttgtgttgttaagtgttatgcctgaaggcgttaccccaggtactcccagcactacctcgggtttcctactcttgtgttacctccttgtcctgatatgcctcga

SEQ ID NO: 594430 - DNA, 120 bp, Artificial Sequence
  ENSG00000173599_43 (sequence is synthesized)
ggccagagaaagaggtggggccgggagggcacgggacagctgggagtacatttccactgcctgtgtgtggaagggcctgactgcttctgtggcagctcctttcctgatgacatccaccat

SEQ ID NO: 594431 - DNA, 120 bp, Artificial Sequence
  ENSG00000173599_44 (sequence is synthesized)
gacatcacaacgaggctttgggaaaattccacgacctggccatgctgagtcatacttagtctctggggatgtgtgtcacctttctcttgtctgtcactgagtgctgcagttactatgaag

SEQ ID NO: 594432 - DNA, 120 bp, Artificial Sequence
  ENSG00000173599_45 (sequence is synthesized)
tgacacatgctgcccatttattacgtttgcacatcactttatgctgctttggagcctcttctcatgtacatgctgtgtatcaatgtgaaatgtattaatattaaatcattaataataagt

SEQ ID NO: 594433 - DNA, 120 bp, Artificial Sequence
  ENSG00000173599_46 (sequence is synthesized)
atattatttattctggaaaatatttgtctcttgcaatgtgtgaggaaccagaggttcagagagactagagactaagcgacttgtccagagagtgaacacattcatcacctttggaattcc

SEQ ID NO: 594434 - DNA, 120 bp, Artificial Sequence
  ENSG00000173599_47 (sequence is synthesized)
ttgtccagagagtgaacacattcatcacctttggaattcctccctctgcctcctcactcttcaggaaaccatggaactgctttctgttactatagacagagtcttgctctgtcacccaag

SEQ ID NO: 594435 - DNA, 120 bp, Artificial Sequence
  ENSG00000173599_48 (sequence is synthesized)
attgggaagctgtgcgtcctcgcagcgcctgcggcccctccctcccgctctgtcgccgccgggccatttccctggaagagcggctcggaaccagctcctctcagagaaagggctcccggc

SEQ ID NO: 594436 - DNA, 120 bp, Artificial Sequence
  ENSG00000173599_49 (sequence is synthesized)
tgaggtgtccccaacaattttattataaataaaaacaagactcccagtgggtggctgcagcccctgcctcggtggctgtgagcacctgttggaggggcctgcccttaccctggtctggag

SEQ ID NO: 594437 - DNA, 120 bp, Artificial Sequence
  ENSG00000173599_50 (sequence is synthesized)
gccagaaccgaggaaagggctccctgcccctccaagtacacaggggagcctgaggtactgagaataaaaaccagggagggactcccaggccaggcggttggaggtgaggtccaggttgag

SEQ ID NO: 594438 - DNA, 120 bp, Artificial Sequence
  ENSG00000173599_51 (sequence is synthesized)
gccgatgccggcccagggcacctgccggaggttgttgtaggacaggtccaggtcctccaggctctctaggaagtcgtcgaaggctcccggcgcgatgcggcccagctggttgccgctgag

SEQ ID NO: 594439 - DNA, 120 bp, Artificial Sequence
  ENSG00000173599_52 (sequence is synthesized)
gatgaggtgctgcagattgacggggccccggaggctcccggtgcccagctccaccagcctgttgccgtcaaggtggagggaacgcaggctctcgaggtccccaaaggcgcgggccccaat

SEQ ID NO: 594440 - DNA, 120 bp, Artificial Sequence
  ENSG00000173599_53 (sequence is synthesized)
gcgggtgatggcattgcgagacagtgtcaggtccaccagtcccgtcatgttgcggaagtcagggggccccagggcctggatgaagttgtcagccagccgcagctccactgtgcgccggtc

SEQ ID NO: 594441 - DNA, 120 bp, Artificial Sequence
  ENSG00000173599_54 (sequence is synthesized)
gtcagaagacaccaggcacagcccttggccgcagccctgggccgcccctgtggacaggaagccaggaggccccaggctgctgtgactgcccccaccggccctggtagccccacccttgtc

SEQ ID NO: 594442 - DNA, 120 bp, Artificial Sequence
  ENSG00000173599_55 (sequence is synthesized)
cgtgtgccaccagcggcccgtgtcctgtcctcccgtctcgggggacctagccagacaacaccagagactagcactgaggtgtccccaacaattttattataaataaaaacaagactccca

SEQ ID NO: 594443 - DNA, 120 bp, Artificial Sequence
  ENSG00000173599_56 (sequence is synthesized)
tgaatccaggctggcgggatgcatgggggtcttcaccaggagcagctgtggatgccagcagtttggcatgtcaggtcttaagctcaatcaataaaaaaaggctgcgctctgatttgtgga

SEQ ID NO: 594444 - DNA, 120 bp, Artificial Sequence
  ENSG00000173599_57 (sequence is synthesized)
ggccagctggaagcccggggatcctggagggatgtgtccctgtccctgagcccagccactctcactgctgccctcgactcagcctctgcccagcccaccctgacccactgcccgctttct

SEQ ID NO: 594445 - DNA, 120 bp, Artificial Sequence
  ENSG00000173610_0 (sequence is synthesized)
agcagagaaaaacatttgcttcacatctcatcaaatcttctgcatcaagccacatcatgttaaacaaccttctgctgttctcccttcagataagtctcataggaaccactcttggtggga

SEQ ID NO: 594446 - DNA, 120 bp, Artificial Sequence
  ENSG00000173610_1 (sequence is synthesized)
atgttttgatttggccaatggaaggtagtcattggctaaatgttaagataattatagatgagctcattaaaaaggagcataatgtgactgtcctagttgcctctggtgcacttttcatca

SEQ ID NO: 594447 - DNA, 120 bp, Artificial Sequence
  ENSG00000173610_2 (sequence is synthesized)
caccaacctctaacccatctctgacatttgaaatatataaggtgccctttggcaaagaaagaatagaaggagtaattaaggacttcgttttgacatggctggaaaatagaccatctcctt

SEQ ID NO: 594448 - DNA, 120 bp, Artificial Sequence
  ENSG00000173610_3 (sequence is synthesized)
caaccatttggagattctatcaggagatggccaaagtaatcaaggacttccacatggtgtctcaggagatctgtgatggcgttcttaaaaaccaacagctgatggcaaagctaaagaaaa

SEQ ID NO: 594449 - DNA, 120 bp, Artificial Sequence
  ENSG00000173610_4 (sequence is synthesized)
gcaagtttgaagtcctggtgtctgatccagtatttccttgtggcgatatagtagctttaaaacttggaattccatttatgtactccttgaggttttctccagcctcaacagtggaaaagc

SEQ ID NO: 594450 - DNA, 120 bp, Artificial Sequence
  ENSG00000173610_5 (sequence is synthesized)
actgtgggaaggtaccataccctccttcctatgttcctgctgttttatcagaactcaccgaccaaatgtctttcactgacagaataagaaatttcatctcctaccacctacaggactaca

SEQ ID NO: 594451 - DNA, 120 bp, Artificial Sequence
  ENSG00000173610_6 (sequence is synthesized)
tgtttgaaactctttggaaatcatgggattcatactatagtaaagctttaggaagacccactacgttatgtgagactatggggaaagctgaaatttggttaatccgaacatattgggatt

SEQ ID NO: 594452 - DNA, 120 bp, Artificial Sequence
  ENSG00000173610_7 (sequence is synthesized)
ttgaatttcctcgtccatacttacctaattttgagtttgttggaggattgcactgcaaacctgccaaacctttacctaaggaaatggaagaatttatccagagctcaggtaaaaatggtg

SEQ ID NO: 594453 - DNA, 120 bp, Artificial Sequence
  ENSG00000173610_8 (sequence is synthesized)
ttgtggtgttttctctgggatcaatggtcaaaaaccttacagaagaaaaggccaatcttattgcctcagcccttgcccagattccacagaaggttttatggagatacaaaggaaagaaac

SEQ ID NO: 594454 - DNA, 120 bp, Artificial Sequence
  ENSG00000173610_9 (sequence is synthesized)
cagccacattaggaaacaatactcagctctttgattggataccccagaatgatcttcttggacatcccaaaaccaaagcttttatcactcatggtggaactaatgggatctacgaagcta

SEQ ID NO: 594455 - DNA, 120 bp, Artificial Sequence
  ENSG00000173610_10 (sequence is synthesized)
aaggagcagctgtggaagtgaacctaaacacaatgacaagtgtggatttgcttagcgctttgagaacagtcattaatgaaccttcttataaagagaatgctatgaggttatcaagaattc

SEQ ID NO: 594456 - DNA, 120 bp, Artificial Sequence
  ENSG00000173610_11 (sequence is synthesized)
accatgatcaacctgtaaagcccctggatcgagcagtcttctggatcgagtttgtcatgcgccacaaaggagccaagcaccttcgggttgcagcccatgacctcacctggttccagtacc

SEQ ID NO: 594457 - DNA, 120 bp, Artificial Sequence
  ENSG00000173610_12 (sequence is synthesized)
actctttggatgtaattgggttcttgctggtctgtgtgacaacggctatatttttggtcatacaatgttgtttgttttcctgtcaaaaatttggtaagataggaaagaagaaaaaaagag

SEQ ID NO: 594458 - DNA, 120 bp, Artificial Sequence
  ENSG00000173610_13 (sequence is synthesized)
aataggtcaagaaaaagaggaaatatatatatttttaagtttggcaaaatcctgagtagtgtagtcctattaattccagacaaaaggagtttaacaaaaacacgtctcccatcctgtttc

SEQ ID NO: 594459 - DNA, 120 bp, Artificial Sequence
  ENSG00000173610_14 (sequence is synthesized)
caaattttctatttctctacctgcgataagcctactgataaagcctagattttggcatgattattattaacttgtgagttatagtcttctatttttcctttgtctctccctgctgactat

SEQ ID NO: 594460 - DNA, 120 bp, Artificial Sequence
  ENSG00000173610_15 (sequence is synthesized)
accctcttcctgtcacttttctgacacaaggatactacctaattttaaatatgttctattcatagtatcaaattattttatcgttaaccttaattaatgattaacaatatgctgaatcct

SEQ ID NO: 594461 - DNA, 120 bp, Artificial Sequence
  ENSG00000173610_16 (sequence is synthesized)
ggtaatgcatacagtgtagatggaatttgataggtgtaaggaagagtcaaattcacaaatttccatataccaaacaaatcagggagccaccgtaggagagtagtgtgttatgagaaaggt

SEQ ID NO: 594462 - DNA, 120 bp, Artificial Sequence
  ENSG00000173610_17 (sequence is synthesized)
aatgatttccttttttaataaaaacaaactcttctgcttgctcaatgtttcaggagttagagaatgaattttaagtgtgacgtgcgtccctattaaatgtctacaaaattttcattaagc

SEQ ID NO: 594463 - DNA, 120 bp, Artificial Sequence
  ENSG00000173610_18 (sequence is synthesized)
atatctagaaaatcacggcataacttgcctgcctttcttcaacatatattcttatataacctgtagtggaagatttgggtactgtctttaataaatcaatcaatcgactcttttatttca

SEQ ID NO: 594464 - DNA, 120 bp, Artificial Sequence
  ENSG00000173610_19 (sequence is synthesized)
aggagaaagttctatgttatatgttgaaggtgaacagatcatatttagaggatataacaattagaaatctagaaaataattatcatttttataaaatttttagtcaactgtacaaataat

SEQ ID NO: 594465 - DNA, 120 bp, Artificial Sequence
  ENSG00000173610_20 (sequence is synthesized)
attggttaaatattaagattattctagaagagttgattcaaagaaatcacaatgtgactgtactggcttcatcagcaactctattcatcaactccaatcccgattctcctgtgaattttg

SEQ ID NO: 594466 - DNA, 120 bp, Artificial Sequence
  ENSG00000173610_21 (sequence is synthesized)
aagtgatacctgtttcctacaagaagagcaatatagattccttaattgagcatatgataatgctgtggattgaccatagaccaactcctctcacaatatgggctttctacaaagaactag

SEQ ID NO: 594467 - DNA, 120 bp, Artificial Sequence
  ENSG00000173610_22 (sequence is synthesized)
ttgatgtgttggtagcagacccagtaacaatctgtggtgatcttgttgctctgaaattaggaattccatttatgtacacattgaggttctctccagcatcaacagtggagagacactgtg

SEQ ID NO: 594468 - DNA, 120 bp, Artificial Sequence
  ENSG00000173610_23 (sequence is synthesized)
ggaaaatcccagcaccagtctcctatgtaccggcagccttatcagagctcactgaccagatgacctttggtgaaaggattaaaaataccatatcttattctctgcaagactatatatttc

SEQ ID NO: 594469 - DNA, 87 bp, Artificial Sequence
  ENSG00000173610_24 (sequence is synthesized)
attgtagttgggattacaggctgccagcaggaagacccactacgttatgtgagactatggggaaagctgaaatttggttaatccgaa

SEQ ID NO: 594470 - DNA, 120 bp, Artificial Sequence
  ENSG00000173610_25 (sequence is synthesized)
cagctcgtcaaagtcattctccgtccagttttgttctgttgcgtgaagacccactacgttatgtgagactatggggaaagctgaaatttggttaatccgaacatattgggattttgaatt

SEQ ID NO: 594471 - DNA, 120 bp, Artificial Sequence
  ENSG00000173610_26 (sequence is synthesized)
actctactccctctcttcttccctttctccttttctccatctctctctcttcctctctctctctctttctttatttctacctctttcttccctttttctcacttttccttgctttcctct

SEQ ID NO: 594472 - DNA, 120 bp, Artificial Sequence
  ENSG00000173610_27 (sequence is synthesized)
ctctccctccctgcttgcctgccttcctcccttcctcccttccttccttcttttcttccttcctccttcctttcttccatcctctttaatttctccttcttcttaatatataaacatgat

SEQ ID NO: 594473 - DNA, 120 bp, Artificial Sequence
  ENSG00000173611_0 (sequence is synthesized)
agcttcccgagcgagccctgcggccgccggagcagctcccgcggcggagcaggagccggatggtcagaggagcccggcagccccagcagccgcggagtcgcctggcccccagactgactg

SEQ ID NO: 594474 - DNA, 120 bp, Artificial Sequence
  ENSG00000173611_1 (sequence is synthesized)
gcacagtggagaaaccgcctcgaaaacggagaagcaggactgaatttgctcttaaagaaatcatgtcctctggaggtgctgaagatgatatcccacagggagagaggaaaacagttacag

SEQ ID NO: 594475 - DNA, 120 bp, Artificial Sequence
  ENSG00000173611_2 (sequence is synthesized)
atttttgttatcttctggataaatctaagcaactgttcaatgggttaagagatttgccacaatatggacagaagcagtggcagtcctattttggaagaacttttgatgtttacaccaaac

SEQ ID NO: 594476 - DNA, 120 bp, Artificial Sequence
  ENSG00000173611_3 (sequence is synthesized)
tctggaagttccagcagcagcatcgacaagtcttggataatcggtatggcttgaagcgctggcaaataggagaaattgcttccaagattgggcagctatactatcattattacttacgca

SEQ ID NO: 594477 - DNA, 120 bp, Artificial Sequence
  ENSG00000173611_4 (sequence is synthesized)
catcggaaaccagctatctgaatgaggctttttccttctattctgcaatcagacagagatcatattattctcaagtcaataaagaggacagacctgaattggtagttaagaagttacgat

SEQ ID NO: 594478 - DNA, 120 bp, Artificial Sequence
  ENSG00000173611_5 (sequence is synthesized)
attatgcaagatttatagtagtttgtcttcttctcaacaaaatggatgttgtaaaggatctggtaaaggaattgtcagatgaaattgaagattatactcaccgatttaatactgaagatc

SEQ ID NO: 594479 - DNA, 120 bp, Artificial Sequence
  ENSG00000173611_6 (sequence is synthesized)
aagtggaatggaacttggtgcttcaagaagtagcagctttcattgaggcggatcctgtaatggtattaaatgatgataataccattgttatcacatcgaatcgccttgctgaaacaggag

SEQ ID NO: 594480 - DNA, 120 bp, Artificial Sequence
  ENSG00000173611_7 (sequence is synthesized)
ccccattgctggaacagggcatgattgtgggacagttgtctctggctgacgcactcattattggtaattgtaataatcaggttaagttcagtgaactaactgttgacatgttccggatgt

SEQ ID NO: 594481 - DNA, 120 bp, Artificial Sequence
  ENSG00000173611_8 (sequence is synthesized)
tacaagctctggaaagggagccaatgaatttagcttcccagatgaataaaccaggaatgcaggaatcagctgacaagcctactagacgagaaaacccccacaagtatctgctctacaaac

SEQ ID NO: 594482 - DNA, 120 bp, Artificial Sequence
  ENSG00000173611_9 (sequence is synthesized)
caaccttcagccagctatataccttcttagcagcgtcttttaaggagctgcctgccaatagcgtgcttctgatttacctgtcggccactggcgttttccccacaggtcgttctgatagtg

SEQ ID NO: 594483 - DNA, 120 bp, Artificial Sequence
  ENSG00000173611_10 (sequence is synthesized)
aaggtccttatgattttggaggtgtacttactaatagtaaccgggatattattaatggagatgccatccacaaacgaaatcagtcccacaaggaaatgcactgccttcatcccggggatc

SEQ ID NO: 594484 - DNA, 120 bp, Artificial Sequence
  ENSG00000173611_11 (sequence is synthesized)
tctatcctttcaccaggaagccactgttcatcattgtggattcgtctaatagtgttgcgtataagaatttcacaaacttgtttggacagccactagtctgcttgctttctcctacagcat

SEQ ID NO: 594485 - DNA, 120 bp, Artificial Sequence
  ENSG00000173611_12 (sequence is synthesized)
atccaaaagctttacaagatcaatctcagcgaggtagcctcttcactctctttttgaacaatcctctaatggccttcctatttgtctctggattgtcaagcatgcgcagaggcctatggg

SEQ ID NO: 594486 - DNA, 120 bp, Artificial Sequence
  ENSG00000173611_13 (sequence is synthesized)
aaaagtgtcaagaatatcttcgaaaaatcaaccgtgatattgcccagctactgactcattcacgttcaatagatcaggcatttctccagttttttggagatgaatttcttcgcttgctcc

SEQ ID NO: 594487 - DNA, 120 bp, Artificial Sequence
  ENSG00000173611_14 (sequence is synthesized)
tcacaagatttatcttttgttcagccaccatgaggatgcacaagatttttcgggaaacacgaaattatccagaatcatatccacaactgccaagggatgaaacagtggagaatcctcatc

SEQ ID NO: 594488 - DNA, 120 bp, Artificial Sequence
  ENSG00000173611_15 (sequence is synthesized)
tccagaagcacattttggaattagcatccattctggatgttcgaaacgtgttctttgagaataccattgatgactattaaaacaaaaaccctgttgtcgaaacaagttttcattttccac

SEQ ID NO: 594489 - DNA, 120 bp, Artificial Sequence
  ENSG00000173611_16 (sequence is synthesized)
aaattttaaatggtgcagttttctaacgtgataagacacatagtggtgttacttagtttttattttttaatttagggccaccattttaaaaacaaacaaaaaaatgttcacacttttagg

SEQ ID NO: 594490 - DNA, 120 bp, Artificial Sequence
  ENSG00000173611_17 (sequence is synthesized)
gtaactgttttaaaatgcaacctttcaggtcttttaaaatcttaaccttggaatttttattttttgattttgagggatggatatttacctccaacttctaatcctacactcaaatagtca

SEQ ID NO: 594491 - DNA, 120 bp, Artificial Sequence
  ENSG00000173611_18 (sequence is synthesized)
ctattctcaccctgagaagagtaaatcatttatttttgtataatgaggtaaatccaactcttatacttggacctaagttaaatgtctggatttggaaatatgtaatggttcataatgatg

SEQ ID NO: 594492 - DNA, 120 bp, Artificial Sequence
  ENSG00000173611_19 (sequence is synthesized)
aagctagccaccatggactactgaaaatcaagaacagagtccctccataatatattttttctcattccaacttagctggtagaaaaatgtttgatcctttgaaacatgatcaagccagtt

SEQ ID NO: 594493 - DNA, 120 bp, Artificial Sequence
  ENSG00000173611_20 (sequence is synthesized)
ttttgaaatcatttaatttctttcaatactgtcataatttcagaaattggattgaattgcatctgaaagctacatcttgattgaggacttgaggtggtaatattacttggaatgtatgag

SEQ ID NO: 594494 - DNA, 120 bp, Artificial Sequence
  ENSG00000173611_21 (sequence is synthesized)
tattatgagatttatttgcatattttctttgtagtctgtgaatgctggaaatgaaaaaggaaacaactttgaaatattttagtcaaaaaaccatgtcattggtttcataatacaatgtct

SEQ ID NO: 594495 - DNA, 120 bp, Artificial Sequence
  ENSG00000173611_22 (sequence is synthesized)
ccaataggaattctatttaaactcttggtttatgagatcacatttaaagactggattgatgtctgtgacataaagttttaattttttgcctcattcaaatttatgagacttcaaagtcat

SEQ ID NO: 594496 - DNA, 120 bp, Artificial Sequence
  ENSG00000173611_23 (sequence is synthesized)
agatgttttaaattttggtaaggggtaactgggtgttatgaaacctaaaatgtaagttgattttgcattggtaatttggaaataagatttattaacattccctgtatttagtattttata

SEQ ID NO: 594497 - DNA, 120 bp, Artificial Sequence
  ENSG00000173611_24 (sequence is synthesized)
ttcatgcacaaaatttttattatcttaaataggactcagtgtatattataaagatttttcttttttgtgttttccttccctgtcattccctttataatttcacagtcacttgctatgaag

SEQ ID NO: 594498 - DNA, 120 bp, Artificial Sequence
  ENSG00000173611_25 (sequence is synthesized)
tcctccctcctttttgattatgcagcattcaatttcagaaatctatgaatgagaaggccttatacctaattttctgtacaggatcacatctggcagtcccaggagaagtgagctgattgc

SEQ ID NO: 594499 - DNA, 120 bp, Artificial Sequence
  ENSG00000173611_26 (sequence is synthesized)
ttttgatatctctttcccatggccctaggtaaattatactctaaatttatttattttttttgaaacagagtcttgcttttgttgcccaggttggagtgcagtggggctatctcggctcac

SEQ ID NO: 594500 - DNA, 120 bp, Artificial Sequence
  ENSG00000173611_27 (sequence is synthesized)
ttcatttctggcatagagactaatttgggtctaagttattcccattcctgctttgatttgctgatttttcaaacctgaagtccaaagttactgtttttggggtttggggacttggggagt

SEQ ID NO: 594501 - DNA, 90 bp, Artificial Sequence
  ENSG00000173611_28 (sequence is synthesized)
attttacttttttttttttttttttttaagagacagagtcttgctttgttgcccaggttggggtgcagcggtacatattcaggcaatctt

SEQ ID NO: 594502 - DNA, 74 bp, Artificial Sequence
  ENSG00000173611_29 (sequence is synthesized)
ctttattttttaattttttgtagagacatggtctcactttgttgagcaggctggcctcaaactcctgggctcaa

SEQ ID NO: 594503 - DNA, 80 bp, Artificial Sequence
  ENSG00000173611_30 (sequence is synthesized)
tgtttactttttaaaaatttttttgtttgttctttcaaacagtatttcagaaagcttgggaaaagttaccctggaaagat

SEQ ID NO: 594504 - DNA, 120 bp, Artificial Sequence
  ENSG00000173611_31 (sequence is synthesized)
agtatttcagaaagcttgggaaaagttaccctggaaagatttcctttgctagtgggttttcattttcaggtaaagactgctttccttttttttcagtatcttaataaacttcatagcttt

SEQ ID NO: 594505 - DNA, 120 bp, Artificial Sequence
  ENSG00000173611_32 (sequence is synthesized)
cctttagtaacagtgttcattgaactacagcaatagactatcttcggttttctgacctcttgtttcaattccccttaagtcctgtgccagttatgctcctaccaacacagagtttcctgt

SEQ ID NO: 594506 - DNA, 120 bp, Artificial Sequence
  ENSG00000173611_33 (sequence is synthesized)
cctctaatgtttaaaatagtatttactgttctgagctttatcctcccccgttaagcataaagaacactggtctgagaactaggagacctaagttctagtcctggctttcctggtaactta

SEQ ID NO: 594507 - DNA, 120 bp, Artificial Sequence
  ENSG00000173611_34 (sequence is synthesized)
agcgttatgccctttgacaactgtcttcatgtctctgcttgttagcactctcatctgtaaaatgaagaggttggcccaggtcttctccaactctgattctgtaatttggactcttggttc

SEQ ID NO: 594508 - DNA, 120 bp, Artificial Sequence
  ENSG00000173611_35 (sequence is synthesized)
caaaaatattgatttccccactccaaccaccaagagaactatttaccctgtttgtagtgtacacaaccttttcttttgtaagtcatatttacctagattttgttcaagaaaatctgggtc

SEQ ID NO: 594509 - DNA, 120 bp, Artificial Sequence
  ENSG00000173611_36 (sequence is synthesized)
ccacttagctgttttagaaactagtacagacagagactctcctgaggaaattagagcttttatgattagaaacatgcttgtctaaaaatgagggtcttagaaatcacaacattgaccctt

SEQ ID NO: 594510 - DNA, 120 bp, Artificial Sequence
  ENSG00000173611_37 (sequence is synthesized)
atgatgttgccccttaagctaatagtgtaattccttactggtagttaaaaatctaaagtggactgaagtgatcttgaatcttcaaagagaggaaaactgtgctggaaaatgttattgttt

SEQ ID NO: 594511 - DNA, 120 bp, Artificial Sequence
  ENSG00000173611_38 (sequence is synthesized)
cattgatgccttcaaaaaaatgcgtattaaacaaagactatactccagattttcttctgggcattggggaagcaaacaaaatagacttaaaaatcctcatgttcatgaagcttacattct

SEQ ID NO: 594512 - DNA, 120 bp, Artificial Sequence
  ENSG00000173611_39 (sequence is synthesized)
agtagaaggagtaaggcaataaacataagtaatttatgttagaaaatgttaagtaggatggaaaagtgtagattatggtaaggtaaatcttttgtttgttttcttaagagaagaacaatg

SEQ ID NO: 594513 - DNA, 120 bp, Artificial Sequence
  ENSG00000173611_40 (sequence is synthesized)
tttaaaagagtgatcaagcagggcatggtggcatgaccctattagtcccagctacctgggaggccgaggtgggagggtcacttgagcccaggagtttgtggctgcagtgagctgtgattg

SEQ ID NO: 594514 - DNA, 120 bp, Artificial Sequence
  ENSG00000173611_41 (sequence is synthesized)
caccactgcactccagcctggatggcaaagcaagacctcgtctctggaaaaaaagaaaagaaaaagtgatgatcagggtaggcttcattaggaaggtcacatttgcatgaacactttgcc

SEQ ID NO: 594515 - DNA, 87 bp, Artificial Sequence
  ENSG00000173611_42 (sequence is synthesized)
ggcttcattaggaaggtcacatttgcatgaacactttgccttttctttctttttatgaaagttttaaacatagtttttttgtactca

SEQ ID NO: 594516 - DNA, 66 bp, Artificial Sequence
  ENSG00000173611_43 (sequence is synthesized)
catacagtttaataaatcctccttgtaccttacccagcttctgtatttctttaatcaagggagaag

SEQ ID NO: 594517 - DNA, 120 bp, Artificial Sequence
  ENSG00000173611_44 (sequence is synthesized)
accttacccagcttctgtatttctttaatcaagggagaagaattatctaaaaggacagttgcccaatgggcttgagctgatgatagtggcaaagaatttcattttttaaaaatgcatacc

SEQ ID NO: 594518 - DNA, 120 bp, Artificial Sequence
  ENSG00000173611_45 (sequence is synthesized)
acctgccctttataaaaaaatttaaaccctaatgtatttaattttataattcataaaaatttaaatattggaactaagaacagagcaaagcaaagggaaaaagcactcctttgttttcaa

SEQ ID NO: 594519 - DNA, 120 bp, Artificial Sequence
  ENSG00000173611_46 (sequence is synthesized)
attgcacaaactgtccctggagattctgatagtctctcatctctcttaactatcactgtaaacaacatagaaagcataagactgcaagaagtcagttatacacaaaacaaaatgaagcac

SEQ ID NO: 594520 - DNA, 120 bp, Artificial Sequence
  ENSG00000173611_47 (sequence is synthesized)
gctgagacccaaaaagctattcatagtgatagagctagaactaaaactcagatctcctcatctcagcccagtcttctcagtagctcagactgctttctataatgaacaagaaagaataat

SEQ ID NO: 594521 - DNA, 120 bp, Artificial Sequence
  ENSG00000173611_48 (sequence is synthesized)
tagggatttgtattttggcacaaaacagtatcaaatttttattgtaaaaatccacaaatctgacattttatcttttattctagccaggatgtattcttcatttgcatgtgtgtgtttctc

SEQ ID NO: 594522 - DNA, 120 bp, Artificial Sequence
  ENSG00000173611_49 (sequence is synthesized)
ttagaaagtggtgctctcaaacctttcaaagcacagaatttattgtaccctctttatttttaccaaattgaaacgtttcaggatttcagaagcaaagtgcaatccaattgtggctggagt

SEQ ID NO: 594523 - DNA, 120 bp, Artificial Sequence
  ENSG00000173611_50 (sequence is synthesized)
tttcctgatagaggatccgggtggttccctcccctccaacttctggctactgccctttatttcctttgtgcaatagaattccctgaaacagattatgtcgtaattatactgatttagtca

SEQ ID NO: 594524 - DNA, 120 bp, Artificial Sequence
  ENSG00000173611_51 (sequence is synthesized)
ggataatgggaaaagcgacaaatcggatttatgtattaggtattatggagctttctttagcactctcctccaagtttaatctctgacatgtgtgatatagtaactttctgtctctgagaa

SEQ ID NO: 594525 - DNA, 120 bp, Artificial Sequence
  ENSG00000173611_52 (sequence is synthesized)
gcagtttggacccagctgaaaaattttatttatggagacttgtaatcagcctgatatacagagaacactctggactggaaatatagtcaggtaccaaggtctgctaatttggccattgcc

SEQ ID NO: 594526 - DNA, 120 bp, Artificial Sequence
  ENSG00000173611_53 (sequence is synthesized)
agtgattcaaaaccacctccccaccctgagtaaaagatttgatatgaatatgaatgctatgagtctcctggtgatgttttgggtgtatatgttcctgtgtgtgtttggaaatcatagagg

SEQ ID NO: 594527 - DNA, 120 bp, Artificial Sequence
  ENSG00000173611_54 (sequence is synthesized)
gtatttaccttgagggctcttttgttgaccttatttatttgaaattcttattttatttgtaatggcatatgtatatttttgtgatgctacatgcaatctctgtgtatactttttgtatat

SEQ ID NO: 594528 - DNA, 120 bp, Artificial Sequence
  ENSG00000173611_55 (sequence is synthesized)
atgtatacatatttgtaaatatattggtatgcagtgatacagtatgtgtatattatgtacccatacccattgtgggctgaatttatttaagttctgtgaggacatcctagtggcattgtt

SEQ ID NO: 594529 - DNA, 120 bp, Artificial Sequence
  ENSG00000173611_56 (sequence is synthesized)
catgctgctgtaattaggttgtggctgtatctcattcataagcctctattttgagaggcttgtgtttggataaaatgggctaatttggagttgaaattaggatatgaagatcttaacaga

SEQ ID NO: 594530 - DNA, 120 bp, Artificial Sequence
  ENSG00000173611_57 (sequence is synthesized)
aagctagatatttattcttagctttaaaatcacctgcaaatttttatttaaactgatgataaattagtgatataacctgaaaaacctaagtatgtgaaactgagacaccagcagattctt

SEQ ID NO: 594531 - DNA, 120 bp, Artificial Sequence
  ENSG00000173611_58 (sequence is synthesized)
aggctgtagtagtcctttattttcttgatccatatttaagtattattactgagtagtaaattatgtatattggggcttaatagagaggctgtggaaaaaaattgctttaatcacatttaa

SEQ ID NO: 594532 - DNA, 120 bp, Artificial Sequence
  ENSG00000173611_59 (sequence is synthesized)
aaacataggaaaatgtccattaaataggggaaatatattcccagttgtcatttttatgcctcatactgaattttgattttggaacaattcttttttcatcagtgttttatgtgtctctat

SEQ ID NO: 594533 - DNA, 120 bp, Artificial Sequence
  ENSG00000173611_60 (sequence is synthesized)
gaggcagaaaagggggcattagctaagggatggcctaacctaagtaggataggatttagtgaggaacgggaggttgttaatttgtatatttgcagcagctatgattaatttagtcctgtc

SEQ ID NO: 594534 - DNA, 120 bp, Artificial Sequence
  ENSG00000173611_61 (sequence is synthesized)
ttggcatttccggctacagattttttcttactggacttgcatatcaaaggtgagtaggctcatctgagaaaatgcttccactgaataaaatgccttcactcgtattgctgtgtctctatg

SEQ ID NO: 594535 - DNA, 120 bp, Artificial Sequence
  ENSG00000173611_62 (sequence is synthesized)
agaccacttgtgttctgcaagttgatgatatattcgcacatgaagtagagtttttaatattagatgcatggtgtgctataaaaatctgggccttcaaacctctcccaaggatgatagggt

SEQ ID NO: 594536 - DNA, 120 bp, Artificial Sequence
  ENSG00000173611_63 (sequence is synthesized)
tggggaggataagaggatagtaaatacgtgcaatgccaatttgtgaacctatagaatgttgccaagtatcaatgtttggttacttcagttgacatatttatttgcatgaaagagtgtagg

SEQ ID NO: 594537 - DNA, 120 bp, Artificial Sequence
  ENSG00000173611_64 (sequence is synthesized)
agatgtttaatatacacttaaatacattcactgcagaaattaagtagaggttatttttgcatgataaaatataactgcaaagcaactttttacaccgtattctttggaagattaaatcta

SEQ ID NO: 594538 - DNA, 120 bp, Artificial Sequence
  ENSG00000173611_65 (sequence is synthesized)
tctgatccaatattatcttaaaatagagaaattatctcaggagtctgttttaccacccaaaaaaatgttacatttgctgattcattatattttaaataaaacagccaactattcataaga

SEQ ID NO: 594539 - DNA, 120 bp, Artificial Sequence
  ENSG00000173611_66 (sequence is synthesized)
tcaattatagtattaaattcagaaataattataacagcatttttcttgaataaatattaaaatttggtaatttattatttctgaaaaatcagtgaaaacatccataggatctgatggttt

SEQ ID NO: 594540 - DNA, 120 bp, Artificial Sequence
  ENSG00000173611_67 (sequence is synthesized)
gtttgttgtttgaataaccaaatcattgtttttgcactggagagtagtagagcagatattataccatttaaaattcatggaactgactcaggctccttgtggatattaatttgaggacag

SEQ ID NO: 594541 - DNA, 120 bp, Artificial Sequence
  ENSG00000173611_68 (sequence is synthesized)
tagtggtaatcaaaagtacagtagaaaacacttgacattgtgaatgtgacctctgaccccaaccgttgtaaagccaataactttgagggtgaataaggtaacacttgcttagaaaaccca

SEQ ID NO: 594542 - DNA, 120 bp, Artificial Sequence
  ENSG00000173611_69 (sequence is synthesized)
gccctttcccccagtctcctgcgctcttatacattgatactttacaactatttttgctgtacctctcagtctttcctggataatgggaccacttaaaaaaaaaagtgattcatcttcctc

SEQ ID NO: 594543 - DNA, 120 bp, Artificial Sequence
  ENSG00000173611_70 (sequence is synthesized)
aaactagaatttcaaagcctaatactacactatgttccagcttcactgagttttgaacaaaaagacttaagcatgccttgtgtttaaggaaaaataattgatgtgtgaatggaatcaatc

SEQ ID NO: 594544 - DNA, 120 bp, Artificial Sequence
  ENSG00000173611_71 (sequence is synthesized)
acctattgacgggaagggtgtcaggatgatgtagggtgatatgcctttaattggataaagagaactgtattaagtataactaatttaataactgattgaagcaccattcttaattttaaa

SEQ ID NO: 594545 - DNA, 70 bp, Artificial Sequence
  ENSG00000173611_72 (sequence is synthesized)
ggcctaaaaaaaattctttttaatagttatcagactactttaaccagtgccatgtttaaacatacttgga

SEQ ID NO: 594546 - DNA, 120 bp, Artificial Sequence
  ENSG00000173611_73 (sequence is synthesized)
cagactactttaaccagtgccatgtttaaacatacttggacaatagactcagtttttttaatagtttgaagtacattatattaaaactacaaactcacttattcaagcctaaatttcatc

SEQ ID NO: 594547 - DNA, 120 bp, Artificial Sequence
  ENSG00000173611_74 (sequence is synthesized)
atagactataaattgggtatcaatttcctattttggtggacaattccagtctgtctactacgacaatcatctttttaggtgtaatattgtttaagacataggtaattttaggttttatac

SEQ ID NO: 594548 - DNA, 120 bp, Artificial Sequence
  ENSG00000173611_75 (sequence is synthesized)
ttttctcctaggcttatggaatgaaagctaataggatatcactttcagaatgaaatagggaattatggctagccttcttatagggctgccgtaaatgatacttaaatgtttgttatatca

SEQ ID NO: 594549 - DNA, 120 bp, Artificial Sequence
  ENSG00000173611_76 (sequence is synthesized)
ctgattttcttttctcttctgaagctgttgtgaatgtccactttgccatgattaaaagttgagatttgtaaacattacaatttgaaccataaattttctcaaacatgaaatcagtatgaa

SEQ ID NO: 594550 - DNA, 120 bp, Artificial Sequence
  ENSG00000173611_77 (sequence is synthesized)
taagtataaaatttgaaatgatcatacatgagaatcccaaaagtaaatacttccaaaccatagagggataaccactgtatttttaaaaagcttatttccacccttaaagaagcatgctac

SEQ ID NO: 594551 - DNA, 120 bp, Artificial Sequence
  ENSG00000173611_78 (sequence is synthesized)
taattgctttttttctaaattaaaactatgtactgtggtaaattaaaaatctgcaggaaaaattgcttagtgttttagcacaataagaatttttattactcaggagttggagaccagtct

SEQ ID NO: 594552 - DNA, 64 bp, Artificial Sequence
  ENSG00000173611_79 (sequence is synthesized)
caataagaatttttattactcaggagttggagaccagtctgggcaatacagtgaaaccctgtcg

SEQ ID NO: 594553 - DNA, 120 bp, Artificial Sequence
  ENSG00000173611_80 (sequence is synthesized)
ctatttcctgaagaatggtttttgttaacttgttactgtatcattaaaaagaccttctaatggttcagtacaataatctagaacttgatttatgtggctttttatagttatctgaatgca

SEQ ID NO: 594554 - DNA, 120 bp, Artificial Sequence
  ENSG00000173611_81 (sequence is synthesized)
ttccttttgccacatagaccatatggctagttctccaacttttttgcttatttttaataaaccttgctgttcaacaatcagagaaacctttagattttggatgattcttccagttgaggt

SEQ ID NO: 594555 - DNA, 120 bp, Artificial Sequence
  ENSG00000173611_82 (sequence is synthesized)
agaaacatcttagataataggaaaggcaaatacaaagtcctaacattttcatagtagagtttacaagtaaaataacttatccatataggttatcttcgttgtgtagcaccagtataaata

SEQ ID NO: 594556 - DNA, 120 bp, Artificial Sequence
  ENSG00000173611_83 (sequence is synthesized)
gtgatttcattaatcattgaatcagatgaagcagttataaatcactttttactttgtgctaagaattattgtaatttcaggacactttattatttcctctgagcagtttccattggaagg

SEQ ID NO: 594557 - DNA, 120 bp, Artificial Sequence
  ENSG00000173611_84 (sequence is synthesized)
ttgagtttcccttttttaagttctaatcatcactaaaggttaagataatcaaataggagttaaaataagttatgtttgatctttttcccttgaaaataatgctgaacttattgtctacat

SEQ ID NO: 594558 - DNA, 120 bp, Artificial Sequence
  ENSG00000173611_85 (sequence is synthesized)
tctgattattaggcagaaatgcacttgtttaaatcatagaagtaattcatttggaggatataattactcgattttctagtggtgtgaaatactttttaacaattgtgcttgtctgtaact

SEQ ID NO: 594559 - DNA, 120 bp, Artificial Sequence
  ENSG00000173611_86 (sequence is synthesized)
gaaatgttatagaattttaacactatagggattatagagttatattagctctcctcaagagactgaagcacaatatttttcatgtaacaattcttatccaagtgctgctaatctgtcgtg

SEQ ID NO: 594560 - DNA, 120 bp, Artificial Sequence
  ENSG00000173611_87 (sequence is synthesized)
caaataatgaagctatttggttgcctatttagctattcacaaatcactgtaatctttgaaacaatcttgtcgttcatttgtattaatatttggatattgtgagttaatactttagaaaaa

SEQ ID NO: 594561 - DNA, 120 bp, Artificial Sequence
  ENSG00000173611_88 (sequence is synthesized)
aatccatcaactcagccccgttagcaaaactgtttggattcatagtttttatatgtgttaacagtagaataaattttgaaggggctatttactaccaatgactaaggggaaaattatact

SEQ ID NO: 594562 - DNA, 120 bp, Artificial Sequence
  ENSG00000173611_89 (sequence is synthesized)
gtcactatcatttgacttgaacatttgtggtattgtaaaagtcttgtcagttgtgttctaaattgcttaagccatacgttctcttaaacaggatgtttttttcttcctttccagcagcct

SEQ ID NO: 594563 - DNA, 120 bp, Artificial Sequence
  ENSG00000173611_90 (sequence is synthesized)
ttttcttctttgtctgttatggttaatactccatagattttagaaattgagaagttcttgaaacattttattttcttgagttcatcacttttgactcttgtatgagatgtgatttgtcat

SEQ ID NO: 594564 - DNA, 120 bp, Artificial Sequence
  ENSG00000173611_91 (sequence is synthesized)
aaaagatagccttccactacttcactaaatgaatttcagagtaaacactgtgattctgcagagcggattcagtaggctttccaatgttttctcctgctatacagtgcctaccaccttgag

SEQ ID NO: 594565 - DNA, 120 bp, Artificial Sequence
  ENSG00000173611_92 (sequence is synthesized)
ggcacttcagtactagaggatgaaaactgaaacgttgttttgatgtttattgaataacgagattagagaatatttgatttttgttgtcagtgtattaaagaaattttcacattgataaat

SEQ ID NO: 594566 - DNA, 120 bp, Artificial Sequence
  ENSG00000173611_93 (sequence is synthesized)
gttctctaggaatgtgtctacattcatcaggtgtgaactcttgtacatgaattttgtaccttgaatccacatatatattaagtgtatcatcaatataaaaataaacattatttgcttaaa

SEQ ID NO: 594567 - DNA, 78 bp, Artificial Sequence
  ENSG00000173611_94 (sequence is synthesized)
aatttcacaaacttgtttggacagccactagtctgcttgctttctcctacagcatatccaaaagctttacaagggact

SEQ ID NO: 594568 - DNA, 120 bp, Artificial Sequence
  ENSG00000173611_95 (sequence is synthesized)
tttttcgggtaggcaaagaacattattaaagacgaattttatcattttaggtatttaagaaccatgtattatattttacctgtataaaataaggttataataaaataatattattttgga

SEQ ID NO: 594569 - DNA, 120 bp, Artificial Sequence
  ENSG00000173611_96 (sequence is synthesized)
atttttcttttgaggacttcaaattactacctctacagtcgattttttttttcttggtatctaagataatgtgggaaatcttgagaaatcctacttttttactttttgatgttgtgtaag

SEQ ID NO: 594570 - DNA, 120 bp, Artificial Sequence
  ENSG00000173611_97 (sequence is synthesized)
gatctcagctatttttttttttaaccttagccataatttcattttctccagcatctctgtttaaaaagctcatcttggctggggtggctcatgccttcaatcccagctctttgggaggct

SEQ ID NO: 594571 - DNA, 120 bp, Artificial Sequence
  ENSG00000173611_98 (sequence is synthesized)
gcacagtggagaaaccgcctcgaaaacggagaagcagtatcagaggttctggtgatagcagtcattcacaatctcaaggggaaagatatcaacatttcactgaaaagactgaatttgctc

SEQ ID NO: 594572 - DNA, 120 bp, Artificial Sequence
  ENSG00000173611_99 (sequence is synthesized)
aaaaaggtacccaaagccctgaagtacatgtgaaagtcacaactagtaacgtgataaaagtctttaaagtctgcgtgttgcattaaggctaggttgtgtttgtttttttttttcttgcag

SEQ ID NO: 594573 - DNA, 120 bp, Artificial Sequence
  ENSG00000173612_0 (sequence is synthesized)
actgagcaaatgagatagaaacatggcattcttaattatactaattacctgctttgtgattattcttgctacttcacagccttgccagacccctgatgactttgtggctgccacttctcc

SEQ ID NO: 594574 - DNA, 120 bp, Artificial Sequence
  ENSG00000173612_1 (sequence is synthesized)
gggacatatcataattggaggtttgtttgctattcatgaaaaaatgttgtcctcagaagactctcccagacgaccacaaatccaggagtgtgttggctttgaaatatcagtttttcttca

SEQ ID NO: 594575 - DNA, 120 bp, Artificial Sequence
  ENSG00000173612_2 (sequence is synthesized)
aactcttgccatgatacacagcattgagatgatcaacaattcaacactcttacctggagtcaaactggggtatgaaatctatgacacttgtacagaagtcacagtggcaatggcagccac

SEQ ID NO: 594576 - DNA, 120 bp, Artificial Sequence
  ENSG00000173612_3 (sequence is synthesized)
tctgaggtttctttctaaattcaactgctccagagaaactgtggagtttaagtgtgactattccagctacatgccaagagttaaggctgtcataggttctgggtactcagaaataactat

SEQ ID NO: 594577 - DNA, 120 bp, Artificial Sequence
  ENSG00000173612_4 (sequence is synthesized)
ggctgtctccaggatgttgaatttacagctcatgccacaggtgggttatgaatcaactgcagaaatcctgagtgacaaaattcgctttccttcatttttacggactgtgcccagtgactt

SEQ ID NO: 594578 - DNA, 120 bp, Artificial Sequence
  ENSG00000173612_5 (sequence is synthesized)
ccatcaaattaaagcaatggctcacctgattcagaaatctggttggaactggattggcatcataaccacagatgatgactatggacgattggctcttaacacttttataattcaggctga

SEQ ID NO: 594579 - DNA, 120 bp, Artificial Sequence
  ENSG00000173612_6 (sequence is synthesized)
agcaaataacgtgtgcatagccttcaaagaggttcttccagcctttctttcagataataccattgaagtcagaatcaatcggacactgaagaaaatcattttagaagcccaggttaatgt

SEQ ID NO: 594580 - DNA, 120 bp, Artificial Sequence
  ENSG00000173612_7 (sequence is synthesized)
cattgtggtatttctgaggcaattccatgtttttgatctcttcaataaagccattgaaatgaatataaataagatgtggattgctagtgataattggtcaactgccaccaagattaccac

SEQ ID NO: 594581 - DNA, 120 bp, Artificial Sequence
  ENSG00000173612_8 (sequence is synthesized)
cattcctaatgttaaaaagattggcaaagttgtagggtttgcctttagaagagggaatatatcctctttccattcctttcttcaaaatctgcacttgcttcccagtgacagtcacaaact

SEQ ID NO: 594582 - DNA, 120 bp, Artificial Sequence
  ENSG00000173612_9 (sequence is synthesized)
cttacatgaatatgccatgcatttatctgcctgcgcatatgtcaaggacactgatttgagtcaatgcatattcaatcattctcaaaggactttggcctacaaggctaacaaggctataga

SEQ ID NO: 594583 - DNA, 120 bp, Artificial Sequence
  ENSG00000173612_10 (sequence is synthesized)
aaggaacttcgtcatgagaaatgacttcctctgggactatgctgagccaggactcattcatagtattcagcttgcagtgtttgcccttggttatgccattcgggatctgtgtcaagctcg

SEQ ID NO: 594584 - DNA, 120 bp, Artificial Sequence
  ENSG00000173612_11 (sequence is synthesized)
cacggggatttaaatactggatatgatgttgtgctctggaaggagatcaatggacacatgactgtcactaagatggcagaatatgacctacagaatgatgtcttcatcatcccagatcag

SEQ ID NO: 594585 - DNA, 120 bp, Artificial Sequence
  ENSG00000173612_12 (sequence is synthesized)
gaaacaaaaaatgagttcaggaatcttaagcaaattcaatctaaatgctccaaggaatgcagtcctgggcaaatgaagaaaactacaagaagtcaacacatctgttgctatgaatgtcag

SEQ ID NO: 594586 - DNA, 120 bp, Artificial Sequence
  ENSG00000173612_13 (sequence is synthesized)
aactgtcctgaaaatcattacactaatcagacagatatgcctcactgccttttatgcaacaacaaaactcactgggcccctgttaggagcactatgtgctttgaaaaggaagtggaatat

SEQ ID NO: 594587 - DNA, 120 bp, Artificial Sequence
  ENSG00000173612_14 (sequence is synthesized)
ctcaactggaatgactccttggccatcctactcctgattctctccctactgggaatcatatttgttctggttgttggcataatatttacaagaaacctgaacacacctgttgtgaaatca

SEQ ID NO: 594588 - DNA, 120 bp, Artificial Sequence
  ENSG00000173612_15 (sequence is synthesized)
tccgggggattaagagtctgctatgtgatccttctctgtcatttcctcaattttgccagcacgagctttttcattggagaaccacaagacttcacatgtaaaaccaggcagacaatgttt

SEQ ID NO: 594589 - DNA, 120 bp, Artificial Sequence
  ENSG00000173612_16 (sequence is synthesized)
ggagtgagctttactctttgcatctcctgcattttgacgaagtctctgaaaattttgctagccttcagctttgatcccaaattacagaaatttctgaagtgcctctatagaccgatcctt

SEQ ID NO: 594590 - DNA, 120 bp, Artificial Sequence
  ENSG00000173612_17 (sequence is synthesized)
attatcttcacttgcacgggcatccaggttgtcatttgcacactctggctaatctttgcagcacctactgtagaggtgaatgtctccttgcccagagtcatcatcctggagtgtgaggag

SEQ ID NO: 594591 - DNA, 120 bp, Artificial Sequence
  ENSG00000173612_18 (sequence is synthesized)
ggatccatacttgcatttggcaccatgctgggctacattgccatcctggccttcatttgcttcatatttgctttcaaaggcaaatatgagaattacaatgaagccaaattcattacattt

SEQ ID NO: 594592 - DNA, 120 bp, Artificial Sequence
  ENSG00000173612_19 (sequence is synthesized)
ggcatgctcatttacttcatagcttggatcacattcatccctatctatgctaccacatttggcaaatatgtaccagctgtggagattattgtcatattaatatctaactatggaatcctg

SEQ ID NO: 594593 - DNA, 120 bp, Artificial Sequence
  ENSG00000173612_20 (sequence is synthesized)
tattgcacattcatccccaaatgctatgttattatttgtaagcaagagattaacacaaagtctgcctttctcaagatgatctacagttattcttcccatagtgtgagcagcattgccctg

SEQ ID NO: 594594 - DNA, 120 bp, Artificial Sequence
  ENSG00000173612_21 (sequence is synthesized)
agtcctgcttcactggactccatgagcggcaatgtcacaatgaccaatcccagctctagtggcaagtctgcaacctggcagaaaagcaaagatcttcaggcacaagcatttgcacacata

SEQ ID NO: 594595 - DNA, 120 bp, Artificial Sequence
  ENSG00000173612_22 (sequence is synthesized)
tgcagggaaaatgccacaagtgtatctaaaactttgcctcgaaaaagaatgtcaagtatatgaataagccttaggagatgccacattccagaataaaatgtttccagggtctttgcatct

SEQ ID NO: 594596 - DNA, 120 bp, Artificial Sequence
  ENSG00000173614_0 (sequence is synthesized)
gatctccggtagcactcgggccggcggacagtgagggcgcgacaacaagggaggtgtcacagttttccatttagatcaacaacttcaagttcttaccatggaaaattccgagaagactga

SEQ ID NO: 594597 - DNA, 120 bp, Artificial Sequence
  ENSG00000173614_1 (sequence is synthesized)
agtggttctccttgcttgtggttcattcaatcccatcaccaacatgcacctcaggttgtttgagctggccaaggactacatgaatggaacaggaaggtacacagttgtcaaaggcatcat

SEQ ID NO: 594598 - DNA, 120 bp, Artificial Sequence
  ENSG00000173614_2 (sequence is synthesized)
ctctcctgttggtgatgcctacaagaagaaaggactcattcctgcctatcaccgggtcatcatggcagaacttgctaccaagaattctaaatgggtggaagttgatacatgggaaagtct

SEQ ID NO: 594599 - DNA, 120 bp, Artificial Sequence
  ENSG00000173614_3 (sequence is synthesized)
tcagaaggagtggaaagagactctgaaggtgctaagacaccatcaagagaaattggaggctagtgactgtgatcaccagcagaactcacctactctagaaaggcctggaaggaagaggaa

SEQ ID NO: 594600 - DNA, 120 bp, Artificial Sequence
  ENSG00000173614_4 (sequence is synthesized)
gtggactgaaacacaagattctagtcaaaagaaatccctagagccaaaaacaaaagctgtgccaaaggtcaagctgctgtgtggggcagatttattggagtcctttgctgttcccaattt

SEQ ID NO: 594601 - DNA, 120 bp, Artificial Sequence
  ENSG00000173614_5 (sequence is synthesized)
gtggaagagtgaagacatcacccaaatcgtggccaactatgggctcatatgtgttactcgggctggaaatgatgctcagaagtttatctatgaatcggatgtgctgtggaaacaccggag

SEQ ID NO: 594602 - DNA, 120 bp, Artificial Sequence
  ENSG00000173614_6 (sequence is synthesized)
caacattcacgtggtgaatgaatggatcgctaatgacatctcatccacaaaaatccggagagccctcagaaggggccagagcattcgctacttggtaccagatcttgtccaagaatacat

SEQ ID NO: 594603 - DNA, 120 bp, Artificial Sequence
  ENSG00000173614_7 (sequence is synthesized)
tgaaaagcataatttgtacagctctgagagtgaagacaggaatgctggggtcatcctggcccctttgcagagaaacactgcagaagctaagacataggaattctacagcatgatatttca

SEQ ID NO: 594604 - DNA, 120 bp, Artificial Sequence
  ENSG00000173614_8 (sequence is synthesized)
gacttcccatttggggatctgaaacaatctgggagttaataactggggaaagaagttgtgatctgttgcctaaactaaagcttaaaagtttagtaaaaatcgtctgggcacagtggctca

SEQ ID NO: 594605 - DNA, 78 bp, Artificial Sequence
  ENSG00000173614_9 (sequence is synthesized)
ttagtaaaaatcaatggtaagctaaaataagtttttgtttgtttatttgtttttgagatgcgcataactataatccca

SEQ ID NO: 594606 - DNA, 63 bp, Artificial Sequence
  ENSG00000173614_10 (sequence is synthesized)
tgtgccactgcactccagcctgggcaaaaaagcaaaactccatctcaaagagaaaaaaaaaaa

SEQ ID NO: 594607 - DNA, 67 bp, Artificial Sequence
  ENSG00000173614_11 (sequence is synthesized)
ctgacagctagcaggtttcaggatccatctgccaagttagtgaaaggctggagcctcaaatcataca

SEQ ID NO: 594608 - DNA, 120 bp, Artificial Sequence
  ENSG00000173614_12 (sequence is synthesized)
tctgccaagttagtgaaaggctggagcctcaaatcatacagatgagggtcattttctcctccttagcttcttggagtttaagagttgaaggagtcctgaaaagtaatgatagagcaagat

SEQ ID NO: 594609 - DNA, 120 bp, Artificial Sequence
  ENSG00000173614_13 (sequence is synthesized)
gaagctatcagaactgaatttggacttcctctgggaaactacacctagttcatctgaagtgtcacgtaaactgcagaaagtttccaatgctggaaacttctctcatactatcgtgccttc

SEQ ID NO: 594610 - DNA, 120 bp, Artificial Sequence
  ENSG00000173614_14 (sequence is synthesized)
ctactcagaagtgcctgtgccctgctcagctgtgactactgacctcaggacctcactggacaaggcatgtggggacccttgcaggagccctggtaagggtacaatgatcctattgttttt

SEQ ID NO: 594611 - DNA, 120 bp, Artificial Sequence
  ENSG00000173614_15 (sequence is synthesized)
aggcatgagccactgcacccagcctgatcctattgttgcactatttatggagcaacaactttgtacaaagaacaagctttgtacagagaacaagcttggctttttctcccaacgccgagg

SEQ ID NO: 594612 - DNA, 120 bp, Artificial Sequence
  ENSG00000173614_16 (sequence is synthesized)
tggctttttctcccaacgccgaggatgctgttgatgctgccacgtaatagcataattttgggtgtcctcaaggacagaacttccactttgaataatggaagttagaacaatgaatttcac

SEQ ID NO: 594613 - DNA, 120 bp, Artificial Sequence
  ENSG00000173614_17 (sequence is synthesized)
aggggaataaatattaatgactgacgtgaagaaaatatgccattgtttattccctcctgcatcatttccataatttgcttttgtactgtcaatttagaggaaatgtgtgatgctggtgtt

SEQ ID NO: 594614 - DNA, 120 bp, Artificial Sequence
  ENSG00000173614_18 (sequence is synthesized)
ttgtttggcctgtttgtttgatgctgggggttttatgtgttgtaccctttaccccttacattgtgtaatttgaaagtggcaaacaaacctgcagtaaaagtccttgattggcatcttcat

SEQ ID NO: 594615 - DNA, 120 bp, Artificial Sequence
  ENSG00000173614_19 (sequence is synthesized)
tcggatgatggagagcctttgtggtagtgtttgcttatgtgaacagcaggcctttcagataagagaagtggcttttccttggtgatgaaggggtagagattgagccatggggatggttta

SEQ ID NO: 594616 - DNA, 120 bp, Artificial Sequence
  ENSG00000173614_20 (sequence is synthesized)
ggttaaagaatgcttttttttggccatcatgaggatctaacaacagagtagaaggaaggatgccctaggtcagcatgcagggtggtgggagggctttcatcttccttacccaagcctctc

SEQ ID NO: 594617 - DNA, 120 bp, Artificial Sequence
  ENSG00000173614_21 (sequence is synthesized)
ttttcacttttctagaagtccagaagttgttatatgatgaaatagcctcctttaacgtttatttctgggtgccaacggaggcccattcctctaacattctcataatttttctcaaaggcc

SEQ ID NO: 594618 - DNA, 120 bp, Artificial Sequence
  ENSG00000173614_22 (sequence is synthesized)
tatgatctaaacatttcaccacggcatccactcagctgtgaggctgcgtacacagtctccacctctgaaatctgaacttcgtttaccagtggtgctgtttgaacttcataatgtcagcac

SEQ ID NO: 594619 - DNA, 120 bp, Artificial Sequence
  ENSG00000173614_23 (sequence is synthesized)
ttcctgaacacttactgtgtgcttggcttgtgctcctgagtgccttatatcataaggaaacggcaaaatcaggggactggtataaatggtgagctgagcttgaatctaagctttgtcttc

SEQ ID NO: 594620 - DNA, 120 bp, Artificial Sequence
  ENSG00000173614_24 (sequence is synthesized)
agagccagtacccctaatctctctttctgtaaaatattacttttcaaagaatgaagttgtagccaaatcttgaaatttttcatttaccctaagtgaggacaaataaagctttcaacaaca

SEQ ID NO: 594621 - DNA, 120 bp, Artificial Sequence
  ENSG00000173614_25 (sequence is synthesized)
ggctagtgactgtgatcaccagcagaactcacctactctagaaaggcctggaaggaagaggaagtggactgaaacacaagattctagtcaaaagaaatccctagagccaaaaacaaaagg

SEQ ID NO: 594622 - DNA, 120 bp, Artificial Sequence
  ENSG00000173614_26 (sequence is synthesized)
aggcgtgagccacagcgcctgggccttattttttttgttttatagagatggggtctcactattttggccaggttggtcttgaactcctggccccaagcagtcctcctgccttggcctccc

SEQ ID NO: 594623 - DNA, 120 bp, Artificial Sequence
  ENSG00000173614_27 (sequence is synthesized)
aggtgtcagccactatgcctggcctttattttcattttatattgcatacttgtgggtgtctggaaaatgccccttgttagttgcatgaagtgaaggagaataaaaggcacttggagctta

SEQ ID NO: 594624 - DNA, 80 bp, Artificial Sequence
  ENSG00000173621_0 (sequence is synthesized)
gccggcgcgcacccgctcgcctgtcgccgccgccaccgctaaccgcgccgggaaaaggtgccgggaaccgagcgagccgg

SEQ ID NO: 594625 - DNA, 80 bp, Artificial Sequence
  ENSG00000173621_1 (sequence is synthesized)
gagcgccatgggcccgagggtgggcggcgggcggccggtcatccccgggcctcgtccccgcgggagagcggccaggagtc

SEQ ID NO: 594626 - DNA, 120 bp, Artificial Sequence
  ENSG00000173621_2 (sequence is synthesized)
cagcgcgggggccggccagggaggggccacggactccacgggaggttcggggggcgccttctctggcgggggagggtatggcggggagtggggaggcggctggcgattcctggggacgcc

SEQ ID NO: 594627 - DNA, 120 bp, Artificial Sequence
  ENSG00000173621_3 (sequence is synthesized)
cctggggacgcctgggaaaggaagttccgggaccctccctgctctcggtcctcctccgcttcctgcctcatgcctcaccttgtccccagcgcctggactcccccttaactgcttgggaaa

SEQ ID NO: 594628 - DNA, 120 bp, Artificial Sequence
  ENSG00000173621_4 (sequence is synthesized)
tgtgacctttgctctggggggcctggccctgcaggccccaaccttccctcatctctggcggccctcttgggcctctgacccagcccctccccgggccaggctcacagaagctggcttctg

SEQ ID NO: 594629 - DNA, 120 bp, Artificial Sequence
  ENSG00000173621_5 (sequence is synthesized)
ggactgtcctgggcccaagtgggcacctgcgccagccccacctgtgcctgggctgtggccccttcctacagggcgctcaccatggccccgccgctcctgctgctgctgctggccagtgga

SEQ ID NO: 594630 - DNA, 120 bp, Artificial Sequence
  ENSG00000173621_6 (sequence is synthesized)
gcggccgcctgcccgctgccctgcgtctgccagaacctgtccgagtcgctcagcaccctctgtgcccaccgaggcctgctgtttgtgccgcccaacgtggaccggcgcacagtggagctg

SEQ ID NO: 594631 - DNA, 120 bp, Artificial Sequence
  ENSG00000173621_7 (sequence is synthesized)
cggctggctgacaacttcatccaggccctggggccccctgacttccgcaacatgacgggactggtggacctgacactgtctcgcaatgccatcacccgcattggggcccgcgcctttggg

SEQ ID NO: 594632 - DNA, 120 bp, Artificial Sequence
  ENSG00000173621_8 (sequence is synthesized)
gacctcgagagcctgcgttccctccaccttgacggcaacaggctggtggagctgggcaccgggagcctccggggccccgtcaatctgcagcacctcatcctcagcggcaaccagctgggc

SEQ ID NO: 594633 - DNA, 120 bp, Artificial Sequence
  ENSG00000173621_9 (sequence is synthesized)
cgcatcgcgccgggagccttcgacgacttcctagagagcctggaggacctggacctgtcctacaacaacctccggcaggtgccctgggccggcatcggcgccatgcctgccctgcacacc

SEQ ID NO: 594634 - DNA, 120 bp, Artificial Sequence
  ENSG00000173621_10 (sequence is synthesized)
ctcaacctggaccataaccttattgacgcactgcccccaggcgccttcgcccagctcggtcagctctcccgcctggacctcacctccaaccgcctggccacgctggctccggacccgctt

SEQ ID NO: 594635 - DNA, 120 bp, Artificial Sequence
  ENSG00000173621_11 (sequence is synthesized)
ggccggacgacctggaaacgtgcgcctccccgcccggcctggccggccgctacttctgggcagtgcccgagggcgagttctcctgtgagccgcccctcattgcccgccacacgcagcgcc

SEQ ID NO: 594636 - DNA, 120 bp, Artificial Sequence
  ENSG00000173621_12 (sequence is synthesized)
tctgggtgctggaaggccagcgggccacgctgcggtgccgggccctgggtgaccccgcgcctaccatgcactgggtcggtcctgacgaccggttggttggcaactcctcccgagcccggg

SEQ ID NO: 594637 - DNA, 120 bp, Artificial Sequence
  ENSG00000173621_13 (sequence is synthesized)
ctttccccaacgggaccttagagattggggtgaccggcgctggggacgctgggggctacacctgcatcgccaccaaccctgctggtgaggccacagcccgagtagaactgcgggtgctgg

SEQ ID NO: 594638 - DNA, 120 bp, Artificial Sequence
  ENSG00000173621_14 (sequence is synthesized)
ccttgccccatggtgggaacagcagtgccgaggggggccgccccgggccctcggacatcgccgcctccgctcgcactgctgccgagggtgaggggacgctggagtctgagccagccgtgc

SEQ ID NO: 594639 - DNA, 120 bp, Artificial Sequence
  ENSG00000173621_15 (sequence is synthesized)
aggtgacggaggtgaccgccacctcagggctggtgagctggggtcccgggcggccagccgacccagtgtggatgttccaaatccagtacaacagcagcgaagatgagaccctcatctacc

SEQ ID NO: 594640 - DNA, 120 bp, Artificial Sequence
  ENSG00000173621_16 (sequence is synthesized)
ggattgtcccagcctccagccaccacttcctgctgaagcacctcgtccccggcgctgactatgacctctgcctgctggccttgtcaccggccgctgggccctctgacctcacggccacca

SEQ ID NO: 594641 - DNA, 120 bp, Artificial Sequence
  ENSG00000173621_17 (sequence is synthesized)
ggctgctgggctgtgcccatttctccacgctgccggcctcgcccctgtgccacgccctgcaggcccacgtgctgggcgggaccctgaccgtggccgtggggggtgtgctggtggctgcct

SEQ ID NO: 594642 - DNA, 120 bp, Artificial Sequence
  ENSG00000173621_18 (sequence is synthesized)
tactggtcttcactgtggccttgctggttcggggccggggggccggaaatggccgcctccccctcaagctcagccacgtccagtcccagaccaatggaggccccagccccacacccaagg

SEQ ID NO: 594643 - DNA, 120 bp, Artificial Sequence
  ENSG00000173621_19 (sequence is synthesized)
cccacccgccgcggagccccccgccccggccgcagcgcagctgctctctggacctgggagatgccgggtgctacggttatgccaggcgcctgggaggagcttgggcccgacggagccact

SEQ ID NO: 594644 - DNA, 120 bp, Artificial Sequence
  ENSG00000173621_20 (sequence is synthesized)
ctgtgcatggggggctgctcggggcagggtgccggggggtaggaggcagcgccgagcggctggaagagagtgtggtgtgatggacgggcagcttcctgtgtgctccaagggatgagcctc

SEQ ID NO: 594645 - DNA, 120 bp, Artificial Sequence
  ENSG00000173621_21 (sequence is synthesized)
gtggggcagagggcccggggccgccgcctggcctgggagtccctccctggtttttattctcagtacctcaggctcccctgtgtacttggaggggcagggagccctttcctcggttctggc

SEQ ID NO: 594646 - DNA, 120 bp, Artificial Sequence
  ENSG00000173621_22 (sequence is synthesized)
ctccagaccagggtaagggcaggcccctccaacaggtgctcacagccaccgaggcaggggctgcagccacccactgggagtcttgtttttatttataataaaattgttggggacacctca

SEQ ID NO: 594647 - DNA, 120 bp, Artificial Sequence
  ENSG00000173621_23 (sequence is synthesized)
gggacgtgtgggtgtgtgggcatgtgtgggtgtgttggggagggtgcccagcgacatgtgacaaagacgcccgtctccgggagatggtgaaggggcccgcgagcaggcgctttgtctggc

SEQ ID NO: 594648 - DNA, 80 bp, Artificial Sequence
  ENSG00000173621_24 (sequence is synthesized)
gggggcgcgcgcgcctgtgccaggggcgctcaccatggccccgccgctcctgctgctgctgctggccagtggagcggccg

SEQ ID NO: 594649 - DNA, 120 bp, Artificial Sequence
  ENSG00000173626_0 (sequence is synthesized)
cctcttcagctcagcaaagagcaaaagcagcagagtgcagaagcagcactcctgtctcaaagcgaggaagagcttacaaaaacaaaacaaaaagacatggactgatacacctctaagaaa

SEQ ID NO: 594650 - DNA, 120 bp, Artificial Sequence
  ENSG00000173626_1 (sequence is synthesized)
caggcaaaagaagagaaattgaagatcatattcttcatctatcaagcactatgtctcgccctgcacaccgaagaccagaataccataaaataaataaagatctctttgtccttacctatg

SEQ ID NO: 594651 - DNA, 120 bp, Artificial Sequence
  ENSG00000173626_2 (sequence is synthesized)
gagctctggttgcccagctgtgtaaggattatgagaaggatgaagatgtgaaccaatatttagataaaatgggttacggcattggaacgcggcttgtggaagactttttggctcgatcct

SEQ ID NO: 594652 - DNA, 120 bp, Artificial Sequence
  ENSG00000173626_3 (sequence is synthesized)
gcgtgggaagatgccatagttattcagaaattatagacataattgcccaggttgctttcaagatgtacctgggaattacaccaagtgtgacctgtaacaattcaagcaaaaatgaatttt

SEQ ID NO: 594653 - DNA, 120 bp, Artificial Sequence
  ENSG00000173626_4 (sequence is synthesized)
ccctgattctagagaagaatcccctggtggagtttgtggaagagctccctgctgggcgatcttctctgtgctactgcaacttgctctgtgggattatcagaggtgccttggaaatggttc

SEQ ID NO: 594654 - DNA, 120 bp, Artificial Sequence
  ENSG00000173626_5 (sequence is synthesized)
atttggcggctgatgttacattcttgcaagacagactaaaaggtgacagtgtgacagaaataggaataacatttctaaaaaagcgagacgagaaaaaatatagagggaaaaaatgaagac

SEQ ID NO: 594655 - DNA, 120 bp, Artificial Sequence
  ENSG00000173626_6 (sequence is synthesized)
tagcacggaaaatgccacggggcggctagctgagttaatgttagctaaacatgtatagacatagaaattttgaattgcttcatagcatgagctttgaaaggtttataaatcagccagaaa

SEQ ID NO: 594656 - DNA, 120 bp, Artificial Sequence
  ENSG00000173626_7 (sequence is synthesized)
tttgaaatgcagggcatgaaggcttaaaggtttttttttccttttgcttataaatcacgcattttcaatctcatgtccacaaaatttcatatgcaaatagctccttacaagatagcaggc

SEQ ID NO: 594657 - DNA, 120 bp, Artificial Sequence
  ENSG00000173626_8 (sequence is synthesized)
aggaattccacatcttacactatccatcctcagagaagctgttcattccattcacgtatggtaatgggaaaaaaaagcagcacaaatacaaacagttgtgtatttgtctctttgctgaaa

SEQ ID NO: 594658 - DNA, 120 bp, Artificial Sequence
  ENSG00000173626_9 (sequence is synthesized)
tgctgaaaaaaaaagaatgaaatgatatagcatagagtttcctatatatagacagtagtttctagatactgtatattgcattccttaaataaataattccatatttctaaaaaaatatga

SEQ ID NO: 594659 - DNA, 120 bp, Artificial Sequence
  ENSG00000173626_10 (sequence is synthesized)
ttctcatgtattagcttggcttatagctttagccttctgacgctacccttgatttgtaatcaccaagtcaagctatttattcaatgataattttgaaacatttataaataacatttaatt

SEQ ID NO: 594660 - DNA, 120 bp, Artificial Sequence
  ENSG00000173626_11 (sequence is synthesized)
ccttccttttctcatgaaatattgcttgatggtcaggccaggaaacttctaaaataaaggataaataatattctttgaaattactttcttaccccaaagcttattaattcagaatttcta

SEQ ID NO: 594661 - DNA, 120 bp, Artificial Sequence
  ENSG00000173626_12 (sequence is synthesized)
ctatcattttcatcctctaaaaaatcttccaaaggatgttttctttgtgaccagaacacatttaaaattcaagtgtaccgaattaaatacacagtaatcttcaccagaccactggcacac

SEQ ID NO: 594662 - DNA, 120 bp, Artificial Sequence
  ENSG00000173626_13 (sequence is synthesized)
aagggcggcctacaaggcagcccagaatctactgggctctgcagagagcccaaattgcaagtacaagttataattagtgtgataccaccctacggaattggagaaaatatttgtaaacta

SEQ ID NO: 594663 - DNA, 120 bp, Artificial Sequence
  ENSG00000173626_14 (sequence is synthesized)
tgtatctgacacccttgtgctattaataaccagaatatataaggagttcaaccaactccataggaaaaaattaaaattaataatccaattaaagatgggcaaaagatctgaatagacatt

SEQ ID NO: 594664 - DNA, 120 bp, Artificial Sequence
  ENSG00000173626_15 (sequence is synthesized)
ggtatatgaaaaggtgctcaacatcattggtcatcagagaaatgcaaatcaaaactataatgagatattatctcaccctagttaaaaatggcttttatccaaaacaggcaatagtgaatg

SEQ ID NO: 594665 - DNA, 120 bp, Artificial Sequence
  ENSG00000173626_16 (sequence is synthesized)
tgagatattatctcaccctagttaaaaatggcttttatccaaaacaggcaatagtgaatgcttgcaaagatgtggagaagagggaactctggtacactgttggtgggaatgtaaattagt

SEQ ID NO: 594666 - DNA, 120 bp, Artificial Sequence
  ENSG00000173626_17 (sequence is synthesized)
ccactatggagaacggtttggaggttcctcaaaaaacaaaaaatagaatgatcatatgatccagcaatcccactgctggatatatacccaaaataaaggaaatcagtatatcaaagagat

SEQ ID NO: 594667 - DNA, 120 bp, Artificial Sequence
  ENSG00000173626_18 (sequence is synthesized)
aaagagatatctgcactcccatgtttactgcagaactactgacgatagctaagatttggaagaaatctaagtgtccttcaatagattaatgaaataaagaaaatatggtacatatacaca

SEQ ID NO: 594668 - DNA, 120 bp, Artificial Sequence
  ENSG00000173626_19 (sequence is synthesized)
atgagatcctgtcatttgcaaaacatggatggaactagaggtcattatgttcaatgaaatatgtcaggacagaaagacagactttgcatgttctcatttatttgtaggagctaaaaatta

SEQ ID NO: 594669 - DNA, 120 bp, Artificial Sequence
  ENSG00000173626_20 (sequence is synthesized)
taggagctaaaaattaaaacagtggactcatggagatatggagtaaaatgatggatatcagaggctgggaagggtagtttcaagaggagtggagatggttaatgggtacaaaaatatagt

SEQ ID NO: 594670 - DNA, 81 bp, Artificial Sequence
  ENSG00000173626_21 (sequence is synthesized)
aatatagttagatagaatgaataagatctgggtcgggcatggtggcacaagcctgtaatctctgcactttgggatgccaaa

SEQ ID NO: 594671 - DNA, 120 bp, Artificial Sequence
  ENSG00000173626_22 (sequence is synthesized)
agtttcaaaatattctgacaggacacagacagccctggctgaaaggagcacagagagaatacttcgagctcatgctgagagaaaaaggcgagtttgtcttttcttacctgagactgggcc

SEQ ID NO: 594672 - DNA, 120 bp, Artificial Sequence
  ENSG00000173627_0 (sequence is synthesized)
aacagtgttcttagaggtagccacacctcagcaagggctttctaacttggaacagcaaagttcaaatgaacgaatagacacaaactgtgaaagagtcctgaacccattacaaggtgaatc

SEQ ID NO: 594673 - DNA, 120 bp, Artificial Sequence
  ENSG00000173627_1 (sequence is synthesized)
tttacagcacaattgccttctgaagctacttgaaacagggcatgggacttaaaggagaaaaaaaaggaaatggaccatctcttctaacacctggaatgtgatccaagcctggagacaaat

SEQ ID NO: 594674 - DNA, 120 bp, Artificial Sequence
  ENSG00000173627_2 (sequence is synthesized)
tgatggtttgcagctagaagacagtaaatctagcaatggagcccatatatgaggagtacctagcaaatcatggaacaatagtaaaaccatattactggctaagcttctctctcgattgct

SEQ ID NO: 594675 - DNA, 120 bp, Artificial Sequence
  ENSG00000173627_3 (sequence is synthesized)
ctaattgtccttaccatattcgaacaggtgaagaagcaagagtttccctcacagaattttgtcagatttttggattcccttatgggacaacatttcctcaaacaaaacacctcacatttt

SEQ ID NO: 594676 - DNA, 120 bp, Artificial Sequence
  ENSG00000173627_4 (sequence is synthesized)
atgaactaaaaacttcttctggtagcctggtgcaaaagggccatgctagcagttgcactgggaattatatccatccagaatcaatgctctttgaaatgaatggttatcttgactcagcca

SEQ ID NO: 594677 - DNA, 120 bp, Artificial Sequence
  ENSG00000173627_5 (sequence is synthesized)
tatacaataatgacagcatcaggcatatcattctgtattccaacaactccccttgtaatgaagctaaccactgctgcatcagcaaaatgtataatttcctgattacgtatccaggcatca

SEQ ID NO: 594678 - DNA, 120 bp, Artificial Sequence
  ENSG00000173627_6 (sequence is synthesized)
ctcttagtatttatttttctcagctctatcatactgagatggactttcctgcctcagcatggaaccgcgaagctctccggagcctggccagcttatggccgcgggttgttttgagtccaa

SEQ ID NO: 594679 - DNA, 120 bp, Artificial Sequence
  ENSG00000173627_7 (sequence is synthesized)
taagtggtgggatctggcattctgttctccacagctttataagtggtgtctcaggatcacatgtttttcagcccattttaactgggagagcactggctgacaggcacaacgcatatgaaa

SEQ ID NO: 594680 - DNA, 120 bp, Artificial Sequence
  ENSG00000173627_8 (sequence is synthesized)
tcaatgccataacaggcgtaaaaccttacttcactgatgttcttctccagacaaaaaggaatccaaacacaaaagctcaggaggctttagagagctaccccttaaacaatgcctttcctg

SEQ ID NO: 594681 - DNA, 120 bp, Artificial Sequence
  ENSG00000173627_9 (sequence is synthesized)
gacagttttttcaaatgccgagtggacaactccaacccaacctacctccagacctcagggctcctgttgtttttgtgctagtgcctctcagggacttaccaccaatgcatatgggccaaa

SEQ ID NO: 594682 - DNA, 120 bp, Artificial Sequence
  ENSG00000173627_10 (sequence is synthesized)
acccaaataaacccaggaatatcgtaaggcacttaaatatgcctcaaatgtcattccaggaaaccaaggaccttggaaggcttcccactggaaggtcagtggagatagtggaaatcacag

SEQ ID NO: 594683 - DNA, 120 bp, Artificial Sequence
  ENSG00000173627_11 (sequence is synthesized)
ggcagatgaaaagaagaagaagaaagggaagaaataaaatctacattcctacagcatgaaaccaattaccaagggacttattagataggcaataaaaatctggaaactttctctctcagg

SEQ ID NO: 594684 - DNA, 120 bp, Artificial Sequence
  ENSG00000173627_12 (sequence is synthesized)
gctgagccaagatggagataaactgatgcactaaaagcaaaccttgaattatttaccatatcaactattataaagttacactattttaaacataatccaaaatgtttccataagcaactt

SEQ ID NO: 594685 - DNA, 120 bp, Artificial Sequence
  ENSG00000173627_13 (sequence is synthesized)
gatctctctcctttattttgaaagtggcagtatcaaaatggaaccattagcagcttgctaatattttgatgcagaaaaggaatctcattattctattttactcacatcatctttccacta

SEQ ID NO: 594686 - DNA, 120 bp, Artificial Sequence
  ENSG00000173627_14 (sequence is synthesized)
caaaagcccatggacaaaatagctacctaaatttgtttcggtaaaaaatttactgtaaaattgaaaaacagcctgaagctactgacattaagtgctgtttgcaggagcaaaccagtgatt

SEQ ID NO: 594687 - DNA, 120 bp, Artificial Sequence
  ENSG00000173627_15 (sequence is synthesized)
ttctattaattgttaatcatggacagaagattttaggcagctcatttttttctaaagtgattcaaaatagttttgtgtgggaaaaagctcttctgctgattacatatagctataaagatt

SEQ ID NO: 594688 - DNA, 120 bp, Artificial Sequence
  ENSG00000173627_16 (sequence is synthesized)
aaaacctagccacctgctcagtttgatcttccccagctcagacctctcccttctgagcagatgatagaggtaagatgatacatgagaacctccaatggctcctgtcatcacatactgtat

SEQ ID NO: 594689 - DNA, 120 bp, Artificial Sequence
  ENSG00000173627_17 (sequence is synthesized)
aaaatccaagttcctcttactggctttcaaggatcctcctttaacttcctgttgccttgtctcatcagcaagatcataagtacctacaggtcaagcactgtctctcccttctctttagct

SEQ ID NO: 594690 - DNA, 120 bp, Artificial Sequence
  ENSG00000173627_18 (sequence is synthesized)
tttcccttaggatctagcacattacccagcaaaatgtgagtagcaaggctgaaatgacatctcaataacttcaccaatgattgtaactcagcatcccttctccatcccagctgaaagcct

SEQ ID NO: 594691 - DNA, 120 bp, Artificial Sequence
  ENSG00000173627_19 (sequence is synthesized)
gcttcaccatcctgcaagagatgttttttctttttgttagcatccattcccctttctaatgcagctcccaatgcataatgtgtgttttacttccctctttctgactccatcctcgtcacc

SEQ ID NO: 594692 - DNA, 120 bp, Artificial Sequence
  ENSG00000173627_20 (sequence is synthesized)
agtgaatatttgtaccttctcttaaaatcttcaaaacacacttctaggaagtgctccttgattaatcctctaagcacttaaatgaaagcactttgcttatgcttatttcacatttgctgc

SEQ ID NO: 594693 - DNA, 120 bp, Artificial Sequence
  ENSG00000173627_21 (sequence is synthesized)
ctgccacttgcctctttgaaatatgtaaagatacattacaagaaaaatgtacattttctcgtaacttgctattaatttttttctttatatatatatataaagtaatcctaagctaataaa

SEQ ID NO: 594694 - DNA, 120 bp, Artificial Sequence
  ENSG00000173627_22 (sequence is synthesized)
tttgccatgacattaaaacatttaatactccataagggaggaggagaaagaaaaacatattttaggaatagcaattagtattgtggttaaaataaacatgaataaaaattttaaaacaaa

SEQ ID NO: 594695 - DNA, 120 bp, Artificial Sequence
  ENSG00000173638_0 (sequence is synthesized)
gctgtagtcccggagtccgcgtgcgcggggccgggtccgggagccccagggcagccgccccgccgagtcgcaggcacagcgtcaccttcgtcccctccggagctgcacgtggcctgagca

SEQ ID NO: 594696 - DNA, 120 bp, Artificial Sequence
  ENSG00000173638_1 (sequence is synthesized)
ggatggtgccctccagcccagcggtggagaagcaggtgcccgtggaacctgggcctgaccccgagctccggtcctggcggcacctcgtgtgctacctttgcttctacggcttcatggcgc

SEQ ID NO: 594697 - DNA, 120 bp, Artificial Sequence
  ENSG00000173638_2 (sequence is synthesized)
agatacggccaggggagagcttcatcaccccctacctcctggggcccgacaagaacttcacgcgggagcaggtcacgaacgagatcacgccggtgctgtcgtactcctacctggccgtgc

SEQ ID NO: 594698 - DNA, 120 bp, Artificial Sequence
  ENSG00000173638_3 (sequence is synthesized)
tggtgcccgtgttcctgctcaccgactacctgcgctacacgccggtgctgctgctgcaggggctcagcttcgtgtcggtgtggctgctgctgctgctgggccactcggtggcgcacatgc

SEQ ID NO: 594699 - DNA, 120 bp, Artificial Sequence
  ENSG00000173638_4 (sequence is synthesized)
agctcatggagctcttctacagcgtcaccatggccgcgcgcatcgcctattcctcctacatcttctctctcgtgcggcccgcgcgctaccagcgtgtggccggctactcgcgcgctgcgg

SEQ ID NO: 594700 - DNA, 120 bp, Artificial Sequence
  ENSG00000173638_5 (sequence is synthesized)
tgctgctgggcgtgttcaccagctccgtgctgggccagctgctggtcactgtgggccgagtctccttctccacgctcaactacatctcgctggccttcctcaccttcagcgtggtcctcg

SEQ ID NO: 594701 - DNA, 120 bp, Artificial Sequence
  ENSG00000173638_6 (sequence is synthesized)
ccctcttcctgaagcgccccaagcgcagcctcttcttcaaccgcgacgaccgggggcggtgcgaaacctcggcttcggagctggagcgcatgaatcctggcccaggcgggaagctgggac

SEQ ID NO: 594702 - DNA, 120 bp, Artificial Sequence
  ENSG00000173638_7 (sequence is synthesized)
acgccctgcgggtggcctgtggggactcagtgctggcgcggatgctgcgggagctgggggacagcctgcggcggccgcagctgcgcctgtggtccctctggtgggtcttcaactcggccg

SEQ ID NO: 594703 - DNA, 120 bp, Artificial Sequence
  ENSG00000173638_8 (sequence is synthesized)
gctactacctggtggtctactacgtgcacatcctgtggaacgaggtggaccccaccaccaacagtgcgcgggtctacaacggcgcggcagatgctgcctccacgctgctgggcgccatca

SEQ ID NO: 594704 - DNA, 120 bp, Artificial Sequence
  ENSG00000173638_9 (sequence is synthesized)
cgtccttcgccgcgggcttcgtgaagatccgctgggcgcgctggtccaagctgctcatcgcgggcgtcacggccacgcaggcggggctggtcttccttctggcgcacacgcgccacccga

SEQ ID NO: 594705 - DNA, 120 bp, Artificial Sequence
  ENSG00000173638_10 (sequence is synthesized)
gcagcatctggctgtgctatgcggccttcgtgctgttccgcggctcctaccagttcctcgtgcccatcgccacctttcagattgcatcttctctgtctaaagagctctgtgccctggtct

SEQ ID NO: 594706 - DNA, 120 bp, Artificial Sequence
  ENSG00000173638_11 (sequence is synthesized)
tcggggtcaacacgttctttgccaccatcgtcaagaccatcatcactttcattgtctcggacgtgcggggcctgggcctcccggtccgcaagcagttccagttatactccgtgtacttcc

SEQ ID NO: 594707 - DNA, 120 bp, Artificial Sequence
  ENSG00000173638_12 (sequence is synthesized)
tgatcctgtccatcatctacttcttgggggccatgctggatggcctgcggcactgccagcggggccaccacccgcggcagcccccggcccagggcctgaggagtgccgcggaggagaagg

SEQ ID NO: 594708 - DNA, 120 bp, Artificial Sequence
  ENSG00000173638_13 (sequence is synthesized)
cagcacaggcactgagcgtgcaggacaagggcctcggaggcctgcagccagcccagagcccgccgctttccccagaagacagcctgggggctgtggggccagcctccctggagcagagac

SEQ ID NO: 594709 - DNA, 120 bp, Artificial Sequence
  ENSG00000173638_14 (sequence is synthesized)
agagcgacccatacctggcccaggccccggccccgcaggcagctgaattcctgagcccagtgacaaccccttccccctgcactctgtgctccgcccaagcctcaggccctgaggctgcag

SEQ ID NO: 594710 - DNA, 120 bp, Artificial Sequence
  ENSG00000173638_15 (sequence is synthesized)
atgagacttgtccccagctggctgtccatcctcctggtgtcagcaagctgggtttgcagtgtcttccaagcgacggtgttcagaatgtgaaccagtgactctcgggcgcccctgtggtaa

SEQ ID NO: 594711 - DNA, 120 bp, Artificial Sequence
  ENSG00000173638_16 (sequence is synthesized)
ctttgcaggcggccctcagtgcatccccacgacccctgcctcgagggccgcctgccttagcaatgggggcctccgcttatcctgctagcaggccccctaggattccccctgccctgtgcc

SEQ ID NO: 594712 - DNA, 120 bp, Artificial Sequence
  ENSG00000173638_17 (sequence is synthesized)
gcactctggcggtggccacagcgtgctggcgacactcagggcagctgcctggccatgctgtccctgcactgtgccccgcgggctttgttgctggaagaggtgggtggtgggcttctgcgt

SEQ ID NO: 594713 - DNA, 120 bp, Artificial Sequence
  ENSG00000173638_18 (sequence is synthesized)
ccaccaggcctcactggctcatgccccttggggggcttgagacaaatcctttctgccccccagggctagtgaagtggcctcttggataccagctcaggggacactggccccacaggagtt

SEQ ID NO: 594714 - DNA, 120 bp, Artificial Sequence
  ENSG00000173638_19 (sequence is synthesized)
gtgagccctctagggcagggtgggagccgggaccctcaggtgtagctgagctgtgacattgctggtcatccttggtgctcttgcttttttgaaagatgctttttttttttttaactgacg

SEQ ID NO: 594715 - DNA, 120 bp, Artificial Sequence
  ENSG00000173638_20 (sequence is synthesized)
gtcatcagaggggagcagcggctctggtcctcggagctggttcctctctcccaccctaagggcagccctccatggtcctgtctgtccttctgaagtgtgtccatcctgacctgcgggtcc

SEQ ID NO: 594716 - DNA, 120 bp, Artificial Sequence
  ENSG00000173638_21 (sequence is synthesized)
tcagctgctcccacacttgtgccagcccggaggggactggtcccggtcaccgcggacgtgctggccttggtatgtgccaggcttgcctgggctgggcagccttgggggggctgcctttgt

SEQ ID NO: 594717 - DNA, 120 bp, Artificial Sequence
  ENSG00000173638_22 (sequence is synthesized)
ggtgggcgctggggaagtacgtcccagcggcctcagggtctaaggagcgctagtgccttgcccacaggtgcgggaccatctgatgtgatgtgaatactcttcccacatacattaaacaca

SEQ ID NO: 594718 - DNA, 120 bp, Artificial Sequence
  ENSG00000173638_23 (sequence is synthesized)
cttaagtgagtgtgcgcagggcttctgattcagggccggcctggcctgggggttgagggtcagcagtcagtgaggaggccaggagaggcgtcccagccttctcccgcctccagcccacgc

SEQ ID NO: 594719 - DNA, 120 bp, Artificial Sequence
  ENSG00000173638_24 (sequence is synthesized)
agggccttggtgcccatgagctgagcacccccacaaccctagtcaacggccctatcctgtggggcctctgccacatctcagcggccccaggtgaatggctggctgctcagcacggagagc

SEQ ID NO: 594720 - DNA, 120 bp, Artificial Sequence
  ENSG00000173638_25 (sequence is synthesized)
tggggagagaatctctggctggggaggggctgctggagctgctggacccaggggtctcccgaggtggctcaggggagcaggcatcttggggtaccctgggttgaggcagaggctgcacgt

SEQ ID NO: 594721 - DNA, 120 bp, Artificial Sequence
  ENSG00000173638_26 (sequence is synthesized)
ggaagatggcccgagtcagtggatggtgccagtcagacagggccatggtcccaggtgcatccaggggctctgtcatggccaccctggggaccctgcttgggggggggtctgcaccagcca

SEQ ID NO: 594722 - DNA, 120 bp, Artificial Sequence
  ENSG00000173638_27 (sequence is synthesized)
tttcctgggctcgtagatctagcaggatgtgatgggtggaggtgggctgggcctgtgccatgggctagagcgtcactggggaggcccacaccgccatcagaatcctcctcccagcgcctc

SEQ ID NO: 594723 - DNA, 120 bp, Artificial Sequence
  ENSG00000173638_28 (sequence is synthesized)
cccaacctgagggcctgctccctccgcagcctgctcactgcacccactgcctgcctgcctctgagtcctgcactcacccgtccaccaggacagggatggctgtcaggatgtagtgttgct

SEQ ID NO: 594724 - DNA, 120 bp, Artificial Sequence
  ENSG00000173638_29 (sequence is synthesized)
gggagcaagtcaggtcctgctgtgaggagagacctaagagtgttggtgtgtgtccacacacccgtgcatgcctgtgtacctgtgcacactatggatgctcctgcacacctgtgtacaact

SEQ ID NO: 594725 - DNA, 120 bp, Artificial Sequence
  ENSG00000173638_30 (sequence is synthesized)
gcacgcctgtgtatggccatgcatgcataccccatgtaaccgtgcgtgcctgtgcacactcgggatctgccagtggggcagtccagggataaaagactcctgagaactccttttggagaa

SEQ ID NO: 594726 - DNA, 120 bp, Artificial Sequence
  ENSG00000173638_31 (sequence is synthesized)
ttgtgtccttcctgtgacagtgaaggctgcttgcaaaccaagagtcagtgtaaaaggtcacttttatttgcctgtctgaattggcttcacatcacacacaattacagaaccagccccacc

SEQ ID NO: 594727 - DNA, 120 bp, Artificial Sequence
  ENSG00000173638_32 (sequence is synthesized)
ggtttcgtcgcagtcctgaggcaggtgcgtgttggctgtgctgtggtcagcctggcgctgccctgagtccacttgtccctccacagaacgaatgactcgggttgatgttgccggatctca

SEQ ID NO: 594728 - DNA, 120 bp, Artificial Sequence
  ENSG00000173638_33 (sequence is synthesized)
ggggtggctgtgactgacagaggaccttgttgcacctcgtggctgctttgttcacccgcagggcggcctgtgggcaccccggggttccccttcagtcccaaggagggtaaggatatgggt

SEQ ID NO: 594729 - DNA, 120 bp, Artificial Sequence
  ENSG00000173638_34 (sequence is synthesized)
ttcctaggagacagccaatgactgccctgcatctggagccagcctgtccatgggcagtgcacagatgacagccctccctcactgccctgtgtgctggctaccgcatgtcctgtgccagcc

SEQ ID NO: 594730 - DNA, 120 bp, Artificial Sequence
  ENSG00000173638_35 (sequence is synthesized)
tcagcctctttgatgtggccgtgttccatcctggcgctcagctggacaagtgctggctgagccacgtcccagccaggggcatgagatgggggccctggatgggaggctgccagaccccaa

SEQ ID NO: 594731 - DNA, 120 bp, Artificial Sequence
  ENSG00000173638_36 (sequence is synthesized)
ctcatgggtcccttgaatctcccagcttggactcggccagggtggagctgtctgctttggatgtatcatctcatggctcatttgggaggccagccccaggctgctgtgcttggtgttgga

SEQ ID NO: 594732 - DNA, 120 bp, Artificial Sequence
  ENSG00000173638_37 (sequence is synthesized)
ggacaggccggagctgggggtcacagtgcgcctctgagcttgggaacctgcttcagcctggggttgctgtggagaatggcccagagctgagcagaaggggctccccctagccccagggac

SEQ ID NO: 594733 - DNA, 120 bp, Artificial Sequence
  ENSG00000173638_38 (sequence is synthesized)
ctgagcctccctcccatctaccgcagggcgagcacacaccctggaggagcccagatggccttgtgctgagtgtggcctcagctcccattgcctcacggggcctgtctgctaacaggtctg

SEQ ID NO: 594734 - DNA, 120 bp, Artificial Sequence
  ENSG00000173638_39 (sequence is synthesized)
ggttttgtgcacagaacggtgctgctaggtgggagatgaagtcagcacctgctggggcgagcacggcttcccaaagcaggaaatcctggagaaatcgagccgtggtctgatcaggccaag

SEQ ID NO: 594735 - DNA, 120 bp, Artificial Sequence
  ENSG00000173638_40 (sequence is synthesized)
aggttgcacagggcatgatactgcaccctgcctgacccagctgggctcacaggtcaggggagagttggggcaggtgaatgtcagcatcaggcttctgttttaaacttttaaaaaaataca

SEQ ID NO: 594736 - DNA, 120 bp, Artificial Sequence
  ENSG00000173638_41 (sequence is synthesized)
ggccgttgaggaggtgcagggagaggagcgggagggctctgggtggctgccaagggggagctctgcgctcagaccctcaactaagaccaggaggtgcctgatgaggccccagcctgcaga

SEQ ID NO: 594737 - DNA, 120 bp, Artificial Sequence
  ENSG00000173638_42 (sequence is synthesized)
actcctcgcagtcctcaatggaggtttctgtaagttcttcacgagtctcctggctcttccctcagagcagctgcctctagattacaactgccaagtgctgttggtggcagaagccctacc

SEQ ID NO: 594738 - DNA, 120 bp, Artificial Sequence
  ENSG00000173638_43 (sequence is synthesized)
tccccactccgaagcagctcctgcaggaaacctgggccttgtgtggctggggaactcccaggactcctgccacgcagggggacccgagggcagcttgggcaggcccctcgcggccggggg

SEQ ID NO: 594739 - DNA, 120 bp, Artificial Sequence
  ENSG00000173638_44 (sequence is synthesized)
caccccagagtgcagccccagcaagagcaggtatggcggcctcctctgcagaggaccctggcagcgagaggggaccctggcggcgagcggggaccgtggcggcgagaggggaccctggcg

SEQ ID NO: 594740 - DNA, 120 bp, Artificial Sequence
  ENSG00000173638_45 (sequence is synthesized)
gcgagaggggaccgtggcggcgagaggggaccctggcggcgagaggggaccctggcggcgagaggggaccgtggtggcgagagggaaccctggcggtgagaggggaccctggcggcgaga

SEQ ID NO: 594741 - DNA, 120 bp, Artificial Sequence
  ENSG00000173638_46 (sequence is synthesized)
ggggaccgtggcggcgagaggggaccctggtggtgaaaggcgcccgaggctagcctggctctctgggcttctgctctgccagcccccagacatcctcaaacagtggttttctcacatttt

SEQ ID NO: 594742 - DNA, 120 bp, Artificial Sequence
  ENSG00000173638_47 (sequence is synthesized)
gagtgctccactccacgtcccatgggccatgagatctctgctctgactggcggaacaggcaacattcctgcctgtgcatgagctctaagggtcacttctgcttctctttctgatggtctt

SEQ ID NO: 594743 - DNA, 120 bp, Artificial Sequence
  ENSG00000173638_48 (sequence is synthesized)
tccctggccttgagtatttgcctctcacacctgcacagatccgtacacacgtagataccggaggaggatcttccacggactgttggaatctgctgtaaattcagctccttcccctctgat

SEQ ID NO: 594744 - DNA, 120 bp, Artificial Sequence
  ENSG00000173638_49 (sequence is synthesized)
ccattcacacctagacactggaggaggatcttccatggactgttggaatctaccgtaaattcagctccttcccctctgatccattcacacctagataccggaggaggatcttctgcggat

SEQ ID NO: 594745 - DNA, 120 bp, Artificial Sequence
  ENSG00000173638_50 (sequence is synthesized)
ccacgctggagtcgtgcacagacgtccctcgggaggagtgaagaggccaccgggtctgcgtctcaggtaaaaaggtgactgaaaatgccccaccctgctgacatcagggagacaaagctc

SEQ ID NO: 594746 - DNA, 120 bp, Artificial Sequence
  ENSG00000173638_51 (sequence is synthesized)
ttggctcaaaagacagcagagtggacacctttgggctgagcgggagaacccccagcatggagggcttggagggcatggagggcatggagggcatagagggcatggagggcatggcccagg

SEQ ID NO: 594747 - DNA, 120 bp, Artificial Sequence
  ENSG00000173638_52 (sequence is synthesized)
cccatggatgccctgctgagaatccacaggggcctgttgtatgtgtgtatatgggtgcacatgtgtgcatatatgtgtattggtgtgtatgcatgtgtatatgtatgtgtgcatgagtat

SEQ ID NO: 594748 - DNA, 120 bp, Artificial Sequence
  ENSG00000173638_53 (sequence is synthesized)
acatgtgcagtgtgtatgcccatcatggaatgggccagggagggctcatagtcatgtatgtggatacacatgtggatacgtgcacatgtatgagtgtatgtatatacctgtatgggtgtg

SEQ ID NO: 594749 - DNA, 120 bp, Artificial Sequence
  ENSG00000173638_54 (sequence is synthesized)
cacgtggacaggctcgtatatgcatgaatacatgtgtatatgtgcacctatgtggagtgtatgggcatgtgtacacacatgagcacgtgtggatgtgtgtgtgcgtgtatgtgtgcgcgt

SEQ ID NO: 594750 - DNA, 120 bp, Artificial Sequence
  ENSG00000173638_55 (sequence is synthesized)
gtgtatgggcatgtatgtgcatagatgcatgtgtatatgtgcacacatgtatgagtacggccatatatgtgcatgcatgtttgggcacacgtgtgcgtgtgtggacatgtatgactgtgc

SEQ ID NO: 594751 - DNA, 120 bp, Artificial Sequence
  ENSG00000173638_56 (sequence is synthesized)
atgggtatggcatgaccagtgctgtgtggccacatggcagggctgcttataagtggcctctgggaggagctgcaggaccccaggctgtggccaggccattcccaggtcctggtctcccag

SEQ ID NO: 594752 - DNA, 120 bp, Artificial Sequence
  ENSG00000173638_57 (sequence is synthesized)
atcccggggcgaccctggggcggagcacagggggtggggactgctgggcactgatgattaccagacaccttcccgcagggtgcctgccgttagccccacgccaggcccggccggcccacg

SEQ ID NO: 594753 - DNA, 120 bp, Artificial Sequence
  ENSG00000173638_58 (sequence is synthesized)
ctcagcctcacacgttcccagctctcaggctaccccggcccttctcacccctttcctgcacaaggacccttttgggaggaggtgactgagcctagcacacacaggcccactgccctgtct

SEQ ID NO: 594754 - DNA, 120 bp, Artificial Sequence
  ENSG00000173638_59 (sequence is synthesized)
gcctccagggcttcctcctgggtactggcccctcgtggggtactgccagccacatccaggacaagagctgcgctcaggcagggccggttcttgggggaggacagtgggtgcggcggccgt

SEQ ID NO: 594755 - DNA, 120 bp, Artificial Sequence
  ENSG00000173638_60 (sequence is synthesized)
ccactcccctctgggcatgtcacccccgtgggcctgggctgctccccacctgccagaccccatctgccgcccccactggagaccccaggtcctcaccggccgtccaggaaagccaatctc

SEQ ID NO: 594756 - DNA, 120 bp, Artificial Sequence
  ENSG00000173638_61 (sequence is synthesized)
tcccttgtaccccggccgtccgtatggaccctgcaagaggaagggggccaggcttagtggggcagaccctggcccttgaccacgagttggggggtcctggggaaggggaggggccatgca

SEQ ID NO: 594757 - DNA, 120 bp, Artificial Sequence
  ENSG00000173638_62 (sequence is synthesized)
gagcacagcaccctgggccacccatcagctcggaggagcccactgcagcctcacgccgacacctgccccacacgctttaaaactgcactagggagatgagccctgggccgcacagcacaa

SEQ ID NO: 594758 - DNA, 120 bp, Artificial Sequence
  ENSG00000173638_63 (sequence is synthesized)
gctcagcagccgcgggcgaccgtgtccttgggggccgtcatgcccgagctcagtgcagagaaagccagggaccgacttaccgggggtcctcggaagcccggctctccctgagcaaaaaaa

SEQ ID NO: 594759 - DNA, 120 bp, Artificial Sequence
  ENSG00000173638_64 (sequence is synthesized)
caagaagacagggttaggtggcagcttgtgccccacctggcagcctctctgagggcccctgtggcgaaggcacggttaggtggcggcttgtgccccacctgatagcctccctaagggccg

SEQ ID NO: 594760 - DNA, 120 bp, Artificial Sequence
  ENSG00000173638_65 (sequence is synthesized)
ctgtggtccctttgggtgcactgggccgtccccaaggcgcaggcagccctggggaggacaggagccactggtgaggggagggtcgggtttggggtttgcgtccaggttggtgcgtgcatg

SEQ ID NO: 594761 - DNA, 120 bp, Artificial Sequence
  ENSG00000173638_66 (sequence is synthesized)
catgccccgggaccctgaagcaggggtggagggtggagggtggagggcatgtgccacgcagtgtcctggttgccacaggccccagctccaatgcacagctgggtgggatagtggagctct

SEQ ID NO: 594762 - DNA, 120 bp, Artificial Sequence
  ENSG00000173638_67 (sequence is synthesized)
cactgggcctggggatcctgtgtctgaggcccaccccaaacaccccggagggctcactgctccctctgaaagtgggagagccggtggcccacactccaaagatccaggcttctccccagg

SEQ ID NO: 594763 - DNA, 120 bp, Artificial Sequence
  ENSG00000173638_68 (sequence is synthesized)
accctccccgagggcttttctgggcggctgcctgctgggggtggggacgcaggcacaggccccttgaggaactgactccgggccctgcccacagcatcagggcccccaggaagaggctgg

SEQ ID NO: 594764 - DNA, 120 bp, Artificial Sequence
  ENSG00000173638_69 (sequence is synthesized)
aggggcagccagaaacctgctgaggctgagctggtacagcctgggctcctgcaccccacaggccaggccccagggaggcgcgagctcagagctgcagcccactgagaacctcccctcagc

SEQ ID NO: 594765 - DNA, 120 bp, Artificial Sequence
  ENSG00000173638_70 (sequence is synthesized)
agggtgggctcaggggtagggagaggacgaggggcagggagaggacgaggggccggcggaaccgccgacatgggtgcgagaaaggaggggccaccagggccaggcctggatggtagagcc

SEQ ID NO: 594766 - DNA, 120 bp, Artificial Sequence
  ENSG00000173638_71 (sequence is synthesized)
ctgcttgggagaggctcgtgcatcaggagccagaccctcaggaagaccctccccaggctgtctccacagccccaggagcccccacgcctgccggaaggaggctgcccggccctcaccttg

SEQ ID NO: 594767 - DNA, 120 bp, Artificial Sequence
  ENSG00000173638_72 (sequence is synthesized)
gggagcagccacccagcgggatgtacaggaccttgggggcccccaaccccacagggaggtcacccaccttcatttcagcctccaactgaagaaagtcaaacggaaactgccctgcaagag

SEQ ID NO: 594768 - DNA, 120 bp, Artificial Sequence
  ENSG00000173638_73 (sequence is synthesized)
agagacaggcggggtctcgctgaggtggtgtctgacagcgccgggttccctctgcagcccccagcactggactcggtggtggtttttctagactgcccttccatctggtgacttcggtac

SEQ ID NO: 594769 - DNA, 120 bp, Artificial Sequence
  ENSG00000173638_74 (sequence is synthesized)
gcttacgtgggagacgtgctgagaaaagagcaacgcgcttctttcctcccagcgtcctgcccttcccatctctcctctgcctcctcccagggtgggcaggcagctgtgtcttggccctga

SEQ ID NO: 594770 - DNA, 120 bp, Artificial Sequence
  ENSG00000173638_75 (sequence is synthesized)
cttgagggtccctccaccctctccaagggtgaagctgtggcagttccaggtggctccttccagaccacggaggagccctttgctgaaatccctgcttgttgctgcttctctccttttcct

SEQ ID NO: 594771 - DNA, 120 bp, Artificial Sequence
  ENSG00000173638_76 (sequence is synthesized)
cagtcccggcagaggtgcaggaatgttgttcgcctttgcaaagaattaactttggatttttggactttcttgatccttgctatttttatatataaaacatacgcaatttctcttcactca

SEQ ID NO: 594772 - DNA, 120 bp, Artificial Sequence
  ENSG00000173638_77 (sequence is synthesized)
cccctacctcctggggcccgacaagaacttcacgcgggagcaggcgaggacagggtcttgccctggctccggctgtcggtggcggggctggggctggagcggcggagccatctccttgac

SEQ ID NO: 594773 - DNA, 120 bp, Artificial Sequence
  ENSG00000173638_78 (sequence is synthesized)
tatttataggggtgagcattatgtgtggcgtttcccttaaaataacaaaataagaaaagtctctagagcaaaaatgtttaaatcccatctgcctgccctctcatgttgtacattaacgga

SEQ ID NO: 594774 - DNA, 120 bp, Artificial Sequence
  ENSG00000173638_79 (sequence is synthesized)
ttaaaaagtagattccagaaattaagccattccaccaggccttggatatcatcagagggacgatgggtgcaggtgctctgcgcacctgccacttggtggggcccccgatctcagcccctc

SEQ ID NO: 594775 - DNA, 120 bp, Artificial Sequence
  ENSG00000173638_80 (sequence is synthesized)
tggctgcaggagaggcccggggagagcttcatcacgccctccctcctggggcccgacaagaacttcacgcgggagcaggcacgtgggcgccggggtgcaggggcagccaccagtaggtgg

SEQ ID NO: 594776 - DNA, 120 bp, Artificial Sequence
  ENSG00000173638_81 (sequence is synthesized)
gggctggccggccgctccctgcccacggtgggggcttcctccgagccgccggtcctctccggccatccgcatccaggcggtggctacttggaggcagtcatgaagctgttctcaatgcag

SEQ ID NO: 594777 - DNA, 120 bp, Artificial Sequence
  ENSG00000173638_82 (sequence is synthesized)
gaagcttgcccctctgtaagcctgtttcctcctctgcaagatggagctaattacagctcccgcccataatgctatcgggaagacgaagcaagttcctgcccgtggagaccttggcactac

SEQ ID NO: 594778 - DNA, 120 bp, Artificial Sequence
  ENSG00000173638_83 (sequence is synthesized)
ttatggccatctttgcctagcaggctcccagctgtgtttcctcagctgtaggaaaccgtggttctgcctggattccttttccctgtgctgcatcctggaaactctctcctggtcatgagc

SEQ ID NO: 594779 - DNA, 120 bp, Artificial Sequence
  ENSG00000173638_84 (sequence is synthesized)
tccggcagctctaggtctcaacccgtttgtttcacgtctctcagggagcactgcaccacgctgccggagaccaggctctgaaaacattttgcttcacatatttgcctgtttttttcagtt

SEQ ID NO: 594780 - DNA, 120 bp, Artificial Sequence
  ENSG00000173638_85 (sequence is synthesized)
gtttcatgggggagagtgagtctaggttctgttcctcccaggctgttagtggaagttttcagaactggccttttgaaaaacttcccagagacagtcacaaatgttccgtagtcactgggg

SEQ ID NO: 594781 - DNA, 120 bp, Artificial Sequence
  ENSG00000173638_86 (sequence is synthesized)
cttccctttacgatgccgatgtggtgaatgcgtgtggtgtcgtgtcagtgtgatgcacctgtgtggtgagtgttgtctgtgtatcattttccacaaacatagattttggttcatgcctga

SEQ ID NO: 594782 - DNA, 120 bp, Artificial Sequence
  ENSG00000173641_0 (sequence is synthesized)
cttttacctctgactgaaatcccacctaaggcgctcgcaggcatcacctctgacacagagatggagcagacagttgccgggaacacaaccttctagacctttaaggagaaagctgccaac

SEQ ID NO: 594783 - DNA, 120 bp, Artificial Sequence
  ENSG00000173641_1 (sequence is synthesized)
tttgtcctcttggggctgctgaatgttctgagagtcagagggagtgcaggcacagaatccaggtccccatgggggctggcaggggacagctgcacattttacaccccctggcagggctca

SEQ ID NO: 594784 - DNA, 120 bp, Artificial Sequence
  ENSG00000173641_2 (sequence is synthesized)
acctttccttagagatgggctgtgaaggttgtctgccttgagggaaggagctcctgacgtcacagagcggtggtgcttccacctaccctgtccccaaggagcctgcacactgatggagga

SEQ ID NO: 594785 - DNA, 120 bp, Artificial Sequence
  ENSG00000173641_3 (sequence is synthesized)
ggtacagccgtggaggagaaccagagtctggaggggaggcacagtcctcaggagcccccaggctgacgggggaaacaaaacacacaataaaccccaaacttgcaaggttctggggcaggc

SEQ ID NO: 594786 - DNA, 120 bp, Artificial Sequence
  ENSG00000173641_4 (sequence is synthesized)
accgaggtccgagtggcaaggagacaggatccagccctgtgcagtggtgaggaggcccctggggctgctgtgatcagcctggaatgtcaggctgtgagctcagccctctcggcctgcgtg

SEQ ID NO: 594787 - DNA, 120 bp, Artificial Sequence
  ENSG00000173641_5 (sequence is synthesized)
tcgggctgtcagcagggccggcgcacgggagaagatttccagccccctctgggccatggagaggcctaaatttagctagtagacaaggggctggccccaagcccagggacagtcggcctt

SEQ ID NO: 594788 - DNA, 120 bp, Artificial Sequence
  ENSG00000173641_6 (sequence is synthesized)
ataaagcggccgcagtcggagcctggcacgctcgcccagaggcctgcgcccacaccctctcctgtccagccctcgcccgcctgggcagggcccggcgccgtccgtggatgagccacagaa

SEQ ID NO: 594789 - DNA, 120 bp, Artificial Sequence
  ENSG00000173641_7 (sequence is synthesized)
cctcttccaccttccgagcggagagaagtttccattcctcttcctcttcctcctcctcttccacctcctcctcggcctcccgtgctctcccggcccaggacccgcccatggagaaggccc

SEQ ID NO: 594790 - DNA, 120 bp, Artificial Sequence
  ENSG00000173641_8 (sequence is synthesized)
tgagcatgttttccgatgactttggcagcttcatgcggccccactcggagcccctggccttcccagcccgccccggtggggcaggcaacatcaagaccctaggagacgcctatgagtttg

SEQ ID NO: 594791 - DNA, 120 bp, Artificial Sequence
  ENSG00000173641_9 (sequence is synthesized)
cggtggacgtgagagacttctcacctgaagacatcattgtcaccacctccaacaaccacatcgaggtgcgggctgagaagctggcggctgacggcactgtcatgaacaccttcgctcaca

SEQ ID NO: 594792 - DNA, 120 bp, Artificial Sequence
  ENSG00000173641_10 (sequence is synthesized)
agtgccagctgccggaggacgtggacccgacgtcggtgacctcggctctgcgggaggacggcagcctcactatccgggcacggcgtcacccgcatacagaacacgtccagcagaccttcc

SEQ ID NO: 594793 - DNA, 120 bp, Artificial Sequence
  ENSG00000173641_11 (sequence is synthesized)
ggacggagatcaaaatctgagtgcctctcccttccctttccctgtccccccgccccacgcctgccagcaaagcctcgctaaccccattacaacagctccaggacatctcagcccaggttc

SEQ ID NO: 594794 - DNA, 120 bp, Artificial Sequence
  ENSG00000173641_12 (sequence is synthesized)
accccagaccccaggtggaccatcctcccaaactagggccctccactctatccagggcaggccagggactccctggcctgacacatgatgcccagatttcagatttggcctccgtcactt

SEQ ID NO: 594795 - DNA, 120 bp, Artificial Sequence
  ENSG00000173641_13 (sequence is synthesized)
aatccagagtacaggggctggggtcagggaaggaagatctaaagaacccactgtgggtcaggggaatgggaccagcaggacatatgggcaagctctgcaggacagacagacagacaaacc

SEQ ID NO: 594796 - DNA, 120 bp, Artificial Sequence
  ENSG00000173641_14 (sequence is synthesized)
ctctgatctatgaagtctctgcagggcaaggggaccagggacctggaaccctcttggccaaggggagtgggagggacagagggaaggtcacaggcaagggtgcctatctaagtggaacta

SEQ ID NO: 594797 - DNA, 120 bp, Artificial Sequence
  ENSG00000173641_15 (sequence is synthesized)
attgcccgagggctcagcaaggccaagaggagacagccgtgacggtaaacttcccctctaccagcctccaagccccacgccagcgagcaggctgcctgcccaccccgtgcccccagccag

SEQ ID NO: 594798 - DNA, 120 bp, Artificial Sequence
  ENSG00000173641_16 (sequence is synthesized)
ctggctgtgccagggcagagccatgccacatctgtatatagatggggtttttccaatacagctggttcgtgataaactgcatgaaactcctgccgtcctgcgcctgctggggcctccagg

SEQ ID NO: 594799 - DNA, 120 bp, Artificial Sequence
  ENSG00000173641_17 (sequence is synthesized)
caaggccaagtggggttgggggtggggctggtccttctccctcccacaggcctgtgttcttggggctgctcccatgcagacaggatcacctaacagagatggaagccagggcatggatgg

SEQ ID NO: 594800 - DNA, 120 bp, Artificial Sequence
  ENSG00000173641_18 (sequence is synthesized)
ggctttgggtcctcgaggttggaccccagcttcttgccaccttcccctccgggcagtcagctctccatccatccccctctttaatctatgaatctataggctcggtgtgtgtaacacaca

SEQ ID NO: 594801 - DNA, 120 bp, Artificial Sequence
  ENSG00000173641_19 (sequence is synthesized)
cacccctatcgttgtccttcaaatactcagcattaccattggttgaggccaaattcagagctttctcaaatcagatttacaatctccattttcattaacggggaaacatccccgagccac

SEQ ID NO: 594802 - DNA, 120 bp, Artificial Sequence
  ENSG00000173641_20 (sequence is synthesized)
tgagtgctgtgctttgtcactgaaggttagatctgaacccagggtgtcaactgctgctctcaactccccacctctgggcactgaggagtatttcccctcattctacctctctaaggctat

SEQ ID NO: 594803 - DNA, 120 bp, Artificial Sequence
  ENSG00000173641_21 (sequence is synthesized)
gcaaccctccccacgtcttccagctgggggatgggggggagtcataggaaaagcccccatctcccatctgggatagggaccttccatcagccttaaccctgggaaatgcctgctgccccc

SEQ ID NO: 594804 - DNA, 120 bp, Artificial Sequence
  ENSG00000173641_22 (sequence is synthesized)
aatgactcttggtttcgtctcccacatacagaagcagggtggaggggaagggtgggtctcagttagcaggggtccccagggcaagtcagcctcctccctccatgcctctctggtcagtgt

SEQ ID NO: 594805 - DNA, 120 bp, Artificial Sequence
  ENSG00000173641_23 (sequence is synthesized)
gccttagggtggcctctcactcccaccactctgggccccttgggggaggactggggagggggccgtgggagagccctgacgctggaacctgtatacacaataaaggacagtctcacagac

SEQ ID NO: 594806 - DNA, 120 bp, Artificial Sequence
  ENSG00000173641_24 (sequence is synthesized)
actccacataccaccagcaccgctaatacccctgtagaaggagctctccaggatgaagctccagactgggttgtagggggctcagacaaaagagaaactgcccgtcttcaagaaccttca

SEQ ID NO: 594807 - DNA, 120 bp, Artificial Sequence
  ENSG00000173641_25 (sequence is synthesized)
atctaatggggagacaggtgaaccctcgcccccgtgggaactgccagttggatagggaagaagggacacagcagagagtcacagcacacaggaagactatgtcacactgccaggtgctgt

SEQ ID NO: 594808 - DNA, 120 bp, Artificial Sequence
  ENSG00000173641_26 (sequence is synthesized)
gggaggacaaagacagtcagtgctgggggcatctggactgggtgtgggcccatgtgagcaggagcagtcagagaggcctccctgggggaggaggcattggagctgatctgggacggaagg

SEQ ID NO: 594809 - DNA, 120 bp, Artificial Sequence
  ENSG00000173641_27 (sequence is synthesized)
gacggatttggagaggacagcagaggcccttaactgcaacctgggcagagcagagggcctggccgcctctcagaatggcctccaccctggcccagggcaaggacccgcccatggagaagg

SEQ ID NO: 594810 - DNA, 120 bp, Artificial Sequence
  ENSG00000173641_28 (sequence is synthesized)
gcttcatgcggccccactcggagcccctggccttcccaggcaagtgatccgggccctgaggggaggggaggtgcacagggaggggacgtctgctccagggcgccaccgaaggcgctgtgg

SEQ ID NO: 594811 - DNA, 120 bp, Artificial Sequence
  ENSG00000173641_29 (sequence is synthesized)
ctgccggtcggcctggaacaggtgctgcacagcctgcagccatgtgtggccaccaagacagatgtggccacagggacagatgtggccatgaaaacaggtgggcctctaaggaacagttgt

SEQ ID NO: 594812 - DNA, 120 bp, Artificial Sequence
  ENSG00000173641_30 (sequence is synthesized)
ggccctgggggttggacatggttccatggccacccatgctctgtaaccacagccaatcccagctggagccctggagggctggatgggtgagcggtggggggcagcccccaggctccaggc

SEQ ID NO: 594813 - DNA, 120 bp, Artificial Sequence
  ENSG00000173641_31 (sequence is synthesized)
ctggggtggggttgttacagacctagcctcatatacacacacactgtgctgggtgaggccccacccccaccccagaaaaggtgggctgtaggaatgaggaggagcttagggagaaacagc

SEQ ID NO: 594814 - DNA, 120 bp, Artificial Sequence
  ENSG00000173641_32 (sequence is synthesized)
taggggggaggtagggcctgggggagccgccccttgccccaagagaaggagccagaacccccggatctgcatgcaaggcctgctccatgcctcgctcacagcagcccatcccacagcccg

SEQ ID NO: 594815 - DNA, 120 bp, Artificial Sequence
  ENSG00000173653_0 (sequence is synthesized)
ggcgctgggcggggatgggctgcgactgctgtcggtgtcgcggccggagcggccgcccgagtcggcggcgctgggcggcctgggccccgggctgtgctgctgggtgtcagtgttctcctg

SEQ ID NO: 594816 - DNA, 120 bp, Artificial Sequence
  ENSG00000173653_1 (sequence is synthesized)
tgggtgtcagtgttctcctgcctcagcctcgcctgctcctacgtgggcagcctctacgtctggaagagcgaactgcccagggaccatcccgcggtcatcaagcgacgcttcaccagcgtc

SEQ ID NO: 594817 - DNA, 120 bp, Artificial Sequence
  ENSG00000173653_2 (sequence is synthesized)
ctggtggtgtccagtctctcacccctgtgcgtgctgctctggagggaactcacaggcatccagccaggcacatccctgctcaccctgatgggcttcaggctggagggcattttcccagcg

SEQ ID NO: 594818 - DNA, 120 bp, Artificial Sequence
  ENSG00000173653_3 (sequence is synthesized)
gcgctgctgcccctgttgctgaccatgattcttttcctgggcccactgatgcagctctctatggattgcccttgtgacctggcagatgggctgaaggttgtcctggccccccgctcctgg

SEQ ID NO: 594819 - DNA, 120 bp, Artificial Sequence
  ENSG00000173653_4 (sequence is synthesized)
gcccgctgcctcacagacatgcgttggctgcggaaccaagtgatcgccccgctgacagaggagctggtgttccgggcctgtatgctgcccatgttagcaccgtgcatgggcctgggccct

SEQ ID NO: 594820 - DNA, 120 bp, Artificial Sequence
  ENSG00000173653_5 (sequence is synthesized)
gctgtgttcacctgcccgctcttttttggagttgcccattttcaccatattattgagcagctgcgtttccgccagagcagcgtggggaacatcttcttgtctgctgcgttccagttctcc

SEQ ID NO: 594821 - DNA, 120 bp, Artificial Sequence
  ENSG00000173653_6 (sequence is synthesized)
acactgctttcctcttcatccgcacaggacacctgattgggccggttctctgccattccttctgcaattacatgggtttcccagctgtttgcgcggccttggagcacccacagaggcggc

SEQ ID NO: 594822 - DNA, 120 bp, Artificial Sequence
  ENSG00000173653_7 (sequence is synthesized)
ccctgctggcaggctatgccctgggtgtgggactcttcctgcttctgctccagcccctcacggaccccaagctctacggcagccttcccctttgtgtgcttttggagcgggcaggggact

SEQ ID NO: 594823 - DNA, 120 bp, Artificial Sequence
  ENSG00000173653_8 (sequence is synthesized)
cagaggctcccctgtgctcctgacctatgctcctggatacgctatgaactctcaccggctccccagccctccccaccaaggggtactgcaggggaagggctggctggggtccccgagatc

SEQ ID NO: 594824 - DNA, 120 bp, Artificial Sequence
  ENSG00000173653_9 (sequence is synthesized)
tcaggaatttttgtaggggattgaagccagagctagttgcgtcccagggaccaagagaaagaagcagatatccaaagggtgcagccccttttgaaaggggtgtttacgagcagctgtgag

SEQ ID NO: 594825 - DNA, 120 bp, Artificial Sequence
  ENSG00000173653_10 (sequence is synthesized)
tgaggggacaaggggcaggtcccaggagccacacactcccttcctcactttggactgctgcttctcttagctcctctgcctctgaaaagctgctcggggttttttatttataaaacctct

SEQ ID NO: 594826 - DNA, 120 bp, Artificial Sequence
  ENSG00000173653_11 (sequence is synthesized)
ccccaccccccaccccccaacttcctgggttttctcattgtctttttgcatcagtactttgtattgggatattaaagagatttaacttgggtaacatggccttgggcctttgggaatcgg

SEQ ID NO: 594827 - DNA, 120 bp, Artificial Sequence
  ENSG00000173653_12 (sequence is synthesized)
ctgcccctgttgctgaccatggtgagtgctcctgctgtattttttcttctggtctttgttatcagcctgatgggcagtgccgtggactcttgtttttggtttttggttgatgggagacag

SEQ ID NO: 594828 - DNA, 120 bp, Artificial Sequence
  ENSG00000173653_13 (sequence is synthesized)
tgtttttctcctagataccagcgggcaagcagaaaacaagaggctcaagaggggcagcccccgcatagaggagatgcgagctctgcgctctgccagggccccgagcccgtcagaggccgc

SEQ ID NO: 594829 - DNA, 120 bp, Artificial Sequence
  ENSG00000173653_14 (sequence is synthesized)
cccgcgccgcccggaagccaccgcggcccccctcactcctagaggaagggagcaccgcgaggctcacggcagggccctggcgccgggcagggcgagcctcggaagccgcctggaggtaac

SEQ ID NO: 594830 - DNA, 120 bp, Artificial Sequence
  ENSG00000173653_15 (sequence is synthesized)
tgggcgagggccgcgcagggaagggctcagcaggaggtgcaggccacgggccgctgctgagaggtcctcaccccgggcccccttgttcccgcaggacgtgctgtggctgcaggaggtctc

SEQ ID NO: 594831 - DNA, 120 bp, Artificial Sequence
  ENSG00000173653_16 (sequence is synthesized)
caacctgtcagagtggctgagtcccagccctgggccctgagccgggtccccttccgcaagcgcccaccgatccggaggctgcgggcagccgttatcccgtggtttaataaagctgccgcg

SEQ ID NO: 594832 - DNA, 120 bp, Artificial Sequence
  ENSG00000173653_17 (sequence is synthesized)
cgctcaccaagtcctcttccgcgtctgcttccgcgtcgggcccgggcggggcggggcggggcgtggagccgcgccgcggcctgacgtcacccacacctccctgggactgcgtcactggtg

SEQ ID NO: 594833 - DNA, 120 bp, Artificial Sequence
  ENSG00000173653_18 (sequence is synthesized)
tgcgggcggagcttgggcgagccgggggcgggtccgtgctcatgggcagccgcgggccccctgaacttactgtcccctccgtagggaccatcccgcggtcatcaagcgacgcttcaccag

SEQ ID NO: 594834 - DNA, 120 bp, Artificial Sequence
  ENSG00000173653_19 (sequence is synthesized)
gtattggagaggccactgaccgtgggaagttggggtgcaggacagctgtaggtggtggggcaggcagctactgccccggggggaggggatggtcggtctttggctgatgggtatgtagtg

SEQ ID NO: 594835 - DNA, 120 bp, Artificial Sequence
  ENSG00000173653_20 (sequence is synthesized)
tgggggcaggaagggcgtgcaggtgtggtcactcgtggcctccccgtctccagcgttccagttctcctacacagctgtcttcggtgcctacactgctttcctcttcatccgcacaggttg

SEQ ID NO: 594836 - DNA, 120 bp, Artificial Sequence
  ENSG00000173653_21 (sequence is synthesized)
gtcctcagtccctcatgggtccctgggggcccacaggagcgggtgggagaatgggaatactgtttgttctaggaacaaaagttcttctactccagtccttgagacaggctgagccagagc

SEQ ID NO: 594837 - DNA, 120 bp, Artificial Sequence
  ENSG00000173653_22 (sequence is synthesized)
cctcagcctggtgaggtctgagaggtggaaaggagcagaggccgtggtgtgtgggtggatggctggggtagtgggatcttgatctcctgtttcaggggatgagggtcactagccctggaa

SEQ ID NO: 594838 - DNA, 120 bp, Artificial Sequence
  ENSG00000173653_23 (sequence is synthesized)
agctcaggggtctttaggggaggaagcaaaactgatgccccctttcctgtggctcagccaggcacatccctgctcaccctgatgggcttcaggctggagggcattttcccagcggcgctg

SEQ ID NO: 594839 - DNA, 120 bp, Artificial Sequence
  ENSG00000173660_0 (sequence is synthesized)
cttcttgatcctgaactgggttaggtgccgctgttgctgctcgtgttgaatctagaaccgtagccagacatgggactggaggacgagcaaaagatgcttaccgaatccggagatcctgag

SEQ ID NO: 594840 - DNA, 120 bp, Artificial Sequence
  ENSG00000173660_1 (sequence is synthesized)
gaggaggaagaggaagaggaggaattagtggatcccctaacaacagtgagagagcaatgcgagcagttggagaaatgtgtaaaggcccgggagcggctagagctctgtgatgagcgtgta

SEQ ID NO: 594841 - DNA, 120 bp, Artificial Sequence
  ENSG00000173660_2 (sequence is synthesized)
gcgagggaccattgcgtggcccacaaactctttaacaacttgaaataaatgtgtggacttaattcaccccagtcttcatcatctgggcatcagaatatttccttatggttttggatgtac

SEQ ID NO: 594842 - DNA, 120 bp, Artificial Sequence
  ENSG00000173660_3 (sequence is synthesized)
catttgtttcttatttgtgtaactgtaagttcacatgaacctcatgggtttggcttaggctggtagcttctatgtaattcgcaatgattccatctaaataaaagttctatgatctgcaaa

SEQ ID NO: 594843 - DNA, 120 bp, Artificial Sequence
  ENSG00000173660_4 (sequence is synthesized)
gaggaagaggaggaattagtggtaagaactgtctcaggtttggaaacatctcagtaaaagcagggtttgagcttcatgaaattctaagggcattttaaggagtttttacttgataccttg

SEQ ID NO: 594844 - DNA, 120 bp, Artificial Sequence
  ENSG00000173660_5 (sequence is synthesized)
tttggggcttcttcagttgtggtaccagggagcagatggcatcttgagggcctggcactcaatcatctgctatttgtggtttaataaagaactttgggctaggcatggtggctcgtgcct

SEQ ID NO: 594845 - DNA, 65 bp, Artificial Sequence
  ENSG00000173660_6 (sequence is synthesized)
ttaataaagaactttgggctaggcatagcctgaacaacgtagagaaaccccatctctactaaaaa

SEQ ID NO: 594846 - DNA, 120 bp, Artificial Sequence
  ENSG00000173660_7 (sequence is synthesized)
actggcaaccttggaaggcaggaatgtgaaacttttccctactacttagcatcagaattgaatgggagaccgcattctgccatttctggcggcagtgtggctctgccagctggccttctg

SEQ ID NO: 594847 - DNA, 120 bp, Artificial Sequence
  ENSG00000173660_8 (sequence is synthesized)
cacggtaattcagaggcagcaccttggtttggtggttgtgttaatcaaagcatatgtgtttggtgggtctctgctaaaaatgcccattttgttttttttctgtttctacatcaggatccc

SEQ ID NO: 594848 - DNA, 120 bp, Artificial Sequence
  ENSG00000173662_0 (sequence is synthesized)
ctatttaagcaactggcctccttagaggccactccttggccatgccaggcgcgggcatctggccagcatgctgctctgcacggctcgcctggtcggcctgcagcttctcatttcctgctg

SEQ ID NO: 594849 - DNA, 120 bp, Artificial Sequence
  ENSG00000173662_1 (sequence is synthesized)
ctgggcctttgcctgccatagcacggagtcttctcctgacttcaccctccccggagattacctcctggcaggcctgttccctctccattctggctgtctgcaggtgaggcacagacccga

SEQ ID NO: 594850 - DNA, 120 bp, Artificial Sequence
  ENSG00000173662_2 (sequence is synthesized)
ggtgaccctgtgtgacaggtcttgtagcttcaatgagcatggctaccacctcttccaggctatgcggcttggggttgaggagataaacaactccacggccctgctgcccaacatcaccct

SEQ ID NO: 594851 - DNA, 120 bp, Artificial Sequence
  ENSG00000173662_3 (sequence is synthesized)
ggggtaccagctgtatgatgtgtgttctgactctgccaatgtgtatgccacgctgagagtgctctccctgccagggcaacaccacatagagctccaaggagaccttctccactattcccc

SEQ ID NO: 594852 - DNA, 120 bp, Artificial Sequence
  ENSG00000173662_4 (sequence is synthesized)
tacggtgctggcagtgattgggcctgacagcaccaaccgtgctgccaccacagccgccctgctgagccctttcctggtgcccatgattagctatgcggccagcagcgagacgctcagcgt

SEQ ID NO: 594853 - DNA, 120 bp, Artificial Sequence
  ENSG00000173662_5 (sequence is synthesized)
gaagcggcagtatccctctttcctgcgcaccatccccaatgacaagtaccaggtggagaccatggtgctgctgctgcagaagttcgggtggacctggatctctctggttggcagcagtga

SEQ ID NO: 594854 - DNA, 120 bp, Artificial Sequence
  ENSG00000173662_6 (sequence is synthesized)
cgactatgggcagctaggggtgcaggcactggagaaccaggccactggtcaggggatctgcattgctttcaaggacatcatgcccttctctgcccaggtgggcgatgagaggatgcagtg

SEQ ID NO: 594855 - DNA, 120 bp, Artificial Sequence
  ENSG00000173662_7 (sequence is synthesized)
cctcatgcgccacctggcccaggccggggccaccgtcgtggttgttttttccagccggcagttggccagggtgtttttcgagtccgtggtgctgaccaacctgactggcaaggtgtgggt

SEQ ID NO: 594856 - DNA, 120 bp, Artificial Sequence
  ENSG00000173662_8 (sequence is synthesized)
cgcctcagaagcctgggccctctccaggcacatcactggggtgcccgggatccagcgcattgggatggtgctgggcgtggccatccagaagagggctgtccctggcctgaaggcgtttga

SEQ ID NO: 594857 - DNA, 120 bp, Artificial Sequence
  ENSG00000173662_9 (sequence is synthesized)
agaagcctatgcccgggcagacaagaaggcccctaggccttgccacaagggctcctggtgcagcagcaatcagctctgcagagaatgccaagctttcatggcacacacgatgcccaagct

SEQ ID NO: 594858 - DNA, 120 bp, Artificial Sequence
  ENSG00000173662_10 (sequence is synthesized)
caaagccttctccatgagttctgcctacaacgcataccgggctgtgtatgcggtggcccatggcctccaccagctcctgggctgtgcctctggagcttgttccaggggccgagtctaccc

SEQ ID NO: 594859 - DNA, 120 bp, Artificial Sequence
  ENSG00000173662_11 (sequence is synthesized)
cagcttttggagcagatccacaaggtgcatttccttctacacaaggacactgtggcgtttaatgacaacagagatcccctcagtagctataacataattgcctgggactggaatggaccc

SEQ ID NO: 594860 - DNA, 120 bp, Artificial Sequence
  ENSG00000173662_12 (sequence is synthesized)
aagtggaccttcacggtcctcggttcctccacatggtctccagttcagctaaacataaatgagaccaaaatccagtggcacggaaaggacaaccaggtgcctaagtctgtgtgttccagc

SEQ ID NO: 594861 - DNA, 120 bp, Artificial Sequence
  ENSG00000173662_13 (sequence is synthesized)
gactgtcttgaagggcaccagcgagtggttacgggtttccatcactgctgctttgagtgtgtgccctgtggggctgggaccttcctcaacaagagtgacctctacagatgccagccttgt

SEQ ID NO: 594862 - DNA, 120 bp, Artificial Sequence
  ENSG00000173662_14 (sequence is synthesized)
gggaaagaagagtgggcacctgagggaagccagacctgcttcccgcgcactgtggtgtttttggctttgcgtgagcacacctcttgggtgctgctggcagctaacacgctgctgctgctg

SEQ ID NO: 594863 - DNA, 120 bp, Artificial Sequence
  ENSG00000173662_15 (sequence is synthesized)
ctgctgcttgggactgctggcctgtttgcctggcacctagacacccctgtggtgaggtcagcagggggccgcctgtgctttcttatgctgggctccctggcagcaggtagtggcagcctc

SEQ ID NO: 594864 - DNA, 120 bp, Artificial Sequence
  ENSG00000173662_16 (sequence is synthesized)
tatggcttctttggggaacccacaaggcctgcgtgcttgctacgccaggccctctttgcccttggtttcaccatcttcctgtcctgcctgacagttcgctcattccaactaatcatcatc

SEQ ID NO: 594865 - DNA, 120 bp, Artificial Sequence
  ENSG00000173662_17 (sequence is synthesized)
ttcaagttttccaccaaggtacctacattctaccacgcctgggtccaaaaccacggtgctggcctgtttgtgatgatcagctcagcggcccagctgcttatctgtctaacttggctggtg

SEQ ID NO: 594866 - DNA, 120 bp, Artificial Sequence
  ENSG00000173662_18 (sequence is synthesized)
gtgtggaccccactgcctgctagggaataccagcgcttcccccatctggtgatgcttgagtgcacagagaccaactccctgggcttcatactggccttcctctacaatggcctcctctcc

SEQ ID NO: 594867 - DNA, 120 bp, Artificial Sequence
  ENSG00000173662_19 (sequence is synthesized)
atcagtgcctttgcctgcagctacctgggtaaggacttgccagagaactacaacgaggccaaatgtgtcaccttcagcctgctcttcaacttcgtgtcctggatcgccttcttcaccacg

SEQ ID NO: 594868 - DNA, 120 bp, Artificial Sequence
  ENSG00000173662_20 (sequence is synthesized)
gccagcgtctacgacggcaagtacctgcctgcggccaacatgatggctgggctgagcagcctgagcagcggcttcggtgggtattttctgcctaagtgctacgtgatcctctgccgccca

SEQ ID NO: 594869 - DNA, 120 bp, Artificial Sequence
  ENSG00000173662_21 (sequence is synthesized)
gacctcaacagcacagagcacttccaggcctccattcaggactacacgaggcgctgcggctccacctgaccagtgggtcagcaggcacggctggcagccttctctgccctgagggtcgaa

SEQ ID NO: 594870 - DNA, 120 bp, Artificial Sequence
  ENSG00000173662_22 (sequence is synthesized)
ggtcgagcaggccgggggtgtccgggaggtctttgggcatcgcggtctggggttgggacgtgtaagcgcctgggagagcctagaccaggctccgggctgccaataaagaagtgaaatgcg

SEQ ID NO: 594871 - DNA, 120 bp, Artificial Sequence
  ENSG00000173673_0 (sequence is synthesized)
atggactgcaacatgggcacggagcctgctgcccggggcagcctccccggcaacttccgaaagatttccaagccgctgatggagaaaaagcgccgggcacgcatcaatgtgtcactggag

SEQ ID NO: 594872 - DNA, 120 bp, Artificial Sequence
  ENSG00000173673_1 (sequence is synthesized)
cagctcaagtcgctgctggagaaacactactcgcaccagatccggaagcgcaaattggagaaggccgacatcctggagttgagcgtgaagtacatgagaagccttcagaactccttgcaa

SEQ ID NO: 594873 - DNA, 120 bp, Artificial Sequence
  ENSG00000173673_2 (sequence is synthesized)
agatgaggtcggcagcggcctgcgctgccccctggtgcccgagagcgccgccggcagcaccatggacagcgccgggttgggccaggaggcgcccgcgctgttccgcccttgcacccctgc

SEQ ID NO: 594874 - DNA, 120 bp, Artificial Sequence
  ENSG00000173673_3 (sequence is synthesized)
cggcggcccgcggtccccaccacccctgctcctcctccccgaaagtctccctggctcgtccgccagcgtccccccgccgcagccagcgtcgagtcgctgcgccgagagtcccgggctggg

SEQ ID NO: 594875 - DNA, 120 bp, Artificial Sequence
  ENSG00000173673_4 (sequence is synthesized)
cctgcgcgtgtggcggccctggggaagccccggggatgacctgaactgaaggcgctccctatttggtctcgcgacacagggactattttcagcacgcccacagtgactgccaggaccccc

SEQ ID NO: 594876 - DNA, 120 bp, Artificial Sequence
  ENSG00000173674_0 (sequence is synthesized)
gccatttgctgccgccgagcgtggacgcaggcggatctctgaagagctgggtcgccagcctctcccgcgcacgttgcctggcctccagcacctacttggtcccgcgcgctccctcgtgtc

SEQ ID NO: 594877 - DNA, 120 bp, Artificial Sequence
  ENSG00000173674_1 (sequence is synthesized)
gcccctcggagcagcagccgccgcggtcgccgctacccggaaagaagtcagagacgccgcgaggtcgccgccaccgccatgcccaagaataaaggtaaaggaggtaaaaacagacgcagg

SEQ ID NO: 594878 - DNA, 120 bp, Artificial Sequence
  ENSG00000173674_2 (sequence is synthesized)
ggtaagaatgagaatgaatctgaaaaaagagaactggtattcaaagaggatggtcaggagtatgctcaggtaatcaaaatgttgggaaatggacggctagaagcaatgtgtttcgatggt

SEQ ID NO: 594879 - DNA, 120 bp, Artificial Sequence
  ENSG00000173674_3 (sequence is synthesized)
gtaaagaggttatgtcacatcagaggaaaattgagaaaaaaggtttggataaatacctcggacattattttggttggtctccgagactaccaggataacaaagctgatgtaattttaaaa

SEQ ID NO: 594880 - DNA, 120 bp, Artificial Sequence
  ENSG00000173674_4 (sequence is synthesized)
tacaatgcagacgaagctagaagtctgaaggcatacggcgagcttccagagcatgctaaaatcaatgaaactgatacatttggtcctggagatgatgatgaaattcagtttgatgacatt

SEQ ID NO: 594881 - DNA, 120 bp, Artificial Sequence
  ENSG00000173674_5 (sequence is synthesized)
ggagatgatgatgaagatattgatgacatctaaattgaactcaacattttacattccatcttttctgaagattgtcctacaatttggattttgatcatgacaaagaagattaaaatttca

SEQ ID NO: 594882 - DNA, 120 bp, Artificial Sequence
  ENSG00000173674_6 (sequence is synthesized)
ttagcatgaatgcaatttgttaaagcagactgatttgtttctaagatatttttggtttttttaaaactgataataatgctgaattatcttaagtgagatgttaagcccactttgttcttt

SEQ ID NO: 594883 - DNA, 120 bp, Artificial Sequence
  ENSG00000173674_7 (sequence is synthesized)
taatgtaatggagcttatgggtagaagaccatgtctactaattacaaaaaaaaaaaaaaaccatgcattgctgcttttcctaccacttccagtaagaaaatgggtgttttgaagaaatca

SEQ ID NO: 594884 - DNA, 120 bp, Artificial Sequence
  ENSG00000173674_8 (sequence is synthesized)
tttgccttgtcctcacggaatctgattaagccctggcctcttgattgtatagagtcattgtgtatattccagttacctagatattcccttgagattttgatacaatttgagggaggcaga

SEQ ID NO: 594885 - DNA, 120 bp, Artificial Sequence
  ENSG00000173674_9 (sequence is synthesized)
agtctgcagttgaagaaaaaaaataagtctgtttgtcatatttaagtagcctgtggctatttttatactgattttgatatcatgttcttttcatagtcgtattttgccaccgtaaacata

SEQ ID NO: 594886 - DNA, 120 bp, Artificial Sequence
  ENSG00000173674_10 (sequence is synthesized)
aaaaaaaaaaaaaagatttccaaaatgccgttttcagaacctgggttttaatagcagtattgaatttgtaagcttagtagttgcagaaattgaacactaggtggcactcagttatcttaa

SEQ ID NO: 594887 - DNA, 120 bp, Artificial Sequence
  ENSG00000173674_11 (sequence is synthesized)
caggggaagtactgatacaattgttgacttttcttttactatgtgtaagaaataccccaaacatgaaaagattgttttgatcatatgcatgtatgtagaatatttttgcagagcagaaag

SEQ ID NO: 594888 - DNA, 120 bp, Artificial Sequence
  ENSG00000173674_12 (sequence is synthesized)
attatgttagaagtgtgatttttattttcagaagtcatatacatgtaagctacaattttgagtgctttataaacacttaagatatatatataaattttaatttcatagcaacttgtaaaa

SEQ ID NO: 594889 - DNA, 120 bp, Artificial Sequence
  ENSG00000173674_13 (sequence is synthesized)
aataaaatacttgttgaaaagcctttttcaacatatccctaagctaagggaagaggaaggaataacaactcagtgaaaagatggtctccagtttctgaatgaaaaagctacagctgagaa

SEQ ID NO: 594890 - DNA, 120 bp, Artificial Sequence
  ENSG00000173674_14 (sequence is synthesized)
aagctacagctgagaaataaaataaaatgtcatgctgcagaatatgttatacccttattttgtgttaaggatatattttattatgtgaatggttttgtttttgttttttgtttttgtttt

SEQ ID NO: 594891 - DNA, 120 bp, Artificial Sequence
  ENSG00000173674_15 (sequence is synthesized)
ttagctttactggtaacttccttatttagtttttagtggtcaactctaataaaatgaaactagggctgagctagttagccctcactagccaaactgaaactctatgcaacattaaaagaa

SEQ ID NO: 594892 - DNA, 120 bp, Artificial Sequence
  ENSG00000173674_16 (sequence is synthesized)
gagatccatcatgtagcttgtgacacttttattttattagtcaccggggaacttttcagtgatgaaaatacacagggtaataaaccttcacatggcttcaaaaggaaaacaagcaaatct

SEQ ID NO: 594893 - DNA, 120 bp, Artificial Sequence
  ENSG00000173674_17 (sequence is synthesized)
tctctaatctactcttactataatttcctaagtgtacaccaaactctggatttaaaaatctgaagtactatagaacattaagttgaagaatggaaattaagagtacgtattcatggttta

SEQ ID NO: 594894 - DNA, 120 bp, Artificial Sequence
  ENSG00000173674_18 (sequence is synthesized)
agaattaacaattctcttcattggtattctaaacctcctaagatatttaggcttctgtacataaaagtgtttttgctaaatttacagtatatatagatcctttcatattattttactaag

SEQ ID NO: 594895 - DNA, 120 bp, Artificial Sequence
  ENSG00000173674_19 (sequence is synthesized)
aatgtttgaactttgcatatttgatatagttcctggtaggaatagcacagctcaaacattagtttttctacttacctcctctaacacgtggtttgtctggagagtttctaaaaattcagc

SEQ ID NO: 594896 - DNA, 120 bp, Artificial Sequence
  ENSG00000173674_20 (sequence is synthesized)
tataaccccagttcatgtatttactggtgattgttcttgctgaggtagtaacagcccaatcttgggctgttaaatcctaggaaatctcgaatcatagtgattaaaatagttggggtaaag

SEQ ID NO: 594897 - DNA, 120 bp, Artificial Sequence
  ENSG00000173674_21 (sequence is synthesized)
ttgtagcttatatgcaatactacttggaggaattcttctactaatttgtatttaatgtggaaattgtatagtttcattgatttaatcataaataatggaaatggtctccaagaagtttta

SEQ ID NO: 594898 - DNA, 120 bp, Artificial Sequence
  ENSG00000173674_22 (sequence is synthesized)
tttttcatttttttgcttatacactctgattcctataatacagtgctataagctatgcacagaaaataaaatgtttgaaatccaagaataatggttcttactgctaagagggagtaatag

SEQ ID NO: 594899 - DNA, 120 bp, Artificial Sequence
  ENSG00000173674_23 (sequence is synthesized)
ttattactaatgattttgattgggttgcatttttgttgcaatgtttattccacttgcagttagaatatgaatatgttttatcactagtgtggctaaataaccaaacatttgtgtaaaaaa

SEQ ID NO: 594900 - DNA, 120 bp, Artificial Sequence
  ENSG00000173674_24 (sequence is synthesized)
aaaaaaaagccaagatttcattgtttgttgaatatttcttaagcatctggcccctaaagagaccgcttcttaccaagcctgtaaactatgcatgatggaaattcttgtattttatttagg

SEQ ID NO: 594901 - DNA, 120 bp, Artificial Sequence
  ENSG00000173674_25 (sequence is synthesized)
aatggctgttggtttactcaccacatctgtggaatcatggctataaatgtttgcttacaaactctttgtgacttgtaatttaacttaatctcatctaatgtaaatattagattatgatgt

SEQ ID NO: 594902 - DNA, 120 bp, Artificial Sequence
  ENSG00000173674_26 (sequence is synthesized)
tcagtaacatcttccataggtataaactgctgtcattattgatttcagagtaactctgagtaatcaaataggtaaaagcatgttttgagtaaaatagctagatttatactttacttgtat

SEQ ID NO: 594903 - DNA, 120 bp, Artificial Sequence
  ENSG00000173674_27 (sequence is synthesized)
acagacttaacaacaaccggtattgactggattgacagctaaagtatcagaatgaaagcaaggtttttttgatgttacctgactgtcataaagatgaaaatgatttgtattggtatgaaa

SEQ ID NO: 594904 - DNA, 120 bp, Artificial Sequence
  ENSG00000173674_28 (sequence is synthesized)
tgcttatctttattctacttcgtaagggtaagttttatttatactctttggactcccatgaacttttgcacactgctttgtgtttttggtttaccctaaactaccatcctttttatcttt

SEQ ID NO: 594905 - DNA, 120 bp, Artificial Sequence
  ENSG00000173674_29 (sequence is synthesized)
gctttttttcttcctattcagaaaagagcaaaatgtgaaaagacacaagactctcaggtatagaatgaactgagcaatttggagaatgtattggactttgtcctctcttattcccccctc

SEQ ID NO: 594906 - DNA, 120 bp, Artificial Sequence
  ENSG00000173674_30 (sequence is synthesized)
ctagccctgcaagttgctaggtacttgtgaggcagtgtactggagaggggagagcatggatcctggggtcaaagggcctttgcccccacccttacttggccctctacctgcaggtgacca

SEQ ID NO: 594907 - DNA, 120 bp, Artificial Sequence
  ENSG00000173674_31 (sequence is synthesized)
ctggcacattctcctgcttgtctcagcttcaggttcttcacctctaagatggggatgatgaaaacagtacctgtcatgcagaattgttgggaggattgataatttagatgtttatacatg

SEQ ID NO: 594908 - DNA, 120 bp, Artificial Sequence
  ENSG00000173674_32 (sequence is synthesized)
taatgtacttagatcagtgtctgctcttttcacttgatatccagtactatgtaagatagaaggtgcatgtcttctgtattctgtatttcccatttcttttgcgtgcagtctttgattcgt

SEQ ID NO: 594909 - DNA, 120 bp, Artificial Sequence
  ENSG00000173674_33 (sequence is synthesized)
acaatagaaggaacacgtagaatgtatatttgtacattcatgtcaacatagtatttgaaattgctaccaaactcatttaatttggcataagactaacagatgaagtctctcatttgcttg

SEQ ID NO: 594910 - DNA, 120 bp, Artificial Sequence
  ENSG00000173674_34 (sequence is synthesized)
aaaataccaactgttctatatttctttagaaaaagattatagttattaatattgatacctctgataatattttattcttaaatcttcagtgattccttttactatagattcatgacagct

SEQ ID NO: 594911 - DNA, 120 bp, Artificial Sequence
  ENSG00000173674_35 (sequence is synthesized)
ttcatgacagctaattagtactaactgatttagaggtttcctttcccatcatatggaatgatgtaaagaaatcagatacaaactactgcaattagaaaataaaatatgaacaactttcaa

SEQ ID NO: 594912 - DNA, 120 bp, Artificial Sequence
  ENSG00000173678_0 (sequence is synthesized)
atggacagaacggagactaggttccgtaagaggggacagattacgggaaagatcacgaccagccgtcaaccgcacccccagaatgagcagagtccccagcggagcacctcggggtacccc

SEQ ID NO: 594913 - DNA, 75 bp, Artificial Sequence
  ENSG00000173678_1 (sequence is synthesized)
tggctggaaaaggaagagggagtggtcagatgaatctgaggaggagccggagaaggagctcgcccctgagcctga

SEQ ID NO: 594914 - DNA, 120 bp, Artificial Sequence
  ENSG00000173678_2 (sequence is synthesized)
tcgcccctgagcctgaggagacctgggtagtggagatgctgtgtgggctcaagatgaagctgaagcaacagcgagtgtcatccatcctccctgagcaccacaaggacttcaacagtcagc

SEQ ID NO: 594915 - DNA, 120 bp, Artificial Sequence
  ENSG00000173678_3 (sequence is synthesized)
gacttcaacagtcagcttgcccctggggtagatcccagccccccgcataggtccttttgctggaaaaggaagatggagtggtgggacgaatctgaggagtcgttggaggaggagccacgg

SEQ ID NO: 594916 - DNA, 120 bp, Artificial Sequence; identical to SEQ ID NO: 565627
  ENSG00000173678_4 (sequence is synthesized)

SEQ ID NO: 594917 - DNA, 120 bp, Artificial Sequence
  ENSG00000173678_5 (sequence is synthesized)
caacgcattcatttcttcctggctctctacctggccaatgacatggaggaggacgacgaggactccaaacaaaacatcttccacttcctgtataggaagaaccgctctcgcatacccttg

SEQ ID NO: 594918 - DNA, 120 bp, Artificial Sequence
  ENSG00000173678_6 (sequence is synthesized)
ctccgtaagccttggttccagttaggccattccatgaacccgagggccaggaagaaccgctctcgcatacccttgctccgtaagcgtcggttccagttataccgttccacgaacccgagg

SEQ ID NO: 594919 - DNA, 120 bp, Artificial Sequence
  ENSG00000173678_7 (sequence is synthesized)
gccaggaagaaccgctctcgcatacccttgctccgtaagcgtcggttccagttataccgttccatgaactcgagggccaggaagaaccgctctcagatagtcctgttccagaaacgacgg

SEQ ID NO: 594920 - DNA, 120 bp, Artificial Sequence
  ENSG00000173678_8 (sequence is synthesized)
aaccgctctcagatagtcctgttccagaaacgacggttccacttcttctgttccatgagctgcagggcttgggtttccccagaggagttggaggagatccaggcttatgacccagagcac

SEQ ID NO: 594921 - DNA, 120 bp, Artificial Sequence
  ENSG00000173678_9 (sequence is synthesized)
agcagagacagaccccagatctgggcccaggactttgtgcagggaggggaaatactggactctgaaatgggcatgtacagagacgaagagaccccaacatgcttcaggctttgagtggag

SEQ ID NO: 594922 - DNA, 71 bp, Artificial Sequence
  ENSG00000173678_10 (sequence is synthesized)
cccaacatagagggatgtggagtccctgaagatgcttttggacaatggtctgaggttgggacagtggcagg

SEQ ID NO: 594923 - DNA, 71 bp, Artificial Sequence
  ENSG00000173678_11 (sequence is synthesized)
ctggttgccaggttggcatgagtggtgcctggagatcagttggacaacagtatcttctcagagctgttctc

SEQ ID NO: 594924 - DNA, 63 bp, Artificial Sequence
  ENSG00000173678_12 (sequence is synthesized)
taatggcagacaccaggggagctgaatacagtgatcacgttgtcctcctaggagcaggggtgg

SEQ ID NO: 594925 - DNA, 90 bp, Artificial Sequence
  ENSG00000173678_13 (sequence is synthesized)
ggagctgaatacagtgatcacgttgtcctcctaggagcaggggtggggggaggggggtggggtccttctaggagtccttggagaaaagta

SEQ ID NO: 594926 - DNA, 120 bp, Artificial Sequence
  ENSG00000173679_0 (sequence is synthesized)
atgggaagaaataacctaacaagaccctctgaattcatcctccttggactctcctctcgacctgaggatcagaagccgctctttgctgtgttcctccccatctaccttatcacagtgata

SEQ ID NO: 594927 - DNA, 120 bp, Artificial Sequence
  ENSG00000173679_1 (sequence is synthesized)
ggaaacctgcttatcatcctggccatccgctcagacactcgtctccagacgcccatgtacttctttctaagcatcctgtcttttgttgacatttgctatgtgacagtcattatccctaag

SEQ ID NO: 594928 - DNA, 120 bp, Artificial Sequence
  ENSG00000173679_2 (sequence is synthesized)
atgctggtgaacttcttatcagagacaaagaccatctcttacagtgagtgtctgacccagatgtactttttcttagcctttggaaacacagacagttacctgctagcagccatggccatt

SEQ ID NO: 594929 - DNA, 120 bp, Artificial Sequence
  ENSG00000173679_3 (sequence is synthesized)
ccacattttcactccctcctgcacattcttctgactaatcagctcatcttctgtgcctcaaatgtcatccatcactttttctgcgatgatcaaccagtgctaaaattgtcctgttcctcc

SEQ ID NO: 594930 - DNA, 120 bp, Artificial Sequence
  ENSG00000173679_4 (sequence is synthesized)
cattttgtcaaagaaatcacagtaatgacagaaggcttggctgtcataatgaccccgttttcatgcatcatcatctcttatttaagaatcctcatcactgttctgaagattccttcagct

SEQ ID NO: 594931 - DNA, 120 bp, Artificial Sequence
  ENSG00000173679_5 (sequence is synthesized)
gctggaaagcgtaaagcattttctacctgtggctctcatctcacagtggtgaccctgttttatggaagcattagctatctctattttcagcccctgtccaactatactgtcaaggatcaa

SEQ ID NO: 594932 - DNA, 120 bp, Artificial Sequence
  ENSG00000173679_6 (sequence is synthesized)
atagcaacaattatctacaccgtactgactcctatgctaaatccatttatctatagtctgaggaacaaagacatgaagcagggtttggcaaagttgatgcacaggatgaaatgtcagtaa

SEQ ID NO: 594933 - DNA, 120 bp, Artificial Sequence
  ENSG00000173679_7 (sequence is synthesized)
atggaaagaaaccacaatccagataattgtaatgttttaaattttttctttgctgataagaagaataaaaggagaaattttggacagattgtatcagatgttggaagaatctgttacagt

SEQ ID NO: 594934 - DNA, 120 bp, Artificial Sequence
  ENSG00000173681_0 (sequence is synthesized)
tgtaaaaagtggatagtggctcacgtgtcaaaggatggcacggtcacgatctagatcccccaggtggaaacacaggtctttatcaccagtacctagaaatgctgaacactacaagcaaag

SEQ ID NO: 594935 - DNA, 120 bp, Artificial Sequence
  ENSG00000173681_1 (sequence is synthesized)
acattcacacgggcattatggctgtgaatataggaaggatccaaaaagacccgtcgcgtggagaatggacagtgagaaacatggacagagtaaaccaaggattccctctcgtggaaatat

SEQ ID NO: 594936 - DNA, 120 bp, Artificial Sequence
  ENSG00000173681_2 (sequence is synthesized)
atattaccagtcttatgaacatagatcaccttcccctaacataagaaactctttagaaaatgtttatatgtataagcctcacagaggatattcgcctggaagaggggacagtaacaggag

SEQ ID NO: 594937 - DNA, 120 bp, Artificial Sequence
  ENSG00000173681_3 (sequence is synthesized)
agctcagtatatgcccaaatactcagagggtataccctacaaagagcatgaaaggaattcttatccccagaaagtgcaaggagggcatagtcctgatgaccacagagttagaggaagtgg

SEQ ID NO: 594938 - DNA, 120 bp, Artificial Sequence
  ENSG00000173681_4 (sequence is synthesized)
aaaaggagggaaaccacctcagaggtcaatagcagattcttttagatttgaaggaaagtggcatgaagatgagttgaggcaccagaggatacaagaagaaaaatactcccagtcaactag

SEQ ID NO: 594939 - DNA, 120 bp, Artificial Sequence
  ENSG00000173681_5 (sequence is synthesized)
aagaggctctgaagactttgagacaaggagctcatttcagaagaggtatcctgaggatcgtgatttcagaaaatatggacacacatcaaaaagacctaaagacgtggagaggtatgaaag

SEQ ID NO: 594940 - DNA, 120 bp, Artificial Sequence
  ENSG00000173681_6 (sequence is synthesized)
cagagagcctgccaggaacccaaagtggaagcctgagcattccctcccaccttaccaagaggacacagaccagtggaaccttgggccccaaacttatcgacatgctgagagggaacaccc

SEQ ID NO: 594941 - DNA, 120 bp, Artificial Sequence
  ENSG00000173681_7 (sequence is synthesized)
agagaccagttcagcaaccaaagtatcctatgactatcgtcacaaacgtcctaagctcttggatggggaccaggacttttctgatgggagaactcagaagtactgtaaggaagaagatag

SEQ ID NO: 594942 - DNA, 120 bp, Artificial Sequence
  ENSG00000173681_8 (sequence is synthesized)
aaaatatagttttcaaaaaggccctctaaatagagagttagattgttttaatactggaagagggagagagactcaagatggacaagtcaaagaaccttttaaaccgtctaagaaagacag

SEQ ID NO: 594943 - DNA, 120 bp, Artificial Sequence
  ENSG00000173681_9 (sequence is synthesized)
cattgcctgtacttattcaaataaaaatgatgttgatttgcgatctagtaatgacaaatggaaggaaaaaataaagaaagaaggggattgtagaaaagagagcaattcttccagtaacca

SEQ ID NO: 594944 - DNA, 120 bp, Artificial Sequence
  ENSG00000173681_10 (sequence is synthesized)
acttgataaaagtcaaaaacttcctgatgtgaaaccctcgcctatcaatcttaggaagaaatcacttacagttaaagtagatgtgaagaaaacagtagatacattcagggttgcttctag

SEQ ID NO: 594945 - DNA, 120 bp, Artificial Sequence
  ENSG00000173681_11 (sequence is synthesized)
ctattccacagagagacagatgtcacatgatttggttgctgttggcaggaaaagtgagaactttcatccagtgtttgaacatcttgactcaactcagaatactgaaaacaaacctacagg

SEQ ID NO: 594946 - DNA, 120 bp, Artificial Sequence
  ENSG00000173681_12 (sequence is synthesized)
agaatttgctcaggaaatcataacaataatccatcaagttaaagcaaattattttccatcacctggcattactttacatgagcgtttctcaacaatgcaagatatacacaaggcagatgt

SEQ ID NO: 594947 - DNA, 120 bp, Artificial Sequence
  ENSG00000173681_13 (sequence is synthesized)
aaatgaaattccattgaattcagatccagaaatacacaggagaatagatatgtctttggccgagcttcagagtaaacaagctgtgatctatgaatcggaacagactctgatcaaaataat

SEQ ID NO: 594948 - DNA, 120 bp, Artificial Sequence
  ENSG00000173681_14 (sequence is synthesized)
agatccaaatgacctacgacatgacattgaaagaaggcgaaaagaacggttacagaatgaagatgagcacatttttcacatagctagtgctgcagagagggatgatcagaattccagttt

SEQ ID NO: 594949 - DNA, 120 bp, Artificial Sequence
  ENSG00000173681_15 (sequence is synthesized)
ttcaaagaattatactacgcagagaaaagacataattactcacaaaccatttgaggttgagggaaaccaccgaaacacaagagtaagaccttttaagagcaactttagaggtggcagatg

SEQ ID NO: 594950 - DNA, 120 bp, Artificial Sequence
  ENSG00000173681_16 (sequence is synthesized)
ccagcccaattataaatcaggcctggtacagaagagcttgtacattcaggctaagtatcagcgtttacggttcactggcccaaggggatttatcactcataagttcagagaaagattaat

SEQ ID NO: 594951 - DNA, 120 bp, Artificial Sequence
  ENSG00000173681_17 (sequence is synthesized)
gagaaaaaagaaggaatatacagatgttgccacaggaatctaatctgaaatcgtacaaatggaaatgacgctacaggaggatgtttgggagcatctctctctttttgtcaggagttagaa

SEQ ID NO: 594952 - DNA, 120 bp, Artificial Sequence
  ENSG00000173681_18 (sequence is synthesized)
gtgacactaaggcactaatactgtaacttcttgataaaataactttattttttagtagtggaatgctgcaacttttttacacctaacaattgcttttaaattacagtattcaatttaaaa

SEQ ID NO: 594953 - DNA, 120 bp, Artificial Sequence
  ENSG00000173681_19 (sequence is synthesized)
gttgtattaactacagtttcctttgcaaaaagtctcaaaagaatcacttgaagggcattatttgttgatgcatttttctctgagcatggtttcatagagagaacttcaccaagtaatatt

SEQ ID NO: 594954 - DNA, 120 bp, Artificial Sequence
  ENSG00000173681_20 (sequence is synthesized)
cagacgtttatatgttgaaagttttgcttacataataaaaacaaaaacaagtgtctgaattgtatagtgtctttacatgaaagaactttaaacagtggccttatggtagaaaattttata

SEQ ID NO: 594955 - DNA, 120 bp, Artificial Sequence
  ENSG00000173681_21 (sequence is synthesized)
ccagatttttctttttctgatgacattttggcttataactcgaagttttcttaagtttctgaagatcaaggcctatataattcatacatttcatattataagaaggcaagagacaaggtg

SEQ ID NO: 594956 - DNA, 120 bp, Artificial Sequence
  ENSG00000173681_22 (sequence is synthesized)
cttcaaatattccatcaggtagttgtgagtgcactgaatttttagtaatatgttcattcagtttttttccacaactatttgctcttttccaatttcaaaatgctattgtggaaaatatgt

SEQ ID NO: 594957 - DNA, 120 bp, Artificial Sequence
  ENSG00000173681_23 (sequence is synthesized)
aaagattttgtaatctatagtccatcttatttttccctcagggcaagcttgtgcatatcatatttttaaaggctttttaaaaatctgacaaacaaaatctcatatttgaaaattgtactt

SEQ ID NO: 594958 - DNA, 120 bp, Artificial Sequence
  ENSG00000173681_24 (sequence is synthesized)
tactactacagcattacacattttgcaagcacatcttatagagtgtttacttttagttcagttgatatgtattgcatacctactatgtgtaagagcaaatggatgggatttttaaatgaa

SEQ ID NO: 594959 - DNA, 120 bp, Artificial Sequence
  ENSG00000173681_25 (sequence is synthesized)
atttttaggccccaataccttatttctttatgttttctgtgttctgcttaacagtacatatacattcccaattacatttttgtgaaatgtttatttgtaataaaataaaatgttgttgct

SEQ ID NO: 594960 - DNA, 120 bp, Artificial Sequence
  ENSG00000173681_26 (sequence is synthesized)
ctttctgcttaaataagttacttgccagtttgtgagagcattattttaattttgtttgagacttatagccttggatagcacctctgtttaaacagtgtttaaagcactgttctgtgctta

SEQ ID NO: 594961 - DNA, 120 bp, Artificial Sequence
  ENSG00000173681_27 (sequence is synthesized)
gtttttcatgactggatgtgaaaaatcttagtacattcagttttcttgtccatatctttaaaagagagggcagccttttccttaagtgagttcatgataaggggggcaagtgcacttgat

SEQ ID NO: 594962 - DNA, 120 bp, Artificial Sequence
  ENSG00000173681_28 (sequence is synthesized)
tcattgctaagcaggtaataaatttgggtagatggcctgtcttgtactgtgtacaatctctataggtcaggttttccaaacatatttagcattccacttatggtaagaaagaaatgcatg

SEQ ID NO: 594963 - DNA, 120 bp, Artificial Sequence
  ENSG00000173681_29 (sequence is synthesized)
cacacaggtagtatggcaactttatattgtgttaggtacttataaaatctgtcttaaattttaaaataattgatttcatttactcccatattctaggggacagtaatgagctttgaatat

SEQ ID NO: 594964 - DNA, 120 bp, Artificial Sequence
  ENSG00000173681_30 (sequence is synthesized)
ttaatcatttgattgacaactatgtattgcacagatactgtactaaaattacagcaatgaacaagaagacaagacacatggaccctgcctttatggtacgaagagtctaataggaaaaat

SEQ ID NO: 594965 - DNA, 120 bp, Artificial Sequence
  ENSG00000173681_31 (sequence is synthesized)
ggacattaaacagaaatataacttggtaaatcgcctttatagctcgctttttatttattgtaacacataaaggtaagatggctgatttactattattcattccacaactgattccctatt

SEQ ID NO: 594966 - DNA, 120 bp, Artificial Sequence
  ENSG00000173681_32 (sequence is synthesized)
tggatattcttttggcactgtctcaatatgcaaagcgtgttatctgcaaaatacctgtgcagaaaacattgtgtgtataagatctaaagcctaaaaggaaaaaccaactttataatttag

SEQ ID NO: 594967 - DNA, 120 bp, Artificial Sequence
  ENSG00000173681_33 (sequence is synthesized)
agtataaaataaggacagggaccgtgtctgtcttgtccaccatagtatccccagcacccagcttcctatttgacgtgtggtaagagttcattaaatattagttgaataatgaatgaataa

SEQ ID NO: 594968 - DNA, 120 bp, Artificial Sequence
  ENSG00000173681_34 (sequence is synthesized)
atagggaataatagaatatgtttattaggaactacatgtgtaattttcatatggagattgaacaaaaggttatccatagcattttttattgactggaaagaatttgacttcttgaatgca

SEQ ID NO: 594969 - DNA, 120 bp, Artificial Sequence
  ENSG00000173681_35 (sequence is synthesized)
taagacttgagaagagaagttttttttttttttcttttttttgataagtcccctaccattgcctcctcaccttcctccactacgtgctaggcccttcgctggtactgggaagacaaagat

SEQ ID NO: 594970 - DNA, 120 bp, Artificial Sequence
  ENSG00000173681_36 (sequence is synthesized)
aataagacacagtccctgctgtgaggaagctcatgcactgctgaagaagagattcacaaaaacaaagaatcacaatgtagagtaagtactttagtggacatatatacaaaaggttgagag

SEQ ID NO: 594971 - DNA, 120 bp, Artificial Sequence
  ENSG00000173681_37 (sequence is synthesized)
gaaagttgacatttctgattcagcatcccctcgtcatgtttctttcctattggtttcaccaacctcagaaggcactattctgttggtggttttactggttttaaaaattgatgcattggg

SEQ ID NO: 594972 - DNA, 120 bp, Artificial Sequence
  ENSG00000173681_38 (sequence is synthesized)
ggaaactgggtaaattgtacgcgggatctctctgtattatttcttttatagctgcatgtgaatctagagttacttcaacataaatttcaatttgaagaattgcccatagtcttatcacag

SEQ ID NO: 594973 - DNA, 120 bp, Artificial Sequence
  ENSG00000173681_39 (sequence is synthesized)
agaacactattataaatattttagatgatacattttcatttttttctattggaaaaaaactcgctacatttatgtgtaacaatttatgtagatgtatactatgtaccacattttacctaa

SEQ ID NO: 594974 - DNA, 120 bp, Artificial Sequence
  ENSG00000173681_40 (sequence is synthesized)
taaatcctacatttttgaatagttttttttttaaaaaaaagacggggatacttccaggcagaagcaagaaaagtaaagctggatgagaaactcttattgtctttattacccagcaaattc

SEQ ID NO: 594975 - DNA, 120 bp, Artificial Sequence
  ENSG00000173681_41 (sequence is synthesized)
agtaaccaccaggcacaaattcaccaggaacaaccaagcaaggaaggaagaagaagctgatgcaacaaggtgtggtatgacttcatccctcgcccatccccagaagtagcactgagtaaa

SEQ ID NO: 594976 - DNA, 120 bp, Artificial Sequence
  ENSG00000173681_42 (sequence is synthesized)
acaatggagatgacaaaaatattggtaacagtgggccccagtatggacaaaggcactgacgaggtgaccaggccacgtggaggagagtcaaggaaaactcttgggacaacgaagtctttg

SEQ ID NO: 594977 - DNA, 120 bp, Artificial Sequence
  ENSG00000173681_43 (sequence is synthesized)
cttccatctcaggacctcagcagaaggggtaagattcaccaggactaggcatttcccaggtctcagagcagcctgggaaagccaaatcctgcagaagtcagagacacctttgactgtgtc

SEQ ID NO: 594978 - DNA, 120 bp, Artificial Sequence
  ENSG00000173681_44 (sequence is synthesized)
tagtgagttctggttctggacatttaatgggaacctagaagagaggggataccaggttccccaacaaagttccgtcaaataggatgattatgagctctgagtccattaaaatacagaatg

SEQ ID NO: 594979 - DNA, 120 bp, Artificial Sequence
  ENSG00000173681_45 (sequence is synthesized)
aacatttaagaactgaggaatcatagatgtagaatagtatgtaaatgttataaatcttgacaaagaaaaattaatgtacattgacaaattcagacatggaggaggtaaagtgggataaag

SEQ ID NO: 594980 - DNA, 120 bp, Artificial Sequence
  ENSG00000173681_46 (sequence is synthesized)
acttaagaactaaccgtctcatcattcatggccaggtgtcatgtcacgtcatgtcttaaaattataatatggggaaaaacgctagtgaccaaccttaagtttttccacaatctttttttt

SEQ ID NO: 594981 - DNA, 120 bp, Artificial Sequence
  ENSG00000173681_47 (sequence is synthesized)
ccttgaccttaatacagtggttctcaaagtgtggtcccagaccagcaacatcagcatcacctgagaacttgttaaaaatgcagattcttggccccaccccagacctcctgaatcagaaac

SEQ ID NO: 594982 - DNA, 120 bp, Artificial Sequence
  ENSG00000173681_48 (sequence is synthesized)
cctgggggtggggccaagcaatctgtgatttaacaagtcctccaggggattctggcacatacttgagtttgagaataactggcttatttatcccttttaggaaccaatgaagaaacattt

SEQ ID NO: 594983 - DNA, 120 bp, Artificial Sequence
  ENSG00000173681_49 (sequence is synthesized)
atctgaagttcagcagccccttcaatttaatgcctaattttttttctattgcattcaaataaagttaaatctaaaacttgtttgctggccgggcacagtgagtcacgcctgtaatcccag

SEQ ID NO: 594984 - DNA, 67 bp, Artificial Sequence
  ENSG00000173681_50 (sequence is synthesized)
gcaggagaattgcttaaacccgggaggcgaaggttgcagtgaaccgagggaaaataaataaataaaa

SEQ ID NO: 594985 - DNA, 120 bp, Artificial Sequence
  ENSG00000173681_51 (sequence is synthesized)
tccatgtcaaaaaagaaaataaataaataaaacttgttagaataaaaagtttagggattccccccgtcaatcctgtctgtacatatgagtgaattgagaggtctggaaacatacccaccc

SEQ ID NO: 594986 - DNA, 120 bp, Artificial Sequence
  ENSG00000173681_52 (sequence is synthesized)
actgttaacactgttgatttttttaaatggtgggattatgagtgactgtactcttctgtatctatcaaatataatgaatgttgtatcatttttataaaataaagtctttcttttttaaaa

SEQ ID NO: 594987 - DNA, 120 bp, Artificial Sequence
  ENSG00000173681_53 (sequence is synthesized)
gctgatgcaacaagtgggccccagtatggacaaaggcactgacgaggtgaccaggccacgtggaggagagtcaaggaaaactcttgggacaacgaagtctttgcttccatctcaggacct

SEQ ID NO: 594988 - DNA, 120 bp, Artificial Sequence
  ENSG00000173681_54 (sequence is synthesized)
ccagtttttcaaagggtctcgctctgtcacccagactggagtgtggtgtcacaatcacagcttactgcagcctctacctccaagactcaagctatctcccacctcagcctcctgagtagc

SEQ ID NO: 594989 - DNA, 120 bp, Artificial Sequence
  ENSG00000173681_55 (sequence is synthesized)
agccaccatgcccagctaagaataaaaattaaaaatatatatattgatatataaaatgagctaggaagccagcttgagagaaacctactttctcaccatcattgactctttctgttttaa

SEQ ID NO: 594990 - DNA, 120 bp, Artificial Sequence
  ENSG00000173681_56 (sequence is synthesized)
tcaccatcattgactctttctgttttaacatctataaggcctagaatccaggacagctccaagtaccagacagtttttcatctgtttttttgttttgttttgtttgagacagggtctcac

SEQ ID NO: 594991 - DNA, 67 bp, Artificial Sequence
  ENSG00000173681_57 (sequence is synthesized)
tctgtcacccaggctggagcgcagtggcactcttttgtacttttcaagcatagagaacagtgactcg

SEQ ID NO: 594992 - DNA, 120 bp, Artificial Sequence
  ENSG00000173681_58 (sequence is synthesized)
gattacaggcgtgagctactgcacccaaccacccactcatctgtttactaataaagtagacttggaaggtgtagttttagcatttaattccttttttttccttcacagagcaactttaga

SEQ ID NO: 594993 - DNA, 120 bp, Artificial Sequence
  ENSG00000173681_59 (sequence is synthesized)
catttaattttaagaaacaacctgggtttttaaatgttcttgttgcatgatagttgaataagatcttcagggagtaatggtaatacagttgtgaggctgtgtaaccttaaaatgctttta

SEQ ID NO: 594994 - DNA, 120 bp, Artificial Sequence
  ENSG00000173681_60 (sequence is synthesized)
ggcattatgccttgaatactttgcatatgttagctgtttgaacttttgactttagaatttctgttgtatggttaatctttgaaatggaaactcaggtaaaggcttttaattgatgtattt

SEQ ID NO: 594995 - DNA, 120 bp, Artificial Sequence
  ENSG00000173681_61 (sequence is synthesized)
taatcttatacaaagtgaattatctgaatgccaaaaatatattgaatatatacaaagggtgcataattgcaaaatacactaactcttttccccattcatatatttttttgttgtggtaaa

SEQ ID NO: 594996 - DNA, 120 bp, Artificial Sequence
  ENSG00000173681_62 (sequence is synthesized)
atatgtataatataaaatttgccattttaaccatttttaagtagcatcaagtacatacagttcagcgacactaatttcattcacagtgctatgcaatcatcaccattatatgttcttttg

SEQ ID NO: 594997 - DNA, 120 bp, Artificial Sequence
  ENSG00000173681_63 (sequence is synthesized)
caatttatgtttttaattgacaagtaaaaattatatatatttatggtgttcaacatgatgttttgatgtatgtatacattgtggaatggctaaatcaagctatttaaaatacccattacc

SEQ ID NO: 594998 - DNA, 120 bp, Artificial Sequence
  ENSG00000173681_64 (sequence is synthesized)
tcacatacttatttttttgtattgagaacacttaaaatctactctgttagcaattttcaggtgtacaatatattgtaattaactgtagtcaccatgatgtataatacatcttttgaacgt

SEQ ID NO: 594999 - DNA, 120 bp, Artificial Sequence
  ENSG00000173681_65 (sequence is synthesized)
atccattttaatggctgcatattattccactctgtggatatatgaattatttcagtggtcttcaacctttttgctccatactgtaaagttttgaaaagttatctaccttcttgcacattg

SEQ ID NO: 595000 - DNA, 120 bp, Artificial Sequence
  ENSG00000173681_66 (sequence is synthesized)
ggcctggtacagaagagcttgtacattcaggctaagtatcagcgtttacggttcactggcccaaggggatttatcactcataagttcagagaaagattaatgagaaaaaagaagttttaa

SEQ ID NO: 595001 - DNA, 120 bp, Artificial Sequence
  ENSG00000173681_67 (sequence is synthesized)
acatggaaacacaaatacataaaacagatgcaggtggagtgactctaggtggggagacaggcaaggctgcagaccctccctttaagccagcacctttacctctaagatacacgtgcagag

SEQ ID NO: 595002 - DNA, 120 bp, Artificial Sequence
  ENSG00000173681_68 (sequence is synthesized)
ctgtagagctttctccaagattcacagattgaaaaaccctgccatggacacacaacccttagaggcgttctggatcatcacaggaagattctggtccagagcaactttagaggtggcaga

SEQ ID NO: 595003 - DNA, 120 bp, Artificial Sequence
  ENSG00000173692_0 (sequence is synthesized)
gtcctggcgagaagcgagccggcggcctgaggaggcgactgactgagcagcgcacccggggagcaaggaggcgcggtgaactgagcggcccctgagctgacagatacactgcgcagctgg

SEQ ID NO: 595004 - DNA, 120 bp, Artificial Sequence
  ENSG00000173692_1 (sequence is synthesized)
aacggcgagcgagccgacgggcgagtgaggggcgcagccatgatcacctcggccgctggaattatttctcttctggatgaagatgaaccacagcttaaggaatttgcactacacaaattg

SEQ ID NO: 595005 - DNA, 120 bp, Artificial Sequence
  ENSG00000173692_2 (sequence is synthesized)
aatgcagttgttaatgacttctgggcagaaatttccgagtccgtagacaaaatagaggttttatacgaagatgaaggtttccggagtcggcagtttgcagccttagtggcatctaaagta

SEQ ID NO: 595006 - DNA, 120 bp, Artificial Sequence
  ENSG00000173692_3 (sequence is synthesized)
ttttatcacctgggggcttttgaggagtctctgaattatgctcttggagcaggggacctcttcaatgtcaatgataactctgaatatgtggaaactattatagcaaaatgcattgatcac

SEQ ID NO: 595007 - DNA, 120 bp, Artificial Sequence
  ENSG00000173692_4 (sequence is synthesized)
tacaccaaacaatgtgtggaaaatgcagatttgcctgaaggagaaaaaaaaccaattgaccagagattggaaggcatcgtaaataaaatgttccagcgatgtctagatgatcacaagtat

SEQ ID NO: 595008 - DNA, 120 bp, Artificial Sequence
  ENSG00000173692_5 (sequence is synthesized)
aaacaggctattggcattgctctggagacacgaagactggacgtctttgaaaagaccatactggagtcgaatgatgtcccaggaatgttagcttatagccttaagctctgcatgtcttta

SEQ ID NO: 595009 - DNA, 120 bp, Artificial Sequence
  ENSG00000173692_6 (sequence is synthesized)
atgcagaataaacagtttcggaataaagtactaagagttctagttaaaatctacatgaacttggagaaacctgatttcatcaatgtttgtcagtgcttaattttcttagatgatcctcag

SEQ ID NO: 595010 - DNA, 120 bp, Artificial Sequence
  ENSG00000173692_7 (sequence is synthesized)
gctgtgagtgatatcttagagaaactggtaaaggaagacaacctcctgatggcatatcagatttgttttgatttgtatgaaagtgctagccagcagtttttgtcatctgtaatccagaat

SEQ ID NO: 595011 - DNA, 120 bp, Artificial Sequence
  ENSG00000173692_8 (sequence is synthesized)
cttcgaactgttggcacccctattgcttctgtgcctggatccactaatacgggtactgttccgggatcagagaaagacagtgactcgatggaaacagaagaaaagacaagcagtgcattt

SEQ ID NO: 595012 - DNA, 120 bp, Artificial Sequence
  ENSG00000173692_9 (sequence is synthesized)
gtaggaaagacaccagaagccagtccagagcctaaggaccagactttgaaaatgattaaaattttaagtggtgaaatggctattgagttacatctgcagttcttaatacgaaacaataat

SEQ ID NO: 595013 - DNA, 120 bp, Artificial Sequence
  ENSG00000173692_10 (sequence is synthesized)
acagacctcatgattctaaaaaacacaaaggatgcagtacggaattctgtatgtcatactgcaaccgttatagcaaactcttttatgcactgtgggacaaccagtgaccagtttcttaga

SEQ ID NO: 595014 - DNA, 120 bp, Artificial Sequence
  ENSG00000173692_11 (sequence is synthesized)
gataatttggaatggttagccagagccactaactgggcaaaatttactgctacagccagtttgggtgtaattcataagggtcatgaaaaagaagcattacagttaatggcaacatacctt

SEQ ID NO: 595015 - DNA, 120 bp, Artificial Sequence
  ENSG00000173692_12 (sequence is synthesized)
cccaaggatacttctccaggatcagcctatcaggaaggtggaggtctctatgcactaggtcttattcatgccaatcatggtggtgatataattgactatctgcttaatcagcttaagaac

SEQ ID NO: 595016 - DNA, 120 bp, Artificial Sequence
  ENSG00000173692_13 (sequence is synthesized)
tttgctaaaaacaaacctttatcaggatgatgcagtaacaggggaagcagctggcctggccctaggtttggttatgttgggctctaaaaatgctcaggctattgaggacatggttggtta

SEQ ID NO: 595017 - DNA, 120 bp, Artificial Sequence
  ENSG00000173692_14 (sequence is synthesized)
tgcacaagaaactcaacatgagaagattctgcgtggtcttgcagttggcatagctttagtaatgtatgggaggatggaagaggctgatgctctcattgaatctctctgtcgtgacaagga

SEQ ID NO: 595018 - DNA, 120 bp, Artificial Sequence
  ENSG00000173692_15 (sequence is synthesized)
cccaattcttcgaaggtctggaatgtatactgtagccatggcttattgtggctctggtaacaacaaagcaattcgacgcctgctacatgttgctgtaagtgatgttaatgatgatgtcag

SEQ ID NO: 595019 - DNA, 120 bp, Artificial Sequence
  ENSG00000173692_16 (sequence is synthesized)
gagggcagcagtagaatcacttgggttcattctattcagaacccctgaacagtgcccaagtgttgtctctttgttgtcagagagttacaaccctcatgtgcgctacggagctgcaatggc

SEQ ID NO: 595020 - DNA, 120 bp, Artificial Sequence
  ENSG00000173692_17 (sequence is synthesized)
cttggggatatgctgtgctggtacaggaaacaaggaagccattaatttgctagaaccaatgacaaacgaccccgtgaactacgtgaggcaaggggcactcatagcttcagctctcatcat

SEQ ID NO: 595021 - DNA, 120 bp, Artificial Sequence
  ENSG00000173692_18 (sequence is synthesized)
gatccagcagactgaaatcacttgtccaaaggtgaatcagttcagacagctgtattccaaagtcatcaatgataagcatgatgatgtcatggccaagtttggcgctattctggcccaggg

SEQ ID NO: 595022 - DNA, 120 bp, Artificial Sequence
  ENSG00000173692_19 (sequence is synthesized)
catactggatgcaggtggtcataatgtcacaatctccttgcagtccaggactgggcatactcatatgccttctgtggttggcgtccttgtatttacccagttttggttctggtttcctct

SEQ ID NO: 595023 - DNA, 120 bp, Artificial Sequence
  ENSG00000173692_20 (sequence is synthesized)
ttcacacttcctgtcattggcttatacccctacctgtgtcattggccttaacaaggacttaaagatgccgaaagttcagtataaatcgaactgtaaaccatccacatttgcatatcctgc

SEQ ID NO: 595024 - DNA, 120 bp, Artificial Sequence
  ENSG00000173692_21 (sequence is synthesized)
ccctctggaagtaccaaaagaaaaagaaaaggaaaaggtttctactgctgtattatctataactgccaaggctaaaaagaaggaaaaagaaaaggaaaaaaaggaggaggagaaaatgga

SEQ ID NO: 595025 - DNA, 120 bp, Artificial Sequence
  ENSG00000173692_22 (sequence is synthesized)
agtggatgaggcagagaaaaaggaggaaaaagagaagaaaaaagaacctgagccaaacttccagttattggataacccagcccgagttatgcctgcccagcttaaggtcctaaccatgcc

SEQ ID NO: 595026 - DNA, 120 bp, Artificial Sequence
  ENSG00000173692_23 (sequence is synthesized)
ggagacctgtagataccagcctttcaaaccactctctattggaggcatcatcattctgaaggataccagtgaagacattgaggagctggtggaacctgtggcagcacatggcccaaaaat

SEQ ID NO: 595027 - DNA, 120 bp, Artificial Sequence
  ENSG00000173692_24 (sequence is synthesized)
cgaggaggaggaacaagagccagaacccccagaaccatttgagtatattgatgattaagggccagaggatctcacttgcttatctgaagaagattgtccaggctcatattgggaatgctt

SEQ ID NO: 595028 - DNA, 120 bp, Artificial Sequence
  ENSG00000173692_25 (sequence is synthesized)
atgaggaaattcatgccgagacctgctattcaatgcatgtatcgttgcctctgcactgacctgaagaaccctgtctccaagtctttggttgaagagaagatatatgactgttgagtgtgc

SEQ ID NO: 595029 - DNA, 120 bp, Artificial Sequence
  ENSG00000173692_26 (sequence is synthesized)
tctttcacagaacttggttttcaaataaatataagatctccagatggacaagacatttgtttttcagcctgggtttttaataaatgtatctaatcctccccacaccatgaaatgcctaaa

SEQ ID NO: 595030 - DNA, 120 bp, Artificial Sequence
  ENSG00000173692_27 (sequence is synthesized)
tcgtatagatcacagttatctttatcccagtaaagttctactccagtttttcacttccaaatcatttaagtagttttaaagtaccatttaacaagtatttactctagattgtggagcacg

SEQ ID NO: 595031 - DNA, 120 bp, Artificial Sequence
  ENSG00000173692_28 (sequence is synthesized)
aaaaaaaaaagaaagaaaggaaaaattgagaccaaagaactttaaaactggtcactaggtaatgtgaagctgactttctattaggctcatgttacactcttacaaggcatgattatatat

SEQ ID NO: 595032 - DNA, 120 bp, Artificial Sequence
  ENSG00000173692_29 (sequence is synthesized)
atgattatatatggtgtggaaattgtattcaggctagtgtaagttactagtctggtacaaagaagggaaatggcagtttgtatgcaggatagaccatcaaatgctttacaaaggagagaa

SEQ ID NO: 595033 - DNA, 120 bp, Artificial Sequence
  ENSG00000173692_30 (sequence is synthesized)
cagttgatctgatgctcacaccatgaataggacttacccattgaagcaggttggtttgttcataaagataaagggatgcccattcaaaggcacagagattaagaaaagtatagagaactg

SEQ ID NO: 595034 - DNA, 120 bp, Artificial Sequence
  ENSG00000173692_31 (sequence is synthesized)
gtaattctgtaaagaacctaaaaactaaatcagtaaaagtagacatggctttcagagaggagtcataacatagttgaacatacagcctgcattaaaactttggtctccttttgtatccgt

SEQ ID NO: 595035 - DNA, 120 bp, Artificial Sequence
  ENSG00000173692_32 (sequence is synthesized)
acaacaaagcaattcgacgcctgctacatgttgctgtaagtgatgttaatgatgatgtcaggagggcagcagtagaatcacttgggttcattctattcagtgaggagaagcgtatctagt

SEQ ID NO: 595036 - DNA, 120 bp, Artificial Sequence
  ENSG00000173692_33 (sequence is synthesized)
agaatgattgatgaagactgaatggttgaacttcggagcctcattggactctggtacatggcagggttaatcccatttcgaattccatgtttcttgaaaaacttagagttctctgccatt

SEQ ID NO: 595037 - DNA, 120 bp, Artificial Sequence
  ENSG00000173692_34 (sequence is synthesized)
ccggtaattgcaggtgatatatcggccaaatgcatcccgaaatgtcttattgaagagggtgtagaccaaaggattcactcctgaggaaacatagcctatccacacaaatatctccaggag

SEQ ID NO: 595038 - DNA, 120 bp, Artificial Sequence
  ENSG00000173692_35 (sequence is synthesized)
catttggagagtagtttggttacaggaatcacataaaactaaagttatatttgtaataaagaagggacaccacataagcaaaaagaggaaaaacacaatccctaggacctttgaggctct

SEQ ID NO: 595039 - DNA, 120 bp, Artificial Sequence
  ENSG00000173692_36 (sequence is synthesized)
ctgttcgttggaaatggtctgcactgactttttcccaattgtggatgttcttcgcataagtgtttcatcacctgagttgggcagagccttgtcctttcgagaaccatccagcattgccac

SEQ ID NO: 595040 - DNA, 120 bp, Artificial Sequence
  ENSG00000173692_37 (sequence is synthesized)
gtgctggtacaggaaacaaggtaaagcccacagccaatggggtcagttctttcttggcgccagactgttttccctcgccgcagaatttatgtaacagctgtaaaaatacaagtgcaatgt

SEQ ID NO: 595041 - DNA, 120 bp, Artificial Sequence
  ENSG00000173692_38 (sequence is synthesized)
gatctgtaagagtaaacttgccatacaaagcttcccagtactccctcattctgcgatgctggattgcccaaagctgcttaagaataaatcgtcacattacatggatagctgtaactgaaa

SEQ ID NO: 595042 - DNA, 120 bp, Artificial Sequence
  ENSG00000173692_39 (sequence is synthesized)
taactcattatcattggagcaatattattccctgttctaaaatggtaccgcaaatgagtagacttagactataattctttctcttgctccttcaggtgaatcagttcagacagctgtatt

SEQ ID NO: 595043 - DNA, 120 bp, Artificial Sequence
  ENSG00000173692_40 (sequence is synthesized)
tttccccaggtttctactgctgtattatctataactgccaaggctaaaaagaaggaaaaagaaaaggaaaaaaaggaggaggagaaaatggaagtggatgaggcagagaaaaaggaggaa

SEQ ID NO: 595044 - DNA, 120 bp, Artificial Sequence
  ENSG00000173698_0 (sequence is synthesized)
cccgaggacgcgagcggcaggtgtgcacagaggttctccactttgttttctgaactcgcggtcaggatggttttctctgtcaggcagtgtggccatgttggcagaactgaagaagtttta

SEQ ID NO: 595045 - DNA, 120 bp, Artificial Sequence
  ENSG00000173698_1 (sequence is synthesized)
ctgacgttcaagatattccttgtcatcatttgtcttcatgtcgttctggtaacatccctggaagaagatactgataattccagtttgtcaccaccacctgctaaattatctgttgtcagt

SEQ ID NO: 595046 - DNA, 120 bp, Artificial Sequence
  ENSG00000173698_2 (sequence is synthesized)
tttgccccctcctccaatgaggttgaaacaacaagcctcaatgatgttactttaagcttactcccttcaaacgaaacagaaaaaactaaaatcactatagtaaaaaccttcaatgcatca

SEQ ID NO: 595047 - DNA, 120 bp, Artificial Sequence
  ENSG00000173698_3 (sequence is synthesized)
ggcgtcaaaccccagagaaatatctgcaatttgtcatctatttgcaatgactcagcattttttagaggtgagatcatgtttcaatatgataaagaaagcactgttccccagaatcaacat

SEQ ID NO: 595048 - DNA, 120 bp, Artificial Sequence
  ENSG00000173698_4 (sequence is synthesized)
ataacgaatggcaccttaactggagtcctgtctctaagtgaattaaaacgctcagagctcaacaaaaccctgcaaaccctaagtgagacttactttataatgtgtgctacagcagaggcc

SEQ ID NO: 595049 - DNA, 120 bp, Artificial Sequence
  ENSG00000173698_5 (sequence is synthesized)
caaagcacattaaattgtacattcacaataaaactgaataatacaatgaatgcatgtgctgtaatagctgctttggaaagagtaaagattcgaccaatggaacactgctgctgttctgtc

SEQ ID NO: 595050 - DNA, 120 bp, Artificial Sequence
  ENSG00000173698_6 (sequence is synthesized)
aggataccctgcccttcctccccagaagagttggaaaagcttcagtgtgacctgcaggatcccattgtctgtcttgctgaccatccacgtggcccaccattttcttccagccaatccatc

SEQ ID NO: 595051 - DNA, 120 bp, Artificial Sequence
  ENSG00000173698_7 (sequence is synthesized)
ccagtggtgcctcgggccactgtgctttcccaggtccccaaagctacctcttttgctgagcctccagattattcacctgtgacccacaatgttccctctccaataggggagattcaaccc

SEQ ID NO: 595052 - DNA, 120 bp, Artificial Sequence
  ENSG00000173698_8 (sequence is synthesized)
ctttcaccccagccttcagctcccatagcttccagccctgccattgacatgcccccacagtctgaaacgatctcttcccctatgccccaaacccatgtctccggcaccccacctcctgtg

SEQ ID NO: 595053 - DNA, 120 bp, Artificial Sequence
  ENSG00000173698_9 (sequence is synthesized)
aaagcctcattttcctctcccaccgtgtctgcccctgcgaatgtcaacactaccagcgcacctcctgtccagacagacatcgtcaacaccagcagtatttctgatcttgagaaccaagtg

SEQ ID NO: 595054 - DNA, 120 bp, Artificial Sequence
  ENSG00000173698_10 (sequence is synthesized)
ttgcagatggagaaggctctgtccttgggcagcctggagcctaacctcgcaggagaaatgatcaaccaagtcagcagactccttcattccccgcctgacatgctggcccctctggctcaa

SEQ ID NO: 595055 - DNA, 120 bp, Artificial Sequence
  ENSG00000173698_11 (sequence is synthesized)
agattgctgaaagtagtggatgacattggcctacagctgaacttttcaaacacgactataagtctaacctccccttctttggctctggctgtgatcagagtgaatgccagtagtttcaac

SEQ ID NO: 595056 - DNA, 120 bp, Artificial Sequence
  ENSG00000173698_12 (sequence is synthesized)
acaactacctttgtggcccaagaccctgcaaatcttcaggtttctctggaaacccaagctcctgagaacagtattggcacaattactcttccttcatcgctgatgaataatttaccagct

SEQ ID NO: 595057 - DNA, 120 bp, Artificial Sequence
  ENSG00000173698_13 (sequence is synthesized)
catgacatggagctagcttccagggttcagttcaatttttttgaaacacctgctttgtttcaggatccttccctggagaacctctctctgatcagctacgtcatatcatcgagtgttgca

SEQ ID NO: 595058 - DNA, 120 bp, Artificial Sequence
  ENSG00000173698_14 (sequence is synthesized)
aacctgaccgtcaggaacttgacaagaaacgtgacagtcacattaaagcacatcaacccgagccaggatgagttaacagtgagatgtgtattttgggacttgggcagaaatggtggcaga

SEQ ID NO: 595059 - DNA, 120 bp, Artificial Sequence
  ENSG00000173698_15 (sequence is synthesized)
ggaggctggtcagacaatggctgctctgtcaaagacaggagattgaatgaaaccatctgtacctgtagccatctaacaagcttcggcgttctgctggacctatctaggacatctgtgctg

SEQ ID NO: 595060 - DNA, 120 bp, Artificial Sequence
  ENSG00000173698_16 (sequence is synthesized)
cctgctcaaatgatggctctgacgttcattacatatattggttgtgggctttcatcaatttttctgtcagtgactcttgtaacctacatagcttttgaaaagatccggagggattaccct

SEQ ID NO: 595061 - DNA, 120 bp, Artificial Sequence
  ENSG00000173698_17 (sequence is synthesized)
tccaaaatcctcatccagctgtgtgctgctctgcttctgctgaacctggtcttcctcctggactcgtggattgctctgtataagatgcaaggcctctgcatctcagtggctgtatttctt

SEQ ID NO: 595062 - DNA, 120 bp, Artificial Sequence
  ENSG00000173698_18 (sequence is synthesized)
cattattttctcttggtctcattcacatggatgggcctagaagcattccatatgtacctggcccttgtcaaagtatttaatacttacatccgaaaatacatccttaaattctgcattgtc

SEQ ID NO: 595063 - DNA, 120 bp, Artificial Sequence
  ENSG00000173698_19 (sequence is synthesized)
tgacttctgctggatcaacaacaatgcagtattctacattacggtggtgggatatttctgtgtgatatttttgctgaacgtcagcatgttcattgtggtcctggttcagctctgtcgaat

SEQ ID NO: 595064 - DNA, 120 bp, Artificial Sequence
  ENSG00000173698_20 (sequence is synthesized)
taaaaagaagaagcaactgggagcccagcgaaaaaccagtattcaagacctcaggagtatcgctggccttacatttttactgggaataacttggggctttgccttctttgcctggggacc

SEQ ID NO: 595065 - DNA, 120 bp, Artificial Sequence
  ENSG00000173698_21 (sequence is synthesized)
agttaacgtgaccttcatgtatctgtttgccatctttaataccttacaaggatttttcatattcatcttttactgtgtggccaaagaaaatgtcaggaagcaatggaggcggtatctttg

SEQ ID NO: 595066 - DNA, 120 bp, Artificial Sequence
  ENSG00000173698_22 (sequence is synthesized)
ttgtggaaagttacggctggctgaaaattctgactggagtaaaactgctactaatggtttaaagaagcagactgtaaaccaaggagtgtccagctcttcaaattccttacagtcaagcag

SEQ ID NO: 595067 - DNA, 120 bp, Artificial Sequence
  ENSG00000173698_23 (sequence is synthesized)
taactccactaactccaccacactgctagtgaataatgattgctcagtacacgcaagcgggaatggaaatgcttctacagagaggaatggggtctcttttagtgttcagaatggagatgt

SEQ ID NO: 595068 - DNA, 120 bp, Artificial Sequence
  ENSG00000173698_24 (sequence is synthesized)
gtgccttcacgatttcactggaaaacagcacatgtttaacgagaaggaagattcctgcaatgggaaaggccgtatggctctcagaaggacttcaaagcggggaagcttacactttattga

SEQ ID NO: 595069 - DNA, 120 bp, Artificial Sequence
  ENSG00000173698_25 (sequence is synthesized)
gcaaatgtgattcctttcttctaaaatcaaagcatgatgcttgacagtgtgaaatgtccaattttaccttttacacaatgtgagatgtatgaaaatcaactcattttattctcggcaaca

SEQ ID NO: 595070 - DNA, 120 bp, Artificial Sequence
  ENSG00000173698_26 (sequence is synthesized)
tctggagaagcataagctaattaagggcgatgattattattacaagaagaaaccaagacattacaccatggtttttagacatttctgatttggtttcttatctttcattttataagaagg

SEQ ID NO: 595071 - DNA, 120 bp, Artificial Sequence
  ENSG00000173698_27 (sequence is synthesized)
ttggttttaaacaatacactaagaatgactcctataaagaaaacaaaaaaaggtagtgaactttcagctaccttttaaagaggctaagttatctttgataacatcatataaagcaactgt

SEQ ID NO: 595072 - DNA, 120 bp, Artificial Sequence
  ENSG00000173698_28 (sequence is synthesized)
tgacttcagcctgttggtgagtttagttgtgcatgcctttgttgtatataagctaaattctagtgacccatgtgtcaaaaatcttacttctacatttttttgtatttattttctactgtg

SEQ ID NO: 595073 - DNA, 120 bp, Artificial Sequence
  ENSG00000173698_29 (sequence is synthesized)
taaatgtattcctttgtagaatcatggttgttttgtctcacgtgataattcagaaaatccttgctcgttccgcaaatcctaaagctccttttggagatgatataggatgtgaaatacaga

SEQ ID NO: 595074 - DNA, 120 bp, Artificial Sequence
  ENSG00000173698_30 (sequence is synthesized)
aacctcagtgaaatcaagaaataatgatcccagccagactgagaaaatgtaagcagacagtgccacagttagctcatacagtgcctttgagcaagttaggaaaagatgcccccactgggc

SEQ ID NO: 595075 - DNA, 120 bp, Artificial Sequence
  ENSG00000173698_31 (sequence is synthesized)
agacacagccctatgggctcatggtttgacaaacagagtggagagaccatattttagccccactcaccctcttgggtgcacgacctgtacagccaaacacagcatccaatatgaataccc

SEQ ID NO: 595076 - DNA, 120 bp, Artificial Sequence
  ENSG00000173698_32 (sequence is synthesized)
atcccctgaccgcatccccagtagtcagattatagaatctgcaccaagatgtttagctttataccttggccacagagagggatgaactgtcatccagaccatgtgtcaggaaaattgtga

SEQ ID NO: 595077 - DNA, 120 bp, Artificial Sequence
  ENSG00000173698_33 (sequence is synthesized)
acgtagatgaggtacatacactgccgcttctcaaatccccagagcctttaggaacaggagagtagactaggattccttctcttaaaaaggtacatatatatggaaaaaaatcatattgcc

SEQ ID NO: 595078 - DNA, 120 bp, Artificial Sequence
  ENSG00000173698_34 (sequence is synthesized)
gttctttaaaaggcaactgcatggtacattgttgattgttatgactggtacactctggcccagccagagctataattgttttttaaatgtgtcttgaagaatgcacagtgacaaggggag

SEQ ID NO: 595079 - DNA, 120 bp, Artificial Sequence
  ENSG00000173698_35 (sequence is synthesized)
tagctattgggaacagggaactgtcctacactgctattgttgctacatgtatcgagccttgattgctcctagttatatacagggtctatcttgcttcctacctacatctgcttgagcagt

SEQ ID NO: 595080 - DNA, 120 bp, Artificial Sequence
  ENSG00000173698_36 (sequence is synthesized)
gcctcaagtacatccttattaggaacatttcaaaccccttttagttaagtctttcactaaggttctcttgcatatatttcaagtgaatgttggatctcagactaaccatagtaataatac

SEQ ID NO: 595081 - DNA, 120 bp, Artificial Sequence
  ENSG00000173698_37 (sequence is synthesized)
acatttctgtgagtgctgacttgtctttgcaatatttcttttctgatttatttaattttcttgtatttatatgttaaaatcaaaaatgttaaaatcaatgaaataaatttgcagttaaga

SEQ ID NO: 595082 - DNA, 120 bp, Artificial Sequence
  ENSG00000173698_38 (sequence is synthesized)
cactggtaaaaatgtattatgcatccacagggctatatattaaaatcagtattaatgttggaaatgtcatatcccttagggacgttcattataatagagaaaaaagggacaaaatattaa

SEQ ID NO: 595083 - DNA, 120 bp, Artificial Sequence
  ENSG00000173698_39 (sequence is synthesized)
acaacatagatgagtttattcaaatctaatggttacgggagtgttgctaagtgtttagacatgtaacttgcatttgaatcaatgaacatttgctccggaattgtctccaggggttggaga

SEQ ID NO: 595084 - DNA, 120 bp, Artificial Sequence
  ENSG00000173698_40 (sequence is synthesized)
atggagtagtgagaggatgggtagcaaaaacatttagtagtgtcagttggcttttgcaaaactaacttctcccagatttggggaaaagggaaatgtttaaggaacctaggaagacacaca

SEQ ID NO: 595085 - DNA, 120 bp, Artificial Sequence
  ENSG00000173698_41 (sequence is synthesized)
tgtttgtaaaccatgccagtagttatgctaatttttattattttatttcagatgttactttaagcttactcccttcaaacgaaacaggtaatatcaagtgatttctaaatgtaatagctt

SEQ ID NO: 595086 - DNA, 120 bp, Artificial Sequence
  ENSG00000173698_42 (sequence is synthesized)
cttctgcagcctcttgagtgtcttgcttgtgcagtctactgggttactaaagagttttcttttgcctccttgccctttttcctgtgccttcaaccattgatttatgacccctttgacttt

SEQ ID NO: 595087 - DNA, 120 bp, Artificial Sequence
  ENSG00000173698_43 (sequence is synthesized)
gacattgaactataattctgtcaccacactcccaaacttccaaaggatggccatagcactccatttaaaatagcatgtattatttttgtgattataatagtgatacatattagctcataa

SEQ ID NO: 595088 - DNA, 120 bp, Artificial Sequence
  ENSG00000173698_44 (sequence is synthesized)
agatggagaatatagagaaatgcaaagaagaaaatacaaatcatctttaatgttactttcctaagactatgactgttaacaatttggtctatttccattcagtatcatttatacatatat

SEQ ID NO: 595089 - DNA, 120 bp, Artificial Sequence
  ENSG00000173698_45 (sequence is synthesized)
ttatatacatatactcttatatcctttgcaaaatagtcataatttacatagatttttgtatcttgcccatttgacttaatattacgttagaagtatattccagtgtcccttactattatg

SEQ ID NO: 595090 - DNA, 120 bp, Artificial Sequence
  ENSG00000173698_46 (sequence is synthesized)
acttgataatattccattttgtaccatatgttgaactttaaagttgtttctatctttttaatagaagttattgcaatgaacattctggtgccaacatctttgcattcatttcttatttct

SEQ ID NO: 595091 - DNA, 120 bp, Artificial Sequence
  ENSG00000173698_47 (sequence is synthesized)
gtaagatacattctaaggattgcagtatgcaaggattgcattctaagggtcagcagtatgaatattgtaagactcttgatactactgcttggttaccttctagaaaggtcgtgcctagcg

SEQ ID NO: 595092 - DNA, 120 bp, Artificial Sequence
  ENSG00000173698_48 (sequence is synthesized)
acattcctgtccgcagtggatgagaatgtctgtcactgtacctttgctgagactgtatcatatcttattaaatctttctctcaacgcttaggttttatttttcattcatgattactagtg

SEQ ID NO: 595093 - DNA, 120 bp, Artificial Sequence
  ENSG00000173698_49 (sequence is synthesized)
aagttaaacatttttaccccagagcactttagttaccaaaaccagaagttcatttcacagttgtattttgtttgctctgaaaaggaaactatcagggcaaacaaaataatatatttaaaa

SEQ ID NO: 595094 - DNA, 62 bp, Artificial Sequence
  ENSG00000173698_50 (sequence is synthesized)
aaaggaaactatcagggcaaacaaaataatatatttaaaagacttcttggctcactgcaagc

SEQ ID NO: 595095 - DNA, 120 bp, Artificial Sequence
  ENSG00000173698_51 (sequence is synthesized)
ttacaggcgtgagccacggcacccggacctaaaagattcttaatgacaatgtgaaatgctatcagccttcataattaccacccatcattggctcatgggtcacacattgaaacctgacag

SEQ ID NO: 595096 - DNA, 120 bp, Artificial Sequence
  ENSG00000173698_52 (sequence is synthesized)
tcatgggtcacacattgaaacctgacagtttcagaaacctcatttgtgtgtctttgttactgatgagtttctgccaggataacatcatcattcttaagtgtgtttccaatctctgagctt

SEQ ID NO: 595097 - DNA, 120 bp, Artificial Sequence
  ENSG00000173698_53 (sequence is synthesized)
ggccttttcttcagaatttgcccatccaccctaggtgacagagcttcggtgaaaatctatgccctgaacacagcctctttccattggccatttttacagcaaagatttctgtacctgctt

SEQ ID NO: 595098 - DNA, 120 bp, Artificial Sequence
  ENSG00000173698_54 (sequence is synthesized)
ctccgttacctggggaatgaaccatgggctctgtccccaaaacgtgtttggaagacatttctaaagtttgcttcttcagggcatgttaatatttgcctgtgagtcactcactttgaacag

SEQ ID NO: 595099 - DNA, 120 bp, Artificial Sequence
  ENSG00000173698_55 (sequence is synthesized)
tcttggttctgctgtgggcgtgttatgtgattgtgtataggtggatgatctcgacctctctgagaatagcattctctatcagtacaatggggatagtattatgttaactcctaaagaaga

SEQ ID NO: 595100 - DNA, 120 bp, Artificial Sequence
  ENSG00000173698_56 (sequence is synthesized)
tagcgagacacttgattgtataatagcaatactttacatcccatgtgtactgtttcacattaatttttattctgaattacctgtttttacaacctatcacctgaaggtcccgatagtggc

SEQ ID NO: 595101 - DNA, 120 bp, Artificial Sequence
  ENSG00000173698_57 (sequence is synthesized)
ttaattctacatatctgaagtgtaagtccacatcatttgtctagcagcagtgtgtggaaagtaaagtagaattacacaggcagtggggtgtgtaatgggtgtgatctaactgcgtaaaca

SEQ ID NO: 595102 - DNA, 120 bp, Artificial Sequence
  ENSG00000173698_58 (sequence is synthesized)
tggaactccaactcccagactcaccctgtgccaatgctacatgatccgtggatgcggttcctattcattctgctgctgagatgaccgatagtgtcttaaaggtgtcaacagtgtgacttt

SEQ ID NO: 595103 - DNA, 120 bp, Artificial Sequence
  ENSG00000173698_59 (sequence is synthesized)
ttttttagcacttcactaaaatgatactcatggcaaattgtttttaaaaaacaagcaatgattattctctaatatttaagttgtttctttgcagaaaaaactaaaatcactatagtaaaa

SEQ ID NO: 595104 - DNA, 120 bp, Artificial Sequence
  ENSG00000173698_60 (sequence is synthesized)
accttcaatgcatcaggtatgacttattatcaatatcaagactttcctttttataactaaagtaaaattaaacaaatggctggtgtttataatttctttctcttttttccaaacttttca

SEQ ID NO: 595105 - DNA, 120 bp, Artificial Sequence
  ENSG00000173698_61 (sequence is synthesized)
gtgtatgcactgggtacctgaaattgtactaggtgtttggggctatataataatgatcagacacagagcctaccctcaagaatcttctagtctatgggtggagacaaggcaaaaaaatag

SEQ ID NO: 595106 - DNA, 120 bp, Artificial Sequence
  ENSG00000173698_62 (sequence is synthesized)
ataactaacatgaacatgcatgcagataaaggcaatgattatacaagtattactgacatggttaagaggcataggagtagagggggatgcaattaatgaagaagttagaggaatgaacct

SEQ ID NO: 595107 - DNA, 120 bp, Artificial Sequence
  ENSG00000173698_63 (sequence is synthesized)
ggatgcaattaatgaagaagttagaggaatgaacctcaaatttttttttcctgagacaagatctcactcagtggcccaggctacagtgcagtgatgcaatcatagctcactgcagcctca

SEQ ID NO: 595108 - DNA, 120 bp, Artificial Sequence
  ENSG00000173698_64 (sequence is synthesized)
acaggcctgagccactgcacctggccaaattctttttaaatcaaagaaaatgtgtacttttaagtttctgatacaagactacacacacaagacatgcttgacaaaggcttgatttcaagt

SEQ ID NO: 595109 - DNA, 120 bp, Artificial Sequence
  ENSG00000173698_65 (sequence is synthesized)
aagacatgcttgacaaaggcttgatttcaagtagcggttggcaaactatcaccaatgggccaaatcgggctcactgcctgtttttgtgaataaagttttattggaacactaccatgcccc

SEQ ID NO: 595110 - DNA, 120 bp, Artificial Sequence
  ENSG00000173698_66 (sequence is synthesized)
tttgcttacatattctctatagctatttttctgctgcgtaaaacacgagtggttgcaacagagaccatatgacccacaaagcttaaatatttactatctgaccctttagaaagttttctc

SEQ ID NO: 595111 - DNA, 120 bp, Artificial Sequence
  ENSG00000173698_67 (sequence is synthesized)
actcatgatttaaggaatgacctgtggccatgtacatagaggagattacagatgagaatgctagcagtaggaaaaacaaaattctcagtatgaatgaacagcaagaagacacgcatcact

SEQ ID NO: 595112 - DNA, 120 bp, Artificial Sequence
  ENSG00000173698_68 (sequence is synthesized)
ggaaacggagctgcagctaaaatttagaaaaagatgagatgatcgaatgaaaagtttagtaagtaatacagcaatggtttaaaggacatttacagcataactacccattataaaatctat

SEQ ID NO: 595113 - DNA, 120 bp, Artificial Sequence
  ENSG00000173698_69 (sequence is synthesized)
aaattctatatttgcataatatatatgttatagtgagttctatctataagcaagtatatttgcttatagacagaagaagaaatgaaatatttctcttttggtgtgggtaacactgctttg

SEQ ID NO: 595114 - DNA, 120 bp, Artificial Sequence
  ENSG00000173698_70 (sequence is synthesized)
gaacaatataaaaatctacagatctggtaatttggggtacctaaatttaatttgctcacaaaatcaaaactcatagctataggtgtcttcgctaaagcatgatgcctgtacatcaataaa

SEQ ID NO: 595115 - DNA, 120 bp, Artificial Sequence
  ENSG00000173698_71 (sequence is synthesized)
tcacactagcagaaagcatatcacatgcactaactcaaattataattttagtttgtacccaaactagttttctcatagaaaagaatttaaggatttgtaatgtgcaatggaaataaactt

SEQ ID NO: 595116 - DNA, 120 bp, Artificial Sequence
  ENSG00000173698_72 (sequence is synthesized)
gcagttgggcattgcacacataattctgaccaaacaagacctaacaaggagacaaaaatatttcttaatataacaagtttttcccttggcagtttgtttaatacattatcagcatttgct

SEQ ID NO: 595117 - DNA, 120 bp, Artificial Sequence
  ENSG00000173698_73 (sequence is synthesized)
cctcccatgtactatggatttcttatgctttgccaaaaggatgcaattaataaaggaaggctttttagagaagtaaaccttgagttcttttcaaattgaagaagagatacacttctcctc

SEQ ID NO: 595118 - DNA, 120 bp, Artificial Sequence
  ENSG00000173698_74 (sequence is synthesized)
tcaccaaaggagaaagtgtttctcaggttaatacgtataaagttttggttctgatgctcattttatctcccagtcatctctgtctcctttgtatgcctgtgtggtctgttgtcctggtca

SEQ ID NO: 595119 - DNA, 120 bp, Artificial Sequence
  ENSG00000173698_75 (sequence is synthesized)
tcactccattttgccctcactaataagtaaattaaaaaatgctttttatttactggctagtatcatccactagattgtatgctccttgagggcaggatctatatctggaaactcccaaag

SEQ ID NO: 595120 - DNA, 120 bp, Artificial Sequence
  ENSG00000173698_76 (sequence is synthesized)
cctgtagaatatggttaatgctcagcaaatatgttttgaattttgtagtttttgcccatgaaacaatattatgacattaatgttatttcatacatacatttgcataaagagctaggatta

SEQ ID NO: 595121 - DNA, 120 bp, Artificial Sequence
  ENSG00000173698_77 (sequence is synthesized)
acattagagtgttcatagactcccctacataggaaaagaaggaggatctatgattaagggccattccatttaaagtctctacttggtttgtgttcatggtgctctgtttatactgaacag

SEQ ID NO: 595122 - DNA, 120 bp, Artificial Sequence
  ENSG00000173698_78 (sequence is synthesized)
gagagggattaattgggaaggggtcaaaaattttagggaggagttaaggatcagatattgacatactaaagattagtaaagaattaagttccgtagctgacaaatgaccaacaaatgaaa

SEQ ID NO: 595123 - DNA, 120 bp, Artificial Sequence
  ENSG00000173698_79 (sequence is synthesized)
actcatttctttagtctttgtggaattcatccatccaattaattccagcttataatatttctggtccacatttgatgcctacgtttatgaattctcttgacaatgcagcacataaacacg

SEQ ID NO: 595124 - DNA, 120 bp, Artificial Sequence
  ENSG00000173699_0 (sequence is synthesized)
agctggaggcccaagccaggctcctagggcagagggcaaacggcccctccaggagggagccgggagattacgcagctccatgtaggtccacgtttaggttgggaggatctaccatgaaga

SEQ ID NO: 595125 - DNA, 120 bp, Artificial Sequence
  ENSG00000173699_1 (sequence is synthesized)
aggtcaagaagaaaaggtcagaggccagacgccaccgagactccacctcccagcatgctagctccaattccacctctcagcagcctagccctgaatccacaccacagcagcctagtcctg

SEQ ID NO: 595126 - DNA, 120 bp, Artificial Sequence
  ENSG00000173699_2 (sequence is synthesized)
aatccacaccacagcagcctagccctgaatccacaccacagcattccagccttgaaaccacctcccggcagccagcattccaagcccttccagcacccgaaatccgccgctcctcttgct

SEQ ID NO: 595127 - DNA, 120 bp, Artificial Sequence
  ENSG00000173699_3 (sequence is synthesized)
gccttttatctccagatgctaacgtgaaggcagcccctcaatccaggaaagcagggcctctgattcgcgccggcccgcattcctgctcctgtgccacttgcccctgcagctccgcttgct

SEQ ID NO: 595128 - DNA, 120 bp, Artificial Sequence
  ENSG00000173699_4 (sequence is synthesized)
gggactggcagatggcgccagggagaggactccccaacctgctcaccttctacagaaaatcttcaagaaaaccctccagtcatcgtaacgcgtgtcctccaagccctcggaactgtggct

SEQ ID NO: 595129 - DNA, 120 bp, Artificial Sequence
  ENSG00000173699_5 (sequence is synthesized)
gtggctctgggggctctaggagctgcctactacatcactgaatccttgtgaacaagcccctaggcccacagtctggcagacctccaccagccccaggagttgataggtgatggcgctggg

SEQ ID NO: 595130 - DNA, 120 bp, Artificial Sequence
  ENSG00000173699_6 (sequence is synthesized)
agaagatgttcagaatatctcaaaagccaagtccagaagtttgatgtccttccctgtccagagagtgaagaaccatctgacgacagtgacatctttcctttttggggaaagatgcttcta

SEQ ID NO: 595131 - DNA, 120 bp, Artificial Sequence
  ENSG00000173699_7 (sequence is synthesized)
gaattttctttcctaaagtttggtgaacctctcccttggcatcttcctcagctgaagatccagtttccatcaaagggacctctcttgtcaccaaaatttaaaaaaagaaaaaaaaaacga

SEQ ID NO: 595132 - DNA, 120 bp, Artificial Sequence
  ENSG00000173699_8 (sequence is synthesized)
gaatatctcaaaagccaagtccagaaggaggtgcttttaatgtgctgataaaccaacctcaggaaggtattatgtacagaagattcccaaggctgctgttgctgaaagagacttgggcta

SEQ ID NO: 595133 - DNA, 120 bp, Artificial Sequence
  ENSG00000173699_9 (sequence is synthesized)
cactctgtcacccaggttggagtgcagcaggggcatgatcagctcactgaaggatcatttcttggtctaggctataggctggccttagaatcaactcacctggtgtcctattgtcaggga

SEQ ID NO: 595134 - DNA, 120 bp, Artificial Sequence
  ENSG00000173699_10 (sequence is synthesized)
tggtgtcctattgtcagggacatcttaaccagggtgactgcacctcgaataaaggccagataaagccaaacttgctgggttacattccttgggggttagacacccttcatcacaagatgt

SEQ ID NO: 595135 - DNA, 120 bp, Artificial Sequence
  ENSG00000173699_11 (sequence is synthesized)
ttgtagctcaaagaaggggttaatgatgctaactagagacccagaacgtctgaaaacgtcctgatatttaaagaacaaagcatccttcatttgagaataagtttcactttaaagaccccc

SEQ ID NO: 595136 - DNA, 120 bp, Artificial Sequence
  ENSG00000173699_12 (sequence is synthesized)
tcaatatcctcctcagatttgccctgcacttcttgttccatgcttggggtcctaagaacaagccatctgatgcctctactatcattacctctattgggacccagaaaccaataccccaaa

SEQ ID NO: 595137 - DNA, 120 bp, Artificial Sequence
  ENSG00000173699_13 (sequence is synthesized)
atatggtgcatggacatgctgaactgaagaagatgcctcaagggtcatccctaaaggcaaaaacagaacttccaaagtatctttctgtgacaacattaggttcaggcttgaagtccctga

SEQ ID NO: 595138 - DNA, 120 bp, Artificial Sequence
  ENSG00000173699_14 (sequence is synthesized)
tttcgccatcaaagtcagatccaggggggacgatgctattcagaaacgtgctgagaagaggactgcaatgactgctttcaaaaaacaccagaataaatacatacgtagtgtaagcaagcg

SEQ ID NO: 595139 - DNA, 120 bp, Artificial Sequence
  ENSG00000173699_15 (sequence is synthesized)
cctcaggaaggtattatgtacagaagattcccaaggctgctgttgctgaaagagacttgggctactgccagggaactagaaacgtgctgagaagaggactgcaatgactgctttcaaaaa

SEQ ID NO: 595140 - DNA, 120 bp, Artificial Sequence
  ENSG00000173699_16 (sequence is synthesized)
agaagacgcagggctacagataggaaacaggagggaataatccagccagaaattatcttgcccaaccacagagggcatcatctacattctgctgggatccataccagaggaggacagaaa

SEQ ID NO: 595141 - DNA, 120 bp, Artificial Sequence
  ENSG00000173699_17 (sequence is synthesized)
atggagcagcggcctggggcccagccctgcagggcaccccaggagaggaaggcggaggcgcagccacaggccccggcccagtctgtcgagggccacggccaggtgctgctgatcagcggg

SEQ ID NO: 595142 - DNA, 120 bp, Artificial Sequence
  ENSG00000173699_18 (sequence is synthesized)
ctctggaagcaggatgaggacggcctgagcctgcagagctttccaggagacactgcagccgatcagctccccaggccctcgtccgcccgagccatgagcggccacaccagcgccagcaac

SEQ ID NO: 595143 - DNA, 120 bp, Artificial Sequence
  ENSG00000173699_19 (sequence is synthesized)
tgcaccgcacggcggtccaagcgctggggcgacagctccatgaactgcgacgactgcccggccacgaagtccaagcgcttcaccaagaagtcgcggcgctcggagcccaaggccgaggac

SEQ ID NO: 595144 - DNA, 120 bp, Artificial Sequence
  ENSG00000173699_20 (sequence is synthesized)
ccgcgcgaggcgccaggggctcctcctgggacccccacctccgcggcagaggacacagcgtctgcacgcggggcaccgcagcacccgcctgagcggggcgcgcagctgctcctggtgttg

SEQ ID NO: 595145 - DNA, 120 bp, Artificial Sequence
  ENSG00000173699_21 (sequence is synthesized)
cagccgcagcaggaggaggaggccgaggcgcgccgccgcatggaggccctgctcagccgagtcctcgcgccgcacagcccagccgtggaggtgcacacggccgtgttctgccccggccgc

SEQ ID NO: 595146 - DNA, 120 bp, Artificial Sequence
  ENSG00000173699_22 (sequence is synthesized)
cccgagggcaccctggacttccaagcgcgccgccagcaagtgcacagggtctccctgatggatcgggagacgcagaccgatgggcctctgattcgcgccggcccgcattcctgctcctgt

SEQ ID NO: 595147 - DNA, 120 bp, Artificial Sequence
  ENSG00000173699_23 (sequence is synthesized)
caggagggagccgggagattacgcagctccatgtaggtccacgtttaggttgggaggatctaccatgaagaaggtcaagaagaaaagggcctctgattcgcgccggcccgcattcctgct

SEQ ID NO: 595148 - DNA, 120 bp, Artificial Sequence
  ENSG00000173702_0 (sequence is synthesized)
atcatttcctcctcagattaccaagcaagaacagctaaaatgaaagccatcattcatcttactcttcttgctctcctttctgtaaacacagccaccaaccaaggcaactcagctgatgct

SEQ ID NO: 595149 - DNA, 120 bp, Artificial Sequence
  ENSG00000173702_1 (sequence is synthesized)
gtaacaaccacagaaactgcgactagtggtcctacagtagctgcagctgataccactgaaactaatttccctgaaactgctagcaccacagcaaatacaccttctttcccaacagctact

SEQ ID NO: 595150 - DNA, 120 bp, Artificial Sequence
  ENSG00000173702_2 (sequence is synthesized)
tcacctgctccccccataattagtacacatagttcctccacaattcctacacctgctccccccataattagtacacatagttcctccacaattcctatacctactgctgcagacagtgag

SEQ ID NO: 595151 - DNA, 120 bp, Artificial Sequence
  ENSG00000173702_3 (sequence is synthesized)
tcaaccacaaatgtaaattcattagctacctctgacataatcaccgcttcatctccaaatgatggattaatcacaatggttccttctgaaacacaaagtaacaatgaaatgtcccccacc

SEQ ID NO: 595152 - DNA, 120 bp, Artificial Sequence
  ENSG00000173702_4 (sequence is synthesized)
acagaagacaatcaatcatcagggcctcccactggcaccgctttattggagaccagcaccctaaacagcacaggtcccagcaatccttgccaagatgatccctgtgcagataattcgtta

SEQ ID NO: 595153 - DNA, 120 bp, Artificial Sequence
  ENSG00000173702_5 (sequence is synthesized)
tgtgttaagctgcataatacaagtttttgcctgtgtttagaagggtattactacaactcttctacatgtaagaaaggaaaggtattccctgggaagatttcagtgacagtatcagaaaca

SEQ ID NO: 595154 - DNA, 120 bp, Artificial Sequence
  ENSG00000173702_6 (sequence is synthesized)
tttgacccagaagagaaacattccatggcctatcaagacttgcatagtgaaattactagcttgtttaaagatgtatttggcacatctgtttatggacagactgtaattcttactgtaagc

SEQ ID NO: 595155 - DNA, 120 bp, Artificial Sequence
  ENSG00000173702_7 (sequence is synthesized)
acatctctgtcaccaagatctgaaatgcgtgctgatgacaagtttgttaatgtaacaatagtaacaattttggcagaaaccacaagtgacaatgagaagactgtgactgagaaaattaat

SEQ ID NO: 595156 - DNA, 120 bp, Artificial Sequence
  ENSG00000173702_8 (sequence is synthesized)
aaagcaattagaagtagctcaagcaactttctaaactatgatttgacccttcggtgtgattattatggctgtaaccagactgcggatgactgcctcaatggtttagcatgcgattgcaaa

SEQ ID NO: 595157 - DNA, 120 bp, Artificial Sequence
  ENSG00000173702_9 (sequence is synthesized)
tctgacctgcaaaggcctaacccacagagccctttctgcgttgcttccagtctcaagtgtcctgatgcctgcaacgcacagcacaagcaatgcttaataaagaagagtggtggggcccct

SEQ ID NO: 595158 - DNA, 120 bp, Artificial Sequence
  ENSG00000173702_10 (sequence is synthesized)
gagtgtgcgtgcgtgcccggctaccaggaagatgctaatgggaactgccaaaagtgtgcatttggctacagtggactcgactgtaaggacaaatttcagctgatcctcactattgtgggc

SEQ ID NO: 595159 - DNA, 120 bp, Artificial Sequence
  ENSG00000173702_11 (sequence is synthesized)
aaaactgcggtcgacaggcttcaccaatcttggagcagaagggagcgtctttcctaaggtcaggataacggcctccagagacagccagatgcaaaatccctattcaagacacagcagcat

SEQ ID NO: 595160 - DNA, 120 bp, Artificial Sequence
  ENSG00000173702_12 (sequence is synthesized)
gccccgccctgactattagaatcataagaatgtggaacccgccatggcccccaaccaatgtacaagctattatttagagtgtttagaaagactgatggagaagtgagcaccagtaaagat

SEQ ID NO: 595161 - DNA, 120 bp, Artificial Sequence
  ENSG00000173702_13 (sequence is synthesized)
ctggcctccggggtttttcttccatctgacatctgccagcctctctgaatggaagttgtgaatgtttgcaacgaatccagctcacttgctaaataagaatctatgacattaaatgtagta

SEQ ID NO: 595162 - DNA, 120 bp, Artificial Sequence
  ENSG00000173702_14 (sequence is synthesized)
gatgctattagcgcttgtcagagaggtggttttcttcaatcagtacaaagtactgagacaatggttagggttgttttcttaattcttttcctggtagggcaacaagaaccatttccaatc

SEQ ID NO: 595163 - DNA, 120 bp, Artificial Sequence
  ENSG00000173702_15 (sequence is synthesized)
tagaggaaagctccccagcattgcttgctcctgggcaaacattgctcttgagttaagtgacctaattcccctgggagacatacgcatcaactgtggaggtccgaggggatgagaagggat

SEQ ID NO: 595164 - DNA, 120 bp, Artificial Sequence
  ENSG00000173702_16 (sequence is synthesized)
acccaccatctttcaagggtcacaagctcactctctgacaagtcagaatagggacactgcttctatccctccaatggagagattctggcaacctttgaacagcccagagcttgcaaccta

SEQ ID NO: 595165 - DNA, 120 bp, Artificial Sequence
  ENSG00000173702_17 (sequence is synthesized)
gcctcacccaagaagactggaaagagacatatctctcagctttttcaggaggcgtgcctgggaatccaggaactttttgatgctaattagaaggcctggactaaaaatgtccactatggg

SEQ ID NO: 595166 - DNA, 120 bp, Artificial Sequence
  ENSG00000173702_18 (sequence is synthesized)
gtgcactctacagtttttgaaatgctaggaggcagaaggggcagagagtaaaaaacatgacctggtagaaggaagagaggcaaaggaaactgggtggggaggatcaattagagaggaggc

SEQ ID NO: 595167 - DNA, 120 bp, Artificial Sequence
  ENSG00000173702_19 (sequence is synthesized)
acctgggatccaccttcttccttaggtcccctcctccatcagcaaaggagcacttctctaatcatgccctcccgaagactggctgggagaaggtttaaaaacaaaaaatccaggagtaag

SEQ ID NO: 595168 - DNA, 120 bp, Artificial Sequence
  ENSG00000173702_20 (sequence is synthesized)
agccttaggtcagtttgaaattggagacaaactgtctggcaaagggtgcgagagggagcttgtgctcaggagtccagccgtccagcctcggggtgtaggtttctgaggtgtgccattggg

SEQ ID NO: 595169 - DNA, 120 bp, Artificial Sequence
  ENSG00000173702_21 (sequence is synthesized)
gcctcagccttctctggtgacagaggctcagctgtggccaccaacacacaaccacacacacacaaccacacacacaaatgggggcaaccacatccagtacaagcttttacaaatgttatt

SEQ ID NO: 595170 - DNA, 120 bp, Artificial Sequence
  ENSG00000173702_22 (sequence is synthesized)
agtgtccttttttatttctaatgccttgtcctcttaaaagttattttatttgttattattatttgttcttgactgttaattgtgaatggtaatgcaataaagtgcctttgttagatggtg

SEQ ID NO: 595171 - DNA, 120 bp, Artificial Sequence
  ENSG00000173702_23 (sequence is synthesized)
agcgattttctctgcttggaagagagtcctctcagaagggaacaaatcggacggccttcattcattccttcctttcttccataaatctttactgagcacctgccatgtgccagctgttct

SEQ ID NO: 595172 - DNA, 120 bp, Artificial Sequence
  ENSG00000173702_24 (sequence is synthesized)
ggatgctggagacagaggagtggacagggaagagaaactctcatggaagttaggcaacagaagcttcaggagagcagagaccttcatcatcttgttcactgcttcatcttcgatacctga

SEQ ID NO: 595173 - DNA, 120 bp, Artificial Sequence
  ENSG00000173702_25 (sequence is synthesized)
aacagatggagacaaaatattacttttatagaagcttatttttgagaatgtggcttagggctccctccttctggatccttaccttcttgggcacaacaatcctgaatccaggttatctcc

SEQ ID NO: 595174 - DNA, 120 bp, Artificial Sequence
  ENSG00000173702_26 (sequence is synthesized)
ccaaatggaaactgcaggatctgagccaccaaccaaggcaactcagctgatgctgtaacaaccacagaaactgcgactagtggtcctacagtagctgcagctgataccactgaaactaat

SEQ ID NO: 595175 - DNA, 120 bp, Artificial Sequence
  ENSG00000173702_27 (sequence is synthesized)
tgctccccacaggggctctttaacactgtttcctattgctcactgtatttcaggtgtgcatttggctacagtggactcgactgtaaggacaaatttcagctgatcctcactattgtgggc

SEQ ID NO: 595176 - DNA, 120 bp, Artificial Sequence
  ENSG00000173705_0 (sequence is synthesized)
gcactcccggaccatgactgccgagggacccagcccgcctgcccgttggcacagacgcctccccgggctctgggcggcggcgctgctcctgctcggtctgccgcgcctttcggtgcgggc

SEQ ID NO: 595177 - DNA, 120 bp, Artificial Sequence
  ENSG00000173705_1 (sequence is synthesized)
ggatggaaagttctttgtgctggagtctcagaatggctctcagggcctacaactggaggctgctcggctttcctgcaagagcaggggcgctcacctggcatctgcagacgagctgcggag

SEQ ID NO: 595178 - DNA, 120 bp, Artificial Sequence
  ENSG00000173705_2 (sequence is synthesized)
agtggtacaggattgctcctttgcggtgtgcaccactggctggctagcagatggtactcttggaacaactgtgtgtagcaaaggaagtggagaacagcaaatcatgagagctgtcgatgt

SEQ ID NO: 595179 - DNA, 120 bp, Artificial Sequence
  ENSG00000173705_3 (sequence is synthesized)
gagaattgagagcaacccagttcctggtggcacatacagtgccctttgtattaaggatgaagagaagccgtgtggagacccgccttcgttcccacacaccatcctgcagggccgcaccgg

SEQ ID NO: 595180 - DNA, 120 bp, Artificial Sequence
  ENSG00000173705_4 (sequence is synthesized)
cttggaaatgggggatgaactgctgtacgtgtgtgccccaggccacatcatgggccaccgggagaccgccttcaccttgctatgtaacagctgtggggagtggtacggcctggtgcaggc

SEQ ID NO: 595181 - DNA, 120 bp, Artificial Sequence
  ENSG00000173705_5 (sequence is synthesized)
ctgtgggaaagatgaggctgaggcacacattgactatgaagataacttccctgatgacagatctgtgtcattcagagagctcatggaggattcccggacagaggcagatgaggacagggg

SEQ ID NO: 595182 - DNA, 120 bp, Artificial Sequence
  ENSG00000173705_6 (sequence is synthesized)
tcagggagactcctctgaggaggctccaaaacaggaccgtctggtctccatttctgtggggagagaaaacatagcccgggataaagtctttgtgccaaccacaggcttgcctggtgctgg

SEQ ID NO: 595183 - DNA, 120 bp, Artificial Sequence
  ENSG00000173705_7 (sequence is synthesized)
gagcagtgtccccgcagattcaccaggatcacggctgctccagaagcacttgttctggtttcctgctgaggctttccacaagcctgggttggaaaaggaggtggatgatgacaccaaaaa

SEQ ID NO: 595184 - DNA, 120 bp, Artificial Sequence
  ENSG00000173705_8 (sequence is synthesized)
gcagttttctgctggagacaaccacagtggtgtaaaattggtcccaggtgaacctgaaaccaaggtgatctacggcaacactgatggtccctcggggccatttgtgggcaagaatgacag

SEQ ID NO: 595185 - DNA, 120 bp, Artificial Sequence
  ENSG00000173705_9 (sequence is synthesized)
caaggcaggagatccagtggtgagcagcagtgatgagtcctggttagatggctaccctgtgacagagggggcttggaggaagacagaggcagaagaggaagaagatggggacagagggga

SEQ ID NO: 595186 - DNA, 120 bp, Artificial Sequence
  ENSG00000173705_10 (sequence is synthesized)
tgggtcagtagggctggatgaaaacgtcctagttactcctgatcagcccattcttgtggaagttaagaagcccaagagtagcaccctcacaccaagcgagggcatgacccatagttcagt

SEQ ID NO: 595187 - DNA, 120 bp, Artificial Sequence
  ENSG00000173705_11 (sequence is synthesized)
tcttccatctcaaatgctagatgtggaagctttggcgctcagacccgtgaatgcttccgagactgagggcattggggatggtgacttgacgaagtaccagtcaactctaccctggagatt

SEQ ID NO: 595188 - DNA, 120 bp, Artificial Sequence
  ENSG00000173705_12 (sequence is synthesized)
catcacagaggaatctcccatggccaccctgtcctatgagctcaccagctccaccctggagatattaacagtgaacactgtcaagcagacacctaaccacatcccctcaacgatcatggc

SEQ ID NO: 595189 - DNA, 120 bp, Artificial Sequence
  ENSG00000173705_13 (sequence is synthesized)
aaccacccagcctccagtagaaaccactgttcctgagatccaggatagcttcccatacctgctgtctgaagacttctttggacaggaaggccccgggccaggtgcaagtgaggagcttca

SEQ ID NO: 595190 - DNA, 120 bp, Artificial Sequence
  ENSG00000173705_14 (sequence is synthesized)
tcccaccttggagtcgtgtgtgggggacggatgtcctggcctcagcagaggccctgtgatcgccaccattgtcaccgtcctgtgcctactgctgctcctggcaggtgtggggatggtgtg

SEQ ID NO: 595191 - DNA, 120 bp, Artificial Sequence
  ENSG00000173705_15 (sequence is synthesized)
gggctaccgcaagtgccagcacaagagctctgtgtacaagctgaatgttggccagcggcaggctcggcactaccaccagcagatcgagatggagaaggtctaggcacctttggagtgggt

SEQ ID NO: 595192 - DNA, 120 bp, Artificial Sequence
  ENSG00000173705_16 (sequence is synthesized)
tctcccaaagccacttgggaggaaaataactgtgacacatcacacgataattcactagagcatgacgcaggtggactgaggctcatcattttttcctcagccctttgttttataggctga

SEQ ID NO: 595193 - DNA, 120 bp, Artificial Sequence
  ENSG00000173705_17 (sequence is synthesized)
gaagtgtctctggagcacctgggagggcagggaggctttggtgacatcatcactcatgtcaatgtctcctccaccatctgccctggaattgactacactaatcccagacctgtgcttggg

SEQ ID NO: 595194 - DNA, 120 bp, Artificial Sequence
  ENSG00000173705_18 (sequence is synthesized)
ccctgtttccagtgtgaggtcaaaaatcgcctcttccttcatcacagtattatctttttttttttgagacagagtctcatgctgttgcccaggctggagtgcagtgtcccgatctgagct

SEQ ID NO: 595195 - DNA, 120 bp, Artificial Sequence
  ENSG00000173705_19 (sequence is synthesized)
ctgccctccttagcctcccaaagtgctaggattccaggtgtgagccacatcacagtattacctttttgaagaaagaaaatcaccagcttcatgccctgaaattttataaatagtcatgat

SEQ ID NO: 595196 - DNA, 120 bp, Artificial Sequence
  ENSG00000173705_20 (sequence is synthesized)
gtcatgataaaccaagtgtatgagagcagtattatctaggacatggatattgaattattgggagaggaatatggaagaataatgggttgtttccttttaatgttgtgatgttgctgaggg

SEQ ID NO: 595197 - DNA, 120 bp, Artificial Sequence
  ENSG00000173705_21 (sequence is synthesized)
cagatgaaccaagagccaggacacagtctagaagctttgaggtttcttttttcattgtttcttgaaattagaatttaagactgacattttgttgggggagttgaggagtgaagaaacaca

SEQ ID NO: 595198 - DNA, 120 bp, Artificial Sequence
  ENSG00000173705_22 (sequence is synthesized)
catccccctctgttccctccattctgtgggacagtctgtcatttattttattttattttcaatatttcatggttaaggatttgccattattttttaaaaacaaagttagctttgtaccag

SEQ ID NO: 595199 - DNA, 120 bp, Artificial Sequence
  ENSG00000173705_23 (sequence is synthesized)
taagtaccatttcctctcagaagcagtggcctagttgtccttgaccagtctgtgcctaggaatgtcttggaatttttgccaggactaacaaaactcagtccttggtttcctctctcagga

SEQ ID NO: 595200 - DNA, 120 bp, Artificial Sequence
  ENSG00000173705_24 (sequence is synthesized)
ttaaccatttctctgaactccagtaagagagaatgacacgggagaaaaaaaaaagaaatgttttcagagggccgaacaccaggttatcaagtatgggcacatacttgatggagaagcaga

SEQ ID NO: 595201 - DNA, 120 bp, Artificial Sequence
  ENSG00000173705_25 (sequence is synthesized)
agaatctgtgaaagaatatgaaatgatctgtgctgatctgttctctagtgtggaaactgggagctctgtggaaacagaatccatcctgtctgttgggtaacccatttcgtagcatctaaa

SEQ ID NO: 595202 - DNA, 120 bp, Artificial Sequence
  ENSG00000173705_26 (sequence is synthesized)
tcatcttagggtggctcagcgaggatggtttatggcagtggttctcaaagtgtggtcctcagaccagtagcatcagcgtcacctgggaatttgttggagatgcaaattctctagtcccac

SEQ ID NO: 595203 - DNA, 120 bp, Artificial Sequence
  ENSG00000173705_27 (sequence is synthesized)
cctggactcaggaaacaggaaccctgggagtagggcccagttctgtttttaacaagccctccaggtgattttgatatgcactcaagtttgagagcctgttggtttataataatctcaaat

SEQ ID NO: 595204 - DNA, 120 bp, Artificial Sequence
  ENSG00000173705_28 (sequence is synthesized)
gtgaacttcgaggccagctgaagccctaaaggcacagatgagtatgtggtgtgtgttgtgtggaagtcaggcatggctgtgtgcagctgaggtggcatttgaagctgcctaaatgccacc

SEQ ID NO: 595205 - DNA, 120 bp, Artificial Sequence
  ENSG00000173705_29 (sequence is synthesized)
tgcaatagtctcctgtatgttggcacagaaatgaaacatgttatatttttctaatatgaatcaccttcttagaaatagttatcagtggtaaaaagtgatgaatgcaacacatttattttg

SEQ ID NO: 595206 - DNA, 120 bp, Artificial Sequence
  ENSG00000173705_30 (sequence is synthesized)
agacaccatagcagtctaagtgtttttgtgtggtagagggaaatcctgatcttttttatgattgaaaaattgttggtggtgttttacctaaggaaaaaaaacattcgcaacatgttttct

SEQ ID NO: 595207 - DNA, 120 bp, Artificial Sequence
  ENSG00000173705_31 (sequence is synthesized)
accctgccacctcttttcagcaagctttggaaaagtaataggcgaagtagctgtaaagagaggcagcataatcaaagatcttattccccatagttgggtaaaataaagcctgaaggtacc

SEQ ID NO: 595208 - DNA, 120 bp, Artificial Sequence
  ENSG00000173705_32 (sequence is synthesized)
aactagaatacctgtgcatcagacgaagtcaagaacaataggaataaaatgctttctgcatgtagccaaagcaaaacataatagaataaaagccagagactgtatatatttataaattag

SEQ ID NO: 595209 - DNA, 120 bp, Artificial Sequence
  ENSG00000173705_33 (sequence is synthesized)
atcctaatctactgcaagataacttttctatttttaactatataaaataacctctgtctcagcattgggactgtgttagcaactattattgtggaataacccagaacattggatttatac

SEQ ID NO: 595210 - DNA, 120 bp, Artificial Sequence
  ENSG00000173705_34 (sequence is synthesized)
attacaaattattaatacagtgtattaataaatttattacaaattattaatacaggtaaatgttttatttgtagacatggactgtgaaataaacccaacacatcagtttttaagttctta

SEQ ID NO: 595211 - DNA, 120 bp, Artificial Sequence
  ENSG00000173705_35 (sequence is synthesized)
actgtgaaataaacccaacacatcagtttttaagttcttattggtgtggtatcctctaaattaatgttatagaatctaaaaattcatgttgaaagggaatgattaaaacaatgtaaatct

SEQ ID NO: 595212 - DNA, 120 bp, Artificial Sequence
  ENSG00000173705_36 (sequence is synthesized)
aaattgtatgtcatgcatgttttgagaatggtgaatgtttaatgctcatgaaaattgggggagggggttctattaacacaaagcttctgagatatttaaaataaataattattgccccaa

SEQ ID NO: 595213 - DNA, 80 bp, Artificial Sequence
  ENSG00000173706_0 (sequence is synthesized)
gggcatgtgagcgcgggcgggcgccgtcaccatggcctcgccgcgcgcctcgcggtggccgccgccgctcctgctgctgt

SEQ ID NO: 595214 - DNA, 80 bp, Artificial Sequence
  ENSG00000173706_1 (sequence is synthesized)
ctcgcggtggccgccgccgctcctgctgctgttgctgccgctgctgctgctgccgccggcggcccccgggacgcgggacc

SEQ ID NO: 595215 - DNA, 80 bp, Artificial Sequence
  ENSG00000173706_2 (sequence is synthesized)
cggctcgccgcgcgctgagcctggcgcccctcgcgggagcggggctggagctgcagctggagcgccgcccggagcgcgag

SEQ ID NO: 595216 - DNA, 120 bp, Artificial Sequence
  ENSG00000173706_3 (sequence is synthesized)
ctgagccaggcgccgcgacacagcggggaccctccggccgggcccccagaggcgggagcgcggatgctgcctggaaacattggccagaaagtaacactgaggcccatgtagaaaacatca

SEQ ID NO: 595217 - DNA, 120 bp, Artificial Sequence
  ENSG00000173706_4 (sequence is synthesized)
ccttctatcagaatcaagaggacttttcaacagtgtcctccaaagagggcgtgatggttcagacctctgggaagagccatgctgcttcggatgctccagaaaacctcactctactcgctg

SEQ ID NO: 595218 - DNA, 120 bp, Artificial Sequence
  ENSG00000173706_5 (sequence is synthesized)
aaacagcagatgctagaggaaggagcggctcttcaagtagaacaaacttcaccattttgcctgttgggtactcactggagatagcaacagctctgacttcccagagtggcaacttagcct

SEQ ID NO: 595219 - DNA, 120 bp, Artificial Sequence
  ENSG00000173706_6 (sequence is synthesized)
cagaaagtcttcacctgccatccagcagttcagagttcgatgaaagaattgccgcttttcaaacaaagagtggaacagcctcggagatgggaacagagagggcgatggggctgtcagaag

SEQ ID NO: 595220 - DNA, 120 bp, Artificial Sequence
  ENSG00000173706_7 (sequence is synthesized)
aatggactgtgcacagccaagaggccaccacttcggcttggagcccgtcctttcttcctgctttggagatgggagagctgaccacgccttctaggaagagaaattcctcaggaccagatc

SEQ ID NO: 595221 - DNA, 120 bp, Artificial Sequence
  ENSG00000173706_8 (sequence is synthesized)
tctcctggctgcatttctacaggacagcagcttcctctcctctcttagacctttcctcatcttctgaaagtacagagaagcttaacaactccactggcctccagagctcctcagtcagtc

SEQ ID NO: 595222 - DNA, 120 bp, Artificial Sequence
  ENSG00000173706_9 (sequence is synthesized)
aaacaaagacaatgcatgttgccaccgtgttcactgatggtggcccgagaacgctgcgatctttgacggtcagtctgggacctgtgagcaagacagaaggcttccccaaggactccagaa

SEQ ID NO: 595223 - DNA, 120 bp, Artificial Sequence
  ENSG00000173706_10 (sequence is synthesized)
ttgccacgacttcatcctcagtccttctttcaccctctgcagtggaatcgagaagaaacagtagagtaactgggaatccaggggatgaggaattcattgaaccatccacagaaaatgaat

SEQ ID NO: 595224 - DNA, 120 bp, Artificial Sequence
  ENSG00000173706_11 (sequence is synthesized)
ttggacttacgtctttgcgttggcaaaatgattccccaacctttggagaacatcagcttgccagcagctctgaggtgcaaaatggaagtcccatgtctcagactgagactgtgtctaggt

SEQ ID NO: 595225 - DNA, 120 bp, Artificial Sequence
  ENSG00000173706_12 (sequence is synthesized)
cagtcgcacccatgagaggtggagagatcactgcacactggctcttgaccaacagcacaacatctgcagatgtgacaggaagctctgcttcatatcctgaaggtgtgaatgcttcagtgt

SEQ ID NO: 595226 - DNA, 120 bp, Artificial Sequence
  ENSG00000173706_13 (sequence is synthesized)
tgacccagttctcagactctactgtacagtctggaggaagtcacacagcattgggagataggagttattcagagtcttcatctacatcttcctcggaaagcttgaattcatcagcaccac

SEQ ID NO: 595227 - DNA, 120 bp, Artificial Sequence
  ENSG00000173706_14 (sequence is synthesized)
gtggagaacgttcgatcgctgggattagctacggtcaagtgcgtggcacagctattgaacaaaggacttccagcgaccacacagaccacacctacctgtcatctactttcaccaaaggag

SEQ ID NO: 595228 - DNA, 120 bp, Artificial Sequence
  ENSG00000173706_15 (sequence is synthesized)
aacgggcgttactgtccattacagataacagttcatcctcagacattgtggagagctcaacttcttatattaaaatctcaaactcttcacattcagagtattcctccttttttcatgctc

SEQ ID NO: 595229 - DNA, 120 bp, Artificial Sequence
  ENSG00000173706_16 (sequence is synthesized)
agactgagagaagtaacatctcatcctatgacggggaatatgctcagccttctactgagtcgccagttctgcatacatccaaccttccgtcctacacacccaccattaatatgccgaaca

SEQ ID NO: 595230 - DNA, 87 bp, Artificial Sequence
  ENSG00000173706_17 (sequence is synthesized)
ttcttcttcagggcctcctttgcctctgccctctgtgtcacaatcccaccatttattttcatcaattttaccatcaaccagggcctc

SEQ ID NO: 595231 - DNA, 120 bp, Artificial Sequence
  ENSG00000173706_18 (sequence is synthesized)
accatttattttcatcaattttaccatcaaccagggcctctgtgcatctactaaagtctacctctgatgcatccacaccatggtcttcctcaccatcacctttaccagtatccttaacga

SEQ ID NO: 595232 - DNA, 120 bp, Artificial Sequence
  ENSG00000173706_19 (sequence is synthesized)
catctacatctgccccactttctgtctcacaaacaaccttgccacagtcatcttctacccctgtcctgcccagggcaagggagactcctgtgacttcatttcagacatcaacaatgacat

SEQ ID NO: 595233 - DNA, 120 bp, Artificial Sequence
  ENSG00000173706_20 (sequence is synthesized)
cattcatgacaatgctccatagtagtcaaactgcagaccttaagagccagagcaccccacaccaagagaaagtcattacagaatcaaagtcaccaagcctggtgtctctgcccacagagt

SEQ ID NO: 595234 - DNA, 120 bp, Artificial Sequence
  ENSG00000173706_21 (sequence is synthesized)
ccaccaaagctgtaacaacaaactctcctttgcctccatccttaacagagtcctccacagagcaaacccttccagccacaagcaccaacttagcacaaatgtctccaactttcacaacta

SEQ ID NO: 595235 - DNA, 120 bp, Artificial Sequence
  ENSG00000173706_22 (sequence is synthesized)
ccattctgaagacctctcagcctcttatgaccactcctggcaccctgtcaagcacagcatctctggtcactggccctatagccgtacagactacagctggaaaacagctctcgctgaccc

SEQ ID NO: 595236 - DNA, 120 bp, Artificial Sequence
  ENSG00000173706_23 (sequence is synthesized)
atcctgaaatactagttcctcaaatctcaacagaaggtggcatcagcacagaaaggaaccgagtgattgtggatgctaccactggattgatccctttgaccagtgtacccacatcagcaa

SEQ ID NO: 595237 - DNA, 120 bp, Artificial Sequence
  ENSG00000173706_24 (sequence is synthesized)
aagaaatgaccacaaagcttggcgttacagcagagtacagcccagcttcacgttccctcggaacatctccttctccccaaaccacagttgtttccacggctgaagacttggctcccaaat

SEQ ID NO: 595238 - DNA, 120 bp, Artificial Sequence
  ENSG00000173706_25 (sequence is synthesized)
ctgccacctttgctgttcagagcagcacacagtcaccaacaacagtgtcctcttcagcctcagtcaacagctgtgctgtgaacccttgtcttcacaatggcgaatgcgtcgcagacaaca

SEQ ID NO: 595239 - DNA, 120 bp, Artificial Sequence
  ENSG00000173706_26 (sequence is synthesized)
ccagccgtggctaccactgcaggtgcccgccttcctggcaaggggatgattgcagtgtggatgtgaatgagtgcctgtcgaacccctgcccatccacagccatgtgcaacaatactcagg

SEQ ID NO: 595240 - DNA, 120 bp, Artificial Sequence
  ENSG00000173706_27 (sequence is synthesized)
gatcctttatctgcaaatgcccggttgggtaccagttggaaaaagggatatgcaatttggttagaaccttcgtgacagagtttaaattaaagagaacttttcttaatacaactgtggaaa

SEQ ID NO: 595241 - DNA, 120 bp, Artificial Sequence
  ENSG00000173706_28 (sequence is synthesized)
aacattcagacctacaagaagttgaaaatgagatcaccaaaacgttaaatatgtgtttttcagcgttacctagttacatccgatctacagttcacgcctctagggagtccaacgcggtgg

SEQ ID NO: 595242 - DNA, 120 bp, Artificial Sequence
  ENSG00000173706_29 (sequence is synthesized)
tgatctcactgcaaacaaccttttccctggcctccaatgtgacgctatttgacctggctgataggatgcagaaatgtgtcaactcctgcaagtcctctgctgaggtctgccagctcttgg

SEQ ID NO: 595243 - DNA, 120 bp, Artificial Sequence
  ENSG00000173706_30 (sequence is synthesized)
gatctcagaggcggatctttagagcgggcagcttgtgcaagcggaagagtcccgaatgtgacaaagacacctccatctgcactgacctggacggcgttgccctgtgccagtgcaagtcgg

SEQ ID NO: 595244 - DNA, 120 bp, Artificial Sequence
  ENSG00000173706_31 (sequence is synthesized)
gatactttcagttcaacaagatggaccactcctgccgagcatgtgaagatggatataggcttgaaaatgaaacctgcatgagttgcccatttggccttggtggtctcaactgtggaaacc

SEQ ID NO: 595245 - DNA, 120 bp, Artificial Sequence
  ENSG00000173706_32 (sequence is synthesized)
cctatcagcttatcactgtggtgatcgcagccgcgggaggtgggctcctgctcatcctaggcatcgcactgattgttacctgttgcagaaagaataaaaatgacataagcaaactcatct

SEQ ID NO: 595246 - DNA, 120 bp, Artificial Sequence
  ENSG00000173706_33 (sequence is synthesized)
tcaaaagtggagatttccaaatgtccccgtatgctgaataccccaaaaatcctcgctcacaagaatggggccgagaagctattgaaatgcatgagaatggaagtaccaaaaacctcctcc

SEQ ID NO: 595247 - DNA, 120 bp, Artificial Sequence
  ENSG00000173706_34 (sequence is synthesized)
agatgacggatgtgtactactcgcctacaagtgtaaggaatccagaacttgaacgaaacggactctacccggcctacactggactgccaggatcacggcattcttgcattttccccggac

SEQ ID NO: 595248 - DNA, 120 bp, Artificial Sequence
  ENSG00000173706_35 (sequence is synthesized)
agtataacccgtctttcatcagtgatgaaagcagaagaagagactacttttaagtccaggagagagagggactcattgctctgagccagtcacctgggacctctgctcagaggaccgcac

SEQ ID NO: 595249 - DNA, 120 bp, Artificial Sequence
  ENSG00000173706_36 (sequence is synthesized)
caggaggctgcgcccaggatttgtcgggagccacgctgagtggcaagcaggaagagggacaggcatgcggggcgtgaccacagtggaggagacaggtggatgtggaaccacaggctgctc

SEQ ID NO: 595250 - DNA, 120 bp, Artificial Sequence
  ENSG00000173706_37 (sequence is synthesized)
attcagcacctttgttgttactgtgaacgtgaatgtgggccagtatcaagagagtctctctgagtgactgcaccatggcactggcaccagggcgactattagccagggcagaccactaga

SEQ ID NO: 595251 - DNA, 120 bp, Artificial Sequence
  ENSG00000173706_38 (sequence is synthesized)
tttgagactgttccagaaagaaggcttcctttcccgagacacttccataggcagcaatttggtgattcatttgcagcaaaatactggcttgttaattattttcctgcccagcgcctgcgt

SEQ ID NO: 595252 - DNA, 120 bp, Artificial Sequence
  ENSG00000173706_39 (sequence is synthesized)
gctaaacaacagatgaggatgagcgtaccactgaagtctgaagatgtcgccattgaacggacagtgttttcatatgtttctaggttgtcttatgctacagtttccaagccagcccccaca

SEQ ID NO: 595253 - DNA, 120 bp, Artificial Sequence
  ENSG00000173706_40 (sequence is synthesized)
gtgaggaaatgtgtgaggcaccgcacacaactgcaatgtgttttttaagtcaaggtgacacatgtatttaagattttttttttaaatctctttgcagttaaatctcactttttcaaacaa

SEQ ID NO: 595254 - DNA, 120 bp, Artificial Sequence
  ENSG00000173706_41 (sequence is synthesized)
gcctggatcagggcaaaacaacttatatttggttttagctggaggctcagcaggcagattgcaggcaggggggcacttttcatccatgagggcccagcctggggcctgggactcgatcac

SEQ ID NO: 595255 - DNA, 120 bp, Artificial Sequence
  ENSG00000173706_42 (sequence is synthesized)
cattgtggaggccagaggcagctgcgtatggaggagaaatgtcaaactgaacgcaggtttcaccactctaggaaagcagcttgttgagcccctgcagctggatgtggttagagggatggg

SEQ ID NO: 595256 - DNA, 120 bp, Artificial Sequence
  ENSG00000173706_43 (sequence is synthesized)
ctgaataggcaggttagatttcctgcatcaacagtgctttgggaagctgtgtggattcctgaggaagaacagggagccgagatggagccacacatgagtttgctcaccggctactgcagc

SEQ ID NO: 595257 - DNA, 120 bp, Artificial Sequence
  ENSG00000173706_44 (sequence is synthesized)
actttgtacccagaatctcatgtccacaaaccccatgtaaactttcaaccactcaaagctgtttattcggctgaagaaataacttttttttctcacccagtcatttgtacctcttcatat

SEQ ID NO: 595258 - DNA, 120 bp, Artificial Sequence
  ENSG00000173706_45 (sequence is synthesized)
ggctatgtcgcaccctccagaaacgtggttatacttccagtcagtgtgggagaactgaagacttccggttggtcgaggaactgagggttgaccttcgggaaggaagttccactcatctta

SEQ ID NO: 595259 - DNA, 120 bp, Artificial Sequence
  ENSG00000173706_46 (sequence is synthesized)
tttattatgcctgtgatgtgggtcctgccagggagacatccagtactcggtgtctttaattgccacctggggaactgtgtttattggccttctttggggcatcctggttttggatgaagt

SEQ ID NO: 595260 - DNA, 120 bp, Artificial Sequence
  ENSG00000173706_47 (sequence is synthesized)
gaggggaatacagaggtaaaagaattgtctccaccctgaagcggggagtcccgcttcacatttctggaaatggtgcagccactggggacagttctgccccgggcatggttgtttcttcaa

SEQ ID NO: 595261 - DNA, 120 bp, Artificial Sequence
  ENSG00000173706_48 (sequence is synthesized)
ggtcctctaaatataatccctattcttacataatccttggccctgatggttttaagcaagaactcctgtgtcccatggtctccaccactcaccatcaccctgctgtagcaagagtcctag

SEQ ID NO: 595262 - DNA, 120 bp, Artificial Sequence
  ENSG00000173706_49 (sequence is synthesized)
tcaggggaggtgcattttagtagttacattgcacttatccatgagataaataaaaggagaactgtttttatcagtggaggctaacctaaaatttcaaagtgtcgcctttttgaaatcttg

SEQ ID NO: 595263 - DNA, 120 bp, Artificial Sequence
  ENSG00000173706_50 (sequence is synthesized)
ggcctctctctctgtagaaccaatggccctttgtggctcacggcctcgcacctaactggagagttctgagctcctgcagctcacctgagcccacagactaggcttcttggctccttccgc

SEQ ID NO: 595264 - DNA, 120 bp, Artificial Sequence
  ENSG00000173706_51 (sequence is synthesized)
agcatgcctgctcacccccagaacccgcagctgtgggaagagccatgtagggaggctattcccaggcatacacttccactgccttcagctgacgtcacagctgacaaatcatctcctcta

SEQ ID NO: 595265 - DNA, 120 bp, Artificial Sequence
  ENSG00000173706_52 (sequence is synthesized)
tcggagccagaagacttcagctccacaaaatgaagtgttctgtcctgaaaacattcttgggaagaatcccaacatcgagaaaacggtgtcctgtgagttccaacaatgcttcttgttcat

SEQ ID NO: 595266 - DNA, 120 bp, Artificial Sequence
  ENSG00000173706_53 (sequence is synthesized)
gggtttcttccgtatggagtggattaagagtgttttattttgttgttctaactgagaaaaaaaggaggcacccacaaggttgaggtcacacagtctccacagtttccaggaggcgtttgg

SEQ ID NO: 595267 - DNA, 120 bp, Artificial Sequence
  ENSG00000173706_54 (sequence is synthesized)
gggtggggaaggcacctccagagcatgaggctctaaggggacatgagtaaagcatgtctgtgacccagtgaggaagggagaggccagctgcactcctgcacggggttcctagctgcagaa

SEQ ID NO: 595268 - DNA, 120 bp, Artificial Sequence
  ENSG00000173706_55 (sequence is synthesized)
gggtcccgcctaggccgaggggaaacacctgatagcagaagaggcctggatgcacacctggcacgccgaggctctccgcccagacacagtgctccatgtcagcccctgcacctggggtgt

SEQ ID NO: 595269 - DNA, 120 bp, Artificial Sequence
  ENSG00000173706_56 (sequence is synthesized)
gtgattcacgtgcacagatgccacaatcctgcaccaatatcccacagatgggggaaggtgagaggaaggggcaagtgatgtgtaactgctcaagagatgcttaaacctccatagagagga

SEQ ID NO: 595270 - DNA, 120 bp, Artificial Sequence
  ENSG00000173706_57 (sequence is synthesized)
gccgggcgcaggggcatctgtgtgtcccgtcacacactgcagcagggaagggtggctggctggctccctggcatcagtggtttggtttaagctccagagggtcttattgccattgtcttt

SEQ ID NO: 595271 - DNA, 120 bp, Artificial Sequence
  ENSG00000173706_58 (sequence is synthesized)
tcctctgccccttgagccagcctaaggccctggagtctgtttctttaggcggatgaactgacatgctcctaccatgaccaggctctgggcaaggctcctcacagtatccttgagaggtgg

SEQ ID NO: 595272 - DNA, 120 bp, Artificial Sequence
  ENSG00000173706_59 (sequence is synthesized)
gcatggaagtgcccatttctcaggtacagaaaccttcagagaggataaatagcttgccctgtagaagcaggactgaaacccttgtctgcctgactcccccagctactctgcccactgtag

SEQ ID NO: 595273 - DNA, 120 bp, Artificial Sequence
  ENSG00000173706_60 (sequence is synthesized)
ccccctgccttactgtcctggcacacccctcaccatcctgtataccttaaatatcaaagagggcaagagagaaagggctttaaagataagttatttttttaaggaaccttaatattattt

SEQ ID NO: 595274 - DNA, 120 bp, Artificial Sequence
  ENSG00000173706_61 (sequence is synthesized)
ttaagaagtaaccaaattagtgacgtgaaatgcaaaaaaaaaaaaaaaaaaatgctgactacccttttgaaaatgtgctttcagattgttttttatatgtaattcttagacacttgtcat

SEQ ID NO: 595275 - DNA, 120 bp, Artificial Sequence
  ENSG00000173706_62 (sequence is synthesized)
taagaaaatagtggctggcttgtgctcagcaagaagcacactggcacgtggctttggtataggaagtggaaggcaaggacctgggtttctgacaagtgcagtcagacatacacatccatc

SEQ ID NO: 595276 - DNA, 120 bp, Artificial Sequence
  ENSG00000173706_63 (sequence is synthesized)
tgagagctgcttgccttgttcccgtggtaaggccatggctcccacatactggaagcatatttttgtgaactgttttcagaattgggaacatattcagtggaatgtcttaaacgctgacac

SEQ ID NO: 595277 - DNA, 120 bp, Artificial Sequence
  ENSG00000173706_64 (sequence is synthesized)
atcttcctcctttgaggggaagtatattttcagaagcagctaagacatttagagccaaaattgctgataggtggttcagtcaagttggctgatggcatctgaggtcaaaaactaagatgt

SEQ ID NO: 595278 - DNA, 120 bp, Artificial Sequence
  ENSG00000173706_65 (sequence is synthesized)
gacgattgagttcttaaagaggtaactcttaaagtgggcccaagggagaaggcagcatctttggactcctaggctggatggctacccaagaatatgccattgaaggatgacacctattca

SEQ ID NO: 595279 - DNA, 120 bp, Artificial Sequence
  ENSG00000173706_66 (sequence is synthesized)
gatgtgaaagttcccagagcaggcacctttgggtcacccaccacgtgtggctttttggtgcctgcatgaaactgtgttgccccctggtgagatgcccgggtgtcctgtaagccgatttaa

SEQ ID NO: 595280 - DNA, 120 bp, Artificial Sequence
  ENSG00000173706_67 (sequence is synthesized)
ctctgcctgaggaagaggagctgtccactccagttgcccttggctaagtttagcctaacacacagggttttgacccatagttctaaaatacacaaattttgagactacagcacttctttg

SEQ ID NO: 595281 - DNA, 120 bp, Artificial Sequence
  ENSG00000173706_68 (sequence is synthesized)
gaaagaggaagaatgcaaagttcagtatttcaatactttgtattttacttgaaattacccttagtagcatcttttttttcctgtctgaaagcttttgtgtggatgagaagggacatttca

SEQ ID NO: 595282 - DNA, 120 bp, Artificial Sequence
  ENSG00000173706_69 (sequence is synthesized)
tttcctcccttaacaaagtgtcattctgaggttctcatgtgtgtttttggaaatagagatactggttttgtagagtttgcctttgggtatgttttctttttttcttaaatctccaaggaa

SEQ ID NO: 595283 - DNA, 120 bp, Artificial Sequence
  ENSG00000173706_70 (sequence is synthesized)
gagaactgactaaaatagtaggaacatgaaagtattaaatgccaattaatttgttgtagtaaagtatcttcattagcgttatactccatcatatctggtgtaaactgctcacagaaaacc

SEQ ID NO: 595284 - DNA, 120 bp, Artificial Sequence
  ENSG00000173706_71 (sequence is synthesized)
ctatgaaaccaaagggggaccattcaggtctaaaaagcgacaggtccgagactgggtctgtcacctgggcattttcaaagaggacattttgaagaatttgcatattcagatttttaaaat

SEQ ID NO: 595285 - DNA, 120 bp, Artificial Sequence
  ENSG00000173706_72 (sequence is synthesized)
gcacttaacatacttcattacagatttcttgggtagggaggatgggataggccagggatgggatggagtcagttctgcctgggaaactaatccgaatcatttacctttctgtattaacct

SEQ ID NO: 595286 - DNA, 120 bp, Artificial Sequence
  ENSG00000173706_73 (sequence is synthesized)
tggcctgtcctaaaaagagaacgactgtttcatcatgagttgctctgagttttgttaatgtttgtgttggtggattgacggttaaatgaagcatttagctggaatatgaactttgggagt

SEQ ID NO: 595287 - DNA, 120 bp, Artificial Sequence
  ENSG00000173706_74 (sequence is synthesized)
tttcatgttgtcctggatttctctttgtaaacctttaaaccttagcccctggttgattgtgttaaacccattatgagaatgttatttaaagttgtattataattgcaacctccactaatt

SEQ ID NO: 595288 - DNA, 120 bp, Artificial Sequence
  ENSG00000173706_75 (sequence is synthesized)
attcagtactgtagcagcaaagtattatttgtaagaatttggttatttttatacttatatccactctaagtctggcgttctagtcagtaaaatgatgcaataaaattaatatcattttca

SEQ ID NO: 595289 - DNA, 120 bp, Artificial Sequence
  ENSG00000173706_76 (sequence is synthesized)
acccacaccttggctactgtcactggaaacggggaacgcacactgcggtctgtcaccctcaccaacaccagcatgagcacgacttctggggaagcaggcagccctgcagcggccatgcac

SEQ ID NO: 595290 - DNA, 120 bp, Artificial Sequence
  ENSG00000173706_77 (sequence is synthesized)
ctgcaaatgcccggttgggtaccagttggaaaaagggatatgcaatttgggtaagagacttagtctatttcggactttattccgtaccacaatatattttacaaggtaacatttgttatt

SEQ ID NO: 595291 - DNA, 120 bp, Artificial Sequence
  ENSG00000173706_78 (sequence is synthesized)
tttcttgctaaccaaaatcagtatttgtccaaggtataaacttaaggaatatagaaaaaagtggaagctattgtccattattctaatacttggagatagaacaccctactttgcattatg

SEQ ID NO: 595292 - DNA, 120 bp, Artificial Sequence
  ENSG00000173706_79 (sequence is synthesized)
aaataaacgtagtcaagaatgtaaatgaaccccatttttattccaaaaatagcaggctggccaggcacagtggctcatgccgataatccctgtaatcactttgggaggccaagatcgggg

SEQ ID NO: 595293 - DNA, 120 bp, Artificial Sequence
  ENSG00000173714_0 (sequence is synthesized)
agaggcgccagcagcctgcctgtgacaggcatcaggttagctggctcccactcgggtggcgcgcccaggatataaatccgggcgcgggcccctgctgtggctcctctccctgcacactca

SEQ ID NO: 595294 - DNA, 120 bp, Artificial Sequence
  ENSG00000173714_1 (sequence is synthesized)
ggagagggagcttccttctaaagacctttcttttatctgaagccgcacagcccggcaggctgtgctgacttggtggaggcagcagcggcagagcagcctgagcagcagcctgagcaggaa

SEQ ID NO: 595295 - DNA, 120 bp, Artificial Sequence
  ENSG00000173714_2 (sequence is synthesized)
acctgctggggtggggagggcaggtgtctgcagcccctgagaagaaggccctggtgggccccagaccctggcatcgtttcaggggaggtctctagccgccccagcctgcaccatgtgggc

SEQ ID NO: 595296 - DNA, 120 bp, Artificial Sequence
  ENSG00000173714_3 (sequence is synthesized)
cccaaggtgtcgccggttctggtctcgctgggagcaggtggcagcgctgctgctgctgctgctactgctcggggtgcccccgcgaagcctggcgctgccgcccatccgctattcccacgc

SEQ ID NO: 595297 - DNA, 120 bp, Artificial Sequence
  ENSG00000173714_4 (sequence is synthesized)
cggcatctgccccaacgacatgaatcccaacctctgggtggacgcacagagcacctgcaggcgggagtgtgagacggaccaggagtgtgagacctatgagaagtgctgccccaacgtatg

SEQ ID NO: 595298 - DNA, 120 bp, Artificial Sequence
  ENSG00000173714_5 (sequence is synthesized)
tgggaccaagagctgcgtggcggcccgctacatggacgtgaaagggaagaagggcccagtgggcatgcccaaggaggccacatgtgaccacttcatgtgtctgcagcagggctctgagtg

SEQ ID NO: 595299 - DNA, 120 bp, Artificial Sequence
  ENSG00000173714_6 (sequence is synthesized)
tgacatctgggatggccagcccgtgtgtaagtgcaaagaccgctgtgagaaggagcccagctttacctgcgcctcggacggcctcacctactataaccgctgctacatggatgccgaggc

SEQ ID NO: 595300 - DNA, 120 bp, Artificial Sequence
  ENSG00000173714_7 (sequence is synthesized)
ctgctccaaaggcatcacactggccgttgtaacctgccgctatcacttcacctggcccaacaccagccccccaccacctgagaccaccatgcaccccaccacagcctccccagagacccc

SEQ ID NO: 595301 - DNA, 120 bp, Artificial Sequence
  ENSG00000173714_8 (sequence is synthesized)
tgagctggacatggcggcccctgcgctgctcaacaaccctgtgcaccagtcggtcaccatgggtgagacagtgagcttcctctgtgatgtggtgggccggccccggcctgagatcacctg

SEQ ID NO: 595302 - DNA, 120 bp, Artificial Sequence
  ENSG00000173714_9 (sequence is synthesized)
ggagaagcagttggaggatcgggagaatgtggtcatgcggcccaaccatgtgcgtggcaacgtggtggtcaccaacattgcccagctggtcatctataacgcccagctgcaggatgctgg

SEQ ID NO: 595303 - DNA, 120 bp, Artificial Sequence
  ENSG00000173714_10 (sequence is synthesized)
gatctacacctgcacggcccggaacgtggctggggtcctgagggctgatttcccgctgtcggtggtcaggggtcatcaggctgcagccacctcagagagcagccccaatggcacggcttt

SEQ ID NO: 595304 - DNA, 120 bp, Artificial Sequence
  ENSG00000173714_11 (sequence is synthesized)
cccggcggccgagtgcctgaagcccccagacagtgaggactgtggcgaagagcagacccgctggcacttcgatgcccaggccaacaactgcctgaccttcaccttcggccactgccaccg

SEQ ID NO: 595305 - DNA, 120 bp, Artificial Sequence
  ENSG00000173714_12 (sequence is synthesized)
taacctcaaccactttgagacctatgaggcctgcatgctggcctgcatgagcgggccgctggccgcgtgcagcctgcccgccctgcaggggccctgcaaagcctacgcgcctcgctgggc

SEQ ID NO: 595306 - DNA, 120 bp, Artificial Sequence
  ENSG00000173714_13 (sequence is synthesized)
ttacaacagccagacgggccagtgccagtcctttgtctatggtggctgcgagggcaatggcaacaactttgagagccgtgaggcctgtgaggagtcgtgccccttccccagggggaacca

SEQ ID NO: 595307 - DNA, 120 bp, Artificial Sequence
  ENSG00000173714_14 (sequence is synthesized)
ctttgtcatcctgggccgagtctctgagctgaccgaggagcctgactcgggccgcgccctggtgactgtggatgaggtcctaaaggatgagaaaatgggcctcaagttcctgggccagga

SEQ ID NO: 595308 - DNA, 120 bp, Artificial Sequence
  ENSG00000173714_15 (sequence is synthesized)
gccattggaggtcactctgcttcacgtggactgggcatgcccctgccccaacgtgaccgtgagcgagatgccgctcatcatcatgggggaggtggacggcggcatggccatgctgcgccc

SEQ ID NO: 595309 - DNA, 120 bp, Artificial Sequence
  ENSG00000173714_16 (sequence is synthesized)
cgatagctttgtgggcgcatcgagtgcccgccgggtcaggaagcttcgtgaggtcatgcacaagaagacctgtgacgtcctcaaggagtttcttggcttgcactgaagccccccacccct

SEQ ID NO: 595310 - DNA, 120 bp, Artificial Sequence
  ENSG00000173714_17 (sequence is synthesized)
ccctgccccctccctggccttcttccacctatccaccccaatgcctctcagcaaactgggcgaggtcagattagacaggcttgggacagcagggaaacatcaaccgacgtgtcacagaaa

SEQ ID NO: 595311 - DNA, 120 bp, Artificial Sequence
  ENSG00000173714_18 (sequence is synthesized)
aagccacagaaggtctcagatcagcatctattctttgggttcaataaggggttcatatcttttttagctgagggggacaagaggagaagtcagtggacacatggaagttactcgtgacca

SEQ ID NO: 595312 - DNA, 120 bp, Artificial Sequence
  ENSG00000173714_19 (sequence is synthesized)
ccagcttgctcagatattctcctcctcccctcactggccccacacccctggctctcccagtcaccctcccctagccagtctcccagcaagggtttaagagatggccgctgtgtgctggtc

SEQ ID NO: 595313 - DNA, 120 bp, Artificial Sequence
  ENSG00000173714_20 (sequence is synthesized)
acaggaagtgttgaatggattggcttgcaaagggggtaggtggggagagataggagggcccagggactcatgggacacctttcccacagcctcctcgattgctgtgagcagaggccactc

SEQ ID NO: 595314 - DNA, 120 bp, Artificial Sequence
  ENSG00000173714_21 (sequence is synthesized)
ggagttaggggcatgggcaatagcaagctggcggcagagtccagcccagcatatgacttgccctgaatggaagctgctgaaacgggtgcctttgggtggtggtcggcttgcctctgaggc

SEQ ID NO: 595315 - DNA, 120 bp, Artificial Sequence
  ENSG00000173714_22 (sequence is synthesized)
caccacggcaccagcagaatacgtatttcttctccttggctgcactggtttgtcgatctagttcagttcaactcagtggatgttctctgaatgcttactgggtgccaggaccacagagag

SEQ ID NO: 595316 - DNA, 120 bp, Artificial Sequence
  ENSG00000173714_23 (sequence is synthesized)
atgttagtcactgcccagttcttagagccccaacacagataccctcatcccagggcccccagacacacccctccgctggactcacaactgtctggagtttctgtctgatggatggtgtgc

SEQ ID NO: 595317 - DNA, 120 bp, Artificial Sequence
  ENSG00000173714_24 (sequence is synthesized)
tttcatatgccactggcttccttggacatagatcagacaaaagccccgggatctgtttggtagcaggagaaatgaaggaagatgaaaaagcaggcagggaagggggtagtaaaggactga

SEQ ID NO: 595318 - DNA, 120 bp, Artificial Sequence
  ENSG00000173714_25 (sequence is synthesized)
gagaggagggaggtggctggagaaggaaaaggaacattgctcgatgctcccatctggtggcggcctcaggaacccacgggaacctggaaggaggctctttgtgagacctgggcaaaggat

SEQ ID NO: 595319 - DNA, 120 bp, Artificial Sequence
  ENSG00000173714_26 (sequence is synthesized)
ggggcagctcgtcgatgatttttttgtgtttccaggcttcctgtgtgatcctggccctccggccgctagagagaggattgggaaaccccactgtcagctctgcatctgcccccactaccc

SEQ ID NO: 595320 - DNA, 120 bp, Artificial Sequence
  ENSG00000173714_27 (sequence is synthesized)
tcctctgccctattctgtccctgcccctccaagctgaagaaggtccttgtggggcgtcctcatttcttcctcaaatataaggaggaagataccaattaaaagctcatagtatcaactgcc

SEQ ID NO: 595321 - DNA, 120 bp, Artificial Sequence
  ENSG00000173714_28 (sequence is synthesized)
gtgcgtcctttcctccgatctgaaatggaggtgcagtttgttgtgaggattaaatgagatgatgcgttcagagaagccacacgtgtgaagagcccagtgcatctggcagctggtaccacc

SEQ ID NO: 595322 - DNA, 120 bp, Artificial Sequence
  ENSG00000173714_29 (sequence is synthesized)
aggactgctcactctgtgcgaccttggacaagtcgctcgccctcttcgaccacagaccttctcctttgggaagtgggggaggccagacaaggctggcagtcagaaggagctcactgaaga

SEQ ID NO: 595323 - DNA, 120 bp, Artificial Sequence
  ENSG00000173714_30 (sequence is synthesized)
gcagccactgtggtcgtcagcgagggcagctggactccggcacaatcctgagacactgtgaccgcggaggttttctcggtgtgtcgatggaagagggaggaatgtgatccgtcccagccg

SEQ ID NO: 595324 - DNA, 80 bp, Artificial Sequence
  ENSG00000173715_0 (sequence is synthesized)
atgggctcgcgctgccgggcgtgggcgtggactcgggcgtgggcactggcggagttccaagcccgggctgaggagggggc

SEQ ID NO: 595325 - DNA, 120 bp, Artificial Sequence
  ENSG00000173715_1 (sequence is synthesized)
gggcgttgccgctgttccctgcgcggcatggaggggacggccgtggccgtgttcgagattttgagatttttaataattcactggaagtgtgacatagatgtatcaaagggagcattgcta

SEQ ID NO: 595326 - DNA, 120 bp, Artificial Sequence
  ENSG00000173715_2 (sequence is synthesized)
gaagggcagctagtgatttccatagaaggattaaattctaagcaccaggcaaatgctcttcattgtgtaacaactagatggagtctcactctgttacccaggccggagtgcagtggcgca

SEQ ID NO: 595327 - DNA, 73 bp, Artificial Sequence
  ENSG00000173715_3 (sequence is synthesized)
attctcatgcctcagtccatggttgcttctgcaggaagcctttttggtggcatggtcctcaagaagttcctaa

SEQ ID NO: 595328 - DNA, 120 bp, Artificial Sequence
  ENSG00000173715_4 (sequence is synthesized)
ggaagcctttttggtggcatggtcctcaagaagttcctaaaagaaatacagtccatactgcccggaatctctgcaaagctgacttggacttcagaggaaggcagctattctcaggatatg

SEQ ID NO: 595329 - DNA, 120 bp, Artificial Sequence
  ENSG00000173715_5 (sequence is synthesized)
acaggggtaacacccttccagatgatttttgaggttgatgaaaagcccagaaccttgatgacagattgtctggttataaagcattttttacgtaaaatcatcatggtgcaccctaaggtc

SEQ ID NO: 595330 - DNA, 120 bp, Artificial Sequence
  ENSG00000173715_6 (sequence is synthesized)
agatttcatttcagtgtaaaggtaaatggaatcctctccacagagatctttggggtggagaatgaacccactttgaaccttgggaatggaattgctcttttggtcgactcccagcattat

SEQ ID NO: 595331 - DNA, 120 bp, Artificial Sequence
  ENSG00000173715_7 (sequence is synthesized)
gtgagaccaaattttggtacaattgaatcacactgcagcagaattcaccctgtgctaggacatccagtaatgcttttcatccctgaagacgtggctggcatggacttgttgggagaactg

SEQ ID NO: 595332 - DNA, 120 bp, Artificial Sequence
  ENSG00000173715_8 (sequence is synthesized)
ttgtcaacttgggagcagccgatgactactttcttcaaagatacctcttctttagttgactggaaaaaataccatttgtgtatgatacccaatttggatctcaatttggatagagatttg

SEQ ID NO: 595333 - DNA, 120 bp, Artificial Sequence
  ENSG00000173715_9 (sequence is synthesized)
gtgcttccagatgtgagttatcaggtggaatccagtgaggaggatcagtctcagactatggatcctcaaggacaaactctgctgctttttctctttgtggatttccacagtgcatttcca

SEQ ID NO: 595334 - DNA, 120 bp, Artificial Sequence
  ENSG00000173715_10 (sequence is synthesized)
gtccagcaaatggaaatctggggagtctatactttgctcacaactcatctcaatgccatccttgtggagagccacagtgtagtgcaaggttccatccaattcactgtggacaaggtcttg

SEQ ID NO: 595335 - DNA, 120 bp, Artificial Sequence
  ENSG00000173715_11 (sequence is synthesized)
gagcaacatcaccaggctgccaaggctcagcagaaactacaggcctcactctcagtggctgtgaactccatcatgagtattctgactggaagcactaggagcagcttccgaaagatgtgt

SEQ ID NO: 595336 - DNA, 120 bp, Artificial Sequence
  ENSG00000173715_12 (sequence is synthesized)
ctccagacccttcaagcagctgacacacaagagttcaggaccaaactgcacaaagtatttcgtgagatcacccaacaccaatttcttcaccactgctcatgtgaggtgaagcagcagcta

SEQ ID NO: 595337 - DNA, 120 bp, Artificial Sequence
  ENSG00000173715_13 (sequence is synthesized)
accctagaaaaaaaggactcagcccagggcactgaggacgcacctgataacagcagcctggagctcctagcagataccagcgggcaagcagaaaacaagaggctcaagaggggcagcccc

SEQ ID NO: 595338 - DNA, 120 bp, Artificial Sequence
  ENSG00000173715_14 (sequence is synthesized)
cgcatagaggagatgcgagctctgcgctctgccagggccccgagcccgtcagaggccgccccgcgccgcccggaagccaccgcggcccccctcactcctagaggaagggagcaccgcgag

SEQ ID NO: 595339 - DNA, 120 bp, Artificial Sequence
  ENSG00000173715_15 (sequence is synthesized)
gctcacggcagggccctggcgccgggcagggcgagcctcggaagccgcctggaggacgtgctgtggctgcaggaggtctccaacctgtcagagtggctgagtcccagccctgggccctga

SEQ ID NO: 595340 - DNA, 120 bp, Artificial Sequence
  ENSG00000173715_16 (sequence is synthesized)
tccagatgatttttgaggtcagatttcatttcagtgtaaaggtaaatggaatcctctccacagagatctttggggtggagaatgaacccactttgaaccttgggaatggaattgctcttt

SEQ ID NO: 595341 - DNA, 120 bp, Artificial Sequence
  ENSG00000173715_17 (sequence is synthesized)
gctcagaggctctaggtggctcccggcggcggttcgcggtctcggggccctgcagcgtcgagtgcgcaggcgcggcgggcagttgcttctgcaggaagcctttttggtggcatggtcctc

SEQ ID NO: 595342 - DNA, 120 bp, Artificial Sequence
  ENSG00000173715_18 (sequence is synthesized)
aaaatttctttctaaaaaagcataactcagattcttaatacagattgttccaaagcacattaggatggtggagttattcttaccaacttcagtctgaattacttttaaatttgtccccaa

SEQ ID NO: 595343 - DNA, 120 bp, Artificial Sequence
  ENSG00000173715_19 (sequence is synthesized)
aggtggttttgacattatgggttttactctgatctttattctcgtgtcttctgaagttccgtgtaatagatactctaacccaagaagtgatggctatttagattttcttttgcatacaat

SEQ ID NO: 595344 - DNA, 120 bp, Artificial Sequence
  ENSG00000173715_20 (sequence is synthesized)
tctcattcccaaagatgtctccctttggttgtccaaaaagctttctgaggtatagttacttttagaagaggaaataccgttttaattcatttgtgctcttgagattgtgtatgtgtggta

SEQ ID NO: 595345 - DNA, 120 bp, Artificial Sequence
  ENSG00000173715_21 (sequence is synthesized)
gtcattacactcaggtgaatctaacctcttaccagccatacctgccttagaaagttgtacaaggaatcaatgaatttattgtgtagagcttctcagtaatgtaaaggagtgctgtttggc

SEQ ID NO: 595346 - DNA, 120 bp, Artificial Sequence
  ENSG00000173715_22 (sequence is synthesized)
ttgcattttacacacatagttactattttaatgttcttcctgtgagtcattatgatttgcttccatcatgtggatagagaaacaggttcaggagggtaaatgggtgttcagatttagatc

SEQ ID NO: 595347 - DNA, 120 bp, Artificial Sequence
  ENSG00000173715_23 (sequence is synthesized)
ggaccaaactgcacaaagtatttcgtgagatcacccaacaccaatttcttcaccactgctcatgtgaggtgaagcaggtaagtgtaaataatcagtactttggtgggaatcttccatttt

SEQ ID NO: 595348 - DNA, 120 bp, Artificial Sequence
  ENSG00000173715_24 (sequence is synthesized)
gattagggccaagggccgcatctcgccgccaccgtgggaaactatctttgagaggagggaggagtcgtggcctggcctcattcccgctcacctccagccttggccgcctctcgcgggctc

SEQ ID NO: 595349 - DNA, 120 bp, Artificial Sequence
  ENSG00000173715_25 (sequence is synthesized)
ttccccgccccgaacctcccacctgcgggcccactggcacccgcggcgctcagaggctctaggtggctcccggcggcggttcgcggtctcggggccctgcagcgtcgagtgcgcaggcgc

SEQ ID NO: 595350 - DNA, 120 bp, Artificial Sequence
  ENSG00000173715_26 (sequence is synthesized)
tgcttctggattttcctttcctcctgaatttcatcactcaggaaatcaatcaaagctttgtctccttcgcacgccacacccacagccggaggtgcagggcccgcgaggccgcagggggcc

SEQ ID NO: 595351 - DNA, 120 bp, Artificial Sequence
  ENSG00000173715_27 (sequence is synthesized)
cccgggggtgtggaagccggcgacgcagaagcccagcatatggggcactcagcgcagcagtggcagcatggcggagaggactgcgaacatgtgcggatgcaaaggacaacccaggcctag

SEQ ID NO: 595352 - DNA, 120 bp, Artificial Sequence
  ENSG00000173726_0 (sequence is synthesized)
ctttctgtgttcctggcccgcggccgtcgggtgtgagctgcgccgaccgctctgagggttcgtggcccaccgctccttcgcggtccctgccgccaccgtccacgctcagcgttgtagaga

SEQ ID NO: 595353 - DNA, 120 bp, Artificial Sequence
  ENSG00000173726_1 (sequence is synthesized)
agatggtgggtcggaacagcgccatcgccgccggtgtatgcggggcccttttcattgggtactgcatctacttcgaccgcaaaagacgaagtgaccccaacttcaagaacaggcttcgag

SEQ ID NO: 595354 - DNA, 120 bp, Artificial Sequence
  ENSG00000173726_2 (sequence is synthesized)
aacgaagaaagaaacagaagcttgccaaggagagagctgggctttccaagttacctgaccttaaagatgctgaagctgttcagaagttcttccttgaagaaatacagcttggtgaagagt

SEQ ID NO: 595355 - DNA, 120 bp, Artificial Sequence
  ENSG00000173726_3 (sequence is synthesized)
tactagctcaaggtgaatatgagaagggcgtagaccatctgacaaatgcaattgctgtgtgtggacagccacagcagttactgcaggtcttacagcaaactcttccaccaccagtgttcc

SEQ ID NO: 595356 - DNA, 120 bp, Artificial Sequence
  ENSG00000173726_4 (sequence is synthesized)
agatgcttctgactaagctcccaacaattagtcagagaattgtaagtgctcagagcttggctgaagatgatgtggaatgagaaacaaatgtcaacataataaaatctcagttaaaaatat

SEQ ID NO: 595357 - DNA, 120 bp, Artificial Sequence
  ENSG00000173726_5 (sequence is synthesized)
tttaaaaattcttggtagttgagcagctctgggggaataagggcaaatatgcttgttatgaactacactgaaatctaccaaagttaatgtttactttgtgtagatccatttgtctatttt

SEQ ID NO: 595358 - DNA, 120 bp, Artificial Sequence
  ENSG00000173726_6 (sequence is synthesized)
atttatttttcccagtgaaaagtgtattttgatagagaacttttcattctataaatacactatgagttactaaaatatcatggattttgtttattcctgaaacatagttacatagttaaa

SEQ ID NO: 595359 - DNA, 120 bp, Artificial Sequence
  ENSG00000173726_7 (sequence is synthesized)
ctgtacatatgacatggcttatgttaaaaatacccagtgctcagttttgaaagataggcaaaaaaaaaaaagtataggagaaactgaagaatgtacacttttttagagggcacattttgc

SEQ ID NO: 595360 - DNA, 120 bp, Artificial Sequence
  ENSG00000173726_8 (sequence is synthesized)
tgtaaatctggaaatttgatagacttgactgtgtttgtgaaaactgagcattaaaggttttgattgatcctttctttccatttaatctctgagacgtaaatatgtgaggtgtgctgctgt

SEQ ID NO: 595361 - DNA, 120 bp, Artificial Sequence
  ENSG00000173726_9 (sequence is synthesized)
gctgggttaacagcttccttccctttctgtgtagcagtcttgaaatgttctgtttaaatcagtaggcttaatgtgttctgggtatttatctccttgtattttaaatatatgtagttgcaa

SEQ ID NO: 595362 - DNA, 120 bp, Artificial Sequence
  ENSG00000173726_10 (sequence is synthesized)
atagcaccaggaattagatttctgtacacccctaatctagccttgtgagcttcgctagttaatgtgtgctcactttccctccatttgttacgtgagagaatgcgtctgctgatcactgaa

SEQ ID NO: 595363 - DNA, 120 bp, Artificial Sequence
  ENSG00000173726_11 (sequence is synthesized)
gtgtcccttttagcttctgattcattgggttctgttgggcatctttaaatccaccttaacctgaggaatgtatgtgggcaaccaggccctgcatttttttatattctgaattttgcatgc

SEQ ID NO: 595364 - DNA, 120 bp, Artificial Sequence
  ENSG00000173726_12 (sequence is synthesized)
ttgcctgacttagtatttctgaattgatgttttttttaatggtataactatcttgattttcactgaaattatatggttctgtcactactctgtaaattaatccgaaacttttaaggtaac

SEQ ID NO: 595365 - DNA, 120 bp, Artificial Sequence
  ENSG00000173726_13 (sequence is synthesized)
tcttcagtgtacctccttaatcctgcttcaacttgattatcttgtgaaacgatgagagtaagttgcaaccttgtgactgaaaacttgaaaagagtggagcaggtgggacctcttattctc

SEQ ID NO: 595366 - DNA, 120 bp, Artificial Sequence
  ENSG00000173726_14 (sequence is synthesized)
aaatagtgacatattctccgtagtcacagtttcagaactgagtaaggatccttggtacttggtggcatctgttgaactgaggagcatttctcattgtaaagattgcctttgttctgtcta

SEQ ID NO: 595367 - DNA, 120 bp, Artificial Sequence
  ENSG00000173726_15 (sequence is synthesized)
aaagtctggagaaatcccaaagacttttcctatgtactaggcattttattttgattgacttacaaactcttcttaatcattatcaatctcggtttttttgtggtgcagtggaaggagaaa

SEQ ID NO: 595368 - DNA, 120 bp, Artificial Sequence
  ENSG00000173726_16 (sequence is synthesized)
taggtctagtttctgcctctgattagccgcacagccttgaacaaatcacatttcatctttgaacttacctctactgttagactaggcgactcacatttgaggacttttctcgggtatctt

SEQ ID NO: 595369 - DNA, 120 bp, Artificial Sequence
  ENSG00000173726_17 (sequence is synthesized)
gagggtttgtgatcctgaacccttaaacagtgcttttttgttacacaggagggcttttttggggggatgaccagtacagacatgccagttagttttactagtgggatcccaaatccaaag

SEQ ID NO: 595370 - DNA, 120 bp, Artificial Sequence
  ENSG00000173726_18 (sequence is synthesized)
cagtgtagtggtgattggtcagtgactaaccaggcagctaagaagtcttaggcagcagcccagacatgtatagaggggcagttagagggagaacaggggtgggaaagggagcaaggggca

SEQ ID NO: 595371 - DNA, 120 bp, Artificial Sequence
  ENSG00000173726_19 (sequence is synthesized)
gatagctcagcaaggaaagaatgggctcagaaaaaggagggctggctggaggagtgaggggcagcttaagtttggggagggtagaaacgccgtttccttgggaactggagtgcagtatga

SEQ ID NO: 595372 - DNA, 120 bp, Artificial Sequence
  ENSG00000173726_20 (sequence is synthesized)
gctgggtgtcacttggctctgaacatactggctttgctgtaatgcttgaaaaggcgttggtatcttcattttacagttcattaacccaagtacgttttcttatttaaatgacaactttgg

SEQ ID NO: 595373 - DNA, 120 bp, Artificial Sequence
  ENSG00000173726_21 (sequence is synthesized)
tgctttaaaatgaggtaccactttttaaagctagctgtgtcgagttaaagaaaaaatcagcagttttttctcccagaaatgtaattgccaaacactattcatccccatcttaagttttac

SEQ ID NO: 595374 - DNA, 120 bp, Artificial Sequence
  ENSG00000173726_22 (sequence is synthesized)
aaggtgatgtaatcagcttgttgtagtgatgctggccaaatggtgctcagcaggtgagaacaaaaaaaccccagatctcagtgaactaatacacagcttgagcgtttccatgtgctaatg

SEQ ID NO: 595375 - DNA, 120 bp, Artificial Sequence
  ENSG00000173726_23 (sequence is synthesized)
ttgcacacttactaaaaaactttggaaatggaaaataatgtattagtgcaacagttgatgtgcttctttgggcaaagatatagttttgttccacaatttgtacttaaaagcgaaagaaca

SEQ ID NO: 595376 - DNA, 120 bp, Artificial Sequence
  ENSG00000173726_24 (sequence is synthesized)
ttgaaaacatagacttactggctgtagcaatgctggcctgttaactgataactagaacttaggttcacgtttatgtaaagtgtgtaaaacctagtagagcttgcatagtcggcactcagt

SEQ ID NO: 595377 - DNA, 120 bp, Artificial Sequence
  ENSG00000173726_25 (sequence is synthesized)
aaatgtttggttccttttgccccttggtaagtttattttaccatcctcccacctgccattctgactttattaaatcaacatgtggaccagagtgttaatgagatgttattgcagaagaga

SEQ ID NO: 595378 - DNA, 120 bp, Artificial Sequence
  ENSG00000173726_26 (sequence is synthesized)
ttgagaaaattggtatatcatgcagataacatacaaaatctttttgtaacgtaaaaaatgcagttttattattgcttgtgcctcaactgtttaagtgaatattaaagggcttggagaaaa

SEQ ID NO: 595379 - DNA, 120 bp, Artificial Sequence
  ENSG00000173726_27 (sequence is synthesized)
ttacctgaccttaaagatgctgaagctgttcagaagttcttccttgaagaaatacagcttggtgaagagttactagctcaagtatttataggaaggaatggctaatgtaaggtcccagag

SEQ ID NO: 595380 - DNA, 120 bp, Artificial Sequence
  ENSG00000173728_0 (sequence is synthesized)
actctgcagttgatccagcagcaggaggcagctgtacccatcactgtcctcagagtacttttaagaacaaggaggtctctgcccacggcagcccaagcagattcccatccatcatgactg

SEQ ID NO: 595381 - DNA, 120 bp, Artificial Sequence
  ENSG00000173728_1 (sequence is synthesized)
ccatccgactacgagaatttattgagcgtcgcccagtgatcccgccaagtatattcatcgctcaccaaggaagagacgttcaaggctattaccctgggcagctggcaagactccattttg

SEQ ID NO: 595382 - DNA, 120 bp, Artificial Sequence
  ENSG00000173728_2 (sequence is synthesized)
atcatagtgcaaagagagctcccagaccgctcatagacttgacaattccacccaagacaaaatatcactatcagcctcaattagaccaacaaacactcattcgatatatttgtcttcgaa

SEQ ID NO: 595383 - DNA, 120 bp, Artificial Sequence
  ENSG00000173728_3 (sequence is synthesized)
gacattcaaagcctgccgagccatggtataaagaaaccacttaccgacgagactattctctgccattttatgagattgattggaaccagaaattagccacagtttcgctgaatcctcgac

SEQ ID NO: 595384 - DNA, 120 bp, Artificial Sequence
  ENSG00000173728_4 (sequence is synthesized)
aaataaccacggcattcgaacaaaataacgtttggcattcttaggtggcccttttagactaagttaatggcagcagaactactttcagtttcagtgtgtatacagatggctataatccta

SEQ ID NO: 595385 - DNA, 120 bp, Artificial Sequence
  ENSG00000173728_5 (sequence is synthesized)
aaatatttacatgttgcaaattctttgcagattaagttggtcagcttagaacagggaatcaagatctatccttaagagaacttgaatttaagccccactcccagtcttattgctgatgct

SEQ ID NO: 595386 - DNA, 120 bp, Artificial Sequence
  ENSG00000173728_6 (sequence is synthesized)
ggcaagctatcttacatttaggccaatgtatacgcaggatcaggtaagaagatcattgtgtctgcacaataattgcatcgctgttgggaaaaataaaaaaaagaaccggggggacatggc

SEQ ID NO: 595387 - DNA, 120 bp, Artificial Sequence
  ENSG00000173728_7 (sequence is synthesized)
caattataaagaaaactggcactggagaccctcaaggggctctggatggagaaacccaggtgtagcctgaggctgtagcgagatgtgggactgataaaaaggattaactgagagtctgtg

SEQ ID NO: 595388 - DNA, 120 bp, Artificial Sequence
  ENSG00000173728_8 (sequence is synthesized)
tccaggagttagcacccctatcttggcaagaagaaagcctgacaactaggcatcagctcctcaggcagaaagctaaagggtcttctctagggagaggaaagaatcccaaaggaaaaaaac

SEQ ID NO: 595389 - DNA, 120 bp, Artificial Sequence
  ENSG00000173744_0 (sequence is synthesized)
aggagaagtcgggaaggtggcggcggcggcggcggttgtcccggctgtgccggttggtgtggcccgtcagcccgcgtaccacagcgcccgggccgcgtcgagcccagtacagccaagccg

SEQ ID NO: 595390 - DNA, 80 bp, Artificial Sequence
  ENSG00000173744_1 (sequence is synthesized)
acagcgcccgggccgcgtcgagcccagtacagccaagccgctgcggccgggtccggcgcgggcggcgcgcgcagacggag

SEQ ID NO: 595391 - DNA, 120 bp, Artificial Sequence
  ENSG00000173744_2 (sequence is synthesized)
cctcccttggcgccgcggccatggcggccagcgcgaagcggaagcaggaggagaagcacctgaagatgctgcgggacatgaccggcctcccgcacaaccgaaagtgcttcgactgcgacc

SEQ ID NO: 595392 - DNA, 120 bp, Artificial Sequence
  ENSG00000173744_3 (sequence is synthesized)
agcgcggccccacctacgttaacatgacggtcggctccttcgtgtgtacctcctgctccggcagcctgcgaggattaaatccaccacacagggtgaaatctatctccatgacaacattca

SEQ ID NO: 595393 - DNA, 120 bp, Artificial Sequence
  ENSG00000173744_4 (sequence is synthesized)
cacaacaggaaattgaattcttacaaaaacatggaaatgaagtctgtaaacagatttggctaggattatttgatgatagatcttcagcaattccagacttcagggatccacaaaaagtga

SEQ ID NO: 595394 - DNA, 120 bp, Artificial Sequence
  ENSG00000173744_5 (sequence is synthesized)
aagagtttctacaagaaaagtatgaaaagaaaagatggtatgtcccgccagaacaagccaaagtcgtggcatcagttcatgcatctatttcagggtcctctgccagtagcacaagcagca

SEQ ID NO: 595395 - DNA, 120 bp, Artificial Sequence
  ENSG00000173744_6 (sequence is synthesized)
cacctgaggtcaaaccactgaaatctcttttaggggattctgcaccaacactgcacttaaataagggcacacctagtcagtccccagttgtaggtcgttctcaagggcagcagcaggaga

SEQ ID NO: 595396 - DNA, 120 bp, Artificial Sequence
  ENSG00000173744_7 (sequence is synthesized)
agaagcaatttgaccttttaagtgatctcggctcagacatctttgctgctccagctcctcagtcaacagctacagccaattttgctaactttgcacatttcaacagtcatgcagctcaga

SEQ ID NO: 595397 - DNA, 120 bp, Artificial Sequence
  ENSG00000173744_8 (sequence is synthesized)
attctgcaaatgcagattttgcaaactttgatgcatttggacagtctagtggttcgagtaattttggaggtttccccacagcaagtcactctccttttcagccccaaactacaggtggaa

SEQ ID NO: 595398 - DNA, 120 bp, Artificial Sequence
  ENSG00000173744_9 (sequence is synthesized)
gtgctgcatcagtaaatgctaattttgctcattttgataacttccccaaatcctccagtgctgattttggaaccttcaatacttcccagagtcatcaaacagcatcagctgttagtaaag

SEQ ID NO: 595399 - DNA, 120 bp, Artificial Sequence
  ENSG00000173744_10 (sequence is synthesized)
tttcaacgaacaaagctggtttacagactgcagacaaatatgcagcacttgctaatttagacaatatcttcagtgccgggcaaggtggtgatcagggaagtggctttgggaccacaggta

SEQ ID NO: 595400 - DNA, 120 bp, Artificial Sequence
  ENSG00000173744_11 (sequence is synthesized)
aagctcctgttggttctgtggtttcagttcccagtcagtcaagtgcatcttcagacaagtatgcagctctggcagaactagacagcgttttcagttctgcagccacctccagtaatgcgt

SEQ ID NO: 595401 - DNA, 120 bp, Artificial Sequence
  ENSG00000173744_12 (sequence is synthesized)
atacttccacaagtaatgctagcagcaatgtttttggaacagtgccagtggttgcttctgcacagacacagcctgcttcatcaagtgtgcctgctccatttggagctacgccttccacaa

SEQ ID NO: 595402 - DNA, 120 bp, Artificial Sequence
  ENSG00000173744_13 (sequence is synthesized)
atccatttgttgctgctgctggtccttctgtggcatcttctacaaacccatttcagaccaatgccagaggagcaacagcggcaacctttggcactgcatccatgagcatgcccacaggat

SEQ ID NO: 595403 - DNA, 120 bp, Artificial Sequence
  ENSG00000173744_14 (sequence is synthesized)
tcggcactcctgctccctacagtcttcccaccagctttagtggcagctttcagcagcctgcctttccagcccaagcagctttccctcaacagacagctttttctcaacagcccaatggtg

SEQ ID NO: 595404 - DNA, 120 bp, Artificial Sequence
  ENSG00000173744_15 (sequence is synthesized)
caggttttgcagcatttggacaaacaaagccagtagtaaccccttttggtcaagttgcagctgctggagtatctagtaatccttttatgactggtgcaccaacaggacaatttccaacag

SEQ ID NO: 595405 - DNA, 120 bp, Artificial Sequence
  ENSG00000173744_16 (sequence is synthesized)
gaagctcatcaaccaatcctttcttatagccttatatagacaatttactggaacgaacttttatgtggtcacattacatctctccacctcttgcactgttgtcttgtttcactgatctta

SEQ ID NO: 595406 - DNA, 120 bp, Artificial Sequence
  ENSG00000173744_17 (sequence is synthesized)
gctttaaacacaagagaagtctttaaaaagcctgcattgtgtattaaacaccaggtaatatgtgcaaaaccgagggctccagtaacaccttctaacctgtgaattggcagaaaagggtag

SEQ ID NO: 595407 - DNA, 120 bp, Artificial Sequence
  ENSG00000173744_18 (sequence is synthesized)
cggtatcatgtatattaaaattggctaatattaagttattgcagataccacattcattatgctgcagtactgtacatatttttcttagaaattagctatttgtgcatatcagtatttgta

SEQ ID NO: 595408 - DNA, 120 bp, Artificial Sequence
  ENSG00000173744_19 (sequence is synthesized)
actttaacacattgttatgtgagaaatgttactggggaaatagatcagccacttttaaggtgctgtcatatatcttggaatgaatgacctaaaatcattttaaccattgctactggaaag

SEQ ID NO: 595409 - DNA, 120 bp, Artificial Sequence
  ENSG00000173744_20 (sequence is synthesized)
taacagagtcaaaattggaaggttttattcattcttgaatttttcctttctaaagagctcttctatttatacatgcctaaattcttttaaaatgtagagggatacctgtctgcataataa

SEQ ID NO: 595410 - DNA, 120 bp, Artificial Sequence
  ENSG00000173744_21 (sequence is synthesized)
agctgatcatgttttgctacagtttgcaggtgaaaaaaaataaatattataaaatatgctattgtttttgtgttcttgctgcaatgcctttaccaaagtggccttaaatatgagtagtga

SEQ ID NO: 595411 - DNA, 120 bp, Artificial Sequence
  ENSG00000173744_22 (sequence is synthesized)
attgagaacatcttgaattcttaaaagacttcttagtgactttttataaaaaggccatgtagaaaatttattaaaactactatgactgctacattcaggaatatgccagtggtaaagcat

SEQ ID NO: 595412 - DNA, 120 bp, Artificial Sequence
  ENSG00000173744_23 (sequence is synthesized)
ttaaatgtagcttgtcagatttaccataatcctactaatttctttgcagcttattaattttgtgaaatttgtatatatgaagaatttgcatgtatgtgtatttacaaatttttctaagta

SEQ ID NO: 595413 - DNA, 120 bp, Artificial Sequence
  ENSG00000173744_24 (sequence is synthesized)
tcttgaattctcagactgcaaaaggcctattttaactattgattttttttaaaaaaaattgtctttgaatgtattggaagtagacatgcattaactgtgacattattgcacctcagtttt

SEQ ID NO: 595414 - DNA, 120 bp, Artificial Sequence
  ENSG00000173744_25 (sequence is synthesized)
tttctttctttttttgggcaaactgatattatctataggatatttgtttatgtttgttttttgggggaaagaaactggaactcagtgttaccttaaagttacggaatactttgttttaaa

SEQ ID NO: 595415 - DNA, 120 bp, Artificial Sequence
  ENSG00000173744_26 (sequence is synthesized)
ggaaaagataataagtttagttatatctttttgttaatattcaaatgaacttgtttaagtatctatgtacagtaatgcctcattcatctagaggtaatctggcagtcttgtgaaaaccga

SEQ ID NO: 595416 - DNA, 120 bp, Artificial Sequence
  ENSG00000173744_27 (sequence is synthesized)
acacaactcagaaacttggaatcgttttttttaaaaatgcctctgagcaacccatataagtcacaaagtctgtgtgttagagcttatgcatttgtttttatgagagattttaataaattt

SEQ ID NO: 595417 - DNA, 120 bp, Artificial Sequence
  ENSG00000173744_28 (sequence is synthesized)
aattatttgcttgtccagactatagcatattagctgtttagaagggatggcttgaaaggaaggagactgaaaaacactctgagagcatacactgtccaaggccattagtgtaaggaccgc

SEQ ID NO: 595418 - DNA, 120 bp, Artificial Sequence
  ENSG00000173744_29 (sequence is synthesized)
tacccagcctagaggacatcactatactacatcatctgatgattattctttattatgcctctaggtaattaagtaaaggtgaaattgcatacacagatatgtagtacatattttaaaagt

SEQ ID NO: 595419 - DNA, 120 bp, Artificial Sequence
  ENSG00000173744_30 (sequence is synthesized)
tttatcttaaattgattaaaactttttaaaaagctttggtattaaaagaggtaaacatcagtttcctcaaacattttattcatgttgaatgcctttttgcaatgatgactgagttgttat

SEQ ID NO: 595420 - DNA, 120 bp, Artificial Sequence
  ENSG00000173744_31 (sequence is synthesized)
catagtattttaaaacctgtatagtgttttagacttgttaaaacattgctgtctagtgtacatctagctaaaagtgtggtttatctaaaccgttttaataagcaagatgactgggaaatc

SEQ ID NO: 595421 - DNA, 120 bp, Artificial Sequence
  ENSG00000173744_32 (sequence is synthesized)
tctgccccttttctgagcagtatgcctcttcttttagaattaaatgaatgctgcacaggtccagatgtgtgttgatgtagacttgaaatgtctccacattttggaggacttcctcagccc

SEQ ID NO: 595422 - DNA, 120 bp, Artificial Sequence
  ENSG00000173744_33 (sequence is synthesized)
ttttcattgagggaaaatatatttgaatttctgttttagattgtatcgggtcccagttgattcatgtgtacaaagttatgctacctaattacagaccattacccaaatatcctaccaggc

SEQ ID NO: 595423 - DNA, 120 bp, Artificial Sequence
  ENSG00000173744_34 (sequence is synthesized)
tttccatctgaatagtaaattaaacagttgttatcaaaatgattttaaagactatttctttttctgggtaactattgaagtttgtaattaaatgggggctcttactgactttaaattagc

SEQ ID NO: 595424 - DNA, 120 bp, Artificial Sequence
  ENSG00000173744_35 (sequence is synthesized)
gcttataaaataaaaatgtttagttcaagaagagacccaagctgggtatggtggtgtgagagcctgtgagtcctagctacctggaggtgaggtgggaacatcacttgagcccaggagttg

SEQ ID NO: 595425 - DNA, 120 bp, Artificial Sequence
  ENSG00000173744_36 (sequence is synthesized)
ctgcacaccagcctggggatagagtgagatcccatctctaaaaaatgaaaaaaagaagagaggtagctttaaagtggtttttctcatgatattcactgtttattattaaagaaaatcagc

SEQ ID NO: 595426 - DNA, 120 bp, Artificial Sequence
  ENSG00000173744_37 (sequence is synthesized)
tttcgttagacttttacatttagatttattctagttttatatagaccatcaaaattatgttgagtactaaaaaggagaaaaaatcctggaaggtaacaaggctgaagaccttcaaatttc

SEQ ID NO: 595427 - DNA, 120 bp, Artificial Sequence
  ENSG00000173744_38 (sequence is synthesized)
ctggcttactggtttagtcacatcatttttcctgttcaggtatctgcagatatccctgttcaggaaagatcttttttcaggatggcaaacttttgacatagtttaaagacattttttccc

SEQ ID NO: 595428 - DNA, 120 bp, Artificial Sequence
  ENSG00000173744_39 (sequence is synthesized)
cattttttgaaatagagaatattttattatttttgtgaaaatagagttttggtaatcactttcttcctcaaaataagtccttctgttaatttgtaaaagcacattagtgctttacctgtg

SEQ ID NO: 595429 - DNA, 120 bp, Artificial Sequence
  ENSG00000173744_40 (sequence is synthesized)
aaattccccgcccccctgcacacacacccactttagtacagttcctgtcaattggcaacatggagagggtgacctggctgctggtttaccactgtaccaacatctctggagcattttagt

SEQ ID NO: 595430 - DNA, 120 bp, Artificial Sequence
  ENSG00000173744_41 (sequence is synthesized)
ttcagaaccttaacactccccaacagctttgttgatgtagcttgtatctctgagaatttattgtattaaaattaatactgagatatttttaaaacatgtttatttatttaagtataacag

SEQ ID NO: 595431 - DNA, 120 bp, Artificial Sequence
  ENSG00000173744_42 (sequence is synthesized)
taataaactaataacttgctaacataaataccatttttgataaaaataacttttccaaaacaaaaactaatgagaacaggaacattgttttacattttatgcatttaaatctggcttaat

SEQ ID NO: 595432 - DNA, 120 bp, Artificial Sequence
  ENSG00000173744_43 (sequence is synthesized)
aaaagcagtgagattttcatgctgcttttgcattccaacttaaaaattacacagcatacacacgctggaaaactccactgtgcacttgtgagatcaggagaatgaaaactatgtaatatc

SEQ ID NO: 595433 - DNA, 120 bp, Artificial Sequence
  ENSG00000173744_44 (sequence is synthesized)
tcagtagtacaatgaaaatagtttgacttttcacagcctttcaaagaaagggttgtagggaccattaagggtctccagactctttgagaaccactatactttaaatttgtgtatttctag

SEQ ID NO: 595434 - DNA, 120 bp, Artificial Sequence
  ENSG00000173744_45 (sequence is synthesized)
aacagtatttacttgcagggcaaacataactattccctgggttttttttgtttgctagtgagaactgaaattgcagactttttaacactacttcaaggtaataatagcagtggtattatg

SEQ ID NO: 595435 - DNA, 120 bp, Artificial Sequence
  ENSG00000173744_46 (sequence is synthesized)
ggctgtgtatgagatagtcatttgtaaaacaattttcatatttcatctcttacaatccctgcagtggacctatacttttaggatgaaagaagcaaagcatagagaggttaagctagtggc

SEQ ID NO: 595436 - DNA, 120 bp, Artificial Sequence
  ENSG00000173744_47 (sequence is synthesized)
agctttttgctctggggaacagatttggattaaatgctatcacatttatatatgaatgcattctttcttaatattttgaaattctgaacaagttaacgttcttgtcttgtatatctaaaa

SEQ ID NO: 595437 - DNA, 120 bp, Artificial Sequence
  ENSG00000173744_48 (sequence is synthesized)
aaactttaatcacttgaattcctttcataatttgatgaaatcagtacagtttattcttggtttttttttttaactttagaagtaaattaatatggtaactagtggagcgtgctttagatt

SEQ ID NO: 595438 - DNA, 120 bp, Artificial Sequence
  ENSG00000173744_49 (sequence is synthesized)
gaagactcatctgaagtatcacagactcctattttgtaaagcattccacctttattgatacagtttgtggcctatacacttttaaaatttattttttaaaaggtgatattaaaatttgta

SEQ ID NO: 595439 - DNA, 120 bp, Artificial Sequence
  ENSG00000173744_50 (sequence is synthesized)
tttaacctgttgtattcatcctcattagttaagtttttctttttatgttttaaaacttagtgacattaaacttttcacgtggttgtttgtgaacagatgaatatataaccacgatgtaat

SEQ ID NO: 595440 - DNA, 120 bp, Artificial Sequence
  ENSG00000173744_51 (sequence is synthesized)
ccagtgttgtgctgctgaatgtttaacaaccatctttcatgaaagaaaaaaggccctgttttgtagcatttactaatatttatggtataaatactgtcttcatggtgattttacctgcca

SEQ ID NO: 595441 - DNA, 120 bp, Artificial Sequence
  ENSG00000173744_52 (sequence is synthesized)
atctgatgtcattaaatgcagtttgatgaaagagatagccaaccagtggctttcccaagccttggcaaaccagcttcagcacagcaaaggacatacaattccacaactcattaattaaat

SEQ ID NO: 595442 - DNA, 120 bp, Artificial Sequence
  ENSG00000173744_53 (sequence is synthesized)
gtattggtcatttgatgattatatccagtatttggagagcttttatattgttaattcatttagcaagcatttgaacacttgtttatttttagagatatactgggcactgaggtatttaat

SEQ ID NO: 595443 - DNA, 120 bp, Artificial Sequence
  ENSG00000173744_54 (sequence is synthesized)
ctgcaaagacccaagtatcgtgaaccttggttttaaaaagtccaattattgtgctcttataggggttgcacattcaaggcttacactgaattctgtctgcagttctgttttgtgtgacca

SEQ ID NO: 595444 - DNA, 120 bp, Artificial Sequence
  ENSG00000173744_55 (sequence is synthesized)
gcacagtgttttaaaacgttgcattctgaatccatctttttgaaatggggcatgtactcttaaggtggccactagcttaccattcccaatttttcttagtctcaaacattcacatgtttt

SEQ ID NO: 595445 - DNA, 120 bp, Artificial Sequence
  ENSG00000173744_56 (sequence is synthesized)
tcaaggccttggagttggcaaatcctgaatatatagtgaaggtaggaaatagctcttcttatgccacatcttagtctgattttgaagtcagttgtgtaagtttgggctgacagtggtatt

SEQ ID NO: 595446 - DNA, 120 bp, Artificial Sequence
  ENSG00000173744_57 (sequence is synthesized)
ttccagtgaagactatcgccaagaatgcatatcattctgcttattttattctagtggataaaaattcaacgtatatttaagtgtatttttgacatctgtgcttgtccaacacagggctgt

SEQ ID NO: 595447 - DNA, 120 bp, Artificial Sequence
  ENSG00000173744_58 (sequence is synthesized)
agggactgatgaaaagagaatgttgtgatttgagcttttataaaaaaagataagtgatcctagataaaatattttagatggtgattaaaatgcccatagattaattttttaatcggttct

SEQ ID NO: 595448 - DNA, 120 bp, Artificial Sequence
  ENSG00000173744_59 (sequence is synthesized)
ctgaaatcttgagatgttatccaagttacaatttaagcaatgagagtaaaatttgaattctaaattctcagcatcttccctcattcttgagtggagagacagaggaagcaaacgccaagg

SEQ ID NO: 595449 - DNA, 120 bp, Artificial Sequence
  ENSG00000173744_60 (sequence is synthesized)
agccttctaattttgactatatgatcattaactaaaggcagcaagggattgtaaactaatcttacatagtcaatgtttcatagaatgctttggttacaatcaggttttttaaagacttta

SEQ ID NO: 595450 - DNA, 120 bp, Artificial Sequence
  ENSG00000173744_61 (sequence is synthesized)
aaggttttttgtatgctataatatatgcttatgatttctaaaaattatgcagtatacacaaagggcataaagtcaaaaagtgtgtctccctctgtgactttattctcataccccagaggc

SEQ ID NO: 595451 - DNA, 120 bp, Artificial Sequence
  ENSG00000173744_62 (sequence is synthesized)
atataatttcttgtattcttgtgtagtctttaagaaatgttatcgtttattttatatatggctctctctctgtatgcctcttcctgttcttattttaaatgttcaagtttgtgacttggt

SEQ ID NO: 595452 - DNA, 120 bp, Artificial Sequence
  ENSG00000173744_63 (sequence is synthesized)
tcttgtttaacttggttgtctttccatattgccaccttccagctctaacattaatgtctccaggattccattatatggatgtccctttgggagaacatttgtttatagacttttctacta

SEQ ID NO: 595453 - DNA, 120 bp, Artificial Sequence
  ENSG00000173744_64 (sequence is synthesized)
aaaatattgttataatgataatatccttatgcatatatgaagattactcttgattctgcctgactggaaactttattaataaagtagacattattctattttgaggctcaccagctgtgt

SEQ ID NO: 595454 - DNA, 120 bp, Artificial Sequence
  ENSG00000173744_65 (sequence is synthesized)
aggtatgatcttgtgcttccatttaagaaattcttccatttaaagaagaaaaaaaatctctctgactatctgaagatatatgaaaaagcctatgcttttaaattaaactgttaagacagt

SEQ ID NO: 595455 - DNA, 120 bp, Artificial Sequence
  ENSG00000173744_66 (sequence is synthesized)
ccattgaaagattgtggaagttcacatctattttgcaccttaattttttcattgtccctactcatgactctaaaaagtgcatggcttggggctatactttgttttgcagtttgttggtat

SEQ ID NO: 595456 - DNA, 120 bp, Artificial Sequence
  ENSG00000173744_67 (sequence is synthesized)
cgtgcctttccttatctacattagcttagactataccttatttttaagaagagaaagtggaaattaactgtggcaaaacctattttggcacaaccacatttgttcattatacaaaattag

SEQ ID NO: 595457 - DNA, 120 bp, Artificial Sequence
  ENSG00000173744_68 (sequence is synthesized)
cttcctatgctttagaaaaaatgtgagttattactctgaaagttgtgattctgattcctcatggtttggagctcagaaatttcttaacatgtctttgctgttagtcaagcacaggatttg

SEQ ID NO: 595458 - DNA, 120 bp, Artificial Sequence
  ENSG00000173744_69 (sequence is synthesized)
ttttctgcaaaagtttattttcaatgaagaatacttgtcctaatagctcataaaaagtacctttgcactttaaatcctaggaatagggaacaaggaaacttactgggaagttcaaaagaa

SEQ ID NO: 595459 - DNA, 120 bp, Artificial Sequence
  ENSG00000173744_70 (sequence is synthesized)
agaataacaggaccttctagtcagcagggcatgtttggaaaatgttaatacgccatgatttttgaagaccaattttagttcaggaggtggttttaaatattggatgaaaacttacaggct

SEQ ID NO: 595460 - DNA, 120 bp, Artificial Sequence
  ENSG00000173744_71 (sequence is synthesized)
gttttcaatattcatttctgaaatactttagtatgatagataaatttggttaagttcttgttcattgtgaaatactgttggaagaatttttttcaaaataaagacttctgaatttgtgta

SEQ ID NO: 595461 - DNA, 120 bp, Artificial Sequence
  ENSG00000173744_72 (sequence is synthesized)
gagtcctagattgaactaaataatggatgagtgtatttgttttaagaggtggctggtattgatgatatccttaaaccatagataatccacaaacaattcttacttcatatcaagacaaaa

SEQ ID NO: 595462 - DNA, 120 bp, Artificial Sequence
  ENSG00000173744_73 (sequence is synthesized)
tataaagttcttaatcatttctgaaggttatatgaccaaacaagctagccctcttctgctactcccttgctcaactccttgtttgttccaggtgtattctggaaaatgtaaaaaatgtaa

SEQ ID NO: 595463 - DNA, 120 bp, Artificial Sequence
  ENSG00000173744_74 (sequence is synthesized)
agctttttctgtgtgtacatctatatgtgaggtagggaggcaagaacacacctttggttaatttttccttgaaaccttgcatatcagattcataatatctttgggagtgagaatgctttg

SEQ ID NO: 595464 - DNA, 120 bp, Artificial Sequence
  ENSG00000173744_75 (sequence is synthesized)
ctacaaacccatttcagaccaatgccagaggagcaacaggcctttctggagcaatgcattctcaagtgtttcctcacgctcattttgcggcaacctttggcactgcatccatgagcatgc

SEQ ID NO: 595465 - DNA, 120 bp, Artificial Sequence
  ENSG00000173744_76 (sequence is synthesized)
atctagaacacagttctgatgttagagaccttaagtgaaataaggtatgggtatgtgagctgtgtgtgctgccctttactaagtccttatggtagatgtctgaattagagttgttgctct

SEQ ID NO: 595466 - DNA, 80 bp, Artificial Sequence
  ENSG00000173757_0 (sequence is synthesized)
ggggacccagcgcaggcaactccgcgcggcggcccggccgagggagggagcgagcgggcgggcgggcaagccagacagct

SEQ ID NO: 595467 - DNA, 120 bp, Artificial Sequence
  ENSG00000173757_1 (sequence is synthesized)
gggccggagcagccgcgggcgcccgaggggccgagcgagattgtaaaccatggctgtgtggatacaagctcagcagctccaaggagaagcccttcatcagatgcaagcgttatatggcca

SEQ ID NO: 595468 - DNA, 120 bp, Artificial Sequence
  ENSG00000173757_2 (sequence is synthesized)
gcattttcccattgaggtgcggcattatttatcccagtggattgaaagccaagcatgggactcagtagatcttgataatccacaggagaacattaaggccacccagctcctggagggcct

SEQ ID NO: 595469 - DNA, 120 bp, Artificial Sequence
  ENSG00000173757_3 (sequence is synthesized)
ggtgcaggagctgcagaagaaggcagagcaccaggtgggggaagatgggtttttactgaagatcaagctggggcactatgccacacagctccagaacacgtatgaccgctgccccatgga

SEQ ID NO: 595470 - DNA, 120 bp, Artificial Sequence
  ENSG00000173757_4 (sequence is synthesized)
gctggtccgctgcatccgccatatattgtacaatgaacagaggttggtccgagaagccaacaatggtagctctccagctggaagccttgctgatgccatgtcccagaaacacctccagat

SEQ ID NO: 595471 - DNA, 120 bp, Artificial Sequence
  ENSG00000173757_5 (sequence is synthesized)
caaccagacgtttgaggagctgcgactggtcacgcaggacacagagaatgagttaaaaaagctgcagcagactcaggagtacttcatcatccagtaccaggagagcctgaggatccaagc

SEQ ID NO: 595472 - DNA, 120 bp, Artificial Sequence
  ENSG00000173757_6 (sequence is synthesized)
tcagtttggcccgctggcccagctgagcccccaggagcgtctgagccgggagacggccctccagcagaagcaggtgtctctggaggcctggttgcagcgtgaggcacagacactgcagca

SEQ ID NO: 595473 - DNA, 120 bp, Artificial Sequence
  ENSG00000173757_7 (sequence is synthesized)
gtaccgcgtggagctggccgagaagcaccagaagaccctgcagctgctgcggaagcagcagaccatcatcctggatgacgagctgatccagtggaagcggcggcagcagctggccgggaa

SEQ ID NO: 595474 - DNA, 120 bp, Artificial Sequence
  ENSG00000173757_8 (sequence is synthesized)
cggcgggccccccgagggcagcctggacgtgctacagtcctggtgtgagaagttggccgagatcatctggcagaaccggcagcagatccgcagggctgagcacctctgccagcagctgcc

SEQ ID NO: 595475 - DNA, 120 bp, Artificial Sequence
  ENSG00000173757_9 (sequence is synthesized)
catccccggcccagtggaggagatgctggccgaggtcaacgccaccatcacggacattatctcagccctggtgaccagcacgttcatcattgagaagcagcctcctcaggtcctgaagac

SEQ ID NO: 595476 - DNA, 120 bp, Artificial Sequence
  ENSG00000173757_10 (sequence is synthesized)
ccagaccaagtttgcagccactgtgcgcctgctggtgggcgggaagctgaacgtgcacatgaaccccccccaggtgaaggccaccatcatcagtgagcagcaggccaagtctctgctcaa

SEQ ID NO: 595477 - DNA, 120 bp, Artificial Sequence
  ENSG00000173757_11 (sequence is synthesized)
gaacgagaacacccgcaatgattacagtggcgagatcttgaacaactgctgcgtcatggagtaccaccaagccacaggcacccttagtgcccacttcaggaatatgtccctgaaacgaat

SEQ ID NO: 595478 - DNA, 120 bp, Artificial Sequence
  ENSG00000173757_12 (sequence is synthesized)
taagaggtcagaccgtcgtggggcagagtcggtgacagaagaaaaatttacaatcctgtttgaatcccagttcagtgttggtggaaatgagctggtttttcaagtcaagaccctgtccct

SEQ ID NO: 595479 - DNA, 120 bp, Artificial Sequence
  ENSG00000173757_13 (sequence is synthesized)
gccagtggtggtgatcgttcatggcagccaggacaacaatgcgacggccactgttctctgggacaatgcttttgcagagcctggcagggtgccatttgccgtgcctgacaaagtgctgtg

SEQ ID NO: 595480 - DNA, 120 bp, Artificial Sequence
  ENSG00000173757_14 (sequence is synthesized)
gccacagctgtgtgaggcgctcaacatgaaattcaaggccgaagtgcagagcaaccggggcctgaccaaggagaacctcgtgttcctggcgcagaaactgttcaacaacagcagcagcca

SEQ ID NO: 595481 - DNA, 120 bp, Artificial Sequence
  ENSG00000173757_15 (sequence is synthesized)
cctggaggactacagtggcctgtctgtgtcctggtcccagttcaacagggagaatttaccaggacggaattacactttctggcaatggtttgacggtgtgatggaagtgttaaaaaaaca

SEQ ID NO: 595482 - DNA, 120 bp, Artificial Sequence
  ENSG00000173757_16 (sequence is synthesized)
tctcaagcctcattggaatgatggggccattttggggtttgtaaacaagcaacaggcccatgacctactcattaacaagccagatgggaccttcctcctgagattcagtgactcagaaat

SEQ ID NO: 595483 - DNA, 120 bp, Artificial Sequence
  ENSG00000173757_17 (sequence is synthesized)
tggcggcatcaccattgcttggaagtttgattctcaggaaagaatgttttggaatctgatgccttttaccaccagagacttctccattcggtccctagccgaccgcttgggagacttgaa

SEQ ID NO: 595484 - DNA, 120 bp, Artificial Sequence
  ENSG00000173757_18 (sequence is synthesized)
ttaccttatctacgtgtttcctgatcggccaaaagatgaagtatactccaaatactacacaccagttccctgcgagtctgctactgctaaagctgttgatggatacgtgaagccacagat

SEQ ID NO: 595485 - DNA, 120 bp, Artificial Sequence
  ENSG00000173757_19 (sequence is synthesized)
caagcaagtggtccctgagtttgtgaacgcatctgcagatgccgggggcggcagcgccacgtacatggaccaggccccctccccagctgtgtgtccccaggctcactataacatgtaccc

SEQ ID NO: 595486 - DNA, 120 bp, Artificial Sequence
  ENSG00000173757_20 (sequence is synthesized)
acagaaccctgactcagtccttgacaccgatggggacttcgatctggaggacacaatggacgtagcgcggcgtgtggaggagctcctgggccggccaatggacagtcagtggatcccgca

SEQ ID NO: 595487 - DNA, 120 bp, Artificial Sequence
  ENSG00000173757_21 (sequence is synthesized)
tcttgtggatgttttaattccatgaatcgcttctcttttgaaacaatactcataatgtgaagtgttaatactagttgtgaccttagtgtttctgtgcatggtggcaccagcgaagggagt

SEQ ID NO: 595488 - DNA, 120 bp, Artificial Sequence
  ENSG00000173757_22 (sequence is synthesized)
gtgtgtgtgtgtgtgtgtgtgtgcgtgtttgcacgttatggtgtttctccctctcactgtctgagagtttagttgtagcagaggggccacagacagaagctgtggtggtttttactttgt

SEQ ID NO: 595489 - DNA, 120 bp, Artificial Sequence
  ENSG00000173757_23 (sequence is synthesized)
tgtggtggtttttactttgtgcaaaaaggcagtgagtttcgtgaagcctggaagttggccatgtgtcttaagagtggctggactttgacatgtggctgtttgaataagagaaggacaaag

SEQ ID NO: 595490 - DNA, 120 bp, Artificial Sequence
  ENSG00000173757_24 (sequence is synthesized)
ggaggagaaagcacatgtgctccagtgagtcttcgtcactctgtctgccaagcaattgatatataaccgtgattgtctctgcttttcttctgaaatgtagataactgctttttgacaaag

SEQ ID NO: 595491 - DNA, 120 bp, Artificial Sequence
  ENSG00000173757_25 (sequence is synthesized)
agagccttccctctcccccacccctgtgttcttgggtaggaatgggaaaaggggcaacctacaaagattgttggggcaagggaagtcacaagctttcggatgggcggtggcttttcacaa

SEQ ID NO: 595492 - DNA, 120 bp, Artificial Sequence
  ENSG00000173757_26 (sequence is synthesized)
aacatttagctcatcttattctctctttgtcctctctcccctcctgcccgcccgcaccctggaattgccactcagttcctctgggtgtgcacatatgtttggagaaatagaggagagaaa

SEQ ID NO: 595493 - DNA, 120 bp, Artificial Sequence
  ENSG00000173757_27 (sequence is synthesized)
agagggccacgtaactgagagcttacagtgccaatgccgtttgtgttctggccagagtggagtgcgcagccctgactcccaggcgctgagattgttgcctggttacccaggaagctgctg

SEQ ID NO: 595494 - DNA, 120 bp, Artificial Sequence
  ENSG00000173757_28 (sequence is synthesized)
ttccggctgcccagcctttctctgagccagcggatgcacagtccgtggccttcttcaggcttattgatgatgctttttgcaaatgttgaatcatggttctgtttctaagttggatctttt

SEQ ID NO: 595495 - DNA, 120 bp, Artificial Sequence
  ENSG00000173757_29 (sequence is synthesized)
ttgttttctccttgccaccctaatttgacatcaaaattctctcttgtgcattgggccctgggtcattcaaacccaggtcacctcattccccttctctgttcacacctaatgtcttgaaga

SEQ ID NO: 595496 - DNA, 120 bp, Artificial Sequence
  ENSG00000173757_30 (sequence is synthesized)
gtaggtagcagcagtgtgggctgaacctaggccagcttgcttagcgggtcaccctgctgtgaagtcctggcaggtgttggtaatgtgtggaaatgcagtcagcaagtttgctggggagtt

SEQ ID NO: 595497 - DNA, 120 bp, Artificial Sequence
  ENSG00000173757_31 (sequence is synthesized)
tgataaaagtataaaacaaaacaaaaaaagcctcggtataattttgttccacgacttcttctgtagctttacaccagaaggaaggaatgggctacagcaggtagtggaggaagagggggg

SEQ ID NO: 595498 - DNA, 120 bp, Artificial Sequence
  ENSG00000173757_32 (sequence is synthesized)
tgagcaggtgtattaaaatagcttacgggtaaggcctaaaaggtcacccctcggccccctctccaaaagaagggcatgggcacccccaggagaggatggccccaaaaaccttatttttat

SEQ ID NO: 595499 - DNA, 120 bp, Artificial Sequence
  ENSG00000173757_33 (sequence is synthesized)
acatgagagtaaataaacatattttttttacaaaaataacttctgaatttatcagtgttttgccgttaaaaatattcctctatagtaaattatttattggaagatgacttttttaaagct

SEQ ID NO: 595500 - DNA, 120 bp, Artificial Sequence
  ENSG00000173757_34 (sequence is synthesized)
gccgtttgccttggcttggtttcatacactgatttatttttctatgccaggcagtagagtctctctgcctctgaggagcaggctacccgcatcccactcagcccctccctacccctcaag

SEQ ID NO: 595501 - DNA, 120 bp, Artificial Sequence
  ENSG00000173757_35 (sequence is synthesized)
atttgatgaaaattccaaccatgaggatgggtgcatcggggaagggtgagaaggagagcctgcctgctcagggatccaggctcgtagagtcactccctgcccgtctcccagagatgcttc

SEQ ID NO: 595502 - DNA, 120 bp, Artificial Sequence
  ENSG00000173757_36 (sequence is synthesized)
accagcacctgcctctgagacctcgctctctgttccagcaaccctggttggggggtcagacttgatacactttcaggttgggagtggacccaccccagggcctgctgaggacagagcagc

SEQ ID NO: 595503 - DNA, 120 bp, Artificial Sequence
  ENSG00000173757_37 (sequence is synthesized)
caggccgtcctggctcactttgcagttggcactgggttggggaggaagagagctgatgagtgtggcttccctgagctggggtttccctgcttgtccagttgtgagctgtcctcggtgtta

SEQ ID NO: 595504 - DNA, 120 bp, Artificial Sequence
  ENSG00000173757_38 (sequence is synthesized)
ccgaggctgtgcctagagagtggagatttttgatgaaaggtgtgctcgctctctgcgttctatcttctctctcctccttgttcctgcaaaccacaagataaaggtagtggtgtgtctcga

SEQ ID NO: 595505 - DNA, 120 bp, Artificial Sequence
  ENSG00000173757_39 (sequence is synthesized)
ccccatcagcctctcacccactcccagacacacacaagtcctcaaaagtttcagctccgtgtgtgagatgtgcaggttttttctagggggtagggggagactaaaatcgaatataactta

SEQ ID NO: 595506 - DNA, 120 bp, Artificial Sequence
  ENSG00000173757_40 (sequence is synthesized)
aaatgaaagtatactttttataatttttctttttaaaacttggtgaaattatttcagatacatattttagtgtcaaggcagattagttatttagccaccaaaaaaaagtattgtgtacaa

SEQ ID NO: 595507 - DNA, 120 bp, Artificial Sequence
  ENSG00000173757_41 (sequence is synthesized)
tttggggcctcaaatttgactctgcctcaaaaaaaagaaatatatcctatgcagagttacagtcacaaagttgtgtattttatgttacaataaagccttcctctgaagggatggtattga

SEQ ID NO: 595508 - DNA, 120 bp, Artificial Sequence
  ENSG00000173757_42 (sequence is synthesized)
gtttgtttcccatttaatttttccaattaaatatgtgtataatattccaagtgttactctggtgttcttatgttcactgttgtatctccaaccaggagaatttaccaggacggaattaca

SEQ ID NO: 595509 - DNA, 84 bp, Artificial Sequence
  ENSG00000173757_43 (sequence is synthesized)
aagaattctgcctcctgtgtcagatccctgtttgcccttctggcctcttctgggcatcagcaaaggaatataaggaagttcttg

SEQ ID NO: 595510 - DNA, 120 bp, Artificial Sequence
  ENSG00000173757_44 (sequence is synthesized)
aacaaaaaaatattaagtgcttgtgtcatatccttagataagttaggtggttgtgttctgtcctaagaaaagatgtgattcataaggaagatcacatttttgtttcacttgagaactttg

SEQ ID NO: 595511 - DNA, 120 bp, Artificial Sequence
  ENSG00000173757_45 (sequence is synthesized)
gaagtaggtggcattcttgtgggggtccacaggggaggaactgggggcttggccccaggctggacccctggagggctggggtcaaaggaatccagagctcctctaggtctgagaccacac

SEQ ID NO: 595512 - DNA, 120 bp, Artificial Sequence
  ENSG00000173757_46 (sequence is synthesized)
agccctggcccgggctctggcctttgggagggagagatttgaccagaagtgattggtggtttagagtcgggttgggcaaatgtcatctgttcccctctctcaatatggagatttttcttg

SEQ ID NO: 595513 - DNA, 120 bp, Artificial Sequence
  ENSG00000173757_47 (sequence is synthesized)
gggcaacaagagcaaaactccgtcacaaaaaaaaaaaaaaaagttctcttaggaactgttttctgtgaagatagtttgatcttgtttcattttgtagagatacgtccgagaagattacat

SEQ ID NO: 595514 - DNA, 120 bp, Artificial Sequence
  ENSG00000173757_48 (sequence is synthesized)
tacgtccgagaagattacatgtatgtgttatgtagctaacatttcctctaaatgacgtacatttttagcaaacttctctatttcctgctaccccaaattatattatttactccgcatgtc

SEQ ID NO: 595515 - DNA, 120 bp, Artificial Sequence
  ENSG00000173762_0 (sequence is synthesized)
ctctctgagctctgagcgcctgcggtctcctgtgtgctgctctctgtggggtcctgtagacccagagaggctcagctgcactcgcccggctgggagagctgggtgtggggaacatggccg

SEQ ID NO: 595516 - DNA, 120 bp, Artificial Sequence
  ENSG00000173762_1 (sequence is synthesized)
ggcctccgaggctcctgctgctgcccctgcttctggcgctggctcgcggcctgcctggggccctggctgcccaagaggtgcagcagtctccccactgcacgactgtccccgtgggagcct

SEQ ID NO: 595517 - DNA, 120 bp, Artificial Sequence
  ENSG00000173762_2 (sequence is synthesized)
ccgtcaacatcacctgctccaccagcgggggcctgcgtgggatctacctgaggcagctcgggccacagccccaagacatcatttactacgaggacggggtggtgcccactacggacagac

SEQ ID NO: 595518 - DNA, 120 bp, Artificial Sequence
  ENSG00000173762_3 (sequence is synthesized)
ggttccggggccgcatcgacttctcagggtcccaggacaacctgactatcaccatgcaccgcctgcagctgtcggacactggcacctacacctgccaggccatcacggaggtcaatgtct

SEQ ID NO: 595519 - DNA, 120 bp, Artificial Sequence
  ENSG00000173762_4 (sequence is synthesized)
acggctccggcaccctggtcctggtgacagaggaacagtcccaaggatggcacagatgctcggacgccccaccaagggcctctgccctccctgccccaccgacaggctccgccctccctg

SEQ ID NO: 595520 - DNA, 120 bp, Artificial Sequence
  ENSG00000173762_5 (sequence is synthesized)
ggctgggcctgggggtggcgtgtgtgctggcgaggacacagataaagaaactgtgctcgtggcgggataagaattcggcggcatgtgtggtgtacgaggacatgtcgcacagccgctgca

SEQ ID NO: 595521 - DNA, 120 bp, Artificial Sequence
  ENSG00000173762_6 (sequence is synthesized)
acacgctgtcctcccccaaccagtaccagtgacccagtgggcccctgcacgtcccgcctgtggtccccccagcaccttccctgccccaccatgccccccaccctgccacacccctcaccc

SEQ ID NO: 595522 - DNA, 120 bp, Artificial Sequence
  ENSG00000173762_7 (sequence is synthesized)
tgctgtcctcccacggctgcagcagagtttgaagggcccagccgtgcccagctccaagcagacacacaggcagtggccaggccccacggtgcttctcagtggacaatgatgcctcctccg

SEQ ID NO: 595523 - DNA, 120 bp, Artificial Sequence
  ENSG00000173762_8 (sequence is synthesized)
ggaagccttccctgcccagcccacgccgccaccgggaggaagcctgactgtcctttggctgcatctcccgaccatggccaaggagggcttttctgtgggatgggcctgggcacgcggccc

SEQ ID NO: 595524 - DNA, 120 bp, Artificial Sequence
  ENSG00000173762_9 (sequence is synthesized)
tctcctgtcagtgccggcccacccaccagcaggcccccaacccccaggcagcccggcagaggacgggaggagaccagtcccccacccagccgtaccagaaataaaggcttctgtgcttcc

SEQ ID NO: 595525 - DNA, 120 bp, Artificial Sequence
  ENSG00000173762_10 (sequence is synthesized)
gcaccccaaagattgttccctctcctgagagcagcgtggggggcgccaaagccccagaggaaaaccctggtacccgccgcctcctctgcaggctctggaactctcagggtggaagtggcc

SEQ ID NO: 595526 - DNA, 120 bp, Artificial Sequence
  ENSG00000173762_11 (sequence is synthesized)
tcggcggggagggagggggaccagcaccaaagcgacctgagggggagggagcagcccaggcgctgggcccgcgtgtgcgcgtgtgcgcgtgtgcaggtgtgagtgtctgaggggggatct

SEQ ID NO: 595527 - DNA, 120 bp, Artificial Sequence
  ENSG00000173762_12 (sequence is synthesized)
gatctctgaggactgtgcgtgcatgttggagtgtgccggcgtgctgtgtggccgtgggaaggggagggggcctcagacagacacagagtctaggcgtggccactcccctcggtccctgct

SEQ ID NO: 595528 - DNA, 120 bp, Artificial Sequence
  ENSG00000173762_13 (sequence is synthesized)
gtttgtctggggctggagtgggggtcccgcttggcttgggcttggtgggggggtccaagccacttccactctccttcttcagaggcaccccagggtccgacccagccctgcctggggaag

SEQ ID NO: 595529 - DNA, 120 bp, Artificial Sequence
  ENSG00000173762_14 (sequence is synthesized)
gctctgctgggaagccctggggctcaggagacctgggggccagcccagaggagccccgtgggggtctcgtgttaaaattagaaagctgaccggagtggggtggggtccaggacaccacgc

SEQ ID NO: 595530 - DNA, 120 bp, Artificial Sequence
  ENSG00000173762_15 (sequence is synthesized)
ggggccctggctgcccaaggtaagagcttcccaggctctccatggccacagctccagagctctccctgccccatgagctcagagcccccagtctgagccacagcacagcccccaggaagc

SEQ ID NO: 595531 - DNA, 120 bp, Artificial Sequence
  ENSG00000173762_16 (sequence is synthesized)
gggtggggtgctgagcggcctccagtgtctgaggactcatttaagagaaggaaaaagggtggaccccggtggggagtggccggggctgtccaggcagggccgctgctttgggaggaagaa

SEQ ID NO: 595532 - DNA, 120 bp, Artificial Sequence
  ENSG00000173762_17 (sequence is synthesized)
gcccacagtctcggaacacgaggacagcacctcccccaacaccacagccggtgcccagatctgctccatgccccgtaaggcaccgtgtctttggcgacatgtcagccctgggctgtctca

SEQ ID NO: 595533 - DNA, 120 bp, Artificial Sequence
  ENSG00000173762_18 (sequence is synthesized)
gggccccaccatccccaccactgtcccctgcagggaggacattctctgtccttctggccagactgatggtgacagcccaggtcctccccagaggtgcagcagtctccccactgcacgact

SEQ ID NO: 595534 - DNA, 120 bp, Artificial Sequence
  ENSG00000173762_19 (sequence is synthesized)
ctgctcccccagcccttgtcgtgggaccctccctcctacatgtgcctgaactgttccagctcccagcccactgcccccagcagcctcctagatagctgcccctcctcccctccacagcct

SEQ ID NO: 595535 - DNA, 120 bp, Artificial Sequence
  ENSG00000173769_0 (sequence is synthesized)
acttccgcttacgcgccccacttccgcttccggccccgggctgtggtgactggcggtgtggggtgggtcagagggcagtaggtacctccaggcgggagcagcgtttgcaccgcggtgggt

SEQ ID NO: 595536 - DNA, 120 bp, Artificial Sequence
  ENSG00000173769_1 (sequence is synthesized)
tcctgcgagctggtgcagaggggccccagcgggccggccccggggcacatgcgacgacctccacccctgggccccacgacggcctcagggcctgaaggcaatgtgcgaaacctgcagaag

SEQ ID NO: 595537 - DNA, 120 bp, Artificial Sequence
  ENSG00000173769_2 (sequence is synthesized)
cggcaggcgccagggccaggcgcggcgggaggctgtggccctgaggccggggggtgccgggaaaataagcaaaagaggagaatggtggcccgggccacccctgggagaggcgaggtggaa

SEQ ID NO: 595538 - DNA, 120 bp, Artificial Sequence
  ENSG00000173769_3 (sequence is synthesized)
agtgataagtcggttgcagcatcaggggctggaaaggccgcaaggcgtcaggtggaggggcgcaggggcccggtgagcccgtcagactcgtcagacccgcgaggcctagaagcagcaaag

SEQ ID NO: 595539 - DNA, 120 bp, Artificial Sequence
  ENSG00000173769_4 (sequence is synthesized)
gaggctgaactccccttgcaaacggaaagacacaccaaggaaaaaagaaaagttactgaagcctcaagtgatgatccacagccagggcttgacttggtaagaaaggaatcattaaccagt

SEQ ID NO: 595540 - DNA, 120 bp, Artificial Sequence
  ENSG00000173769_5 (sequence is synthesized)
tcggaatctttccaaacagtggaatgcttgcagtctttgggtaaggaaagtataatagaaggtattaaaagaagaattcgaaataaaaaacttaaaagcttagaaaacccacctctcaaa

SEQ ID NO: 595541 - DNA, 120 bp, Artificial Sequence
  ENSG00000173769_6 (sequence is synthesized)
ataaccgaaaatgaggctacacaaaatattaaggttgaattccaagatgaactgtacaagaatactccaaaatattcttgtaatatcttgtcacctgaagtagaaaataattccgtttta

SEQ ID NO: 595542 - DNA, 120 bp, Artificial Sequence
  ENSG00000173769_7 (sequence is synthesized)
aaattacgtgattgcaattgtttcccccattccaagggttgtaatgatgaaaacaacctgccatataaacctgatggtggatgtatgcatgtagcagaaaatttctcaaagaaagaaaac

SEQ ID NO: 595543 - DNA, 120 bp, Artificial Sequence
  ENSG00000173769_8 (sequence is synthesized)
cttaggagtcttgcagagaagagtgacacaaatagtattcctcagctcttacaaacagaagaaaatgtaatgggagtaaataagttactaccagaagagagtgatttataccaaagtaaa

SEQ ID NO: 595544 - DNA, 120 bp, Artificial Sequence
  ENSG00000173769_9 (sequence is synthesized)
accaatggcttgctttcctgccttcaacatgaaaaaaataaatattcaatagaggagagcagtgttgggcgaaaacccaggaaaaggatgaagttgtctgaaaaagcagatgaaacagtt

SEQ ID NO: 595545 - DNA, 120 bp, Artificial Sequence
  ENSG00000173769_10 (sequence is synthesized)
actgagatgaacttctctaatgagtataacaagtctgagttgatgttgcaagaaaatcaaatgattgctgatggtaaagaagcagagactaaaagtcctttaaatgttttgagaaaagta

SEQ ID NO: 595546 - DNA, 120 bp, Artificial Sequence
  ENSG00000173769_11 (sequence is synthesized)
agccataatacagtctctttgatggatcatttattaagtgtcccagaaacagtagaaaaagaaacaagttctgaacatcatgtaaatgctgtgtttcagaaaaccattgaaccacttttg

SEQ ID NO: 595547 - DNA, 120 bp, Artificial Sequence
  ENSG00000173769_12 (sequence is synthesized)
aaagaagaaacagagaatgcttcagagccgttaggttatgaaagcatggcatcgaaagaggattttaaatcgatgaaaagcttcatagggaaatcacctaatgagtaccatattgaaagg

SEQ ID NO: 595548 - DNA, 120 bp, Artificial Sequence
  ENSG00000173769_13 (sequence is synthesized)
agatcttcacgggaagacttaagaagtgcatctgaagaattgaagttaagctgtcagagaacaatacctatgactggtaaaagaacttggccctattattcatgtgctagaatatctgcc

SEQ ID NO: 595549 - DNA, 120 bp, Artificial Sequence
  ENSG00000173769_14 (sequence is synthesized)
tggtgttggaaaaaggcttccttgccagaatcaagttactttcttcgtgggtctcaggaaagttgtaggcaagttgatgtccctaaacaccaaacaaaccagacccatttaactgactcc

SEQ ID NO: 595550 - DNA, 120 bp, Artificial Sequence
  ENSG00000173769_15 (sequence is synthesized)
aaattattattacaaagttccttaacagaaacaaacactgaatcttcaagtaaagaaaaattagattctaattctaattgtttgtcttcagtttctgcagtagaacctactttaatggtt

SEQ ID NO: 595551 - DNA, 120 bp, Artificial Sequence
  ENSG00000173769_16 (sequence is synthesized)
ataaaggaacctataatcaaggatgataaaaagataaaatcagaggaactgagcagaagagggtcagaggtaatttctaacactactgaagatactcaattaaccagtgagactcaaagc

SEQ ID NO: 595552 - DNA, 120 bp, Artificial Sequence
  ENSG00000173769_17 (sequence is synthesized)
ttaacgggaaataaaaaaaaagctagaggaaatttaacgaaacttaatttgacagcgacttccaaagatggtcaggaagcaaataactctgcaggcaaaactattcatcgaaaagcatgc

SEQ ID NO: 595553 - DNA, 120 bp, Artificial Sequence
  ENSG00000173769_18 (sequence is synthesized)
attgctcaacaaacatttatagttccagacttggttaaaatattgaacacaggacggctgactaattttaaaattcctttacttaagaataaatcagaaaaaagaaaagaagtaaatgcc

SEQ ID NO: 595554 - DNA, 120 bp, Artificial Sequence
  ENSG00000173769_19 (sequence is synthesized)
aagtcatcagagagagaagcttacagtcctctagaacttctggacaatttatctggagcagacgtaagacagaacaggagtaaagaaaatgtctccatgatgatgttaggacctcaaact

SEQ ID NO: 595555 - DNA, 120 bp, Artificial Sequence
  ENSG00000173769_20 (sequence is synthesized)
ttgagcatacgaaatagtgtaactccagtgcaagctagttctgactcattctacaataagaaatcctatagtatttctccaagctttacaaagcaaggtaacaatagcaaaccatctaat

SEQ ID NO: 595556 - DNA, 120 bp, Artificial Sequence
  ENSG00000173769_21 (sequence is synthesized)
cacgtctctgaaccaggcaatattgtttctaataaagaagttgcttctctcacagttgaaaataatgctttttcttgtgatcctgggtatgtagagaaaagtccttccttctgctgtaat

SEQ ID NO: 595557 - DNA, 120 bp, Artificial Sequence
  ENSG00000173769_22 (sequence is synthesized)
aagaatttttcagaggtagggtttccagatattcttaaagcatatgaagatgacgtcctcttaattgatgtaattcaagatgacccagacctctttggagtctccaatgaaggggagctc

SEQ ID NO: 595558 - DNA, 120 bp, Artificial Sequence
  ENSG00000173769_23 (sequence is synthesized)
tcatttacttctgaggtcccaaagataagccaggagcccaatgttgctggagagcaccaatcaacagactccaagtacatggaaactccagtaaaaaaagaaccaagtgatgacttaaga

SEQ ID NO: 595559 - DNA, 120 bp, Artificial Sequence
  ENSG00000173769_24 (sequence is synthesized)
gaacttcctgtactggactgtggatggataaagccagacatctgtgcttccaactcagcagaaagtgaaataaaacgtgatcccaaagatgtaaacacttccttaggagaagttgctaat

SEQ ID NO: 595560 - DNA, 120 bp, Artificial Sequence
  ENSG00000173769_25 (sequence is synthesized)
gagacctctgaaaatgaaacactgggagacttcagtgaacaaataaaaggttcagacttggatgaaaagcatagatttacagacaaagtgattaccaaagaagaaaaagaaaatatttat

SEQ ID NO: 595561 - DNA, 120 bp, Artificial Sequence
  ENSG00000173769_26 (sequence is synthesized)
gaagtttgcaaaagcaaagattctagaaatgcagactttatggtcggcgaatgtcaatttgcagtaccagtcccgaaacctctgtgtttattagtacctcctttgaatctaagtggtcgt

SEQ ID NO: 595562 - DNA, 120 bp, Artificial Sequence
  ENSG00000173769_27 (sequence is synthesized)
caagaagacacaatactgaatacctggatgaatgatttcagatttctgggaaaacattctgtcctaaagctgcagaatcctgaaacttgtgaaatattcaagagggaaaaaaatgtgggg

SEQ ID NO: 595563 - DNA, 120 bp, Artificial Sequence
  ENSG00000173769_28 (sequence is synthesized)
gtgttccagaagtccctagggttgatgataccctataaatattgcaaatttcattttaatacattacgtggctgtgagcgaccactgtgcaagtttgctcatgtgcctgaacaaggggat

SEQ ID NO: 595564 - DNA, 120 bp, Artificial Sequence
  ENSG00000173769_29 (sequence is synthesized)
gaaaaggtttgcatggatgtgtttaagaaatatataaatatcaatgaactgtgtttgctacagcgtgcagtaaacatatttatggagtactacagaaagtttcccccaggtgtatacttt

SEQ ID NO: 595565 - DNA, 120 bp, Artificial Sequence
  ENSG00000173769_30 (sequence is synthesized)
gatttacaagtgctaaatgaccttctaaattctttactcaaacattgtttgttgaaagaagtatttcagatagtgaacctcagcataatggttaaaatgctgccttctctgaaaatatta

SEQ ID NO: 595566 - DNA, 120 bp, Artificial Sequence
  ENSG00000173769_31 (sequence is synthesized)
ctaaacatatttgagtatgtggcaactatgaaattaaggaatgctgtacctgctttaattgatatcttttgcaagcttgttgaagccgggatggtgcttgacccagagcactttaactat

SEQ ID NO: 595567 - DNA, 120 bp, Artificial Sequence
  ENSG00000173769_32 (sequence is synthesized)
attgttaagcttttataccaagtacaagcttccaaacaagaaataactgcagttctggaaatgaaatcgaggttacagatgagacgatttaaaaagaactggaagtgtgatttagattca

SEQ ID NO: 595568 - DNA, 120 bp, Artificial Sequence
  ENSG00000173769_33 (sequence is synthesized)
gccttgaataaattagagcattgtaaagaaaaaggtgactggaccaaattgggaaaattatacattaacgtaaaaatgggctgtgaaaaatttgcagatttccagacattttgtgcttgc

SEQ ID NO: 595569 - DNA, 120 bp, Artificial Sequence
  ENSG00000173769_34 (sequence is synthesized)
attgctgaaacactcacaaaaaactatgaagatgaaagaccagatattcccttttgtgaatttgctgaaacagttagcaaagatccacaaaacagtaaagtagataaaggtgtactggga

SEQ ID NO: 595570 - DNA, 120 bp, Artificial Sequence
  ENSG00000173769_35 (sequence is synthesized)
agaattggaatcagtgctatgtacttctatcacaagctgttgcagtggtccaagggaaggaaggtcttagagaaactatatgaattaaaaatacactttacaagtttaaaaggacttata

SEQ ID NO: 595571 - DNA, 120 bp, Artificial Sequence
  ENSG00000173769_36 (sequence is synthesized)
gggcctgagaagttagcatcaagatgtcaaattgtgaatgttgcagcagaaatttttctaaaaagtggaagcctagatggtgccatttgggtaatgagggagtcagagtggataatcaat

SEQ ID NO: 595572 - DNA, 120 bp, Artificial Sequence
  ENSG00000173769_37 (sequence is synthesized)
acgcctctgtggccttgtgatagactggatgtgcttaatcgacataatttactctgtacaattgcacatgaaatcttagccaagagcctttatagacagacatttgaagttttgcagaat

SEQ ID NO: 595573 - DNA, 120 bp, Artificial Sequence
  ENSG00000173769_38 (sequence is synthesized)
ctaccaggttttcaaaattcccaagaaactgtggaagtctcacaatatagccttctttttaataagcttctaggttcctgtatagaaagcagtagtcttggtatgtcatcctctgtggca

SEQ ID NO: 595574 - DNA, 120 bp, Artificial Sequence
  ENSG00000173769_39 (sequence is synthesized)
gaattcatgatttcaaagagcatccctattgatttttcctttctcagaagattaattacttctttaggaaggagtcgtttatggctcaaagccagagcccactacaaaagtgctctttcc

SEQ ID NO: 595575 - DNA, 120 bp, Artificial Sequence
  ENSG00000173769_40 (sequence is synthesized)
ttgggttgctacccaccattggaaggaaatttataccgaaaacttcttctaattccatcttatttatctgagattgaaatgctcttagctattgaaatcttcatggtatctaatgctagt

SEQ ID NO: 595576 - DNA, 120 bp, Artificial Sequence
  ENSG00000173769_41 (sequence is synthesized)
agtattcagagtcctggaacttctacacagatactgcagatagttttgaaaaggtgtgaagacaaccagtctcggagcaatgatgattatcaagctgcagtagaaaggttaattatggct

SEQ ID NO: 595577 - DNA, 120 bp, Artificial Sequence
  ENSG00000173769_42 (sequence is synthesized)
gctcgtatatcagatccaaagcttttcgttaaacacatgactgtcaatgttaataaggaacaggtttatagtttggaacattgttctgccctgaaatggttaaaagagaatatgaagtgg

SEQ ID NO: 595578 - DNA, 120 bp, Artificial Sequence
  ENSG00000173769_43 (sequence is synthesized)
gctggaaaggtttggcttttcagtaaccattagctaataaagtctgctttttttttttttttagttcaagtaatcattgttgaaaataaaaggcaataaaaatagacagttttcactata

SEQ ID NO: 595579 - DNA, 120 bp, Artificial Sequence
  ENSG00000173786_0 (sequence is synthesized)
accgctggactcccgtgtccctccgcgcaggcgggcggccccggagcgctggtgccggcagaggcggcgacggtggcgcccctcctcatcatgaacagaggcttctcccgaaaaagccac

SEQ ID NO: 595580 - DNA, 120 bp, Artificial Sequence
  ENSG00000173786_1 (sequence is synthesized)
acattcctgcccaagatcttcttccgcaagatgtcatcctcaggggccaaggacaagcctgagctgcagtttcccttccttcaggatgaggacacagtggccacgctgctagagtgcaag

SEQ ID NO: 595581 - DNA, 120 bp, Artificial Sequence
  ENSG00000173786_2 (sequence is synthesized)
acgctcttcatcttgcgcggcctgccaggaagcggcaagtccacgctggcacgggtcatcgtggacaagtaccgtgatggcaccaagatggtgtcggctgacgcttacaagatcaccccc

SEQ ID NO: 595582 - DNA, 120 bp, Artificial Sequence
  ENSG00000173786_3 (sequence is synthesized)
ggcgctcgaggagccttctccgaggagtacaagcggctcgatgaggacctggctgcctactgccgccgccgggacatcagaattcttgtgcttgatgacaccaaccacgaacgggaacgg

SEQ ID NO: 595583 - DNA, 120 bp, Artificial Sequence
  ENSG00000173786_4 (sequence is synthesized)
ctggagcagctctttgaaatggccgaccagtaccagtaccaggtggtgctggtggagcccaagacggcgtggcggctggactgtgcccagctcaaggagaagaaccagtggcagctgtcg

SEQ ID NO: 595584 - DNA, 120 bp, Artificial Sequence
  ENSG00000173786_5 (sequence is synthesized)
gctgatgacctgaagaagctgaagcctgggctggagaaggacttcctgccgctctacttcggctggttcctgaccaagaagagctctgagaccctccgcaaagccggccaggtcttcctg

SEQ ID NO: 595585 - DNA, 120 bp, Artificial Sequence
  ENSG00000173786_6 (sequence is synthesized)
gaagagctggggaaccacaaggccttcaagaaggagctgcgacaattcgtccctggggatgagcccagggagaagatggacttggtcacctactttggaaagagacccccaggcgtgctg

SEQ ID NO: 595586 - DNA, 120 bp, Artificial Sequence
  ENSG00000173786_7 (sequence is synthesized)
cattgcacaaccaagttttgtgactacgggaaggctcccggggcagaggagtacgctcaacaagatgtgttaaagaaatcttactccaaggccttcacgctgaccatctctgccctcttt

SEQ ID NO: 595587 - DNA, 120 bp, Artificial Sequence
  ENSG00000173786_8 (sequence is synthesized)
gtgacacccaagacgactggggcccgggtggagttaagcgagcagcaactgcagttgtggccgagtgatgtggacaagctgtcacccactgacaacctgccgcgggggagccgcgcccac

SEQ ID NO: 595588 - DNA, 120 bp, Artificial Sequence
  ENSG00000173786_9 (sequence is synthesized)
atcaccctcggctgtgcagctgacgtagaggccgtgcagacgggccttgacctcttagagattctgcggcaggagaaggggggcagccgaggcgaggaggtgggcgagctaagccggggc

SEQ ID NO: 595589 - DNA, 120 bp, Artificial Sequence
  ENSG00000173786_10 (sequence is synthesized)
aagctctattccttgggcaatgggcgctggatgctgaccctggccaagaacatggaggtcagggccatcttcacggggtactacgggaaaggcaaacctgtgcccacgcaaggtagccgg

SEQ ID NO: 595590 - DNA, 120 bp, Artificial Sequence
  ENSG00000173786_11 (sequence is synthesized)
aaggggggcgccttgcagtcctgcaccatcatatgagtgttctcaccaccacttatgcccctagaagggaaggggagagggaaacgtgccctctgtttgatccttgttttgtgacatttt

SEQ ID NO: 595591 - DNA, 120 bp, Artificial Sequence
  ENSG00000173786_12 (sequence is synthesized)
ttttttttttttttttactcaaagttaacctacctgtaactttttaaaaacttgtaaaataactgaccctcccttcctgtccgccctcttcccctctaatgctcacgctcccaacacaag

SEQ ID NO: 595592 - DNA, 120 bp, Artificial Sequence
  ENSG00000173786_13 (sequence is synthesized)
gtgggcagggaggcaccattcaggaacctggaccaaagctgacgaggctgggccaagccagggatggggccacagccagaaccccgagccctacttccaggttctggttagctcagcccc

SEQ ID NO: 595593 - DNA, 120 bp, Artificial Sequence
  ENSG00000173786_14 (sequence is synthesized)
agcccagcccagctgctctgcccagagctgggtgagtggggagacacctcagagccccgcaaaacccactgaccggaggcaaaaggcagtggggctgggggtagttttccatggtcacag

SEQ ID NO: 595594 - DNA, 120 bp, Artificial Sequence
  ENSG00000173786_15 (sequence is synthesized)
agaactagtggtggctctgagaaggggaggacctctgggctttgattccatctccttgtcttttttctttgtttttagagacagggtcctgctatttcccaagctggagtgcagtggtgc

SEQ ID NO: 595595 - DNA, 120 bp, Artificial Sequence
  ENSG00000173786_16 (sequence is synthesized)
actcctgggctcaagcaatcctcctgagtgatcccatttcttaatcagtgtagccccaagaaggctggggctatttaccagggtagaaaaaggagcttacctcccacctttggtcctaag

SEQ ID NO: 595596 - DNA, 120 bp, Artificial Sequence
  ENSG00000173786_17 (sequence is synthesized)
ttacctcccacctttggtcctaagtccctgccccctccccttcacaccataactaggtaacagtttgataactagggaagaaagcagaacagttaagcagccgccacatccccgctggct

SEQ ID NO: 595597 - DNA, 120 bp, Artificial Sequence
  ENSG00000173786_18 (sequence is synthesized)
gggggcctcactccaggaaggggctggactggctgtcctttccagtggcctggctccgctgtgtggatggggagatcggggccagaggcagaaccctggtgaggaagctccagtcctgct

SEQ ID NO: 595598 - DNA, 120 bp, Artificial Sequence
  ENSG00000173786_19 (sequence is synthesized)
ctctacccagcccatcttgcctccatggtgcctctggaggcctctgggcctcctctaacaggggctggtgggcaccaagagccaatggagtagacccctggctggtaagggccaagtccc

SEQ ID NO: 595599 - DNA, 120 bp, Artificial Sequence
  ENSG00000173786_20 (sequence is synthesized)
accggttgcttctgggaaggggtttctaacactagtctgtgtgctgtggttcctggggtgccctccactgccctctgttcagtaacagggccttgctaatcgggttgtcactcaacaaaa

SEQ ID NO: 595600 - DNA, 120 bp, Artificial Sequence
  ENSG00000173786_21 (sequence is synthesized)
taagttactatcctggctttgcccaacctcagcaacctgtaagactgataatgaaataaatcatgttaatcctagctgtgtgcagtctctcttacccttctgtgcccagctcagtcttcc

SEQ ID NO: 595601 - DNA, 120 bp, Artificial Sequence
  ENSG00000173786_22 (sequence is synthesized)
ctagggctgggtgtattaggactggctttgtcccacagcttggggccatcggtcctgtctcccctctgctggccgggcacagctgtggtgaggttgggcagctgaacagtgttggctttc

SEQ ID NO: 595602 - DNA, 120 bp, Artificial Sequence
  ENSG00000173786_23 (sequence is synthesized)
atgaggaggcagaaagcagaggctggcctcagactcatacagaaggtgggggttggctgggtacgagggatgtggagcacaaaagcctctcatcccccattaaccagggcaccaagccca

SEQ ID NO: 595603 - DNA, 120 bp, Artificial Sequence
  ENSG00000173786_24 (sequence is synthesized)
caggtgtccccagcccactggatcagaaagagttcagtaagaccggaagctcctggtatgggtttctcccagttctctagggaaggccacctgcaggtcactgaaacttcaagcaccagg

SEQ ID NO: 595604 - DNA, 120 bp, Artificial Sequence
  ENSG00000173786_25 (sequence is synthesized)
gaagatctaacatttgagtcccttccaggccatcagaggcctagtcagccacatgggaaacttccaagacctgactcaggcatcattccaccatggctaaggcaccagccggggaagact

SEQ ID NO: 595605 - DNA, 120 bp, Artificial Sequence
  ENSG00000173786_26 (sequence is synthesized)
tgaaagaaaggggcaggagctcagatgaagagaaatcctaagttacctttctaggtcaaggcctgtccctggccatctctgaacttcagctagagcttcaagtctgtgcctggagctcct

SEQ ID NO: 595606 - DNA, 120 bp, Artificial Sequence
  ENSG00000173786_27 (sequence is synthesized)
gggaaggctactcaccttgaacaccacgcttgacaggacagcatggtgcatgccgctgcatccgtgagcagtgtgtctcctgcatgcagaaagggagcagagaaggccaggggcttttgc

SEQ ID NO: 595607 - DNA, 120 bp, Artificial Sequence
  ENSG00000173786_28 (sequence is synthesized)
taaaaatagtggccagaccagagctctggagccacctgtcccacctcaaatgggtctgggggtcaggaggcagggttttatctctgtctaccatctccctcgaacccacactgcaacagg

SEQ ID NO: 595608 - DNA, 120 bp, Artificial Sequence
  ENSG00000173786_29 (sequence is synthesized)
aactgtgagagtctttgtaagtaaactgccctgtctaggtcagtacccacctgagctttggacgcacacagcttttagtacccacctgagctttggacacacacagcttctagtgatttc

SEQ ID NO: 595609 - DNA, 120 bp, Artificial Sequence
  ENSG00000173786_30 (sequence is synthesized)
tggggccccaccgtaaagtgagcatgctttctgaactcgcttctctgtgactgatgttaggctgggcccagaggcacagccggggcctgcctagcactcacatgctggacaggtctggga

SEQ ID NO: 595610 - DNA, 120 bp, Artificial Sequence
  ENSG00000173786_31 (sequence is synthesized)
gaggcagagtgccccacctgccactaggctgggtgcccacagcccgcatgcagcagcttgctgcaccccaagtccaggtcgggctcagctctggctcacagactggagacaatgcagatg

SEQ ID NO: 595611 - DNA, 120 bp, Artificial Sequence
  ENSG00000173786_32 (sequence is synthesized)
ccagagcaaagggccaggaagggtcaaaacattttattctcttttttttttcttttttaataaagttaaacagtaaaacaaaaattcacaagctgcctccctgtccacccccgcctccct

SEQ ID NO: 595612 - DNA, 120 bp, Artificial Sequence
  ENSG00000173786_33 (sequence is synthesized)
cccctgccctcggtcttcggcattggttccctttgctccaccccactcacagagacacagggcatccaactgagaaaacgaaactgctctaagcacacggagacgtgatgaagggaggag

SEQ ID NO: 595613 - DNA, 120 bp, Artificial Sequence
  ENSG00000173786_34 (sequence is synthesized)
gtgaactgtttccacattcaagattaaactgagtgaatctgcattttctgggttctgggtggttgcccttcattagccaaattgaaaaaagaaattccctggaccagatgctgaaagaga

SEQ ID NO: 595614 - DNA, 120 bp, Artificial Sequence
  ENSG00000173786_35 (sequence is synthesized)
aaagaggggttggtagttggctatggattttctaaggaagatcactttgctctgattatggaaaagtcttcaagggctgcttcaaactcaaacacagagagaaactctatgggtatcaaa

SEQ ID NO: 595615 - DNA, 120 bp, Artificial Sequence
  ENSG00000173786_36 (sequence is synthesized)
cagctcaggctgtttttgggtgcaagagggagcacgtgactgtattatacatgggtagcttctgacctcagcattatctatatagtacctttgctcttgcagagaagccttggtactagg

SEQ ID NO: 595616 - DNA, 120 bp, Artificial Sequence
  ENSG00000173786_37 (sequence is synthesized)
cagttagagatgcctccctgaccctgcagagatgcggtggctaaaggtcccaaggcaaggggtgcctgggaaccttcctgtcttcatccttagcaacagccgagtggatagatgccctgc

SEQ ID NO: 595617 - DNA, 120 bp, Artificial Sequence
  ENSG00000173786_38 (sequence is synthesized)
tagatgagaattcagctgcccccgctcatgggcccctctgactcccaaagagctgcctaagaggcaatgagtgtgttggcttgtgatctgggaactcccaagaacagcaggcccacctac

SEQ ID NO: 595618 - DNA, 120 bp, Artificial Sequence
  ENSG00000173786_39 (sequence is synthesized)
cttcaaagctgaagccgccaggaccgccaaagaatgccttgaagatattgtttggatcaaaatctgtagagcagggcaagtaacatggaagggaagaaaaggtgaaaaattagaaatgtt

SEQ ID NO: 595619 - DNA, 120 bp, Artificial Sequence
  ENSG00000173786_40 (sequence is synthesized)
cgaagagaactgatgacactgagaacagatctccaaagctttcctggagagtctcactcccctcctttcccaacacttcagactgcaagtgagcaaacctgccccatcccgtgcaaaaca

SEQ ID NO: 595620 - DNA, 120 bp, Artificial Sequence
  ENSG00000173786_41 (sequence is synthesized)
tgctacctgatcccactcctaggacatgttcccttctccttccaactgctgccccaaaggaagctttctctgcttcagcttgcttcattgggctgttttctcaacaaatggaatgccatt

SEQ ID NO: 595621 - DNA, 120 bp, Artificial Sequence
  ENSG00000173786_42 (sequence is synthesized)
tgcacttacacaagactttccccatactctgtctccctataatgctggagcggctactaaaaaggataaaatgtatcacttaaatgttaccaaaaataaatataagagcaagatctagga

SEQ ID NO: 595622 - DNA, 120 bp, Artificial Sequence
  ENSG00000173786_43 (sequence is synthesized)
gctggactcccgtgtccctccgcgcaggcgggcggccccggagcgctggtgccggcagaggcggcgacggtggcgcccctcctcatcatgccgtggcagctgtggcttggcccagacaca

SEQ ID NO: 595623 - DNA, 120 bp, Artificial Sequence
  ENSG00000173786_44 (sequence is synthesized)
gctggactcccgtgtccctccgcgcaggcgggcggccccggagcgctggtgccggcagaggcggcgacggtggcgcccctcctcatcatggatgaggacacagtggccacgctgctagag

SEQ ID NO: 595624 - DNA, 120 bp, Artificial Sequence
  ENSG00000173786_45 (sequence is synthesized)
gggtttcaccatcttgaccaggctggtcggtagcacaaaagaaaggaggggcccttggcccaagatgggacgaatcaagcttgacaggatgattgccagatctttttttttttttttttt

SEQ ID NO: 595625 - DNA, 77 bp, Artificial Sequence
  ENSG00000173786_46 (sequence is synthesized)
atgggacgaatcaagcttgacaggatgattgccagatcttttttttttttttttttgagacgtcggcttactgcaac

SEQ ID NO: 595626 - DNA, 65 bp, Artificial Sequence
  ENSG00000173786_47 (sequence is synthesized)
gctaatttatccgcctcaatttcccaaattgccgggattacaggtgcgagccactatgcccagcc

SEQ ID NO: 595627 - DNA, 120 bp, Artificial Sequence
  ENSG00000173786_48 (sequence is synthesized)
aaattgccgggattacaggtgcgagccactatgcccagcctattttatttgtaaaggaaaactggatttttctgcccaggattagagcaggagaaatgtaatgggccagcaaggctgctc

SEQ ID NO: 595628 - DNA, 120 bp, Artificial Sequence
  ENSG00000173786_49 (sequence is synthesized)
tcaggagaggccttcctcccctgtggagggcgagacatcctcatggggactcaattcagaacataacaggaaaaagcgagtgactccaaagacagccacaggtgtggagtctggaaatca

SEQ ID NO: 595629 - DNA, 120 bp, Artificial Sequence
  ENSG00000173786_50 (sequence is synthesized)
aaatcacagatactccactcctctttgtgtcttccagccccataatgtcaccccattatagtccaagacccttcctgtaccaggaggcccccccataggcctgcaaggtgtgtattaaac

SEQ ID NO: 595630 - DNA, 120 bp, Artificial Sequence
  ENSG00000173786_51 (sequence is synthesized)
ctgggaacactggggtatatggtcaccctaactgttgtgctggattgatagatagggttggtcacttgcccgaggccgatggctggtacatggcagagctgagatattcactgtgttctg

SEQ ID NO: 595631 - DNA, 120 bp, Artificial Sequence
  ENSG00000173786_52 (sequence is synthesized)
gctgtttccaccgtaccatgttgttcccagccctctgttttctttccaccccacttcccatgacttgcttcccctttgagacgtggtgctagtaaatcttagattcccttggcctgtact

SEQ ID NO: 595632 - DNA, 120 bp, Artificial Sequence
  ENSG00000173786_53 (sequence is synthesized)
tcccttggcctgtactgcctgcctctgttacaaatgccttagagtttggagaagagatggaaagatctatacaatgtaaagccagagaattttaacttttttttttttttttttggagac

SEQ ID NO: 595633 - DNA, 120 bp, Artificial Sequence
  ENSG00000173786_54 (sequence is synthesized)
gtgaaccaccgcacctggcctgagaattttaactttttattgctctaaagttgccattagtttgaccaactaaccaatgaatgagctgtagtgggttgctggagaggtgatgcttagtgt

SEQ ID NO: 595634 - DNA, 120 bp, Artificial Sequence
  ENSG00000173786_55 (sequence is synthesized)
atcatggtgagaggccgggcggggccgggcacggggtagcaccagggcgggaaacgagtgtcggggcccctcgggaggaagcgtcttgcaaacgaggacccggggctccgggttcgactt

SEQ ID NO: 595635 - DNA, 120 bp, Artificial Sequence
  ENSG00000173786_56 (sequence is synthesized)
agtcccagaaccgcaggctcctggcgcgccccgcatgcctccagcacgtttacctttccgaagtggcaggaatggggaaagcgcacgcttaggagagcttcagacaagcttccctcttcc

SEQ ID NO: 595636 - DNA, 120 bp, Artificial Sequence
  ENSG00000173786_57 (sequence is synthesized)
agtaaatcttagattcccttggcctgtactgcctgcctctgttacaaatgccttagagtttggagaagagatggaaagatctatacaattcgtccctggggatgagcccagggagaagat

SEQ ID NO: 595637 - DNA, 120 bp, Artificial Sequence
  ENSG00000173786_58 (sequence is synthesized)
gaccgaaagggaaagaaggtccagcactgccccgcttgggaaggcacccacaaccagtctagggactaggggtaaggccggcggggagcccgcgaatgacctgggctgacatctcttccc

SEQ ID NO: 595638 - DNA, 120 bp, Artificial Sequence
  ENSG00000173786_59 (sequence is synthesized)
ctccttacacagaacagaggcttctcccgaaaaagccacacattcctgcccaagatcttcttccgcaagatgtcatcctcaggggccaaggacaagcctgagctgcagtttcccttcctt

SEQ ID NO: 595639 - DNA, 120 bp, Artificial Sequence
  ENSG00000173786_60 (sequence is synthesized)
gtcccttgtggcttctagaagataggaaaacaagtggctccgagaggcgcttctgacacacagcacagcggcgggtagagctggatcctaattgcagaacagaggcttctcccgaaaaag

SEQ ID NO: 595640 - DNA, 120 bp, Artificial Sequence
  ENSG00000173786_61 (sequence is synthesized)
gctatgtaaagcggccgggctcgggtcgtgccaccgctggactcccgtgtccctccgcgcaggcgggcggccccggagcgctggtgccggcagaggcggcgacggtggcgcccctcctca

SEQ ID NO: 595641 - DNA, 120 bp, Artificial Sequence
  ENSG00000173801_0 (sequence is synthesized)
ggccagagtccggagcagccgccgcccgaccacgccgagctcagttcgctgtccgcgccggctcccaccccggcccgaccccgacccggcccggtcaggccccatactcagtagccacga

SEQ ID NO: 595642 - DNA, 120 bp, Artificial Sequence
  ENSG00000173801_1 (sequence is synthesized)
tggaggtgatgaacctgatggagcagcctatcaaggtgactgagtggcagcagacatacacctacgactcgggtatccactcgggcgccaacacctgcgtgccctccgtcagcagcaagg

SEQ ID NO: 595643 - DNA, 120 bp, Artificial Sequence
  ENSG00000173801_2 (sequence is synthesized)
gcatcatggaggaggatgaggcctgcgggcgccagtacacgctcaagaaaaccaccacttacacccagggggtgccccccagccaaggtgatctggagtaccagatgtccacaacagcca

SEQ ID NO: 595644 - DNA, 120 bp, Artificial Sequence
  ENSG00000173801_3 (sequence is synthesized)
gggccaaacgggtgcgggaggccatgtgccctggtgtgtcaggcgaggacagctcgcttctgctggccacccaggtggaggggcaggccaccaacctgcagcgactggccgagccgtccc

SEQ ID NO: 595645 - DNA, 120 bp, Artificial Sequence
  ENSG00000173801_4 (sequence is synthesized)
agctgctcaagtcggccattgtgcatctcatcaactaccaggacgatgccgagctggccactcgcgccctgcccgagctcaccaaactgctcaacgacgaggacccggtggtggtgacca

SEQ ID NO: 595646 - DNA, 120 bp, Artificial Sequence
  ENSG00000173801_5 (sequence is synthesized)
aggcggccatgattgtgaaccagctgtcgaagaaggaggcgtcgcggcgggccctgatgggctcgccccagctggtggccgctgtcgtgcgtaccatgcagaataccagcgacctggaca

SEQ ID NO: 595647 - DNA, 120 bp, Artificial Sequence
  ENSG00000173801_6 (sequence is synthesized)
cagcccgctgcaccaccagcatcctgcacaacctctcccaccaccgggaggggctgctcgccatcttcaagtcgggtggcatccctgctctggtccgcatgctcagctcccctgtggagt

SEQ ID NO: 595648 - DNA, 120 bp, Artificial Sequence
  ENSG00000173801_7 (sequence is synthesized)
cggtcctgttctatgccatcaccacgctgcacaacctgctcctgtaccaggagggcgccaagatggccgtgcgcctggccgacgggctgcaaaagatggtgcccctgctcaacaagaaca

SEQ ID NO: 595649 - DNA, 120 bp, Artificial Sequence
  ENSG00000173801_8 (sequence is synthesized)
accccaagttcctggccatcaccaccgactgcctgcagctcctggcctacggcaaccaggagagcaagctgatcatcctggccaatggtgggccccaggccctcgtgcagatcatgcgta

SEQ ID NO: 595650 - DNA, 120 bp, Artificial Sequence
  ENSG00000173801_9 (sequence is synthesized)
actacagttatgaaaagctgctctggaccaccagtcgtgtgctcaaggtgctatccgtgtgtcccagcaataagcctgccattgtggaggctggtgggatgcaggccctgggcaagcacc

SEQ ID NO: 595651 - DNA, 120 bp, Artificial Sequence
  ENSG00000173801_10 (sequence is synthesized)
tgaccagcaacagcccccgcctggtgcagaactgcctgtggaccctgcgcaacctctcagatgtggccaccaagcaggagggcctggagagtgtgctgaagattctggtgaatcagctga

SEQ ID NO: 595652 - DNA, 120 bp, Artificial Sequence
  ENSG00000173801_11 (sequence is synthesized)
gtgtggatgacgtcaacgtcctcacctgtgccacgggcacactctccaacctgacatgcaacaacagcaagaacaagacgctggtgacacagaacagcggtgtggaggctctcatccatg

SEQ ID NO: 595653 - DNA, 120 bp, Artificial Sequence
  ENSG00000173801_12 (sequence is synthesized)
ccatcctgcgtgctggtgacaaggacgacatcacggagcctgccgtctgcgctctgcgccacctcactagccgccaccctgaggccgagatggcccagaactctgtgcgtctcaactatg

SEQ ID NO: 595654 - DNA, 120 bp, Artificial Sequence
  ENSG00000173801_13 (sequence is synthesized)
ctggccctgtgcccagccaaccatgccccgctgcaggaggcagcggtcatcccccgcctcgtccaactgctggtgaaggcccaccaggatgcccagcgccacgtagctgcaggcacacag

SEQ ID NO: 595655 - DNA, 120 bp, Artificial Sequence
  ENSG00000173801_14 (sequence is synthesized)
cagccctacacggatggtgtgaggatggaggagattgtggagggctgcaccggagcactgcacatcctcgcccgggaccccatgaaccgcatggagatcttccggctcaacaccattccc

SEQ ID NO: 595656 - DNA, 120 bp, Artificial Sequence
  ENSG00000173801_15 (sequence is synthesized)
ctgtttgtgcagctcctgtactcgtcggtggagaacatccagcgcgtggctgccggggtgctgtgtgagctggcccaggacaaggaggcggccgacgccattgatgcagagggggcctcg

SEQ ID NO: 595657 - DNA, 120 bp, Artificial Sequence
  ENSG00000173801_16 (sequence is synthesized)
gccccactcatggagttgctgcactcccgcaacgagggcactgccacctacgctgctgccgtcctgttccgcatctccgaggacaagaacccagactaccggaagcgcgtgtccgtggag

SEQ ID NO: 595658 - DNA, 120 bp, Artificial Sequence
  ENSG00000173801_17 (sequence is synthesized)
ctcaccaactccctcttcaagcatgacccggctgcctgggaggctgcccagagcatgattcccatcaatgagccctatggagatgacatggatgccacctaccgccccatgtactccagc

SEQ ID NO: 595659 - DNA, 120 bp, Artificial Sequence
  ENSG00000173801_18 (sequence is synthesized)
gatgtgccccttgacccgctggagatgcacatggacatggatggagactaccccatcgacacctacagcgacggcctcaggcccccgtaccccactgcagaccacatgctggcctaggcg

SEQ ID NO: 595660 - DNA, 120 bp, Artificial Sequence
  ENSG00000173801_19 (sequence is synthesized)
gcctggccccagtgcggttcctcatctgagaggctctccgtgcaggcgatggggcaagacagaaaagtgcctgagctggggaagccggggtgtaacttcctgctgcaccctgcgcctcca

SEQ ID NO: 595661 - DNA, 120 bp, Artificial Sequence
  ENSG00000173801_20 (sequence is synthesized)
gaggtcctccgtagggtctttcttgggatagtgttctgctcctgcttttctgtcctgggcatgggtccagggcctgacaccccctccccgcccctgtggccctggccactaaagcttcag

SEQ ID NO: 595662 - DNA, 120 bp, Artificial Sequence
  ENSG00000173801_21 (sequence is synthesized)
actcaagtacccattctgttttcccccagcaacgcccctccaaacctccagcctccctgtctccagctgcctgggcccggaagggctttggttccttctctgggtctgattttctcactg

SEQ ID NO: 595663 - DNA, 120 bp, Artificial Sequence
  ENSG00000173801_22 (sequence is synthesized)
aactccaccgaccaactgccctaagcccccagggcctccagggcccaggttcgagacccaaacccccaaaatccaaaacttctcttgaaaagttcagggaccgtccaggggagatgggga

SEQ ID NO: 595664 - DNA, 120 bp, Artificial Sequence
  ENSG00000173801_23 (sequence is synthesized)
ggagatatggagtgagtcacctgctccagaagatgccagcttctctctccagggtgcttagttggctttgcccacccctcactccccagggagctctggggacagcttcctcacacccct

SEQ ID NO: 595665 - DNA, 120 bp, Artificial Sequence
  ENSG00000173801_24 (sequence is synthesized)
gtcccacccacacagctgccctagctgaccccgagaagtgctcttggctgacccctctggtgtgtggtgaggggctttctcttccccttcctgtttcagacccccccatttcccgcacat

SEQ ID NO: 595666 - DNA, 120 bp, Artificial Sequence
  ENSG00000173801_25 (sequence is synthesized)
ggtgtggggggctgggggaggtccaagcagagtgttttattattatcgctttatgtttttggttattggtttttttgtatagaccaaagcaaagaaaataaaaataacacagatgcgttg

SEQ ID NO: 595667 - DNA, 120 bp, Artificial Sequence
  ENSG00000173801_26 (sequence is synthesized)
catgctttctggaggcctgcacagacctttcccacccgctttcctgaaagaatttgacagggaaagtgagaccgcaggaaggctttttgggggaaggtttcttcaatgctagactctctc

SEQ ID NO: 595668 - DNA, 120 bp, Artificial Sequence
  ENSG00000173801_27 (sequence is synthesized)
ctccttctgttggaggccctcccatctccccgctgaaacctgcgctccttttttggggggatcctttgctgctgagcttccccaagcacggtgtgccctggcctgccttcttcttgtgtc

SEQ ID NO: 595669 - DNA, 120 bp, Artificial Sequence
  ENSG00000173801_28 (sequence is synthesized)
tttggtggggatggggaggcctattcctgctggccccttctgggggtggtgggcaggtgacacggagtggcttgagcttctggggatgcaggtccaccgagcccctgacccctgtctgtc

SEQ ID NO: 595670 - DNA, 120 bp, Artificial Sequence
  ENSG00000173801_29 (sequence is synthesized)
tgtgggggccgagcgcacattttcccagcgactctggccccacctgccgagcaggtgagcgcacggagtccagaggccctgccctccagctcccagagcctcgtcgatactacctgcggc

SEQ ID NO: 595671 - DNA, 120 bp, Artificial Sequence
  ENSG00000173801_30 (sequence is synthesized)
ctagagccgactggcagtccccggggccaatggcaagcggataaacagaggcggccgtggaagaggactggaggcgaggctccgcccctccacgggacagtcaggcgagatagccagtga

SEQ ID NO: 595672 - DNA, 120 bp, Artificial Sequence
  ENSG00000173801_31 (sequence is synthesized)
gaggagtttggaggaaagttgccactccagattgactacttagcaaccccctgcatgggcatggctttctaagcttcaaagcaaggaaagagatcacaaatggaaaaaaaaaacaaaaaa

SEQ ID NO: 595673 - DNA, 120 bp, Artificial Sequence
  ENSG00000173801_32 (sequence is synthesized)
aggcagagctgcatcgggccccctgccttccctgctcccaatttcctgagaccgcccccccccacccagaattggggatcttgatcaggcctctgacctctgcaggtcagttcccaggac

SEQ ID NO: 595674 - DNA, 120 bp, Artificial Sequence
  ENSG00000173801_33 (sequence is synthesized)
ttaccgtttggggaacttgctgccgctggtctctttggggccaccctcaccccaccccacgcgtcatcctcgctttccctccctccctactcccccaggcctgggtggggccctattgtt

SEQ ID NO: 595675 - DNA, 120 bp, Artificial Sequence
  ENSG00000173801_34 (sequence is synthesized)
cccagccaaggtcaggacccctggggactattgcatggggcagaaaacctgcctgggtcctggagagaggtcagagtgaaaggaggcagattgtagggggtctctggtctgagggaggag

SEQ ID NO: 595676 - DNA, 120 bp, Artificial Sequence
  ENSG00000173801_35 (sequence is synthesized)
gcacagctcatgctaactaggggcccacccagtctgaaggaggaggtgcagctacttcagggtgctgcatctgggagggtcacagaatcctcttctgtgaaccatcagtagggagggaag

SEQ ID NO: 595677 - DNA, 120 bp, Artificial Sequence
  ENSG00000173805_0 (sequence is synthesized)
cagactcgagatgcgcccgaagaggttgggccggtgctgcgcggggagccggctcggacccggggacccagcagcactcacctgtgcaccttcgccctcagccagtcccgctccggagcc

SEQ ID NO: 595678 - DNA, 120 bp, Artificial Sequence
  ENSG00000173805_1 (sequence is synthesized)
ctctgcgcagccgcaggcacggggcactggacagagagtaggatcccgagccacctctggatcccagttcctctcggaagcccgcaccggagctcgcccggcctcggaggctggagccaa

SEQ ID NO: 595679 - DNA, 120 bp, Artificial Sequence
  ENSG00000173805_2 (sequence is synthesized)
ggcaggagcccggcgcccgtccgcattctcggccatccaaggggatgtccggtctatgcccgacaattcggacgcgccgtggacccgcttcgtattccaagggccgtttggttcccgggc

SEQ ID NO: 595680 - DNA, 120 bp, Artificial Sequence
  ENSG00000173805_3 (sequence is synthesized)
cactggccgggggactggaaaggcagcgggcatctggaagacgccagccgcctacgttggccggcgacccggggtgtccggccctgagcgcgccgcctttattcgggagctggaggaagc

SEQ ID NO: 595681 - DNA, 120 bp, Artificial Sequence
  ENSG00000173805_4 (sequence is synthesized)
actgtgtcctaacctacctccgccagtcaaaaagatcacccaggaagacgtcaaagtgatgttatatttgctggaggagcttctcccacctgtctgggagagcgttacctatgggatggt

SEQ ID NO: 595682 - DNA, 120 bp, Artificial Sequence
  ENSG00000173805_5 (sequence is synthesized)
cctgcagagagagagggacctgaacactgcagctcgcatcggccagtccctggtgaaacagaacagtgttttgatggaggagaacagcaagctggaagccctgctgggctcagccaagga

SEQ ID NO: 595683 - DNA, 120 bp, Artificial Sequence
  ENSG00000173805_6 (sequence is synthesized)
ggagattttatacctcagacaccaggtgaacttgcgggatgagctcctccagctctactcagattctgatgaggaggatgaggatgaagaagaggaggaggaagaaaaggaggcagaaga

SEQ ID NO: 595684 - DNA, 120 bp, Artificial Sequence
  ENSG00000173805_7 (sequence is synthesized)
ggaacaggaagaagaagaagcagaggaagacctgcagtgtgctcatccctgtgatgcccctaagctgatttcgcaggaggcattgctgcaccagcaccactgcccacagctggaagcctt

SEQ ID NO: 595685 - DNA, 120 bp, Artificial Sequence
  ENSG00000173805_8 (sequence is synthesized)
gcaggagaagctgaggctgctggaggaggagaatcatcagctgagagaagaggcctctcaactcgacactcttgaggatgaggaacagatgctcattctggagtgtgtggagcagttttc

SEQ ID NO: 595686 - DNA, 120 bp, Artificial Sequence
  ENSG00000173805_9 (sequence is synthesized)
ggaggccagccaacagatggctgagctgtcggaggtgctggtgctcaggctggaaaactatgaacggcagcagcaggaggtcgctcggctgcaggcccaggtgctgaagctgcagcagcg

SEQ ID NO: 595687 - DNA, 120 bp, Artificial Sequence
  ENSG00000173805_10 (sequence is synthesized)
ctgccggatgtatggggctgagactgaaaagttgcagaagcagctggcttcggagaaggaaatccagatgcagctccaggaagaggagactcttcctggtttccaggagacgctggctga

SEQ ID NO: 595688 - DNA, 120 bp, Artificial Sequence
  ENSG00000173805_11 (sequence is synthesized)
ggagctcagaacgtctctaaggaggatgatctcagaccctgtgtattttatggagaggaattatgagatgcccagaggggacacatccagcctaaggtatgattttcgctacagtgagga

SEQ ID NO: 595689 - DNA, 120 bp, Artificial Sequence
  ENSG00000173805_12 (sequence is synthesized)
tcgagagcaggtgcgggggtttgaggctgaggaagggttgatgctggcagcggatatcatgcggggggaagatttcacgcctgcggaggagttcgtgccccaggaggagctgggggctgc

SEQ ID NO: 595690 - DNA, 120 bp, Artificial Sequence
  ENSG00000173805_13 (sequence is synthesized)
caagaaggtgccggctgaggaaggggtgatggaagaggcagagctggtgtcagaggagaccgagggctgggaggaggtggaactggagctggatgaggcaacgcggatgaacgtggtgac

SEQ ID NO: 595691 - DNA, 120 bp, Artificial Sequence
  ENSG00000173805_14 (sequence is synthesized)
atcagccctggaggccagcggcttgggcccttcacacctggacatgaattatgtcctccagcagctggccaactggcaagatgcccattacaggcggcagctgaggtggaagatgctcca

SEQ ID NO: 595692 - DNA, 120 bp, Artificial Sequence
  ENSG00000173805_15 (sequence is synthesized)
gaaaggtgagtgcccccacggggccctccctgccgccagccggacaagctgcagatcgtcgtgccgatgaaaagagagggtggataagctccccgagtgctcacctgccccagcctggct

SEQ ID NO: 595693 - DNA, 120 bp, Artificial Sequence
  ENSG00000173805_16 (sequence is synthesized)
tttatgtggcatttgcttaggattccagatctccatccacttttctcctgggggctgggctgggggttagggctgggactgtgcccccacactgcgcctcagcttcccatctctgcccgc

SEQ ID NO: 595694 - DNA, 120 bp, Artificial Sequence
  ENSG00000173805_17 (sequence is synthesized)
ttgcttcccctgcccccaacccctgcctcctctatcccccaggctctccaactctgcagcagtggcagcagcagtcaaaacaaacacggggggcggtgggtgggatggtggagcagcccg

SEQ ID NO: 595695 - DNA, 120 bp, Artificial Sequence
  ENSG00000173805_18 (sequence is synthesized)
ggggctgacccaggctggaggacagggccagccaccctcccacggcctgggaggaagagaggccttctgggactgcccaggctatggggacaaaggccttcaccagcaagggccacagtt

SEQ ID NO: 595696 - DNA, 120 bp, Artificial Sequence
  ENSG00000173805_19 (sequence is synthesized)
ggaacagtcccctgggtgtcagaaggtgggctagggcctcctgcagggttgtggggtggaacagggtctcctctccccagccagaaaccccaaagtctgggagctgcaccttccgagtgc

SEQ ID NO: 595697 - DNA, 120 bp, Artificial Sequence
  ENSG00000173805_20 (sequence is synthesized)
aggccatgtgagccctgcctctttaaggagccgcaggacatgaaagatgaccttgtgacactcatgcacagcagccattgcacgtgcatcagctcccatcagcctcattccgtggcaggt

SEQ ID NO: 595698 - DNA, 120 bp, Artificial Sequence
  ENSG00000173805_21 (sequence is synthesized)
gatgtgtccccattggttaggtgaggagggtgaggctcagagagctaaggacacttgtttggggccacacagccggggtagatctgagcccgtcctctctactcctgtgctgtagcacct

SEQ ID NO: 595699 - DNA, 120 bp, Artificial Sequence
  ENSG00000173805_22 (sequence is synthesized)
tcactggcccatccctcccctctagtgctgtcctggtacccgtcccagcctgtccccattctcatggccctttggtcactgccgggtggaatagcactggcttcagcaggcgtgtcatgt

SEQ ID NO: 595700 - DNA, 120 bp, Artificial Sequence
  ENSG00000173805_23 (sequence is synthesized)
aagcttgtgcaggttataaactgaaccatgacctttatggcgcatgcagggggcaacctgcataattatcaatggcgactttccgtgtccttctgatacagttgatcagacccctgccca

SEQ ID NO: 595701 - DNA, 120 bp, Artificial Sequence
  ENSG00000173805_24 (sequence is synthesized)
ccgcccaggccaggcctgtggtcatcaatgccccagttcacatccacctgcttctcttccaggctttgctgttccccagcagcctgcagaggccccacagacagcttgaggcccctcctt

SEQ ID NO: 595702 - DNA, 120 bp, Artificial Sequence
  ENSG00000173805_25 (sequence is synthesized)
ctgctgcctggccaagccccacacccgcagaccctccttcccatcctctgaaatgggaccctgtgtctgtcaccagcccaccctctgtgttcatgaacctgggctggagcttggggaccc

SEQ ID NO: 595703 - DNA, 120 bp, Artificial Sequence
  ENSG00000173805_26 (sequence is synthesized)
ctccctgcccctggcttcctcttccatgttctgccctttcccacatgttggaggcttttccaacgtcttcagggacaggcggtaggaaccccggccctcgctctgcagctggtgcaaaag

SEQ ID NO: 595704 - DNA, 120 bp, Artificial Sequence
  ENSG00000173805_27 (sequence is synthesized)
ctgtggctgccaggtctgggccacatggcagcccagggggcaggagaagcccgggagaggcccactggctaccagactcagccctgagcagggaacagggcccagcttccaccggcaggg

SEQ ID NO: 595705 - DNA, 120 bp, Artificial Sequence
  ENSG00000173805_28 (sequence is synthesized)
agttgtgagcgccttcccaacaatgtgcccctcaccccttgatgcccatgctaatggtagccaccctggttcttgttgacttgagggacctggctgtcttccctgttcttcatcctttct

SEQ ID NO: 595706 - DNA, 120 bp, Artificial Sequence
  ENSG00000173805_29 (sequence is synthesized)
tctcagtccctacctactgtttgtaaccacaagtgtctctgtgtgtgggtgggtgagggcccctctgcccagtggtgtgtctcctctccctccctccctcttctgccagtggcctggggg

SEQ ID NO: 595707 - DNA, 120 bp, Artificial Sequence
  ENSG00000173805_30 (sequence is synthesized)
tgtccaggctcccatccgtggcccagcccctctcccctctgtcttgatccccccctccctgcccctggcttcctcttccatgttctgccctttcccacacctttgttcctcaatagctgg

SEQ ID NO: 595708 - DNA, 120 bp, Artificial Sequence
  ENSG00000173805_31 (sequence is synthesized)
gggctgggactgaggcctcctgcaggtacctgccccccttcacacagcacctctcaatctcctattgcttgtcagcctgtgtgcgtgtggtgcaggaaataaaggatctataccctcctg

SEQ ID NO: 595709 - DNA, 120 bp, Artificial Sequence
  ENSG00000173805_32 (sequence is synthesized)
ggagaagtacatggattgtgggggcatgctgattgagatgcaggaggaggtgaagaccctccgccagcaacccccagtgtccactgggtctgccacccattacccatacagcgtgcctct

SEQ ID NO: 595710 - DNA, 120 bp, Artificial Sequence
  ENSG00000173805_33 (sequence is synthesized)
agtgtgtgtgtgcacttggcagggcgaagttgtagagaaagggtggatgctaatattgaagtatgtgccgaggactcctattaaatacgccgtttaatcatagcagcagctcctagaggg

SEQ ID NO: 595711 - DNA, 120 bp, Artificial Sequence
  ENSG00000173805_34 (sequence is synthesized)
cggtgggtgatgtcataagtgtctgttggatggagaaactcaggccagagtaggttaagtgatgccctcaccagcagatcatggctagtgtggagctgggatttgagctcatgcttccct

SEQ ID NO: 595712 - DNA, 120 bp, Artificial Sequence
  ENSG00000173805_35 (sequence is synthesized)
gatcctttcaccccagagactgactcagtggcctggctgtgaaagataggatgggagagagtcacccactgtcttagggtgaagtccccagagcagacctggaacagggtttaggaacaa

SEQ ID NO: 595713 - DNA, 120 bp, Artificial Sequence
  ENSG00000173805_36 (sequence is synthesized)
ggaacagggtttaggaacaagtatagtcgccctccgtatcctcaggctctgcatccgtggagtcaactaaccacagatagaaaatatttgggggaggctgggtgcagtggctcatgcctg

SEQ ID NO: 595714 - DNA, 60 bp, Artificial Sequence
  ENSG00000173805_37 (sequence is synthesized)
acagcgagactccatttgaaaacacaagaaaatatctgggggaggccaggcgcggtggct

SEQ ID NO: 595715 - DNA, 86 bp, Artificial Sequence
  ENSG00000173805_38 (sequence is synthesized)
gagaaaagaaaatgacagacaaaccagacatgggggaaattgccagctttgataaagctttgaaggaaacggagatgcaggagaac

SEQ ID NO: 595716 - DNA, 120 bp, Artificial Sequence
  ENSG00000173805_39 (sequence is synthesized)
ctttgataaagctttgaaggaaacggagatgcaggagaacaccttgtggaccagagaccactgagcaggagaagcagtgaaatttcctaaaatctggaggattccctgcccctgttatct

SEQ ID NO: 595717 - DNA, 120 bp, Artificial Sequence
  ENSG00000173805_40 (sequence is synthesized)
tcaagtccccagtggtgatgtggaagaaaagcaacctgcaaggtggatgcaagccacaagctgctctgtgaacctgggcacctcacacagatgccactggcctgtgggtctctgagggga

SEQ ID NO: 595718 - DNA, 120 bp, Artificial Sequence
  ENSG00000173805_41 (sequence is synthesized)
cccgcaaatgggactgccaaattctctggtttgctccaggatattatagaaaattatttatatgaatagtaaaaataaaacacactttgtggcccccctgccaaaagaatatcattgaga

SEQ ID NO: 595719 - DNA, 120 bp, Artificial Sequence
  ENSG00000173805_42 (sequence is synthesized)
aagaatatcattgagaagattattgctgtggctaaccgggtctcagtcctgctgggaactctgggggacagtagaatatatctcagagtagcctgggtgaggtggctcacacctgtaatc

SEQ ID NO: 595720 - DNA, 78 bp, Artificial Sequence
  ENSG00000173805_43 (sequence is synthesized)
tcaggagttcgagaccagcctgaccaatggagaaaccccgtctccactaaagatacaaaattaactgggcatggtggc

SEQ ID NO: 595721 - DNA, 120 bp, Artificial Sequence
  ENSG00000173805_44 (sequence is synthesized)
cctctacagccctcaggtggcgggtagctcaaggtaatggtgtcaacaggcacaagaacaatgatggaatggagtgagacaccagcaatgcctgcaccagccactcatgagcaattattt

SEQ ID NO: 595722 - DNA, 120 bp, Artificial Sequence
  ENSG00000173805_45 (sequence is synthesized)
acaaatatttattgggttcctcctattcttgccaccggggatacagaagggaggagggacttgtcacgctcccagtttcctgttttgcccgagaggcagacaataaactggcaaacaaaa

SEQ ID NO: 595723 - DNA, 120 bp, Artificial Sequence
  ENSG00000173809_0 (sequence is synthesized)
cccgcgacggtaggggacttccagggcgagggggcccatctgccctcgggcgccaggaggatgctccagctcctggtgctgaagattgaagatccaggttgcttctgggttattataaaa

SEQ ID NO: 595724 - DNA, 120 bp, Artificial Sequence
  ENSG00000173809_1 (sequence is synthesized)
gggtgtagtccctttttagatcatgatgtcgattatcaaaaattaaatagtgccatgaatgacttctacaacagcacgtgtcaagatatagaaataaaacccttaacattggaagaagga

SEQ ID NO: 595725 - DNA, 120 bp, Artificial Sequence
  ENSG00000173809_2 (sequence is synthesized)
caggtgtgtgtggtctattgtgaggagctaaagtgctggtgcagggccattgtcaaatcaattacgtcttccgcagaccagtacctggcagaatgtttccttgtggactttgccaagaac

SEQ ID NO: 595726 - DNA, 120 bp, Artificial Sequence
  ENSG00000173809_3 (sequence is synthesized)
attccagtcaaatctaaaaacatccgagttgtagtagaatcgtttatgcagcttccctatagagcaaaaaaattcagcctgtactgcacaaagcctgtcacattacacattgacttctgc

SEQ ID NO: 595727 - DNA, 120 bp, Artificial Sequence
  ENSG00000173809_4 (sequence is synthesized)
cgagacagtactgacattgtacctgccaagaagtgggacaatgcagctattcagtactttcagaaccttctgaaagcaactacccaggtggaagccagattatgtgctgtggaagaagat

SEQ ID NO: 595728 - DNA, 120 bp, Artificial Sequence
  ENSG00000173809_5 (sequence is synthesized)
acatttgaggtttacctttatgtaactataaaagatgaaaaagtttgtgttaatgatgatcttgttgcaaagaactatgcttgttatatgtcacctacaaagaataaaaaccttgattat

SEQ ID NO: 595729 - DNA, 120 bp, Artificial Sequence
  ENSG00000173809_6 (sequence is synthesized)
ttagaaaaaccaagattgaatataaaatcagcaccctccttcaataaactcaatccagcacttacactctggccaatgtttttgcaaggaaaagatgttcaaggaatggaagattcacat

SEQ ID NO: 595730 - DNA, 120 bp, Artificial Sequence
  ENSG00000173809_7 (sequence is synthesized)
ggtgtaaattttccggcacaatctctgcaacatacatggtgcaagggtattgtcggtgacctcaggccaacagccacagcacaggacaaagctgtaaaatgtaatatggattcattgaga

SEQ ID NO: 595731 - DNA, 120 bp, Artificial Sequence
  ENSG00000173809_8 (sequence is synthesized)
gattcacctaaagacaaatctgaaaagaaacaccattgcatctctttaaaagatacaaataagcgtgttgaatcctcagtgtactggccagcaaaaagaggcataaccatatatgctgat

SEQ ID NO: 595732 - DNA, 120 bp, Artificial Sequence
  ENSG00000173809_9 (sequence is synthesized)
ccagatgtaccagaagcaagtgctttaagtcagaagtcaaatgagaaacctcttagattgactgagaagaaagaatatgatgagaagaatagctgtgtgaaattactgcagtttttaaat

SEQ ID NO: 595733 - DNA, 120 bp, Artificial Sequence
  ENSG00000173809_10 (sequence is synthesized)
cctgatcctttgagagctgacggaatctctgatctccagcagttgcagaagctgaagggcctgcagccgcccgtggtagtgctccggaacaagatcaagccctgcttaaccattgactcg

SEQ ID NO: 595734 - DNA, 120 bp, Artificial Sequence
  ENSG00000173809_11 (sequence is synthesized)
tcgccgctgtcagcagacctgaagaaggctcttcaaagaaataagtttccgggccccagccacactgaatcttactcttggcctcccatagcgcgtggctgtgatgtggttgtcatttct

SEQ ID NO: 595735 - DNA, 120 bp, Artificial Sequence
  ENSG00000173809_12 (sequence is synthesized)
cactgtgaaagcaaccctttgctctacctcctaccagtgttgacagttttgcaaacaggagcctgctacaagtcattaccaagtagaaatggacctctcgcagtcatcgtgtgccctggg

SEQ ID NO: 595736 - DNA, 120 bp, Artificial Sequence
  ENSG00000173809_13 (sequence is synthesized)
tggaagaaggcccaatttatttttgaattattgggagaatatagcatgtcctccaggcctcttcatcctgtgctattaacaattgggctccataaagaggaagccaaaaatacaaagctt

SEQ ID NO: 595737 - DNA, 120 bp, Artificial Sequence
  ENSG00000173809_14 (sequence is synthesized)
ccaaggggctgtgatgtgattgttacgaccccatacagcctgctgaggcttctcgcctgtcagagcctgctgttcctcaggctctgccacctgatcctggatgaggtagaggtgctattc

SEQ ID NO: 595738 - DNA, 120 bp, Artificial Sequence
  ENSG00000173809_15 (sequence is synthesized)
ttggaagccaatgaacagatgtttgctatattagataactttaaaaaaaatattgaagttgaagaaagggaatctgcaccacatcagattgttgcagttggagttcattggaacaaacat

SEQ ID NO: 595739 - DNA, 120 bp, Artificial Sequence
  ENSG00000173809_16 (sequence is synthesized)
atagaacatctcatcaaagagttcatgaatgatccctacattgtgatcacagccatggaagaggctgctctctatggcaatgtccaacaggtagtacatctttgcctagaatgtgaaaaa

SEQ ID NO: 595740 - DNA, 120 bp, Artificial Sequence
  ENSG00000173809_17 (sequence is synthesized)
caagctcttgattttattccaagtcaggcacaaaagaccttgatcttcacctgctctgtagctgaaacagaaatagtgtgtaaggtagtagaaagcagttcaatattttgcttgaagatg

SEQ ID NO: 595741 - DNA, 120 bp, Artificial Sequence
  ENSG00000173809_18 (sequence is synthesized)
cataaagaaatgatttttaacttacaaaatgttttagaacagtggaagaagaagttaagttctggctctcaaattatattagccctcacagacgactgcgtcccactcttggccatcacc

SEQ ID NO: 595742 - DNA, 120 bp, Artificial Sequence
  ENSG00000173809_19 (sequence is synthesized)
gatgccacgtgtgtgattcacttcagtttccctgcctcaccaaaagtttttggtggacgcctgtattgcatgtctgatcattttcacgctgaacagggttctcctgcagaacagggagat

SEQ ID NO: 595743 - DNA, 120 bp, Artificial Sequence
  ENSG00000173809_20 (sequence is synthesized)
aagaaagccaaatctgtcttgctgctgacggagaaagatgcgagccatgcggtgggcgtcctgcgctacttggagcgagcggacgccaaggtccccgcagagctgtacgagttcaccgca

SEQ ID NO: 595744 - DNA, 120 bp, Artificial Sequence
  ENSG00000173809_21 (sequence is synthesized)
ggagttctggaagccaaagaagataagaaagccggaaggcctctttgtccatatctgaaggcttttggtttttgcaatcatttcattttcagagacaaaaggatctgtcctgaccgacac

SEQ ID NO: 595745 - DNA, 120 bp, Artificial Sequence
  ENSG00000173809_22 (sequence is synthesized)
cgtattaatccagaaacggacttgcccaggaaactgtccagccaagccctaccttcatttggatacattaaaataatacctttttatattttgaatgcaacaaattactttggccgtata

SEQ ID NO: 595746 - DNA, 120 bp, Artificial Sequence
  ENSG00000173809_23 (sequence is synthesized)
gttgataaacacatggatctttatgcaactctcaatgctgaaatgaatgagtattttaaggattctaataaaacaactgtggaaaaggtggagaagtttggattgtatggattagcagaa

SEQ ID NO: 595747 - DNA, 120 bp, Artificial Sequence
  ENSG00000173809_24 (sequence is synthesized)
aaaacgctttttcacagggttcaggtgttggaagtgaaccaaaaagaagacgcctgggccctggatgacatccttgtagagttcatcgatgaaggcaggacggggctcgtcacaagggac

SEQ ID NO: 595748 - DNA, 120 bp, Artificial Sequence
  ENSG00000173809_25 (sequence is synthesized)
cagctgctgcatctcccagaacatttccacacacttcccccgcaggctgtggagtttattgtctgtagggtgaaacctgctgacaacgaaatagaatggaatccgaaggttactaggtac

SEQ ID NO: 595749 - DNA, 120 bp, Artificial Sequence
  ENSG00000173809_26 (sequence is synthesized)
attcatcataaaattgttggaaaattgcatgatgcaaaagtgatcctggctttgggaaatacagtttggattgatccaatggtgcacattacaaacctttccagtttaaaaacctctgtc

SEQ ID NO: 595750 - DNA, 120 bp, Artificial Sequence
  ENSG00000173809_27 (sequence is synthesized)
attgattataatgttcgagctgaaattttgtccatgggcatgggcattgataatccagaacacatagaacaactgaaaaaattacgcgaagatgctaagataccagcttgtgaagaaagc

SEQ ID NO: 595751 - DNA, 120 bp, Artificial Sequence
  ENSG00000173809_28 (sequence is synthesized)
ctaagccagaccccgccgagggtgacagggaccagtcctgctcaagaccaggatcatccatccgaggagcagggggggcaggggacgcctccagcagaagatgctgcttgcctgcagagc

SEQ ID NO: 595752 - DNA, 120 bp, Artificial Sequence
  ENSG00000173809_29 (sequence is synthesized)
ccccagcctgaggacacgggtgcagaaggaggggctgagtccaagacgagctcagaaaaccagaagcctgaaactttatctggaaacactgaaggtgccttcattagcagaactgcacag

SEQ ID NO: 595753 - DNA, 120 bp, Artificial Sequence
  ENSG00000173809_30 (sequence is synthesized)
ccgcctctgaaaagcttccacccacaaataaaatggttccaaaaagaagatgtcgtcatcttaaagataagaataaggaatgtaaaggactacaagtgtcagtatttaagggatagagtc

SEQ ID NO: 595754 - DNA, 120 bp, Artificial Sequence
  ENSG00000173809_31 (sequence is synthesized)
gttttcagtgcttgggtgggagacaaattttacctggctgatctggagctgcggggcaacataaggaaagatgactgccaatgtgtgattagaaacgatgaacctgtaatcactctggcc

SEQ ID NO: 595755 - DNA, 120 bp, Artificial Sequence
  ENSG00000173809_32 (sequence is synthesized)
aaagagagaagggaggcatggtgtcacctactcagacagaggaaccccaacgtggcttttgattttgatcactgggaagactgtgaagaggacagccacttccccaaggtagtgaattct

SEQ ID NO: 595756 - DNA, 120 bp, Artificial Sequence
  ENSG00000173809_33 (sequence is synthesized)
aaaaacctgccgtacacagtgacagaggtggttgaagacagtagcagcacttcagaggatgacgacagtgagagtgaaagagaaggtgaatgacgtcctcaagagcggctggaagatgtt

SEQ ID NO: 595757 - DNA, 120 bp, Artificial Sequence
  ENSG00000173809_34 (sequence is synthesized)
aatgacgtcctcaagagcggctggaagatgttgaacaaaaatggatattgccatgtgaccgacagttaagaaaacagtcagtcataaccaaatctttttcttttcttttctttttttttt

SEQ ID NO: 595758 - DNA, 120 bp, Artificial Sequence
  ENSG00000173809_35 (sequence is synthesized)
aggataaatgattactgtcaccttgtggtgctggacttgataacggtgagaaattcttcattgacttaaaaataggctgatgataagaccatcaaaggagggtggacacagagaaacagc

SEQ ID NO: 595759 - DNA, 120 bp, Artificial Sequence
  ENSG00000173809_36 (sequence is synthesized)
aggtgtggtctgattccgccggcttgtctgtcctgtctggcgcctctcgccactcaccctggcagagcagacatgcatctgggtgatgaaatgcactgtctggagtcagtccattcattt

SEQ ID NO: 595760 - DNA, 120 bp, Artificial Sequence
  ENSG00000173809_37 (sequence is synthesized)
tttttcacctagacctttgctacattgctacaaacctgatcttacacatataaattgaggtttctaatgtacacacttagactcagcaactgttgaaccagccctttcaaccatgagata

SEQ ID NO: 595761 - DNA, 120 bp, Artificial Sequence
  ENSG00000173809_38 (sequence is synthesized)
gtgggatttaacataaccatctatgtgaattgatagtgttagcattcttggatagtgatagctcctcagagtaagttgacttctgatgaagagatagtccagggatagaaattggattgc

SEQ ID NO: 595762 - DNA, 120 bp, Artificial Sequence
  ENSG00000173809_39 (sequence is synthesized)
tcagtaagacccaggcctttccggggtgaagctgctggttctaaacaatcccttggacctgcagagtcctgagcaaatggcacaaaggttgctttttagtggaaattcacaagggcctgt

SEQ ID NO: 595763 - DNA, 120 bp, Artificial Sequence
  ENSG00000173809_40 (sequence is synthesized)
ggggtgcctggaggtgatctttgaatgcctacatgtcgtgagccctgcagacattcgccaccccatctgcattgtggctgcagcactggggggggtcaccaggtttaggggaggagtgta

SEQ ID NO: 595764 - DNA, 120 bp, Artificial Sequence
  ENSG00000173809_41 (sequence is synthesized)
tgtagtcatggccacacccagaggctggcttttgtgctttgggtttctttgttgactgaaaaagcgagaaaggtgagctattgggaaattaaaagtcctgtgcactctgtgtcttgttta

SEQ ID NO: 595765 - DNA, 120 bp, Artificial Sequence
  ENSG00000173809_42 (sequence is synthesized)
tcagctttgcctcggaatggaaaagaatttggatagaacatgagtgttgtgtgacggccccaagatctttattatttttttgtatcagaaagcgccaatgcccaggcttatgtatgtccc

SEQ ID NO: 595766 - DNA, 120 bp, Artificial Sequence
  ENSG00000173809_43 (sequence is synthesized)
agcagaagccaccgcttgaactagaggtgaactttgtcatcaagctgtcctgtgagcaggtctggatcacactctggctcagttttctcatctgtaaaatgagacatcccctcattgtgt

SEQ ID NO: 595767 - DNA, 120 bp, Artificial Sequence
  ENSG00000173809_44 (sequence is synthesized)
ggcctggccttgtctcagggagcgcccgccgagtgctgctgggttgggcagtttttctgcccagtggctctgatgggggctcagagccctggcctcccctgggaggacacgctgtgcagc

SEQ ID NO: 595768 - DNA, 120 bp, Artificial Sequence
  ENSG00000173809_45 (sequence is synthesized)
caggacagctgccgggagtgtgcccaggtcactgctatggccttcgcagggtgactggcaggtatcaaatcagcccatgaaggaagatggtgattttccttttttgtagctaaattgggc

SEQ ID NO: 595769 - DNA, 120 bp, Artificial Sequence
  ENSG00000173809_46 (sequence is synthesized)
aggctcttgggaagtagaaagttctggtgtttttgctggtgaaggttttgactgtggagctcttctaacacccatatcagtgtctgtttctctgcatgtggctgctgccctgttggtgga

SEQ ID NO: 595770 - DNA, 120 bp, Artificial Sequence
  ENSG00000173809_47 (sequence is synthesized)
gctctgggggcagagaccaggccgccgtccagtggcgccccgtgcgcaccagctgcctgctgtttacacccaggtgcgccgagtctctttcatacagcacagcaaatgataatagctagt

SEQ ID NO: 595771 - DNA, 120 bp, Artificial Sequence
  ENSG00000173809_48 (sequence is synthesized)
gacaatgtgtttcctgtgcactcgtgaaaatgcagggaggacaactgcatgcttagatctgtttcttttttcagacattcaaatgttctaatatctgaagctaacattttgtaggatata

SEQ ID NO: 595772 - DNA, 120 bp, Artificial Sequence
  ENSG00000173809_49 (sequence is synthesized)
agaaactccttagatgggggacttaacctgaagacatccttttagaaacgatcgaatggattgttgcttctgagaaattgttccttgttttttggataataaacgatcttccttttggta

SEQ ID NO: 595773 - DNA, 120 bp, Artificial Sequence
  ENSG00000173809_50 (sequence is synthesized)
atctaaaatgcaaggtgaaagtgcctttgtctctatgcttctaaaatcgctcatgcttagttgtggtatggatgtcttccgcagtgtatcatcaataaaatttcactgttttcacagaaa

SEQ ID NO: 595774 - DNA, 120 bp, Artificial Sequence
  ENSG00000173809_51 (sequence is synthesized)
cgacgcctcaaggcctgctcagcgtgcgcgggcatccggtgggtgcgggaggcccgaggccaggcaggcagggatcccgcagcgaggggctggttactgccaggacggagcgcattgcct

SEQ ID NO: 595775 - DNA, 120 bp, Artificial Sequence
  ENSG00000173809_52 (sequence is synthesized)
cgagccgaccccggggtccgcgagggctcctggggacgaggagtgtggggcacctgccgcggggggcccaggcgctaaaggtggagggaaggaacgcactcgcggcgggggcctggccgg

SEQ ID NO: 595776 - DNA, 120 bp, Artificial Sequence
  ENSG00000173809_53 (sequence is synthesized)
gtacttggtattcaaaagatggttaagttcaaatcgttaatgtctggaaaattgctaatgtttagactttctactttgagatgaaatgtagagaagatgacataaactgatatcacctaa

SEQ ID NO: 595777 - DNA, 120 bp, Artificial Sequence
  ENSG00000173812_0 (sequence is synthesized)
gccccagtcactgagccgccgccgaggattcagcagcctcccccttgagccccctcgcttcccgacgttccgttcccccctgcccgccttctcccgccaccgccgccgccgccttccgca

SEQ ID NO: 595778 - DNA, 120 bp, Artificial Sequence
  ENSG00000173812_1 (sequence is synthesized)
ggccgtttccaccgaggaaaaggaatcgtatcgtatgtccgctatccagaacctccactctttcgacccctttgctgatgcaagtaagggtgatgacctgcttcctgctggcactgagga

SEQ ID NO: 595779 - DNA, 120 bp, Artificial Sequence
  ENSG00000173812_2 (sequence is synthesized)
ttatatccatataagaattcaacagagaaacggcaggaagacccttactactgtccaagggatcgctgatgattacgataaaaagaaactagtgaaggcgtttaagaaaaagtttgcctg

SEQ ID NO: 595780 - DNA, 120 bp, Artificial Sequence
  ENSG00000173812_3 (sequence is synthesized)
caatggtactgtaattgagcatccggaatatggagaagtaattcagctacagggtgaccaacgcaagaacatatgccagttcctcgtagagattggactggctaaggacgatcagctgaa

SEQ ID NO: 595781 - DNA, 120 bp, Artificial Sequence
  ENSG00000173812_4 (sequence is synthesized)
ggttcatgggttttaagtgcttgtggctcactgaagcttaagtgaggatttccttgcaatgagtagaatttcccttctctcccttgtcacaggtttaaaaacctcacagcttgtataatg

SEQ ID NO: 595782 - DNA, 120 bp, Artificial Sequence
  ENSG00000173812_5 (sequence is synthesized)
taaccatttggggtccgcttttaacttggactagtgtaactccttcatgcaataaactgaaaagagccatgctgtctagtcttgaagtccctcatttaaacagaggtcaagcaataggcg

SEQ ID NO: 595783 - DNA, 120 bp, Artificial Sequence
  ENSG00000173812_6 (sequence is synthesized)
cctggcagtgtcaagcctgaaaccaagcaataccgtcatgtttcagccaagcccagagccctaagattacaaacaactatggccggaacctcctcagctctccctctgcagagttcccta

SEQ ID NO: 595784 - DNA, 120 bp, Artificial Sequence
  ENSG00000173812_7 (sequence is synthesized)
ccctaagagaatgttaccacctgaacagtcctcggtgaatctgagaggagaggatggggtaaggcagaagcaccagctgtactactagaagggagcttttggtggtagatcccctggtgt

SEQ ID NO: 595785 - DNA, 120 bp, Artificial Sequence
  ENSG00000173812_8 (sequence is synthesized)
ctccaacctgactaggtggacagagctcaaagaggccctcttaccgctagcgaggtgataggacatctggcttgccacaaaggtctgttcgaccagacatatcctagctaagggatgtcc

SEQ ID NO: 595786 - DNA, 120 bp, Artificial Sequence
  ENSG00000173812_9 (sequence is synthesized)
atctcaaactgatccatcagtcatgtagctagctgtagagcttgcaacttaatagcagcagctgcccaatgccatgtgaagtaacaaactggtttttggtttttttttccccttcagttt

SEQ ID NO: 595787 - DNA, 120 bp, Artificial Sequence
  ENSG00000173812_10 (sequence is synthesized)
taatgttatgtgtaatgtatttaaacccttatttaaataaaacttgttttcagaaatacctgacttgcagattatttatatatagtcgatcttgtgcatataaaggaaccatagaaatgg

SEQ ID NO: 595788 - DNA, 120 bp, Artificial Sequence
  ENSG00000173812_11 (sequence is synthesized)
gcagtggaggattcgtccacacccacagcttctcaacgggcctgaatttggccaagaaaaacctttatgagcttgtccctctctggtcaactggttttttgttcgtttgttttttgagac

SEQ ID NO: 595789 - DNA, 61 bp, Artificial Sequence
  ENSG00000173812_12 (sequence is synthesized)
ctctggtcaactggttttttgttcgtttgttttttgagacaggtttgcaggttcaagcaat

SEQ ID NO: 595790 - DNA, 120 bp, Artificial Sequence
  ENSG00000173812_13 (sequence is synthesized)
tacaggcatgagccaccatgcccagcaggtcaactgtttttgcaagcatttagccagagtcatgctgtgctgttaatcagtgtcctggagaatgggttgcttggaaatcttggcgccccc

SEQ ID NO: 595791 - DNA, 120 bp, Artificial Sequence
  ENSG00000173812_14 (sequence is synthesized)
tcagtagtaacagccttggtttaagggcgcagagtggagagtaaatgcaagggctataacaagggcattcatgctgtgggttaagatccacaaatcgctaggaatgtgtatactctgggt

SEQ ID NO: 595792 - DNA, 120 bp, Artificial Sequence
  ENSG00000173812_15 (sequence is synthesized)
agtaagtttgtagtattagaaggtttaatgacaagtatttgaagagctgaagttaagtgttgggaggccatcccttatgaaggacaatgaatggcaagtaaaagaccaagttctgttcct

SEQ ID NO: 595793 - DNA, 120 bp, Artificial Sequence
  ENSG00000173812_16 (sequence is synthesized)
gggtccattaatttagttaaaaaggcaaagttctttcagcacacatatctgcatgcagtcacgtgctgcctaaggatgcttcattcaacaatgagcctcacagccgtgctacacaataag

SEQ ID NO: 595794 - DNA, 89 bp, Artificial Sequence
  ENSG00000173812_17 (sequence is synthesized)
aacattgtgttacaatggcctacaagaagcttgtgtggatggctttgaatgtggcccaacacgaactaataaattttgctaaaacatga

SEQ ID NO: 595795 - DNA, 120 bp, Artificial Sequence
  ENSG00000173812_18 (sequence is synthesized)
ggagacgtgttccgggaagttgccaagcgctccgggccttcgtaagctcgggcaggggaaacttgaccagggtcgcagggcagcgggatcaaggcctgggccccggggtcggaccctgag

SEQ ID NO: 595796 - DNA, 120 bp, Artificial Sequence
  ENSG00000173812_19 (sequence is synthesized)
cgcgaccggaaggagcaggcggtaggtcagcccttgggcgggcccggcgtctcagtggcgcatttactaatggctcctgggcctcctcgggccacacccgcccctcccgtcaccattgcg

SEQ ID NO: 595797 - DNA, 120 bp, Artificial Sequence
  ENSG00000173812_20 (sequence is synthesized)
tcacgtccgttacgtcaccacccgttgtcacggatccggagggaaaggcggtgccagccctaagtggcaagcgggtgcaccaatgggggtgggaggcttagccccgcctcgggagctcgg

SEQ ID NO: 595798 - DNA, 120 bp, Artificial Sequence
  ENSG00000173812_21 (sequence is synthesized)
gttccggcgggttgcatcagctgggtggggcaccgcctggcagcccggactcccccgacatgtgatcggcttcccagggagggcgggaggcccgggcgttccccgagcctggggaagctg

SEQ ID NO: 595799 - DNA, 120 bp, Artificial Sequence
  ENSG00000173812_22 (sequence is synthesized)
gccgtcccggactgacctgctcggggagagccagcaaaggacacattcggcctggcccaagccctgacgatttcagtgttgttttctgcacgcgcaaaacacctggggaccgaggggatg

SEQ ID NO: 595800 - DNA, 120 bp, Artificial Sequence
  ENSG00000173812_23 (sequence is synthesized)
atggatttgtccacaagggggtgccagctgtgttgtatgtattgttagcggaaggggtgataaatgcgttcatgctcttgctaggcctaattcgttttcctttgtgcttgcagaagtttg

SEQ ID NO: 595801 - DNA, 120 bp, Artificial Sequence
  ENSG00000173812_24 (sequence is synthesized)
atatgccagttcctcgtagaggtgagttcagtcactacttgatttgtgcctctctgctggcaaatctcagatcctgtctgttagcttctgctggggacataaaagttggctttgtaaggc

SEQ ID NO: 595802 - DNA, 120 bp, Artificial Sequence
  ENSG00000173812_25 (sequence is synthesized)
tttctgtggatctacttcacagatgcaaatttgaatagcatatagatgcattgtaaaataagccaaatgctgggttgttcctgtatttgtaaggacatgagtttttaaaaatgaatttcc

SEQ ID NO: 595803 - DNA, 120 bp, Artificial Sequence
  ENSG00000173812_26 (sequence is synthesized)
tgagtattaatactaaaatactgttacatgatcagctcttgatataattgaagagatttcagatacctgatgagtctcattctcacactaattcagaaccttggaaggcactgagtgttc

SEQ ID NO: 595804 - DNA, 120 bp, Artificial Sequence
  ENSG00000173818_0 (sequence is synthesized)
gtgcggaaggggtgcccgggacgaagccatggccctggaggcggcgggagggccgccggaggaaacgctgtcactgtggaaacgggagcaagctcggctgaaggcccacgtcgtagaccg

SEQ ID NO: 595805 - DNA, 120 bp, Artificial Sequence
  ENSG00000173818_1 (sequence is synthesized)
ggacaccgaggcgtggcagcgagaccccgccttctcgggtctgcagagggtcgggggcgttgacgtgtccttcgtgaaaggggacagtgtccgcgcttgtgcttccctggtggtgctcag

SEQ ID NO: 595806 - DNA, 120 bp, Artificial Sequence
  ENSG00000173818_2 (sequence is synthesized)
cttccctgagctcgaggtggtgtatgaggagagccgcatggtcagcctcacagccccctacgtgtcgggcttcctggccttccgagaggtgcccttcttgctggagctggtgcagcagct

SEQ ID NO: 595807 - DNA, 120 bp, Artificial Sequence
  ENSG00000173818_3 (sequence is synthesized)
gcgggagaaggagccgggcctcatgccccaggtccttcttgtggatggaaacggggtactccaccaccgaggctttggggtggcctgccaccttggcgtccttacagacctgccgtgtgt

SEQ ID NO: 595808 - DNA, 120 bp, Artificial Sequence
  ENSG00000173818_4 (sequence is synthesized)
tggggtggccaagaaacttctgcaggtggatgggctggagaacaacgccctgcacaaggagaagatccgactcctgcagactcgaggagactcattccctctgctgggagactctgggac

SEQ ID NO: 595809 - DNA, 120 bp, Artificial Sequence
  ENSG00000173818_5 (sequence is synthesized)
tgtcctgggaatggccctgaggagccacgaccgcagcaccaggcccctctacatctccgtgggccacaggatgagcctggaggccgctgtgcgcctgacttgctgctgctgcaggttccg

SEQ ID NO: 595810 - DNA, 120 bp, Artificial Sequence
  ENSG00000173818_6 (sequence is synthesized)
gatcccagagcccgtgcgccaggctgacatctgctcccgagagcacatccgcaagtcgctgggactccccgggccacccacaccgaggagcccgaaggcgcagaggccagtggcatgccc

SEQ ID NO: 595811 - DNA, 120 bp, Artificial Sequence
  ENSG00000173818_7 (sequence is synthesized)
caaaggagactccggagagtcctcagcactttgttgaacgtggtggtgagagcacacgtcctcgtctcattcctgatcgaacgcggtggtgagagcacacgtcctcgtctcgttcctgat

SEQ ID NO: 595812 - DNA, 120 bp, Artificial Sequence
  ENSG00000173818_8 (sequence is synthesized)
cgaacgcggtggtgagagcacacatcctcgtctcgttcctgatcgaacgcggtggtgagagcacacgtcctcgtctcgttcctgatcgaacgtggtggtgagagcacacgtccttgtctt

SEQ ID NO: 595813 - DNA, 120 bp, Artificial Sequence
  ENSG00000173818_9 (sequence is synthesized)
gttcctgatcttaagggaacgtttgcagtctttcaccactagatgtgatgtgagctgttagattttcaaggatgctcttcatccagctgaagacggtcccttctagtcctaatttgttaa

SEQ ID NO: 595814 - DNA, 120 bp, Artificial Sequence
  ENSG00000173818_10 (sequence is synthesized)
gtgtttttatccttaaagggtactggattttgtcaaatgcttttctggcctctattgaaaagatcctgtgttcttctgtgaatatgaggtgttacattgattgattttcatatgttgagc

SEQ ID NO: 595815 - DNA, 120 bp, Artificial Sequence
  ENSG00000173818_11 (sequence is synthesized)
gctgaatgtgatttgcttgtattttggtgcggatttttacatctgtatttataagggatattggtctggtgttttcttatgatgtcttcctttggttttgatatcaggataatattagcc

SEQ ID NO: 595816 - DNA, 120 bp, Artificial Sequence
  ENSG00000173818_12 (sequence is synthesized)
tcatagattgggttaggaaatgttctctcctccgttttttttggaagagagagattggtgttaattcttgctagaacctttggtagaatttgccagtaagcctatctggtcttgggtctt

SEQ ID NO: 595817 - DNA, 120 bp, Artificial Sequence
  ENSG00000173818_13 (sequence is synthesized)
tgggaggattttgattcgattcaatctatgtatttgttatagatcgttcggattgtccatccttgagtcagttgctagcttgtgtgtttcttggagtttttccgtttcgtccatgttatc

SEQ ID NO: 595818 - DNA, 120 bp, Artificial Sequence
  ENSG00000173818_14 (sequence is synthesized)
tcatctgttggcataccgtcgttcacgggattttattgatgtgtgtgaggtctctgagaacgtccctgccttcactcctgcttttagtcactggcatcttcttttaacttgggccatctg

SEQ ID NO: 595819 - DNA, 120 bp, Artificial Sequence
  ENSG00000173818_15 (sequence is synthesized)
gccgtgcatggttttgggagagtcctccttgactctgcagatgctgagcagtgatctggctgggaaaggggaccaggagtgcagggcacctgctgaggactcacctaagcccaagagtca

SEQ ID NO: 595820 - DNA, 120 bp, Artificial Sequence
  ENSG00000173818_16 (sequence is synthesized)
gagagtcggagctccaaccacatctgcctgcatgcctttcccaggctctccccaggcggacagccagcaccccctccccaaagaccgggcagttcctgaccagcaccccaccaagtcctc

SEQ ID NO: 595821 - DNA, 120 bp, Artificial Sequence
  ENSG00000173818_17 (sequence is synthesized)
agtaaggcctgtctttgggggagcagggtttcaggaggacagtgggggtggtgtagaactcatggctggcggttccgggcctctcaggaagctttgccactgggcttggggttaagtggg

SEQ ID NO: 595822 - DNA, 120 bp, Artificial Sequence
  ENSG00000173818_18 (sequence is synthesized)
tgtggggctccgaaccctaaatgggtgagagttgaaatgaaagcggcacctgtagtccgtttggggtgcaggtgtgtgccaggggtcttcagccccggctgatggccacatgaaccacat

SEQ ID NO: 595823 - DNA, 120 bp, Artificial Sequence
  ENSG00000173818_19 (sequence is synthesized)
gaggagaggcagggcgtgtcagcagcaaacctaagtgtgtgctcatttctgtgggcccttactctgtgacactgcagctctccagagagacgctttgaaaacaaaacaggaaagaacaca

SEQ ID NO: 595824 - DNA, 120 bp, Artificial Sequence
  ENSG00000173818_20 (sequence is synthesized)
cggccccgcgtctgttgcctgagtcactgtattccttaaaaggtgaaggaccctggtccttggcttttcgtgcacatgagaaaatgttggccaaggttagcgattatgcttctgtaatct

SEQ ID NO: 595825 - DNA, 120 bp, Artificial Sequence
  ENSG00000173818_21 (sequence is synthesized)
gtaaccagaagtgctcttatgcccaaaccttgatgtgattctgctgtaatgtaacttcggagccagctggatggatgtgactgtgcaggtcctgagccccggcccccgtaaccaagcagt

SEQ ID NO: 595826 - DNA, 120 bp, Artificial Sequence
  ENSG00000173818_22 (sequence is synthesized)
gggccgagacactgagccgggcagtcaaacaggagctctctaaggctgctcccgggctgggacctgggtctaggattctcagtaagacctttgaataaaactaacttgaattcttcaaaa

SEQ ID NO: 595827 - DNA, 120 bp, Artificial Sequence
  ENSG00000173818_23 (sequence is synthesized)
tcgagttctgccttcaggtagcaaaacagaacggatcttccctgccttctgcttgtcagcccttctgctgctggaaacagctgcctgctccttgaccacactgtcccaagaggctgcgat

SEQ ID NO: 595828 - DNA, 120 bp, Artificial Sequence
  ENSG00000173818_24 (sequence is synthesized)
agctgttgctgctctggaatattctctctcgcgcacatgcgctctttgtgtgcgtgtgtaccgtacatcccagcgactgtgacagctcagaagacatcagcaggcctgtcctgagaatga

SEQ ID NO: 595829 - DNA, 120 bp, Artificial Sequence
  ENSG00000173818_25 (sequence is synthesized)
cattctcctccacagccacagtgtcattatcatactgattacacatcatagtcatcccataatgtcacctgaatgataacattatgggagagattcagatgtaagcagccacgcccctcc

SEQ ID NO: 595830 - DNA, 120 bp, Artificial Sequence
  ENSG00000173818_26 (sequence is synthesized)
tgtgggaactcaggccacacttgaattccacatgtcactgtgcaaagtgacttttactctgtggggatgtcagtgatccagcctgctggcttctctgtgaacccaaattctgttatcaga

SEQ ID NO: 595831 - DNA, 120 bp, Artificial Sequence
  ENSG00000173818_27 (sequence is synthesized)
atggaccctccccactttgggtcatgggcagatttgatcagtttccccattgagtcattgatgaagatgttgtgagaatgatccccaaccctctgtgctaatacagagcactccgtctgc

SEQ ID NO: 595832 - DNA, 120 bp, Artificial Sequence
  ENSG00000173818_28 (sequence is synthesized)
cgagctcatagtcttcaggctgtggaatcggagctgccaccgcccgagactccaaagcaaagcccagtttccggcgcggaagcggagggatctcaggaattgtagtccgcggggtgggcg

SEQ ID NO: 595833 - DNA, 120 bp, Artificial Sequence
  ENSG00000173818_29 (sequence is synthesized)
cggttctcgcttccggccagtttgtctggcctgcgcttgcgcgggtctccgccgcctgggctcctagggactgtggcctcggcggtatgtcccttgctttcccttgaagcgggagaagac

SEQ ID NO: 595834 - DNA, 120 bp, Artificial Sequence
  ENSG00000173818_30 (sequence is synthesized)
ccggcagaggcgctctgtccgctgcagccgcgcgggtggaggaggcagagtctgaggtgtgaccccgaccaagtttgacgcttctgtcctcctagggagcaagctcggctgaaggcccac

SEQ ID NO: 595835 - DNA, 120 bp, Artificial Sequence
  ENSG00000173818_31 (sequence is synthesized)
cccacaggaccacagcccaggccccaggacagccccaaggccaggctcccaggagcaggcgggcaaggactggcagtagggtggaactgggcaccatgaagacaagaaggccaccggcca

SEQ ID NO: 595836 - DNA, 120 bp, Artificial Sequence
  ENSG00000173818_32 (sequence is synthesized)
ccccgttctggcctcaggacactgaccacccctgggggtggtctagggacttaggggaacctcatctcagccgcaggtggagcacccagtccccaaagacaggctgaccgcaccacccca

SEQ ID NO: 595837 - DNA, 120 bp, Artificial Sequence
  ENSG00000173818_33 (sequence is synthesized)
gggggacgccgcagcacagcccagcaccaggtggggcagaggtgaccacggcccctctttgctccgtcatcggctggtcagctgtggtcacggtgcctcagaggacagatctctatgggg

SEQ ID NO: 595838 - DNA, 120 bp, Artificial Sequence
  ENSG00000173818_34 (sequence is synthesized)
gcaagtgccagatcctgagagcgcatgagacgctttcccggagccgacgaaggggactcggagctgcagcctgcacgacccctgcagcctgtgctttgcccacccctttcaatagatgga

SEQ ID NO: 595839 - DNA, 120 bp, Artificial Sequence
  ENSG00000173818_35 (sequence is synthesized)
tcggtgggctcgggcgtgcggtctccgggacagggagcagtgcaagcgtagaacccggcttctcgttttgtaggatgtcattaatagtctggggagttggccgggcgcggtggctcacgc

SEQ ID NO: 595840 - DNA, 120 bp, Artificial Sequence
  ENSG00000173818_36 (sequence is synthesized)
gtgttggggtggccaagaaacttctgcaggtggatgggctggagaacaacgccctgcacaaggagaaggtaccacagcctccaggcccccctcccgccaagacctgcctggagctgccac

SEQ ID NO: 595841 - DNA, 120 bp, Artificial Sequence
  ENSG00000173818_37 (sequence is synthesized)
tgacacccccagctgtttcactggatggcagattctgagagcagagactgtgtctctcattcctcctagctctcaggtgcctgcatggagaagttgcttaataaaaatctgttgagttga

SEQ ID NO: 595842 - DNA, 120 bp, Artificial Sequence
  ENSG00000173818_38 (sequence is synthesized)
attacaggtgggaaccaccacacccagcccacaagtcctcttagaacattgaagtgcccttctcatgacctcatggtgaataaagttcactctggttggcatggcttcaaggcccgtcat

SEQ ID NO: 595843 - DNA, 120 bp, Artificial Sequence
  ENSG00000173818_39 (sequence is synthesized)
acgtgcggaaggggtgcccgggacgaagccatggccctggaggcggcgggagggccgccggaggaaacgctgtcactgtggaaacggctttggggtggcctgccaccttggcgtccttac

SEQ ID NO: 595844 - DNA, 120 bp, Artificial Sequence
  ENSG00000173818_40 (sequence is synthesized)
agaagctctcaggtgcctgcatggagaagttgcttaataaaaatctgttgagttgatggggaccttagacccactcaatgagccagtccaccgccgccagaaataccagcctgttgagct

SEQ ID NO: 595845 - DNA, 120 bp, Artificial Sequence
  ENSG00000173818_41 (sequence is synthesized)
tagtccgtttgggctgctgtaatagaataccttagactgggtggcctacccacagcaggaatttatttctcacagttctggaggctggaggctcaagatcagggtgccagcgcaatcagg

SEQ ID NO: 595846 - DNA, 120 bp, Artificial Sequence
  ENSG00000173818_42 (sequence is synthesized)
ttgtggtgacggcgctctttcaggttgcacagggccagcttcttaaccgtgttctcacatggtgatccactcacctccctagaggccccacctcgtaataccatcacctatgggttataa

SEQ ID NO: 595847 - DNA, 120 bp, Artificial Sequence
  ENSG00000173818_43 (sequence is synthesized)
cctactggaatataaactccatgatggtagaaaccatgttgctttgcccaccatggatagcatgaggaagacgctggactcttccttcaagagatacgtgtgtgaatggacagtgggctc

SEQ ID NO: 595848 - DNA, 120 bp, Artificial Sequence
  ENSG00000173818_44 (sequence is synthesized)
atgattcacataagagtcaacagctccggaagcctcttggcgtcactcgcattgctcctctgctgactcccgaaggttctcaagagtagggtgtaccatatttcttttacaaccccagca

SEQ ID NO: 595849 - DNA, 120 bp, Artificial Sequence
  ENSG00000173818_45 (sequence is synthesized)
ccaagcaaagcacctgctacttcgtcggtattcattgttccggctatgaaagcttagactaggaaaggatcttggaacagtctggtccactggttcctgaatgcccgaccgtggacctgc

SEQ ID NO: 595850 - DNA, 120 bp, Artificial Sequence
  ENSG00000173818_46 (sequence is synthesized)
cacgaccgcagcaccaggcccctctacatctccgtgggccacaggatgagcctggaggccgctgtgcgcctgacttgctgctgctgcaggttccggatcccagagcccgtgcgccaggtt

SEQ ID NO: 595851 - DNA, 120 bp, Artificial Sequence
  ENSG00000173818_47 (sequence is synthesized)
cacctcctgctctgttccagaaggtcctgggagagcacagacggggttagtgttggtctgctctctccctggctccgcgccgggccgtcttggtggccccatggtcacaggcgctgcggc

SEQ ID NO: 595852 - DNA, 120 bp, Artificial Sequence
  ENSG00000173818_48 (sequence is synthesized)
tgactcccgaaggtccttcttgtggatggaaacggggtactccaccaccgaggctttggggtggcctgccaccttggcgtccttacagacctgccgtgtgttggggtggccaagaaactt

SEQ ID NO: 595853 - DNA, 120 bp, Artificial Sequence
  ENSG00000173818_49 (sequence is synthesized)
ccaagaaacttctgcaggtggatgggctggagaacaacgccctgcacaaggagaaggtgaggaggggcctgctgcaggccatgcccggcagctcagtggcggggctgtggtggccctggg

SEQ ID NO: 595854 - DNA, 120 bp, Artificial Sequence
  ENSG00000173818_50 (sequence is synthesized)
catgaggacacttctggaccagcccttgcctgctgacgctgccctcctcatccctggcttgtggcctggagtaagaaagacctgctttcctctgggtgctgcattgcctgtctcagctga

SEQ ID NO: 595855 - DNA, 120 bp, Artificial Sequence
  ENSG00000173818_51 (sequence is synthesized)
tttcagtccaaatcaagcaaaaatgtactgagtgcctactgtgtgctaagattgggatattcagcagcccctactctaagaggtcccctggccattgtgtaggctagcatagggagtggg

SEQ ID NO: 595856 - DNA, 120 bp, Artificial Sequence
  ENSG00000173818_52 (sequence is synthesized)
gacacagtcttagggtcctgactactcatgctcacacccaactctgccactccccactttgccctctaggcctctgtctccttttttctgacttgaggatgatagtggtattaatatcca

SEQ ID NO: 595857 - DNA, 120 bp, Artificial Sequence
  ENSG00000173818_53 (sequence is synthesized)
gctcacagaattgtgatgagcagtacatgaaatgcatggaaagcagttaacacagcattcccttccccctccaacttctcctggctgcaaattaatcacctcatctgcatcctgggcctc

SEQ ID NO: 595858 - DNA, 120 bp, Artificial Sequence
  ENSG00000173818_54 (sequence is synthesized)
ttttgaatgcacatgctgttagagcgcttctcacattgtattaaagttagtcatttatgattccatttttcccactgactgtaggttctcaagagtagggtgtaccatatttcttttaca

SEQ ID NO: 595859 - DNA, 120 bp, Artificial Sequence
  ENSG00000173818_55 (sequence is synthesized)
actgctgatgaggatgaggtttatttaggggttaaggaaaatgttctaaagttagattgtagtgatattgcacaactctgtaaataccaaaaccatcgcattatatgttttaaacaagtg

SEQ ID NO: 595860 - DNA, 120 bp, Artificial Sequence
  ENSG00000173821_0 (sequence is synthesized)
cagcgcgcggcaggcggcgagctcgggggccgcagaaaatgaaactgaagccgtggtcacgtgacaggacatgtagtatatagcaggctgccagcgactcctgctcttgcttctggatct

SEQ ID NO: 595861 - DNA, 120 bp, Artificial Sequence
  ENSG00000173821_1 (sequence is synthesized)
gcagggcagtcccagcaggacccatggagtgtccttcgtgccagcatgtctccaaggaggaaacccccaagttctgcagccagtgcggagagaggctgcctcctgcagcccccatagcag

SEQ ID NO: 595862 - DNA, 120 bp, Artificial Sequence
  ENSG00000173821_2 (sequence is synthesized)
attctgagaacaataactccacaatggcgtcggcctcggagggtgaaatggagtgtgggcaggagctgaaggaggaagggggcccgtgcttgttcccgggctcagacagttggcaagaaa

SEQ ID NO: 595863 - DNA, 120 bp, Artificial Sequence
  ENSG00000173821_3 (sequence is synthesized)
accccgaggagccctgttccaaagcctcctggaccgtccaagaaagcaaaaagaagaaaaggaagaagaaaaagaaggggaacaagtccgcttcctcagagctggcttccttgccccttt

SEQ ID NO: 595864 - DNA, 120 bp, Artificial Sequence
  ENSG00000173821_4 (sequence is synthesized)
ctcctgccagcccctgtcacctgactttgctttcaaacccgtggcctcaggacacagccctgccccacagccaagcccagcagagtggccccactggccagccgagccagcccccaggca

SEQ ID NO: 595865 - DNA, 120 bp, Artificial Sequence
  ENSG00000173821_5 (sequence is synthesized)
cagccaccacgccactggagggtgacggcctctccgcgcccaccgaggttggcgacagccccctgcaggcccaggctttgggagaggcaggagtggccacaggaagtgaggctcagagca

SEQ ID NO: 595866 - DNA, 120 bp, Artificial Sequence
  ENSG00000173821_6 (sequence is synthesized)
gcccgcaattccaggaccacacggaaggggaggaccaggacgcttccatcccctctgggggcagaggcctgtcccaggaggggaccggtccccccacctctgctggtgaaggccattcta

SEQ ID NO: 595867 - DNA, 120 bp, Artificial Sequence
  ENSG00000173821_7 (sequence is synthesized)
ggactgaagatgctgcccaggagctcctgttgcctgagtcaaaaggaggcagctctgagcccgggacagaactgcagaccaccgagcaacaggcaggggcctcagcctctatggcagttg

SEQ ID NO: 595868 - DNA, 120 bp, Artificial Sequence
  ENSG00000173821_8 (sequence is synthesized)
atgctgtagctgagccagccaatgcagttaaaggggccgggaaggaaatgaaagagaagacccagagaatgaaacagccaccagcaaccactcctcctttcaaaacacactgccaggaag

SEQ ID NO: 595869 - DNA, 120 bp, Artificial Sequence
  ENSG00000173821_9 (sequence is synthesized)
ctgagaccaagaccaaggacgagatggctgctgctgaagaaaaagtcggtaagaatgaacaaggggagcctgaagacctcaagaagccagaggggaagaacagaagtgcagctgctgtga

SEQ ID NO: 595870 - DNA, 120 bp, Artificial Sequence
  ENSG00000173821_10 (sequence is synthesized)
aaaacgagaaggagcaaaaaaaccaggaagcagatgtccaggaagtgaaggcaagcacgctgagcccgggtggaggagtcaccgtgttcttccacgccatcatctctcttcatttcccat

SEQ ID NO: 595871 - DNA, 120 bp, Artificial Sequence
  ENSG00000173821_11 (sequence is synthesized)
tcaatcctgacctccataaagtcttcatcagaggaggagaagaatttggggagtcaaaatgggacagcaatatctgtgagctgcactacaccagagacttgggtcatgaccgcgttcttg

SEQ ID NO: 595872 - DNA, 120 bp, Artificial Sequence
  ENSG00000173821_12 (sequence is synthesized)
ttgaaggcattgtctgcatttccaagaagcacctagataaatacattccttacaagtacgtcatttataatggggaatcttttgagtatgagttcatttacaagcaccagcagaagaagg

SEQ ID NO: 595873 - DNA, 120 bp, Artificial Sequence
  ENSG00000173821_13 (sequence is synthesized)
gcgagtacgtcaaccgctgtctgttcataaaatcttcacttctgggctcaggagactggcatcagtactatgacatagtttatatgaagcctcatgggagactccagaaagtcatgaacc

SEQ ID NO: 595874 - DNA, 120 bp, Artificial Sequence
  ENSG00000173821_14 (sequence is synthesized)
acatcacagacgggccgaggaaggacctggtgaaggggaagcagattgccgctgcgctcatgctggacagcaccttcagcatcctgcagacctgggacaccatcaacctgaacagcttct

SEQ ID NO: 595875 - DNA, 120 bp, Artificial Sequence
  ENSG00000173821_15 (sequence is synthesized)
tcacccagttcgagcagttttgctttgtcctgcaacagcctatgatttatgaaggacaggcacagctgtggaccgatttgcagtacagggagaaagaggtgaagagatacctgtggcaac

SEQ ID NO: 595876 - DNA, 120 bp, Artificial Sequence
  ENSG00000173821_16 (sequence is synthesized)
atctgaaaaaacacgtggtaccattgccggacggaaaaagcacggactttttgcctgtggactgcccagtgaggagtaaactgaaaacaggcctgattgtcctttttgtagtggaaaaaa

SEQ ID NO: 595877 - DNA, 120 bp, Artificial Sequence
  ENSG00000173821_17 (sequence is synthesized)
ttgagcttttattagaaggcagcctggactggttgtgtcacctcctaacctcagatgccagctcaccagatgagtttcaccgtgacctaagccacatccttgggatacctcagagctggc

SEQ ID NO: 595878 - DNA, 120 bp, Artificial Sequence
  ENSG00000173821_18 (sequence is synthesized)
ggctgtacctggtgaacctgtgccaaagatgcatggacacaaggacgtacacctggctgggcgccctgcctgtcctgcactgctgtatggagctggccccgcggcacaaggatgcctgga

SEQ ID NO: 595879 - DNA, 120 bp, Artificial Sequence
  ENSG00000173821_19 (sequence is synthesized)
gacagcctgaggacacctgggccgctctggagggactctccttctcaccgttccgggaacaaatgctagatacgagttccctacttcagtttatgagagagaagcagcatttgctgagca

SEQ ID NO: 595880 - DNA, 120 bp, Artificial Sequence
  ENSG00000173821_20 (sequence is synthesized)
tagacgagcctctcttccggtcctggtttagtctgctacctctgagtcacctggttatgtatatggaaaacttcattgagcacctgggtcgttttcctgctcatatcctggactgtcttt

SEQ ID NO: 595881 - DNA, 120 bp, Artificial Sequence
  ENSG00000173821_21 (sequence is synthesized)
cagggatttactaccggcttccgggacttgagcaagtcttgaatacgcaggatgttcaggatgttcagaacgttcagaacattttagaaatgctgttgcgactcctggacacttaccggg

SEQ ID NO: 595882 - DNA, 120 bp, Artificial Sequence
  ENSG00000173821_22 (sequence is synthesized)
acaagattcccgaggaggccttgtcaccatcctacctgactgtgtgtctgaaactgcatgaagccatctgcagcagcacaaagctacttaagttttacgagctgccagccttatctgccg

SEQ ID NO: 595883 - DNA, 120 bp, Artificial Sequence
  ENSG00000173821_23 (sequence is synthesized)
agattgtctgcagaatgattagacttctatctctggtggattctgcaggacagagagatgaaactggaaataattcagtccaaacagtcttccaagggacccttgctgctacgaaaaggt

SEQ ID NO: 595884 - DNA, 120 bp, Artificial Sequence
  ENSG00000173821_24 (sequence is synthesized)
ggctccgagaagtttttacaaagaacatgctcacatcttcaggtgcctcattcacatacgtcaaggaaattgaggtctggaggcggctggtggaaatccaattccccgcggagcatggct

SEQ ID NO: 595885 - DNA, 120 bp, Artificial Sequence
  ENSG00000173821_25 (sequence is synthesized)
ggaaggagtcgttgctgggagacatggaatggaggctcacaaaggaggaacccctctcccagatcactgcctactgcaatagttgctgggacaccaaaggcttagaggacagtgtggcca

SEQ ID NO: 595886 - DNA, 120 bp, Artificial Sequence
  ENSG00000173821_26 (sequence is synthesized)
agaccttcgagaaatgcatcattgaagccgtgagctcagcctgccagtctcagaccagtatccttcaggggttctcttactctgatttgcggaaatttggcatcgtcttgtctgctgtga

SEQ ID NO: 595887 - DNA, 120 bp, Artificial Sequence
  ENSG00000173821_27 (sequence is synthesized)
tcactaagtcctggcctaggaccgcggacaacttcgatgacattttaaagcatctgctcacgttggcagatgtcaagcacgtcttcagattgtgtggaaccgacgagaaaatactagcaa

SEQ ID NO: 595888 - DNA, 120 bp, Artificial Sequence
  ENSG00000173821_28 (sequence is synthesized)
atgtcacagaggatgccaagaggctgatagctgttgccgactctgtgttgacgaaagttgttggtgacctcctaagtggcacgattttagttggacaactggagctgattataaagcaca

SEQ ID NO: 595889 - DNA, 120 bp, Artificial Sequence
  ENSG00000173821_29 (sequence is synthesized)
agaatcagtttcttgacatctggcaactgagggaaaaaagtctttcaccccaggatgaacaatgtgctgtggaggaagcactggattggagaagggaggaactgttacttctaaagaaag

SEQ ID NO: 595890 - DNA, 120 bp, Artificial Sequence
  ENSG00000173821_30 (sequence is synthesized)
agaaaagatgtgttgatagtctcctgaagatgtgtgggaacgtgaaacatctgatacaagtggactttggagtgcttgcagtaagacactcacaagacctcagcagtaaaagattaaatg

SEQ ID NO: 595891 - DNA, 120 bp, Artificial Sequence
  ENSG00000173821_31 (sequence is synthesized)
acaccgtgacagtgagactgtccacctcctcgaactcgcagagggcaacgcattaccacctgagctcccaggtccaagaaatggctgggaagatagacttgctcagagacagccacatct

SEQ ID NO: 595892 - DNA, 120 bp, Artificial Sequence
  ENSG00000173821_32 (sequence is synthesized)
tccagctcttctggcgggaagccgcagagccgctgagtgagcctaaggaggaccaggaagccgcagagttgctgagtgagcccgaagaagaatcagaaaggcacatccttgagcttgaag

SEQ ID NO: 595893 - DNA, 120 bp, Artificial Sequence
  ENSG00000173821_33 (sequence is synthesized)
aggtgtatgactatttgtatcagccttcttacagaaagttcattaagttgcaccaggatctaaagtcaggagaggtcacccttgcagagattgatgtcatcttcaaggactttgtgaata

SEQ ID NO: 595894 - DNA, 120 bp, Artificial Sequence
  ENSG00000173821_34 (sequence is synthesized)
aatacacggacctggattcagaacttaagatcatgtgcaccgtggaccaccaggaccaaagagattggatcaaggaccgagtcgaacagatcaaggaataccatcacctgcaccaggctg

SEQ ID NO: 595895 - DNA, 120 bp, Artificial Sequence
  ENSG00000173821_35 (sequence is synthesized)
tccacgcagccaaggtcatcttgcaggtcaaagagagcctgggactgaacggtgacttcagtgttctcaacactttactaaattttactgataacttcgacgactttcgccgtgaaacac

SEQ ID NO: 595896 - DNA, 120 bp, Artificial Sequence
  ENSG00000173821_36 (sequence is synthesized)
tggaccagatcaaccaggagctcatccaggccaaaaagctgctccaggacatcagcgaggcccggtgcaaggggctgcaggctctgtccctgagaaaggagttcatctgctgggtccggg

SEQ ID NO: 595897 - DNA, 120 bp, Artificial Sequence
  ENSG00000173821_37 (sequence is synthesized)
aggctcttggaggcatcaatgagctgaaggtgtttgtggacctggcctccatctcagcgggggagaatgacattgatgtggaccgggtggcctgcttccatgacgctgtgcagggctacg

SEQ ID NO: 595898 - DNA, 120 bp, Artificial Sequence
  ENSG00000173821_38 (sequence is synthesized)
catccctgctatttaagctggaccccagcgtggacttcagtgcattcatgaagcatctgaaaaagctgtggaaggctctggataaggaccagtacctgcccaggaaactgtgtgactccg

SEQ ID NO: 595899 - DNA, 120 bp, Artificial Sequence
  ENSG00000173821_39 (sequence is synthesized)
ccaggaacttggaatggctgaagactgtgaatgagagtcatgggtctgtggaacgctcatccctgaccctggccacggccatcaaccaaagaggcatctatgtgatccaggcgcccaaag

SEQ ID NO: 595900 - DNA, 120 bp, Artificial Sequence
  ENSG00000173821_40 (sequence is synthesized)
gtggccaaaagatttccccagacacggttctgcacttgatccttcctgagagccctggcagccacgaggagtcacgagagtactctttagaggaggtgaaggagcttttgaacaagttga

SEQ ID NO: 595901 - DNA, 120 bp, Artificial Sequence
  ENSG00000173821_41 (sequence is synthesized)
tgctgatgtctggcaagaaggatcgtaacaacacggaagtggagaggttttcagaggtcttctgcagtgtgcagaggctcagccaggccttcatcgacctgcactctgctgggaatatgc

SEQ ID NO: 595902 - DNA, 120 bp, Artificial Sequence
  ENSG00000173821_42 (sequence is synthesized)
tgttcaggacgtggatcgccatggcctactgctcccccaagcagggtgtgtccctccaaatggactttggcttggacctggtgacggagcttaaagaaggtggagatgtcactgagctgc

SEQ ID NO: 595903 - DNA, 120 bp, Artificial Sequence
  ENSG00000173821_43 (sequence is synthesized)
tggcagccctctgcaggcagatggagcacttccttgacagctggaagagatttgtgacccagaagcgaatggagcacttttacctgaacttctacacggcagagcagctggtttacctga

SEQ ID NO: 595904 - DNA, 120 bp, Artificial Sequence
  ENSG00000173821_44 (sequence is synthesized)
gcactgagctcaggaagcagcccccgagtgatgccgccctaacgatgctatccttcatcaaaagcaactgcaccctgagggatgtcttaagggcctctgtggggtgtgggagtgaggccg

SEQ ID NO: 595905 - DNA, 120 bp, Artificial Sequence
  ENSG00000173821_45 (sequence is synthesized)
ccaggtaccgcatgaggagagtcatggaagagctcccgctgatgctcttatcagagttcagcctggtggacaagctgaggatcatcatggagcagtccatgaggtgccttcctgccttcc

SEQ ID NO: 595906 - DNA, 120 bp, Artificial Sequence
  ENSG00000173821_46 (sequence is synthesized)
tgcccgactgcctcgacctagagacccttggccactgtctggctcacctggcagggatgggtgggtctcccgtggagcgttgtctcccgagaggtctgcaggtcggccagcccaacctcg

SEQ ID NO: 595907 - DNA, 120 bp, Artificial Sequence
  ENSG00000173821_47 (sequence is synthesized)
tcgtctgtggccactccgaggtgttgccagccgccctggctgtctacatgcaaaccccaagccagcccctgcccacttacgatgaggtgctgctctgcaccccggcaaccacctttgagg

SEQ ID NO: 595908 - DNA, 120 bp, Artificial Sequence
  ENSG00000173821_48 (sequence is synthesized)
aggtggcactgttgctgcgccgctgcctgaccctgggctccctggggcacaaggtctacagcctgctgttcgcagatcagctgagctacgaggtggcacgccaagcggaggagcttttcc

SEQ ID NO: 595909 - DNA, 120 bp, Artificial Sequence
  ENSG00000173821_49 (sequence is synthesized)
acaatctgtgcacgcagcagcaccgagaagactaccagctcgtcatggtctgtgatggggactgggagcactgctacctcccctctgccttcagccagcacaaggtcttcgtcacccccc

SEQ ID NO: 595910 - DNA, 120 bp, Artificial Sequence
  ENSG00000173821_50 (sequence is synthesized)
aggcacccctcgaggccatccaagcctacctggcaggtcactaccgggtcccgaagcagaccctgtcggcggcagccgtgttcaatgaccggctgtgtgttgggatcgtggcctcggagc

SEQ ID NO: 595911 - DNA, 120 bp, Artificial Sequence
  ENSG00000173821_51 (sequence is synthesized)
gagcaggtgttggaaagtctctgtacgtgaagaggttgcacgacaaaatgaagatgcagttaaacgtgaaaaatgtgcctctgaaaacaattcgactgatcgaccctcaggtggatgaga

SEQ ID NO: 595912 - DNA, 120 bp, Artificial Sequence
  ENSG00000173821_52 (sequence is synthesized)
gccgagtcctgggcgccctgctgcccttcctggatgcgcagtatcagaaggtccccgtgctctttcacctggacgtgacctcctcagtgcagactggaatttgggtgtttcttttcaagc

SEQ ID NO: 595913 - DNA, 120 bp, Artificial Sequence
  ENSG00000173821_53 (sequence is synthesized)
tcctcattttacaatacttaatggatataaatgggaaaatgtggcttcggaacccctgccatttgtatatcgttgaaatcctggaaaggaggacgtcagtgccgtcgaggagctcttcag

SEQ ID NO: 595914 - DNA, 120 bp, Artificial Sequence
  ENSG00000173821_54 (sequence is synthesized)
cgctgcgtacacgtgtaccccagttcagttttcttgacatcttcccaaaagtcacctgcaggcctcccaaagaggtgatagacatggagctgagtgccctgaggagtgacacagagcctg

SEQ ID NO: 595915 - DNA, 120 bp, Artificial Sequence
  ENSG00000173821_55 (sequence is synthesized)
ggatggatctgtgggagttctgcagcgaaactttccaaagaccttaccagtatttaagacgattcaatcaaaaccaagacctagacacgtttcagtatcaagaaggctctgtcgaaggca

SEQ ID NO: 595916 - DNA, 120 bp, Artificial Sequence
  ENSG00000173821_56 (sequence is synthesized)
ccccggaggaatgcctccagcatttcctgtttcactgcggggtaataaacccatcctggtcagagcttcggaactttgctcggttcctgaattatcagctcagagattgtgaggcctctc

SEQ ID NO: 595917 - DNA, 120 bp, Artificial Sequence
  ENSG00000173821_57 (sequence is synthesized)
tcttctgcaatccgagttttattggcgacacactgaggggcttcaagaagttcgtggtgaccttcatgatctttatggcaagagattttgccacaccatcactccacacctctgaccaaa

SEQ ID NO: 595918 - DNA, 120 bp, Artificial Sequence
  ENSG00000173821_58 (sequence is synthesized)
gcccggggaagcacatggtcaccatggatggggttagggaagaagatctagcgcccttctccctccggaagaggtgggagtcggagcctcacccatacgttttcttcaatgacgaccaca

SEQ ID NO: 595919 - DNA, 120 bp, Artificial Sequence
  ENSG00000173821_59 (sequence is synthesized)
caaccatgacattcatcggcttccatctgcagcccaacatcaacggcagtgtcgatgccatcagtcacttgactgggaaggtcatcaagagagacgtcatgaccagggacctgtaccagg

SEQ ID NO: 595920 - DNA, 120 bp, Artificial Sequence
  ENSG00000173821_60 (sequence is synthesized)
gcctgctgctccagagggtgcccttcaatgtcgactttgataaactgcccagacacaagaaacttgagaggctctgcctgaccttagggatcccccaggccaccgaccccgacaaaacgt

SEQ ID NO: 595921 - DNA, 120 bp, Artificial Sequence
  ENSG00000173821_61 (sequence is synthesized)
atgagctcacaaccgacaatatgcttaaaatccttgccatcgagatgcggttccggtgtgggatcccggttatcatcatgggagaaactggctgtgggaaaaccaggcttattaaattcc

SEQ ID NO: 595922 - DNA, 120 bp, Artificial Sequence
  ENSG00000173821_62 (sequence is synthesized)
ttagcgacctgcggcgtggtggtaccaatgctgacaccataaagctggtcaaggtgcacggaggaacaactgcagacatgatctactccagagtcagggaggctgaaaatgtggccttcg

SEQ ID NO: 595923 - DNA, 120 bp, Artificial Sequence
  ENSG00000173821_63 (sequence is synthesized)
ccaataaggaccaacatcagttggacaccatcttgttttttgatgaagccaacacaacggaagctataagctgtatcaaagaagtcctgtgtgatcatatggtggatggccagcctctgg

SEQ ID NO: 595924 - DNA, 120 bp, Artificial Sequence
  ENSG00000173821_64 (sequence is synthesized)
ctgaggactctggcctgcatattatagctgcctgcaatccataccggaagcactctgaggagatgatctgccgtttggagtcagctggtttgggctacagggttagtatggaggagacgg

SEQ ID NO: 595925 - DNA, 120 bp, Artificial Sequence
  ENSG00000173821_65 (sequence is synthesized)
ccgacaggctgggctccattcctctgaggcagctggtataccgggtccatgctctgcccccgagcctgattcctctggtgtgggactttggacaactgagtgacgttgctgaaaagctct

SEQ ID NO: 595926 - DNA, 120 bp, Artificial Sequence
  ENSG00000173821_66 (sequence is synthesized)
acatccagcagattgtccagagactggttgagtccatcagcctagatgaaaacgggactcgcgtgatcacagaagtcctctgcgcctctcagggtttcatgaggaaaacagaagatgagt

SEQ ID NO: 595927 - DNA, 120 bp, Artificial Sequence
  ENSG00000173821_67 (sequence is synthesized)
gcagctttgtcagcctcagggacgtggagcgctgtgtgaaagttttcaggtggttccacgagcacagcgcgatgctcttagcgcagctgaatgcctttctctccaagtccagcgtcagca

SEQ ID NO: 595928 - DNA, 120 bp, Artificial Sequence
  ENSG00000173821_68 (sequence is synthesized)
aaaatcacaccgagagagatcccgtcctctggtcgttgatgctggccatcggggtgtgttaccatgcctctttagaaaagaaagactcatatcggaaagccatcgccaggttctttccga

SEQ ID NO: 595929 - DNA, 120 bp, Artificial Sequence
  ENSG00000173821_69 (sequence is synthesized)
aaccgtatgacgacagcaggctgcttctggatgaaataacacgggcacaggatctttttctggacggcgtacctctgaggaaaaccatcgccaagaacttggccttgaaggagaacgtct

SEQ ID NO: 595930 - DNA, 120 bp, Artificial Sequence
  ENSG00000173821_70 (sequence is synthesized)
tcatgatggtcgtctgcatcgagctgaagattcccctcttcctggtggggaagcccggcagctccaagtctctcgccaagaccatcgtggcagacgccatgcagggcccggctgcctact

SEQ ID NO: 595931 - DNA, 120 bp, Artificial Sequence
  ENSG00000173821_71 (sequence is synthesized)
cagatctcttccgcagcctgaagcaggtccacctggtgtccttccagtgcagcccgcactccaccccacagggcatcatcagcaccttccggcagtgcgcccgctttcagcaggggaagg

SEQ ID NO: 595932 - DNA, 120 bp, Artificial Sequence
  ENSG00000173821_72 (sequence is synthesized)
acctgcagcagtacgtctctgtggtggtgttagatgaggtggggctggcggaagactcacccaaaatgcccctgaagactctgcacccgctgctggaagacggatgcattgaagacgatc

SEQ ID NO: 595933 - DNA, 120 bp, Artificial Sequence
  ENSG00000173821_73 (sequence is synthesized)
ccgccccccacaaaaaggtcggcttcgtgggcatctccaactgggcccttgaccctgccaagatgaaccggggcatttttgtgtcacgtggcagccccaacgagacagagctcatagaga

SEQ ID NO: 595934 - DNA, 120 bp, Artificial Sequence
  ENSG00000173821_74 (sequence is synthesized)
gcgccaagggcatctgctcctcagacatcctcgtccaggaccgagtccaagggtactttgcgtcctttgccaaagcctacgaaacggtgtgtaagcgccaggacaaggaattcttcgggc

SEQ ID NO: 595935 - DNA, 120 bp, Artificial Sequence
  ENSG00000173821_75 (sequence is synthesized)
ttcgtgactactacagcctcatcaaaatggtctttgctgcagcaaaggcttcaaatagaaagccttccccgcaagacattgcacaggctgtccttaggaacttcagtggcaaggatgaca

SEQ ID NO: 595936 - DNA, 120 bp, Artificial Sequence
  ENSG00000173821_76 (sequence is synthesized)
tccaagctttggacatctttctggccaatttgcccgaggccaagtgctcagaggaagtcagccccatgcagctgatcaaacagaacatctttgggccttctcagaaggtgccgggtggag

SEQ ID NO: 595937 - DNA, 120 bp, Artificial Sequence
  ENSG00000173821_77 (sequence is synthesized)
agcaggaagatgctgagtcccgctacttactcgtgctgaccaaaaactacgtggcactgcagatcctgcagcagacattcttcgagggggaccagcagccggagattatttttggttctg

SEQ ID NO: 595938 - DNA, 120 bp, Artificial Sequence
  ENSG00000173821_78 (sequence is synthesized)
gtttccccaaggaccaagagtacacccagctctgcagaaacatcaatcgtgtgaagatctgcatggaaacaggcaagatggtgttgcttctcaacctgcagaacctctacgagagcctct

SEQ ID NO: 595939 - DNA, 120 bp, Artificial Sequence
  ENSG00000173821_79 (sequence is synthesized)
acgacgcactcaaccagtactacgtccacctcggcggccagaagtacgtggacctcggtctggggacccaccgcgtcaaatgtcgggttcaccccaacttccgcctgattgtcattgaag

SEQ ID NO: 595940 - DNA, 120 bp, Artificial Sequence
  ENSG00000173821_80 (sequence is synthesized)
agaaagacgtcgtgtacaaacactttcccatccccctcattaaccggctggagaagcactatctggatatcaacacggtgctggagaaatggcagaagagcatcgtggaggagctctgtg

SEQ ID NO: 595941 - DNA, 120 bp, Artificial Sequence
  ENSG00000173821_81 (sequence is synthesized)
cgtgggtggagaagttcatcaatgtcaaagcacatcatttccagaagaggcacaaatacagcccctctgacgtcttcatcggctaccactcggacgcctgcgcgtctgtggtgctgcagg

SEQ ID NO: 595942 - DNA, 120 bp, Artificial Sequence
  ENSG00000173821_82 (sequence is synthesized)
tcatagagaggcagggtccccgggccttgacggaggaacttcaccagaaggtgtctgaggaggccaaatcgatcctgctgaactgcgctacgcccgatgccgtggtccggctgagcgcct

SEQ ID NO: 595943 - DNA, 120 bp, Artificial Sequence
  ENSG00000173821_83 (sequence is synthesized)
actcgctgggcgggttcgcagcggagtggctgtcgcaggagtactttcacagacagaggcacaactcctttgcagatttccttcaggcacacctgcacacggcagacctggagcgccacg

SEQ ID NO: 595944 - DNA, 120 bp, Artificial Sequence
  ENSG00000173821_84 (sequence is synthesized)
ccatcttcacagagatcaccactttctccaggctgctaacaagtcacgactgtgaaattttagaatcagaggtcacaggcagggctccgaaacccacactcctgtggctgcagcagtttg

SEQ ID NO: 595945 - DNA, 120 bp, Artificial Sequence
  ENSG00000173821_85 (sequence is synthesized)
acaccgagtactcattcctcaaagaagtccgaaactgtttaacgaatacagccaaatgtaaaatcctcatttttcagacagattttgaagatggaatccgtagcgcccagctcattgcct

SEQ ID NO: 595946 - DNA, 120 bp, Artificial Sequence
  ENSG00000173821_86 (sequence is synthesized)
cagctaagtattctgttataaatgaaatcaacaaaatacgagaaaatgaggaccgtatcttcgtctatttcatcacaaaactgtcccgggtgggaagaggaacagcctatgtgggcttcc

SEQ ID NO: 595947 - DNA, 120 bp, Artificial Sequence
  ENSG00000173821_87 (sequence is synthesized)
ggtttctgatgtgaccaggctgcagcatgtcaccatcagccagctgttcgcgcccggagacttgcctgagctgggcttggaacaccgggcggaagacggccatgaggaggcgatggagac

SEQ ID NO: 595948 - DNA, 120 bp, Artificial Sequence
  ENSG00000173821_88 (sequence is synthesized)
ggaggccagcacatcaggggaggtggcagaggtggcagaggaggccatggaaacagaaagttctgagaaggtgggaaaggaaacctctgaactcggaggcagtgatgtgtcgatcctgga

SEQ ID NO: 595949 - DNA, 120 bp, Artificial Sequence
  ENSG00000173821_89 (sequence is synthesized)
caccaccaggctgctgagaagctgtgtgcagagcgccgtgggcatgctcagagaccagaacgagagctgcacgcgcaatatgcggagggtggtgctcctcctgggcctcttgaatgagga

SEQ ID NO: 595950 - DNA, 120 bp, Artificial Sequence
  ENSG00000173821_90 (sequence is synthesized)
tgacgcgtgccacgcctctttcttgcgggtatccaagatgcgcctcagtgtctttttaaagaagcaagaagagagccagtttcaccctctggagtggttggcaagggaagcctgcaacca

SEQ ID NO: 595951 - DNA, 120 bp, Artificial Sequence
  ENSG00000173821_91 (sequence is synthesized)
ggacgctctccaggaggcgggcacattcaggcacaccctctggaagcgggtccaaggtgctgtcacccctctgctggcgagcatgatatcattcatcgacagagacggcaacctagagtt

SEQ ID NO: 595952 - DNA, 120 bp, Artificial Sequence
  ENSG00000173821_92 (sequence is synthesized)
actgaccaggccagatactccgccctgggcaagagatctttggatgtttattttcagtgacacgatgcttctgaacattcctcttgtgatgaataatgaaagacataaaggtgagatggc

SEQ ID NO: 595953 - DNA, 120 bp, Artificial Sequence
  ENSG00000173821_93 (sequence is synthesized)
ctacatcgtggtgcagaaccacatgaacctttccgagaacgcttccaacaacgtccctttcagctggaaaatcaaggactatctggaggagctgtgggtccaggctcagtacatcacaga

SEQ ID NO: 595954 - DNA, 120 bp, Artificial Sequence
  ENSG00000173821_94 (sequence is synthesized)
cgcagaaggactgcccaagaagttcgtggacatctttcagcagactcctctgggcaggtttcttgcccagctccatggagagccgcagcaggaacttcttcagtgttacttgaaggattt

SEQ ID NO: 595955 - DNA, 120 bp, Artificial Sequence
  ENSG00000173821_95 (sequence is synthesized)
cattctcttgaccatgcgtgtgtcaacggaggaggaattaaagtttctgcagatggctctgtggtcctgcactaggaaactgaaagcggcgtcagaagcgcccgaggaagaggtttcctt

SEQ ID NO: 595956 - DNA, 120 bp, Artificial Sequence
  ENSG00000173821_96 (sequence is synthesized)
accgtgggtgcaccttgcctaccagcgtttcagaagccgtctgcagaacttttccagaatcctgaccatctaccctcaggttctccacagcctgatggaagcccgttggaaccatgagct

SEQ ID NO: 595957 - DNA, 120 bp, Artificial Sequence
  ENSG00000173821_97 (sequence is synthesized)
ggctggatgtgagatgaccctggacgcatttgccgcaatggcctgcacggagatgctgacaagaaacaccctgaagcccagtccccaggcgtggctacagttggtgaagaatctttccat

SEQ ID NO: 595958 - DNA, 120 bp, Artificial Sequence
  ENSG00000173821_98 (sequence is synthesized)
gccgctggagctcatctgctccgatgagcacatgcaaggcagcgggagcctggcccaggctgtcatcagggaagtcagagcccagtggagtcggattttctccaccgcactcttcgtgga

SEQ ID NO: 595959 - DNA, 120 bp, Artificial Sequence
  ENSG00000173821_99 (sequence is synthesized)
gcacgtgctcctaggaaccgagagccgcgtccccgagttacaggggctggtgaccgagcacgtcttcttactagacaagtgtcttcgagagaactctgacgtgaagacgcacgggccttt

SEQ ID NO: 595960 - DNA, 120 bp, Artificial Sequence
  ENSG00000173821_100 (sequence is synthesized)
tgaggccgtgatgcgcactctctgtgaatgcaaggagacagccagcaagaccctcagcaggtttgggattcagccgtgctccatctgcctgggagatgcaaaggaccccgtctgtctgcc

SEQ ID NO: 595961 - DNA, 120 bp, Artificial Sequence
  ENSG00000173821_101 (sequence is synthesized)
ctgcgaccacgtgcactgcctgcgctgcctcagggcctggtttgcctcagagcagatgatatgcccctactgtttaactgccttgccagacgaattctctccagctgtttcccaagcgca

SEQ ID NO: 595962 - DNA, 120 bp, Artificial Sequence
  ENSG00000173821_102 (sequence is synthesized)
cagggaagccattgaaaagcatgcccgcttccggcagatgtgcaacagtttcttcgtagacctggtgtccaccatttgcttcaaggacaacgctccgcctgagaaggaagtgattgagag

SEQ ID NO: 595963 - DNA, 120 bp, Artificial Sequence
  ENSG00000173821_103 (sequence is synthesized)
cctgctctctctcctcttcgtccaaaaggggcgcttaagagatgctgcccagagacactgtgaacacacaaaatctctctctccattcaatgatgttgtggataagactcctgtcatccg

SEQ ID NO: 595964 - DNA, 120 bp, Artificial Sequence
  ENSG00000173821_104 (sequence is synthesized)
ctcagtgatactgaaactgcttttgaagtacagctttcatgatgtaaaagattatattcaggaatatttgaccctgttaaaaaagaaagcattcataactgaagataaaactgaactgta

SEQ ID NO: 595965 - DNA, 120 bp, Artificial Sequence
  ENSG00000173821_105 (sequence is synthesized)
catgctcttcatcaactgcctggaggattcaatacttgagaagaccagtgcttactccagaaatgatgaactgaaccacctagaagaggaaggtcgtttccttaaggcatattctccagc

SEQ ID NO: 595966 - DNA, 120 bp, Artificial Sequence
  ENSG00000173821_106 (sequence is synthesized)
aagccggggccgagagcctgccaacgaggcctcggttgaatacctgcaagaggtggcccggatccgcctctgcctcgacagagctgcagatttcctctcggagcctgagggaggcccaga

SEQ ID NO: 595967 - DNA, 120 bp, Artificial Sequence
  ENSG00000173821_107 (sequence is synthesized)
gatggccaaggagaagcagtgctacctgcagcaagtcaagcagttctgtatccgggtggagaacgactggcaccgggtgtacctggtgcggaagctcagcagccagcgggggatggagtt

SEQ ID NO: 595968 - DNA, 120 bp, Artificial Sequence
  ENSG00000173821_108 (sequence is synthesized)
cgtgcagggcctctccaagcccggccgcccgcaccagtgggtgtttcccaaggacgttgtcaagcagcaggggctgcggcaggaccacccaggccagatggataggtacctggtgtacgg

SEQ ID NO: 595969 - DNA, 120 bp, Artificial Sequence
  ENSG00000173821_109 (sequence is synthesized)
cgatgaatacaaggctctccgtgatgctgtggccaaagctgtcctcgagtgcaagccactgggcattaagactgctctgaaggcctgcaagaccccccaaagccagcagtcagcctactt

SEQ ID NO: 595970 - DNA, 120 bp, Artificial Sequence
  ENSG00000173821_110 (sequence is synthesized)
cctgttaacactgtttagagaggtggctattttgtacagatcccacaatgcaagcctccaccccacgccagagcaatgtgaagctgtgagcaaattcattggcgaatgcaagatcctttc

SEQ ID NO: 595971 - DNA, 120 bp, Artificial Sequence
  ENSG00000173821_111 (sequence is synthesized)
acctcctgatatcagccgttttgcaacatcgctcgtggacaattctgtgccattgttgagggcggggcctagtgacagcaaccttgatggaacggtgacagaaatggccattcatgctgc

SEQ ID NO: 595972 - DNA, 120 bp, Artificial Sequence
  ENSG00000173821_112 (sequence is synthesized)
agccgtccttctgtgtggacagaatgaactcttggagcccctaaagaatctggccttctccccagccaccatggcgcatgcttttcttccaaccatgcctgaagacttgctggctcaagc

SEQ ID NO: 595973 - DNA, 120 bp, Artificial Sequence
  ENSG00000173821_113 (sequence is synthesized)
tcggaggtggaagggtctggagcgagtccactggtacacttgtcccaacggccatccttgctccgtgggagagtgtggcaggccgatggaacagagcatctgcattgactgccatgcgcc

SEQ ID NO: 595974 - DNA, 120 bp, Artificial Sequence
  ENSG00000173821_114 (sequence is synthesized)
gattggaggcattgaccacaaacctcgggacggctttcatctggtcaaagacaaggcagacagaacgcagaccggccacgtgctgggcaacccgcagcggagagacgtggtgacatgtga

SEQ ID NO: 595975 - DNA, 120 bp, Artificial Sequence
  ENSG00000173821_115 (sequence is synthesized)
ccgagggctgcccccagtggtcttcctccttatccggctactcactcacttggctctgcttctgggagcgtcccagagttcccaggctctgataaacatcattaagcctccagtgaggga

SEQ ID NO: 595976 - DNA, 120 bp, Artificial Sequence
  ENSG00000173821_116 (sequence is synthesized)
tccaaaaggctttctgcagcagcacatcctgaaggacctggagcagttggccaagatgctgggacacagtgccgacgagaccatcggcgtggtccacctcgtcctgcgcaggcttctcca

SEQ ID NO: 595977 - DNA, 120 bp, Artificial Sequence
  ENSG00000173821_117 (sequence is synthesized)
agagcagcaccagctctctagcagaaggcttttaaattttgacacagaattgtcaactaaagaaatgaggaacaactgggaaaaggaaatcgcagctgtgatttctcctgaactggagca

SEQ ID NO: 595978 - DNA, 120 bp, Artificial Sequence
  ENSG00000173821_118 (sequence is synthesized)
tctagataaaacccttcccaccatgaataatctcatcagccaagataagcgtatcagctctaaccctgtggccaaaataatatatggtgacccagtgaccttcctgccccacctgccccg

SEQ ID NO: 595979 - DNA, 120 bp, Artificial Sequence
  ENSG00000173821_119 (sequence is synthesized)
gaaaagtgtggtccattgctctaagatttggagctgcaggaaaagaattacagttgagtacctccagcacattgtggaacagaaaaatggcaaagaaagagtgcccatcctctggcattt

SEQ ID NO: 595980 - DNA, 120 bp, Artificial Sequence
  ENSG00000173821_120 (sequence is synthesized)
cctgcagaaggaagcagagctgaggctggtaaagttcctgcctgagattttggccttgcaaagggatctagtgaagcagttccagaacgtccagcaagttgaatacagctccatcagagg

SEQ ID NO: 595981 - DNA, 120 bp, Artificial Sequence
  ENSG00000173821_121 (sequence is synthesized)
cttcctcagcaagcacagctcagatgggttgaggcagctgcttcacaacaggatcacagtctttctgtccacatggaacaaactgaggagatcgcttgagacgaacggtgagatcaacct

SEQ ID NO: 595982 - DNA, 120 bp, Artificial Sequence
  ENSG00000173821_122 (sequence is synthesized)
acccaaagactactgcagcactgacttggatctggacactgagtttgagatcctcttgccacgccgacggggcctgggcctctgtgctaccgctctcgtcagctacttgattcgcctaca

SEQ ID NO: 595983 - DNA, 120 bp, Artificial Sequence
  ENSG00000173821_123 (sequence is synthesized)
caatgaaattgtctacgccgtggaaaaactctccaaggaaaacaacagctattccgtggatgccgccgaggtcactgaactgcatgtcatcagttatgaagtggagcgggacctgactcc

SEQ ID NO: 595984 - DNA, 120 bp, Artificial Sequence
  ENSG00000173821_124 (sequence is synthesized)
actgattctctccaactgccagtaccaggtggaggagggcagagagaccgtgcaggagttcgatctggagaagattcagcggcagatcgtcagccgcttcctccagggcaagccccggct

SEQ ID NO: 595985 - DNA, 120 bp, Artificial Sequence
  ENSG00000173821_125 (sequence is synthesized)
gagcctcaagggaatacccactctggtgtacagacacgactggaactatgaacatctctttatggacatcaagaacaaaatggcacaggactccctccccagctcggtcattagtgccat

SEQ ID NO: 595986 - DNA, 120 bp, Artificial Sequence
  ENSG00000173821_126 (sequence is synthesized)
cagtggacagctgcagtcctacagcgatgcctgtgaagtgctgtctgtcgtagaagtcactctggggtttctgagcacagctggtggggatccaaacatgcagctgaatgtgtatactca

SEQ ID NO: 595987 - DNA, 120 bp, Artificial Sequence
  ENSG00000173821_127 (sequence is synthesized)
agacatcctgcaaatgggtgatcagacgattcacgtgttaaaggccttaaacagatgccagttaaaacacaccattgccctctggcagttcctgtctgctcataagtctgaacagctgct

SEQ ID NO: 595988 - DNA, 120 bp, Artificial Sequence
  ENSG00000173821_128 (sequence is synthesized)
gcggctgcacaaagagccatttggggaaatcagttcaaggtacaaagcggatctgagcccggaaaatgctaagctcctcagcacattcctaaatcagactggcctagacgccttcctgct

SEQ ID NO: 595989 - DNA, 120 bp, Artificial Sequence
  ENSG00000173821_129 (sequence is synthesized)
agagctgcacgaaatgataatcttgaaactaaagaacccccaaacccaaaccgaggagcgcttccgccctcagtggagcctgagagacactctcgtaagttacatgcaaactaaagaaag

SEQ ID NO: 595990 - DNA, 120 bp, Artificial Sequence
  ENSG00000173821_130 (sequence is synthesized)
tgaaattcttcctgaaatggcatctcagttcccagaagagatactgctcgccagctgtgtctcagtgtggaaaacagctgctgtgctgaaatggaatcgagaaatgagatagaattattt

SEQ ID NO: 595991 - DNA, 120 bp, Artificial Sequence
  ENSG00000173821_131 (sequence is synthesized)
cctcagctatctttggatgactttggagagaagactcctctctcctcgtctgcggcgtggacttgatcatggactggtgcctttgcattcagaaggagagctgtcagcgtagcaccgaat

SEQ ID NO: 595992 - DNA, 120 bp, Artificial Sequence
  ENSG00000173821_132 (sequence is synthesized)
tcaagaccaaggcgtgctacctgagctgacagctttttgaaagccgagctgtttctgaaccatgtacatacatgttctgaaactttctcatcattttatgagtactgttcattgagagat

SEQ ID NO: 595993 - DNA, 120 bp, Artificial Sequence
  ENSG00000173821_133 (sequence is synthesized)
gacaatgaagattagatgaaattggaaataaaccaacattgtttacattccaggagacttgtagctcagccacacacgcagtaatgacctgtgcccgttcgcctctggcactgcccaccc

SEQ ID NO: 595994 - DNA, 120 bp, Artificial Sequence
  ENSG00000173821_134 (sequence is synthesized)
ctctttttttttttcttctaattctgtactcacaaaagagaatctcattttcttctttcttccattcccttaaattctgagtactgtacatatatttctgggttcccacgatgatgtgaa

SEQ ID NO: 595995 - DNA, 120 bp, Artificial Sequence
  ENSG00000173821_135 (sequence is synthesized)
aaactaccagactgttttttgtcttctcacaaagacaagaaaaatcagggcattttgtgagtgccttaagatcaaactaacaagatctgaccctctcccctcacagtgagccactgcccc

SEQ ID NO: 595996 - DNA, 120 bp, Artificial Sequence
  ENSG00000173821_136 (sequence is synthesized)
acttcagagggtaagagccaaaagcctcattgtgaaaggcactggacttggaccagggacaccatcagggccttggttttctcacgcataaaatggagagtggattaatcgccaaagatt

SEQ ID NO: 595997 - DNA, 120 bp, Artificial Sequence
  ENSG00000173821_137 (sequence is synthesized)
cttctgatctgacattttgaaattgtgagagaaactagatgactgtaaacttggtcacaggcctggttctggcagttctttgcggacttttttctagcattatgccaaataaacatgcag

SEQ ID NO: 595998 - DNA, 120 bp, Artificial Sequence
  ENSG00000173821_138 (sequence is synthesized)
tctcagtgtgctctcgcatgtatgaatatctagtcctttctgtggttctcagccaagacataaaaactaggactcagagcacatacaaaaccagttatgtttcggaaagagggaaaagag

SEQ ID NO: 595999 - DNA, 120 bp, Artificial Sequence
  ENSG00000173821_139 (sequence is synthesized)
tccccgagcccggatcttgtgctgcttttctcactgacgtgttgccttttttctttacaaaatctgctttgatacttaggacctctctggactaatttctcttcctagacagctcagcac

SEQ ID NO: 596000 - DNA, 120 bp, Artificial Sequence
  ENSG00000173821_140 (sequence is synthesized)
agctattgatatgttagaggcagtatccttaatattcattctaaatgagttaacgacttaacttgaaattgggcctaaggagtgagaactacaaaaatacaaaatgcttgtccaggactc

SEQ ID NO: 596001 - DNA, 120 bp, Artificial Sequence
  ENSG00000173821_141 (sequence is synthesized)
agccatgcacaccttgagcagcgccggcaggaggcacggaaggaactgtgctccgttctcctcactgtcatggtgccaccagtgtctgatgaagggcagagtgacccagactgcaggcag

SEQ ID NO: 596002 - DNA, 120 bp, Artificial Sequence
  ENSG00000173821_142 (sequence is synthesized)
taactgacttcacacagtccctggcatttagtcatctgtgattgttttatcactctggactgtgcagagccacctgccaccgagatctgcattccgactgcctatgaacgggtgtggggg

SEQ ID NO: 596003 - DNA, 120 bp, Artificial Sequence
  ENSG00000173821_143 (sequence is synthesized)
ccgggggctggcttgctgaagtcttcaacttgcactcggagctcctttgatacctcagagctggctgtcaggtggcagctcacacccagactcactggccacacctcagcagggggggag

SEQ ID NO: 596004 - DNA, 120 bp, Artificial Sequence
  ENSG00000173821_144 (sequence is synthesized)
tcgagtgtcagtctctttctgtgaaggctttttttttcctttggcctgggaatttttcccatttttatgaaggggttttaaattgtttcattttgtgtgctgtgcttcaaagccttaact

SEQ ID NO: 596005 - DNA, 120 bp, Artificial Sequence
  ENSG00000173821_145 (sequence is synthesized)
gtcaaatcttgcattatcttgtttgtacagaaatatactggcctagcagaggcaaaaaaaaaaaaaatgaattttattttacttgtcacacctgtcttaataaactggagttttgctgct

SEQ ID NO: 596006 - DNA, 120 bp, Artificial Sequence
  ENSG00000173821_146 (sequence is synthesized)
aaagaactcttctctctgggggcagagcttctatttatggcacatagacatcagctaggcttttgggaatcgtttgtgttctttgtggaaatgtcctttagaagcacccatgaagtagtg

SEQ ID NO: 596007 - DNA, 120 bp, Artificial Sequence
  ENSG00000173821_147 (sequence is synthesized)
tgttcagactgtgcacacagaaaacaggctctgccttcacatgtgagacggtggacttttcctctggacaaaatgacagcatcctggcgactccacagtggagctgagcgccactccctg

SEQ ID NO: 596008 - DNA, 120 bp, Artificial Sequence
  ENSG00000173821_148 (sequence is synthesized)
tagccgatctgggactgaaacgcttacacctctgcctcagaaggagtcccccatgccctgcctgaaatgacttcactggacacagcggggctgcagctaacggggtacaggtaggagcta

SEQ ID NO: 596009 - DNA, 120 bp, Artificial Sequence
  ENSG00000173821_149 (sequence is synthesized)
actaacttcacccctgagtccacttgcggggtaagagataaacagtaacccttccaggagcccactgacgttggagtgctaaaaatgccccttcagggggaaaactgcattttctcttcc

SEQ ID NO: 596010 - DNA, 120 bp, Artificial Sequence
  ENSG00000173821_150 (sequence is synthesized)
aaaaaggaaaggttcttccaggcgagaaacctgtggtctagaaccacagcaagaagaggaggcatgctggcctgcaccggaagactcactttgtctgccctgcgccagcctcacctcacc

SEQ ID NO: 596011 - DNA, 120 bp, Artificial Sequence
  ENSG00000173821_151 (sequence is synthesized)
ctgcagttcccgtttccgccatggatgcctcatcaccaaccctgaccttccccctcccaaccctttattcatcctcactcccactcatacccgcctccctggacagttccctgctgcaga

SEQ ID NO: 596012 - DNA, 120 bp, Artificial Sequence
  ENSG00000173821_152 (sequence is synthesized)
gttctttctgctttcagccctaccttggtggtgatttacctgaaaatcttcacaactgatcattatctccttctctttgagacctgactgaaaaaattaggtgtgcacacctgtaatccc

SEQ ID NO: 596013 - DNA, 120 bp, Artificial Sequence
  ENSG00000173821_153 (sequence is synthesized)
aaaataaaataaggaccttattgtgtgtgcaaattatttgcctttcatgaatagttatgagactttgtgcatgtgttaaccgagacggccctgagctatttcagttactcctgtatgttc

SEQ ID NO: 596014 - DNA, 120 bp, Artificial Sequence
  ENSG00000173821_154 (sequence is synthesized)
aggcaattccaatttagaaacaaacttccagtgataaatattgggaagaaaatgtcagctcagggccaagtaggtaaagccacccaagtctagccatgcacacaggcactagtgtgctga

SEQ ID NO: 596015 - DNA, 120 bp, Artificial Sequence
  ENSG00000173821_155 (sequence is synthesized)
aggaaaacacctctgatttgatacataaagtgtgaaggttgcataactggggaggtggctggagaaaacctgagcctcgagctgagtaacaatccaagccatgattagcatttatattgc

SEQ ID NO: 596016 - DNA, 120 bp, Artificial Sequence
  ENSG00000173821_156 (sequence is synthesized)
attctgcattattctcatcctatcacgttcattaagttcaaccattaccattacgaatcccgtttccagctggaaaaacaagcgccaggaaagtgcatttcccccccacccccccccccc

SEQ ID NO: 596017 - DNA, 120 bp, Artificial Sequence
  ENSG00000173821_157 (sequence is synthesized)
aaccagagcaactttggtcagaagtcacacctaatcaccctctctgcaggatatgctggggatagcccttttgaggaggtgggggtgtatgcgaaagcaacctggggccaaagcaggggg

SEQ ID NO: 596018 - DNA, 120 bp, Artificial Sequence
  ENSG00000173821_158 (sequence is synthesized)
aagcaggagagactggaggggccctgggtccagcaagtgctccaccaggctgcccctgctcaggtgctccacagcccataaaaaacgccttcagccctgctgtgcttcccctcacaccta

SEQ ID NO: 596019 - DNA, 120 bp, Artificial Sequence
  ENSG00000173821_159 (sequence is synthesized)
aacttactataagggtcctaccttccccagtattccttcatgatcactgctacctgtgccctgaagcgcaacagaacctcaacccagaggacagccacttcctcagaacccacgatcttt

SEQ ID NO: 596020 - DNA, 120 bp, Artificial Sequence
  ENSG00000173821_160 (sequence is synthesized)
gccccatcgccacaggtccatgagtgactcctaattaccaaatccaagggctccttcaccctgaccactctggaacccaacaaagctgacacacagcccagcccagacaggcctgaatgt

SEQ ID NO: 596021 - DNA, 120 bp, Artificial Sequence
  ENSG00000173821_161 (sequence is synthesized)
gggtcctggctctcccatttgccagttctacagccatgggcaagtggctcgacctctctaagcttcagtttcctcgtctgtgaaatatctgtcagtgctcttaagggaggagaccacccc

SEQ ID NO: 596022 - DNA, 76 bp, Artificial Sequence
  ENSG00000173821_162 (sequence is synthesized)
tgaaatatctgtcagtgctcttaagggaggagaccaccccacatattgtcttacgcccaatttctgcctccaaaga

SEQ ID NO: 596023 - DNA, 88 bp, Artificial Sequence
  ENSG00000173821_163 (sequence is synthesized)
tgcagcctgacctaatcagtgatgctatctatagattacagacattatatagaaaagcaccgtgaaaatccctgtcctgttctgttcc

SEQ ID NO: 596024 - DNA, 67 bp, Artificial Sequence
  ENSG00000173821_164 (sequence is synthesized)
accccttagttggagacatgagtcttgccgaagcgcccggctgaataaagcccttctttaactcgtg

SEQ ID NO: 596025 - DNA, 120 bp, Artificial Sequence
  ENSG00000173821_165 (sequence is synthesized)
ccgaagcgcccggctgaataaagcccttctttaactcgtgtctgaggggttttctctgcagcttgtcctgctacatttcttggttccctgaccaggaatctaggtgattaatggatggtt

SEQ ID NO: 596026 - DNA, 120 bp, Artificial Sequence
  ENSG00000173821_166 (sequence is synthesized)
ttaggcctgccctgtggagcatccctgtggaggactccagccagcttgagcgacatggatcctgagagcgctctcaggcaggcaattgccccagtggaatgcctggccagagcagtgtgt

SEQ ID NO: 596027 - DNA, 79 bp, Artificial Sequence
  ENSG00000173821_167 (sequence is synthesized)
cctgagagcgctctcaggcaggcaattgccccagtggaatgcctggccagagcagtgtgtagcaggcccccgcacttgg

SEQ ID NO: 596028 - DNA, 72 bp, Artificial Sequence
  ENSG00000173821_168 (sequence is synthesized)
ggaagcgtggcctgatcacccacggcgtgcctgtactggcactctggtttttgtttttgacttgacttggat

SEQ ID NO: 596029 - DNA, 120 bp, Artificial Sequence
  ENSG00000173821_169 (sequence is synthesized)
gggtgagcgtaatgttttgtcttgaagaagcatgggtcaagcacaaagtaagaccaccccactaggaactatgctgaaaaatttcaggaaaggatttaagggagactatggagtactatg

SEQ ID NO: 596030 - DNA, 120 bp, Artificial Sequence
  ENSG00000173821_170 (sequence is synthesized)
ctgtaagccagggtacccacaccagttcccgtacacagacacttggttacagctggttttagactccccacccgcccgccccaacagtggttgagagaacagcagcataagtggctggca

SEQ ID NO: 596031 - DNA, 120 bp, Artificial Sequence
  ENSG00000173821_171 (sequence is synthesized)
gaccagcagagagagaaagaggaagagacagacaaagagggagtcagagagagagagagaaagagacagaggcaaaaggaaagtcaaagagaaagagacagaaaatcaagaggaaaaaaa

SEQ ID NO: 596032 - DNA, 120 bp, Artificial Sequence
  ENSG00000173821_172 (sequence is synthesized)
tactggacgcgtctctctggagagcacagactttgcctgggcagtgaggtcctctttgctctgcattgaccccgccccagcctccaggttcagtgacactgactctgggttgtgtctctg

SEQ ID NO: 596033 - DNA, 120 bp, Artificial Sequence
  ENSG00000173821_173 (sequence is synthesized)
gcattgcttagcaacgttagggcagtgactgtggaaatggtggcacacctgtgtggtaggtttgtacacagccgttttcaatgatatttaaaaagcttttcttcataaatggaaattcac

SEQ ID NO: 596034 - DNA, 120 bp, Artificial Sequence
  ENSG00000173821_174 (sequence is synthesized)
catcttgttacctagaaagcaggatacaaaattacatgacacatagtaatctctaaggtgcaaaacacacgtggaaaaaagacagaagggaaatatgctgaaacgttgccaggagttttc

SEQ ID NO: 596035 - DNA, 120 bp, Artificial Sequence
  ENSG00000173821_175 (sequence is synthesized)
tttctctgaatggttgtaattgtcattttattctgttactttttgttattttctataattgatagaattttttatcagaaaaaagtaaacatttaaaattagccaggcatggtggtgtgc

SEQ ID NO: 596036 - DNA, 120 bp, Artificial Sequence
  ENSG00000173821_176 (sequence is synthesized)
cggctgcagattctgtttgtcatctgctggaaatgtccacgatggatttaattttaaaaaacttttttctttcccaatttagggaatacccactctggtgtacagacacgactggaacta

SEQ ID NO: 596037 - DNA, 120 bp, Artificial Sequence
  ENSG00000173821_177 (sequence is synthesized)
ccttgccccgggtgtttgctgtgagcccacagtttctgcggcctcccttacagagagcaagcaagacagcaaatcagcaagttttcttgtagagtaaaagcagattgacatcttgtgggt

SEQ ID NO: 596038 - DNA, 120 bp, Artificial Sequence
  ENSG00000173821_178 (sequence is synthesized)
aaccgatttgttcctgctctccgcatgcgggtactgataggtagacctgtgtgtctccatggcctccaggaactgcctgcacaccgtgcgcccaagtgtcagctgttagagagttggccc

SEQ ID NO: 596039 - DNA, 120 bp, Artificial Sequence
  ENSG00000173821_179 (sequence is synthesized)
cccgcatgtggcttgggcagtgaaggggctcggctctcttaccaggtggtgagatgccagaaacccagcccacagacatccctctcctgcttttcatttcccaggactccctccccagct

SEQ ID NO: 596040 - DNA, 120 bp, Artificial Sequence
  ENSG00000173821_180 (sequence is synthesized)
agagtagagagttagctttcccttttcaatgtgggtcattgggtgaaacctcattagccaatgtgtgtcctgttctcttcacagcttgtcccaacggccatccttgctccgtgggagagt

SEQ ID NO: 596041 - DNA, 120 bp, Artificial Sequence
  ENSG00000173821_181 (sequence is synthesized)
tgaccacaaacctcgggacggctttcatctggtcaagtatgtgggtcaggattctatttcctaagtactcaaactttggggtgttgggctgtttttattccagctgataaagtgatactc

SEQ ID NO: 596042 - DNA, 120 bp, Artificial Sequence
  ENSG00000173821_182 (sequence is synthesized)
cctgttcccatgggttctccacccacccgaaacaagcacacactgggacaatctgagggtgctcacgtctgccggtgataaggaggtgttcatttgcatgatggcatttgtgcataaaat

SEQ ID NO: 596043 - DNA, 120 bp, Artificial Sequence
  ENSG00000173821_183 (sequence is synthesized)
tgaaaagcagatgggtggctagaattgcaaggtgaattttggagtttttagttttcacactttgtttgtgcagtaagcgtccaatttacgtcaccgcgtcattttaaagtttctgctgaa

SEQ ID NO: 596044 - DNA, 120 bp, Artificial Sequence
  ENSG00000173821_184 (sequence is synthesized)
tgaaaccaaagtttgaggacagctggtctaaaatgtgagttttatattcctccagtattatgctaaaaggttttccataaaatcttagaaaccacgtatatgtatgtatatgtttataca

SEQ ID NO: 596045 - DNA, 120 bp, Artificial Sequence
  ENSG00000173821_185 (sequence is synthesized)
cacacacacacaggacagacgaccgatagatagatgctcttttttttagtaaggtatgtctccagatctgagagaaccaggaataatatttctctttctgcagctttcatgatgtaaaag

SEQ ID NO: 596046 - DNA, 120 bp, Artificial Sequence
  ENSG00000173821_186 (sequence is synthesized)
cggggatcacacagcacaacggcagcgcaagcaggctcgctgtcttgtgggccaccccacacacagccagtctgagctctgtctgtgctgttgctggaaagaatgagagaacacacagag

SEQ ID NO: 596047 - DNA, 120 bp, Artificial Sequence
  ENSG00000173821_187 (sequence is synthesized)
agaaaaccgtgtctagggaaggcgatgcctggggctggaaaaaggaagcactctgcttgcccagaggctggaaggagctgctctgttccctccattcacccctgcctggctaagacctgc

SEQ ID NO: 596048 - DNA, 120 bp, Artificial Sequence
  ENSG00000173821_188 (sequence is synthesized)
ggtattcgggagcgtctgcacgcaagtgttcagtgtgcatatatggggagtcttcagttccgaagtcagccccgtaggtcattcccctaccatgctgggagcacgtgtcgtccacacaga

SEQ ID NO: 596049 - DNA, 120 bp, Artificial Sequence
  ENSG00000173821_189 (sequence is synthesized)
gcgtgcgtgtcaaaggatcaatcaccatcacagttgtgtgctgatttattaaatgtttatatgtccacagttatgttaaaaaaaaaaagctataaaatattgtattcactgagctaactt

SEQ ID NO: 596050 - DNA, 120 bp, Artificial Sequence
  ENSG00000173821_190 (sequence is synthesized)
tctattttaaaaatttaaatccatacagaaagaaaaggtctgtaagacaacttagtaaaatggttatatggttatctgtgagtggtggaattaagagtgattttcttttgctaatctgca

SEQ ID NO: 596051 - DNA, 120 bp, Artificial Sequence
  ENSG00000173821_191 (sequence is synthesized)
aaaatcacaatgaccattgtgaggacaatgttaatttaaaataataacaataatagcaagaagaagtcctgccccatgacaagaaaatctgctcccacctcaggtacttctttgcctgaa

SEQ ID NO: 596052 - DNA, 120 bp, Artificial Sequence
  ENSG00000173821_192 (sequence is synthesized)
actggcattcctatttattttccattttgaacaatctgattttattttaagcctcttattctggtgggatttcagcaaagtgagcacacccagagtcacactgatgaaatgacagaatcc

SEQ ID NO: 596053 - DNA, 120 bp, Artificial Sequence
  ENSG00000173821_193 (sequence is synthesized)
tggaagcaggtggacagttcccgcagcactccacatctgtgtggtctgcctcagggtttgggtggcagcagctgagacggctggcggtagcctgggccactcttactattgagctcaagt

SEQ ID NO: 596054 - DNA, 120 bp, Artificial Sequence
  ENSG00000173821_194 (sequence is synthesized)
tctgttctttcagtaatttttttcaaaatgggtctaagattacaattatgtaggatagaggaatttttagagattgatgttatcttcaaaaggtcattaagttggtggtaacaacaggaa

SEQ ID NO: 596055 - DNA, 120 bp, Artificial Sequence
  ENSG00000173821_195 (sequence is synthesized)
ctacttcaaaatacttagattaatttagaaagctattacctcaaaacgagtgttatttctattaaacacttatttagggtttattatacgcagactgctgtgttctttgtgccttgggta

SEQ ID NO: 596056 - DNA, 120 bp, Artificial Sequence
  ENSG00000173821_196 (sequence is synthesized)
gtgcttccaactccactctgggaatggagagcttctggggctgtgttccaagtgggagatttcttcacaaggcacataccttagctgaattcagagatgttaaggacacatctcgctgac

SEQ ID NO: 596057 - DNA, 120 bp, Artificial Sequence
  ENSG00000173821_197 (sequence is synthesized)
gcttctcacatcctagacaatgaaagtttaggtcgcaagcctgggacacaagtatacatgcagctaacagccggggcctctggtgggccggtgggaggggcaccgctcagccacgccctg

SEQ ID NO: 596058 - DNA, 120 bp, Artificial Sequence
  ENSG00000173821_198 (sequence is synthesized)
gggattacctggcctttggagtgaccccagaacagaccactagcctggccatctgtggaagctgttaccattttcatagtcatggagacaaggatgtcagagaatgccaccggggtttgg

SEQ ID NO: 596059 - DNA, 120 bp, Artificial Sequence
  ENSG00000173821_199 (sequence is synthesized)
accatgcctgtcactcaacacccttcataaagctactaatgtggggtggtctgcagaaagaaacctgtgaccctacagtgatgcccctctgtggccacgcagtggtgtccagcaacagtg

SEQ ID NO: 596060 - DNA, 120 bp, Artificial Sequence
  ENSG00000173821_200 (sequence is synthesized)
gccactcagccaaacacagcctcagcctctgcctcacccgcacccgtgaccttcacgtgagcacatccagagccctcaccgccagggggtctggaagaggcagcgctggctgtccgacct

SEQ ID NO: 596061 - DNA, 120 bp, Artificial Sequence
  ENSG00000173821_201 (sequence is synthesized)
ttggagcacaggaaggtttactaaaaggaggccagcatggatgctggatgtgttgactctgacctatcaaaacatcagcggcttagacacagtatcagctgatttcccacccaggatggg

SEQ ID NO: 596062 - DNA, 120 bp, Artificial Sequence
  ENSG00000173821_202 (sequence is synthesized)
tgggaagaacttttcccgttttcaagctccacgctgcatcacaggaaatgacactgaccagattaagctacaaatacaagtctcgcagccagtctcaaagtctgtaaccccaataacatt

SEQ ID NO: 596063 - DNA, 120 bp, Artificial Sequence
  ENSG00000173821_203 (sequence is synthesized)
tcacgtgacactgtattggaagtcacgtgcccacagcctccagggcgcacctggctagtgtgcgtgaaccagtggctggaacaggacagctatgacagttgagctgggttgacagatttg

SEQ ID NO: 596064 - DNA, 120 bp, Artificial Sequence
  ENSG00000173821_204 (sequence is synthesized)
ctgtgtcttgctgatctgccaagtccatcagcagcgccttttgatttatgcccattacttcctttgagaccctgctggaaaacagtctaagaaagatgctgacacaactattaatagcaa

SEQ ID NO: 596065 - DNA, 120 bp, Artificial Sequence
  ENSG00000173821_205 (sequence is synthesized)
aattcatacctagatgtattcataattcagatatgcatgtgtgtttaataaaaatacatatgttggtgtagtgtgggaagttaaaaaatataaagatgtttttagaatctaacctttaaa

SEQ ID NO: 596066 - DNA, 120 bp, Artificial Sequence
  ENSG00000173821_206 (sequence is synthesized)
gggtctggagcgagtccactggtacagtaagtgttggggtctagatgaccccacactcctttgagcttcaaagggtgtccagatgctatgaagcattgggttcgacttggggtccacgtg

SEQ ID NO: 596067 - DNA, 120 bp, Artificial Sequence
  ENSG00000173821_207 (sequence is synthesized)
gtttgtgcctcagggtccaaaaccacctgcattctaccggtggcgtctgcagaagacgaatggcttgaaggagctggcactccgccggctagatgatccaaaccatttcatttctttgtc

SEQ ID NO: 596068 - DNA, 120 bp, Artificial Sequence
  ENSG00000173821_208 (sequence is synthesized)
gcctgccaggtgaacaatctctcctcctgggaaacggattcgggctcacagctgtgttctgccatgacccagctaagggctatgaagcacccgctgggtctcagctcctccgctaactca

SEQ ID NO: 596069 - DNA, 120 bp, Artificial Sequence
  ENSG00000173821_209 (sequence is synthesized)
gagattgggaagtgggcaccctcctccctcgccaagggcaatggcgctgaaatctagttctctccggattcctcagtgtgctgcacagtccctgctgctcgcaccatcctgcatgtgttc

SEQ ID NO: 596070 - DNA, 120 bp, Artificial Sequence
  ENSG00000173821_210 (sequence is synthesized)
catatggaatcacggccgtgcgcgtgtggcacaagtcacacgggcttgcaggccgttcctcagatggccctgtcatcactgtggctgctggtttgattgattgttaacacttgctcagta

SEQ ID NO: 596071 - DNA, 120 bp, Artificial Sequence
  ENSG00000173821_211 (sequence is synthesized)
ggtgtgcgggaagagactccaaaggttgacagaacatttatggaagcaaaatatgtgaaatggaaaattgtatcaatttatttagctcttttcggcaaaggggaagagattgtgcccccc

SEQ ID NO: 596072 - DNA, 120 bp, Artificial Sequence
  ENSG00000173821_212 (sequence is synthesized)
tgtctcccaggaacagtctcgcaggcaatgccacatgaggaagctccctgctggccacggctgccctgctcacatttcctaattggacacttaacccctgtacaagcacagccttgcggc

SEQ ID NO: 596073 - DNA, 120 bp, Artificial Sequence
  ENSG00000173821_213 (sequence is synthesized)
cacaggggaagtccagaaacattgaggtcattgaattccggggaccaaggggttctaattttttaagtgactgatacctttgataaggttttcctttccctttttcgttaactctttgtt

SEQ ID NO: 596074 - DNA, 120 bp, Artificial Sequence
  ENSG00000173821_214 (sequence is synthesized)
gagatattgttcgtatgccatacggtacatctgtcaaaagttccagttcagcaggttttggggtagtcacagatatgtacagtcatcaccacagttaatgacagagcattttcatcactt

SEQ ID NO: 596075 - DNA, 120 bp, Artificial Sequence
  ENSG00000173821_215 (sequence is synthesized)
caaagagaaacccggcccctttagccatcatcctcctcccctctagtcacccactcccctctgcaggcataaacaattgctgaacataaacaactgcttctgtggctttctctgttctga

SEQ ID NO: 596076 - DNA, 120 bp, Artificial Sequence
  ENSG00000173821_216 (sequence is synthesized)
ctgtcatatgaatggaatcatatcatatgtggccttttgggtatggcttatttcactgagcataatgtttttttgttgttggtggtggtggttgtttgttgtttttgagacagagtttca

SEQ ID NO: 596077 - DNA, 73 bp, Artificial Sequence
  ENSG00000173821_217 (sequence is synthesized)
ctcaccgcaaccctggaattacagctactttttgtttaaagagtcttttaattgtttaaagaacaatgtgccg

SEQ ID NO: 596078 - DNA, 120 bp, Artificial Sequence
  ENSG00000173821_218 (sequence is synthesized)
gtgctggaattacagctactttttgtttaaagagtcttttaattgtttaaagaacaatgtgccgccacactcggttccttttgtatttttagaagagacagggtttctccatgttggtca

SEQ ID NO: 596079 - DNA, 120 bp, Artificial Sequence
  ENSG00000173821_219 (sequence is synthesized)
acaggtgtgagccaccgcgcccggccgagcataatgttttgaaagaccgctcaggctggacacggttgctcacgcctgtaatcacggcactttgggagcccaggagttcaagacaagcct

SEQ ID NO: 596080 - DNA, 120 bp, Artificial Sequence
  ENSG00000173821_220 (sequence is synthesized)
atcacggcactttgggagcccaggagttcaagacaagcctgggtaacagagtaagaccctgtctctataaaaactaaaaaataaacaaaaaaaattagccaggcatggccgggcacacct

SEQ ID NO: 596081 - DNA, 88 bp, Artificial Sequence
  ENSG00000173821_221 (sequence is synthesized)
ttgggcccagaaggtcaaggcaacctgggggacagagcaagaccctgtctcaaaaagcaataacaacaaaagtccatccatattgtag

SEQ ID NO: 596082 - DNA, 120 bp, Artificial Sequence
  ENSG00000173821_222 (sequence is synthesized)
ctcaaaaagcaataacaacaaaagtccatccatattgtagcttgtgtccgtttacgttaagtattccttacccaaaatgcttgagaccagaagtgttttggatttcagatgttttcaaat

SEQ ID NO: 596083 - DNA, 120 bp, Artificial Sequence
  ENSG00000173821_223 (sequence is synthesized)
tttggaatatttgcatttacataatgagatgtcttccagatgggacccagagtctaaccacaaaattcacttgtttcatatacatcttatacacatagcctgaaggtaattttatacaat

SEQ ID NO: 596084 - DNA, 120 bp, Artificial Sequence
  ENSG00000173821_224 (sequence is synthesized)
atttttaacaattttgtgcatgagacaaagtttgtattaagtatttgtatgttgaatttttcacttgtggcatcattatactcaaaaagtttggattttgtagtattttggatttgggga

SEQ ID NO: 596085 - DNA, 120 bp, Artificial Sequence
  ENSG00000173821_225 (sequence is synthesized)
ttaggaatgctcaacctatatttcatttttttccatggccaaatattccccgtttatccatgtgtccattgacggccatctatgttgcttcttcggctattataaatctgctgatacaaa

SEQ ID NO: 596086 - DNA, 120 bp, Artificial Sequence
  ENSG00000173821_226 (sequence is synthesized)
gcttatctacatgaatctgggaagactgactcctacattgtgcacccggagtcccggtgggctctgcagtgactccattcctgattctaatgacagaactaacacacgctcttttaacat

SEQ ID NO: 596087 - DNA, 67 bp, Artificial Sequence
  ENSG00000173821_227 (sequence is synthesized)
ctgattctaatgacagaactaacacacgctcttttaacattttaagacatcaaaactgtcaagaata

SEQ ID NO: 596088 - DNA, 120 bp, Artificial Sequence
  ENSG00000173825_0 (sequence is synthesized)
gcacgggactctgctgtgcgcgcgcccgcccgcccgccgtccgcgcaggccctcggtccgctctgccctcggggtcgtggcgcccatccctcccctgttctgctgtcgccgcccggacag

SEQ ID NO: 596089 - DNA, 120 bp, Artificial Sequence
  ENSG00000173825_1 (sequence is synthesized)
cctcccctgttctgctgtcgccgcccggacaggggctcgggagccgggctgggggcaggggctggagccgcgggaccagcgcctgaggtgccccggagaggccatggagctgagcagcaa

SEQ ID NO: 596090 - DNA, 120 bp, Artificial Sequence
  ENSG00000173825_2 (sequence is synthesized)
gaagaagcttcacgccctgtccctggccgagaagatccaggtgctggaactcctggatgagtccaagatgtcccagtcggaggtggcccggcgcttccaggtttcccagccccagatctc

SEQ ID NO: 596091 - DNA, 120 bp, Artificial Sequence
  ENSG00000173825_3 (sequence is synthesized)
gcgcatctgcaagaataaggagaagctgctggcggactggtgcagcggcacagccaaccgagagcgcaagcgcaagcgggagtccaagtacagcgggatcgacgaggctctgctctgctg

SEQ ID NO: 596092 - DNA, 120 bp, Artificial Sequence
  ENSG00000173825_4 (sequence is synthesized)
gtaccacattgcccgggccaaggcctgggacgtgacggggcccatgctgctccacaaagccaaggagctggccgatatcatgggccaggacttcgtgcccagcatcggctggctggtccg

SEQ ID NO: 596093 - DNA, 120 bp, Artificial Sequence
  ENSG00000173825_5 (sequence is synthesized)
ctggaaacgccgaaacaacgtcggctttggggcccgccatgttcttgcgccttcattcccccctgagccacctcccccggggctcacatcccaggctcagctgcctctttccctaaaaga

SEQ ID NO: 596094 - DNA, 120 bp, Artificial Sequence
  ENSG00000173825_6 (sequence is synthesized)
cttctctccagaggacgtgtttggctgtgctgaattgcccttgctgtatcgggcagtgcccggcagctttggtgcatgtgatcaagtacaggtgctgctgtgtgccaacagcaggggcac

SEQ ID NO: 596095 - DNA, 120 bp, Artificial Sequence
  ENSG00000173825_7 (sequence is synthesized)
cgagaagcggcgggtactgctgggtgggctccaggctgccccgagatgcttctttgggatccgcagtgaggctctgcctgcctcctaccacccggacctgggcatcccctggttagagtg

SEQ ID NO: 596096 - DNA, 120 bp, Artificial Sequence
  ENSG00000173825_8 (sequence is synthesized)
gaagctcttgcctctggccgcctctagcaccacgcctcccctgcccagctcagtggtccgggcctttaaggcccattaccgacaccggctgttgggcaaactggctgccatccaaagcga

SEQ ID NO: 596097 - DNA, 120 bp, Artificial Sequence
  ENSG00000173825_9 (sequence is synthesized)
gagggatggcacctcgctggccgaggccggggcaggcatcaccgtgctggacgccctgcacgtggcgtctgccgcctgggccaaggtgcctcctcagctcattttcagcagcttcattca

SEQ ID NO: 596098 - DNA, 120 bp, Artificial Sequence
  ENSG00000173825_10 (sequence is synthesized)
agaagggctggctcccggcaaaacgcccccgtcctcgcacaaaacctctgagatgccaccagtccccggcgggctgagcctggaggagttttcccgctttgtggacctggagggtgagga

SEQ ID NO: 596099 - DNA, 120 bp, Artificial Sequence
  ENSG00000173825_11 (sequence is synthesized)
gccaaggtctggagtatgtaaggaggagataggcactgaagacgagaagggggacagagagggtgcctttgagcccctgcccaccaaagctgatgccctccgggccctgggcaccttgag

SEQ ID NO: 596100 - DNA, 120 bp, Artificial Sequence
  ENSG00000173825_12 (sequence is synthesized)
gaggtggtttgaatgcaacagcacttctcctgagctattcgaaaaattctacgactgtgaggaggaggtggagcggctttgctgcctatgaaggcgccttcactgcttgccagagcccct

SEQ ID NO: 596101 - DNA, 120 bp, Artificial Sequence
  ENSG00000173825_13 (sequence is synthesized)
tcctctcttgtttcccatggaaacggcctcttcagaaggcagatcgggctgtctctttcctgtggaaatagaactgtcgtaaaggtgtagaagggagagaagttgggacaccaagtctga

SEQ ID NO: 596102 - DNA, 120 bp, Artificial Sequence
  ENSG00000173825_14 (sequence is synthesized)
gcttggagtggcagtcgtccaaaccccaggaagagagctctaaagatggggcttcgggggtaggaatccaggatgcttagtttctagaccctgcttgaaagttctagagcctttgaaagg

SEQ ID NO: 596103 - DNA, 120 bp, Artificial Sequence
  ENSG00000173825_15 (sequence is synthesized)
gagttagtctagaggcagccacttagaaaggtggaatttgggctttttggacagactgcttccttgaactttgtgttaaaaacagttctgcttctgaaaataaagtttttaatcagaaaa

SEQ ID NO: 596104 - DNA, 120 bp, Artificial Sequence
  ENSG00000173826_0 (sequence is synthesized)
gcggccgaaagatgccggtccgcaggggccacgtcgctccccaaaacacttacctggacaccatcatccgcaagttcgagggccaaagtcggaagttcctgattgccaatgctcagatgg

SEQ ID NO: 596105 - DNA, 120 bp, Artificial Sequence
  ENSG00000173826_1 (sequence is synthesized)
agaactgcgccatcatttactgcaacgacggcttctgcgaactcttcggctactcccgagtggaggtgatgcagcaaccctgcacctgcgacttcctcacaggccccaacacaccaagca

SEQ ID NO: 596106 - DNA, 120 bp, Artificial Sequence
  ENSG00000173826_2 (sequence is synthesized)
gcgccgtgtcccgcctagcgcaggccctgctgggggctgaggagtgcaaggtggacatcctctactaccgcaaggatgcctccagcttccgctgcctggtagatgtggtgcccgtgaaga

SEQ ID NO: 596107 - DNA, 120 bp, Artificial Sequence
  ENSG00000173826_3 (sequence is synthesized)
acgaggacggggctgtcatcatgttcattctcaacttcgaggacctggcccagctcctggccaagtgcagcagccgcagcttgtcccagcgcctgttgtcccagagcttcctgggctccg

SEQ ID NO: 596108 - DNA, 120 bp, Artificial Sequence
  ENSG00000173826_4 (sequence is synthesized)
agggctctcatggcaggccaggcggaccagggccaggcacaggcaggggcaagtacaggaccatcagccagatcccacagttcacgctcaacttcgtggagttcaacttggagaagcacc

SEQ ID NO: 596109 - DNA, 120 bp, Artificial Sequence
  ENSG00000173826_5 (sequence is synthesized)
gctccagctccaccacggagattgagatcatcgcgccccataaggtggtggagcggacacagaacgtcactgagaaggtcacccaggtcctgtccctgggcgcggatgtgctgccggagt

SEQ ID NO: 596110 - DNA, 120 bp, Artificial Sequence
  ENSG00000173826_6 (sequence is synthesized)
acaagctgcaggcgccgcgcatccaccgctggaccatcctgcactacagccccttcaaggccgtgtgggactggctcatcctgctgctggtcatctacacggctgtcttcacgccctact

SEQ ID NO: 596111 - DNA, 120 bp, Artificial Sequence
  ENSG00000173826_7 (sequence is synthesized)
cagccgccttcctgctcagcgatcaggacgaatcacggcgtggggcctgcagctatacctgcagtcccctcactgtggtggatctcatcgtggacatcatgttcgtcgtggacatcgtca

SEQ ID NO: 596112 - DNA, 120 bp, Artificial Sequence
  ENSG00000173826_8 (sequence is synthesized)
tcaacttccgcaccacctatgtcaacaccaatgatgaggtggtcagccacccccgccgcatcgccgtccactacttcaagggctggttcctcattgacatggtggccgccatccctttcg

SEQ ID NO: 596113 - DNA, 120 bp, Artificial Sequence
  ENSG00000173826_9 (sequence is synthesized)
acctcctgatcttccgcactggctccgatgagaccacaaccctgattgggctattgaagacagcgcggctgctgcggctggtgcgcgtagcacggaagctggaccgctactctgagtatg

SEQ ID NO: 596114 - DNA, 120 bp, Artificial Sequence
  ENSG00000173826_10 (sequence is synthesized)
gggcggctgtgctcttcttgctcatgtgcaccttcgcgctcatagcgcactggctggcctgcatctggtacgccatcggcaatgtggagcggccctacctagaacacaagatcggctggc

SEQ ID NO: 596115 - DNA, 120 bp, Artificial Sequence
  ENSG00000173826_11 (sequence is synthesized)
tggacagcctgggtgtgcagcttggcaagcgctacaacggcagcgacccagcctcgggcccctcggtgcaggacaagtatgtcacagccctctacttcaccttcagcagcctcaccagcg

SEQ ID NO: 596116 - DNA, 120 bp, Artificial Sequence
  ENSG00000173826_12 (sequence is synthesized)
tgggcttcggcaatgtctcgcccaacaccaactccgagaaggtcttctccatctgcgtcatgctcatcggctccctgatgtacgccagcatcttcgggaacgtgtccgcgatcatccagc

SEQ ID NO: 596117 - DNA, 120 bp, Artificial Sequence
  ENSG00000173826_13 (sequence is synthesized)
gcctgtactcgggcaccgcgcgctaccacacgcagatgctgcgtgtcaaggagttcatccgcttccaccagatccccaacccactgcgccagcgcctggaggagtatttccagcacgcct

SEQ ID NO: 596118 - DNA, 120 bp, Artificial Sequence
  ENSG00000173826_14 (sequence is synthesized)
ggtcctacaccaatggcattgacatgaacgcggtgctgaagggcttccccgagtgcctgcaggctgacatctgcctgcacctgcaccgcgcactgctgcagcactgcccagctttcagcg

SEQ ID NO: 596119 - DNA, 120 bp, Artificial Sequence
  ENSG00000173826_15 (sequence is synthesized)
ctctacttcatctcccgaggctccatcgagatcctgcgcgacgacgtggtcgtggccatcctaggaaagaatgacatctttggggaacccgtcagcctccatgcccagccaggcaagtcc

SEQ ID NO: 596120 - DNA, 120 bp, Artificial Sequence
  ENSG00000173826_16 (sequence is synthesized)
agtgcagacgtgcgggctctgacctactgcgacctgcacaagatccagcgggcagatctgctggaggtgctggacatgtacccggcctttgcggagagcttctggagtaagctggaggtc

SEQ ID NO: 596121 - DNA, 120 bp, Artificial Sequence
  ENSG00000173826_17 (sequence is synthesized)
accttcaacctgcgggacgcagccgggggtctccactcatccccccgacaggctcctggcagccaagaccaccaaggtttctttctcagtgacaaccagtcagggtctccccatgagctg

SEQ ID NO: 596122 - DNA, 120 bp, Artificial Sequence
  ENSG00000173826_18 (sequence is synthesized)
gggccccagttcccctctaagggctacagcctcctgggtcctgggagccagaactccatgggggcaggaccttgtgctccagggcacccagatgcagcccctcccctgagcatctcagat

SEQ ID NO: 596123 - DNA, 120 bp, Artificial Sequence
  ENSG00000173826_19 (sequence is synthesized)
gcatctggcctctggcctgagctactgcaggaaatgcccccaaggcacagcccccaaagccctcaggaagacccagattgctggcctctgaagctgggctccaggctagagcagctccag

SEQ ID NO: 596124 - DNA, 120 bp, Artificial Sequence
  ENSG00000173826_20 (sequence is synthesized)
gcccagatgaacaggctggagtcccgcgtgtcctcagacctcagccgcatcttgcagctcctccagaagcccatgccccagggccacgccagctacattctggaagcccctgcctccaat

SEQ ID NO: 596125 - DNA, 120 bp, Artificial Sequence
  ENSG00000173826_21 (sequence is synthesized)
gacctggccttggttcctatagcctcggagacgacgagtccagggcccaggctgccccagggctttctgcctcctgcacagaccccaagctatggagacttggatgactgtagtccaaag

SEQ ID NO: 596126 - DNA, 120 bp, Artificial Sequence
  ENSG00000173826_22 (sequence is synthesized)
cacaggaactcctcccccaggatgcctcacctggctgtggcaacggacaaaactctggcaccatcctcagaacaggaacagcctgaggggctctggccacccctagcctcacctctacat

SEQ ID NO: 596127 - DNA, 120 bp, Artificial Sequence
  ENSG00000173826_23 (sequence is synthesized)
cccctggaagtacaaggactcatctgtggtccctgcttctcctccctccctgaacaccttggctctgttcccaagcagctggacttccagagacatggctcagatcctggatttgcaggg

SEQ ID NO: 596128 - DNA, 120 bp, Artificial Sequence
  ENSG00000173826_24 (sequence is synthesized)
agttggggccactgaactccaagataaagacaccatgaggggactgaaggtgggcaaggtgagagttaaggatcttggggaggtggccgggtgcagtggctcgcctgtaatcccagcact

SEQ ID NO: 596129 - DNA, 120 bp, Artificial Sequence
  ENSG00000173826_25 (sequence is synthesized)
aaaaaaaaaagatcttggggaggcagacagccccccagatgggcctctcctaaagtagctacaaactgctgatccaggtgacccaggatggcgtgggtgaagaagctcacgacttttccc

SEQ ID NO: 596130 - DNA, 120 bp, Artificial Sequence
  ENSG00000173826_26 (sequence is synthesized)
agcctcctccagggctccatttaaacagcaagcctggtgcagggtgggagagtctcaggtgtggaggcagcttacaggattgagggggcagtgaagaaagaggtttctgatctacatgag

SEQ ID NO: 596131 - DNA, 120 bp, Artificial Sequence
  ENSG00000173826_27 (sequence is synthesized)
taccttgctctgagcctcccagctcagaaccctccagcacctcatggctcagcaccaaggcccggggttggtcagaactcttaccatgagcctctgacctggctggagatggaggtatgt

SEQ ID NO: 596132 - DNA, 120 bp, Artificial Sequence
  ENSG00000173826_28 (sequence is synthesized)
tctgtggcagacatgtcaggacagtcctccagccctctgctcctgatggttctgtgacattgggtctcttgagggcagtggagtgtcacacagctaataaagtacacatttcatgttgga

SEQ ID NO: 596133 - DNA, 120 bp, Artificial Sequence
  ENSG00000173826_29 (sequence is synthesized)
taacttcatgctctggtcttacccgtgaaattttatgtgtagttttgtactgagatagaacataacacatagcaacaattcatgcagtacactgatcctaagtgtgcagcacaatgaatt

SEQ ID NO: 596134 - DNA, 120 bp, Artificial Sequence
  ENSG00000173838_0 (sequence is synthesized)
agccgcccccaccgcctccgccccaggcaaggccggccggcgccgcggaaagcagcctcggggaaggaggaggaagaggggcaggtgtagggagtgaagaagcaaaaagaggaggaggaa

SEQ ID NO: 596135 - DNA, 120 bp, Artificial Sequence
  ENSG00000173838_1 (sequence is synthesized)
gaggagctcagggccgtccccgcgcaattaatgggcggctcctgcgccctggaccggcccgcccgcccagcccctcgacccctgtagccccggcaggggaggaagggcagacccacaggt

SEQ ID NO: 596136 - DNA, 120 bp, Artificial Sequence
  ENSG00000173838_2 (sequence is synthesized)
cagggattaggaatcatgttgcatgacgcaagggacaggcagaagttcttcagcgatgttcagtatctgcgggacatgcagcataaggtggactctgagtatcaggcttgtctgagacga

SEQ ID NO: 596137 - DNA, 120 bp, Artificial Sequence
  ENSG00000173838_3 (sequence is synthesized)
caggaatatagaagagacccaaatgagaagaaacgcgatcagttttgggggcaagagacaagttttgagagatcccggttttctagcaggtcatcttccaaacagagttctagtgaggag

SEQ ID NO: 596138 - DNA, 120 bp, Artificial Sequence
  ENSG00000173838_4 (sequence is synthesized)
gatgctctaactgaaccaaggtcatctatcaagatatctgcatttaagtgtgactccaaacttccagcaattgaccaaacatcagtcaagcagaaacataaaagtaccatgactgtaagg

SEQ ID NO: 596139 - DNA, 120 bp, Artificial Sequence
  ENSG00000173838_5 (sequence is synthesized)
aaagcagagaaagtggaccccagcgaaccctctccagcagaccaagcaccaatggttttattaagaaagaggaagccaaacctgaggagatttacagtcagcccagaatcgcacagcccg

SEQ ID NO: 596140 - DNA, 120 bp, Artificial Sequence
  ENSG00000173838_6 (sequence is synthesized)
agagcatctggggacagaagcagacagaaacagcagtggcctgcaaaggtgccggttcccaggggagcagatcaagtagttcaacaagaaggcctgatgtgtaacactaagctgaagagg

SEQ ID NO: 596141 - DNA, 120 bp, Artificial Sequence
  ENSG00000173838_7 (sequence is synthesized)
ccaaatcaagagagaagaaacttggtcccatcgtcacagccaatgactgagaacgcccctgatagagccaaaaaaggagacccgagtgctccttcccagagtgagctgcatccagccctg

SEQ ID NO: 596142 - DNA, 120 bp, Artificial Sequence
  ENSG00000173838_8 (sequence is synthesized)
tcccaggccttccaaggaaaaaatagtcctcaagtattgagtgagttctcggggccaccactcacacccaccactgtaggagggccaagaaaggcatcatttaggttccgagatgaagac

SEQ ID NO: 596143 - DNA, 120 bp, Artificial Sequence
  ENSG00000173838_9 (sequence is synthesized)
ttttattccattttgtcattgaacagcagaagagaaagcgatgacactgaagaggaaacccagtctgaagaatgtctgtgggttggtgtgcgctcaccctgttctccttcccatcacaaa

SEQ ID NO: 596144 - DNA, 120 bp, Artificial Sequence
  ENSG00000173838_10 (sequence is synthesized)
agaagtagatttggggggacatcgacccctcaggccaaaaataaaaattttgaagaaaatgctgaaaattgcagaggtcattcttcaagaagaagtgagcccagtcatggctcattgaga

SEQ ID NO: 596145 - DNA, 120 bp, Artificial Sequence
  ENSG00000173838_11 (sequence is synthesized)
ataagcaatgcaatggagccagcaacagagcggccttctgctgggcaaaggttgtcccaagaccccgggctgcctgatagggaatctgctacagagaaggacagaggtggcagtgaaaat

SEQ ID NO: 596146 - DNA, 120 bp, Artificial Sequence
  ENSG00000173838_12 (sequence is synthesized)
tgtatggagtgattgtatttctgtggaacataggcctggcacccatgattctgaaggatactggaaagactatttaaacagttctcaaaattctcttgactactttatttctggcagacc

SEQ ID NO: 596147 - DNA, 120 bp, Artificial Sequence
  ENSG00000173838_13 (sequence is synthesized)
aatatctccaagatcatcagtgaattcatcctataaccctcctgcatcattcatgcattctgctctgagagatgatattccagtagacttgtcaatgtcatcgacttcagttcacagctc

SEQ ID NO: 596148 - DNA, 120 bp, Artificial Sequence
  ENSG00000173838_14 (sequence is synthesized)
agactcagagggaaactcagggtttcatgtttgccaaccactgtctcccattagaaataggactccatttgccagtgccgaaaaccataattatttcccagtaaacagtgcacacgaatt

SEQ ID NO: 596149 - DNA, 120 bp, Artificial Sequence
  ENSG00000173838_15 (sequence is synthesized)
tgctgtcagggaagcagaagatactactttaacaagccagcctcagggggctccactatatacagatctcttactaaatccacagggcaatttgtccttagtggattcttccagctcctc

SEQ ID NO: 596150 - DNA, 120 bp, Artificial Sequence
  ENSG00000173838_16 (sequence is synthesized)
tccatcaagaatgaactcagaaggccatttgcatgtgtctgggtctctgcaagaaaatacaccatttactttctttgcagtgtctcatttcccaaatcaaaatgataatgggagcaggat

SEQ ID NO: 596151 - DNA, 120 bp, Artificial Sequence
  ENSG00000173838_17 (sequence is synthesized)
ggcagcctctggtttcacagatgaaaaggaaaccagtaagataaaggcagaccctgagaaactcaagaaattgcaagaaagtctcctggaggaggactccgaggaggagggagacttgtg

SEQ ID NO: 596152 - DNA, 120 bp, Artificial Sequence
  ENSG00000173838_18 (sequence is synthesized)
tcgcatctgtcagatagccgggggttccccaagcaaccccctcctggagccttgcggctgtgtgggaagcctgcagtttgttcatcaagagtgcctgaaaaagtggctgaaagtgaaaat

SEQ ID NO: 596153 - DNA, 120 bp, Artificial Sequence
  ENSG00000173838_19 (sequence is synthesized)
aacatcaggagcagatcttggtgccgtgaagacctgtgagatgtgtaagcaaggcctgctggttgacctgggtgactttaacatgattgagttctaccagaagcaccagcaatctcaggc

SEQ ID NO: 596154 - DNA, 120 bp, Artificial Sequence
  ENSG00000173838_20 (sequence is synthesized)
acaaaacgagctgatgaattcaggcttgtacctggtgctgctgcttcacctctatgagcagaggtttgcagaactcatgaggctcaaccacaaccaggtggaaagagagaggttgtcaag

SEQ ID NO: 596155 - DNA, 120 bp, Artificial Sequence
  ENSG00000173838_21 (sequence is synthesized)
aaattacccacaacccagaacagaggaaaatgaaaattcggagttgggagatggaaatgaaggcagcatttctcaaagccaggtcgtctagcaaggaagccaactgtggagctcggcgga

SEQ ID NO: 596156 - DNA, 120 bp, Artificial Sequence
  ENSG00000173838_22 (sequence is synthesized)
gacctctcccgccagcccttctttctacgtccccaagtgcctccctccctcctcctctttactgaaactgaaaccaaagcgttcacagttagattttcacctcgtgccactctcttttgg

SEQ ID NO: 596157 - DNA, 120 bp, Artificial Sequence
  ENSG00000173838_23 (sequence is synthesized)
ggtctggcttgagcatctatgggcagccacagcgaccagtctagtcccagacagcacaggtcaagcagcgtgggactgtggagcccctggcaggctggcctggtgctgcccccttagccc

SEQ ID NO: 596158 - DNA, 120 bp, Artificial Sequence
  ENSG00000173838_24 (sequence is synthesized)
agaagccctgccaggtccagtggcctggggtcccactgctgagggcacctgccaggcctcactccaccctgaatggactcgagccatgtattcattcagtaaactgacattattctccca

SEQ ID NO: 596159 - DNA, 120 bp, Artificial Sequence
  ENSG00000173838_25 (sequence is synthesized)
gaggccaagaagaattactcgctcttgctttcagcaaggcaggaccccctccttccttctccacctgcctccaactccctcctcctttctctctccctacttaatatggcttcttatgtt

SEQ ID NO: 596160 - DNA, 120 bp, Artificial Sequence
  ENSG00000173838_26 (sequence is synthesized)
tcataactaccagaccagacgctgggtcaccatgagtccggggcggcctgactctgccaatatctgcacaactgaataaacaggaggagcgagggaatgccgcagaacgtatacacctga

SEQ ID NO: 596161 - DNA, 120 bp, Artificial Sequence
  ENSG00000173838_27 (sequence is synthesized)
aaaatgaaagtaggttttgggggccagtcctgccattttgagggtgtttgctaaattactctttttctgtgactgtgtggaaccaaatgccatggaaggaaggaatgaccaccacccaga

SEQ ID NO: 596162 - DNA, 120 bp, Artificial Sequence
  ENSG00000173838_28 (sequence is synthesized)
ggcaaaaataaccccgcaaagcttgggaaagtcagccgcagcaaacaatcaggaaggcgaggccaagttcactggatgcagagcagataagaattttaattcatcctgaacgcaaggaaa

SEQ ID NO: 596163 - DNA, 120 bp, Artificial Sequence
  ENSG00000173838_29 (sequence is synthesized)
ggcgccaacaaagggaagaggttatcttccggcatgagataagatttgttccttttccttgctgggattctccagcgtccagcacttggagagtttgggggttggtttttttactgccag

SEQ ID NO: 596164 - DNA, 120 bp, Artificial Sequence
  ENSG00000173838_30 (sequence is synthesized)
gattcctctaggaaaaccctccccaagccctggcaggggctgtctggcccttacctgaagggaccacattcactcacaagctagtggccttggtggatttggggtctgctgaattcagag

SEQ ID NO: 596165 - DNA, 120 bp, Artificial Sequence
  ENSG00000173838_31 (sequence is synthesized)
gttgaacaaagcaaacaggtctcccaagaaagggccctcaaagcgggcaagacggctctctgcaaacaggttcgagaaaagccttctccctgttcctttttccattaaaaaaaaaaaaaa

SEQ ID NO: 596166 - DNA, 120 bp, Artificial Sequence
  ENSG00000173838_32 (sequence is synthesized)
ggtagccattggcagagccatgggcacccagcctcccccataggccacactcccttggtcccctggcatcctggcatgactcgcctggttggcagcactttgttaatatgggttgccgga

SEQ ID NO: 596167 - DNA, 120 bp, Artificial Sequence
  ENSG00000173838_33 (sequence is synthesized)
aaagcagagaaagtggaccccagcgaaccctctccaggtggcagcagcaagcaccccctgttctgtgttgaatacaccccttactgctccgtctttgctttctcccctgtcctgcagccc

SEQ ID NO: 596168 - DNA, 120 bp, Artificial Sequence
  ENSG00000173838_34 (sequence is synthesized)
ccacctccccggaccccgtgcccgagtcccccgccgtgctgtgctacttccccatctcctgccccactccggctgagacccctgtgctgtgccttcagggccccagaaggcccagtagga

SEQ ID NO: 596169 - DNA, 120 bp, Artificial Sequence
  ENSG00000173838_35 (sequence is synthesized)
tttacctcatgtggtaagtcactcttgcaaggcacacagcacagcgcagtcggggagaggggacttcgggcttccggaaggcaggtggacaggagaggggccagaggccacaccaagaac

SEQ ID NO: 596170 - DNA, 120 bp, Artificial Sequence
  ENSG00000173838_36 (sequence is synthesized)
aataccaggcggcgtggtgttcgggggagcaggaagatgggacagcgtggccactgcactggggctgcaccttctagcgccaaaggagcgagcgaccaataaaatcccatcctctctgga

SEQ ID NO: 596171 - DNA, 120 bp, Artificial Sequence
  ENSG00000173846_0 (sequence is synthesized)
gcagcgtagcaaatccaggcagcgccacgcgcggccggggccgggcggaaccgagaagccgggaccgcgctgcgacgcgccggccgcatggagcctgccgccggtttcctgtctccgcgc

SEQ ID NO: 596172 - DNA, 120 bp, Artificial Sequence
  ENSG00000173846_1 (sequence is synthesized)
cgcgcccgctcccccggccgggcccgggccgcctccgagtgccttgcgcggacctgagctggagatgctggccgggctaccgacgtcagaccccgggcgcctcatcacggacccgcgcag

SEQ ID NO: 596173 - DNA, 120 bp, Artificial Sequence
  ENSG00000173846_2 (sequence is synthesized)
ctcatcacggacccgcgcagcggccgcacctacctcaaaggccgcttgttgggcaaggggggcttcgcccgctgctacgaggccactgacacagagactggcagcgcctacgctgtcaaa

SEQ ID NO: 596174 - DNA, 120 bp, Artificial Sequence
  ENSG00000173846_3 (sequence is synthesized)
gtcatcccgcagagccgcgtcgccaagccgcatcagcgcgagaagatcctaaatgagattgagctgcaccgagacctgcagcaccgccacatcgtgcgtttttcgcaccactttgaggac

SEQ ID NO: 596175 - DNA, 120 bp, Artificial Sequence
  ENSG00000173846_4 (sequence is synthesized)
gctgacaacatctacattttcttggagctctgcagccgaaagtccctggcccacatctggaaggcccggcacaccctgttggagccagaagtgcgctactacctgcggcagatcctttct

SEQ ID NO: 596176 - DNA, 120 bp, Artificial Sequence
  ENSG00000173846_5 (sequence is synthesized)
ggcctcaagtacttgcaccagcgcggcatcttgcaccgggacctcaagttgggaaattttttcatcactgagaacatggaactgaaggtgggggattttgggctggcagcccggttggag

SEQ ID NO: 596177 - DNA, 120 bp, Artificial Sequence
  ENSG00000173846_6 (sequence is synthesized)
cctccggagcagaggaagaagaccatctgtggcacccccaactatgtggctccagaagtgctgctgagacagggccacggccctgaggcggatgtatggtcactgggctgtgtcatgtac

SEQ ID NO: 596178 - DNA, 120 bp, Artificial Sequence
  ENSG00000173846_7 (sequence is synthesized)
acgctgctctgcgggagccctccctttgagacggctgacctgaaggagacgtaccgctgcatcaagcaggttcactacacgctgcctgccagcctctcactgcctgcccggcagctcctg

SEQ ID NO: 596179 - DNA, 120 bp, Artificial Sequence
  ENSG00000173846_8 (sequence is synthesized)
gccgccatccttcgggcctcaccccgagaccgcccctctattgaccagatcctgcgccatgacttctttaccaagggctacacccccgatcgactccctatcagcagctgcgtgacagtc

SEQ ID NO: 596180 - DNA, 120 bp, Artificial Sequence
  ENSG00000173846_9 (sequence is synthesized)
tttggcagaaagaagaagagtaagaatcatgcccaggagagggatgaggtctccggtttggtgagcggcctcatgcgcacatccgttggccatcaggatgccaggccagaggctccagca

SEQ ID NO: 596181 - DNA, 120 bp, Artificial Sequence
  ENSG00000173846_10 (sequence is synthesized)
gcttctggcccagcccctgtcagcctggtagagacagcacctgaagacagctcaccccgtgggacactggcaagcagtggagatggatttgaagaaggtctgactgtggccacagtagtg

SEQ ID NO: 596182 - DNA, 120 bp, Artificial Sequence
  ENSG00000173846_11 (sequence is synthesized)
gagtcagccctttgtgctctgagaaattgtatagccttcatgcccccagcggaacagaacccggcccccctggcccagccagagcctctggtgtgggtcagcaagtgggttgactactcc

SEQ ID NO: 596183 - DNA, 120 bp, Artificial Sequence
  ENSG00000173846_12 (sequence is synthesized)
aataagttcggctttgggtatcaactgtccagccgccgtgtggctgtgctcttcaacgatggcacacatatggccctgtcggccaacagaaagactgtgcactacaatcccaccagcaca

SEQ ID NO: 596184 - DNA, 120 bp, Artificial Sequence
  ENSG00000173846_13 (sequence is synthesized)
aagcacttctccttctccgtgggtgctgtgccccgggccctgcagcctcagctgggtatcctgcggtacttcgcctcctacatggagcagcacctcatgaagggtggagatctgcccagt

SEQ ID NO: 596185 - DNA, 120 bp, Artificial Sequence
  ENSG00000173846_14 (sequence is synthesized)
gtggaagaggtagaggtacctgctccgcccttgctgctgcagtgggtcaagacggatcaggctctcctcatgctgtttagtgatggcactgtccaggtgaacttctacggggaccacacc

SEQ ID NO: 596186 - DNA, 120 bp, Artificial Sequence
  ENSG00000173846_15 (sequence is synthesized)
aagctgattctcagtggctgggagcccctccttgtgacttttgtggcccgaaatcgtagtgcttgtacttacctcgcttcccaccttcggcagctgggctgctctccagacctgcggcag

SEQ ID NO: 596187 - DNA, 120 bp, Artificial Sequence
  ENSG00000173846_16 (sequence is synthesized)
cgactccgctatgctctgcgcctgctccgggaccgcagcccagcctaggacccaagccctgaggcctgaggcctgtgcctgtcaggctctggcccttgcctttgtggccttcccccttcc

SEQ ID NO: 596188 - DNA, 120 bp, Artificial Sequence
  ENSG00000173846_17 (sequence is synthesized)
tttggtgcctcactgggggctttgggccgaatcccccagggaatcagggaccagctttactggagttgggggcggcttgtcttcgctggctcctaccccatctccaagataagcctgagc

SEQ ID NO: 596189 - DNA, 120 bp, Artificial Sequence
  ENSG00000173846_18 (sequence is synthesized)
cttagctcccagctagggggcgttatttatggaccacttttatttattgtcagacacttatttattgggatgtgagccccaggggggcctcctcctaggataataaacaattttgcagaa

SEQ ID NO: 596190 - DNA, 120 bp, Artificial Sequence
  ENSG00000173846_19 (sequence is synthesized)
cctcgtgagtgctcctgggctcaggggtctgggtttctcagaggaggggcattggtgcagggctccctctgacctctgcctccccattctaggactgtgcactacaatcccaccagcaca

SEQ ID NO: 596191 - DNA, 120 bp, Artificial Sequence
  ENSG00000173846_20 (sequence is synthesized)
aacccatcctgatccctctgattcccccttggtggtggttggggttgctgaaagctagaggataaggcatacactaatggggagggggctgtctcacgctggatcagtgacctgccctga

SEQ ID NO: 596192 - DNA, 120 bp, Artificial Sequence
  ENSG00000173846_21 (sequence is synthesized)
ctaagtccatctgtgtattcccagggattgaaagggggcaggtgacaggacccctggagcctctcttctctgttcacatggttcccctccctagggctacacccccgatcgactccctat

SEQ ID NO: 596193 - DNA, 120 bp, Artificial Sequence
  ENSG00000173846_22 (sequence is synthesized)
cctcgtggtggcctaattggctgtgtgtcaccagcctggcggggctgacctggggtgccctgggagccagggcagggccaggccatggactcaagggtttggattttggggcctgtgtca

SEQ ID NO: 596194 - DNA, 120 bp, Artificial Sequence
  ENSG00000173848_0 (sequence is synthesized)
aagcctctgctccaccgcggcgagaggcatgggcacgtggctgccgagggtggccgagctctgggaagaaaagcccgtgtgcctctgcatagcgtcgctacagcgctgactcggtgtgga

SEQ ID NO: 596195 - DNA, 120 bp, Artificial Sequence
  ENSG00000173848_1 (sequence is synthesized)
ttgattggaaaggtttgagggagtacttgggaagcatggtggcacatgatgagactggaggtctcctacctattaaaaggaccatacgagtcctagatgtcaataaccagtccttcagag

SEQ ID NO: 596196 - DNA, 120 bp, Artificial Sequence
  ENSG00000173848_2 (sequence is synthesized)
aacaagaggagccaagcaataaaagagttcgacctctggctcgtgtcacgtccttggcaaatttaatctctcctgtaagaaatggagctgtcagacgttttggtcaaacaatacagtcat

SEQ ID NO: 596197 - DNA, 120 bp, Artificial Sequence
  ENSG00000173848_3 (sequence is synthesized)
ttacccttcgtggtgaccacagatccccagcctctgcccagaagttttctagcaggtcaacagtcccaacacccgccaagagaaggagcagtgcactgtggtcagagatgctggacatca

SEQ ID NO: 596198 - DNA, 120 bp, Artificial Sequence
  ENSG00000173848_4 (sequence is synthesized)
ccatgaaggagtctctcaccaccagggagatcagacggcaggaggcaatatatgaaatgtcccgaggtgaacaggatttaattgaggatctcaaacttgcaagaaaggcctatcatgacc

SEQ ID NO: 596199 - DNA, 120 bp, Artificial Sequence
  ENSG00000173848_5 (sequence is synthesized)
ccatgttaaagttgtccatcatgtcagaagaggaactcacacatatatttggtgatctggactcttacatacctctgcatgaagatttgttgacaagaataggagaagcaaccaagcctg

SEQ ID NO: 596200 - DNA, 120 bp, Artificial Sequence
  ENSG00000173848_6 (sequence is synthesized)
atggaacagtggagcagattggtcacattctcgtgagctggttaccgcgcttgaatgcctacagaggttactgtagtaaccagctggcagccaaagctcttcttgatcaaaagaaacagg

SEQ ID NO: 596201 - DNA, 120 bp, Artificial Sequence
  ENSG00000173848_7 (sequence is synthesized)
atccaagagtccaagacttcctccagcgatgtctcgagtctcccttcagtcgaaaactagatctttggagtttcctagatatccctcgaagtcgcctagtcaaataccctttactgttaa

SEQ ID NO: 596202 - DNA, 120 bp, Artificial Sequence
  ENSG00000173848_8 (sequence is synthesized)
aagaaattcttaaacacactccaaaagagcaccctgatgttcagcttctggaggatgctatattgataatacagggagtcctctctgatatcaacttgaagaaaggtgaatccgagtgcc

SEQ ID NO: 596203 - DNA, 120 bp, Artificial Sequence
  ENSG00000173848_9 (sequence is synthesized)
agtattacatcgacaagctggagtacctggatgaaaagcagagggaccccagaatcgaagcgagcaaagtgctgctgtgccatggggagctgcggagcaagagtggacataaactttaca

SEQ ID NO: 596204 - DNA, 120 bp, Artificial Sequence
  ENSG00000173848_10 (sequence is synthesized)
ttttcctgtttcaagacatcttggttctgactcggcccgtcacacggaacgaacggcactcttaccaggtttaccggcagccaatcccagtccaagagctagtcctagaagacctgcagg

SEQ ID NO: 596205 - DNA, 120 bp, Artificial Sequence
  ENSG00000173848_11 (sequence is synthesized)
atggagatgtgagaatgggaggctcctttcgaggagctttcagtaactcagagaaagctaaaaatatctttagaattcgcttccatgacccctctccagcccagtctcacactctgcaag

SEQ ID NO: 596206 - DNA, 120 bp, Artificial Sequence
  ENSG00000173848_12 (sequence is synthesized)
ccaatgacgtgttccacaagcagcagtggttcaactgtattcgagcggccattgcccccttccagtcggcaggcagtccacctgagctgcagggcctgccggagctgcacgaagagtgtg

SEQ ID NO: 596207 - DNA, 120 bp, Artificial Sequence
  ENSG00000173848_13 (sequence is synthesized)
ctctgcgaggaaactcacagcccagaggagggcatccacagtttccagtgttactcaggtagaagttgatgaaaacgcttacagatgtggctctggcatgcagatggcagaggacagcaa

SEQ ID NO: 596208 - DNA, 120 bp, Artificial Sequence
  ENSG00000173848_14 (sequence is synthesized)
gagcttaaagacacaccagacacagcccggcatccgaagagcgagggacaaagccctttctggtggcaaacggaaagagactttggtgtagagaaggctctgtgtgttaactgatgggag

SEQ ID NO: 596209 - DNA, 120 bp, Artificial Sequence
  ENSG00000173848_15 (sequence is synthesized)
agactgtttgtttataaatgtgtacagttttgttttctcgtaaggggagcatcatagggttactttataccagttgtaacattttcattgtttttggttgttcttttttctttttttaat

SEQ ID NO: 596210 - DNA, 120 bp, Artificial Sequence
  ENSG00000173848_16 (sequence is synthesized)
ggcagctaaagatatacagattactgttaaattgcagtccttttttttttaaagatattttcttgaattatttagaacatggtaagcctggtattttttaatcaaacaaaatatttatga

SEQ ID NO: 596211 - DNA, 120 bp, Artificial Sequence
  ENSG00000173848_17 (sequence is synthesized)
aatgggttttctcttaattctggattcatcatggctttctaataccaattgtaatatttacaatattcaccaaaacttagaattttgcaaatgctggaattctgccagtgtttctttgct

SEQ ID NO: 596212 - DNA, 120 bp, Artificial Sequence
  ENSG00000173848_18 (sequence is synthesized)
aagccttgcatgcaaaatttgaaattttaacattggcacccaaaacctacatggaatgtatgtctggagtatttcaaactttacattgaaacataatttccttggaaaacaaaccataag

SEQ ID NO: 596213 - DNA, 120 bp, Artificial Sequence
  ENSG00000173848_19 (sequence is synthesized)
cctgaggaggtttttatcaactggaatgctttatattagtttgtttttcactgtacattcctcattttacattcatttaacctgccgattatttaatttttttattgtaaagtagttttt

SEQ ID NO: 596214 - DNA, 120 bp, Artificial Sequence
  ENSG00000173848_20 (sequence is synthesized)
ttgtaaagtagtttttagcatttgcttttatttttttactttgatgccttttcaaattggcatgtctttaaagtatttttcttcctgattaaaaatgtgtgtgtatgtgtgtgtgtgtgt

SEQ ID NO: 596215 - DNA, 120 bp, Artificial Sequence
  ENSG00000173848_21 (sequence is synthesized)
ttttaaatcacattaattttaccaagtgaaaccaagccatactgtttttgagccaattaagaaaattgccatttttaaagtgtagcatttcagggtaaagacccatgaaatggcttgatg

SEQ ID NO: 596216 - DNA, 120 bp, Artificial Sequence
  ENSG00000173848_22 (sequence is synthesized)
tattctagactactgaaagaaaaccacttcaaagattttgttgaaagttttagtgttgtctgaaatgcaagagggaaggtgattggtagtgagttaaaagaaaaagagaggaaaagagag

SEQ ID NO: 596217 - DNA, 120 bp, Artificial Sequence
  ENSG00000173848_23 (sequence is synthesized)
tagttttgtcttcaagtaaaatgtctggttgtgccagacatttcacaagtgtgaaaggagataggagaagctcaacttgagggcgtgtagtaagttgtagaaggctcgaggggacgtgga

SEQ ID NO: 596218 - DNA, 120 bp, Artificial Sequence
  ENSG00000173848_24 (sequence is synthesized)
cttatttgccttggtttgcaatacctgcaaataatgagtttgaaaagaaacaatgaaatgtgttaaaaatttgaccatattagataaattttcgtggatttagtcataagatggaaaaag

SEQ ID NO: 596219 - DNA, 120 bp, Artificial Sequence
  ENSG00000173848_25 (sequence is synthesized)
actggtgaatcttttattacaaaatgtttctgttaaaatgggatcatcatctttgaaaggggggaggaggagtaaaagcccgattataatggtgatcaattcaagtcagtgttgactatt

SEQ ID NO: 596220 - DNA, 120 bp, Artificial Sequence
  ENSG00000173848_26 (sequence is synthesized)
ctgtgaaatatatttggccagtggaaatgataatcagaaaagactgtaaatagatccatccaaatgatttctctgtacaaatgaatgatactattaaaaaaaaaaaaagcacacacataa

SEQ ID NO: 596221 - DNA, 120 bp, Artificial Sequence
  ENSG00000173848_27 (sequence is synthesized)
aaatccccggatgacggcggtggcggctgcagtccgctgacaggcgctttctgcctggcagaggctggcgggcatcgtgcccgtccctgccggtctcccgggcacccggccaccgcccca

SEQ ID NO: 596222 - DNA, 120 bp, Artificial Sequence
  ENSG00000173848_28 (sequence is synthesized)
ccccctcctccgtgccatggagcccgagctggcggctcagaagcagcctcgaccgcggaggcgaagccgccgggcctctgggctcagcacggagggagcgacggggccttcggccgacac

SEQ ID NO: 596223 - DNA, 120 bp, Artificial Sequence
  ENSG00000173848_29 (sequence is synthesized)
ctccgggtcggagctggacgggagatgttcccttcggagaggcagctccttcacattcttaacacctggccccaactgggacttcactttgaaaagaaaacgcagagagaaagatgatga

SEQ ID NO: 596224 - DNA, 120 bp, Artificial Sequence
  ENSG00000173848_30 (sequence is synthesized)
aacctttgaaatcattgatgaatcagcgaaaggtaggtaagtcttgtgttaggaaatcttttaagaacatggtgtaatcagacacagcaattgtattgaaaataactgaacacctgttac

SEQ ID NO: 596225 - DNA, 120 bp, Artificial Sequence
  ENSG00000173848_31 (sequence is synthesized)
tttctggataggatagtaagggtagtagtggcaaaggatcctgattaatttcagattttaatgtaagtacctcaggttcttgtctttggaaattcacattcataagtgtatattacacca

SEQ ID NO: 596226 - DNA, 120 bp, Artificial Sequence
  ENSG00000173848_32 (sequence is synthesized)
atgattgtgatctgcaacaccagaaagcaagatttctaatcatttccagaggtgttgtatagaatagttattccagagttaccttgatcagcttctgaagtttaagaagcaagtaatagt

SEQ ID NO: 596227 - DNA, 120 bp, Artificial Sequence
  ENSG00000173848_33 (sequence is synthesized)
tcaagtgttgttaatggaattatgttttatttaaaaccgtatcttcttttggttccctcaaaggtaaaaataagacccagaatctgagtaaatctattaaatgaatgttcttcagaaata

SEQ ID NO: 596228 - DNA, 120 bp, Artificial Sequence
  ENSG00000173848_34 (sequence is synthesized)
aataatttaaagaaatagaagctcagaactgaagtgaatttagttttgcctttaagaattctagagatgaaatggctccattgtcctatacttgttacatccattgagttgtccaggcct

SEQ ID NO: 596229 - DNA, 120 bp, Artificial Sequence
  ENSG00000173848_35 (sequence is synthesized)
tcccagctcgaacacccgcaggtgtatctaagaaataatgcataggcttaatgtattcacattgacataaataaattgccataaattgacagtcacgttaagattgtatgaccactttgt

SEQ ID NO: 596230 - DNA, 120 bp, Artificial Sequence
  ENSG00000173848_36 (sequence is synthesized)
aagaaaggtcagtaaataactttttatcagatgccctagtttttaaaaattacatttcacaaaatctaaaggatagttttcttaacctttagaagtagaagaatagaaaatatctactgg

SEQ ID NO: 596231 - DNA, 120 bp, Artificial Sequence
  ENSG00000173848_37 (sequence is synthesized)
tgaatacattttttttaggtgaggtctagacacatcctcaaatacaagtattagtaagagagtttatttggggattaatacatactaatttattttatgtgtagcaaacagaatccacgc

SEQ ID NO: 596232 - DNA, 120 bp, Artificial Sequence
  ENSG00000173852_0 (sequence is synthesized)
cctccgcccgcccgcccgctggagagtgagctgcgcccagccgcccagccagcccgccgttctctggccgccgtccgggcgcgcgcagcgagcgggcgcgactatgccaagatggtcctg

SEQ ID NO: 596233 - DNA, 120 bp, Artificial Sequence
  ENSG00000173852_1 (sequence is synthesized)
actatgccaagatggtcctgcaggcgcggaacaagcaccgggaggcggctcccaagccgccccagccaccccgcgcctcacagtcgccgctgaggggggcgtcggacgtcggcgccgggg

SEQ ID NO: 596234 - DNA, 120 bp, Artificial Sequence
  ENSG00000173852_2 (sequence is synthesized)
cccggctgcgctgggcgctgggcctgcggcgcgcggggcgcggccggacctggaccacgctcctgttagctgtttttgcagcagtgttgcactggagccatataacacacctctttgaaa

SEQ ID NO: 596235 - DNA, 120 bp, Artificial Sequence
  ENSG00000173852_3 (sequence is synthesized)
atgaccgtcatttttctcacctctcaacattggaaagggagatggcttttcgcactgaaatgggactatattattcctatttcaagactattgtggaagcaccctcatttttgaatggag

SEQ ID NO: 596236 - DNA, 120 bp, Artificial Sequence
  ENSG00000173852_4 (sequence is synthesized)
tatggatgattatgaatgataaactgactgaatacccccttgtcattaatacattaaaaagattcaatctttaccctgaggtaattttggccagttggtaccggatttataccaaaataa

SEQ ID NO: 596237 - DNA, 120 bp, Artificial Sequence
  ENSG00000173852_5 (sequence is synthesized)
tggacttgattggtattcaaaccaagatatgttggacggttaccagaggagaaggactcagtcctattgaaagctgtgaaggattgggagatcctgcttgcttttatgttgctgtaattt

SEQ ID NO: 596238 - DNA, 120 bp, Artificial Sequence
  ENSG00000173852_6 (sequence is synthesized)
ttattttaaatggactaatgatggcattattcttcatatatggcacatatttaagtggcagccgattaggaggcctggttacagtgttgtgcttctttttcaatcatggagagtgtaccc

SEQ ID NO: 596239 - DNA, 120 bp, Artificial Sequence
  ENSG00000173852_7 (sequence is synthesized)
gtgtaatgtggacaccacctctccgtgaaagcttctcatatccatttcttgttcttcagatgttgctagtgactcatattctcagggctacaaaactttatagaggaagcttgattgcac

SEQ ID NO: 596240 - DNA, 120 bp, Artificial Sequence
  ENSG00000173852_8 (sequence is synthesized)
tctgcatttccaatgtatttttcatgcttccttggcagtttgctcagtttgtacttcttactcagattgcatcattatttgcagtatatgttgtcgggtacattgatatatgtaaattac

SEQ ID NO: 596241 - DNA, 120 bp, Artificial Sequence
  ENSG00000173852_9 (sequence is synthesized)
ggaagatcatttatatacacatgatttctcttgcactttgttttgttttgatgtttgggaactcaatgttattaacttcttattatgcttcttctttggtaattatttggggtattctgg

SEQ ID NO: 596242 - DNA, 120 bp, Artificial Sequence
  ENSG00000173852_10 (sequence is synthesized)
caatgaaaccacatttcctgaaaataaatgtatctgaacttagtttatgggttattcaaggatgtttttggttatttggaactgtcatacttaaatacttgacatctaaaatttttggta

SEQ ID NO: 596243 - DNA, 120 bp, Artificial Sequence
  ENSG00000173852_11 (sequence is synthesized)
ttgcagatgacgctcatattggcaacttactaacatcaaaattctttagttataaggattttgatactttattgtatacctgtgcagcggagtttgactttatggaaaaagagactccac

SEQ ID NO: 596244 - DNA, 120 bp, Artificial Sequence
  ENSG00000173852_12 (sequence is synthesized)
tgagatacacaaagacattattgcttccagttgttcttgtagtgtttgttgctattgttagaaagattattagtgatatgtggggtgtcttagctaaacaacagacacatgtaagaaaac

SEQ ID NO: 596245 - DNA, 120 bp, Artificial Sequence
  ENSG00000173852_13 (sequence is synthesized)
accagtttgatcatggagagctggtttaccatgcattgcaattgttagcatatacagcccttggtattttaattatgagactaaaactcttcttgacaccacacatgtgtgttatggcat

SEQ ID NO: 596246 - DNA, 120 bp, Artificial Sequence
  ENSG00000173852_14 (sequence is synthesized)
cactgatctgctcaagacagctatttggatggctcttttgcaaagtacatcctggtgctattgtgtttgctatattagcagcaatgtcaatacaaggttcagcaaatctgcaaacccagt

SEQ ID NO: 596247 - DNA, 120 bp, Artificial Sequence
  ENSG00000173852_15 (sequence is synthesized)
ggaatattgtaggggagttcagcaatttgccccaagaagaacttatagaatggatcaaatatagtactaaaccagatgcagtgtttgcgggtgccatgcccacgatggcaagtgttaagc

SEQ ID NO: 596248 - DNA, 120 bp, Artificial Sequence
  ENSG00000173852_16 (sequence is synthesized)
tctctgcacttcggcccattgtgaatcatccacattatgaagacgcaggcttgagagccagaacaaaaatagtatactcaatgtatagtcggaaagcagccgaagaagtgaagcgagaac

SEQ ID NO: 596249 - DNA, 120 bp, Artificial Sequence
  ENSG00000173852_17 (sequence is synthesized)
tgataaagttaaaagtgaactattacattctagaagagtcatggtgtgtaagaagatccaagcctggttgcagtatgcctgaaatttgggatgtagaagatcctgccaatgctgggaaaa

SEQ ID NO: 596250 - DNA, 120 bp, Artificial Sequence
  ENSG00000173852_18 (sequence is synthesized)
ctcccttatgtaacctcttggtgaaggattccaaacctcacttcaccactgtattccagaacagtgtttacaaagtcctagaagttgtaaaagaatgactgctacatgacctgctgccta

SEQ ID NO: 596251 - DNA, 120 bp, Artificial Sequence
  ENSG00000173852_19 (sequence is synthesized)
cggagaactacatctgtaatggttttaatgttttgctaagtcatgtgttgttcatatcccaaaaacttttataggtaactgttttcaaatagaaaacgttttatttggtcaatttgaatg

SEQ ID NO: 596252 - DNA, 120 bp, Artificial Sequence
  ENSG00000173852_20 (sequence is synthesized)
aattggttactatttcaatgcaccctttaaaatttgctatgcaaatgagtatatgcttgtacttgactttaatatttgtgctaaagtgagcaaagctacctgtataaagaaaacacagtg

SEQ ID NO: 596253 - DNA, 120 bp, Artificial Sequence
  ENSG00000173852_21 (sequence is synthesized)
ggttgtgacaaggatgacatgaaaatacaggacaattctgacaatgtaggggctgattttatagtgtaagaactattaatgccccttgcttcttttttctgcctcttgctcttgtctttt

SEQ ID NO: 596254 - DNA, 120 bp, Artificial Sequence
  ENSG00000173852_22 (sequence is synthesized)
ggacatttcagtgattgtaagttcttcggtcatgtcagcccctgtcatcaacttgagttacagtagatggggcagacatggagtgtttgctatatagaactatctgtttgttttacttcc

SEQ ID NO: 596255 - DNA, 120 bp, Artificial Sequence
  ENSG00000173852_23 (sequence is synthesized)
ttgtgcgctttttgttctctgttctcttgttaatgaagcttttcctgcccattattaatccaaactcttggaccttgtggttaggaaattcccttaacttccagccatatggcattatcg

SEQ ID NO: 596256 - DNA, 120 bp, Artificial Sequence
  ENSG00000173852_24 (sequence is synthesized)
tgtctctttctctctctctcttgctctctctcttctcctcttccccatattttctgtcaaataagtactgtttactcatttagttgcttatcaagtacttattcttggttttaaaaaaaa

SEQ ID NO: 596257 - DNA, 120 bp, Artificial Sequence
  ENSG00000173852_25 (sequence is synthesized)
aactgtatttttctcatttttagcattattcaaatgtttatattttaatacctttaaaccactttaaagttttttcatgtttaattatagttttaagaaaaactattttgaacaacccca

SEQ ID NO: 596258 - DNA, 120 bp, Artificial Sequence
  ENSG00000173852_26 (sequence is synthesized)
caaccccaaatatagtgcatctagaaactaatgtatatttgattagacatcatttatagtggaacagtagactgtagtacatggtaatttttcttttactattaagatacaataaaacat

SEQ ID NO: 596259 - DNA, 120 bp, Artificial Sequence
  ENSG00000173852_27 (sequence is synthesized)
gactaattttgctgtcaaaaatgtaaagaataatgataaatggagtttttatattttacttttaagattgcctgtctttaataagacaaagccttaagccttatgttataattttggttc

SEQ ID NO: 596260 - DNA, 120 bp, Artificial Sequence
  ENSG00000173852_28 (sequence is synthesized)
taaaaaccatcatttcagtataaggaataagtatatttcgtcctcctctttagtttttttcttcctatttatttttattttgaaaaatttctacaccttctttgaattccttgtatgaat

SEQ ID NO: 596261 - DNA, 120 bp, Artificial Sequence
  ENSG00000173852_29 (sequence is synthesized)
ttttgtttcttagaagttaatttgtgtgaaatgagattcttcaaaacgatgaaacctcatagctctgagaaaaggttttagggttttaaattctaagcaaagcgtgactatggctgacag

SEQ ID NO: 596262 - DNA, 120 bp, Artificial Sequence
  ENSG00000173852_30 (sequence is synthesized)
actacacatttaattatacagcttctctttcttaaccacaggcagattaacctcattgtggattgtccttcagaccttagtcctcaggcatggtttctggtgcccactcctggaagccgc

SEQ ID NO: 596263 - DNA, 120 bp, Artificial Sequence
  ENSG00000173852_31 (sequence is synthesized)
tgttccctttctaccttcttaccagagcccaagggcaggcctggtcccggggaagcagcagcttgctgacataagtcagctgcaaaggctgaggagtgtgccctcagagaagcaccgccc

SEQ ID NO: 596264 - DNA, 120 bp, Artificial Sequence
  ENSG00000173852_32 (sequence is synthesized)
cccagtcttgtgccagcgcctagagccgcagctcccagggatgctccttccctggaggcagcccaggagagggactctggcagcgttcttcagatttgtggccactgtttctcatttgct

SEQ ID NO: 596265 - DNA, 120 bp, Artificial Sequence
  ENSG00000173852_33 (sequence is synthesized)
ggttgactgtttttatttcttaggcttttgctagttttagaaaatagggaagcagcccttgatttgtggattaaaagcaacatttgagcgatgatgcacaacagtccaggaaaatgggcg

SEQ ID NO: 596266 - DNA, 120 bp, Artificial Sequence
  ENSG00000173852_34 (sequence is synthesized)
gtggacacttgaggctgaggatgggagttgacatgagcagggagagggaggtgcgcgctgcttatctgtgattgttgctcacctgagtgtggctgattgtgtacatccagcagttacaat

SEQ ID NO: 596267 - DNA, 120 bp, Artificial Sequence
  ENSG00000173852_35 (sequence is synthesized)
ttttaaaaattatacttttacatttattttatatttttctcacccccagtaatttccttccaaagaagttcacatgtaataagtagaaattctgtataggaaaaaagcattaaaaatact

SEQ ID NO: 596268 - DNA, 120 bp, Artificial Sequence
  ENSG00000173852_36 (sequence is synthesized)
attataactgcttcatttgctgggaaccattaaaagtaatataaattagctttttccagaaggatccttttgtagcagtgtttatgaatgtaacccccagcaaaatatggctatatatta

SEQ ID NO: 596269 - DNA, 120 bp, Artificial Sequence
  ENSG00000173852_37 (sequence is synthesized)
ggggagccagtttggagcagaggcctgaaggtccctgctatgcagccgtggccacagctcgcagcccaagcactgtggagcatccacacctttgatggcaatgcagattggtagcaggtt

SEQ ID NO: 596270 - DNA, 120 bp, Artificial Sequence
  ENSG00000173852_38 (sequence is synthesized)
ccataggcgtacaaaacagtattaaagctcagtgttttgcatattgttagcatttacaaatatttttgctttagtatgaggaaagtaaggatgggcaaagaagcgatcaaaatagctatt

SEQ ID NO: 596271 - DNA, 120 bp, Artificial Sequence
  ENSG00000173852_39 (sequence is synthesized)
gctacaacattttcgaaaacaaagttggggctgtatttctttaaaaagataagcctctaaaaatgcttggcaaaaaaaatatagtgttaaaataggccagtgatattaatgagaaaatga

SEQ ID NO: 596272 - DNA, 120 bp, Artificial Sequence
  ENSG00000173852_40 (sequence is synthesized)
aagtatgtatcaggaataaagtgatattgcataggagtattgtatttttatgaattttatgccagttgtttacatgtactatatatgttaaattaaaaaaaatcatgagtaatgagggaa

SEQ ID NO: 596273 - DNA, 120 bp, Artificial Sequence
  ENSG00000173852_41 (sequence is synthesized)
aggaagaccactgtttgtaaagtgcaaaggtctatcgtgctaccctcagtgtatactatggtttttaattcttcgtcttacgttttcttataattttgatactcatgtggcatgaacatc

SEQ ID NO: 596274 - DNA, 120 bp, Artificial Sequence
  ENSG00000173852_42 (sequence is synthesized)
attccttacaaagttttcttaaattttaacaatggaattcagactattcaactggcttttcaggctgatgaattgtctttttgatacttttcagctacttggtgtagctgaaaagcatgc

SEQ ID NO: 596275 - DNA, 120 bp, Artificial Sequence
  ENSG00000173852_43 (sequence is synthesized)
gtttgcgggtgccatgcccacgatggcaagtgttaagctctctgcacttcggcccattgtgaatcatccacattatgaagacgcaggcttgaggcctggttgcagtatgcctgaaatttg

SEQ ID NO: 596276 - DNA, 120 bp, Artificial Sequence
  ENSG00000173852_44 (sequence is synthesized)
ccctaagtggccgctccgggcgccttctccctgccccgccgcgtctcgcctgcgcgggctccaagcgcagccttaacaggctccgaaacttgaatcagcgccccgatcccgagagggctc

SEQ ID NO: 596277 - DNA, 120 bp, Artificial Sequence
  ENSG00000173852_45 (sequence is synthesized)
ttccttcggccccatcactcccacaatggaagggcggccgcctccggaaggccgtccgcccccgcgtcctcgcaccggccgagccccgcgcgggcgccgaagagctgtttttgcagcagt

SEQ ID NO: 596278 - DNA, 120 bp, Artificial Sequence
  ENSG00000173852_46 (sequence is synthesized)
acttgtgcctcgtcccttatcagctccccatgagattccaggctgctattttaatactctgttactatcttaaatcgggtcgcacccgttcttcttgtcgctgtttttgcagcagtgttg

SEQ ID NO: 596279 - DNA, 120 bp, Artificial Sequence
  ENSG00000173852_47 (sequence is synthesized)
gaaggattctgaggtcccaggattttgctgttcttcagctgatatttctgtatgcattgttttggtttgataggtggaagtttactctttctaatattgccatttttcaggatcctattg

SEQ ID NO: 596280 - DNA, 120 bp, Artificial Sequence
  ENSG00000173852_48 (sequence is synthesized)
agggaaaggtaacatactgcatgttggggggcggattcttaaatgtctgcttttgtgattacacatttccccgactcctcattctccagtggcagccgattaggaggcctggttacagtg

SEQ ID NO: 596281 - DNA, 120 bp, Artificial Sequence
  ENSG00000173852_49 (sequence is synthesized)
ttgaaaagaatcgaataggctaagaataaattgagttattcaagtatcactattaaatgaaattctaggatgaagtctgttcacctattattttatttaatataatagaaagtaaatgta

SEQ ID NO: 596282 - DNA, 120 bp, Artificial Sequence
  ENSG00000173852_50 (sequence is synthesized)
atgcaaacagacagtgagtggaggacaccagcaaagtaataaggaatgtttcaaaaggatatgatgaactgaggcttatcgagtcagggagcagaaagctgaaataagaccgctaagctc

SEQ ID NO: 596283 - DNA, 120 bp, Artificial Sequence
  ENSG00000173868_0 (sequence is synthesized)
cttccccacttcttacactccaaactcagccgggacagacctctgctgccgccgcccccacgaacgtgtgacgacggctggaggccaacagagtccctacaggtggtgctcacggtaatg

SEQ ID NO: 596284 - DNA, 120 bp, Artificial Sequence
  ENSG00000173868_1 (sequence is synthesized)
caccgacaatgagtggctgttttccagtttctggcctccgctgcctatctagggacggcaggatggccgcgcagggcgcgccgcgcttcctcctgaccttcgacttcgacgagactatcg

SEQ ID NO: 596285 - DNA, 120 bp, Artificial Sequence
  ENSG00000173868_2 (sequence is synthesized)
tggacgaaaacagcgacgattcgatcgtgcgcgccgcgccgggccagcggctcccggagagcctgcgagccacctaccgcgagggcttctacaacgagtacatgcagcgcgtcttcaagt

SEQ ID NO: 596286 - DNA, 120 bp, Artificial Sequence
  ENSG00000173868_3 (sequence is synthesized)
acctgggcgagcagggcgtgcggccgcgggacctgagcgccatctacgaagccatccctttgtcgccaggcatgagcgacctgctgcagtttgtggcaaaacagggcgcctgcttcgagg

SEQ ID NO: 596287 - DNA, 120 bp, Artificial Sequence
  ENSG00000173868_4 (sequence is synthesized)
tgattctcatctccgatgccaacacctttggcgtggagagctcgctgcgcgccgccggccaccacagcctgttccgccgcatcctcagcaacccgtcggggccggatgcgcggggactgc

SEQ ID NO: 596288 - DNA, 120 bp, Artificial Sequence
  ENSG00000173868_5 (sequence is synthesized)
tggctctgcggccgttccacacacacagctgcgcgcgctgccccgccaacatgtgcaagcacaaggtgctcagcgactacctgcgcgagcgggcccacgacggcgtgcacttcgagcgcc

SEQ ID NO: 596289 - DNA, 120 bp, Artificial Sequence
  ENSG00000173868_6 (sequence is synthesized)
tcttctacgtgggcgacggcgccaacgacttctgccccatggggctgctggcgggcggcgacgtggccttcccgcgccgcggctaccccatgcaccgcctcattcaggaggcccagaagg

SEQ ID NO: 596290 - DNA, 120 bp, Artificial Sequence
  ENSG00000173868_7 (sequence is synthesized)
ccgcgccagcgtggtgccctgggaaacggctgcagatgtgcgcctccacctgcaacaggtgctgaagtcgtgctgagtctggccgcctgcaggggggtacccgggccaacggcggagggg

SEQ ID NO: 596291 - DNA, 120 bp, Artificial Sequence
  ENSG00000173868_8 (sequence is synthesized)
gcggggaagggagattcggcaaagacagctttactactcccttttccctttggctttgttatgtccctctgggaatttctggaatctcgtatttgggggcttggggaagggggctcagag

SEQ ID NO: 596292 - DNA, 120 bp, Artificial Sequence
  ENSG00000173868_9 (sequence is synthesized)
ccgtccctatctattcagttaacccacctcggctgcctcccccactccactgtgcacggttgagttctggagtctgacccatcgcggggtggcgcgcaaaccttggaaggcagcagtatt

SEQ ID NO: 596293 - DNA, 120 bp, Artificial Sequence
  ENSG00000173868_10 (sequence is synthesized)
tcctggtcctcccaactgggaggaaggggcccccccggcaggtgagagaaggaacatctcccgccgctgtaacttgttgcctcgggctgcgtgaccgcccctcctccagtctactgtgga

SEQ ID NO: 596294 - DNA, 120 bp, Artificial Sequence
  ENSG00000173868_11 (sequence is synthesized)
gggaacccaggatcctgaaattctcctggccgcaagaactccccacagaggcagaagagggtctccacctatggccccaggcctttgcgatcttgcttcacccaccgcgaccccacacta

SEQ ID NO: 596295 - DNA, 120 bp, Artificial Sequence
  ENSG00000173868_12 (sequence is synthesized)
tttctgtgctgtccacactctcttgcctcccgacccccgcactcccttctagcacccccaaaggaaaagccagaggaacaatcgcctcctggtggtggtacgaggtagcgcaccgtccgg

SEQ ID NO: 596296 - DNA, 120 bp, Artificial Sequence
  ENSG00000173868_13 (sequence is synthesized)
ctcgggtccggacagccagtaacctcgcagagagtgacggtgtctccttgcatcccagcctcgtctatgcagcaagagaccagggacttcaccaaagtcaccctcgcgggctgggccttc

SEQ ID NO: 596297 - DNA, 120 bp, Artificial Sequence
  ENSG00000173868_14 (sequence is synthesized)
cacgcatcccccccaccccccatggaacagaaagccatgtttttaagcagaaccagcgaaacccaagcccctccttcctctggtgttttacaactataaaggaggtgaagggggaagaaa

SEQ ID NO: 596298 - DNA, 120 bp, Artificial Sequence
  ENSG00000173868_15 (sequence is synthesized)
ggatgtgccagcgcctctggccgtggcccgctaaccagcctctcccgggcgggctcctgccgcgccccctctcgcttgccccctcctcctcctcctcctgctgctctcccccctgctccc

SEQ ID NO: 596299 - DNA, 120 bp, Artificial Sequence
  ENSG00000173868_16 (sequence is synthesized)
gcggctccggctccggctccggctcccgggcatttaaaggggacgcggcggctgcccgggggggatgaggggcaagtggaggggacggctcagacgcacatcatcctcagtccctcggga

SEQ ID NO: 596300 - DNA, 120 bp, Artificial Sequence
  ENSG00000173868_17 (sequence is synthesized)
ctggagggactcgtgagccggagcccagaaatccgggggtggataagacaccgcgtcccctccaattcccgaacgtgtgacgacggctggaggccaacagagtccctacaggtggtgctc

SEQ ID NO: 596301 - DNA, 120 bp, Artificial Sequence
  ENSG00000173868_18 (sequence is synthesized)
gggaagaaacccaagatgcctgactttctgccttggagactgaaagaaacaagggcaactcaccaaacagtgtgacgacggctggaggccaacagagtccctacaggtggtgctcacggt

SEQ ID NO: 596302 - DNA, 120 bp, Artificial Sequence
  ENSG00000173875_0 (sequence is synthesized)
aaatgcgtgctacgtcactgtgcgatcgggttgtgcttagcttggggtctcctggccccttgacgcgtcaggttgctgtacccctgcatcggatgcgctgtaccctgcgctggctccgtg

SEQ ID NO: 596303 - DNA, 120 bp, Artificial Sequence
  ENSG00000173875_1 (sequence is synthesized)
aaccttagggacaacaccgggacacccgcgaggccggaaaatggactcagtggcttttgaggatgtgtctgtgagcttcagccaggaggagtgggctctgctggctccttcacagaagaa

SEQ ID NO: 596304 - DNA, 120 bp, Artificial Sequence
  ENSG00000173875_2 (sequence is synthesized)
actctacagagatgtgatgcaggaaacattcaagaacctggcatctataggggaaaaatgggaagacccgaatgttgaagatcaacacaaaaaccaaggacgaaatctaagaagccatac

SEQ ID NO: 596305 - DNA, 120 bp, Artificial Sequence
  ENSG00000173875_3 (sequence is synthesized)
gggagagagactctgtgaaggtaaagaaggtagtcaatgtgcagaaaacttcagtcccaatctcagtgtgacgaagaagactgccggagtaaaaccatatgagtgtactatctgtggaaa

SEQ ID NO: 596306 - DNA, 120 bp, Artificial Sequence
  ENSG00000173875_4 (sequence is synthesized)
agccttcatgcgtctctcatcccttactagacacatgaggtctcacactggatacgagctatttgagaagccatataaatgtaaggagtgtgagaaagcctttagttatctcaaatcctt

SEQ ID NO: 596307 - DNA, 120 bp, Artificial Sequence
  ENSG00000173875_5 (sequence is synthesized)
tcaaagacatgaaaggagtcacactggagaaaaaccctataaatgtaaacaatgtggaaaaaccttcatatatcaccagccctttcaaagacatgagcggactcacattggagaaaaacc

SEQ ID NO: 596308 - DNA, 120 bp, Artificial Sequence
  ENSG00000173875_6 (sequence is synthesized)
ctatgaatgtaagcaatgtggaaaagctcttagttgttccagttcgcttcgagttcatgaaaggattcacactggagaaaagccctatgaatgtaaacaatgtgggaaagccttcagttg

SEQ ID NO: 596309 - DNA, 120 bp, Artificial Sequence
  ENSG00000173875_7 (sequence is synthesized)
ttccagttctattcgagtacacgaaagaactcacactggagagaaaccctatgcatgtaaggaatgtgggaaagccttcatttcccacacaagtgttctaacacacatgataacacacaa

SEQ ID NO: 596310 - DNA, 120 bp, Artificial Sequence
  ENSG00000173875_8 (sequence is synthesized)
cggagatagaccttataaatgcaaagaatgtggaaaggcattcatttttcccagttttttacgagtacatgaaagaattcacactggagagaaaccctataaatgtaaacaatgtggtaa

SEQ ID NO: 596311 - DNA, 120 bp, Artificial Sequence
  ENSG00000173875_9 (sequence is synthesized)
agccttcagatgttccacctccattcaaattcatgaaagaattcatactggagagaagccctataaatgtaaagaatgtgggaaatctttcagtgcacgcccagcctttcgagtacacgt

SEQ ID NO: 596312 - DNA, 120 bp, Artificial Sequence
  ENSG00000173875_10 (sequence is synthesized)
cctttcgagtacacgtgagagtgcatactggagagaaaccctataagtgtaaagaatgtgggaaagcctttagtagaatcagttactttcgaatacatgaaaggactcacactggagaga

SEQ ID NO: 596313 - DNA, 120 bp, Artificial Sequence
  ENSG00000173875_11 (sequence is synthesized)
aaaatgtgggaaaactttcaattatcctctagatttgaaaatccacaagagaaatcacactggagaaaaaccctatgagtgtaaggaatgtgcaaaaaccttcatttctcttgagaactt

SEQ ID NO: 596314 - DNA, 120 bp, Artificial Sequence
  ENSG00000173875_12 (sequence is synthesized)
tcgaagacacatgatcacccacactggagacggaccttataaatgtagggactgtgggaaggtgttcatttttcctagtgcgttacgaacacatgaaagaactcacactggagagaaacc

SEQ ID NO: 596315 - DNA, 120 bp, Artificial Sequence
  ENSG00000173875_13 (sequence is synthesized)
ctatgaatgtaaacaatgtggaaaagcctttagttgttctagttacattcggatacataaaagaactcacactggggagaaaccttatgaatgtaaggaatgcgggaaggcctttattta

SEQ ID NO: 596316 - DNA, 120 bp, Artificial Sequence
  ENSG00000173875_14 (sequence is synthesized)
tcccacaagctttcaaggacacatgagaatgcatactggagagaaaccctataaatgtaaagaatgtgggaaggcctttagtcttcacagttcctttcaaagacatacaagaattcacaa

SEQ ID NO: 596317 - DNA, 120 bp, Artificial Sequence
  ENSG00000173875_15 (sequence is synthesized)
ttatgagaaacctcttgaatgtaagcaatgtggaaaagccttcagtgtgtccacatccttaaaaaaacatatgagaatgcacaatcgatagaaactctataaatgtgagaaataggagaa

SEQ ID NO: 596318 - DNA, 120 bp, Artificial Sequence
  ENSG00000173875_16 (sequence is synthesized)
agttttcaattctaacagatgctttcaaagttgtgaaaattcccactgaagagagaaatcctgtcaatgtaagtaatatagaaagcgagatacaagatgattcatgtatagtcaggtacc

SEQ ID NO: 596319 - DNA, 120 bp, Artificial Sequence
  ENSG00000173875_17 (sequence is synthesized)
acataatcatgtttcagtcagcaatggaccatataggttggtagccccataagattatataacacctaaaacatttctatcaaccgcaatttagtagcagtagtaacaccatagtgcagc

SEQ ID NO: 596320 - DNA, 120 bp, Artificial Sequence
  ENSG00000173875_18 (sequence is synthesized)
tagtaacaccatagtgcagcacattatttaagtgtttatggtgctggtgtaaacgtgctgcactttcagttgtataaaagtacaagacagcggccggggacggtggctcacgcctgtaat

SEQ ID NO: 596321 - DNA, 64 bp, Artificial Sequence
  ENSG00000173875_19 (sequence is synthesized)
gcaggagaatggcataaacccaggaggccgagctgacagtgagctgagatccgctgggcatggt

SEQ ID NO: 596322 - DNA, 120 bp, Artificial Sequence
  ENSG00000173875_20 (sequence is synthesized)
acaacacagctgggcatggtcacacctgtgatcccaacactgggagactaaggcagtaggattgcttgatgccaggactactctggtcaacctagtgagaccctgtctctacaaaaaata

SEQ ID NO: 596323 - DNA, 77 bp, Artificial Sequence
  ENSG00000173875_21 (sequence is synthesized)
caggctacagtgaaccaagatcacgtgatggcagtccagcatgggtgacagtgagactgtatcaaaaaaaaaaaaaa

SEQ ID NO: 596324 - DNA, 84 bp, Artificial Sequence
  ENSG00000173875_22 (sequence is synthesized)
ttcaaggctacagtgaaccaagatcacgtgatggcagtccagcatgggtgacagtgagactgtatcaaaaaaaaaaaaaaaaaa

SEQ ID NO: 596325 - DNA, 86 bp, Artificial Sequence
  ENSG00000173875_23 (sequence is synthesized)
tggtcaacatgatgaaaccctgtctccattagaaatacgaaaattagctgggcgttctgagcaggagaatcgcttgaacccgggag

SEQ ID NO: 596326 - DNA, 63 bp, Artificial Sequence
  ENSG00000173875_24 (sequence is synthesized)
agatcttacagcacagatgtgcaatatatacttgataataaatggctaagttactggtttata

SEQ ID NO: 596327 - DNA, 120 bp, Artificial Sequence
  ENSG00000173875_25 (sequence is synthesized)
taaggagatattcccggaaaaactttgttatgataggcgatgacggctccatgtgcaggactgcccctgaacgtattctggcgggacaaaacatggaggcagaagacaatgatattgatg

SEQ ID NO: 596328 - DNA, 120 bp, Artificial Sequence
  ENSG00000173875_26 (sequence is synthesized)
atcctcaccccgtgtagtcctacactaatgtgtgtttgtgtcttagttagtctttaacaaaaatagtttaaaaaaatttaatagaaaaagcttatagaatatggacataaaatatttttg

SEQ ID NO: 596329 - DNA, 120 bp, Artificial Sequence
  ENSG00000173875_27 (sequence is synthesized)
tttgtacagctgtacaatgtgttttaagctaaattattacaaagtttttaaaaataagtttataaagaaaataatgtacagtaagttaaggtttattcattattgaggaaaaaatgtttt

SEQ ID NO: 596330 - DNA, 120 bp, Artificial Sequence
  ENSG00000173875_28 (sequence is synthesized)
aatgtagtgtagtccaagtgtacagtgtttataaattctccattagtgtacagtaacatcctgggccttcgcattcactcaccactcaactgactcacccagagcaacttctagtcctgc

SEQ ID NO: 596331 - DNA, 120 bp, Artificial Sequence
  ENSG00000173875_29 (sequence is synthesized)
aagctatgttcatggagtgtcctatgcaggtgcatccttttttatcttttatactgcatgtttactctgtgtattttctgtgtttagactcataaatacttaacattttgttacaatttc

SEQ ID NO: 596332 - DNA, 120 bp, Artificial Sequence
  ENSG00000173875_30 (sequence is synthesized)
ctacagtgttcagtacaacaacatgttgtatggtttatagcctagtagcaatagactgtaccatatagtctagatgtgttgtagctataccatctagatttgtgtaagttcactttgtga

SEQ ID NO: 596333 - DNA, 120 bp, Artificial Sequence
  ENSG00000173875_31 (sequence is synthesized)
tgtttgtaccatgaggaaatcacctacaacacgtttctcagaacatatacccatgattaagcaatctctgcctgtaaaatgctccagaaaattcacaccatgatataaattcatcacaca

SEQ ID NO: 596334 - DNA, 120 bp, Artificial Sequence
  ENSG00000173875_32 (sequence is synthesized)
gcctgggcaacagagcaagactccatcccacacaccaaaaaaaagttaaaaattttttatcactggctcattcttcaagtacatctctggactatgaattgtaacttaactacttttcca

SEQ ID NO: 596335 - DNA, 120 bp, Artificial Sequence
  ENSG00000173875_33 (sequence is synthesized)
tatgaattgtaacttaactacttttccaagaagtcttggaagtgagataattctgtaagtactctttaagcagtggtcaaaagtttaaaaggttgtgttttctcattaaatcagttagta

SEQ ID NO: 596336 - DNA, 120 bp, Artificial Sequence
  ENSG00000173875_34 (sequence is synthesized)
aagtttaaaaggttgtgttttctcattaaatcagttagtaaaacttttctctttctcttgatgtcttgattcatgagtaaactgaagtgtattttttttttttcgagacggagtcttgct

SEQ ID NO: 596337 - DNA, 67 bp, Artificial Sequence
  ENSG00000173875_35 (sequence is synthesized)
cctcgtgattcggcctgaagtgtattttttttttcttttaaagaccagtgttagtagaagtgtattt

SEQ ID NO: 596338 - DNA, 120 bp, Artificial Sequence
  ENSG00000173875_36 (sequence is synthesized)
tttttttcttttaaagaccagtgttagtagaagtgtatttttaatatacaattagttttaatttgtgtatagtttttcagttgttctctgaataaagagattgttgaatactgacacact

SEQ ID NO: 596339 - DNA, 120 bp, Artificial Sequence
  ENSG00000173875_37 (sequence is synthesized)
gtaactaggatttttcctactggcctcatgtggaaggtggtgcatatattacccattatatatttatttcaccttttccgaaaaactgctttttaaatttcttggccagacacggtggct

SEQ ID NO: 596340 - DNA, 71 bp, Artificial Sequence
  ENSG00000173875_38 (sequence is synthesized)
aaaaactgctttttaaatttcttggccagacacggtggctcactcctttgtaattccagcactttgggaaa

SEQ ID NO: 596341 - DNA, 73 bp, Artificial Sequence
  ENSG00000173875_39 (sequence is synthesized)
accactgcactccagcctggacaacagaacgagactccatatcaaaaaaattaaattaaaatataataaattt

SEQ ID NO: 596342 - DNA, 120 bp, Artificial Sequence
  ENSG00000173875_40 (sequence is synthesized)
tgaatttcagctagaagagccttattccattttcctttttattaaacatctggcataagttggtaagtatgtgaagtttatcatatattcttatgcgaattattattttcgccttttttt

SEQ ID NO: 596343 - DNA, 120 bp, Artificial Sequence
  ENSG00000173875_41 (sequence is synthesized)
tataattctgtctgggatttgaatagtagagtttgaattcaggaaggacacctgtgataggacaataaaatctagagctggacgtggccctcctgctacctgtcgacacaggtaaatttc

SEQ ID NO: 596344 - DNA, 120 bp, Artificial Sequence
  ENSG00000173875_42 (sequence is synthesized)
ctagaatctgttccctttatagatccatgttgaaattcacttatagcctcacttgcatgagatttgccaggcagaagtgaagaagacattagtcaggtattggaaccccaccatacaggg

SEQ ID NO: 596345 - DNA, 120 bp, Artificial Sequence
  ENSG00000173875_43 (sequence is synthesized)
agacagcctgcttcctgctcattttcctggttattttctctgccaatcaaaagtatcctgaaaacaccctgagctgcttgacttccattctcaaagagatgtgttggtttccacagttgt

SEQ ID NO: 596346 - DNA, 120 bp, Artificial Sequence
  ENSG00000173875_44 (sequence is synthesized)
ctccacaagctccgcatcaaagatccacgtacagtttggattttccttctagccttcatgtgtggcccaagcatctatttcagactgtcatggttggcattgttctctgaggttctgtct

SEQ ID NO: 596347 - DNA, 120 bp, Artificial Sequence
  ENSG00000173875_45 (sequence is synthesized)
tccctttgtgtttctatgagctttaatttgtatggttcttgttctgttaatgccactagggactatgtattcctgattccaccatgacagctacagtaaaacagtaaaaaaaaaaaaaaa

SEQ ID NO: 596348 - DNA, 120 bp, Artificial Sequence
  ENSG00000173875_46 (sequence is synthesized)
gcgatcctccaccctcagcatcccaaagtgctaggattccaggcatgagctactattaccggcccaacattctcattttctgaaagcaatagtgggttttcttgttaaatggcttaaaat

SEQ ID NO: 596349 - DNA, 120 bp, Artificial Sequence
  ENSG00000173889_0 (sequence is synthesized)
agtgatggaggagagaagatggcggaagcggaatttaaggaccatagtacagctatggatactgaaccaaacccgggaacatcttctgtgtcaacaacaaccagcagtaccaccaccacc

SEQ ID NO: 596350 - DNA, 120 bp, Artificial Sequence
  ENSG00000173889_1 (sequence is synthesized)
accatcaccacttcctcctctcgaatgcagcagccacagatctctgtctacagtggttcagaccgacatgctgtacaggtaattcaacaggcattgcatcggccccccagctcagctgct

SEQ ID NO: 596351 - DNA, 120 bp, Artificial Sequence
  ENSG00000173889_2 (sequence is synthesized)
cagtaccttcagcaaatgtatgcagcccaacaacagcacttgatgctgcatactgcagctcttcagcagcagcatttaagcagctcccagcttcagagccttgctgctgttcaggcaagt

SEQ ID NO: 596352 - DNA, 120 bp, Artificial Sequence
  ENSG00000173889_3 (sequence is synthesized)
ttgtccagtggaagaccatctacatctcccacaggaagtgtcacacagcagtcaagtatgtcccaaacgtctatcaacctctccacttctcctacacctgcacagttaataagccgttcc

SEQ ID NO: 596353 - DNA, 120 bp, Artificial Sequence
  ENSG00000173889_4 (sequence is synthesized)
caggcttccagttctaccagcggcagtattacccaacagactatgttactagggagtacttcccctaccctaacggcaagccaagctcaaatgtatctccgagctcaaatgctgattttc

SEQ ID NO: 596354 - DNA, 120 bp, Artificial Sequence
  ENSG00000173889_5 (sequence is synthesized)
acacccgctaccactgtggctgctgtacagtctgacattcctgttgtctcgtcgtcatcgtcatcttcctgtcagtctgcagctactcaggttcagaatttaacattacgcagccagaag

SEQ ID NO: 596355 - DNA, 120 bp, Artificial Sequence
  ENSG00000173889_6 (sequence is synthesized)
ttgggtgtattatctagctcacagaatggtccaccaaaaagcactagtcaaactcagtcattgacaatttgtcataacaaaacaacagtgaccagttctaaaatcagccaacgagatcct

SEQ ID NO: 596356 - DNA, 120 bp, Artificial Sequence
  ENSG00000173889_7 (sequence is synthesized)
tctccagaaagtaataagaaaggagagagcccaagcctggaatcacgaagcacagctgtcacccggacatcaagtattcaccagttaatagcaccagcttcatattctccaattcagcct

SEQ ID NO: 596357 - DNA, 120 bp, Artificial Sequence
  ENSG00000173889_8 (sequence is synthesized)
cattctctaataaaacatcagcagattcctcttcattcaccaccttccaaagtttcccatcatcagctgatattacaacagcagcaacagcaaattcagccaatcacacttcagaattca

SEQ ID NO: 596358 - DNA, 120 bp, Artificial Sequence
  ENSG00000173889_9 (sequence is synthesized)
actcaagacccacccccatcccagcactgtataccactccagaaccatggccttcctccagctcccagtaatgcccagtcacagcattgttcaccgattcagagtcatccctctccttta

SEQ ID NO: 596359 - DNA, 120 bp, Artificial Sequence
  ENSG00000173889_10 (sequence is synthesized)
acagtgtctcctaatcagtcacagtcagcacagcagtctgtagtggtgtctcctccaccacctcattcaccaagtcagtctcctactataattattcatccacaagcacttattcagcca

SEQ ID NO: 596360 - DNA, 120 bp, Artificial Sequence
  ENSG00000173889_11 (sequence is synthesized)
caccctcttgtgtcatcagctctccagccagggccaaatttgcagcagtccactgctaatcaggtgcaagctacagcacagttgaatcttccatcccatcttccacttccagcttcccct

SEQ ID NO: 596361 - DNA, 120 bp, Artificial Sequence
  ENSG00000173889_12 (sequence is synthesized)
gttgtacacattggcccagttcagcagtctgccttggtatccccaggccagcagattgtctctccatcacaccagcaatattcatccctgcagtcctctccaatcccaattgcaagtcct

SEQ ID NO: 596362 - DNA, 120 bp, Artificial Sequence
  ENSG00000173889_13 (sequence is synthesized)
ccacagatgtcgacatctcctccagctcagattccaccactgcccttgcagtctatgcagtctttacaagtgcagcctgaaattctgtcccagggccaggttttggtgcagaatgctttg

SEQ ID NO: 596363 - DNA, 120 bp, Artificial Sequence
  ENSG00000173889_14 (sequence is synthesized)
gtgtcagaagaggaacttccagctgcagaagctttggtccagttgccatttcagactcttcctcctccacagactgttgcggtaaacctacaagtgcaaccaccagcacctgttgatcca

SEQ ID NO: 596364 - DNA, 120 bp, Artificial Sequence
  ENSG00000173889_15 (sequence is synthesized)
ccagtggtttatcaggtagaagatgtgtgtgaagaagaaatgccagaagagtcagatgaatgtgtccggatggatagaaccccaccaccacccactttgtctccagcagctataacagtg

SEQ ID NO: 596365 - DNA, 120 bp, Artificial Sequence
  ENSG00000173889_16 (sequence is synthesized)
gggagaggagaagatttgacttctgaacatcctttgttagagcaagtggaattacctgctgtggcatcagtcagtgcttcagtaattaaatctccatcagatccctcacatgtttctgtt

SEQ ID NO: 596366 - DNA, 120 bp, Artificial Sequence
  ENSG00000173889_17 (sequence is synthesized)
ccaccacctccattgttacttccagctgccaccacaaggagtaacagtacatctatgcacagtagcattcccagtatagagaacaaacctccacaggctattgttaaaccacagatccta

SEQ ID NO: 596367 - DNA, 120 bp, Artificial Sequence
  ENSG00000173889_18 (sequence is synthesized)
acccatgttattgaaggctttgtgattcaggagggattggagccatttcctgtgagtcgttcctctttgctaatagaacagcctgtgaaaaaacggcctcttttggataatcaggtgata

SEQ ID NO: 596368 - DNA, 120 bp, Artificial Sequence
  ENSG00000173889_19 (sequence is synthesized)
aattcagtgtgtgttcagccagagctacagaataatacaaaacatgcggataattcatctgacacagagatggaagacatgattgctgaagagacattagaagaaatggacagtgagttg

SEQ ID NO: 596369 - DNA, 120 bp, Artificial Sequence
  ENSG00000173889_20 (sequence is synthesized)
ctcaagtgtgaattctgtgggaaaatgggatatgctaatgaatttttgcggtcaaaacgattctgcactatgtcatgtgccaaaaggtacaatgttagctgttctaaaaaatttgcactt

SEQ ID NO: 596370 - DNA, 120 bp, Artificial Sequence
  ENSG00000173889_21 (sequence is synthesized)
agtcgttggaatcgtaagcctgataatcaaagtcttgggcatcgtggccgtcgtccaagtggccctgatggggcagcgagagaacatatccttaggcagcttccaattacttatccatct

SEQ ID NO: 596371 - DNA, 120 bp, Artificial Sequence
  ENSG00000173889_22 (sequence is synthesized)
gcagaagaagacttggcttctcatgaagattctgtgccatctgctatgacaactcgtctgcgcaggcagagcgagcgggaaagagaacgtgagcttcgggatgtgagaattcggaaaatg

SEQ ID NO: 596372 - DNA, 120 bp, Artificial Sequence
  ENSG00000173889_23 (sequence is synthesized)
cctgagaacagtgacttgctaccagttgcacaaacagagccatctatatggacagttgatgatgtctgggccttcatccattctttgcctggctgccaggatatcgcagatgaattcaga

SEQ ID NO: 596373 - DNA, 120 bp, Artificial Sequence
  ENSG00000173889_24 (sequence is synthesized)
gcacaggagattgatggacaggcccttctcttgctgaaagaagaccatctcatgagtgcaatgaatatcaagctaggcccagccctgaagatctgtgcacgcatcaactctctgaaggaa

SEQ ID NO: 596374 - DNA, 120 bp, Artificial Sequence
  ENSG00000173889_25 (sequence is synthesized)
tcttaacaggaacatgaagccttgataaaacagcagttttacttttctcacaaaaacttgtaaggtaaaggcctaacttggtctagaatatgacacttattgtggtggatagccaagcac

SEQ ID NO: 596375 - DNA, 120 bp, Artificial Sequence
  ENSG00000173889_26 (sequence is synthesized)
attgggatctccacatcaaatactgacatttcttctacaggtataataattcatcatgcattttcataattaataaacattggtaaaattaattttacaggttacatgaaacattgaaag

SEQ ID NO: 596376 - DNA, 120 bp, Artificial Sequence
  ENSG00000173889_27 (sequence is synthesized)
acttgttacagagggccatgatatttttcaaagaaatgtgttatactagataatttttttaaaggtgatgtttatcattaatataaagaatccttttaaaagtaatttaatgatttacat

SEQ ID NO: 596377 - DNA, 120 bp, Artificial Sequence
  ENSG00000173889_28 (sequence is synthesized)
ttctcctcttttgattcaattttcttatacattttttctaccctattagttttctaaaggttgtcatgagaggtatattatggaataatttagtagtccagtgacagaatcgtatgaaat

SEQ ID NO: 596378 - DNA, 120 bp, Artificial Sequence
  ENSG00000173889_29 (sequence is synthesized)
cagtgtacattttaaaaaacatgtcttttagacatatgctttatctataaaaaaggaattgtgttctagtatgaacaatactgatctggaagtgagaagagttagtttctattccaaact

SEQ ID NO: 596379 - DNA, 120 bp, Artificial Sequence
  ENSG00000173889_30 (sequence is synthesized)
tgaccaagaatttggtttgactgagaacgttttcctctcagtttttgtacatttatttagagcagtggttctcagtggaggtcagttttgatcgccaggggacatctggcaatgttgaga

SEQ ID NO: 596380 - DNA, 120 bp, Artificial Sequence
  ENSG00000173889_31 (sequence is synthesized)
cattttggttgtcacagcttgggggtgggttcaggggagggttgctactggtgtctagtagttagaagccagagatgtttctaaacatcttataatgcacaggacagcacccctccactg

SEQ ID NO: 596381 - DNA, 120 bp, Artificial Sequence
  ENSG00000173889_32 (sequence is synthesized)
taaagaattattggttcaaaaatatcggtactgccaaggttgagaaactctgatatagaaggagtgataaatattgttttcacccaaaggaatacttttaaaggatgaagcttactaaac

SEQ ID NO: 596382 - DNA, 120 bp, Artificial Sequence
  ENSG00000173889_33 (sequence is synthesized)
atgatggaagtattattcagataacattaatattctgctgaataattttttctagtttaatcatactagaaaaagaaaaaaaatctacaaattgtcctataaaataaggacaaacatgca

SEQ ID NO: 596383 - DNA, 120 bp, Artificial Sequence
  ENSG00000173889_34 (sequence is synthesized)
tgcaaataatttaactctcagaaagtactaattcattctgattatctttcatacctctgtgctcctctgcactgacgaagacataatatgattatacctatgaactagtgcacagccttt

SEQ ID NO: 596384 - DNA, 120 bp, Artificial Sequence
  ENSG00000173889_35 (sequence is synthesized)
tctggcaagaaaatagtttgtagcagatacgtggttgctctttggatttttttctattgttgaacatgctgggactagctagaatgcacattcctacttcctttaccaaacgtttgcatg

SEQ ID NO: 596385 - DNA, 120 bp, Artificial Sequence
  ENSG00000173889_36 (sequence is synthesized)
cttcctgcaaagcacttaccaagtgatttctcttgaaccatcggatataattttgtatgtacatgtttgaggaaaaaaatgtaaagcaaaaccttttactgaacagtgttctatagaatt

SEQ ID NO: 596386 - DNA, 120 bp, Artificial Sequence
  ENSG00000173889_37 (sequence is synthesized)
atgacactaaaacaaaattgtttgtggaagccctgaaagctttatagtcctggacatcaaaaattttatttgagatgatgaatgttttgttttcatcttttcttatattaccacaattga

SEQ ID NO: 596387 - DNA, 120 bp, Artificial Sequence
  ENSG00000173889_38 (sequence is synthesized)
gatattttagtaattgaaggaacatacacagatatttggcagaagtcgagtaaggaggggaaaaaaagagtccgtgagtttcagtcattttcactgctcttttcaaaaagattgtgttga

SEQ ID NO: 596388 - DNA, 120 bp, Artificial Sequence
  ENSG00000173889_39 (sequence is synthesized)
gctggtagaagactaaagatgtcactgaagacatcacagatactatatttatcttttggctttgtgtacattagagaatgttgattatttttatacaaaaatacagcgggtaattttttt

SEQ ID NO: 596389 - DNA, 120 bp, Artificial Sequence
  ENSG00000173889_40 (sequence is synthesized)
aatctttagatgcctcttgtttgaatgtatgctttgtggaattctttgtgtagtaatgttttaaaaaaagatgtttactgatagttacatgtaggattagaatatgtaatataatataag

SEQ ID NO: 596390 - DNA, 120 bp, Artificial Sequence
  ENSG00000173889_41 (sequence is synthesized)
gctcatgttccagacctacgatagcttgtagtctatgttacgtatttctttatatcacatttttaatcattggattaaagtatcaaggaaagctaggtactctataatgagttttcattt

SEQ ID NO: 596391 - DNA, 120 bp, Artificial Sequence
  ENSG00000173889_42 (sequence is synthesized)
attagcagttaatcatcatgacagaattgtcatatgcttgacttttccctcttcttggaatttcagaacacaaatacaggctaagcattagtaagagatggcccacagtatgagagagag

SEQ ID NO: 596392 - DNA, 120 bp, Artificial Sequence
  ENSG00000173889_43 (sequence is synthesized)
aggtgcaacggaaaatctcgcctggaattaaaacttttcatagattatccacggttaatacaaaatttattatatggggatagactgctccagcaataatgattacatcctataactgta

SEQ ID NO: 596393 - DNA, 120 bp, Artificial Sequence
  ENSG00000173889_44 (sequence is synthesized)
ttacctatggcctttaaggtatcaattttgaactgtgttgtaggctctccttttatttgttctctttcctaatagcagccattctgtacttattgaaagcccctgtgcctactgctgtct

SEQ ID NO: 596394 - DNA, 120 bp, Artificial Sequence
  ENSG00000173889_45 (sequence is synthesized)
taagtattcaggaggggcttacaagagggttttctattggagaataccgtataatcttaaatctagtccagatctctgttgtccccactcaaaacatacacaaaatatgcacttgctttt

SEQ ID NO: 596395 - DNA, 120 bp, Artificial Sequence
  ENSG00000173889_46 (sequence is synthesized)
ttcaagtgagtttttatttaaaaatggcttgtttgctatcacattggtgcagctgtttctttcaagatgagttaatcatcttaatttcaaagcttcagctatatataatggatatataga

SEQ ID NO: 596396 - DNA, 120 bp, Artificial Sequence
  ENSG00000173889_47 (sequence is synthesized)
caacactgagcatccacctctctcctgagctttaaagcagagtttcagtatgatataggtggggagagtaaattgttttcatatcctttcatactactactaatagttttaggattttga

SEQ ID NO: 596397 - DNA, 120 bp, Artificial Sequence
  ENSG00000173889_48 (sequence is synthesized)
ctggggagagataatgacaaacagaaagggaacatggaggttcttcctacttttgctacctaagtttgcattttctgacttccttgcagtgttgcactctttgtcccattgggataaaaa

SEQ ID NO: 596398 - DNA, 120 bp, Artificial Sequence
  ENSG00000173889_49 (sequence is synthesized)
gcataagtttgaaattttgctttaagccttgtgttcctggggaagttaaacaactaagagagctgatttgtaaaaattattttttatatgacattaatattcatcaagccttgtgtaggc

SEQ ID NO: 596399 - DNA, 120 bp, Artificial Sequence
  ENSG00000173889_50 (sequence is synthesized)
atgtgtaagacacagctatgcagctttgagtagtcaatatagtatgagatagagtgttgtcccaaatcctcctgtcactttttaagtagcatattatttccctgatggtcctgttacttt

SEQ ID NO: 596400 - DNA, 120 bp, Artificial Sequence
  ENSG00000173889_51 (sequence is synthesized)
gctgttgaatgctctaaacagaactttttaaaaggtgtgttttaagagcagtcacctaggagtagacaaggtggaatgggaggagagaaatggtaatgcaaaagcttgagcatgggaaga

SEQ ID NO: 596401 - DNA, 120 bp, Artificial Sequence
  ENSG00000173889_52 (sequence is synthesized)
cacatttctgcacttttgaagtgaaattcatgttttacttagaagaaataattttctttcattagggatcccagttgatttttgtttcctggtgtatcaaaatacttagaactatgaaac

SEQ ID NO: 596402 - DNA, 120 bp, Artificial Sequence
  ENSG00000173889_53 (sequence is synthesized)
aagtattattgtgatcatgcctttgaataatttttgacgtagcttatcttcatgtatcaagtataaaattataatgagacatctattcacaaatacaagtcttagattgaattgaaatgt

SEQ ID NO: 596403 - DNA, 120 bp, Artificial Sequence
  ENSG00000173889_54 (sequence is synthesized)
gttatagtgccctgtctcccactgacttgttcagttaaatgtcttaaagtacattatgtacatcttcaggcttttggtaccacaatggcacaagtatggtagggaggcaatatagtctta

SEQ ID NO: 596404 - DNA, 120 bp, Artificial Sequence
  ENSG00000173889_55 (sequence is synthesized)
ggctatatgcctatattaagtgtgtataaacaatttttgaaagaatacactattatagatgtatgtgagtgatgctgacctgacagccatatccagtggatgaaactgactggacacact

SEQ ID NO: 596405 - DNA, 120 bp, Artificial Sequence
  ENSG00000173889_56 (sequence is synthesized)
gttaaaatgttttaaagatgtattttcagccagaacagcctggttatagtttgtggttttcaccttggtggattgcaggaacacatgcagcctactggcattgagcattagctaatggca

SEQ ID NO: 596406 - DNA, 120 bp, Artificial Sequence
  ENSG00000173889_57 (sequence is synthesized)
tgaaagggcctcatctcactacctctctaaggcctctagctccaagaaaaccatgaaaacttctttcttggagagatctttgtctcagaatccttagagaggatttcgtatgggggctaa

SEQ ID NO: 596407 - DNA, 120 bp, Artificial Sequence
  ENSG00000173889_58 (sequence is synthesized)
ctttaggaagggaggcagctggggcaggactttctgatacctgacagtcatgttccagagcaacctttgggcagtggaaactggcgcatctatgcaaaatgattgctcaatctctatctt

SEQ ID NO: 596408 - DNA, 120 bp, Artificial Sequence
  ENSG00000173889_59 (sequence is synthesized)
gtgtactacatatgtaactagctgggccctaaggaaggttttctagggggaaggatagggaagtagaggaggagacaagtaggaggaacaaagcattctagacccaagaggatagaagat

SEQ ID NO: 596409 - DNA, 120 bp, Artificial Sequence
  ENSG00000173889_60 (sequence is synthesized)
atttaggatagatatggctttcatccatagttcaaaataatgcgttttgttagatgccagttatagcagtaaataggttatagtttttatatgtcaagatttacctgtaatcagactcat

SEQ ID NO: 596410 - DNA, 120 bp, Artificial Sequence
  ENSG00000173889_61 (sequence is synthesized)
tctttcactctctatacccactgtctccatgcttgggagcatggatattaatagttccagtgatgtagaagttagtgatttttgatttctgaaaaaggtgagaaccttttattacagttg

SEQ ID NO: 596411 - DNA, 120 bp, Artificial Sequence
  ENSG00000173889_62 (sequence is synthesized)
gagaatatttgtcaaaaattcaaaggttgttgtaattgagttgccagaattacagagtttccattttcagatatcacagttgaatcacctctgtagattgttataaagagaggcatttta

SEQ ID NO: 596412 - DNA, 120 bp, Artificial Sequence
  ENSG00000173889_63 (sequence is synthesized)
agatagtattttatttgctaggttgtgtctcagtctaagaattgggaaaagaagagctataggtttctctttcctagtctggatttcagtaaacacaagcctacctctgcttctttggtt

SEQ ID NO: 596413 - DNA, 120 bp, Artificial Sequence
  ENSG00000173889_64 (sequence is synthesized)
cacagcagtgtggatcatgaaatgaactgtttacccacattcatcaatattggtattttacaaatctacttggagcatttaatttcatctcaaagattgtgatccactttagataagcac

SEQ ID NO: 596414 - DNA, 120 bp, Artificial Sequence
  ENSG00000173889_65 (sequence is synthesized)
ttagataagcacaaatacagtattaggaaaagtaaatatgcaatcttactaaaatttcaacttgttaagctgtatatcttaaaagaaattatttggggctgggcatggtggctcacacct

SEQ ID NO: 596415 - DNA, 120 bp, Artificial Sequence
  ENSG00000173889_66 (sequence is synthesized)
catctcaaaaaaacaaaacaaaaaattatttgggaagatacgtcctcttttattagaagttcataaaatgtatcatatagttttgttcacagtagttatataagctttcttcaaataaat

SEQ ID NO: 596416 - DNA, 120 bp, Artificial Sequence
  ENSG00000173889_67 (sequence is synthesized)
ttaaaattagattaccttctttggaaaaagaatttcctaaatttttaagaattttcaaagttttacatattagtttttagaacctaatccgttttaaaattgtactatgagaaagctttt

SEQ ID NO: 596417 - DNA, 120 bp, Artificial Sequence
  ENSG00000173889_68 (sequence is synthesized)
ttttgaaagttgtaaagcattaatacaaataatacaaatataattattaccatcacattccagagaatatggctttttctaaactttcaatttagaaaacatacattaagggagaatctc

SEQ ID NO: 596418 - DNA, 120 bp, Artificial Sequence
  ENSG00000173889_69 (sequence is synthesized)
tgccctccttttcagctctgaagatcagcttttctactcagacacatgcacacaccccttccaagtgtcatgtttatgggaacatttgggaaatgttttccagatgttttattttttccc

SEQ ID NO: 596419 - DNA, 120 bp, Artificial Sequence
  ENSG00000173889_70 (sequence is synthesized)
ttttatagtttgttgacatttaattttacttaaagatgacaattttaatcggaaatgttagaggtacaacatagtgaggttctagctagctttatacttttgaaaaatatttttgtttct

SEQ ID NO: 596420 - DNA, 120 bp, Artificial Sequence
  ENSG00000173889_71 (sequence is synthesized)
actgctttttacaagtactagtcctctcagtgatactggtggtgttcagtatgaatccatagaaagaaaacaaaatttgttgtttaaaaaaagcagagtaatgaatgaatttcagttttg

SEQ ID NO: 596421 - DNA, 120 bp, Artificial Sequence
  ENSG00000173889_72 (sequence is synthesized)
aaaacaacataatttgaaaacactgttatactaacatggcaaggtgttaattaaatataagagtaaggtagtaagttcttttagagcacctgtttaaatttactccagtaatcatcttaa

SEQ ID NO: 596422 - DNA, 120 bp, Artificial Sequence
  ENSG00000173889_73 (sequence is synthesized)
ggattgatagtcaccatcacttattggcttaaaagttatatttcatggaatattatcagtgttaaatccaagctttgtggagctttaagtgatggtggtgaaaaagttggtgtttatgag

SEQ ID NO: 596423 - DNA, 120 bp, Artificial Sequence
  ENSG00000173889_74 (sequence is synthesized)
agagtggtggggtgtctagtcattagtgaagttaaacatcaacctgttttagaaagaattttttagtcttgcctaaagtaaaccagaagtgtctagtgtttaaatctttatttagaatgc

SEQ ID NO: 596424 - DNA, 120 bp, Artificial Sequence
  ENSG00000173889_75 (sequence is synthesized)
ttctcttaaaagtattttttgttttgggtagtattaaataatcagtaaataatctatttcagtagtaaataatgaattaagatgatgatgaatgaggattaacacactggtctggagact

SEQ ID NO: 596425 - DNA, 120 bp, Artificial Sequence
  ENSG00000173889_76 (sequence is synthesized)
ggggttttatttcagtgggttagctgtgtgtgacatgttgggcaattactcagctgttttaacagcttccagatatgcagtatggtgcctgtactactcaaaagttgattttggtttaat

SEQ ID NO: 596426 - DNA, 120 bp, Artificial Sequence
  ENSG00000173889_77 (sequence is synthesized)
tcatctttaaggtacctcccagctctaaaactatgattctaggctgtgtaatggggttattcctactttattctctttccttttttaagggttcattttatacttaataagcatccattt

SEQ ID NO: 596427 - DNA, 120 bp, Artificial Sequence
  ENSG00000173889_78 (sequence is synthesized)
cttgggtcacctacagtctttgttctcctaaggattaaaatagaaaattcatacataacaagcaaatgatgacattttcctaaatgctccttattggttaaccactgaatatatgaacac

SEQ ID NO: 596428 - DNA, 120 bp, Artificial Sequence
  ENSG00000173889_79 (sequence is synthesized)
atatgaatattgtcattcatgtacttaaattcatttagcaaactatttgaacacttacatgtgcagtgtttggtgaacatgacatgaggaactagtagtaagtaaaatcttccccccaaa

SEQ ID NO: 596429 - DNA, 120 bp, Artificial Sequence
  ENSG00000173889_80 (sequence is synthesized)
attcattgtggcttaaataaatatgaacataatcattactacttaatatactgagagggaatcttaataaacttggaactgggagggaatatttgtatacattgggtaaagggttaggct

SEQ ID NO: 596430 - DNA, 120 bp, Artificial Sequence
  ENSG00000173889_81 (sequence is synthesized)
agatgacatctaaggggtctgagtgaatcatatcataatttttataacacatttcacatactaaacatcagttggccccatacctgattaagttacaaaatttaggagacttaacattaa

SEQ ID NO: 596431 - DNA, 120 bp, Artificial Sequence
  ENSG00000173889_82 (sequence is synthesized)
ggacttacaggttgagacagcccgtatttcacaacattattttgacacttgactctattccagagttgttgctatacaaggcatgtggcagaacaaaaaaaaagctggtgttgatataag

SEQ ID NO: 596432 - DNA, 73 bp, Artificial Sequence
  ENSG00000173889_83 (sequence is synthesized)
gcatgtggcagaacaaaaaaaaagctggtgttgatataagagctttttacccagtattgacagtgagcagttc

SEQ ID NO: 596433 - DNA, 66 bp, Artificial Sequence
  ENSG00000173889_84 (sequence is synthesized)
aacctccacctcccgggttgaagcgattgtcttgcctcagccttccaagtagctggaattacaggt

SEQ ID NO: 596434 - DNA, 120 bp, Artificial Sequence
  ENSG00000173889_85 (sequence is synthesized)
aactttctaaaactgaaaaatctcaaaggagatcattggaactgacttgttcatttattttttgtttttaaattaagaaagattacacaaaataagtgttactgtactttaagctattac

SEQ ID NO: 596435 - DNA, 120 bp, Artificial Sequence
  ENSG00000173889_86 (sequence is synthesized)
aaatatccaacttttaaagatatgtaagaatcagtaatattctagaaagcacatatatagtaaaagggcatcctttaaatgtagaacgggtaaacatgaaacagttccatgcttgaattg

SEQ ID NO: 596436 - DNA, 120 bp, Artificial Sequence
  ENSG00000173889_87 (sequence is synthesized)
ttaagtatctagggggtaaacattgaatgggagaatcatttattgggttaaggtcccttccttgtcattctgggatctgtgaatcacattgtaattcctgttgacaaagctttacttgtt

SEQ ID NO: 596437 - DNA, 120 bp, Artificial Sequence
  ENSG00000173889_88 (sequence is synthesized)
aacatcagttgatactgacattctccataaagatatagaatgaaaatatctattaaaaatagtttatcattgttttagcttttttgttttgtttgttttgagacagagtctcactgtcac

SEQ ID NO: 596438 - DNA, 79 bp, Artificial Sequence
  ENSG00000173889_89 (sequence is synthesized)
caatgcaacctccacctcccaggttcaatagattcaccactatgcctggccagttttttgtatttttagtagagatggg

SEQ ID NO: 596439 - DNA, 120 bp, Artificial Sequence
  ENSG00000173889_90 (sequence is synthesized)
atgagccactgcgcctagcctgttgcagctttttaaagcaggaaaatatccatataaactgttgggttagaatctatattagaatctttcaaactaattgaaaacaggaagactatcatc

SEQ ID NO: 596440 - DNA, 120 bp, Artificial Sequence
  ENSG00000173889_91 (sequence is synthesized)
taagtagccagataatctgggtttcaaaaagttattccatggtactggtttaaaaaatacttttcaagtgttttaatttttaaagtgtaactaattcttcaaatatgttatgctgttaaa

SEQ ID NO: 596441 - DNA, 120 bp, Artificial Sequence
  ENSG00000173889_92 (sequence is synthesized)
atatgtattccataagtactttttgtatatgtattcttaaattttaaaaagtcaactgaatgcgcaaagatgatataattttggatgtagacatttaaactagattcccagtcctctcct

SEQ ID NO: 596442 - DNA, 120 bp, Artificial Sequence
  ENSG00000173889_93 (sequence is synthesized)
tcaaaagcttggtctttgtttttcctatagggaaaaaagtcaaaataagttccaaaaactatcctcaaagtagtattgtgcttgtagtaaatgaaggttggatggatggatactgacaat

SEQ ID NO: 596443 - DNA, 120 bp, Artificial Sequence
  ENSG00000173889_94 (sequence is synthesized)
ggtggcaggcatttcaagccttttaaattagtactttttgtcgtcttgcttattaaaattttgttaattttagcaaagaccaattgttgtgataaactggtgttttttggatgcttcaag

SEQ ID NO: 596444 - DNA, 120 bp, Artificial Sequence
  ENSG00000173889_95 (sequence is synthesized)
cacacgttaaccaattttttaattccccttttggttcctcccattgttctaaaataggactttcatattattaaaacctcaaaagatgatccacccaggatgaacaaagatcaccaaggg

SEQ ID NO: 596445 - DNA, 120 bp, Artificial Sequence
  ENSG00000173889_96 (sequence is synthesized)
gaaagaaaacattttttatctttacagaaaacatgttaagattatatatagatgtattctttacattggatattgtattagagtcctccttacaagaaatgaaatagtttttagcactct

SEQ ID NO: 596446 - DNA, 120 bp, Artificial Sequence
  ENSG00000173889_97 (sequence is synthesized)
tagcattagagttcctagattggtgttgatagctacagttttaaaatgtataacctgaaaatgaaggttaattttgcattgtaagagcacatttgatctatgtaaaaagtgtccatttgg

SEQ ID NO: 596447 - DNA, 120 bp, Artificial Sequence
  ENSG00000173889_98 (sequence is synthesized)
tgtatttttttaaaaaagagaaagcactttcatattaagtagcatgtgtatgaatttagattttcatatttgttgtgtctgtattcagtgaagtaaattgagcatttaaatgtttgttga

SEQ ID NO: 596448 - DNA, 120 bp, Artificial Sequence
  ENSG00000173889_99 (sequence is synthesized)
tggcaacattaactattaaattaaagcaccttatactctgctgcttaacttgcttgtaattgcacctttgttacctgcacattttcatatagaatattgttgtaacattgcttcatgtgg

SEQ ID NO: 596449 - DNA, 120 bp, Artificial Sequence
  ENSG00000173889_100 (sequence is synthesized)
gtctggatggaagattagtgggcctacaggatcatttatttatattgtttatattacaataatatattgtagatcagttgtaagttcatttctttacaaataaaagcctcttccatttga

SEQ ID NO: 596450 - DNA, 120 bp, Artificial Sequence
  ENSG00000173889_101 (sequence is synthesized)
gctaccaaattttttcagtgtttaaggacttgagagatcaaaatgtttcttgatttgatacaataagaggtatttttaatatttaagaaatgtttaattgtgtgtgtgtgcatgcgggcg

SEQ ID NO: 596451 - DNA, 120 bp, Artificial Sequence
  ENSG00000173889_102 (sequence is synthesized)
tgccttcagctcttgtacatttatgtcatgaaagattctacttttaattaataggtcttcttggtatcaaatagtaattattacattgagaagctaatagagattcagtaacgtaagagt

SEQ ID NO: 596452 - DNA, 120 bp, Artificial Sequence
  ENSG00000173889_103 (sequence is synthesized)
gattattttttaatatcaaattcattgaaaacctttttttcatattttaatatctgtgaaatttggatgcattttataactgatggcatcttggtacttacagtggtccataaaatcatt

SEQ ID NO: 596453 - DNA, 120 bp, Artificial Sequence
  ENSG00000173889_104 (sequence is synthesized)
gcctgtttttgtcaacttagatttggtgaaatagagatgttaaaaaaactttgttgttaaagttataatttgtatcctaggattttctgaattctatattggagttccggatagtctccc

SEQ ID NO: 596454 - DNA, 120 bp, Artificial Sequence
  ENSG00000173889_105 (sequence is synthesized)
agatgattcttaactttggtttttcccatctcaaattctgcaaggttatttgtgttcttgtgttcattttgatattttatgaatataggaatgttaatttggttattctgtatttgagta

SEQ ID NO: 596455 - DNA, 120 bp, Artificial Sequence
  ENSG00000173889_106 (sequence is synthesized)
agcttctttaaggaatatagaaattggttgacatgtattttatttgatgtctttacaagaagctagacaaaagcattgtccctaatatatatttatattcttttttgtccagtggactga

SEQ ID NO: 596456 - DNA, 88 bp, Artificial Sequence
  ENSG00000173889_107 (sequence is synthesized)
cctaatatatatttatattcttttttgtccagtggactgaatatatatctggatctcattgttttttgaggtgaagtctcactctgtc

SEQ ID NO: 596457 - DNA, 89 bp, Artificial Sequence
  ENSG00000173889_108 (sequence is synthesized)
ccacctgcctcacctcccagaatggcttggatcttcagttttctatctaaaattgcaaagtttccaatcatttaactcatactatgctt

SEQ ID NO: 596458 - DNA, 120 bp, Artificial Sequence
  ENSG00000173889_109 (sequence is synthesized)
aaattgcaaagtttccaatcatttaactcatactatgctttaaaattaggttgaaccatttgagatggttgctatttggctatttttgaactctaaaattagcagtttcatacgggtcaa

SEQ ID NO: 596459 - DNA, 120 bp, Artificial Sequence
  ENSG00000173889_110 (sequence is synthesized)
actaaattgaatatcttctttttaggtttagtcctttcagggtgttggtactggaaattaccttttcaggaaagttataccatttgtcccttggtgtctgtggtggattgttgccaggcc

SEQ ID NO: 596460 - DNA, 120 bp, Artificial Sequence
  ENSG00000173889_111 (sequence is synthesized)
ctaccctctctgtcccctagaatacccaaatctgaggatgctcaaggcatagtatttgcatataacctatgtatatcctcccatatactttacatcgtctttacatatatttagtataat

SEQ ID NO: 596461 - DNA, 120 bp, Artificial Sequence
  ENSG00000173889_112 (sequence is synthesized)
ataaacatcatttaaataactgttatactatattgtttagggaataataacaagagaaaaatttgtacatgttcaatgcagatgcagctattttttttaaatgaatattgttttgatcta

SEQ ID NO: 596462 - DNA, 120 bp, Artificial Sequence
  ENSG00000173889_113 (sequence is synthesized)
tagttgaatgacgaagcacagagccttccataggtatggagggctcatcattgtactttgttgttgaatttacttagatttagtgtaccaaagaactgaagtttaaaaggtcacttaatt

SEQ ID NO: 596463 - DNA, 120 bp, Artificial Sequence
  ENSG00000173889_114 (sequence is synthesized)
ggtcgtttaattttctaatttttttggatccgcatttggttgaacattttaatttagatagcaagaggaactgaataacccttgatacaattttgaaataaagtatttacacattctttg

SEQ ID NO: 596464 - DNA, 120 bp, Artificial Sequence
  ENSG00000173889_115 (sequence is synthesized)
gttttccaaaagtaaactgttgttatttatgaagctgttattataatttgttgcatgctgtttaaagtaacaattgcccagaaatagaaatgataaaattcaagaattcagaactaatgt

SEQ ID NO: 596465 - DNA, 120 bp, Artificial Sequence
  ENSG00000173889_116 (sequence is synthesized)
taaacttatgaaaatctgagtcttaaaaaaatctttttgtattatttcttgtatatccatttgcactgatcatgttcagatcttatgtggtttcagctttctgtgtgtattgaaagccta

SEQ ID NO: 596466 - DNA, 120 bp, Artificial Sequence
  ENSG00000173889_117 (sequence is synthesized)
aaatatacaatgcagggatattggccatgaatttactgtgatatacaatagtatgtcatgtccttggtagacatctaagcatttctaactttgtgcaattcacattttagaaattatact

SEQ ID NO: 596467 - DNA, 120 bp, Artificial Sequence
  ENSG00000173889_118 (sequence is synthesized)
ttcagcttacatgagttatttgggttcaatttgcaagtatccattcaagatagggtaatttattttgagaaaggagtaaaagaaagctgattcgctatattgcacatatatattgggaaa

SEQ ID NO: 596468 - DNA, 120 bp, Artificial Sequence
  ENSG00000173889_119 (sequence is synthesized)
ttgtttagcttttaattttggtataattttaaactgcaataataataaaaaaatttctgtatctactctactcagattaatcaattattgcatattgccccattactttatcattcattc

SEQ ID NO: 596469 - DNA, 120 bp, Artificial Sequence
  ENSG00000173889_120 (sequence is synthesized)
ttttccactacatgtatacatatttttttctgagtcatttgtaagttgagatatgttcctttattcctaaatactttgatgtgtatttcctaagaacaaggctattgttttttgaagcca

SEQ ID NO: 596470 - DNA, 120 bp, Artificial Sequence
  ENSG00000173889_121 (sequence is synthesized)
cagaaaaattactaaattcaggaaatataacattgatacagtgcagttcattttcacatttcatcatttgtctcaggtttcccaacctcatcactatggacattatgagccagataattc

SEQ ID NO: 596471 - DNA, 120 bp, Artificial Sequence
  ENSG00000173889_122 (sequence is synthesized)
tttgttgtcaggggctatcgtgtaatttataggatgtttagcagcatccctggctactagatgccggcagcttgtggtctttctccttcctctagtgtgacaactataggtgtttcctgg

SEQ ID NO: 596472 - DNA, 120 bp, Artificial Sequence
  ENSG00000173889_123 (sequence is synthesized)
tggggggcaaactgcctgtagttgagaacctaataatgtcctttctagatattttttcctggtccagaatggtaatactttgatacttcataaaattggctccaatacaatatagtttgt

SEQ ID NO: 596473 - DNA, 120 bp, Artificial Sequence
  ENSG00000173889_124 (sequence is synthesized)
aggttgttaaggaattgaaggttaaggaattgtgctctatttcttcagctaagggtatggtctttgctaactacatgctgtggtcagcatatagctgtggttttttttgttgtttggttt

SEQ ID NO: 596474 - DNA, 120 bp, Artificial Sequence
  ENSG00000173889_125 (sequence is synthesized)
ttttttctggctgttgatctgactttttttttttggcgtgggaatgtcctggagtgtgaacaagattagtttaaaaagttccctatgacttgaagatgttagattaaatgaaaaacttaa

SEQ ID NO: 596475 - DNA, 120 bp, Artificial Sequence
  ENSG00000173889_126 (sequence is synthesized)
ataatgtaacctagctcttaagcattaatactggagtttttgtcattgacatcagatgtctttaatacaatggtaattaaggaaaggagtggtaaatattttgtgggctactgaaggaaa

SEQ ID NO: 596476 - DNA, 120 bp, Artificial Sequence
  ENSG00000173889_127 (sequence is synthesized)
ttatatagacaaattctttattctgtgaaatactggaataacaataggatgtatttgtatagatatgttattttgaatttttttccttcatgttattaaaaggtatctttttaaactgtc

SEQ ID NO: 596477 - DNA, 120 bp, Artificial Sequence
  ENSG00000173889_128 (sequence is synthesized)
gattggagccatttcctgtaagtagcaagcatatttgtgtgtgtgtttgtaatttatataacattattttaaaagttacatattactgttctctaataaaaagcttgtaattttatttca

SEQ ID NO: 596478 - DNA, 120 bp, Artificial Sequence
  ENSG00000173889_129 (sequence is synthesized)
agagaggtggacatatgattgaagtcaggttgaacagtcattccccgggactgtatatttgaagaagttaggagatgctttaagtaagtgtaattaattatgaaagccctgagctgctgg

SEQ ID NO: 596479 - DNA, 120 bp, Artificial Sequence
  ENSG00000173889_130 (sequence is synthesized)
cagccagaacacccactttgtggacacaaaatggaaaccgacaactcagagagattctcctagtagtttactaagtaagttcttgccaatatccagcttgttcttagaatggctcaggtt

SEQ ID NO: 596480 - DNA, 120 bp, Artificial Sequence
  ENSG00000173889_131 (sequence is synthesized)
gagtttgtattacctgctactcaaagaattcttgactgactctccaggagcatttcccaacttgtctttatagatgcttaattaattaattttagctaattaaagagacttgtgtgctca

SEQ ID NO: 596481 - DNA, 80 bp, Artificial Sequence
  ENSG00000173890_0 (sequence is synthesized)
gcatttcctggtctggagccggctgagccacagcagggtcgccgcggggtcccggggccgtgctcccctgcccctcccgg

SEQ ID NO: 596482 - DNA, 120 bp, Artificial Sequence
  ENSG00000173890_1 (sequence is synthesized)
gcgagctgggccctcgcccctccctcgggcggtcacctgggcacgggcgctgcaggtgtcggggcctcaaccttgcggagccgacagccatcgatcctcgggtggcctcgaggtggtggc

SEQ ID NO: 596483 - DNA, 120 bp, Artificial Sequence
  ENSG00000173890_2 (sequence is synthesized)
agggccgccccctgcagtccggagacgaacgcacggaccgggcctccggaggcaggttcggctggaaggaaccgctctcgcttcgtcctacacttgcgcaaatgtctccgagcttactca

SEQ ID NO: 596484 - DNA, 120 bp, Artificial Sequence
  ENSG00000173890_3 (sequence is synthesized)
catagcatattggtatatcaaaatgaaatgcaaggaaccaaaaataacataattgaaggcagtaaaagtgaaattaaataggaagatcatcagtcaaggaagacccactggagaggacag

SEQ ID NO: 596485 - DNA, 120 bp, Artificial Sequence
  ENSG00000173890_4 (sequence is synthesized)
aaaatgaagcagtgttttatcatgtgtatttcagcaggtcttcttgaaatttaactaaaaatatgactgctctctcttcagagaactgctcttttcagtaccagttacgtcaaacaaacc

SEQ ID NO: 596486 - DNA, 120 bp, Artificial Sequence
  ENSG00000173890_5 (sequence is synthesized)
agcccctagatgttaactatctgctattcttgatcatacttgggaaaatattattaaatatccttacactaggaatgagaagaaaaaacacctgtcaaaattttatggaatatttttgca

SEQ ID NO: 596487 - DNA, 120 bp, Artificial Sequence
  ENSG00000173890_6 (sequence is synthesized)
tttcactagcattcgttgatcttttacttttggtaaacatttccattatattgtatttcagggattttgtacttttaagcattaggttcactaaataccacatctgcctatttactcaaa

SEQ ID NO: 596488 - DNA, 120 bp, Artificial Sequence
  ENSG00000173890_7 (sequence is synthesized)
ttatttcctttacttatggctttttgcattatccagttttcctgacagcttgtatagattattgcctgaatttctctaaaacaaccaagctttcatttaagtgtcaaaaattattttatt

SEQ ID NO: 596489 - DNA, 120 bp, Artificial Sequence
  ENSG00000173890_8 (sequence is synthesized)
ttttgggagacccagccatctaccaaagcctgaaggcacagaatgcttattctcgtcactgtcctttctatgtcagcattcagagttactggctgtcatttttcatggtgatgattttat

SEQ ID NO: 596490 - DNA, 120 bp, Artificial Sequence
  ENSG00000173890_9 (sequence is synthesized)
ttgtagctttcataacctgttgggaagaagttactactttggtacaggctatcaggataacttcctatatgaatgaaactatcttatattttcctttttcatcccactccagttatactg

SEQ ID NO: 596491 - DNA, 120 bp, Artificial Sequence
  ENSG00000173890_10 (sequence is synthesized)
tgagatctaaaaaaatattcttatccaagctcattgtctgttttctcagtacctggttaccatttgtactacttcaggtaatcattgttttacttaaagttcagattccagcatatattg

SEQ ID NO: 596492 - DNA, 120 bp, Artificial Sequence
  ENSG00000173890_11 (sequence is synthesized)
agatgaatattccctggttatactttgtcaatagttttctcattgctacagtgtattggtttaattgtcacaagcttaatttaaaagacattggattacctttggatccatttgtcaact

SEQ ID NO: 596493 - DNA, 120 bp, Artificial Sequence
  ENSG00000173890_12 (sequence is synthesized)
ggaagtgctgcttcattccacttacaattcctaatcttgagcaaattgaaaagcctatatcaataatgatttgttaatattattaattaaaagttacagctgtcataagatcataatttt

SEQ ID NO: 596494 - DNA, 120 bp, Artificial Sequence
  ENSG00000173890_13 (sequence is synthesized)
atgaacagaaagaactcaggacatattaaaaaataaactgaactaaaacaacttttgccccctgactgatagcatttcagaatgtgtcttttgaagggctatgataccagttattaaata

SEQ ID NO: 596495 - DNA, 120 bp, Artificial Sequence
  ENSG00000173890_14 (sequence is synthesized)
gtgttttattttaaaaacaaaataattccaagaagtttttatagttattcagggacactatattacaaatattactttgttattaacacaaaaagtgataagagttaacatttggctata

SEQ ID NO: 596496 - DNA, 120 bp, Artificial Sequence
  ENSG00000173890_15 (sequence is synthesized)
ctgatgtttgtgttactcaaaaaaactactggatgcaaactgttatgtaaatctgagatttcactgacaactttaagatatcaacctaaacatttttattaaatgttcaaatgaaagcaa

SEQ ID NO: 596497 - DNA, 120 bp, Artificial Sequence
  ENSG00000173890_16 (sequence is synthesized)
gtggagggcgcccggcgctctcgccaccggcgtcccagcctcggggcggcgaacggtccccgcgccgctcccagcctccctggccgggcgttcagcgcgcctgggaggggaaggaatttc

SEQ ID NO: 596498 - DNA, 120 bp, Artificial Sequence
  ENSG00000173890_17 (sequence is synthesized)
cagcgcgcctgggaggggaaggaatttcctttgcaggaactcaggggctgggggttctctgctacttaagagatccaggagtggagcccggacgcccgagccttcctgcttcgggatggg

SEQ ID NO: 596499 - DNA, 120 bp, Artificial Sequence
  ENSG00000173890_18 (sequence is synthesized)
tgcagtatgaattccatcttctacacaacagtaaaccagaatgttcatgttcacagcgttcatctcccatcctgttgtctaacgcacatggtttttttaaacttttctaagattgcatga

SEQ ID NO: 596500 - DNA, 120 bp, Artificial Sequence
  ENSG00000173890_19 (sequence is synthesized)
cgaagcccaagcacagaagatcaaagacgccaggagaggacccctcgcaccttttccaaaccaaaaatgtgaagcagcagaacttccaaaacctccggcctcgtcttgtgattccaccaa

SEQ ID NO: 596501 - DNA, 120 bp, Artificial Sequence
  ENSG00000173890_20 (sequence is synthesized)
aaatagcccatcaagggcaaacaggcccccgaaaaaaagctcaaggaaaagtcgcaaactcacggatttctaccctgtcccaaggagctccaggaagggcaaagcggagctgcaatttga

SEQ ID NO: 596502 - DNA, 120 bp, Artificial Sequence
  ENSG00000173890_21 (sequence is synthesized)
agaaagggaaagaatagatgaattggttgaaagcggaaaggaaagaaggagtgaagactgacctcatcaatgacaaaggccgggtgtgaacaccagagggagctctcccggggcgccttt

SEQ ID NO: 596503 - DNA, 120 bp, Artificial Sequence
  ENSG00000173890_22 (sequence is synthesized)
gtggtagaaaagcaccggagcctcacggagatcaccgacgccacgggacccctccatggtggatctccgtggatctccacagtaagccgagatcgcgccaccgcactccatcctgggagg

SEQ ID NO: 596504 - DNA, 120 bp, Artificial Sequence
  ENSG00000173890_23 (sequence is synthesized)
cagagggagactccagctcaaaataagtagatgactgaatgaatgaatgaacgaatgaatgaatgaatggatgttacaggtttccaaggtggacttaaacagatggctttatattaccaa

SEQ ID NO: 596505 - DNA, 120 bp, Artificial Sequence
  ENSG00000173890_24 (sequence is synthesized)
ctgaaagctgcctgggaagggagagaggagggaaagatacagcaatcgaaaactcctactgaaagtaagcttgcaaagcaaaactttaaaatacatgaagacatagatatggagttcaaa

SEQ ID NO: 596506 - DNA, 120 bp, Artificial Sequence
  ENSG00000173890_25 (sequence is synthesized)
atttgttcaagcaagacacgaatttactaaaagtgaaattagcagttggaattcctggaaatgacaataaaccttcaggaggagaactccgttacacgtcacgaagtcaaatgccagggg

SEQ ID NO: 596507 - DNA, 120 bp, Artificial Sequence
  ENSG00000173890_26 (sequence is synthesized)
tgatgaaatgtagatgtataggtaatcggtcagagtggtgggagaaactgttgggaaaggagcaggccttctgaaaggtcggaaggcttcaggggagaataagctgaacgcagctgttct

SEQ ID NO: 596508 - DNA, 120 bp, Artificial Sequence
  ENSG00000173890_27 (sequence is synthesized)
atcatcagcgcgcatgactgctccctgaaaggaagaacaataatgttaattacccgcagactgtgtttgctccaggctttcggcattatgtctgtactgaataaaagcaagcagctccag

SEQ ID NO: 596509 - DNA, 120 bp, Artificial Sequence
  ENSG00000173890_28 (sequence is synthesized)
ctgttcgaggctgctctcttcttcagccattagtgccgggcagcccactagctgctgttacactgcatatctgtgtctgagtactcctttcttcagttgcttggccagggtctgtgggac

SEQ ID NO: 596510 - DNA, 120 bp, Artificial Sequence
  ENSG00000173890_29 (sequence is synthesized)
gttttccgaggccgttgcgtccgggtaggttcctggatgaccatcctggctggctcaaaattccctctagattacctgcgaccacccccaggaacccggagactgaaactccttttctca

SEQ ID NO: 596511 - DNA, 120 bp, Artificial Sequence
  ENSG00000173890_30 (sequence is synthesized)
tggagactgaaaccacctgttttcagagcttcaggaaaagacttaatctgaaggatcctgcagctaaaaagctttgaaaactgtgttaaggggccccataagcatcgcttctaaacttca

SEQ ID NO: 596512 - DNA, 120 bp, Artificial Sequence
  ENSG00000173894_0 (sequence is synthesized)
ctttgtgtgctgccggcggggcgcgcggcggtccgggcgggtgactggcggcgggcgccgcggtcgggctggctgccgggcagcatggaggagctgagcagcgtgggcgagcaggtcttc

SEQ ID NO: 596513 - DNA, 120 bp, Artificial Sequence
  ENSG00000173894_1 (sequence is synthesized)
cttcgccgccgagtgcatcctgagcaagcggctccgcaagggcaagctggagtacctggtcaagtggcgcggctggtcctccaaacataacagctgggagccggaggagaacatcctgga

SEQ ID NO: 596514 - DNA, 120 bp, Artificial Sequence
  ENSG00000173894_2 (sequence is synthesized)
cccgaggctgctcctggccttccagaagaaggaacatgagaaggaggtgcagaaccggaagagaggcaagaggccgagaggccggccaaggaagctcactgccatgtcctcctgcagccg

SEQ ID NO: 596515 - DNA, 120 bp, Artificial Sequence
  ENSG00000173894_3 (sequence is synthesized)
gcgctccaagctcaaggaacccgatgctccctccaaatccaagtccagcagttcctcctcttcctccacgtcatcctcctcttcctcagatgaagaggatgacagtgacttagatgctaa

SEQ ID NO: 596516 - DNA, 120 bp, Artificial Sequence
  ENSG00000173894_4 (sequence is synthesized)
gaggggtccccggggccgcgagacccacccagtgccgcagaagaaggcccagatcctggtggccaaacccgagctgaaggatcccatccggaagaagcggggacgaaagcccctgccccc

SEQ ID NO: 596517 - DNA, 120 bp, Artificial Sequence
  ENSG00000173894_5 (sequence is synthesized)
agagcaaaaggcaacccgaagacccgtgagcctggccaaggtgctgaagaccgcccggaaggatctgggggccccggccagcaagctgccccctccactcagcgcccccgttgcaggcct

SEQ ID NO: 596518 - DNA, 120 bp, Artificial Sequence
  ENSG00000173894_6 (sequence is synthesized)
ggcagctctgaaggcccacgccaaggaggcctgtggcggccccagtgccatggccaccccagagaacctggccagcctaatgaagggcatggccagtagccccggccggggtggcatcag

SEQ ID NO: 596519 - DNA, 120 bp, Artificial Sequence
  ENSG00000173894_7 (sequence is synthesized)
ctggcagagctccatcgtgcactacatgaaccggatgacccagagccaggcccaggctgccagcaggttggcgctgaaggcccaggccaccaacaagtgcggcctcgggctggacctgaa

SEQ ID NO: 596520 - DNA, 120 bp, Artificial Sequence
  ENSG00000173894_8 (sequence is synthesized)
ggtgaggacgcagaaaggggagctgggaatgagccctccaggaagcaaaatcccgaaggcccccagcggtggggctgtggagcagaaagtggggaacacagggggccccccgcacaccca

SEQ ID NO: 596521 - DNA, 120 bp, Artificial Sequence
  ENSG00000173894_9 (sequence is synthesized)
tggtgccagcagggtgcctgctgggtgcccaggcccccagccagcacccacccaggagctgagcctccaggtcttggacttgcagagtgtcaagaatggcatgcccggggtgggtctcct

SEQ ID NO: 596522 - DNA, 120 bp, Artificial Sequence
  ENSG00000173894_10 (sequence is synthesized)
tgcccgccacgccaccgccaccaagggtgtcccggccaccaacccagcccctgggaagggcactgggagtggcctcattggggccagcggggccaccatgcccaccgacacaagcaaaag

SEQ ID NO: 596523 - DNA, 120 bp, Artificial Sequence
  ENSG00000173894_11 (sequence is synthesized)
tgagaagctggcttccagagcagtggcgccacccacccctgccagcaagagggactgtgtcaagggcagtgctacccccagtgggcaggagagccgcacagcccccggagaagcccgcaa

SEQ ID NO: 596524 - DNA, 120 bp, Artificial Sequence
  ENSG00000173894_12 (sequence is synthesized)
ggcggccacactgccagagatgagcgcaggtgaggagagtagcagctcggactccgaccccgactccgcctcgccgcccagcactggacagaacccgtcagtgtccgttcagaccagcca

SEQ ID NO: 596525 - DNA, 120 bp, Artificial Sequence
  ENSG00000173894_13 (sequence is synthesized)
ggactggaagcccacccgcagcctcatcgagcacgtatttgtcaccgacgtcactgccaacctcatcaccgtcacagtgaaggagtctcccaccagcgtgggcttcttcaacctgaggca

SEQ ID NO: 596526 - DNA, 120 bp, Artificial Sequence
  ENSG00000173894_14 (sequence is synthesized)
ttactgaagccccggcgccaccagctgcgcggtcttactccccttccctgcctatggtgtcgcttggctaagtgactcccagcccaagccccctcaagagtctgggtcgggggaggagga

SEQ ID NO: 596527 - DNA, 120 bp, Artificial Sequence
  ENSG00000173894_15 (sequence is synthesized)
gtgggtggcctccttgatgggcaggcttggaagggacttctcccgcaccccactctgtcccaggacatagggcagggggcctcactgccttgttggtctccaccttgttcctacctctgc

SEQ ID NO: 596528 - DNA, 120 bp, Artificial Sequence
  ENSG00000173894_16 (sequence is synthesized)
aggcctctttgctctcccctcttgcctcaggaaacccggtggcacctgtggctccaggtgactgtcttgaacagagcgggcttcttcatggctgcgttgttgctgagtttgaactgctcc

SEQ ID NO: 596529 - DNA, 120 bp, Artificial Sequence
  ENSG00000173894_17 (sequence is synthesized)
tccctggcctgcgtgactgaatcacagctttggtccctgtcttgcaggggctgaggtgtcaggaggggacttctggcccaccttgccttcagccctggagtgggcagagagtattgtggg

SEQ ID NO: 596530 - DNA, 120 bp, Artificial Sequence
  ENSG00000173894_18 (sequence is synthesized)
gaggcatggccagtgggactagtgttccctccatctggccacagcttttgggagatggggtgggcaggggtggtcctggctggcattgcctgagccggcagtgatgaagtggggagcttg

SEQ ID NO: 596531 - DNA, 120 bp, Artificial Sequence
  ENSG00000173894_19 (sequence is synthesized)
gagcccagcagccctaaaaggctgccttcatggccatctagccccagttcagggcagcatccatagcccacaagccagcgtgggtggggcgggggtggtcccacagctgggttccacctg

SEQ ID NO: 596532 - DNA, 120 bp, Artificial Sequence
  ENSG00000173894_20 (sequence is synthesized)
aagagcctccgtgcctcggagcaggagaggcaggctatggctgccaccctccctcctgcctgtgtcccagtgagaactgacctgagtccccttccaaacccagacccacctcctgcccca

SEQ ID NO: 596533 - DNA, 120 bp, Artificial Sequence
  ENSG00000173894_21 (sequence is synthesized)
ggcccactgaagcatgttccatttctaaaaagcccagagttcagtgtgtcccaaggaaaacccaaagtggaggtgctcaggtccaggggagtccagtgggcaggacccttggcaggcaag

SEQ ID NO: 596534 - DNA, 120 bp, Artificial Sequence
  ENSG00000173894_22 (sequence is synthesized)
cccctcccttcactcccaggacctaccttctgctagtaaaggactggcttcattctaattatggcccacagactgccccggagacctggaggacagcagtgctggcacttgggtgtccat

SEQ ID NO: 596535 - DNA, 120 bp, Artificial Sequence
  ENSG00000173894_23 (sequence is synthesized)
gggcccgtctgccggctctgcctgtgctgcaagtgttggccgtgggtccagccaacaactccctacgtcctgtgtggggccctgcccaagtggatgaggcattccttgaggagtatcatt

SEQ ID NO: 596536 - DNA, 120 bp, Artificial Sequence
  ENSG00000173894_24 (sequence is synthesized)
ttccctgacaatccccatcacctttaggggttccctgcttggctcctttccagctgaaaaactagacctgtgccattggggaagctggacaaagtctagggggcccgcctggtagagggt

SEQ ID NO: 596537 - DNA, 120 bp, Artificial Sequence
  ENSG00000173894_25 (sequence is synthesized)
cccgggaagctggatctgtcagcctcggccctgaggcccctgttaactcaagactgtgagctgcctctaggtggtcacgtctgggagctagcttgtatggcttctgaccagtatcaggat

SEQ ID NO: 596538 - DNA, 120 bp, Artificial Sequence
  ENSG00000173894_26 (sequence is synthesized)
ttctgttctgagagcagcgtgggcagcaaggcagggcagcccagaggtggcagcggcaggcaatctggtcactaggtctttgtgatgccaaaaataaaagagggtggggtgggtgctttc

SEQ ID NO: 596539 - DNA, 120 bp, Artificial Sequence
  ENSG00000173894_27 (sequence is synthesized)
tgttcctctgattggatggagtccgccagcaggcatggggctacattccagtgcctgactatagggaggcactcctgattccatggagcagcccggactttgagaatgggctctggtttg

SEQ ID NO: 596540 - DNA, 120 bp, Artificial Sequence
  ENSG00000173894_28 (sequence is synthesized)
cggggggcaggcgtaccagactgcaagaccccccagtacctcaccgtgccaaataggaagaggtggccttggtgtagccaaatggatctttttaacagtgtgcctttggggagggaccca

SEQ ID NO: 596541 - DNA, 120 bp, Artificial Sequence
  ENSG00000173894_29 (sequence is synthesized)
tgtccatggcttcgttgagggccatccatatgccagctgggggccagcccacagtggccatattggctgcagcaggaatggtgcccacctcggcgaattgaagggctaagagtcccagat

SEQ ID NO: 596542 - DNA, 120 bp, Artificial Sequence
  ENSG00000173894_30 (sequence is synthesized)
agctaggccagagctggaagcagacagtaaggggaagagctgctcccacaggagagggagagattccagctcactgcgcagcctgggaggaggcgtggatcctggcacgctgagcctcag

SEQ ID NO: 596543 - DNA, 120 bp, Artificial Sequence
  ENSG00000173894_31 (sequence is synthesized)
gcaccagcctccctgtgctcgacagcaaagtcttgactccttcctgctgagcactgtgctaccttcactgctccaaagccagactaacagctctccaagcccttggggtgactcggcttc

SEQ ID NO: 596544 - DNA, 120 bp, Artificial Sequence
  ENSG00000173894_32 (sequence is synthesized)
caggagctgttggagaaatgaggatgtctgtccctgtctgcctgggcaggccagattcctccccagcagccgggtctctccagaccctgattcggtgcctttctgtttaccagctacttc

SEQ ID NO: 596545 - DNA, 120 bp, Artificial Sequence
  ENSG00000173894_33 (sequence is synthesized)
aatcccaaagtttgaatctgcagataccttactcccagccactttgccttcttactgtgttgtgtgtttttcctggtgcttcaagagcgtgtgcagggcaagtgccgtcactgggaactg

SEQ ID NO: 596546 - DNA, 120 bp, Artificial Sequence
  ENSG00000173894_34 (sequence is synthesized)
caccagatgctcagacttggttgtcttatgtttaccaataaataaaagtagactttttctatttttatttgctgctatttgtgtgtgtgtttgtgtttgtgtagctaggtatctggcact

SEQ ID NO: 596547 - DNA, 120 bp, Artificial Sequence
  ENSG00000173894_35 (sequence is synthesized)
tctgacgatgcattgttgcttttttcccgaaggtcccgcaggaactgtggcaatggtgtgtgtgtgaaatggtgtgttaaccgcgttttgtttgctcctgtattgaataggaagcagtgg

SEQ ID NO: 596548 - DNA, 120 bp, Artificial Sequence
  ENSG00000173894_36 (sequence is synthesized)
ccagtctgtcttccttagagatgttagcatatttttatatgtatatattttgtaccaaaaaagagtgttccttgttttggttacactcgaaattctgacctagctggagagggctctggg

SEQ ID NO: 596549 - DNA, 120 bp, Artificial Sequence
  ENSG00000173894_37 (sequence is synthesized)
ccgagagctttcactaaggggagacttcaggggaggatcaagctttgaaccaaagccaatcactggcttgatttgtgttttttaattaaaaaaaaaatcattcatgtatgccacttctaa

SEQ ID NO: 596550 - DNA, 120 bp, Artificial Sequence
  ENSG00000173894_38 (sequence is synthesized)
ctcgcctgccgggaggctggagctggggctgtggtctgaggtcccttagcaagattgtgtccagggccatctctgtggctggctgtaaaagtccccagccagcccctctcccaccttctc

SEQ ID NO: 596551 - DNA, 120 bp, Artificial Sequence
  ENSG00000173894_39 (sequence is synthesized)
ctagccagcctgtatccatccctgagaagaacctaagtaagtgctgctttggtgtttccgacagccatacttgcaaaaaccaactttttcagttgcttcagataaagatgttatagcttc

SEQ ID NO: 596552 - DNA, 120 bp, Artificial Sequence
  ENSG00000173894_40 (sequence is synthesized)
acctcccagcacccccttggcgtagggggcaggcagagggagggtttggggccctcaggaagggggtggcacttctgccaacagtctgtccctctactcggaaaacaggagccccctttc

SEQ ID NO: 596553 - DNA, 120 bp, Artificial Sequence
  ENSG00000173894_41 (sequence is synthesized)
ctgctgggtggcagggtcaaactgctgcagacaagcactcttccctcccagggggtccttgggggacggaaaggaacaggaagcatgcgtacagtaggtgctcataggattgccggctgg

SEQ ID NO: 596554 - DNA, 120 bp, Artificial Sequence
  ENSG00000173894_42 (sequence is synthesized)
atgtgactcaaaagcctaagatttgggggctactccgggcccacctgcgggtgcaccttaaatcgaggtggccacgaaaggcagggctgactgaatagccagggggtgccaggaggggcc

SEQ ID NO: 596555 - DNA, 120 bp, Artificial Sequence
  ENSG00000173894_43 (sequence is synthesized)
ttggaggagggcagaggcagtgtgggctgatgatgtgctttggccttctcgggactgtcctgtcacccctcctcgctacagtgatgggctcaccccgccacaggtatgcatgcgcccctg

SEQ ID NO: 596556 - DNA, 120 bp, Artificial Sequence
  ENSG00000173894_44 (sequence is synthesized)
gggtccgtggtagggcccctccctcccctgaggacaggtgaggcaggacaggatgggggaggagggcctggcctcagtcccgggtgtggctttgattccctcctccgggcactgtccctg

SEQ ID NO: 596557 - DNA, 120 bp, Artificial Sequence
  ENSG00000173898_0 (sequence is synthesized)
ccactgagcagccaaccgcagcctctggccacaaggagagcggagcacaggagcaggaagccgcctaccaccatgagcagcacgctgtcacccacagactttgacagcttggaaatccag

SEQ ID NO: 596558 - DNA, 120 bp, Artificial Sequence
  ENSG00000173898_1 (sequence is synthesized)
ggccagtacagtgacatcaacaaccgctgggaccttcctgactcggactgggacaatgacagcagctcggcccgcctctttgagaggtctcgcattaaggctctggcagatgaacgagaa

SEQ ID NO: 596559 - DNA, 120 bp, Artificial Sequence
  ENSG00000173898_2 (sequence is synthesized)
gctgtgcagaagaaaaccttcaccaagtgggtaaactcgcacctggcccgggtcacgtgccgggtgggggacctgtacagcgacctccgggacggacgcaacctgctgaggctcctcgag

SEQ ID NO: 596560 - DNA, 120 bp, Artificial Sequence
  ENSG00000173898_3 (sequence is synthesized)
gtgctctcgggagagatactgccaaagcctacaaagggccgcatgcggatccactgcctggagaacgtggacaaggcactgcagttcctcaaggagcagaaagtgcacttggaaaacatg

SEQ ID NO: 596561 - DNA, 120 bp, Artificial Sequence
  ENSG00000173898_4 (sequence is synthesized)
ggctcccatgacattgtggacggaaaccaccgactgacccttgggctggtctggaccatcatccttcgattccagatccaagacatcagtgtggagacagaagacaacaaggagaagaag

SEQ ID NO: 596562 - DNA, 120 bp, Artificial Sequence
  ENSG00000173898_5 (sequence is synthesized)
tcagccaaggatgccctgcttctgtggtgccagatgaagactgcaggttatcccaacgtcaatgtacacaacttcaccaccagctggagagatggactagctttcaacgccatcgtgcat

SEQ ID NO: 596563 - DNA, 120 bp, Artificial Sequence
  ENSG00000173898_6 (sequence is synthesized)
aaacaccggccagacctgctggattttgagtctctgaagaagtgtaatgcacactataatctgcagaatgcattcaatctggctgaaaaggaactgggacttaccaagctgctggatccc

SEQ ID NO: 596564 - DNA, 120 bp, Artificial Sequence
  ENSG00000173898_7 (sequence is synthesized)
gaagacgtgaatgtggaccagccagatgagaagtcaatcattacctatgtggctacttactaccattacttctccaagatgaaggccctggccgtggaaggcaagagaattggcaaggtg

SEQ ID NO: 596565 - DNA, 120 bp, Artificial Sequence
  ENSG00000173898_8 (sequence is synthesized)
ctggaccatgccatggaggcagagcgcctggtggagaaatacgagtccctggcctcggagctgctgcagtggatcgagcaaacgatcgtgaccctcaatgaccggcagttggccaactcc

SEQ ID NO: 596566 - DNA, 120 bp, Artificial Sequence
  ENSG00000173898_9 (sequence is synthesized)
cttagcggggtccagaaccagctgcagtccttcaactcctaccgcaccgtggagaagccgcccaagtttaccgagaaagggaacttggaagtgctgctcttcaccatccagagcaagctt

SEQ ID NO: 596567 - DNA, 120 bp, Artificial Sequence
  ENSG00000173898_10 (sequence is synthesized)
cgggccaacaaccagaaggtctacacgccccgcgagggccggctcatctcggacatcaacaaggcttgggagcggctggagaaggcggagcacgagcgtgagctggccctgcgcaccgag

SEQ ID NO: 596568 - DNA, 120 bp, Artificial Sequence
  ENSG00000173898_11 (sequence is synthesized)
ctcatccgccaggagaagctggagcagctggccgcccgcttcgaccgcaaggctgccatgcgggagacctggctcagcgagaaccagcgcctcgtgtcccaggacaactttgggctggag

SEQ ID NO: 596569 - DNA, 120 bp, Artificial Sequence
  ENSG00000173898_12 (sequence is synthesized)
ctggcagctgtcgaggcagcagtacggaagcacgaagccattgagacggacatcgtggcctacagcggccgggtgcaggcagtggacgccgtggctgcagagctggccgccgagcgctac

SEQ ID NO: 596570 - DNA, 120 bp, Artificial Sequence
  ENSG00000173898_13 (sequence is synthesized)
cacgacatcaagcgcatcgccgctcggcagcacaacgtggcacggctctgggacttcttgcggcagatggtggccgcccggcgggagcggctcctcctcaacctggagctgcagaaggtg

SEQ ID NO: 596571 - DNA, 120 bp, Artificial Sequence
  ENSG00000173898_14 (sequence is synthesized)
ttccaggacctgctctacctcatggactggatggaagagatgaagggccggctgcagtctcaggacctgggcaggcacctagcaggagtggaggacctgctgcagctgcacgagctggtg

SEQ ID NO: 596572 - DNA, 120 bp, Artificial Sequence
  ENSG00000173898_15 (sequence is synthesized)
gaggcagacatcgccgtgcaggccgagagggtgcgggccgtcagcgcctctgccctgcgcttctgcaacccagggaaagagtatagaccttgcgacccgcagctggtgtcggagcgggtg

SEQ ID NO: 596573 - DNA, 120 bp, Artificial Sequence
  ENSG00000173898_16 (sequence is synthesized)
gccaagctagagcagagctatgaggcactgtgcgagttggcagcggcgcggcgggcccggctggaggaatcacggcggctctggcgtttcctctgggaggtgggtgaagctgaggcctgg

SEQ ID NO: 596574 - DNA, 120 bp, Artificial Sequence
  ENSG00000173898_17 (sequence is synthesized)
gtgcgggagcagcagcacctcctggcctcagccgacacgggccgagacctgaccggtgccctccgcctgctcaacaagcacacagccctgcggggcgagatgagcggccggctggggccc

SEQ ID NO: 596575 - DNA, 120 bp, Artificial Sequence
  ENSG00000173898_18 (sequence is synthesized)
ctgaagctcaccctggagcagggccagcagttggtggccgagggtcaccctggggcaagccaggcctctgcccgtgcagctgaactccaagcccagtgggagcggctagaggccctggcc

SEQ ID NO: 596576 - DNA, 120 bp, Artificial Sequence
  ENSG00000173898_19 (sequence is synthesized)
gaggagcgtgcccagcggctggcccaagccgccagcctctaccagttccaggccgatgcaaacgacatggaggcctggttggttgacgcactgcgcctggtgtccagccccgagctgggg

SEQ ID NO: 596577 - DNA, 120 bp, Artificial Sequence
  ENSG00000173898_20 (sequence is synthesized)
cacgacgagttctccacgcaggctctagccaggcagcatcgggccctggaggaggagattcgaagccaccggccaaccctggacgccttgagggaacaggcagcagccctgccccccaca

SEQ ID NO: 596578 - DNA, 120 bp, Artificial Sequence
  ENSG00000173898_21 (sequence is synthesized)
ctgagccgcacgcccgaggtgcagagccgggtgcccaccctggagcggcactacgaggagctgcaggcccgggcaggcgagcgagcgcgggccttggaggcagccctggcgctctacacc

SEQ ID NO: 596579 - DNA, 120 bp, Artificial Sequence
  ENSG00000173898_22 (sequence is synthesized)
atgctcagcgaggccggggcctgtggactctgggtggaggagaaggagcagtggctcaacgggctggccctgcctgaacgcctggaggacctggaggtcgtgcagcagaggttcgagacc

SEQ ID NO: 596580 - DNA, 120 bp, Artificial Sequence
  ENSG00000173898_23 (sequence is synthesized)
ctggagcctgaaatgaacacccttgcagcacaaatcaccgcggtgaatgacattgccgagcagttactgaaggccaaccccccaggcaaagaccgcattgtcaacacccaggagcagctc

SEQ ID NO: 596581 - DNA, 120 bp, Artificial Sequence
  ENSG00000173898_24 (sequence is synthesized)
aaccacaggtggcagcagtttcggcgtctggcagacggcaagaaggcagctctcacctcagccctgagcatccagaactaccacttagagtgcacggagacccaggcctggatgagagag

SEQ ID NO: 596582 - DNA, 120 bp, Artificial Sequence
  ENSG00000173898_25 (sequence is synthesized)
aagaccaaagtcatcgagtccacccagggcctaggcaacgatctggctggggtgctggccctgcagcgcaagctggccggcacggagcgggacctggaggccatcgccgcccgggtgggc

SEQ ID NO: 596583 - DNA, 120 bp, Artificial Sequence
  ENSG00000173898_26 (sequence is synthesized)
gaactgactcgagaggcaaatgccctggctgccggccatcccgctcaggcagtggccatcaacgcccggctgagagaggtgcagaccggctgggaggacctcagggccaccatgcggcgt

SEQ ID NO: 596584 - DNA, 120 bp, Artificial Sequence
  ENSG00000173898_27 (sequence is synthesized)
cgagaagagtcgctgggggaggcgcggcggctgcaggacttcttgcgcagcttggatgacttccaggcctggctaggccgcactcagactgctgtggcctctgaagaagggccggccacc

SEQ ID NO: 596585 - DNA, 120 bp, Artificial Sequence
  ENSG00000173898_28 (sequence is synthesized)
ctgcctgaggcagaggccctcctggcccaacatgcagccctgcggggagaggtggagcgggcccagagcgagtatagccggctgcgagccctgggcgaggaggtgacccgggaccaggct

SEQ ID NO: 596586 - DNA, 120 bp, Artificial Sequence
  ENSG00000173898_29 (sequence is synthesized)
gacccccagtgcctcttcctacgacagcgactggaggccctgggaactggctgggaggagctgggccgaatgtgggagagccggcaaggtcgcctggcccaggcccacggcttccaggga

SEQ ID NO: 596587 - DNA, 120 bp, Artificial Sequence
  ENSG00000173898_30 (sequence is synthesized)
ttcctgcgggatgctcgtcaggctgagggcgtgctcagcagccaggaatatgttctgtctcacacggagatgccagggacactccaggctgctgatgctgccattaaaaaactggaggac

SEQ ID NO: 596588 - DNA, 120 bp, Artificial Sequence
  ENSG00000173898_31 (sequence is synthesized)
ttcatgagcaccatggacgccaatggggaacggatccacgggctcctggaggctggccgccagctggtatctgaaggcaacatccacgccgacaagattcgggaaaaggcagactccatt

SEQ ID NO: 596589 - DNA, 120 bp, Artificial Sequence
  ENSG00000173898_32 (sequence is synthesized)
gagcagcagcatttcctgcaagattgtcacgagctgaagctctggatcgacgagaagatgctgacagcccaggacgtgtcctatgacgaggcccgcaacctgcatactaagtggcagaag

SEQ ID NO: 596590 - DNA, 120 bp, Artificial Sequence
  ENSG00000173898_33 (sequence is synthesized)
caccaggcattcatggccgagctggctgccaacaaagactggctggacaaggtggacaaggaagggcgagagctcacccttgagaagccagagctgaaagccctggtgtcggagaagctg

SEQ ID NO: 596591 - DNA, 120 bp, Artificial Sequence
  ENSG00000173898_34 (sequence is synthesized)
agagacctgcacaggcgctgggacgagctggagaccaccacccaagccaaggcccgcagcctctttgatgccaaccgagctgagctgtttgcccagagctgctgtgccctggagagctgg

SEQ ID NO: 596592 - DNA, 120 bp, Artificial Sequence
  ENSG00000173898_35 (sequence is synthesized)
ctggagagcctgcaggcccagctgcactcggatgactacggcaaggacctcaccagcgtcaacatcctgctcaagaagcagcagatgctggaatgggagatggctgtgagagagaaggag

SEQ ID NO: 596593 - DNA, 120 bp, Artificial Sequence
  ENSG00000173898_36 (sequence is synthesized)
gtggaggcaatccaggcccaggccaaagcactggcccaggaggaccagggtgcaggggaggtggagagaacctcgagggccgtggaggagaagttcagggccttgtgccagcccatgcgg

SEQ ID NO: 596594 - DNA, 120 bp, Artificial Sequence
  ENSG00000173898_37 (sequence is synthesized)
gaacgctgccggcgcctgcaggcttctcgcgagcagcaccagttccaccgcgatgtggaagatgagattttgtgggtgacagagcggctgcccatggccagctccatggagcatggcaag

SEQ ID NO: 596595 - DNA, 120 bp, Artificial Sequence
  ENSG00000173898_38 (sequence is synthesized)
gacctgcccagcgtccagcttctcatgaagaaaaaccagaccctgcagaaagagattcagggccatgagccccggatcgcggacctgagggagcggcagcgtgctctaggtgcagcagca

SEQ ID NO: 596596 - DNA, 120 bp, Artificial Sequence
  ENSG00000173898_39 (sequence is synthesized)
gcaggtccagagctggctgagctgcaggaaatgtggaaacgcctgggccacgagctggaacttcgagggaagcgactggaggatgccctgcgagcccagcagttctaccgcgatgccgcc

SEQ ID NO: 596597 - DNA, 120 bp, Artificial Sequence
  ENSG00000173898_40 (sequence is synthesized)
gaggcggaggcctggatgggcgagcaggaattacacatgatgggccaggagaaggccaaggatgagctgagtgcccaggcagaggtgaagaagcaccaggtgctggagcaagccctggcc

SEQ ID NO: 596598 - DNA, 120 bp, Artificial Sequence
  ENSG00000173898_41 (sequence is synthesized)
gactacgcgcagaccatccaccagctggcggccagcagccaggacatgattgaccacgagcacccagagagcactcggatatccatccgccaagcccaggtggacaagctgtatgccggc

SEQ ID NO: 596599 - DNA, 120 bp, Artificial Sequence
  ENSG00000173898_42 (sequence is synthesized)
ctgaaggagctggctggagagcggcgggagcgcctgcaggagcacctccggctgtgccagctccgccgcgagctggatgacctggaacagtggatccaggagcgcgaggtggtggcggcc

SEQ ID NO: 596600 - DNA, 120 bp, Artificial Sequence
  ENSG00000173898_43 (sequence is synthesized)
tcccacgagctgggccaggactacgagcatgtgactatgctccgagacaaattccgagagttctcccgggacacaagcaccatcggtcaggagcgcgtagatagcgccaatgcgctggcc

SEQ ID NO: 596601 - DNA, 120 bp, Artificial Sequence
  ENSG00000173898_44 (sequence is synthesized)
aatgggctcattgctgggggccatgctgcacgggccaccgtggccgagtggaaggacagtctcaacgaggcctgggctgacctgcttgagctgctggacacacggggtcaggtgctggcc

SEQ ID NO: 596602 - DNA, 120 bp, Artificial Sequence
  ENSG00000173898_45 (sequence is synthesized)
gcggcgtacgagctgcagcgcttcctgcacggggcacgccaagccctggcgcgggtgcagcacaagcagcagcagcttccggacgggactggccgcgacctcaacgctgccgaggccctg

SEQ ID NO: 596603 - DNA, 120 bp, Artificial Sequence
  ENSG00000173898_46 (sequence is synthesized)
cagcgccgacactgtgcctacgagcatgacattcaggccctcagcccccaggtccagcaggtgcaggacgacggccaccggctccagaaggcctacgctggagacaaggctgaggagatc

SEQ ID NO: 596604 - DNA, 120 bp, Artificial Sequence
  ENSG00000173898_47 (sequence is synthesized)
ggccgccacatgcaggccgtggccgaggcctgggcccagcttcagggaagctctgccgcccgccggcagctgctgctggacaccacagacaagttccgcttcttcaaggctgtccgggaa

SEQ ID NO: 596605 - DNA, 120 bp, Artificial Sequence
  ENSG00000173898_48 (sequence is synthesized)
ctgatgctctggatggatgaggtcaacctgcagatggatgcccaggagcgtccccgggatgtgtcctccgcggatctagtcatcaagaaccagcaaggcatcaaggcagagatagaggcc

SEQ ID NO: 596606 - DNA, 120 bp, Artificial Sequence
  ENSG00000173898_49 (sequence is synthesized)
cgggcagaccgcttctcctcctgcatcgacatggggaaggagctgctggccaggagccactatgcggccgaggagatctcagagaagctgtctcagctgcaggcacggcgccaggagaca

SEQ ID NO: 596607 - DNA, 120 bp, Artificial Sequence
  ENSG00000173898_50 (sequence is synthesized)
gctgagaagtggcaggagaagatggactggcttcagctggttttggaggtgcttgtgtttggaagagatgcagggatggcagaggcctggctctgcagccaggagccactggtgcgcagc

SEQ ID NO: 596608 - DNA, 120 bp, Artificial Sequence
  ENSG00000173898_51 (sequence is synthesized)
gctgagctgggttgcacggtcgacgaagttgagagcctcatcaagcggcacgaggccttccagaagtcagcagtggcctgggaggagcgattctgtgcgctggagaagcttactgcgcta

SEQ ID NO: 596609 - DNA, 120 bp, Artificial Sequence
  ENSG00000173898_52 (sequence is synthesized)
gaggagcgggagaaggagcgaaagagaaagagggaggaggaggagcggcggaaacagccgcctgctcccgaacccacagccagtgtgcctccaggggacctggtgggcggccagacagct

SEQ ID NO: 596610 - DNA, 120 bp, Artificial Sequence
  ENSG00000173898_53 (sequence is synthesized)
tctgacaccacctgggacggaacccagccacggccaccaccatccacacaagcacccagtgttaatggagtctgcacagatggagagccctcacagcccctgctgggacaacagagactt

SEQ ID NO: 596611 - DNA, 120 bp, Artificial Sequence
  ENSG00000173898_54 (sequence is synthesized)
gagcacagcagcttccccgaagggccgggacctggctcaggggacgaagccaatgggccccggggagagaggcagacccggactcggggcccggccccatctgcaatgccccagagcagg

SEQ ID NO: 596612 - DNA, 120 bp, Artificial Sequence
  ENSG00000173898_55 (sequence is synthesized)
tctaccgagtcagcccatgctgccaccctgccgcctcgaggcccagagccatctgcccaggagcagatggaggggatgctgtgccgcaagcaggagatggaggccttcgggaagaaggct

SEQ ID NO: 596613 - DNA, 120 bp, Artificial Sequence
  ENSG00000173898_56 (sequence is synthesized)
gccaacaggtcctggcagaacgtgtactgtgtcctgcggcgtgggagcctcggcttttacaaggatgccaaggcagccagcgcgggagtgccataccacggagaagtgcctgtcagcctg

SEQ ID NO: 596614 - DNA, 120 bp, Artificial Sequence
  ENSG00000173898_57 (sequence is synthesized)
gccagggcccagggcagcgtcgcctttgattaccgaaagcgcaaacatgtcttcaagctgggcttacaggatggaaaagaatatttattccaggccaaggatgaggcagagatgagctcg

SEQ ID NO: 596615 - DNA, 120 bp, Artificial Sequence
  ENSG00000173898_58 (sequence is synthesized)
tggctacgggtggtgaatgcagccattgccacagcgtcttctgcctctggagagcctgaagagccggtggtgcccagcaccacccggggcatgacccgggccatgaccatgcccccagtg

SEQ ID NO: 596616 - DNA, 120 bp, Artificial Sequence
  ENSG00000173898_59 (sequence is synthesized)
tcacccgtcggggctgaggggcctgttgtgctccgcagcaaagacggcagagaacgagagcgagaaaaacgcttcagcttctttaagaagaacaagtagttgggggcaaggtcccaggcc

SEQ ID NO: 596617 - DNA, 120 bp, Artificial Sequence
  ENSG00000173898_60 (sequence is synthesized)
aactccctccctccgttcaggaaactgccagggacagtcgacagggaccgccctcttgtcaggacaactgcctgctgctagggtctgttgccaaggtcaacccatcaccaggaactgtca

SEQ ID NO: 596618 - DNA, 120 bp, Artificial Sequence
  ENSG00000173898_61 (sequence is synthesized)
ctggggacgagtccatgttcccaagggcagcccttctcttctgctgtttaattccagactggtggtgggacccaggtaaccccctctcccacccccgccgacttctcccctttccccagc

SEQ ID NO: 596619 - DNA, 120 bp, Artificial Sequence
  ENSG00000173898_62 (sequence is synthesized)
ctcgtgcctctgtccctcaccacggtgtggacagtgccgcaccctcaacataggccatgtggggagtggctgcccctgcctcagggtcattctcctgccatgcgagggcactcgccttct

SEQ ID NO: 596620 - DNA, 120 bp, Artificial Sequence
  ENSG00000173898_63 (sequence is synthesized)
gccttctggttcctcacccctcagaccagccaggaacctctcagagctgaagcaggccctgggggcagaagtgccagatgacagtcagaggcgcaggagccctccctccccacccccacc

SEQ ID NO: 596621 - DNA, 120 bp, Artificial Sequence
  ENSG00000173898_64 (sequence is synthesized)
ctgtaactccagctgccactccatctccagctgctctcaatggcttccaggtgtgttgttcggggacagccaccgccttgagtctggccaaggaggtgattaaacagctcagcttctctc

SEQ ID NO: 596622 - DNA, 120 bp, Artificial Sequence
  ENSG00000173898_65 (sequence is synthesized)
gatgttctgggagggagagccggcccagctgcctgaaggaggacgcgagagcgaggggacgggtgagaggaatgcttagcggagacggactggaggtgcccggagaggaaaggggaacgg

SEQ ID NO: 596623 - DNA, 120 bp, Artificial Sequence
  ENSG00000173898_66 (sequence is synthesized)
aggctggatctcgggaaacctcgtcggcagtgtcattagaggaaggatcgcgtgtctcggggatacggattttggaggaaaagcagaatagggacaaaggcttcccaggtggcttcccct

SEQ ID NO: 596624 - DNA, 80 bp, Artificial Sequence
  ENSG00000173898_67 (sequence is synthesized)
gggcctcccgcgggagccggcggcctgcggcagggggaggctattgtcctccttccgcggcgccgcagtcccgccgctcg

SEQ ID NO: 596625 - DNA, 80 bp, Artificial Sequence
  ENSG00000173898_68 (sequence is synthesized)
ggtcgggtcccggcggccggggtgagccggggcgggagcaggcggggacgggacggagagggtcccgtgccagccacaca

SEQ ID NO: 596626 - DNA, 120 bp, Artificial Sequence
  ENSG00000173898_69 (sequence is synthesized)
ctttgattaccgaaagcgcaaacatgtcttcaagctggggtaggaacagggaacagtgctctcgggatgggaggagagttgggagtgacacaggtgagccatgagtcaggtccagaggga

SEQ ID NO: 596627 - DNA, 120 bp, Artificial Sequence
  ENSG00000173898_70 (sequence is synthesized)
ggggagttcctgtaaggagcctgagtggagtaaccaggccagccacttggggatagtgtagatgagggaggcggagattctggttgtctccacaccaaggggagcaggagaaccaagacc

SEQ ID NO: 596628 - DNA, 120 bp, Artificial Sequence
  ENSG00000173898_71 (sequence is synthesized)
atgattacgctctcaccagcagctacctggcagatccggattctcagctctgccctgtggcctctctctcccaacagcttacaggatggaaaagaatatttattccaggccaaggatgag

SEQ ID NO: 596629 - DNA, 120 bp, Artificial Sequence
  ENSG00000173898_72 (sequence is synthesized)
tgatttgggcataattccttcctctcctaagcaggcagcagttcaccttggttaaggaccttggaccttagaccactcagacgctaacaaaccaaggagaaacccagccgtgtcaggcct

SEQ ID NO: 596630 - DNA, 120 bp, Artificial Sequence
  ENSG00000173898_73 (sequence is synthesized)
agaaatgtctgcccccacccccacccccctcaagacggtgactaggccggaattctcctggttgataaatgagaggagctgagaagcgctgagatgcctgtttggagcatctgatctgta

SEQ ID NO: 596631 - DNA, 120 bp, Artificial Sequence
  ENSG00000173898_74 (sequence is synthesized)
cccaacactgtccaacctgtttgtctggagccgcctgtctcctctcaccgcagccaggcgtgcccccactctctgtctcaggagttcgggacaccccgtaactctttttgccactccttg

SEQ ID NO: 596632 - DNA, 120 bp, Artificial Sequence
  ENSG00000173898_75 (sequence is synthesized)
aaattcccaccattcttgaatcccctgacgctggactccagcctgaggttccactggggaacagaaactggccccctgccagcggggagcatggactctgggccctgggctctgtaacta

SEQ ID NO: 596633 - DNA, 120 bp, Artificial Sequence
  ENSG00000173898_76 (sequence is synthesized)
tctttccctgtcctccctctttttcctggtcttgtcctttgtggtaagactggatgtgtgcgacggccgcaccaggccgcactccctgtctaagccggccacattctcctaatagcatga

SEQ ID NO: 596634 - DNA, 120 bp, Artificial Sequence
  ENSG00000173898_77 (sequence is synthesized)
aacagtcagctcactttctgcctcctcctcttacacttccctgctgtccactgcggccaactcagcacagtgtccttgaagctgattgagggtctttccatccacaggcagagatgagct

SEQ ID NO: 596635 - DNA, 120 bp, Artificial Sequence
  ENSG00000173898_78 (sequence is synthesized)
ggcagccaggactgaggcaggctgcggctccttggagtcccccgctctgcctgactctgacccggggctccgcaggtccagcaggtgcaggacgacggccaccggctccagaaggcctac

SEQ ID NO: 596636 - DNA, 120 bp, Artificial Sequence
  ENSG00000173905_0 (sequence is synthesized)
atagccgggccgtgggtgacacgtaagttgggcaggaggtggcggggcggcagaggcaccagccgacccgtcagtgacaccgctgtgccgtccccaaaaccagccgagacagctggcccc

SEQ ID NO: 596637 - DNA, 120 bp, Artificial Sequence
  ENSG00000173905_1 (sequence is synthesized)
cacccttccacccattgggcaggccgcacgggggcgcggcccggagtcctggtccctttgttgggcgcgcaccccctcccttaggtggcaacaaagtcgtgcagtgggagccgccgcgat

SEQ ID NO: 596638 - DNA, 120 bp, Artificial Sequence
  ENSG00000173905_2 (sequence is synthesized)
agggcggggagtggccagggcgggactccaagaactgcccgggggcagcggggccaaaaagtgggaagaaggaaaaaaggcaggaggcatctggggacaggcgcgagggcagccggctct

SEQ ID NO: 596639 - DNA, 120 bp, Artificial Sequence
  ENSG00000173905_3 (sequence is synthesized)
gaagtatgcggagggcctcctcccggccccgggcattcgcggagaacgagcctcgcagaagtttggctgcagctgcccgggcggcgtcgatggctgcgcgccccgcgccgcgcgggggct

SEQ ID NO: 596640 - DNA, 120 bp, Artificial Sequence
  ENSG00000173905_4 (sequence is synthesized)
gagcgggcgccacttcccctccgggccggcttttgtgtctggcatctcctcctcatgctgcgtctggccacctactgcggcggccgctgctgagacgctcgctcggaccaaggggaggag

SEQ ID NO: 596641 - DNA, 120 bp, Artificial Sequence
  ENSG00000173905_5 (sequence is synthesized)
acggcgggggcggccgcggctttgggtccaggcgggactatgggaaacgggatgtgctcccgaaagcagaagcggattttccagacgctgctgctgctgaccgtcgtgttcggctttctc

SEQ ID NO: 596642 - DNA, 120 bp, Artificial Sequence
  ENSG00000173905_6 (sequence is synthesized)
tacggcgcgatgctctactacgagctgcagacgcagctgcggaaagccgaggcggtggcgctcaagtaccagcagcaccaggagtccctctccgcccagttacaagttgtatatgaacac

SEQ ID NO: 596643 - DNA, 120 bp, Artificial Sequence
  ENSG00000173905_7 (sequence is synthesized)
agatcaagattagagaaatccttgcaaaaagaaagacttgaacataaaaaagcaaaggaagattttcttgtttataagttagaagcacaagaaacattaaataaaggaaggcaagattcc

SEQ ID NO: 596644 - DNA, 120 bp, Artificial Sequence
  ENSG00000173905_8 (sequence is synthesized)
aatagcagatacagtgcactgaatgtccaacatcagatgttgaaaagccaacacgaggagctaaagaaacagcacagtgacttggaagaggaacatcgcaaacaaggggaagacttcagt

SEQ ID NO: 596645 - DNA, 120 bp, Artificial Sequence
  ENSG00000173905_9 (sequence is synthesized)
agaacatttaatgaccataagcaaaaatacttgcagctccagcaagaaaaagaacaagaactttctaagctaaaagagactgtatacaatttgagagaagagaatagacaactaaggaaa

SEQ ID NO: 596646 - DNA, 120 bp, Artificial Sequence
  ENSG00000173905_10 (sequence is synthesized)
gcacaccaagacatacatacacagcttcaagatgtcaagcaacagcataagaatttactctccgagcatgaacaacttgtagtgactttggaagaccacaagagtgcactagctgctgca

SEQ ID NO: 596647 - DNA, 120 bp, Artificial Sequence
  ENSG00000173905_11 (sequence is synthesized)
cagactcaagttgcagaatataaacaactgaaagatactctgaataggattccaagccttcgaaaacctgatccagcagaacagcaaaatgtgacccaggtggcacattctccacaaggt

SEQ ID NO: 596648 - DNA, 120 bp, Artificial Sequence
  ENSG00000173905_12 (sequence is synthesized)
tacaacacagcaagggagaagccaacccgagaggtgcaggaggtgtctcgaaataatgatgtgtggcagaaccatgaagcagttcctggaagagcagaagacacaaaactctatgctccc

SEQ ID NO: 596649 - DNA, 120 bp, Artificial Sequence
  ENSG00000173905_13 (sequence is synthesized)
acccataaggaggcagaatttcaggctcccccagagccaatccaacaagaagtggaacgcagagaacctgaggagcatcaggtggaagaggagcacagaaaggccctggaggaggaagaa

SEQ ID NO: 596650 - DNA, 120 bp, Artificial Sequence
  ENSG00000173905_14 (sequence is synthesized)
atggagcaggtcgggcaagcagaacatcttgaggaggaacacgatccatcaccagaggagcaggatcgggagtggaaagagcagcatgagcaacgagaagcagccaacctcctggaaggg

SEQ ID NO: 596651 - DNA, 120 bp, Artificial Sequence
  ENSG00000173905_15 (sequence is synthesized)
cacgcgcgtgctgaggtgtacccttcagccaagccaatgatcaaattccaatcaccctatgaggaacagttggaacagcagagactggcagtgcagcaggtggaggaggcccagcagctg

SEQ ID NO: 596652 - DNA, 120 bp, Artificial Sequence
  ENSG00000173905_16 (sequence is synthesized)
cgggaacaccaggaagctttgcaccagcagaggctgcaggggcacttactacggcagcaggaacagcagcagcagcaggtggcaagagagatggccctgcagaggcaggctgagcttgag

SEQ ID NO: 596653 - DNA, 120 bp, Artificial Sequence
  ENSG00000173905_17 (sequence is synthesized)
agcctatgaaagagacaaccagcaccaagatgaagcagaaggagatccaggtaatagacatgagcctcgtgaacaaggaccccgagaagccgacccagaatctgaggcagatagggcagc

SEQ ID NO: 596654 - DNA, 120 bp, Artificial Sequence
  ENSG00000173905_18 (sequence is synthesized)
tgtagaagatataaacccagcagatgaccctaataatcaaggtgaggatgaatttgaagaagccgagcaagtgagagaagaaaatttgccagatgaaaatgaagagcaaaaacaaagtaa

SEQ ID NO: 596655 - DNA, 120 bp, Artificial Sequence
  ENSG00000173905_19 (sequence is synthesized)
tcaaaagcaagagaatacagaagtggaggaacatttggtgatggcaggaaatccagaccagcaggaggacaatgttgatgaacagtaccaggaagaggcagaagaggaggttcaggaaga

SEQ ID NO: 596656 - DNA, 120 bp, Artificial Sequence
  ENSG00000173905_20 (sequence is synthesized)
tttgactgaagagaaaaaaagggaactggagcataatgctgaagagacctatggtgaaaatgatgaaaatactgatgataaaaataatgatggagaagagcaagaagttcgagatgacaa

SEQ ID NO: 596657 - DNA, 120 bp, Artificial Sequence
  ENSG00000173905_21 (sequence is synthesized)
ccgccccaaaggccgagaggaacactacgaggaggaagaagaggaggaagaagacggggctgcagttgctgagaaatcacatcgaagagctgaaatgtagcggcacccaatttctagaca

SEQ ID NO: 596658 - DNA, 120 bp, Artificial Sequence
  ENSG00000173905_22 (sequence is synthesized)
acgctcagccaacggattcttttcaagctgctcaaacataaatctgcctactgaactctaggatatttaattacaaaaattaagaacttagacttttttaaaacttttgtattagaaatg

SEQ ID NO: 596659 - DNA, 120 bp, Artificial Sequence
  ENSG00000173905_23 (sequence is synthesized)
cgcatacatttatatgaatatattttgataacgtaggtctagagcttcttttatattcaagctaaacatgaaaaagaagaaaaacaataaagtaaacctgagcccccacgtcccaatttt

SEQ ID NO: 596660 - DNA, 120 bp, Artificial Sequence
  ENSG00000173905_24 (sequence is synthesized)
tttaatagattatgtgatgttggaaagctcattgattttgtatatgtttcagcgtgttacctttctggcttccagttcccaggtgttctttgtttgcctttgataaaatacaggatttaa

SEQ ID NO: 596661 - DNA, 120 bp, Artificial Sequence
  ENSG00000173905_25 (sequence is synthesized)
gaacagagagtactgcaaaatgccatgcagactttaaagagaatggcctgtttactaattgctgcccttctgatgtctttatgtatagctctgatagaattttcaccagtctatgtatct

SEQ ID NO: 596662 - DNA, 120 bp, Artificial Sequence
  ENSG00000173905_26 (sequence is synthesized)
ctggagtgagatctatgtacaaagtgacatacaattggaaatccatttttgttgtaaagacattgtttttcagacttttcagatcaattagaaaaatgtcattgctttaaaatcatagct

SEQ ID NO: 596663 - DNA, 120 bp, Artificial Sequence
  ENSG00000173905_27 (sequence is synthesized)
gttctgtttaagaggaattgaatttaaaaatgagagagtattaaaactcatgtggcagtatcctggtcttaatcaggtattgcagtgttcaaacaaggtatggacacatcaacatattca

SEQ ID NO: 596664 - DNA, 120 bp, Artificial Sequence
  ENSG00000173905_28 (sequence is synthesized)
ccttttggaaggactagtgacttggttaaaaactaatgagtgtttgcgtgtggtgtttctatgcgagcacccattctcaattttttttttttttttttgtttgaagccattgattgatat

SEQ ID NO: 596665 - DNA, 120 bp, Artificial Sequence
  ENSG00000173905_29 (sequence is synthesized)
tcttgtttcagtgtctggttccctataagtaatatatatttcctctttaagctctgtgcctcaatatgcaatcactttgataataagtataaatatgaagacataccaaactgcaaatag

SEQ ID NO: 596666 - DNA, 120 bp, Artificial Sequence
  ENSG00000173905_30 (sequence is synthesized)
gattatttttcaaaactatatggtgaaacatatggtgatatgatagacttatggtttttctgtttgctgggattgggtctgctttttgcctatgtgtaaggcattttaatcattgtgaat

SEQ ID NO: 596667 - DNA, 120 bp, Artificial Sequence
  ENSG00000173905_31 (sequence is synthesized)
ataatagattccttaaaataagaaaattaaaaatcagaaacttcccttggagtagagacatttcagttgcaagcataaagatttttaaatatataacactaggttatataattcatatat

SEQ ID NO: 596668 - DNA, 120 bp, Artificial Sequence
  ENSG00000173905_32 (sequence is synthesized)
gtgtggttttgtattaataatcaaattaataaaaacatttcattttctaccattgtatgaacgtaattttattttttaataaccacactcatagatggttttgattgttccagttgagtg

SEQ ID NO: 596669 - DNA, 120 bp, Artificial Sequence
  ENSG00000173905_33 (sequence is synthesized)
attgtgtatgtacgcataggaatgttttgttcagttgtactttgtatttccaataatcagaaatcttacctttatgtataaaaacccattatgtaatgtaaaatgtataatattgtacat

SEQ ID NO: 596670 - DNA, 120 bp, Artificial Sequence
  ENSG00000173905_34 (sequence is synthesized)
aatattcagaatacaattattttggtaaattagcttgtatttttaatgtcccagttgcagtatttaattatttgaaccatactgaaagttggtaatagtcaataaagctaaaaaaaaaaa

SEQ ID NO: 596671 - DNA, 120 bp, Artificial Sequence
  ENSG00000173905_35 (sequence is synthesized)
ttgcctgctttatttggtagaatgactttaaaaagtcattccctaattggcctgctttacaaatccacgttgttattgtgggctttgcattaactagagtgtacctaatatttttaccac

SEQ ID NO: 596672 - DNA, 120 bp, Artificial Sequence
  ENSG00000173905_36 (sequence is synthesized)
ttcagcattgtaagctaaaagatggtctgaaaatctgaatattctcattagtactgaaattattctcatgctagttacatattaataagctttttatttataaaagtttactaataatga

SEQ ID NO: 596673 - DNA, 120 bp, Artificial Sequence
  ENSG00000173908_0 (sequence is synthesized)
atgatattctgttctcttgggacattacagttttgcatagacaaggtgaacatttctcaaaacaccatgtctctccaattttctaatggatccaggcatgtttgcttaaggtctggagct

SEQ ID NO: 596674 - DNA, 120 bp, Artificial Sequence
  ENSG00000173908_1 (sequence is synthesized)
ggatctgtcagacccctcaatggaggtgcaggctttgcaggcagcagtgcatgtggtggctctgttgctggaagtgaattttcctgtgccttgggagggggcttgggcagtgttcctggt

SEQ ID NO: 596675 - DNA, 120 bp, Artificial Sequence
  ENSG00000173908_2 (sequence is synthesized)
gggagccatgctggtggtgcccttggaaatgctgcttgtattggctttgctggaagcgaagggggactcctctctggaaatgagaaggtgaccatgcaaaatcttaatgaccgcttggca

SEQ ID NO: 596676 - DNA, 120 bp, Artificial Sequence
  ENSG00000173908_3 (sequence is synthesized)
tcctacctggataatgtgcgagctctggaggaggcaaatgctgaattagagagaaaaatcaagggttggtatgaaaaatacggacctggatcttgccgtggacttgatcatgactatagc

SEQ ID NO: 596677 - DNA, 120 bp, Artificial Sequence
  ENSG00000173908_4 (sequence is synthesized)
agatatcacctaacaattgaggatcttaagaataagattatctcctccactactactaatgctaatgtcattctgcagattgataatgccagactggctgctgatgatttcaggctaaag

SEQ ID NO: 596678 - DNA, 120 bp, Artificial Sequence
  ENSG00000173908_5 (sequence is synthesized)
tatgaaaatgagctcacccttcaccaaaacgtagaggccgacatcaacggattacggcgagtcctggacgagctgacgctctgcaggaccgaccaggagctgcaatatgagtctctgagt

SEQ ID NO: 596679 - DNA, 120 bp, Artificial Sequence
  ENSG00000173908_6 (sequence is synthesized)
gaggagatgacatatctcaaaaagaaccacgaagaggagatgaaggctctgcagtgcgcggctgggggcaacgtgaacgtggagatgaacgcggccccgggggtagacctcgcggttttg

SEQ ID NO: 596680 - DNA, 120 bp, Artificial Sequence
  ENSG00000173908_7 (sequence is synthesized)
cgagcggagtacgaagcccttgcagagcagaaccgcaaggacgcggaggcctggttcaatgagaagagcgcctcgctgcagcaacagatctcccacgactcaggcgcagccactttcgcc

SEQ ID NO: 596681 - DNA, 120 bp, Artificial Sequence
  ENSG00000173908_8 (sequence is synthesized)
cggagccagctcaccgagatgaggcgcaccctgcagaccctggagatccagctgcagtccctgatggccacgaaacactccctggagtgctccttgacagagaccgagagcaactactgt

SEQ ID NO: 596682 - DNA, 120 bp, Artificial Sequence
  ENSG00000173908_9 (sequence is synthesized)
acgcagctggcgcagatccaggctcagatcggggccctggaggagcagctgcaccaggtcagaaccgagaccgagggccagaagctggagtatgagcatctcctcgatgtcaaggtccac

SEQ ID NO: 596683 - DNA, 120 bp, Artificial Sequence
  ENSG00000173908_10 (sequence is synthesized)
ttggaaaaagaaattgagacctactgccgcctgatagatggagatggaaattcatgctccaaatcaaagggctttggatcaggaagccctgggaattcatctaaagatttatccaaaacc

SEQ ID NO: 596684 - DNA, 120 bp, Artificial Sequence
  ENSG00000173908_11 (sequence is synthesized)
acactggtaaagacagtggttgaagagctagatcaacgtggtaaagttctttcatcaaggattcactccattgaagaaaagacatctaaaatgaccaacggcaagacagaacaaagggtt

SEQ ID NO: 596685 - DNA, 120 bp, Artificial Sequence
  ENSG00000173908_12 (sequence is synthesized)
cctttctagctgtcattttagagaaaagaataatttgggaaaggatcctgtacaattgcattattctaaatatcagagagaatatacacactttttacttttaaagatacattacttagc

SEQ ID NO: 596686 - DNA, 120 bp, Artificial Sequence
  ENSG00000173908_13 (sequence is synthesized)
aaaaatacctgttttcttagttttacaggatattgagtgtttgtttccaataaataaaaaagttgatgtgcattcatttccattcactgatgactaataaataactatttgtgatttttt

SEQ ID NO: 596687 - DNA, 120 bp, Artificial Sequence
  ENSG00000173914_0 (sequence is synthesized)
gcactcgcgcgtgcgtgagctggcgcgcgagaaagggcccggtcgcgtccaggctcgagcggccgtcgccattttgtaaggttctctctgacgtgggagccgccgtcgctgccgccaccc

SEQ ID NO: 596688 - DNA, 120 bp, Artificial Sequence
  ENSG00000173914_1 (sequence is synthesized)
ggaggctcttgtcaggatggtgaagctgttcatcggaaaccttccccgggaggctacagagcaggagattcgctcactcttcgagcagtatgggaaggtgctggaatgtgacatcattaa

SEQ ID NO: 596689 - DNA, 120 bp, Artificial Sequence
  ENSG00000173914_2 (sequence is synthesized)
gaattacggctttgtgcacatagaagacaagacggcagctgaggatgccatacgcaacctgcaccattacaagcttcatggggtgaacatcaacgtggaagccagcaagaataagagcaa

SEQ ID NO: 596690 - DNA, 120 bp, Artificial Sequence
  ENSG00000173914_3 (sequence is synthesized)
agcttcaaccaagttacacgtgggtaacatcagccccacttgtaccaaccaagagcttcgagccaagtttgaggagtatggtccggtcatcgaatgtgacatcgtgaaagattatgcctt

SEQ ID NO: 596691 - DNA, 120 bp, Artificial Sequence
  ENSG00000173914_4 (sequence is synthesized)
cgtacacatggagcgggcagaggatgcagtggaggccatcaggggccttgacaacacagagtttcaaggcaaaagaatgcatgtgcagttgtccacaagccggcttcggactgcccctgg

SEQ ID NO: 596692 - DNA, 120 bp, Artificial Sequence
  ENSG00000173914_5 (sequence is synthesized)
tatgggagaccagagtggctgctatcggtgtgggaaagaagggcactggtccaaagagtgcccagtagatcgtacgggtcgtgtggcagactttactgagcagtataatgaacaatatgg

SEQ ID NO: 596693 - DNA, 120 bp, Artificial Sequence
  ENSG00000173914_6 (sequence is synthesized)
agcagttcgaacaccttacaccatgggctacggggaatccatgtattacaacgatgcatatggagcactcgactactataagcgataccgggtccgctcttatgaggcagtagcagcggc

SEQ ID NO: 596694 - DNA, 120 bp, Artificial Sequence
  ENSG00000173914_7 (sequence is synthesized)
ggcttctgcatacaactacgcagagcagaccatgtcccatctgcctcaagtccaaagcacaactgtgaccagccacctcaactctacttctgttgatccctatgacagacacctattgcc

SEQ ID NO: 596695 - DNA, 120 bp, Artificial Sequence
  ENSG00000173914_8 (sequence is synthesized)
aaactctggcgctgctgccacttcagctgctatggctgctgctgcagccaccacttcctcctactatggaagggacaggagcccactgcgtcgtgctgcagccatgctccccacagttgg

SEQ ID NO: 596696 - DNA, 120 bp, Artificial Sequence
  ENSG00000173914_9 (sequence is synthesized)
agagggctacggttatgggccagagagtgaattatctcaggcttccgcagctacacggaattctctgtatgacatggcccggtatgaacgggagcagtatgtggaccgagcccggtactc

SEQ ID NO: 596697 - DNA, 120 bp, Artificial Sequence
  ENSG00000173914_10 (sequence is synthesized)
agccttttaaaaactggaggtaggataattgcggactgaaccctcgggctgcggtcatatatgagaacttgctccgcgcggtcccctttgccgggatgtttccattgcttcatgtttcag

SEQ ID NO: 596698 - DNA, 120 bp, Artificial Sequence
  ENSG00000173914_11 (sequence is synthesized)
taaacaaaaggagtttgtgaccaactatgttttctttcttaattcttctaagttgacttttctttcctcctgaaactagtctctgtagcctttcactctgttccttatattctcagcctc

SEQ ID NO: 596699 - DNA, 120 bp, Artificial Sequence
  ENSG00000173914_12 (sequence is synthesized)
tgagcagccctaggtaaggattatgctggcatcccctttttcctgtgcagtggaacccctcttatcttgctttccctaggagttgaatccttctccctgcctacctgcagcatctccttt

SEQ ID NO: 596700 - DNA, 120 bp, Artificial Sequence
  ENSG00000173914_13 (sequence is synthesized)
ccctttaaaatgaccatgtagtggcaagcagccttttactcttctgttagctctggactcttaacacttaagttactcttctgaaattgctaggaccattgggggttttgttgttttgtt

SEQ ID NO: 596701 - DNA, 120 bp, Artificial Sequence
  ENSG00000173914_14 (sequence is synthesized)
tgttttttatgtccgacctgtgatcgtggtacagcattagctgaaatttacccttgttttactccactcctcccttttttaaaaaaattttttgacaaataaatgtttctaacacttaaa

SEQ ID NO: 596702 - DNA, 120 bp, Artificial Sequence
  ENSG00000173914_15 (sequence is synthesized)
gtgtgtgtgatgtggggagctcgggggcgggtcgggccgggcctccggcagactgcacggcccggatttgggtttctcattttgcagcgggaggtctgggaagacaacgggaggaggcgg

SEQ ID NO: 596703 - DNA, 120 bp, Artificial Sequence
  ENSG00000173914_16 (sequence is synthesized)
ggccgggtctccggaaggaggcggggcaggggtcgggtcgagtctttgttggggcgaagaagctggagggtgggccgctgggggcgaggtggttggtccccggtttgggggaaaggggac

SEQ ID NO: 596704 - DNA, 120 bp, Artificial Sequence
  ENSG00000173914_17 (sequence is synthesized)
ttttttctttttagagtatcttgaaaggcgctagtgcgcgcaggagaggtacacagatttccctccaaaaccttgttaccaggcgcactgcgattgatgccccttgcctttgcttgggct

SEQ ID NO: 596705 - DNA, 120 bp, Artificial Sequence
  ENSG00000173914_18 (sequence is synthesized)
tttctcttccctcattttaagacatgaagcagctaattctggtatttcattgcgctccacttcacggagatgatagactgggctatgcatgctgaccctcgacctcctgtttgcatgtca

SEQ ID NO: 596706 - DNA, 120 bp, Artificial Sequence
  ENSG00000173914_19 (sequence is synthesized)
cgcatagctcgcacttctcgagaacaaaccgcccttcttctattgaggaagaataatgaatgtctgtacgagggtcttgaaggtgcaagaactttggaggattagacgaaaatgctgcag

SEQ ID NO: 596707 - DNA, 120 bp, Artificial Sequence
  ENSG00000173914_20 (sequence is synthesized)
tgaataaccctgagttggttgcagtcccaggagcctgatgttaatgaggctgccaggatgaaatactccagaactgttggggatccaaattcgggtctcaccctagcagaactgatccaa

SEQ ID NO: 596708 - DNA, 120 bp, Artificial Sequence
  ENSG00000173914_21 (sequence is synthesized)
taactttttttttcccccagccattggtgtctggagttcccatcatcaatagaaggattagagaattctaggaatgatttcttttgatttggcaagggagatttggtcaattaggggaac

SEQ ID NO: 596709 - DNA, 120 bp, Artificial Sequence
  ENSG00000173914_22 (sequence is synthesized)
tactggaactgtggctctcactctgtgacagtgtgacatgtaggtgtgttggaattgggtgaatgactggctgctccttgatatcctaccccttgtgaccatcatttctgaaagcttgtt

SEQ ID NO: 596710 - DNA, 120 bp, Artificial Sequence
  ENSG00000173914_23 (sequence is synthesized)
tactgtgaaagattaaaacaaaacacatttagaatagtgcaattcgccatatatgacatctcagcatcttctgcttttcctggactccaaaattaaattgcagttcttgaaaatgtatgt

SEQ ID NO: 596711 - DNA, 120 bp, Artificial Sequence
  ENSG00000173914_24 (sequence is synthesized)
acaagactatagaacttgctgggtggtctcttccattctgttttagctggaaataatagattatgtttaccgctcttaagcataatttacccctggggaagcaaacacttccccttttca

SEQ ID NO: 596712 - DNA, 120 bp, Artificial Sequence
  ENSG00000173914_25 (sequence is synthesized)
gctgttggaagtgtaatctgcttggggaaacgagtacctcatgagagaagggaggataaaggtccgtggcttacctgcttctttggtgatgatcaggaagccttatatttgagggtttaa

SEQ ID NO: 596713 - DNA, 120 bp, Artificial Sequence
  ENSG00000173914_26 (sequence is synthesized)
gtgcttaagatttatattctttactgctttgggtggatactggtgggaaagaagaaaaaagacatctagaggaagccctatattataaatctgggtggcaagtctggatctgcgggagta

SEQ ID NO: 596714 - DNA, 120 bp, Artificial Sequence
  ENSG00000173914_27 (sequence is synthesized)
tctttttgttgatcaaagttgtgcagtctcttcaagcagagtcaaaaaaacatgccatggagtgttctgctccacctgttcatttcaccctcagaaaaggaaatttctaaatatatcaga

SEQ ID NO: 596715 - DNA, 120 bp, Artificial Sequence
  ENSG00000173914_28 (sequence is synthesized)
ctcaatgggaatgatggtcccgcttctgaagaaatttcagtacaagcatcgtagagcatatcatactatttataccgataataaaggtacatatgttgtcattaataccacaagaggttg

SEQ ID NO: 596716 - DNA, 120 bp, Artificial Sequence
  ENSG00000173914_29 (sequence is synthesized)
tcagaagactctagaactgtgctaatatggtaaccacatgcggcttagtaaattgaaattaacagattagataaaatttaaaattcagtttttcaagtgtataccagacacgtttcaagc

SEQ ID NO: 596717 - DNA, 120 bp, Artificial Sequence
  ENSG00000173914_30 (sequence is synthesized)
actcagtagtcatgaggcctgtggctaccgtattaatagagacacagaacatttccatcatcatagaacattcttttggatagcactgttctacaagtgttttgttaacagtatcgtctt

SEQ ID NO: 596718 - DNA, 120 bp, Artificial Sequence
  ENSG00000173914_31 (sequence is synthesized)
ggacctcatgttcatagccacttttgtggttcctaagtcaacaccttttttgccctgagtgtcattaaaggggttgttaagaagtacttttgggtcttctattaaaactaaaaaacaaaa

SEQ ID NO: 596719 - DNA, 120 bp, Artificial Sequence
  ENSG00000173914_32 (sequence is synthesized)
gccctttgtctgtaataagtagaggaacttggtgacaggacccagggcgcttgtacgcggagccaggctgctctccaggcattgtgtaagcctcttgtgttgtgctctctttcaggtagg

SEQ ID NO: 596720 - DNA, 120 bp, Artificial Sequence
  ENSG00000173915_0 (sequence is synthesized)
ccgagaggtggttacattcgttgaaggacaccagctgcggaatttgcggctttggcagattgaaatcatggcaggtccagaaagtgatgcgcaataccagttcactggtattaaaaaata

SEQ ID NO: 596721 - DNA, 120 bp, Artificial Sequence
  ENSG00000173915_1 (sequence is synthesized)
aactcttatactctcacaggtagaatgaactgtgtactggccacatatggaagcattgcattgattgtcttatatttcaagttaaggtccaaaaaaactccagctgtgaaagcaacataa

SEQ ID NO: 596722 - DNA, 120 bp, Artificial Sequence
  ENSG00000173915_2 (sequence is synthesized)
atggattttaaactgtctacggttcttaacctcatctgttaagttcccatgcctggagaagctaatgccaactcatcatgtgataattcaatttgtacaataaattatgaacctggaaaa

SEQ ID NO: 596723 - DNA, 120 bp, Artificial Sequence
  ENSG00000173915_3 (sequence is synthesized)
ccgagaggtggttacattcgttgaaggacaccagctgcggaatttgcggctttggcagacccagctgagtcactgtcactgcctaccaatctcgaccggacctcgaccggctcgtctgtg

SEQ ID NO: 596724 - DNA, 120 bp, Artificial Sequence
  ENSG00000173915_4 (sequence is synthesized)
ttgccaatcgactcggcgtggcgtcggtcgtggtagataggcggtcatgcatacgaattttcagctcttgttctggtgaccttttgaatacgtcttgtctataaaagaaattcatgcctt

SEQ ID NO: 596725 - DNA, 120 bp, Artificial Sequence
  ENSG00000173915_5 (sequence is synthesized)
atcaccggccgaattaacctcttttcttctgtatgtccatagctgtttgttcccaccgagctgtgctttaggaagctggccagccgggcctcctttaggtgcgctgcagcctttttcaaa

SEQ ID NO: 596726 - DNA, 120 bp, Artificial Sequence
  ENSG00000173915_6 (sequence is synthesized)
gcgagtgaatgtggcccggcccctacagttcgccaggcccgctgtaaaagggttagatttcagtctatagacgatcagtgggaaggcctttcctaggaggtaaccagaacagagagctgt

SEQ ID NO: 596727 - DNA, 120 bp, Artificial Sequence
  ENSG00000173915_7 (sequence is synthesized)
gggggaggtggcttcttccggccgggccgagaggtggttacattcgttgaaggacaccagctgcggaatttgcggctttggcagctgtttgttcccaccgagctgtgctttaggaagctg

SEQ ID NO: 596728 - DNA, 120 bp, Artificial Sequence
  ENSG00000173917_0 (sequence is synthesized)
gggtgcaggaggggggtcccttccgatcctccctcctgacgccccccccagcagccccctcccccaccattgaaagccatgaattttgaatttgagagggagattgggtttataaacagc

SEQ ID NO: 596729 - DNA, 120 bp, Artificial Sequence
  ENSG00000173917_1 (sequence is synthesized)
cagccgtcgctcgccgagtgtctgacttccttccccgctgtcttggagacatttcaaacttcatcaatcaaggagtcgacattaattcctcctcctcctcctttcgagcaaaccttcccc

SEQ ID NO: 596730 - DNA, 120 bp, Artificial Sequence
  ENSG00000173917_2 (sequence is synthesized)
agcctccagcccggcgcctccacccttcagagacccaggagccaaaagcgagccgaagatgggcctgctctgccgccgccaccgccgccgccactccccgctgcccccccggcccccgag

SEQ ID NO: 596731 - DNA, 120 bp, Artificial Sequence
  ENSG00000173917_3 (sequence is synthesized)
ttcccttggatgaaagagaagaaatccgccaagaaacccagccaatccgccacgtctccttctccggccgcctccgccgttccggcctccggggtcggatcgcctgcagatggcctggga

SEQ ID NO: 596732 - DNA, 120 bp, Artificial Sequence
  ENSG00000173917_4 (sequence is synthesized)
ctgccggaggctggtggcggcggggcgcgcaggctgcgcacggcttacaccaacacgcagctgctggaactggagaaggaattccactttaataagtacctgtgccggccacgccgcgtc

SEQ ID NO: 596733 - DNA, 120 bp, Artificial Sequence
  ENSG00000173917_5 (sequence is synthesized)
gagatcgcggccttgctggacctcaccgaaaggcaggtcaaagtctggtttcagaaccggcgcatgaagcacaagcggcagacgcagcaccgagagccgccggatggggagcctgcctgc

SEQ ID NO: 596734 - DNA, 120 bp, Artificial Sequence
  ENSG00000173917_6 (sequence is synthesized)
tggaggacatctgcgaccctgccgaggaacccgcggccagcccgggcggcccctccgcctcgcgggcggcgtgggaagcctgctgtcacccgccggaggtggtgccgggggccttaagcg

SEQ ID NO: 596735 - DNA, 120 bp, Artificial Sequence
  ENSG00000173917_7 (sequence is synthesized)
cttaagcgcggacccccggcctttagccgttcgcttagagggcgcaggcgcgtcgagtcccggctgcgcgctgcgcggggccggcgggctggagcccgggccattgccagaagacgtctt

SEQ ID NO: 596736 - DNA, 120 bp, Artificial Sequence
  ENSG00000173917_8 (sequence is synthesized)
ctcggggcgccaggattcacctttccttcccgacctcaacttcttcgcggccgactcctgtctccagctatccggaggcctctcccctagcctacagggttctctcgacagcccggtccc

SEQ ID NO: 596737 - DNA, 120 bp, Artificial Sequence
  ENSG00000173917_9 (sequence is synthesized)
tttttccgaggaagagctggattttttcaccagtacgctctgtgccatcgacctgcagtttccctaacctgtttcctcctcccggtcctttcgacccccgcgctccttggccgtctactg

SEQ ID NO: 596738 - DNA, 120 bp, Artificial Sequence
  ENSG00000173917_10 (sequence is synthesized)
gaaaaatcgagcctctcccaccctcagtcgcatagacttatgtgttttgctaaaattcaggtattactgaattagcgtttaatccactccctttcttcttcttctaaaatattgggcact

SEQ ID NO: 596739 - DNA, 120 bp, Artificial Sequence
  ENSG00000173917_11 (sequence is synthesized)
cggttatcttttaaaattcacacagaaaaattccgtttggtagactccttccaatgaaatctcaggaataattaaactctagggggactttcttaaaaataactagagggacctattttc

SEQ ID NO: 596740 - DNA, 120 bp, Artificial Sequence
  ENSG00000173917_12 (sequence is synthesized)
agagggacctattttcctcttttttatgttttagactgtagattatttattaaaattctttaataataggaaaaggggaaagtatttattgtacattattttcatagattaaataaatgt

SEQ ID NO: 596741 - DNA, 120 bp, Artificial Sequence
  ENSG00000173917_13 (sequence is synthesized)
ggatgtgggaagggaaggagagcggcgggtctgcgggcctgggtgtgcctcatccagtctgacttttgattcttcgctgtgggatttgaagccaggccagagctttctctgaatgcagac

SEQ ID NO: 596742 - DNA, 120 bp, Artificial Sequence
  ENSG00000173917_14 (sequence is synthesized)
ggtaagcgggaagcaaggatcgatctcccccatctgcctcctggtttgttctgggaaggtggaggtttaaaggtccccggaaagccatccatcctccttaggtttctttaatatttctcc

SEQ ID NO: 596743 - DNA, 120 bp, Artificial Sequence
  ENSG00000173917_15 (sequence is synthesized)
cgctcagaaacagacactacggggctatctccccggcagatgctgcccttctcaaaaagcagtttatttcctgggcctccagactttcccctggaccaacaggaccgggatttagagtac

SEQ ID NO: 596744 - DNA, 120 bp, Artificial Sequence
  ENSG00000173917_16 (sequence is synthesized)
cagtcacccagaggcagcaattgtcaggataagccaggagccaacataggttgtgacacagaggactagacaggccctttgcatattttaaaatgggtccctcagtgtgggaagtacaca

SEQ ID NO: 596745 - DNA, 120 bp, Artificial Sequence
  ENSG00000173917_17 (sequence is synthesized)
cctcttagttagctggaacttaatcccttaaactgtcttaatatagaattcatctcgtgcattaatcttacatcatgttaaattgcacttatttctctcataaataaatatagaacaatt

SEQ ID NO: 596746 - DNA, 120 bp, Artificial Sequence
  ENSG00000173918_0 (sequence is synthesized)
atctggctgggcttcgctccttgcgcgtctgtcccactttctccctctcttcctttactttcgagaaaccgcgcttccgcttctggtcgcagagacctcggagaccgcgccggggagacg

SEQ ID NO: 596747 - DNA, 120 bp, Artificial Sequence
  ENSG00000173918_1 (sequence is synthesized)
gaggtgctgtgggtgggggggacctgtggctgctcgtaccgccccccaccctcctcttctgcactgccgtcctccggaagaccttttcccctgctctgtttccttcaccgagtctgtgca

SEQ ID NO: 596748 - DNA, 120 bp, Artificial Sequence
  ENSG00000173918_2 (sequence is synthesized)
gacctggccgggaggaggcttggccggcgggagatgctctaggggcggcgcgggaggagcggccggcgggacggagcaggggcaagcctgccgcccgaggccttccagctgggaggtgag

SEQ ID NO: 596749 - DNA, 120 bp, Artificial Sequence
  ENSG00000173918_3 (sequence is synthesized)
gaggtgagctgaggacagctgctctactcaaggaaatctttgtttccactgggacggaatcggagctctggaggctgggctggccaagcgccccgaaggcccgatgcctgacggctcatg

SEQ ID NO: 596750 - DNA, 120 bp, Artificial Sequence
  ENSG00000173918_4 (sequence is synthesized)
cggcctccttgtttgcagggcctgggcaaaaatttacactgagtcccactcttcgctccagggcccggcaggaagatgggctcccgtggacagggactcttgctggcgtactgcctgctc

SEQ ID NO: 596751 - DNA, 120 bp, Artificial Sequence
  ENSG00000173918_5 (sequence is synthesized)
cttgcctttgcctctggcctggtcctgagtcgtgtgccccatgtccagggggaacagcaggagtgggaggggactgaggagctgccgtcgcctccggaccatgccgagagggctgaagaa

SEQ ID NO: 596752 - DNA, 120 bp, Artificial Sequence
  ENSG00000173918_6 (sequence is synthesized)
caacatgaaaaatacaggcccagtcaggaccaggggctccctgcttcccggtgcttgcgctgctgtgaccccggtacctccatgtacccggcgaccgccgtgccccagatcaacatcact

SEQ ID NO: 596753 - DNA, 120 bp, Artificial Sequence
  ENSG00000173918_7 (sequence is synthesized)
atcttgaaaggggagaagggtgaccgcggagatcgaggcctccaagggaaatatggcaaaacaggctcagcaggggccaggggccacactggacccaaagggcagaagggctccatgggg

SEQ ID NO: 596754 - DNA, 120 bp, Artificial Sequence
  ENSG00000173918_8 (sequence is synthesized)
gcccctggggagcggtgcaagagccactacgccgccttttcggtgggccggaagaagcccatgcacagcaaccactactaccagacggtgatcttcgacacggagttcgtgaacctctac

SEQ ID NO: 596755 - DNA, 120 bp, Artificial Sequence
  ENSG00000173918_9 (sequence is synthesized)
gaccacttcaacatgttcaccggcaagttctactgctacgtgcccggcctctacttcttcagcctcaacgtgcacacctggaaccagaaggagacctacctgcacatcatgaagaacgag

SEQ ID NO: 596756 - DNA, 120 bp, Artificial Sequence
  ENSG00000173918_10 (sequence is synthesized)
gaggaggtggtgatcttgttcgcgcaggtgggcgaccgcagcatcatgcaaagccagagcctgatgctggagctgcgagagcaggaccaggtgtgggtacgcctctacaagggcgaacgt

SEQ ID NO: 596757 - DNA, 120 bp, Artificial Sequence
  ENSG00000173918_11 (sequence is synthesized)
gagaacgccatcttcagcgaggagctggacacctacatcaccttcagtggctacctggtcaagcacgccaccgagccctagctggccggccacctcctttcctctcgccaccttccaccc

SEQ ID NO: 596758 - DNA, 120 bp, Artificial Sequence
  ENSG00000173918_12 (sequence is synthesized)
cgatcggtgctcccagatcccgcagcctctggagagagctgacggcagatgaaatcaccagggcggggcacccgcgagaaccctctgggaccttccgcggccctctctgcacacatcctc

SEQ ID NO: 596759 - DNA, 120 bp, Artificial Sequence
  ENSG00000173918_13 (sequence is synthesized)
aagtgaccccgcacggcgagacgcgggtggcggcagggcgtcccagggtgcggcaccgcggctccagtccttggaaataattaggcaaattctaaaggtctcaaaaggagcaaagtaaac

SEQ ID NO: 596760 - DNA, 120 bp, Artificial Sequence
  ENSG00000173918_14 (sequence is synthesized)
cgtggaggacaaagaaaagggttgttatttttgtctttccagccagcctgctggctcccaagagagaggccttttcagttgagactctgcttaagagaagatccaaagttaaagctctgg

SEQ ID NO: 596761 - DNA, 120 bp, Artificial Sequence
  ENSG00000173918_15 (sequence is synthesized)
ggtcaggggaggggccgggggcaggaaactacctctggcttaattcttttaagccacgtaggaactttcttgagggataggtggaccctgacatccctgtggccttgcccaagggctctg

SEQ ID NO: 596762 - DNA, 120 bp, Artificial Sequence
  ENSG00000173918_16 (sequence is synthesized)
ctggtctttctgagtcacagctgcgaggtgatgggggctggggccccaggcgtcagcctcccagagggacagctgagccccctgccttggctccaggttggtagaagcagccgaagggct

SEQ ID NO: 596763 - DNA, 120 bp, Artificial Sequence
  ENSG00000173918_17 (sequence is synthesized)
cctgacagtggccagggacccctgggtcccccaggcctgcagatgtttctatgaggggcagagctcctggtacatccatgtgtggctctgctccacccctgtgccaccccagagccctgg

SEQ ID NO: 596764 - DNA, 120 bp, Artificial Sequence
  ENSG00000173918_18 (sequence is synthesized)
ggggtggtctccatgcctgccaccctggcatcggctttctgtgccgcctcccacacaaatcagccccagaaggccccggggccttggcttctgttttttataaaacacctcaagcagcac

SEQ ID NO: 596765 - DNA, 120 bp, Artificial Sequence
  ENSG00000173918_19 (sequence is synthesized)
tgcagtctcccatctcctcgtgggctaagcatcaccgcttccacgtgtgttgtgttggttggcagcaaggctgatccagaccccttctgcccccactgccctcatccaggcctctgacca

SEQ ID NO: 596766 - DNA, 120 bp, Artificial Sequence
  ENSG00000173918_20 (sequence is synthesized)
gtagcctgagaggggctttttctaggcttcagagcaggggagagctggaaggggctagaaagctcccgcttgtctgtttctcaggctcctgtgagcctcagtcctgagaccagagtcaag

SEQ ID NO: 596767 - DNA, 120 bp, Artificial Sequence
  ENSG00000173918_21 (sequence is synthesized)
aggaagtacacgtcccaatcacccgtgtcaggattcactctcaggagctgggtggcaggagaggcaatagcccctgtggcaattgcaggaccagctggagcagggttgcggtgtctccac

SEQ ID NO: 596768 - DNA, 120 bp, Artificial Sequence
  ENSG00000173918_22 (sequence is synthesized)
ggtgctctcgccctgcccatggccaccccagactctgatctccaggaaccccatagcccctctccacctcaccccatgttgatgcccagggtcactcttgctacccgctgggcccccaaa

SEQ ID NO: 596769 - DNA, 120 bp, Artificial Sequence
  ENSG00000173918_23 (sequence is synthesized)
cccccgctgcctctcttccttccccccatcccccacctggttttgactaatcctgcttccctctctgggcctggctgccgggatctggggtccctaagtccctctctttaaagaacttct

SEQ ID NO: 596770 - DNA, 120 bp, Artificial Sequence
  ENSG00000173918_24 (sequence is synthesized)
gcgggtcagactctgaagccgagttgctgtgggcgtgcccggaagcagagcgccacactcgctgcttaagctcccccagctctttccagaaaacattaaactcagaattgtgttttcagc

SEQ ID NO: 596771 - DNA, 120 bp, Artificial Sequence
  ENSG00000173918_25 (sequence is synthesized)
atttgtcctcagctctacctgagtgctggcctcgcccagcctggggcaaggcagtgggcattgtgcttgcaccctcttcttcctctcctttttgattcttttcatctgtccagttgttgg

SEQ ID NO: 596772 - DNA, 120 bp, Artificial Sequence
  ENSG00000173918_26 (sequence is synthesized)
gcacttggctgtggtgtgtgctgcagggagcgggaggacatgggaggacgtgctccaggaggcctctccagcacctgccaaccggggaggagggaaccaagacagggagatgggagccga

SEQ ID NO: 596773 - DNA, 120 bp, Artificial Sequence
  ENSG00000173918_27 (sequence is synthesized)
ggtctgaggacaagcagaagcttccccaccctccctcttagagctgcagagctggagaggcccctagagtccacccaacaacaacagtggcaatcatcatcaccatcatcatcatcatca

SEQ ID NO: 596774 - DNA, 120 bp, Artificial Sequence
  ENSG00000173918_28 (sequence is synthesized)
agcctggggcaaggcagtgggcattgtgcttgcaccctcttcttcctctcctttttgattcttttcatctgtccagttgttggtgcggcggatgggaggacactccaggcagggaaagaa

SEQ ID NO: 596775 - DNA, 120 bp, Artificial Sequence
  ENSG00000173918_29 (sequence is synthesized)
gtggattgcatgtgtgttgggtgcatgtgaatgtgtgggttgcatgtgagtgtatgtgactgtgtgtgcatgtgtggattgcatgtgtgttgagtgtgtgcatgtgtgggggttgcatgt

SEQ ID NO: 596776 - DNA, 120 bp, Artificial Sequence
  ENSG00000173918_30 (sequence is synthesized)
atgtgaatgtgtgtgcatgtgcgtgtgtgcacgtgagtgcgtcgtgagtgcgtgtatgcatgcatgggtgtgtgagagtgattgtcctcccagaagctgtgtaactgcagcatttcccag

SEQ ID NO: 596777 - DNA, 120 bp, Artificial Sequence
  ENSG00000173918_31 (sequence is synthesized)
tggcgtgaggctggggaagcacctccgatttccaggctgtttctctccccaattttcaggctgtttctctgtgcagctccttcctaactcggtgccttccctgtgtgtttctttcccacc

SEQ ID NO: 596778 - DNA, 120 bp, Artificial Sequence
  ENSG00000173918_32 (sequence is synthesized)
gttttgggagcggtcggtccccgagggcgtccccgctgctggtgctagggaagtgggcggcgggccaggccacctgcagagtgggctcaggacagctgttggtgcctcttctctctcaca

SEQ ID NO: 596779 - DNA, 120 bp, Artificial Sequence
  ENSG00000173918_33 (sequence is synthesized)
ctccatctcaaaaaaaaaaaaaaaaagcccgctacagacatcccccgcagaggctccaaagcccccgagcgacgggcccggcaggaagatgggctcccgtggacagggactcttgctggc

SEQ ID NO: 596780 - DNA, 120 bp, Artificial Sequence
  ENSG00000173918_34 (sequence is synthesized)
ggcctggcagcctttctccctgtactcacaggaggggttgacgcatgcagtcagggcctctgtggagtggcttttgggcgcctcgcctgcccggaagcctccccttctgttctcatctcc

SEQ ID NO: 596781 - DNA, 120 bp, Artificial Sequence
  ENSG00000173918_35 (sequence is synthesized)
tatcactgggaccacctgaccgccgggtctgtccagtcctgtctgtggccaacctggaccttcacggaataggaagcgctgactttggccccccgcatctgacagccttggtgtcctgga

SEQ ID NO: 596782 - DNA, 120 bp, Artificial Sequence
  ENSG00000173918_36 (sequence is synthesized)
ggaaaggggcccacaggaccaagagcaggagagggagcccagaggctactcggggtctcgtccctccagttgtatgtggacgccaggcttctaggccctttgctttggggcttggtcccc

SEQ ID NO: 596783 - DNA, 120 bp, Artificial Sequence
  ENSG00000173918_37 (sequence is synthesized)
cagcctgctttctgaaatgccacctgctcgctccggtcctgcacacggcagataaccctgcacagccccgtgaaatcgaactggaaacacttgcagcctagatccccagctggccccgac

SEQ ID NO: 596784 - DNA, 120 bp, Artificial Sequence
  ENSG00000173926_0 (sequence is synthesized)
actcgttgagcaggtccgtgaattgtcagcgcgctgtgggcgactgtgtggccgcggcggccgccaggcttgccgcactccccctgaggtgcccgccggaaccaatgtgccctggtccac

SEQ ID NO: 596785 - DNA, 120 bp, Artificial Sequence
  ENSG00000173926_1 (sequence is synthesized)
tgggccgtgagcagccaccgactgggggcaacttggcacttagaaccgcagcagggacgtcggtttgctatcgggactcggcgaggacgatggaaatcctgtatgaatgtggaagccatt

SEQ ID NO: 596786 - DNA, 120 bp, Artificial Sequence
  ENSG00000173926_2 (sequence is synthesized)
agcagagtaattgctgtctgttaccatgacaaccagccgctgcagtcacctgcccgaagtcctgccagactgcaccagctcagctgcacccgtggtgaagacggtggaggattgtggcag

SEQ ID NO: 596787 - DNA, 120 bp, Artificial Sequence
  ENSG00000173926_3 (sequence is synthesized)
cctagtgaatgggcagccgcagtatgtcatgcaagtttcagccaaggacgggcagctgctgtcaacagtagtgcggactcttgccacccagagccccttcaatgaccggccgatgtgcag

SEQ ID NO: 596788 - DNA, 120 bp, Artificial Sequence
  ENSG00000173926_4 (sequence is synthesized)
gatctgccacgagggcagcagccaagaggacttgctctctccatgtgaatgtacagggaccttggggacaattcatcggagctgcctggagcactggctgtcatcctcaaacaccagcta

SEQ ID NO: 596789 - DNA, 120 bp, Artificial Sequence
  ENSG00000173926_5 (sequence is synthesized)
ctgtgaactctgccacttcaggtttgcagtcgagcgcaaacccaggccgttagtggagtggctgagaaaccctggcccccagcatgagaagcggactctgtttggcgacatggtgtgctt

SEQ ID NO: 596790 - DNA, 120 bp, Artificial Sequence
  ENSG00000173926_6 (sequence is synthesized)
cttgtttataactcccctggccaccatctcgggctggctgtgcctgcggggcgccgtggaccacctgcactttagtagtcggctggaagccgtcggactgattgcactcactgtcgcact

SEQ ID NO: 596791 - DNA, 120 bp, Artificial Sequence
  ENSG00000173926_7 (sequence is synthesized)
cttcactatttacctcttttggacactagtgtcatttaggtaccactgtcgattgtacaacgagtggcgtcggaccaatcagagggtgattctcctcattccaaagtctgtcaatgtacc

SEQ ID NO: 596792 - DNA, 120 bp, Artificial Sequence
  ENSG00000173926_8 (sequence is synthesized)
ttctaaccagccgtccttgctgggcctccattcggtcaagaggaactcaaaggagacagttgtttgatgtttgtatggttggttggttgtttgattcattgtttggggtttggaagtgtc

SEQ ID NO: 596793 - DNA, 120 bp, Artificial Sequence
  ENSG00000173926_9 (sequence is synthesized)
tgcactggggtcatgcactgagcgacccccaagcccttccttaagcctgtgggtctaagaacatccagagcatattagcacatcactccaagcaacaacctccgccagaagaaagcaaat

SEQ ID NO: 596794 - DNA, 120 bp, Artificial Sequence
  ENSG00000173926_10 (sequence is synthesized)
gctgttttacttcaaatgatggatgctgcaatcatatgatatttgctaagctgccaaacatgtttatttagcagatactgtatggaattttctgaacacctctttaacgtatgaggaagg

SEQ ID NO: 596795 - DNA, 120 bp, Artificial Sequence
  ENSG00000173926_11 (sequence is synthesized)
ttgtcctgctacggatgcaattcaattcttccttttttattactatttcaaacacacacacatatatatatatattaaacttagatgataatcaaaatcaaaaagtcaacgtaaaaactg

SEQ ID NO: 596796 - DNA, 120 bp, Artificial Sequence
  ENSG00000173926_12 (sequence is synthesized)
gtttcttggtttggttgggtcttatttgagttagtttgtttctcagtttctcgtatggattctttggggtactttggtagcctgagtggtctttttcatctctttcgcgtccattactca

SEQ ID NO: 596797 - DNA, 120 bp, Artificial Sequence
  ENSG00000173926_13 (sequence is synthesized)
aggagacagcataacagatgcagaacaagtcatatttgaagaatgttttgtactaaacttcatttaattattcagtttttaaagggaaaaagggcgtgagctcacacagtgagctgttta

SEQ ID NO: 596798 - DNA, 120 bp, Artificial Sequence
  ENSG00000173926_14 (sequence is synthesized)
tttaaatatcattaaggagaaaaaaaaatatggtgagaagctcgctcctttcaacttgtttggtactgacagctgatagaagctattttctaataataaacatccagtgtgtgaaagaca

SEQ ID NO: 596799 - DNA, 120 bp, Artificial Sequence
  ENSG00000173926_15 (sequence is synthesized)
aaacccactgattgcaatactctttttttaatgataaaacctgtgaagtttcccaaagcaggttttaaaaggaaaaaaaggaaaagcaaaaaggttgctgttctcactcccatctcattt

SEQ ID NO: 596800 - DNA, 120 bp, Artificial Sequence
  ENSG00000173926_16 (sequence is synthesized)
gaatttctagcttgacaggtagatgtggcaaaaaaaaaaaaaaaaaaaaaagcctgtcctagcagccctgcacttattctaagacccctttgtctgattctttaaaaaggagccccacac

SEQ ID NO: 596801 - DNA, 120 bp, Artificial Sequence
  ENSG00000173926_17 (sequence is synthesized)
agtgccttcccccaaccatgagccaattctgtcacagtccgaaatagactttttctaagggtttcgtgtccctcttttatccgtcgcagtgtaaagggtctgatccgcagcctgcattgt

SEQ ID NO: 596802 - DNA, 120 bp, Artificial Sequence
  ENSG00000173926_18 (sequence is synthesized)
gcgcgcaccgaggcaggagcggatgtcttctgaggagagcgctggctggggttgactctcaggctcccggctgtccgcccgcccacacgcagcgaggaggggcggagccctgcttccgga

SEQ ID NO: 596803 - DNA, 120 bp, Artificial Sequence
  ENSG00000173926_19 (sequence is synthesized)
atgcttaaaatatggaattctagaacatgacccacattctgagtatcactccagcatctgccttgtgttccaagtgggaaaacgagaagtgcaaaggaacaggcagcgaggagggtagcg

SEQ ID NO: 596804 - DNA, 120 bp, Artificial Sequence
  ENSG00000173926_20 (sequence is synthesized)
atttttgtctgcaaattgatggagctgatgcaggtgtcccctttgtaggcgagccctccattcactggctgctcccagcgctgcctggggagggaaacagctgtactgctctccgctgca

SEQ ID NO: 596805 - DNA, 120 bp, Artificial Sequence
  ENSG00000173926_21 (sequence is synthesized)
aaactcagatgtgctttatggcttgtgacaatagatttcctccccaccacgcttcactgggacacttcaattccagtaatatatgtctcagcccttctgtttactgcgccctgctcaccc

SEQ ID NO: 596806 - DNA, 120 bp, Artificial Sequence
  ENSG00000173926_22 (sequence is synthesized)
ccctgggctgtcattagctgcaccaccatcaaccgtttcttaattgacctttttaaaatgctggacatcaccggctgcacgcagctgccacacattaaatttccagagcaaagagtccaa

SEQ ID NO: 596807 - DNA, 120 bp, Artificial Sequence
  ENSG00000173926_23 (sequence is synthesized)
cttggtagctggtgaattgcagccctgtaatatacttaataaatgacgtccacccagccttagtccctgagctgtcaggtgaacccgtgacacgtctcaactgaatggcacaacattcat

SEQ ID NO: 596808 - DNA, 120 bp, Artificial Sequence
  ENSG00000173926_24 (sequence is synthesized)
gagaggaccataccccttctccctgtttcttgcatgaattaaggaagcagcggatttccaggatgatttcctgtcaaggttggctgcagagaattcctgccatcttggttcatgagatga

SEQ ID NO: 596809 - DNA, 120 bp, Artificial Sequence
  ENSG00000173926_25 (sequence is synthesized)
gatatgacatcatcaaaggcagccaggtcccaggccgttcaatggggatcctgcattaggaagggtttgcacattaaaactgtgcctgtgccacacctctttccttcgtgtttgcatccc

SEQ ID NO: 596810 - DNA, 120 bp, Artificial Sequence
  ENSG00000173926_26 (sequence is synthesized)
tgccctgtgaagtaaaacagagtccaagatgcaaggagtagattgtgtgtggggtggtgaaaggacacccctggcagccaggcagagcatcagtgcctcccttcccaggtcaccagcttg

SEQ ID NO: 596811 - DNA, 120 bp, Artificial Sequence
  ENSG00000173926_27 (sequence is synthesized)
ggacctccttgtgagaggctctgatctccatcagcatcagggcccataggggattctgaactcttggaggatatttcatcccctccaagccttgccccatggaaagggctacacctcctg

SEQ ID NO: 596812 - DNA, 120 bp, Artificial Sequence
  ENSG00000173926_28 (sequence is synthesized)
caggaaggggtgccttttgttaacaggtattaatgggtacagaggcaccatgcagcctaccagcacccttgctagcctagtcctcttcctgtgcttctttttgaaagatcaagaatgaag

SEQ ID NO: 596813 - DNA, 120 bp, Artificial Sequence
  ENSG00000173926_29 (sequence is synthesized)
aggaagagatgaggagtgggggtcctttacctaaaggaccctcgtggttcattgcttctctttaactgactttttaaaaaaactccctcttccacactccttgctgtgattctgtcctaa

SEQ ID NO: 596814 - DNA, 120 bp, Artificial Sequence
  ENSG00000173926_30 (sequence is synthesized)
tcatttttcttgagaatgtcatgtagagataaatgtgtgtcacagtgaagccagaaggtgaattaacaactaagacaaatccagcatgctcttgcctgccctgcatatgtgctcatttgg

SEQ ID NO: 596815 - DNA, 120 bp, Artificial Sequence
  ENSG00000173926_31 (sequence is synthesized)
ggaaggacggaggacacagagcatcgacacaaattctacagctcctcagagaacacagcagagactcagatgagctgtaaaatccattaaggaaaaataaatggcatgatttggaagtta

SEQ ID NO: 596816 - DNA, 120 bp, Artificial Sequence
  ENSG00000173926_32 (sequence is synthesized)
gtcctgaaaacttagctctaatgagcaaatgatgtctgtttttatgcctggatcacaagccctgtacagctttactgaagcacggtaatagctatgtgactgtgtgtgtgtgtgtgtgtg

SEQ ID NO: 596817 - DNA, 120 bp, Artificial Sequence
  ENSG00000173926_33 (sequence is synthesized)
tgtgtgtgtgtgtttgagaaagagagatgtagacagacagacacagagaagggagagcttgctagctcacttgggatccagcagtagaaggaaagcagaataaattagtataaggagaaa

SEQ ID NO: 596818 - DNA, 120 bp, Artificial Sequence
  ENSG00000173926_34 (sequence is synthesized)
ctactgtgaactctgccacttcaggtttgcagtcgagcgcaaacccaggccgttagtggaggtgcagcagatttgggggaagataagaaaacacccctgtcaggtcttcaggctttgccg

SEQ ID NO: 596819 - DNA, 120 bp, Artificial Sequence
  ENSG00000173926_35 (sequence is synthesized)
gggataaagcggtttctttgcaatccatcattacagagttagagggatagatttacactgtgatggatatgtgagaagaaggttatgttggtgcttgtaaaacacgaaagagaaataata

SEQ ID NO: 596820 - DNA, 120 bp, Artificial Sequence
  ENSG00000173926_36 (sequence is synthesized)
tgcttttgaagcttttagtttggatactaaaaaaaaaagtttaattcttagatgtgccacttatgaaaatgtataatctgtttgtgaagattgaagtcagattacaagaagaaaatgaaa

SEQ ID NO: 596821 - DNA, 120 bp, Artificial Sequence
  ENSG00000173926_37 (sequence is synthesized)
aaagcatcccaactccgcccgggacgcggttccagtccgcaccaacttggcgtaattgacatgggtaggtggggccgggacgcgtcccctgcccctctgcggcaacgacatggagcgctg

SEQ ID NO: 596822 - DNA, 120 bp, Artificial Sequence
  ENSG00000173926_38 (sequence is synthesized)
gggcggcctccgcgcccgcggcgtgcggaccgcggttcctgaaaaattacccgcgctgtgcggtacggtaagacccggcgtccgcgtctggatctcaaggctgagcgagcgctcatcggg

SEQ ID NO: 596823 - DNA, 120 bp, Artificial Sequence
  ENSG00000173928_0 (sequence is synthesized)
agagctacgcggcgaatggcggagacgctgaggcgggtgctaaccaggggcggtgcggcctggtccggggaggagaacatgcctgccgccggaccgcctttgctgctgctcggtacacca

SEQ ID NO: 596824 - DNA, 120 bp, Artificial Sequence
  ENSG00000173928_1 (sequence is synthesized)
ggatctggaaaaacagcgctgctatttgctgcggccctagaggcggcgggggagggccaaggcccagtcctcttcctgacacgaaggcctcttcaaagcatgccccgcgggaccggaacg

SEQ ID NO: 596825 - DNA, 120 bp, Artificial Sequence
  ENSG00000173928_2 (sequence is synthesized)
actctagacccaatgcgactccagaagatccgcttccagtacccaccctcaacccgagagcttttccggctcctgtgctctgcccatgaggccccggggccagccccctcccttctgctg

SEQ ID NO: 596826 - DNA, 120 bp, Artificial Sequence
  ENSG00000173928_3 (sequence is synthesized)
ctcgacggcctagaagagtacctagcggaagacccagagccccaggaagccgcctacctcattgccttacttctagacacagctgcccacttcagccaccggcttgggcctggccgggat

SEQ ID NO: 596827 - DNA, 120 bp, Artificial Sequence
  ENSG00000173928_4 (sequence is synthesized)
tgtgggctcatggtggccctccagacccaggaggaagcaggtagtggggacgtcctgcacctggcactgctccagcggtattttcctgcccagtgctggctgcagccagatgcaccaggt

SEQ ID NO: 596828 - DNA, 120 bp, Artificial Sequence
  ENSG00000173928_5 (sequence is synthesized)
ccaggagagcacggcctccgagcctgcctggagccaggcgggctgggccccagaacagagtggtgggtgactttccgatcagatggagaaatgatgatcgctccgtggcccacccaggct

SEQ ID NO: 596829 - DNA, 120 bp, Artificial Sequence
  ENSG00000173928_6 (sequence is synthesized)
ggtgaccccagctcaggcaagggttcaagctctggaggccagccctgagctttggtgggtgactacctctctgtgcttcagtttcccatggctggaatacttacctcagggacatatgca

SEQ ID NO: 596830 - DNA, 120 bp, Artificial Sequence
  ENSG00000173928_7 (sequence is synthesized)
aagtgctttttctcttttaaaagtatagcattatcttgtatatattttacccaatcaatatgttgtttatagtttcattgctttaaactttataaaaagagcttcaggccaggcgtggtg

SEQ ID NO: 596831 - DNA, 86 bp, Artificial Sequence
  ENSG00000173928_8 (sequence is synthesized)
cagaggtcaggagttggagaccagcctgcccaacatgatgaaaccctgtatcaactaaaagtacaaaaaaaattagctgggtgtgg

SEQ ID NO: 596832 - DNA, 120 bp, Artificial Sequence
  ENSG00000173928_9 (sequence is synthesized)
ctcaaaaaaaaaaaaaaaaaaaagtttgagacttccttctttttgcactcaacgttgttactaagattcatctacatttttttagttcattcctttttccatattgcatataattccatg

SEQ ID NO: 596833 - DNA, 120 bp, Artificial Sequence
  ENSG00000173928_10 (sequence is synthesized)
ctttttccatattgcatataattccatgggtgactataccctgatttcttcatcagattgccttatttactgctgcgaacattcttgcacacatgccctggtacgtgtgtgtgtttttag

SEQ ID NO: 596834 - DNA, 120 bp, Artificial Sequence
  ENSG00000173930_0 (sequence is synthesized)
agtcgggagaacccatccagacatgaagagcgccaaaggtattgagaacttggcttttgtcccctccagcccagacatcctgcgccgcttgtctgcgtcgccctcccaaatcgaagtctc

SEQ ID NO: 596835 - DNA, 120 bp, Artificial Sequence
  ENSG00000173930_1 (sequence is synthesized)
tgccttgtcctctgacccccaaagagagaattctcagccacaggagcttcagaagccccaggagccccagaagtcaccagagccatctctgccttcagcccctcccaatgtctccgaaga

SEQ ID NO: 596836 - DNA, 120 bp, Artificial Sequence
  ENSG00000173930_2 (sequence is synthesized)
gaagctccggtcactgtcgctgtccgagtttgaggaggggtcttacggctggaggaacttccatcctcaatgtctccagcgctgcaacacacctggaggctttctgcttcactactgcct

SEQ ID NO: 596837 - DNA, 120 bp, Artificial Sequence
  ENSG00000173930_3 (sequence is synthesized)
cttggccgtcacgcaaggtattgtagttaatggcctagtaaatattagcatttccactgttgagaagcgttatgaaatgaagagttccctgactggcctgatttcatcaagctacgatat

SEQ ID NO: 596838 - DNA, 120 bp, Artificial Sequence
  ENSG00000173930_4 (sequence is synthesized)
ttcattctgtttgttgtctttatttgtatcattctttggtgaaagaggacataagccgagatggcttgcatttgcagcctttatgattggactgggagcacttgtattctcattgccaca

SEQ ID NO: 596839 - DNA, 120 bp, Artificial Sequence
  ENSG00000173930_5 (sequence is synthesized)
atttttcagtggagaatataaattggggtctctttttgaagacacttgtgtaacaacaaggaatagcaccagttgtacatcttcaacttcttcactttctaactacttgtatgtcttcat

SEQ ID NO: 596840 - DNA, 120 bp, Artificial Sequence
  ENSG00000173930_6 (sequence is synthesized)
cttgggacaactattgctgggggcaggaggaactcctctttatactctgggaacagcctttcttgatgattctgtgcccacacacaagtcttctctctatataggaaccggttatgctat

SEQ ID NO: 596841 - DNA, 120 bp, Artificial Sequence
  ENSG00000173930_7 (sequence is synthesized)
gtcaatcttaggccctgctattggctatgtattgggaggacaactgctaaccatatacattgatgttgctatgggagaaagcactgatgtcactgaggatgatccgcgatggttgggagc

SEQ ID NO: 596842 - DNA, 120 bp, Artificial Sequence
  ENSG00000173930_8 (sequence is synthesized)
ttggtggattgggtttcttctatcatggatctttgcttggtctttaataatacctttttcttgctttccaaaacatttaccaggtacagcagaaattcaagctggaaaaacttcccaggc

SEQ ID NO: 596843 - DNA, 120 bp, Artificial Sequence
  ENSG00000173930_9 (sequence is synthesized)
tcatcagagtaatagtaatgcagatgtgaaatttggaaaaagtattaaagattttccagctgctctaaagaatttgatgaagaatgctgtctttatgtgtttagttctatcaacttcttc

SEQ ID NO: 596844 - DNA, 120 bp, Artificial Sequence
  ENSG00000173930_10 (sequence is synthesized)
agaagccttaattactactggatttgctacatttttacctaaatttatagaaaatcaattcggattgacatccagcttcgcagctactcttggaggggctgttttaattcctggagctgc

SEQ ID NO: 596845 - DNA, 120 bp, Artificial Sequence
  ENSG00000173930_11 (sequence is synthesized)
tctcggtcaaattttaggtggcttccttgtttcaaaattcagaatgacatgtaaaaacacaatgaagtttgcactgttcacatctggagttgcacttacgctgagttttgtatttatgta

SEQ ID NO: 596846 - DNA, 120 bp, Artificial Sequence
  ENSG00000173930_12 (sequence is synthesized)
tgccaaatgtgaaaatgagccatttgctggtgtatctgaatcatataatgggactggagaattgggaaacttgatagccccttgtaatgccaattgtaactgttcgcgatcatattatta

SEQ ID NO: 596847 - DNA, 120 bp, Artificial Sequence
  ENSG00000173930_13 (sequence is synthesized)
tcctgtctgtggagatggagtccaatatttttctccctgctttgcaggctgttcaaacccagttgcacacaggaagccaaaggtatattacaactgttcctgtattgaaaggaaaacaga

SEQ ID NO: 596848 - DNA, 120 bp, Artificial Sequence
  ENSG00000173930_14 (sequence is synthesized)
aataacatccactgcagaaacttttggttttgaagctaaagctggaaaatgtgaaactcattgtgcgaaactgcccatattcctttgcattttctttattgtaattatttttacctttat

SEQ ID NO: 596849 - DNA, 120 bp, Artificial Sequence
  ENSG00000173930_15 (sequence is synthesized)
ggccggtactcctataactgtgtctatcctaaggtgtgttaatcacagacaacggtccctagccttgggaatacaatttatggtccttcgattattagggacaattcctggaccaattat

SEQ ID NO: 596850 - DNA, 120 bp, Artificial Sequence
  ENSG00000173930_16 (sequence is synthesized)
atttggtttcacaatagacagcacatgtattctttgggatataaatgattgtggaattaaaggagcttgctggatttatgataacatcaagatggcccatatgctagtagccataagtgt

SEQ ID NO: 596851 - DNA, 120 bp, Artificial Sequence
  ENSG00000173930_17 (sequence is synthesized)
tacttgtaaagttatcaccatgttcttcaatggatttgcaatctttttgtataaaccacctccatcagccacagatgtgtcatttcataaagagaatgcagttgtgactaatgttttagc

SEQ ID NO: 596852 - DNA, 120 bp, Artificial Sequence
  ENSG00000173930_18 (sequence is synthesized)
agaacaggatctcaacaaaatagtaaaagaagggtgaaatgggaaaagagaagactgttttacacctggaaaatttacctcgatttttaagaacacacattgccatggcaggattatcta

SEQ ID NO: 596853 - DNA, 120 bp, Artificial Sequence
  ENSG00000173930_19 (sequence is synthesized)
tccaatatggacaatcatatttacaaaattgatgtttttataatcaaatgtatttttttacttatgtagtttttgttttatgcaagaaacagacctgtgccttcaaagcccacgtaaagc

SEQ ID NO: 596854 - DNA, 120 bp, Artificial Sequence
  ENSG00000173930_20 (sequence is synthesized)
tgcaagaaacagacctgtgccttcaaagcccacgtaaagcctcaaaacacagcacacacacacacgagcacacacacacacacacacacgaacacacacacacacacacacacgcacaca

SEQ ID NO: 596855 - DNA, 120 bp, Artificial Sequence
  ENSG00000173930_21 (sequence is synthesized)
cccacaattagaaaaatttacatttaaaaaaaatgttgtttctatccccattacaacttgtttaattttaattttcattgtcaatattttgagcttagaacatttatggtataaaaattt

SEQ ID NO: 596856 - DNA, 120 bp, Artificial Sequence
  ENSG00000173930_22 (sequence is synthesized)
taatcaaagttgtgtgatgatttccgggaattattattgaaagcctatgaatttaaaaccaggtttaccatgtaatttgtttttaaatttatgtatactagcctggcctttctccaagca

SEQ ID NO: 596857 - DNA, 120 bp, Artificial Sequence
  ENSG00000173930_23 (sequence is synthesized)
aattattgaactattagaatatgttagttatcatccttgtgtcttagtatatagtgaatacagaaacatcagcattgtatacacatattttcactttaactcaagaattccaggaggtaa

SEQ ID NO: 596858 - DNA, 120 bp, Artificial Sequence
  ENSG00000173930_24 (sequence is synthesized)
tttgttgatattacaatttttaacacatttatgattctgtgataatattattcaattgcatatatttcagaggaaagtaccagtcagtaaagaaaaatgccaactaaacatgaaactatt

SEQ ID NO: 596859 - DNA, 120 bp, Artificial Sequence
  ENSG00000173930_25 (sequence is synthesized)
gatcaatacttatatacctttaatttttcctatttgaaaagccaaccacttaacacattactcatagcacctaagacagtgccttgcatagtgtagtcatctattattattgtttaatta

SEQ ID NO: 596860 - DNA, 120 bp, Artificial Sequence
  ENSG00000173930_26 (sequence is synthesized)
gaatattaaaccctaccctttaactcagcagtccccaaccttttttgcatcagggaccatttttgtggaagacaatttttccatgggggaagaaggtatggttttgagatgaaactgctc

SEQ ID NO: 596861 - DNA, 120 bp, Artificial Sequence
  ENSG00000173930_27 (sequence is synthesized)
tcaggcattagttagattctcataaggagagtgcaacctagatcccttgcatgtgcagttcccaatggagtgtgcactcctatgagaatctaatgccactactgatctaacaagaggtgg

SEQ ID NO: 596862 - DNA, 120 bp, Artificial Sequence
  ENSG00000173930_28 (sequence is synthesized)
aacaagaggtggagctcaggcagtaatgctcactcacctgcctctcagctcaccaactgtgtggcccgattcctaacaggccacacacagcccagggctggggacccctgctttaactga

SEQ ID NO: 596863 - DNA, 120 bp, Artificial Sequence
  ENSG00000173930_29 (sequence is synthesized)
tgcattgatttgataaagtattttacaagcctgataatgttataaccctgtttattcaggtcagatttatgccaactttgctgagaatatggagggtatagatgagtgaacatcaacaaa

SEQ ID NO: 596864 - DNA, 120 bp, Artificial Sequence
  ENSG00000173930_30 (sequence is synthesized)
cataacttctaccatggttaagaattttacttaggaaaagtattgaagttcaaatccagatagtattacatttgaaattgttataagggttattaatttaataaaattcatcatcaggtt

SEQ ID NO: 596865 - DNA, 120 bp, Artificial Sequence
  ENSG00000173930_31 (sequence is synthesized)
tcccctataagctttctcctaggttaattttccacaagcattgttttatatacactgtaatcaggataacacaagcttagtgttagatcttgtaggaaaccaagattagaaacattagaa

SEQ ID NO: 596866 - DNA, 120 bp, Artificial Sequence
  ENSG00000173930_32 (sequence is synthesized)
atttgcagaatttaagaaattatgttttgtggtaatctatggccaacgatgttagaacctagcgcaattgtaaagtgaaattcaaggagaaggaatgaggagttagggaagcagcatact

SEQ ID NO: 596867 - DNA, 120 bp, Artificial Sequence
  ENSG00000173930_33 (sequence is synthesized)
tgaatattagagaaggagaggagctgtgggtcaggaatcagagagacctgctaaaaccagacagatataaacaccaaagacggaagccaaataggtagccaaaaatccagatatttgaga

SEQ ID NO: 596868 - DNA, 120 bp, Artificial Sequence
  ENSG00000173930_34 (sequence is synthesized)
agcaggaaatttatagcaaccaaagaaatagggcaagagaggcaggtgaacacacatgatacctcaattgacaatcttcctcccaccaagccagacacgttgtaaatgctgcttcctatt

SEQ ID NO: 596869 - DNA, 120 bp, Artificial Sequence
  ENSG00000173930_35 (sequence is synthesized)
ggagcccagaaaaaaggaaaaggaaagtttaggctttctttgtcctttgtgtggaagcagggaattggattgaagactttcatagttgtaacataaaggcaaatcctgaggaactcactg

SEQ ID NO: 596870 - DNA, 120 bp, Artificial Sequence
  ENSG00000173930_36 (sequence is synthesized)
atggagatgtgaaatggcagtaaggaagaaaacagaataactgaacaaatatattagtctagggccacttaatttagaggaagaaaaaaaatcaacccatccatagaaatagtttgataa

SEQ ID NO: 596871 - DNA, 120 bp, Artificial Sequence
  ENSG00000173930_37 (sequence is synthesized)
acaggtcactaaatcattggcgtttataaagattcttagctatcaagggctgcattgtattttatatactcagttttataaggtgatactttttaaataagcgctttaatgaaaatggtt

SEQ ID NO: 596872 - DNA, 120 bp, Artificial Sequence
  ENSG00000173930_38 (sequence is synthesized)
agactgaaaataattttggtccttaaaaggagtcaggagcttttatatataaggtacatattttaaaagaatacctcctttataacagggttttacagacactaccataatttataatca

SEQ ID NO: 596873 - DNA, 120 bp, Artificial Sequence
  ENSG00000173930_39 (sequence is synthesized)
ttattttttacttttgggttcacctagatcatatgagttgatgtgatacttctagaacaaaattattcatagtgcgttttttgtaatttatgattgttaagtaagcttgacttataaatt

SEQ ID NO: 596874 - DNA, 120 bp, Artificial Sequence
  ENSG00000173930_40 (sequence is synthesized)
gacattgtaattgtgtacataattggatatatgtgttaaaatttaacatttagatttacttaattgtagaaaatacaaatgtaaaacttacacatggaaagaactgtatgcagttgactt

SEQ ID NO: 596875 - DNA, 120 bp, Artificial Sequence
  ENSG00000173930_41 (sequence is synthesized)
tactatgtaaattggagggaaacaaagttttagatccattttctttcaaaattttctttattgtaaagtatgcaaaatatatattcataccatttattaaatcagaatgtttatacaaaa

SEQ ID NO: 596876 - DNA, 120 bp, Artificial Sequence
  ENSG00000173933_0 (sequence is synthesized)
actttcttgagtggccaatccggttgtaggctcacctcccccttctactcagagcactgctgcggccgccgccattttagcgttttgtcagaagcgtccgcgccgcgaggaggaggccct

SEQ ID NO: 596877 - DNA, 120 bp, Artificial Sequence
  ENSG00000173933_1 (sequence is synthesized)
gctggtttctgtgcgggctcttgtcaggatggtgaagctgttcatcggaaacctgccccgggaggctacagagcaggagattcgctcactcttcgagcagtatgggaaggtgctggaatg

SEQ ID NO: 596878 - DNA, 120 bp, Artificial Sequence
  ENSG00000173933_2 (sequence is synthesized)
tgacatcattaagaattacggctttgtgcacatagaagacaagacggcagctgaggatgccatacgcaacctgcaccattacaagcttcatggggtgaacatcaacgtggaagccagcaa

SEQ ID NO: 596879 - DNA, 120 bp, Artificial Sequence
  ENSG00000173933_3 (sequence is synthesized)
gaataagagcaaaacctcaacaaagttgcatgtgggcaacatcagtcccacctgcaccaataaggagcttcgagccaagtttgaggagtatggtccggtcatcgaatgtgacatcgtgaa

SEQ ID NO: 596880 - DNA, 120 bp, Artificial Sequence
  ENSG00000173933_4 (sequence is synthesized)
agattatgccttcgtacacatggagcgggcagaggatgcagtggaggccatcaggggccttgataacacagagtttcaaggcaaacgaatgcacgtgcagttgtccaccagccggcttag

SEQ ID NO: 596881 - DNA, 120 bp, Artificial Sequence
  ENSG00000173933_5 (sequence is synthesized)
gactgcgcccgggatgggagaccagagcggctgctatcggtgcgggaaagaggggcactggtccaaagagtgtccgatagatcgttcaggccgcgtggcagacttgaccgagcaatataa

SEQ ID NO: 596882 - DNA, 120 bp, Artificial Sequence
  ENSG00000173933_6 (sequence is synthesized)
tgagcaatacggagcagtgcgtacgccttacaccatgagctatggggattcattgtattacaacaacgcgtacggagcgctcgatgcctactacaagcgctgccgtgctgcccggtccta

SEQ ID NO: 596883 - DNA, 120 bp, Artificial Sequence
  ENSG00000173933_7 (sequence is synthesized)
ctgcagctgcctccgtgtataattacgcagagcagaccctgtcccagctgccacaagtccagaatacagccatggccagtcacctcacctccacctctctcgatccctacgatagacacc

SEQ ID NO: 596884 - DNA, 120 bp, Artificial Sequence
  ENSG00000173933_8 (sequence is synthesized)
tgttgccgacctcaggagctgctgccacagctgctgctgcagcagcagccgctgctgctgttactgcagcttccacttcatattacgggcgggatcggagccccctgcgtcgcgctacag

SEQ ID NO: 596885 - DNA, 120 bp, Artificial Sequence
  ENSG00000173933_9 (sequence is synthesized)
ccccagtccccactgttggagagggctacggttacgggcatgagagtgagttgtcccaagcttcagcagccgcgcggaattctctgtacgacatggcccggtatgagcgggagcagtatg

SEQ ID NO: 596886 - DNA, 120 bp, Artificial Sequence
  ENSG00000173933_10 (sequence is synthesized)
ccgatcgggcgcggtactcagccttttaaagcttgaggtgggatgtgtgtgggctgaaattccgagctgcggttgtgcatgagaatacacccttcgtggtaccccatctccgggacgttc

SEQ ID NO: 596887 - DNA, 120 bp, Artificial Sequence
  ENSG00000173933_11 (sequence is synthesized)
tcggctctgtgcgttcagtccctcaggaaccgtggaccttaatttaccttgctaagttcagaccttctcttcctttcctttcctttcctctcctgcccattttcctgttcttctgtcctt

SEQ ID NO: 596888 - DNA, 120 bp, Artificial Sequence
  ENSG00000173933_12 (sequence is synthesized)
caatacttctgtagcttcccattcatgttctcttctcccagcaggcctcattgtgtgcagaaactgtggtgggggctgtgctgtctcctccctgcctcctgcctcctgcggctgttggat

SEQ ID NO: 596889 - DNA, 120 bp, Artificial Sequence
  ENSG00000173933_13 (sequence is synthesized)
ttgggaatgaccttggtgagagtctcactgctccagggtctctttttggtccaaaggctagacctatagagttggatcactttttttctttccggtgaaataaatggtttttcaacttag

SEQ ID NO: 596890 - DNA, 120 bp, Artificial Sequence
  ENSG00000173933_14 (sequence is synthesized)
actgctgcggccgccgccattttagcgttttgtcagaagcgtccgcgccgcgaggaggaggccctgctggtttctgtgcgggtgagactccgagcctttccactgcctttcttgtactgt

SEQ ID NO: 596891 - DNA, 120 bp, Artificial Sequence
  ENSG00000173933_15 (sequence is synthesized)
accttgctttttttcgcccaccctgtcccgcgcccgacatggctgctcttggagcctcgagatttccactgggataaccccctttcccttatatctgacagttacattctcgtttcggga

SEQ ID NO: 596892 - DNA, 120 bp, Artificial Sequence
  ENSG00000173933_16 (sequence is synthesized)
atttctcgggccgtgagacatcgtctggttaatgaatctgaagctcttttccgcggccgcgcatttcagtgttcggcaggagctaggacggtgccccgagagaggcgttcaccactccag

SEQ ID NO: 596893 - DNA, 120 bp, Artificial Sequence
  ENSG00000173933_17 (sequence is synthesized)
tatttcctttatctcccactcctcgctgtctgatccgagtcgcgcgttcattacttccaaaggaaactcaaatgtagctattacaaggcccattttcccggaaatgatggctgctttggt

SEQ ID NO: 596894 - DNA, 120 bp, Artificial Sequence
  ENSG00000173933_18 (sequence is synthesized)
tcctacgtgaggaaaagcctgttgataatttcaggcaggcagtcagcaagcctagtagacttttgttttctgttgtcctcctagtggatagaaaagcctagtacccccatttcttcatat

SEQ ID NO: 596895 - DNA, 120 bp, Artificial Sequence
  ENSG00000173933_19 (sequence is synthesized)
gctgtctttcatgcccatttctgttggaaggtatcggttcttaccaaaccctttgtctactaaggacctccctattgcagacgtcttcttattcttacaggttcatggcggctactatag

SEQ ID NO: 596896 - DNA, 120 bp, Artificial Sequence
  ENSG00000173933_20 (sequence is synthesized)
caggccttagttcactcccacttccatttgattattgtgtggaggtgtgtgtgcaggcgtgtgagagagaaaactggaaatatacattagagtgaaagtcgttgtcttttgtgaacggat

SEQ ID NO: 596897 - DNA, 62 bp, Artificial Sequence
  ENSG00000173933_21 (sequence is synthesized)
cacatggagcgggcagaggatgcagtggaggccatcaggggccttgataacacagagtttca

SEQ ID NO: 596898 - DNA, 120 bp, Artificial Sequence
  ENSG00000173933_22 (sequence is synthesized)
tcaggggccttgataacacagagtttcaaggcaagataacccctgtgacagaaggctactgttgctgtaacaaagggcatacatacattttcaagaactgcaatttaattttggagtcca

SEQ ID NO: 596899 - DNA, 120 bp, Artificial Sequence
  ENSG00000173933_23 (sequence is synthesized)
ggaaaagcagaagatgctgagatgtcatatatggcgaattgcactattctaaatgtgttttgttttaatctttcacagtaaacaagctttcagaaatgatggtcacaaggggtaggatat

SEQ ID NO: 596900 - DNA, 120 bp, Artificial Sequence
  ENSG00000173933_24 (sequence is synthesized)
caaggagcagccagtcattcacccaattccaacacacctacatgtcacactgtcacagagtgagagccacagttccagtagttcccctaattgaccaaatctcccttgccaaatcaaaag

SEQ ID NO: 596901 - DNA, 120 bp, Artificial Sequence
  ENSG00000173933_25 (sequence is synthesized)
aaatcattcctagaattctctaatccttctattgatgatgggaactccagacaccaatggctgggggaaaaaaaaagttaactcacaccaagttcctctacttattacagacaaagggcc

SEQ ID NO: 596902 - DNA, 120 bp, Artificial Sequence
  ENSG00000173933_26 (sequence is synthesized)
aaatcttggtcttgatctgtgccaatcgacttcaaaagttgtgacgttcttggatcagttctgctagggtgagacccgaatttggatccccaacagttctggagtatttcatcctggcag

SEQ ID NO: 596903 - DNA, 120 bp, Artificial Sequence
  ENSG00000173933_27 (sequence is synthesized)
cctcattaacatcaggctcctgggactgcaaccaactcagggttattcagtccatttgaggttcacacctggaaggtaagtttctttaaaagtcatcgctaaaaagaggttagttgaaca

SEQ ID NO: 596904 - DNA, 120 bp, Artificial Sequence
  ENSG00000173933_28 (sequence is synthesized)
accactgcttgcagtcaaaattcattttaaaatgtcctagcaataccttttgaagaccacaatatatgaatttaatatttaactttgaaacataagagacaggttatctgatagatttat

SEQ ID NO: 596905 - DNA, 120 bp, Artificial Sequence
  ENSG00000173933_29 (sequence is synthesized)
accagcttacttcggaagcatgtcccaccccatgctagatccagctgcattaaaagtaaaaattaatggcaaactataaattttaagatcatttgcttcacacataaacacagactagct

SEQ ID NO: 596906 - DNA, 120 bp, Artificial Sequence
  ENSG00000173933_30 (sequence is synthesized)
tcaagtcttgctgacatgcatatagggtacaacttattacaggttcataacatttgcttctcaattcacataaaagagcaaattgctgtggctttgctttttaatttttttttttttttt

SEQ ID NO: 596907 - DNA, 120 bp, Artificial Sequence
  ENSG00000173933_31 (sequence is synthesized)
agaggagccactcttgcccaggctggagtgcagtggctaactgcagtctctcactcctgggctcaagggatcctccagcctcagcttcctgaatagttgggactacaggcacaagccact

SEQ ID NO: 596908 - DNA, 120 bp, Artificial Sequence
  ENSG00000173933_32 (sequence is synthesized)
gtacacagctgctttgttatcttctacatatataccaaagggataagttaggaacaccagaaactcagtagtaactcactttaaccttgcttctggggctccaattcaagtgatgctcaa

SEQ ID NO: 596909 - DNA, 120 bp, Artificial Sequence
  ENSG00000173933_33 (sequence is synthesized)
tttcaaggtacaaggaaaaccatgagaatataaagtcataatgccatttccactcagatgaaaagatttatctatctttagatactcaaaattattcttggcattttagcacttttggta

SEQ ID NO: 596910 - DNA, 120 bp, Artificial Sequence
  ENSG00000173933_34 (sequence is synthesized)
cacatttcctgatgtaggaaatagtaaaatttcagagcctatggcattggctttcaccacctatgcaattttctacacatctgaaaattaccagtttatctaactccttaaatgttcctc

SEQ ID NO: 596911 - DNA, 120 bp, Artificial Sequence
  ENSG00000173933_35 (sequence is synthesized)
tcttcaacaacaaaaaacacaaacaaaaattgctggaagaaacaggaagcatccaggtccaaatgacagcataacagactatgaagaaacagggcttaagtgcccatctagaacaagatg

SEQ ID NO: 596912 - DNA, 120 bp, Artificial Sequence
  ENSG00000173933_36 (sequence is synthesized)
gtctagattacaataaggaccccatgggacagaacatcaaaacattcaactttcaagtaaatgtcttggaagtaaacatttaaaatttataggacttcctctggcatgtaggtatgatat

SEQ ID NO: 596913 - DNA, 120 bp, Artificial Sequence
  ENSG00000173933_37 (sequence is synthesized)
tcctctggcatgtaggtatgatattagaagagtttcctttgacaaaggacaatgacccaagaagtaggtttttttttttttttaaataaaggagagacagtctcactctgttgcccaggc

SEQ ID NO: 596914 - DNA, 120 bp, Artificial Sequence
  ENSG00000173933_38 (sequence is synthesized)
ctcactgcagcctcttttaactcctgggctcaagcaatccttccaacctcagcattctgagtagctgggatcacaggtgctccccatcacaccctgctaatttaattttctttgtagaga

SEQ ID NO: 596915 - DNA, 87 bp, Artificial Sequence
  ENSG00000173933_39 (sequence is synthesized)
gtgttaggattacaggagtgagccactgcctctgccttcaggtagcaattttattagcaaactataagcctaaagtaatagttaaaa

SEQ ID NO: 596916 - DNA, 120 bp, Artificial Sequence
  ENSG00000173933_40 (sequence is synthesized)
attttattagcaaactataagcctaaagtaatagttaaaattctcactgtgatattcattactaacccctgaacctgtacccttcagcttaccactacagtacttctgtagtagagcgag

SEQ ID NO: 596917 - DNA, 120 bp, Artificial Sequence
  ENSG00000173933_41 (sequence is synthesized)
tatgggttttggtatcagacaggtccaaatttgaattctggttctacctttcatttatcaaatgactttgggcaaagtacttaacctctctgagctttagttcccttctctgtaaaagaa

SEQ ID NO: 596918 - DNA, 120 bp, Artificial Sequence
  ENSG00000173933_42 (sequence is synthesized)
taaaatatttcagtcttatcgtgtagatgatatacagagggcacataacaaatgttagatctctcaaatgtttttctgtaacccaaatatgcttacaactgattaaagaatgttctcact

SEQ ID NO: 596919 - DNA, 120 bp, Artificial Sequence
  ENSG00000173933_43 (sequence is synthesized)
aagggatcctcccgccttggcctcccagagtttttgcagggactatatgtgagccactgcgtctggtcaaaatgtagtttttcaagagtaatgctttaataaactgatttttttccccca

SEQ ID NO: 596920 - DNA, 120 bp, Artificial Sequence
  ENSG00000173933_44 (sequence is synthesized)
agaaaatggttggataagtaaaaggagaggtttggtaaagataacagctgttggctggctggtgatgaagaaataagtgtgggtgatggacttcttatgatgtagaatgcatgggactta

SEQ ID NO: 596921 - DNA, 120 bp, Artificial Sequence
  ENSG00000173933_45 (sequence is synthesized)
ttattgccctcagcacaggatcagaattctgcattttacgtgaagaacctctcaaaaacatgtcaagcgacacttataggaccagaatccttgttaagctgtcctaccttacacaaactc

SEQ ID NO: 596922 - DNA, 120 bp, Artificial Sequence
  ENSG00000173933_46 (sequence is synthesized)
tttaaagggttacagctcttgttgcttttatattatacctgtaccaagggattgtattttgagtttaaggccactctagaattacaaggctgattttaggacttcctggggaggaggcac

SEQ ID NO: 596923 - DNA, 120 bp, Artificial Sequence
  ENSG00000173933_47 (sequence is synthesized)
tggggttttaggggcggtaatgactgtcttttcattggtttggggggctggactttataagattttggtgaatagagcacttagatttgtgttatcttggagtcttaaccaaatgaatct

SEQ ID NO: 596924 - DNA, 120 bp, Artificial Sequence
  ENSG00000173933_48 (sequence is synthesized)
tttgtgcctggagggcagcatgggtgatatgtggattgtcacttcatttggaagcatctcaaatccccagcattttgaatgcctacatgttgctcaaaggaaatgcttgttagagcattt

SEQ ID NO: 596925 - DNA, 120 bp, Artificial Sequence
  ENSG00000173933_49 (sequence is synthesized)
tggattttgaattttcagatttgggatgctaaaatggtacgtagaacgcaaatattccaaaatctgaggtctgaagcaacagtggcagttcaggggtggtgatcatggtgagttgctatc

SEQ ID NO: 596926 - DNA, 120 bp, Artificial Sequence
  ENSG00000173933_50 (sequence is synthesized)
tgaactcttctttcacctcctttgggttcccagtgtcaaaaagagtggtgtccttttttagcttaattaagcaggactgaacaaaaataataaaaaataaaaaaagccttattcaaatta

SEQ ID NO: 596927 - DNA, 120 bp, Artificial Sequence
  ENSG00000173947_0 (sequence is synthesized)
agtacacaagtgctagccctagcagctcgcgatgtgcttcagcagagcagacgctgcggataactacccttttggaacatgtcaacagaggaaactttttcctcacttccatcccccgaa

SEQ ID NO: 596928 - DNA, 120 bp, Artificial Sequence
  ENSG00000173947_1 (sequence is synthesized)
tttgattgggaacaagtttgtccctcttaggggatcaccccacagagggcctgggtgttatttttcagatggatatggcttggcatacgacttatctaagatcccaaccagtataaaagg

SEQ ID NO: 596929 - DNA, 120 bp, Artificial Sequence
  ENSG00000173947_2 (sequence is synthesized)
atatactttgggagccagaacagctgtgaggtttaagccaatacagaaggaaatgacacctcatgcaggcaggtaccagaaagtaagtcctcagcaggaaaaacacaaacaaaattttgc

SEQ ID NO: 596930 - DNA, 120 bp, Artificial Sequence
  ENSG00000173947_3 (sequence is synthesized)
tccatttaatgtcttggtgcctcgatttaagaactacccaaaggacacttactatcccagccctggtgcatacaacccagagaagaagccaccgccaaaaattgcctggccaatgaaatt

SEQ ID NO: 596931 - DNA, 120 bp, Artificial Sequence
  ENSG00000173947_4 (sequence is synthesized)
tggatctccagactgggctcaggttccatgtctacagaaaagaaccctaaaagctgagctgtccacagacaaagactttagaaagcatcggaaccgtgtggcctacctaagcctgtatta

SEQ ID NO: 596932 - DNA, 120 bp, Artificial Sequence
  ENSG00000173947_5 (sequence is synthesized)
taattgagcggctgtaactaccttcacgtgctcctcttatacacagactctccaggactgaggacagagctgctcttcttcttctacgttactgtggccctcttgtctggcagcctggag

SEQ ID NO: 596933 - DNA, 120 bp, Artificial Sequence
  ENSG00000173947_6 (sequence is synthesized)
cccagggagggacaggggcttatagctgctgtatgagaacataaagactagtgcacagtgctatctccatctactgacttgtggtgtacacgtgcatgtctgggtctgtgggtttctgtt

SEQ ID NO: 596934 - DNA, 120 bp, Artificial Sequence
  ENSG00000173947_7 (sequence is synthesized)
gggtgctgagttgggtgatttcattttagtgaaatatttgtgggcccctgctctctagttctaattcccaggagccaattttatatattctaccactagccctggtcataggaggctgtt

SEQ ID NO: 596935 - DNA, 120 bp, Artificial Sequence
  ENSG00000173947_8 (sequence is synthesized)
agcctatacatgtcaagggtttggatgggatttgggcttgctagatacagaaaacacttaaggcagattaaaacatgtattggagctctcccaattgtgttgctcagtgtggagtgggaa

SEQ ID NO: 596936 - DNA, 120 bp, Artificial Sequence
  ENSG00000173947_9 (sequence is synthesized)
ttgactttcccagattgacataaaactcaaaaaccaaaaaattgcccctttcctatgacatcatccatttagtctgtgagtcaacatatatactgaggtcctactatgtgttgagcagag

SEQ ID NO: 596937 - DNA, 120 bp, Artificial Sequence
  ENSG00000173947_10 (sequence is synthesized)
cagtaagcactggggatatggcaggaatcaaaataaacttatctactaagtccttgggcctggcctgaagtcagaggaggactccccagggcagctaggggattgggtctgccctccaat

SEQ ID NO: 596938 - DNA, 120 bp, Artificial Sequence
  ENSG00000173947_11 (sequence is synthesized)
ctgaatgaccccctagaaccttacaagtcattctggggttataaagatcataacatttatagccccagactgacttgtaagcagctgcatttaaagtacttactcagacactcaggcctg

SEQ ID NO: 596939 - DNA, 120 bp, Artificial Sequence
  ENSG00000173947_12 (sequence is synthesized)
agagatagacccctttctttccagcactagctgaaataatcaagtatatagtttgttcaggattggcactaaatgtgatttaatcttttaataaaagggtccttttgtacccacttaggc

SEQ ID NO: 596940 - DNA, 120 bp, Artificial Sequence
  ENSG00000173947_13 (sequence is synthesized)
ttcttcgtaattaccagaaaggtgataagcctgcatgtgtctggacaccaaagattgagaagctgccagtggctgcaagagagcctactgtaaccctcatggccaccccctgatgagtgt

SEQ ID NO: 596941 - DNA, 120 bp, Artificial Sequence
  ENSG00000173947_14 (sequence is synthesized)
tacctggggaaagggctagcaagaggtgaagcctcctggtcatatgatgctgggggtgcctaattccttaaaggccaaggtcttctgaaataataatggtgaaggacagaaaagtcttta

SEQ ID NO: 596942 - DNA, 120 bp, Artificial Sequence
  ENSG00000173947_15 (sequence is synthesized)
tgagaaatcacataggatatattaagataatgataaagatacctcagcaagaacatacctaatatatacacttcttttaatctgatgacttaatgatttctgttatcaagaagtatttat

SEQ ID NO: 596943 - DNA, 120 bp, Artificial Sequence
  ENSG00000173947_16 (sequence is synthesized)
gacttgagataagtcaggattaactgttatcacctctcctgtacacctccctcctttttctcctttgtacccacatgtgcagattttttcagaggtgacaatttagcatttaatgttttt

SEQ ID NO: 596944 - DNA, 120 bp, Artificial Sequence
  ENSG00000173947_17 (sequence is synthesized)
ttttctgcttcaagttcttaggtccctttggaggatattgatgggggtggaggtggggatagaacatctttcacactgtttggtacagagacgctcaaagcttttcccagggaaaggaac

SEQ ID NO: 596945 - DNA, 120 bp, Artificial Sequence
  ENSG00000173947_18 (sequence is synthesized)
tctctaaaatagtaatctgatttgatgaaagataaaattttaatatagcttcagttaaccttcaggatactttaaatgctacattgtatataaaagtaataaagtacaaatgaacacgaa

SEQ ID NO: 596946 - DNA, 120 bp, Artificial Sequence
  ENSG00000173947_19 (sequence is synthesized)
cacccgtatctcggttttctacctaccgaagacttatttctgtagcttgaggtggctgaaccatagctgatttatgaacagaaagaggatgattctgttttttctacctggaaggcttta

SEQ ID NO: 596947 - DNA, 120 bp, Artificial Sequence
  ENSG00000173947_20 (sequence is synthesized)
gcaataggaggaaaagaagtacgtaataaaagaagcacataaagaagggatgacatccaaaccatcgcagttaaataaggaaccattcagagatttaatcaattgtctcacagatttctg

SEQ ID NO: 596948 - DNA, 120 bp, Artificial Sequence
  ENSG00000173947_21 (sequence is synthesized)
gcattgtagaatgtagaatcatagttactcattcaatgaatttttattaacatgccaggtagttttgtaggttcgatagatttttgcactaaatccatcacacaaggctcctgatttctt

SEQ ID NO: 596949 - DNA, 120 bp, Artificial Sequence
  ENSG00000173947_22 (sequence is synthesized)
ggggcttacattctagagtccagacagagcacaggcaaatacacaagaaaatatcaatagtgatagagtgaccatataatttgttagtcaaacgatgacacttctgagagtaaaaggggg

SEQ ID NO: 596950 - DNA, 120 bp, Artificial Sequence
  ENSG00000173947_23 (sequence is synthesized)
cctattaataattctaccaagacagtacccataaggtagggactgtcatggacaaaccaggaagtaggttgtccaggctacaaagaaggtaaaacaggatgacaatgtgatagggagtga

SEQ ID NO: 596951 - DNA, 120 bp, Artificial Sequence
  ENSG00000173947_24 (sequence is synthesized)
tggcctggagtctactttagaaagggttgaagaaatgacagttaacctgagatctaaatgacaagactgagccagccctgtgaagatctggggaccgagcattcccagcagaaggaacag

SEQ ID NO: 596952 - DNA, 120 bp, Artificial Sequence
  ENSG00000173947_25 (sequence is synthesized)
caagtgcaaaggctataaattgggaaggaatttgacgtgaacaaaaaggcatgctgccatggctagagtgtagtgagcaagtaggaaatgagacagaaatggagggcatgctggagcaca

SEQ ID NO: 596953 - DNA, 120 bp, Artificial Sequence
  ENSG00000173947_26 (sequence is synthesized)
taggccttgcaggccaacaggcttattctcaatgctttaggaagctattcagaatgtatagacttgtagggcaaaagatcaaggactttcttttattgatgagaaatccaaggatcacag

SEQ ID NO: 596954 - DNA, 120 bp, Artificial Sequence
  ENSG00000173947_27 (sequence is synthesized)
agtgatgtaactttctcaagttgcattaaggaagtagaagcattgagtcttgacccccaagtccagtccattatttcctgacagtaaagagtccacaccaaaagacaaagtgtatatgaa

SEQ ID NO: 596955 - DNA, 120 bp, Artificial Sequence
  ENSG00000173947_28 (sequence is synthesized)
caaagacaatttttaaatgaccccattgtcaagaaaatttaactggctttgctttgctttgctttgcctacattgcagatagattatcactgcacttttatcaccaactttaaattgtgg

SEQ ID NO: 596956 - DNA, 120 bp, Artificial Sequence
  ENSG00000173947_29 (sequence is synthesized)
gcagtactaattcatcactgctttagatctctttcatcacccaccgcttctaggaccttctcatctctcagctatagatactgaggtacagaaatatcttttaatctggagtcgatctgt

SEQ ID NO: 596957 - DNA, 120 bp, Artificial Sequence
  ENSG00000173947_30 (sequence is synthesized)
gctctaactggatgtcaagattgtcaagttagatgtttaacgctaacatctaactcgaaatacattaacaggtaaaggaatcccatgcttaattaaaaagctaatcaatctgttgccttt

SEQ ID NO: 596958 - DNA, 120 bp, Artificial Sequence
  ENSG00000173950_0 (sequence is synthesized)
atggccgccgcctggcgccggggctaagtggccgccggcgtccgggtacccgagggctctcccgcgttgctggcaccgctggcgccgcggtctcgtagcgcatgggcctcctccgaggcg

SEQ ID NO: 596959 - DNA, 120 bp, Artificial Sequence
  ENSG00000173950_1 (sequence is synthesized)
ggctcccatgcgctcgggccatggcgcgcctgggcgctgtgcgctcccactactgcgccctgctgctggccgcggcgctggccgtctgcgccttctactacctcggctcaggccgggaga

SEQ ID NO: 596960 - DNA, 120 bp, Artificial Sequence
  ENSG00000173950_2 (sequence is synthesized)
actacctcggctcaggccgggagaccttctccagcgccaccaagaggctgaaggaggcccgcgccggggctcccgccgcgccctcgccgcccgcgctggagctagcgcggggctccgtgg

SEQ ID NO: 596961 - DNA, 120 bp, Artificial Sequence
  ENSG00000173950_3 (sequence is synthesized)
agagcttggagggcggcggtgccgggccggtggactaccacctgctgatgatgttcaccaaggcggagcacaatgccgcgctgcaggccaaggcccgcgtcgcgctgcgctcactgctgc

SEQ ID NO: 596962 - DNA, 120 bp, Artificial Sequence
  ENSG00000173950_4 (sequence is synthesized)
gcctcgccaagttcgaggcgcacgaggtgcttaaccttcacttcgtgagcgaggaggccagccgcgaggtggccaagggcctgctgcgggagctcctgccgcccgccgctggcttcaagt

SEQ ID NO: 596963 - DNA, 120 bp, Artificial Sequence
  ENSG00000173950_5 (sequence is synthesized)
gcaaggtcatcttccacgatgttgctgtgctgacggataagctcttccccatcgtggaggccatgcagaagcacttcagtgctggcttgggaacctactacagtgactccatcttcttcc

SEQ ID NO: 596964 - DNA, 120 bp, Artificial Sequence
  ENSG00000173950_6 (sequence is synthesized)
tctcggtcgccatgcatcagatcatgcccaaagagatcctgcagatcattcagctggacctagacctgaagtttaagaccaacatccgggagttgtttgaggaatttgacagtttcctgc

SEQ ID NO: 596965 - DNA, 120 bp, Artificial Sequence
  ENSG00000173950_7 (sequence is synthesized)
caggcgccatcatcggcatagcccgggagatgcagccagtttacaggcacacattctggcagttccgccatgagaacccccagacccgggttgggggcccgccccccgaggggctgccgg

SEQ ID NO: 596966 - DNA, 120 bp, Artificial Sequence
  ENSG00000173950_8 (sequence is synthesized)
gcttcaacagcggggtgatgttgctgaacctggaggccatgcgccagtccccgctctacagccgcctgctggagccggcgcaggtgcagcagctggccgacaagtaccacttccgcggcc

SEQ ID NO: 596967 - DNA, 120 bp, Artificial Sequence
  ENSG00000173950_9 (sequence is synthesized)
acctcggggaccaggacttcttcaccatgatcggcatggagcaccccaagctcttccatgtgctggactgtacctggaaccggcagctgtgcacctggtggagggaccatggctacagtg

SEQ ID NO: 596968 - DNA, 120 bp, Artificial Sequence
  ENSG00000173950_10 (sequence is synthesized)
acgtcttcgaggcctatttcaggtgtgagggccacgtcaagatctaccacgggaactgcaacactcccatcccggaggactaggcgctccccgtgccttgcccccggggcctccagatct

SEQ ID NO: 596969 - DNA, 120 bp, Artificial Sequence
  ENSG00000173950_11 (sequence is synthesized)
cctgtgattaaggtgctgagacctcctgccgggcaggtcactgtgctgaggccacccgccaaggactggcctgtgcactgctggtgcttgggaccttattcctccagggagcaggcgaca

SEQ ID NO: 596970 - DNA, 120 bp, Artificial Sequence
  ENSG00000173950_12 (sequence is synthesized)
caaaggacacgcatgtccagtgggctgggaagcaagcacttgaagagaaggaaggggagaaagggtcccccttgctgtctgcctctgaggaatggaaatcctttagacccggcctttttt

SEQ ID NO: 596971 - DNA, 120 bp, Artificial Sequence
  ENSG00000173950_13 (sequence is synthesized)
ggaccaatataaatttaatttaaattgacagccttccatttttcgagaaagtacaaacagaactgctttagcacccatcgagccccaaacgggtaaggtaagccaaggttttaatgacca

SEQ ID NO: 596972 - DNA, 120 bp, Artificial Sequence
  ENSG00000173950_14 (sequence is synthesized)
gcccagtatctaagcttccaaacgaatgccagcccatcacatactcaccctgggaggctgctgcacgcgcattctcctgatgctcacgtcacttggtgtaggtttcaggatcgcctcttt

SEQ ID NO: 596973 - DNA, 120 bp, Artificial Sequence
  ENSG00000173950_15 (sequence is synthesized)
gaggaaggacttcaggaccaactggggcctgcataagaaaacttatctcattattagagtactcacagcttgtatctcccagctacatcctagaaccccattgtcctttattccaccaaa

SEQ ID NO: 596974 - DNA, 120 bp, Artificial Sequence
  ENSG00000173950_16 (sequence is synthesized)
ccagctccaggtgaccagactctactcagaaagcaaattcgtcatcaaagaacagagactggccaccacaaggacatgcaggagaactgtcgggaccaggaagactcattccaaaaagcc

SEQ ID NO: 596975 - DNA, 120 bp, Artificial Sequence
  ENSG00000173950_17 (sequence is synthesized)
atcccaacactttgggagaccgaggtgggggtatcgattgagcctcggaggtcgagatcagcctgggaaacacagggaggcccccatcgctacaaaatattttaaaaattagccaggtgt

SEQ ID NO: 596976 - DNA, 120 bp, Artificial Sequence
  ENSG00000173950_18 (sequence is synthesized)
caaaatattttaaaaattagccaggtgtggtggcttgtgcttgttgtcccggctacttgggaggctgaagtgggagggtggcttgagtccaggagttcactgcactgagctgtgatcaca

SEQ ID NO: 596977 - DNA, 120 bp, Artificial Sequence
  ENSG00000173950_19 (sequence is synthesized)
ctccagcctggacgacagagtgagacgtccatctcaaaaaaaaaaaaaaaaccaaaaaggaacccagcaattcccaagtgtgaccatgtgggcttggaagacatgtcactcatgggctag

SEQ ID NO: 596978 - DNA, 120 bp, Artificial Sequence
  ENSG00000173950_20 (sequence is synthesized)
tgggctagtaagcattctagtttctttgtttaaaaaatccccttatcataccacgttagaccgtagaccttagcagaaattaaagcgtcatttcttttgatggggcctcctgtacgtagg

SEQ ID NO: 596979 - DNA, 120 bp, Artificial Sequence
  ENSG00000173950_21 (sequence is synthesized)
ctgcagacgtgaaagccccaggggtccatttgtatcaattttcatcttgttttgttttgatttcatttacgtttttctttttcccatgagtgaggatagccaataaatcatctttgagaa

SEQ ID NO: 596980 - DNA, 120 bp, Artificial Sequence
  ENSG00000173950_22 (sequence is synthesized)
gccaatttttcagagacccaaaggacagaccaatcgtagcctgaatcccaagagttcagtgggagacacactgtattcgtctgttctcacaccgctacgaagaaatacccgagactgggg

SEQ ID NO: 596981 - DNA, 120 bp, Artificial Sequence
  ENSG00000173950_23 (sequence is synthesized)
ctacagagccaggaagaggagcatagaaagaaaaaggaacaggaaattgttcaaaagaagttcatgaaatgagaaaagcagcaggaaacagctcgggaatcggcgaggctgcagccgaag

SEQ ID NO: 596982 - DNA, 120 bp, Artificial Sequence
  ENSG00000173950_24 (sequence is synthesized)
agagatttatctggaaggcctggagaagcaactcaagcacaagggatctgaggaggagccagggagcacatttccagtttaaaggggaaaaatgtctccctggagagccccaggcagtcc

SEQ ID NO: 596983 - DNA, 120 bp, Artificial Sequence
  ENSG00000173950_25 (sequence is synthesized)
ttgaaagagaagcttgaaaagtcaagtttgggtcttctgcagctcgggcaccaccgagtcatagtgagtgttggcctccgcaaggcctgacagcacagaggacagaggcacacattctgg

SEQ ID NO: 596984 - DNA, 120 bp, Artificial Sequence
  ENSG00000173950_26 (sequence is synthesized)
aattgaagtagtcacttctttcagaatgctaagttccctggaatattttcccagcctactgtgtctatgatagactcaaatattggaagttttaccggctgtgtgtggggtggggaagga

SEQ ID NO: 596985 - DNA, 120 bp, Artificial Sequence
  ENSG00000173950_27 (sequence is synthesized)
attctgttggttctccggtgagtcctgaagagaccttgtttctggagccaggaagaggagcatagaaagaaaaaggaacaggaaattgttcaaaagaagttcatgaaatgagaaaagcag

SEQ ID NO: 596986 - DNA, 120 bp, Artificial Sequence
  ENSG00000173950_28 (sequence is synthesized)
caggaaacagctcgggaatcggcgaggctgcagccgaaggaagacatcttccttttaagcagtgactcgggaatcgaggccacttccatcctgtaacgacgccatctggagcatgtggct

SEQ ID NO: 596987 - DNA, 120 bp, Artificial Sequence
  ENSG00000173950_29 (sequence is synthesized)
tccaggggagcagtggctgaggccctgcagtggcttctcactgctacagtccagagttgcacacagcacttctgctcatagtccatcagccaggagctagtcatgtggccacctcgctgc

SEQ ID NO: 596988 - DNA, 120 bp, Artificial Sequence
  ENSG00000173950_30 (sequence is synthesized)
gtgagagtcagtgagctctcaggagatctgctgtttgaaagtgtgtagcgcttcccccttctctctctctgtcctgctgcactatggtgagatgtgtcccttccgccgtgattgtgtgtt

SEQ ID NO: 596989 - DNA, 120 bp, Artificial Sequence
  ENSG00000173950_31 (sequence is synthesized)
atgaatgggatgagtgtcctgatgaaagagaccctgaagagctctgtcaccccttcaccatatgaggagactggggaaaggcagccatctgtgaactgggcagtgagtcctcaccagaca

SEQ ID NO: 596990 - DNA, 120 bp, Artificial Sequence
  ENSG00000173950_32 (sequence is synthesized)
gctgagctctccgttctggcttgaaggcctcgcccgagccctgtcaccggctctgcctgtcaggagggcccaagtgtgcggcttcggtggggctgcctgacactgacctctggggttgta

SEQ ID NO: 596991 - DNA, 120 bp, Artificial Sequence
  ENSG00000173950_33 (sequence is synthesized)
aaggtcccagagggtcctaagtcgggcctgatgtggctgagatggcaagagccggaacgtttctgtaaaatctgaaagcccttgatggggccgagggggtgaggaggattcccaccctgt

SEQ ID NO: 596992 - DNA, 120 bp, Artificial Sequence
  ENSG00000173950_34 (sequence is synthesized)
ccgccttggacggagtctcgggcctgcttttccgttttctgtccccttactctggcttctggatagcctttggaatattccgggcgatagctgggcctccagagagagtgggctgcaggg

SEQ ID NO: 596993 - DNA, 120 bp, Artificial Sequence
  ENSG00000173950_35 (sequence is synthesized)
tgtgggcccggcctccccttgcctggcgggttttcctggtcagcgttcctgctgctccccggtcatccctcctgtgctgcagcctttttctctggttcagacccacactctgccgtccca

SEQ ID NO: 596994 - DNA, 120 bp, Artificial Sequence
  ENSG00000173950_36 (sequence is synthesized)
tcttttctcctttgcctccttccaaggtgcgtccacagccagcgtttctttatgcttttccctcagtctgagacctaggaacaggagaggccagtgctgtgaatttcatgtttcatggcc

SEQ ID NO: 596995 - DNA, 120 bp, Artificial Sequence
  ENSG00000173950_37 (sequence is synthesized)
aggaggaagaggaggaggaggaggaggagctgccactgtccccgaggggagcagctgacactctccccttgactgcaccaggccttgggggtatggcgcctccacggacgtgggctgggg

SEQ ID NO: 596996 - DNA, 120 bp, Artificial Sequence
  ENSG00000173950_38 (sequence is synthesized)
atgcgcttggagtcagggcaccttttccccagtgggcagttctgcaccctgaacagctgtggggagaagggcagcgggaggacggccagataattccagaagaaaggctccaggagtggc

SEQ ID NO: 596997 - DNA, 120 bp, Artificial Sequence
  ENSG00000173950_39 (sequence is synthesized)
agcagaactgctgttattttcggaggagtctaattactttccccaggcacacattctggcagttccgccatgagaacccccagacccgggttgggggcccgccccccgaggggctgccgg

SEQ ID NO: 596998 - DNA, 120 bp, Artificial Sequence
  ENSG00000173950_40 (sequence is synthesized)
catgtctgactagctacctactgtaacaatacagggagcctcagagtcccaagccctagatactagtcccagctctgccaccttggggcctttgttcccccacctgagaaggagaagagc

SEQ ID NO: 596999 - DNA, 120 bp, Artificial Sequence
  ENSG00000173950_41 (sequence is synthesized)
tgagctctaagtccccgctccccggctctggcattgggggttacagcccttcggaccctcattgtcctccctccgtctggaagttgcctgtctgctggcacacattctggcagttccgcc

SEQ ID NO: 597000 - DNA, 120 bp, Artificial Sequence
  ENSG00000173960_0 (sequence is synthesized)
gcttgggcgcctggcgaagaccgagagaggctggcgggatctcagcggcgcggccgcggaacctgaggcggtctggggcggcggcgctccggctctgaagggctccagccaaacggagcc

SEQ ID NO: 597001 - DNA, 120 bp, Artificial Sequence
  ENSG00000173960_1 (sequence is synthesized)
cgcggccaaacggtgcctgcggtgcctgagctgagtgaggccgaggccgggaggccgtgcccggagtaaggcgaaagagaatgaaagacgtagataacctcaaaagtataaaagaagaat

SEQ ID NO: 597002 - DNA, 120 bp, Artificial Sequence
  ENSG00000173960_2 (sequence is synthesized)
gggtttgtgaaacaggatctgataatcaacctcttggtaataatcaacaatcaaattgtgaatattttgttgatagcctttttgaggaagctcagaaggttagttccaaatgtgtgtctc

SEQ ID NO: 597003 - DNA, 120 bp, Artificial Sequence
  ENSG00000173960_3 (sequence is synthesized)
ccgctgaacagaagaaacaggtagatgtaaatataaaattatggaaaaacggattcaccgtcaacgacgatttcagaagttattccgatggtgccagtcagcagtttttgaactccatca

SEQ ID NO: 597004 - DNA, 120 bp, Artificial Sequence
  ENSG00000173960_4 (sequence is synthesized)
aaaagggggaattaccttcagaattacagggaatttttgataaagaagaggtggacgttaaagttgaagacaagaaaaatgaaatatgtttgtctacgaagcctgtgttccagccctttt

SEQ ID NO: 597005 - DNA, 120 bp, Artificial Sequence
  ENSG00000173960_5 (sequence is synthesized)
caggacagggtcacagactaggaagtgccacaccaaaaattgtttctaaagcaaagaatattgaagttgaaaataaaaataatttgtctgctgttccactgaacaacttggaacccatta

SEQ ID NO: 597006 - DNA, 120 bp, Artificial Sequence
  ENSG00000173960_6 (sequence is synthesized)
ctaatatacagatctggttggccaatggaaaaaggattgtccagaaatttaacattactcatagagtaagccatatcaaagacttcattgaaaaataccaaggatctcaaagaagtcctc

SEQ ID NO: 597007 - DNA, 120 bp, Artificial Sequence
  ENSG00000173960_7 (sequence is synthesized)
cgttttccctggcaacagctcttcctgtcctcaggttgctagatgagacactcacactggaagaagcagatttacagaatgctgtcatcattcagagactccaaaaaactgcatctttta

SEQ ID NO: 597008 - DNA, 120 bp, Artificial Sequence
  ENSG00000173960_8 (sequence is synthesized)
gagaactttcagagcactgatttttgatagactaagtggaaaatttgcagagaaatgatggttgtaagtggacatgcaaaccaaaattggggattggagaagtcagactcactagacttt

SEQ ID NO: 597009 - DNA, 120 bp, Artificial Sequence
  ENSG00000173960_9 (sequence is synthesized)
tggttcgagtactattgaactctctcctgatgagaagatgtttagataagtacaagttaagaaagtagcatatgactggaaactatattcagtgcactttctccaaaagactacccagaa

SEQ ID NO: 597010 - DNA, 120 bp, Artificial Sequence
  ENSG00000173960_10 (sequence is synthesized)
aaatagacttattttcaaataccagttatcaagatatattaaatagctgtattgtttagaatcttaatatggtataaattagcatatgtattcacaatattcattcagacatcattccca

SEQ ID NO: 597011 - DNA, 120 bp, Artificial Sequence
  ENSG00000173960_11 (sequence is synthesized)
gacagcagggatttatttaaatgttagctgtctgagtttttaaatagctaatacgaccgggtacagtggttcatgcctgtaatcccagaacttcgggaggccgagacaggcagatcacga

SEQ ID NO: 597012 - DNA, 120 bp, Artificial Sequence
  ENSG00000173960_12 (sequence is synthesized)
aggagaatctcttgaacctggcaagtgtaggttgcagtgagctgagattgagcaactgtactccagcttggcgacagagcaagaccccctctcaaaaataaataaaataaagtaaaataa

SEQ ID NO: 597013 - DNA, 77 bp, Artificial Sequence
  ENSG00000173960_13 (sequence is synthesized)
gccaggagtttaaaaccagaatgatcaacagagtgagacccctgtctatatatttttttaatttaaaaaataaaaga

SEQ ID NO: 597014 - DNA, 120 bp, Artificial Sequence
  ENSG00000173960_14 (sequence is synthesized)
acccctgtctatatatttttttaatttaaaaaataaaagaataaaattgtgtagctcagtatagtatcaagattaatctgcctactcacatttctacactttataaaaatgtaataaaag

SEQ ID NO: 597015 - DNA, 120 bp, Artificial Sequence
  ENSG00000173960_15 (sequence is synthesized)
aaaattatctttctaaaaagcctattccctttccattttattttctttcaaaaattatggatttgtttttggctaacatttgggattagccattcatttgccaccactcacttagaatat

SEQ ID NO: 597016 - DNA, 120 bp, Artificial Sequence
  ENSG00000173960_16 (sequence is synthesized)
ccaccactcacttagaatataatgccggtgtgtgtcacattactagtattttttaaatgcatcatataaagtatggttttctgtttctttttcgtttgtttgagatggagtttcgctctt

SEQ ID NO: 597017 - DNA, 120 bp, Artificial Sequence
  ENSG00000173960_17 (sequence is synthesized)
ggctggtctcgaactcccgacctcaggggatctgcctgcctaggcctcctgaagtgctgggattacaagtgtgaaccaccgtgcccagctggttttctgtttcatacatcagagtcaact

SEQ ID NO: 597018 - DNA, 120 bp, Artificial Sequence
  ENSG00000173960_18 (sequence is synthesized)
ctggttttctgtttcatacatcagagtcaacttgtgaatacatttaaagattatttcattttgatatcacgaagaaaaacaggctttatatctcagactttaactaaatccagttagacc

SEQ ID NO: 597019 - DNA, 120 bp, Artificial Sequence
  ENSG00000173960_19 (sequence is synthesized)
tcaatttttcactgtcagattaaatccccatacctgaaaataagtttaacatttttttttgcaaatgatctattgaatcagatttaaaatgaagcatgcattgagtgtgccaaggaacta

SEQ ID NO: 597020 - DNA, 120 bp, Artificial Sequence
  ENSG00000173960_20 (sequence is synthesized)
agtggtccatagcagcagtaatgttcatagggtgcgagatgcctgctatgaaacagcaactctcaaacatttttatctcaagaccatttgtttatgtgagctatatatattattatatta

SEQ ID NO: 597021 - DNA, 120 bp, Artificial Sequence
  ENSG00000173960_21 (sequence is synthesized)
gagattgcgcccctgcactccagcctggtgacggagcgagactctttctcaaaaaaaaaaaattattcatttaaaaataacttctggctggacatggtgtctcacgcctgtaatcctagc

SEQ ID NO: 597022 - DNA, 79 bp, Artificial Sequence
  ENSG00000173960_22 (sequence is synthesized)
agtttgagaccagcctgggcaacaaggcaaaactctatctataaaaattacaaaaattataaagcgggcagatcacctg

SEQ ID NO: 597023 - DNA, 89 bp, Artificial Sequence
  ENSG00000173960_23 (sequence is synthesized)
agccgagattgcgccactgcactctagcttaggcaacagagtaagaccctgccgtaataataataactcccccagactagagtgcaatg

SEQ ID NO: 597024 - DNA, 80 bp, Artificial Sequence
  ENSG00000173960_24 (sequence is synthesized)
aataataacttataaaacatgaaacgatttagtgagaaaagtggccggttttttggggggaattactttctgtcataaag

SEQ ID NO: 597025 - DNA, 120 bp, Artificial Sequence
  ENSG00000173960_25 (sequence is synthesized)
gtggccggttttttggggggaattactttctgtcataaagaagatagatgggttctcatgtcttctacattcagtctgttgtgcagtcacatatcatgtagactctggaaaacacctctg

SEQ ID NO: 597026 - DNA, 120 bp, Artificial Sequence
  ENSG00000173960_26 (sequence is synthesized)
tatactggtgaaagaatgaaaagaagcaaataatgccttagtatgattatgaaaaacgttttgacttcacagtgccctgaatgggtcttgggaatctccagggatccctcaggcacactt

SEQ ID NO: 597027 - DNA, 120 bp, Artificial Sequence
  ENSG00000173960_27 (sequence is synthesized)
tgagaaccaatctatataaagtgatggttcacaatgattctgaagccttagtttcagaatcatttggggcagcttttcaaaaatgccattcctgccacctaccacaaagattctgattca

SEQ ID NO: 597028 - DNA, 120 bp, Artificial Sequence
  ENSG00000173960_28 (sequence is synthesized)
ctgtatctgtgatgggtctcagatctctgcatttttaatctcacgtgattcttaagtatgtggtggaagtacctttcttcaggaaattctgtcctaagcttttaccctgagaaaataaaa

SEQ ID NO: 597029 - DNA, 120 bp, Artificial Sequence
  ENSG00000173960_29 (sequence is synthesized)
cctgcatgctttcaccatggacggtgggagactccactgaaacacatctgctagaccactaagtttatccttgtcacccagtttgctcttggaaagagtctgttcccttttgtcactgaa

SEQ ID NO: 597030 - DNA, 120 bp, Artificial Sequence
  ENSG00000173960_30 (sequence is synthesized)
ccaatcatgacataaacttgtgctttacctcctatagcacagccgagacaaggctggaacatttaattaaggtttttactaaggactcaggaataacaacagggaaatatctatgtaact

SEQ ID NO: 597031 - DNA, 120 bp, Artificial Sequence
  ENSG00000173960_31 (sequence is synthesized)
agatgacctgacataaaatctatcttctgattgcagtctattgtgagaatgctgcttttcctagctcccagccttccatggggcagaaggctcttttaattaggaagagagggaggacaa

SEQ ID NO: 597032 - DNA, 120 bp, Artificial Sequence
  ENSG00000173960_32 (sequence is synthesized)
aggagagccttttcttttgtccattactcttagaaatgaacaggtacataatagaaaataaataattattgttggtaatgtttacacagcagtgttagagcctctctgtagtgaaacaaa

SEQ ID NO: 597033 - DNA, 120 bp, Artificial Sequence
  ENSG00000173960_33 (sequence is synthesized)
aataatgttcttaccaaaaaaaaaaaaaaaaaaaagaggcaatgataaaatcaatgagcttatctttctgatatagaaaataacaggatgacagttaatacatgttcaggaatctaagaa

SEQ ID NO: 597034 - DNA, 120 bp, Artificial Sequence
  ENSG00000173960_34 (sequence is synthesized)
aatgtttcatataggcctatcatgtagcatttttatttgcataattatagtcaacatatgattctccatgtaggggtctctcattgagaatgtttcctgtgtacctatagaaaagcctct

SEQ ID NO: 597035 - DNA, 120 bp, Artificial Sequence
  ENSG00000173960_35 (sequence is synthesized)
ttggtagattttccggtttataattatttaaccagaagatacatgggaggttcttttgtatgtacctgtagaatacatcccagtaagggtcctatggagaaagacctgttgtcatcaata

SEQ ID NO: 597036 - DNA, 120 bp, Artificial Sequence
  ENSG00000173960_36 (sequence is synthesized)
accttcattattctaactgtgaaacgttcattaatgcgaataatatcctcaaagattttctacaatgagaatcatccagtaaagctttttaactgagaatttaaaagttgtaaaattgtt

SEQ ID NO: 597037 - DNA, 120 bp, Artificial Sequence
  ENSG00000173960_37 (sequence is synthesized)
agttaaatgtgtataattatcaaaagaggttgactttggaaaacaaacaatttgctaagggaaggaaaacttgaaaataatcaccttagatggggcatacaatttgacctaagcaattgt

SEQ ID NO: 597038 - DNA, 120 bp, Artificial Sequence
  ENSG00000173960_38 (sequence is synthesized)
aatttgacctaagcaattgtttcaaaactgtcttcagtttcttgaaaataattgttagggctgatatatagaaatacatatctaggccaggcacggtgactcatgcctgcaatcccagca

SEQ ID NO: 597039 - DNA, 120 bp, Artificial Sequence
  ENSG00000173960_39 (sequence is synthesized)
gaaatacatatctaatgttacagattgtggtttattggttaattactatgcatttttttcagtttaaaaaataatcttattttatatacttctctcggtataatttttcatgacatttca

SEQ ID NO: 597040 - DNA, 120 bp, Artificial Sequence
  ENSG00000173960_40 (sequence is synthesized)
gcatgttgataatatgtgtgcatctatttcagtgccttaaagtattttgagagcaatcttttgctgacagttgaagaactgttaatgaaatactgttcattaaaaggatctgtgaaatca

SEQ ID NO: 597041 - DNA, 120 bp, Artificial Sequence
  ENSG00000173960_41 (sequence is synthesized)
gaccagaaaagccagactaatcaggacgagttcgggcgtggaattgggcctgaagccctcatgcccagccaggcctgaatgccccagaccccaccgtcacccccgtggcctggatggagc

SEQ ID NO: 597042 - DNA, 120 bp, Artificial Sequence
  ENSG00000173960_42 (sequence is synthesized)
aggggacggccggcgaaggcgcggggtggaaggggagcggcgacgaaggcgcgaggagctgactgggaatccccaagctacccgaggcaagacactgaacttgagtcgcacttttcatgc

SEQ ID NO: 597043 - DNA, 120 bp, Artificial Sequence
  ENSG00000173960_43 (sequence is synthesized)
ctgtagaaatgagaatgacagctgtgataaaaaaaaaattcatctgggcggtatctggaacttggcggtggatgaggagggctgctcgctggctgcggctgaggctcggtcaccgtgtag

SEQ ID NO: 597044 - DNA, 120 bp, Artificial Sequence
  ENSG00000173960_44 (sequence is synthesized)
agaggcccagggagagctgcttcactcaagtcctgtcaagtcaaggcagccgggatttgtccacatctaaggcgaaagagaatgaaagacgtagataacctcaaaagtataaaagaagaa

SEQ ID NO: 597045 - DNA, 120 bp, Artificial Sequence
  ENSG00000173960_45 (sequence is synthesized)
tagccaggtgtggtaggtcaagcctgtaaacccaaaactttggcaggctgtggcgagaggattgcctgagctcaggagttcaaggccagccggggaacatagccagacctcatctctact

SEQ ID NO: 597046 - DNA, 120 bp, Artificial Sequence
  ENSG00000173960_46 (sequence is synthesized)
taaaaaaagaaaattaccagccagcccagctactcaggattgcttgcacttgggagactgaggctacagtgagccatgcttgcactactgcactccagcctgggcaacagcacgatgccc

SEQ ID NO: 597047 - DNA, 65 bp, Artificial Sequence
  ENSG00000173960_47 (sequence is synthesized)
tctggaacttgtaaggcgaaagagaatgaaagacgtagataacctcaaaagtataaaagaagaat

SEQ ID NO: 597048 - DNA, 120 bp, Artificial Sequence
  ENSG00000173976_0 (sequence is synthesized)
gcgccaggcccgctggggcaggtgtcccgtggaaatcgacggaggggctgccgtgggcggccgtgacagtcacagagaggggaagagaaaacagggacggtgacacacacagagagaagg

SEQ ID NO: 597049 - DNA, 120 bp, Artificial Sequence
  ENSG00000173976_1 (sequence is synthesized)
aagagcagacagaggcacagcaggagacccccccaagcccgaggaggacagcctggggatgcagagcgcatgccggccccagtggagggaaccgatttccccggagccgggaggcaagcc

SEQ ID NO: 597050 - DNA, 120 bp, Artificial Sequence
  ENSG00000173976_2 (sequence is synthesized)
tggggctcccctgccctgtccctgccggtagcccccccagccgtctccccaccatctgtcccgctgccgtcccaccaggtgggagccatgttcctgagcccgggcgaggggccggcaacc

SEQ ID NO: 597051 - DNA, 120 bp, Artificial Sequence
  ENSG00000173976_3 (sequence is synthesized)
gagggtgggggtctggggccgggcgaggaggcccccaagaagaagcaccggaggaaccgcaccaccttcaccacctaccagctgcaccagctggagcgggcgttcgaggcctctcactac

SEQ ID NO: 597052 - DNA, 120 bp, Artificial Sequence
  ENSG00000173976_4 (sequence is synthesized)
ccggatgtgtacagccgtgaggagctggcagccaaggtgcacctacctgaggtgcgcgtgcaggtgtggttccagaaccgccgggccaagtggcgccgccaggagcggctggagtcaggc

SEQ ID NO: 597053 - DNA, 120 bp, Artificial Sequence
  ENSG00000173976_5 (sequence is synthesized)
ctggagtcaggctcgggtgccgtggcagctccgagactccccgaggccccagcgctgccgttcgcccgccccccggccatgtcgctgcccctggagccctggttgggccccggaccgccg

SEQ ID NO: 597054 - DNA, 120 bp, Artificial Sequence
  ENSG00000173976_6 (sequence is synthesized)
ctcccccgcctcctgggcccgggcccggggctgcaagcgtccttcgggcctcatgcctttgctcccaccttcgcagatggcttcgccctggaggaggcgtccctgcggctgctggccaag

SEQ ID NO: 597055 - DNA, 120 bp, Artificial Sequence
  ENSG00000173976_7 (sequence is synthesized)
gaacatgcacaggctctggacagggcctggccgccagcctgagcctgccgccctcccgggccccctcctcggcccaacccgagaaccggggacgtgccctggtgacagccaccacgcctt

SEQ ID NO: 597056 - DNA, 120 bp, Artificial Sequence
  ENSG00000173976_8 (sequence is synthesized)
ggcctaggccgaggtcatggagcaaccgtggtcaggccaggccaccaccactggggagcgggaccagagagacaggctgctgggttccctgcccccatcccgtctcccaccccatcgcca

SEQ ID NO: 597057 - DNA, 120 bp, Artificial Sequence
  ENSG00000173976_9 (sequence is synthesized)
cccgtcctgctggcagcggactggcccccagtgtcaggcaggaggtgacccaagtattctcaggccaggtgcggggacctcctcccctcctggggcctcagtctcctgtctgttaattgg

SEQ ID NO: 597058 - DNA, 120 bp, Artificial Sequence
  ENSG00000173976_10 (sequence is synthesized)
gaggttcgagggctgcgaggctgtgggtggcgggaccgctgactctgtaagatgagtgtaaatctctctgcttctcctaatccccatcagcagagctgcccactctccaggctcccagtc

SEQ ID NO: 597059 - DNA, 120 bp, Artificial Sequence
  ENSG00000173976_11 (sequence is synthesized)
ccctggaaataacaaatagcagcagctcccgcgagcctggtctcctctcaccgtgtgctcgccatgtgagcactcccctctccgttgtgccctggacctcgggcacagctgtcagcccat

SEQ ID NO: 597060 - DNA, 120 bp, Artificial Sequence
  ENSG00000173976_12 (sequence is synthesized)
tctatagagagggaaaccggggcttaggcaggaagccaggtccccaaagtcgcacggccaggagtggatggagctgcctttcagacccatcaccggtcctaccgtccggggcacagcgac

SEQ ID NO: 597061 - DNA, 120 bp, Artificial Sequence
  ENSG00000173976_13 (sequence is synthesized)
aggttctggagagagggtgggtcccgggccaggtgctggtgggcctccaggtggaggcgggctgatgctgggtgtgtcgtcatcgtcagaccgttcctcacgtccccacagaccccaggc

SEQ ID NO: 597062 - DNA, 120 bp, Artificial Sequence
  ENSG00000173976_14 (sequence is synthesized)
cctgtgcatgtccccagtggaggcatggccagcatctgctctgtccaacccagccgcatcgcccaagagctctgagcaaggaggctgtcgcggggccgagaacccgctgggactggcaag

SEQ ID NO: 597063 - DNA, 120 bp, Artificial Sequence
  ENSG00000173976_15 (sequence is synthesized)
cacggctggcccagtgcagcaggagggggccctgaggcatgggatgggacagtctgggccagcgccacctcccgggacagaagtgcggcaccagggcaggagctgcagtagctaccctcc

SEQ ID NO: 597064 - DNA, 120 bp, Artificial Sequence
  ENSG00000173976_16 (sequence is synthesized)
ccgtctccagcctgggctccccagatcactcccagatcaccaggtcaccccatctctaggcggcacctcacacaccagtcctgtggtccaacgccccgccatcacccaatgtcaccgcac

SEQ ID NO: 597065 - DNA, 120 bp, Artificial Sequence
  ENSG00000173976_17 (sequence is synthesized)
caacgccccgccatcacccaatgtcaccgcacaccaggcagtggggacacggcagtaagcacaagaaagatttttttttttaaagctaaaccaggccaggtgcggtggctcatgcctgta

SEQ ID NO: 597066 - DNA, 120 bp, Artificial Sequence
  ENSG00000173976_18 (sequence is synthesized)
attgcttgagaccagcctgggtgacacagcaagaccccatctccacaaacgtttttaaaatgtgccgggtgtactggtgcacacctgtcatcccagctacccaagaagctgaggcaagag

SEQ ID NO: 597067 - DNA, 88 bp, Artificial Sequence
  ENSG00000173976_19 (sequence is synthesized)
ggagctgtgatcacactgctgcactccagcctgtgcaacagagccagaccctgactcaatacaaataaaaaacaaatctaaaacaaaa

SEQ ID NO: 597068 - DNA, 120 bp, Artificial Sequence
  ENSG00000173988_0 (sequence is synthesized)
ttagcggaccccggttgctagggtgtgtctccttggcctcctagagggtggggatccgtggtgcttcttcgggaacagcctcctgcaggaagaccctcgctggacctttacctcgctgcc

SEQ ID NO: 597069 - DNA, 120 bp, Artificial Sequence
  ENSG00000173988_1 (sequence is synthesized)
tagattccgaggaaaaggagataggagacgaaaagccagttggtttggaaagcggccgattatcctaaagggtagtgtgggagtccagcacttccatgcccctctttgggtactacggaa

SEQ ID NO: 597070 - DNA, 120 bp, Artificial Sequence
  ENSG00000173988_2 (sequence is synthesized)
gggagatttccagcatcgtgtggaacatatgaccagggagtacaccttgagcgcttgtgtgcagttatcttttggcggattatgaaaaacagcacttattattcattaaaatgcaaaagc

SEQ ID NO: 597071 - DNA, 120 bp, Artificial Sequence
  ENSG00000173988_3 (sequence is synthesized)
ccccactgcttcttcgaagacccttacctccaaaattcactaagctgtctttacatgagaaaaaaacccatacagctaaaactggtaaaattgagtcactacatgtagcattcactgaag

SEQ ID NO: 597072 - DNA, 120 bp, Artificial Sequence
  ENSG00000173988_4 (sequence is synthesized)
atgaaaccacttccattaaaatggatagaactcgttttcctgatgttttaagaaatcaatcactaacacctatcaatatccaaaatatctttcttgatcactgtgtacaagaaagagtga

SEQ ID NO: 597073 - DNA, 120 bp, Artificial Sequence
  ENSG00000173988_5 (sequence is synthesized)
ctgcaatttcatcaccccagaaatctactaagcatgtccgtgagcagattccagatactgctactggttccatattttttccacattgtaattcagcttctactcgaatttttgggaaac

SEQ ID NO: 597074 - DNA, 120 bp, Artificial Sequence
  ENSG00000173988_6 (sequence is synthesized)
aaacaaacaaaatggaaagttcaagaaagtttaaaactatgaaagatgtttatactgaaaaaaggctagaaaacattttaattctttcttccaagttttccaaacctaaaagtactcctg

SEQ ID NO: 597075 - DNA, 120 bp, Artificial Sequence
  ENSG00000173988_7 (sequence is synthesized)
gctcagttatcgctcaaaaacttgagaaaatgcaccctaagcatcaacctttaccagagagtccaggctatacttatcagcacatctcgagagacttaagtgcaacagtgccaagccctc

SEQ ID NO: 597076 - DNA, 120 bp, Artificial Sequence
  ENSG00000173988_8 (sequence is synthesized)
agagttactgaatttccaggttttgtttccttgccaacaccagttttaccaagaaaacctcacaggcagtctgtgatagaaactcttgtaacagaaaatggaaatatagaaagtgtccca

SEQ ID NO: 597077 - DNA, 120 bp, Artificial Sequence
  ENSG00000173988_9 (sequence is synthesized)
aagcaaatcccaccaagaccacctgaaggtctcaccaaaactgaaaaaatagaatcagagatacacgttgtacgtggtgaaggttttaagactgttgcagcaacacgatatgaaacaata

SEQ ID NO: 597078 - DNA, 120 bp, Artificial Sequence
  ENSG00000173988_10 (sequence is synthesized)
acagccatgaccaacctggccatagtaaactgtcaagtatatgggagaaatgcacttaatctgaagggcttttttatcctaaattgtccagacttaacacctttggctttccagttgata

SEQ ID NO: 597079 - DNA, 120 bp, Artificial Sequence
  ENSG00000173988_11 (sequence is synthesized)
tatcttaatttatcatttaatgatcttcattactttcccacagaaatattatgtcttaaaaatttacaaatactgaaattgagaaataatcctatcaaagaaattccttctgaaattcaa

SEQ ID NO: 597080 - DNA, 120 bp, Artificial Sequence
  ENSG00000173988_12 (sequence is synthesized)
caacttgagttccttagaattttcaccattgcttttaatttaattactgttcttccaattgggttattttccttgtcttatcttgaagaacttgatgtttcctataatgaacttactttt

SEQ ID NO: 597081 - DNA, 120 bp, Artificial Sequence
  ENSG00000173988_13 (sequence is synthesized)
attccaaatgaaattcagaaactcagatcacttgaaaaactgactgttgatgggaatgaactgagttttttcccccatggaattttgaagcttaacctgacaaaaattcagtttgagaat

SEQ ID NO: 597082 - DNA, 120 bp, Artificial Sequence
  ENSG00000173988_14 (sequence is synthesized)
aatttcactcatccttgtttttggagagataattatttgaataatccacaacaacttactcaaattatttctttgttcattgtccaaaataaactacataaattttatgataagatccca

SEQ ID NO: 597083 - DNA, 120 bp, Artificial Sequence
  ENSG00000173988_15 (sequence is synthesized)
gtagaagttcagaagttactaaaatgcacatccaggtgtgaatggtgtcatggtcccaagtttggtgaaggttttcgtgtcatccgatcctgtgatatttttggagcatcacagcttcca

SEQ ID NO: 597084 - DNA, 120 bp, Artificial Sequence
  ENSG00000173988_16 (sequence is synthesized)
gttatgttttatgtctgttctccttcttgctatagaagaataaaggaaagcagttttgttttagatggtagtcctagtagaagaatagctctagatgtggagttgtcaaaagaattatag

SEQ ID NO: 597085 - DNA, 120 bp, Artificial Sequence
  ENSG00000173988_17 (sequence is synthesized)
tatatatataaactttactggcttttactgcatatatatctgcatatagtaattcatctctttgaaagtagaggttctgtttggaagacataagtgtcttctcatacgaattatctttgt

SEQ ID NO: 597086 - DNA, 120 bp, Artificial Sequence
  ENSG00000173988_18 (sequence is synthesized)
aattctagctccttatgaaagtttgtgattgtttgggaattgttgcagaataattactcaaggaggattagtaaagcctttagatttgaataaagctctagaaaatttctttcagagcct

SEQ ID NO: 597087 - DNA, 120 bp, Artificial Sequence
  ENSG00000173988_19 (sequence is synthesized)
gtttactataaaaggaaaaatgttggaatcctttgcaaaatgggttatgtcttacaactggtcttttcatgcatccatactaagtgatgagatagcattgcagagtcatcagtggggtat

SEQ ID NO: 597088 - DNA, 120 bp, Artificial Sequence
  ENSG00000173988_20 (sequence is synthesized)
gtgctgcatagagcttcaatgtcacacatccaagtgctcaatgcttgtgcatttctgtggaaatctgaccagcaccttccatctcaattgtaggttgttttggggaataaaagattaatt

SEQ ID NO: 597089 - DNA, 120 bp, Artificial Sequence
  ENSG00000173991_0 (sequence is synthesized)
atatgaagaaccggggacagtgctcagtaatcaatagtctgcagttctgcacccacgtgctcctgggtactctgccgtccccacagggtcctcagctcagcccctgtcactgcctctcct

SEQ ID NO: 597090 - DNA, 120 bp, Artificial Sequence
  ENSG00000173991_1 (sequence is synthesized)
gccaccctttgtccactcggcagtgttctcactcctcatccccccacacccaccacctgtctgccagcctcttgcaccatgagttgctactcctggggtgctggactgtccccacagcca

SEQ ID NO: 597091 - DNA, 120 bp, Artificial Sequence
  ENSG00000173991_2 (sequence is synthesized)
tctgtctcccctgctccccatgaagaagagccagtcccctcccaggtagcacatcagagcgggcaggctccagagctcttctggtcctcttgcagtggccagaaagtggggaaaggggcc

SEQ ID NO: 597092 - DNA, 120 bp, Artificial Sequence
  ENSG00000173991_3 (sequence is synthesized)
cagagaggggcagggactgacccatggtcacacagcctatttatggctgatctggagccaggccttctgactatcacccatcagagcccctggattcccatttcacccaacacaggtgtt

SEQ ID NO: 597093 - DNA, 120 bp, Artificial Sequence
  ENSG00000173991_4 (sequence is synthesized)
ggggtagaactgggggccctccacccctactagcctgactgtctcctgagacctgtctcctaagaccacttacctgaccactggccatggggaaggaaaacacctggccaaggctcatgc

SEQ ID NO: 597094 - DNA, 120 bp, Artificial Sequence
  ENSG00000173991_5 (sequence is synthesized)
cccaggttcccaggcatgaagttgactgtctccgcccctgctggtgtggtgagggtgactggggactaggcactaggcctttggtgcaggcgcctgaggacgtggttgcactctcccttc

SEQ ID NO: 597095 - DNA, 120 bp, Artificial Sequence
  ENSG00000173991_6 (sequence is synthesized)
tggggatatgcccttgagcccaggcagaggagagcacagccagggcaggacctggcagccctggtacagagcccagagggggcatcagttcctgctggtcctgctctgtttacagacaag

SEQ ID NO: 597096 - DNA, 120 bp, Artificial Sequence
  ENSG00000173991_7 (sequence is synthesized)
ctgctgtcctccctgcaaaggggagtgggtggggcagagggcaagtgccaggggggcacaaggctgggcatgtggctggcatgagacggtgtctgagtaatgtcaggcacctggaggcat

SEQ ID NO: 597097 - DNA, 120 bp, Artificial Sequence
  ENSG00000173991_8 (sequence is synthesized)
tccccccattagtgagtcttggctctacttatagcatctgacaccagaggggccgaaaatagcccctggagaagggggaggagggggctatttaaagggcctgggaggggagagagaatg

SEQ ID NO: 597098 - DNA, 120 bp, Artificial Sequence
  ENSG00000173991_9 (sequence is synthesized)
aggagtgatcatggctacctcagagctgagctgcgaggtgtcggaggagaactgtgagcgccgggaggccttctgggcagaatggaaggatctgacactgtccacacggcccgaggaggg

SEQ ID NO: 597099 - DNA, 120 bp, Artificial Sequence
  ENSG00000173991_10 (sequence is synthesized)
ctgctccctgcatgaggaggacacccagagacatgagacctaccaccagcaggggcagtgccaggtgctggtgcagcgctcgccctggctgatgatgcggatgggcatcctcggccgtgg

SEQ ID NO: 597100 - DNA, 120 bp, Artificial Sequence
  ENSG00000173991_11 (sequence is synthesized)
gctgcaggagtaccagctgccctaccagcgggtactgccgctgcccatcttcacccctgccaagatgggcgccaccaaggaggagcgtgaggacacccccatccagcttcaggagctgct

SEQ ID NO: 597101 - DNA, 120 bp, Artificial Sequence
  ENSG00000173991_12 (sequence is synthesized)
ggcgctggagacagccctgggtggccagtgtgtggaccgccaggaggtggctgagatcacaaagcagctgccccctgtggtgcctgtcagcaagcccggtgcacttcgtcgctccctgtc

SEQ ID NO: 597102 - DNA, 120 bp, Artificial Sequence
  ENSG00000173991_13 (sequence is synthesized)
ccgctccatgtcccaggaagcacagagaggctgagagggactgtgacttgggctccgctgtgcccgccctgggctgggcccttcctggctaggactgtggaggggagctgctggccatgg

SEQ ID NO: 597103 - DNA, 120 bp, Artificial Sequence
  ENSG00000173991_14 (sequence is synthesized)
ctgctttgtagtttgcccagagttgggggctaggggaggggggagccagaggccaggatgcctgagccccctgagttcccaaagggagggtggcagagacagtgggcactaagggtggag

SEQ ID NO: 597104 - DNA, 120 bp, Artificial Sequence
  ENSG00000173991_15 (sequence is synthesized)
agttgggggccagcacagctgaggaccctcagccccaggagaagggacaaaaggtactggtgagggcaagaggtgcctgggaggagtggccctgatccaggaaaatgtgaggggaatctg

SEQ ID NO: 597105 - DNA, 120 bp, Artificial Sequence
  ENSG00000173991_16 (sequence is synthesized)
gaacgctctaggcagaagaagctgggagggagggggaggtgaaaagggcagaggcaaggatggtggggcccccagcaccctctgttagtgccgcaataaatgctcaatcatgtgccagag

SEQ ID NO: 597106 - DNA, 120 bp, Artificial Sequence
  ENSG00000173992_0 (sequence is synthesized)
agtccccgcgacgccgcgctggttggtgctcctgcgccggaggagttctgcgtctcggggtggtgactgggtccagaatggcttcggattcggggaaccaggggaccctctgcacgttgg

SEQ ID NO: 597107 - DNA, 120 bp, Artificial Sequence
  ENSG00000173992_1 (sequence is synthesized)
agttcgcggtgcagatgacctgtcagagctgtgtggacgcggtgcgcaaatccctgcaaggggtggcaggtgtccaggatgtggaggtgcacttggaggaccagatggtcttggtacaca

SEQ ID NO: 597108 - DNA, 120 bp, Artificial Sequence
  ENSG00000173992_2 (sequence is synthesized)
ccactctacccagccaggaggtgcaggctctcctggaaggcacggggcggcaggcggtactcaagggcatgggcagcggccagttgcagaatctgggggcagcagtggccatcctggggg

SEQ ID NO: 597109 - DNA, 120 bp, Artificial Sequence
  ENSG00000173992_3 (sequence is synthesized)
ggcctggcaccgtgcagggggtggtgcgcttcctacagctgacccctgagcgctgcctcatcgagggaactattgacggcctggagcctgggctgcatggactccacgtccatcagtacg

SEQ ID NO: 597110 - DNA, 120 bp, Artificial Sequence
  ENSG00000173992_4 (sequence is synthesized)
tgtccgtgctgatgctgacggccgcgccatcttcagaatggaggatgagcagctgaaggtgtgggatgtgattggccgcagcctgattattgatgagggagaagatgacctgggccgggg

SEQ ID NO: 597111 - DNA, 120 bp, Artificial Sequence
  ENSG00000173992_5 (sequence is synthesized)
aggccatcccttatccaagatcacagggaactccggggagaggttggcctgtggcatcattgcacgctccgctggccttttccagaaccccaagcagatctgctcttgcgatggcctcac

SEQ ID NO: 597112 - DNA, 120 bp, Artificial Sequence
  ENSG00000173992_6 (sequence is synthesized)
catctgggaggagcgaggccggcccatcgctggcaagggccgaaaggagtcagcgcagccccctgcccacctttgagcaggacctcaccttggctctgttgctgtcctccagggcgagca

SEQ ID NO: 597113 - DNA, 120 bp, Artificial Sequence
  ENSG00000173992_7 (sequence is synthesized)
ctttccacttccagagggggccagagggactttgcctgcccagtctttggagagctcagtacagggcaggagctgctgtggtgttcccttggcaaatgaaagttttattttcgtttggga

SEQ ID NO: 597114 - DNA, 120 bp, Artificial Sequence
  ENSG00000173992_8 (sequence is synthesized)
ctgcaacagctgtgggaatcactttaaccctgatggagcatctcatgggggcccccaggactctgaccggacagggccaagaggaccttgcctgcccagtccttggggagctcagatcct

SEQ ID NO: 597115 - DNA, 120 bp, Artificial Sequence
  ENSG00000173992_9 (sequence is synthesized)
cacaggaggaaatgggtactttagggaagcaggaagaggcgtcggaatcaggaaatcagaagatagcagcttggcaccacgtggcacacatcccctatacacacactggatctcattcca

SEQ ID NO: 597116 - DNA, 120 bp, Artificial Sequence
  ENSG00000173992_10 (sequence is synthesized)
tggttggtgctcctgcgccggaggagttctgcgtctcggggtggtgactgggtccagaatggcttcggattcggggaaccaggggaccctctgcacggtgtccaggatgtggaggtgcac

SEQ ID NO: 597117 - DNA, 120 bp, Artificial Sequence
  ENSG00000173992_11 (sequence is synthesized)
tatgtgagactccctgcccttcccgagctgctgaagaggtgtgctgggtgaggtggcaagccagcccaagtgtctaataccttgcagagaatctgggggcagcagtggccatcctggggg

SEQ ID NO: 597118 - DNA, 120 bp, Artificial Sequence
  ENSG00000173992_12 (sequence is synthesized)
tggaggttgtggtgagctgagattgcaccacggcactccagctcaggggtgacagggcaaaactctgtctcaagaaaaaaaataaaatctgatcttgaaggtcctgcttataaccacctt

SEQ ID NO: 597119 - DNA, 120 bp, Artificial Sequence
  ENSG00000173992_13 (sequence is synthesized)
tcttgaaggtcctgcttataaccaccttactgcctctgagatggaaggggacttctggacacagcaaaggaagggtccccatgccatggtgtttgtcatgctgtgatataactagttgtt

SEQ ID NO: 597120 - DNA, 120 bp, Artificial Sequence
  ENSG00000173992_14 (sequence is synthesized)
tactcatctgtgagtcccctgagccagaagcttattcaggacaggacccatgtctgattcttctcggtgccctctacccaaagcccagcacagagtaggcctgtttgttgaatgaatgaa

SEQ ID NO: 597121 - DNA, 120 bp, Artificial Sequence
  ENSG00000173992_15 (sequence is synthesized)
cacactgggccctcaccaatactctgtgaggcacatacacacaggcacaacctccagatgaggaaactgaggctcacagaggttaaatgacttgccaaaggtccacagcaggtaaaaggt

SEQ ID NO: 597122 - DNA, 120 bp, Artificial Sequence
  ENSG00000174004_0 (sequence is synthesized)
gagtcgccgagcagcccgctctccatgtgacttcagtttccgtccgttccttccgctggtgctaaaataatctgatgccccacagcaaggaggtagcccagccccgcgttcggctgctct

SEQ ID NO: 597123 - DNA, 120 bp, Artificial Sequence
  ENSG00000174004_1 (sequence is synthesized)
cgaggaggccggagcccccggagacgatgcgccccgcgcagccgcctgcgcctgcgggagccggctgcccttgagatggagttgctgcctctttggctctgcctgggttttcacttcctg

SEQ ID NO: 597124 - DNA, 120 bp, Artificial Sequence
  ENSG00000174004_2 (sequence is synthesized)
accgtgggctggaggaacagaagcggaacagccacagcagcctcccaaggagtctgcaagttggtgggtggagccgctgactgccgagggcagagcctcgcttcggtgcccagcagcctc

SEQ ID NO: 597125 - DNA, 120 bp, Artificial Sequence
  ENSG00000174004_3 (sequence is synthesized)
ccgccccacgcccggatgctcaccctggatgccaaccctctcaagaccctgtggaatcactccctccagccttaccctctcctggagagcctcagcctgcacagctgccacctggagcgc

SEQ ID NO: 597126 - DNA, 120 bp, Artificial Sequence
  ENSG00000174004_4 (sequence is synthesized)
atcagccgcggcgccttccaggagcaaggtcacctgcgcagcctggtcctgggggacaactgcctctcagagaactacgaagagacggcagccgccctccacgccctgccgggcctgcgg

SEQ ID NO: 597127 - DNA, 120 bp, Artificial Sequence
  ENSG00000174004_5 (sequence is synthesized)
aggctggacttgtcaggaaacgccctgacggaggacatggcagccctcatgctccagaacctctcctcgctgcggtccgtgtccctggcggggaacaccatcatgcggctggacgactcc

SEQ ID NO: 597128 - DNA, 120 bp, Artificial Sequence
  ENSG00000174004_6 (sequence is synthesized)
gtcttcgagggcctggagcgtctccgggagctggatctgcagaggaactacatcttcgagatcgagggcggcgctttcgacggcctggctgagctgaggcacctcaacctggccttcaac

SEQ ID NO: 597129 - DNA, 120 bp, Artificial Sequence
  ENSG00000174004_7 (sequence is synthesized)
aacctcccctgcatcgtggacttcgggctcacgcggctgcgggtcctcaacgtcagctacaacgtcctggagtggttcctcgcgaccgggggagaggctgccttcgagctggagacgctg

SEQ ID NO: 597130 - DNA, 120 bp, Artificial Sequence
  ENSG00000174004_8 (sequence is synthesized)
gacctgtctcacaaccagctgctgttcttcccgctgctgccccagtacagcaagttgcggaccctcctgctgcgcgacaacaacatgggcttctaccgggacctgtacaacacctcgtcg

SEQ ID NO: 597131 - DNA, 120 bp, Artificial Sequence
  ENSG00000174004_9 (sequence is synthesized)
ccgagggagatggtggcccagttcctcctcgtggacggcaacgtgaccaacatcaccaccgtcagcctctgggaagaattctcctccagcgacctcgcagatctccgcttcctggacatg

SEQ ID NO: 597132 - DNA, 120 bp, Artificial Sequence
  ENSG00000174004_10 (sequence is synthesized)
ctgaggaaaatgccttccctctcccacctgaacctccaccagaattgcctgatgacgcttcacattcgggagcacgagccccccggagcgctcaccgagctggacctgagccacaaccag

SEQ ID NO: 597133 - DNA, 120 bp, Artificial Sequence
  ENSG00000174004_11 (sequence is synthesized)
ctgtcggagctgcacctggctccggggctggccagctgcctgggcagcctgcgcttgttcaacctgagctccaaccagctcctgggcgtcccccctggcctcttcgccaatgctaggaac

SEQ ID NO: 597134 - DNA, 120 bp, Artificial Sequence
  ENSG00000174004_12 (sequence is synthesized)
atcactacacttgacatgagccacaatcagatctcactttgtcccctgccagctgcctcggaccgggtgggcccccctagctgtgtggatttcaggaatatggcatctttaaggagcctg

SEQ ID NO: 597135 - DNA, 120 bp, Artificial Sequence
  ENSG00000174004_13 (sequence is synthesized)
tctctggagggctgtggcctgggggcattgccagactgcccattccaagggacctccctgacctacttagacctctcaagcaactggggggttctgaatgggagcctcgccccactccag

SEQ ID NO: 597136 - DNA, 120 bp, Artificial Sequence
  ENSG00000174004_14 (sequence is synthesized)
gatgttgcccccatgttacaggtcctgtctctcaggaacatgggcctccactccagctttatggcgttggacttctctgggtttgggaatctcagggacttagatctgtcggggaattgc

SEQ ID NO: 597137 - DNA, 120 bp, Artificial Sequence
  ENSG00000174004_15 (sequence is synthesized)
ttgaccaccttcccaaggtttgggggcagcctggccctggagaccctggatctccgtagaaactcgctcacagcccttccccagaaggctgtgtctgagcagctctcgagaggtctgcgg

SEQ ID NO: 597138 - DNA, 120 bp, Artificial Sequence
  ENSG00000174004_16 (sequence is synthesized)
accatctacctcagtcagaatccatatgactgctgtggggtggatggctggggggccctgcagcatgggcagacggtggccgactgggccatggtcacctgcaacctctcctccaagatc

SEQ ID NO: 597139 - DNA, 120 bp, Artificial Sequence
  ENSG00000174004_17 (sequence is synthesized)
atccgcgtgacggagctgcccggaggtgtgcctcgggactgcaagtgggagcggctggacctgggcctgctctacctcgtgctcatcctccccagctgcctcaccctgctggtggcctgc

SEQ ID NO: 597140 - DNA, 120 bp, Artificial Sequence
  ENSG00000174004_18 (sequence is synthesized)
actgtcatcgtcctcacttttaagaagcctctgcttcaggtcatcaagagccgctgccactggtcctccgtttactgacctggctgtgtgccaagactcgaaattcggtccgcacacaac

SEQ ID NO: 597141 - DNA, 120 bp, Artificial Sequence
  ENSG00000174004_19 (sequence is synthesized)
aggacactttctctgccagctttcaagatgtgatgcagaggccaagtctgacgaattgaagtttcaattaaaatttaatatgtttccattcctcatcgcccaccccacccccgcccccac

SEQ ID NO: 597142 - DNA, 120 bp, Artificial Sequence
  ENSG00000174004_20 (sequence is synthesized)
caccgcccaagttctttttccatcattataattcatcctcattatcttggtaaaatatttattaagtgactttttcagaaataaaaggcaacgtgtctcataaatattttttaaattaaa

SEQ ID NO: 597143 - DNA, 120 bp, Artificial Sequence
  ENSG00000174004_21 (sequence is synthesized)
agcctgcatcactctgtgcctgcctagcacaggggcatgtgcagctgccctttaaccacaggattttaagatgcttcctgggaagagccaggcagtccctgccccgccgttctcacgcct

SEQ ID NO: 597144 - DNA, 120 bp, Artificial Sequence
  ENSG00000174004_22 (sequence is synthesized)
gttctcacgcctgctgaggataggaggcatccgagaccagcctagggcatcctcccggaacaagaacaacttgttaaaaatctggatgattcaggccgggtgcagtggctcaggcctgta

SEQ ID NO: 597145 - DNA, 120 bp, Artificial Sequence
  ENSG00000174007_0 (sequence is synthesized)
ctgtcgctgtggaaaccgctaggccagcgctcgccgggacctggaatccctgtacgccgaggtgggagccggtggaccggtcccccagccggcccccacctccgcttcccggtgtttgag

SEQ ID NO: 597146 - DNA, 120 bp, Artificial Sequence
  ENSG00000174007_1 (sequence is synthesized)
ggttcgggcctcccgccggggagttcacccctcgggctcgtcagtagggctgtggctgtcgcctcttcctgcagcgccaggctccgcccggtctcacagtcggcttaggggctttgcgtg

SEQ ID NO: 597147 - DNA, 120 bp, Artificial Sequence
  ENSG00000174007_2 (sequence is synthesized)
cactgcggttgggtggaaaaacccactcctggttgtttagacgttggcctgcagacgatgtcatttctgtattcctctaaggcaggaagtcattatgcaacttacacatattcatcagat

SEQ ID NO: 597148 - DNA, 120 bp, Artificial Sequence
  ENSG00000174007_3 (sequence is synthesized)
ttcctctgacttacccggacatgtacatgggaatgatgtgcactgccaagaaatgtgggattaggtttcagcctccagctattatcttaatctatgagagtgaaatcaaggggaaaattc

SEQ ID NO: 597149 - DNA, 120 bp, Artificial Sequence
  ENSG00000174007_4 (sequence is synthesized)
gccagcgcattatgccagttcgaaacttttcaaagttttcagattgcaccagagctgctgaacaattaaagaataatccgcgacacaagagttacctagaacaagtatccctgaggcagc

SEQ ID NO: 597150 - DNA, 120 bp, Artificial Sequence
  ENSG00000174007_5 (sequence is synthesized)
tagagaagctattcagttttttacgaggttacttgtcggggcagagtctggcagaaacaatggaacaaattcaacgggaaacaaccattgatcctgaggaagacctgaacaaactagatg

SEQ ID NO: 597151 - DNA, 120 bp, Artificial Sequence
  ENSG00000174007_6 (sequence is synthesized)
acaaggagcttgccaaaagaaagagcatcatggatgaactttttgagaaaaatcagaagaagaaggatgatccaaattttgtttatgacattgaggttgaatttccacaggacgatcaac

SEQ ID NO: 597152 - DNA, 120 bp, Artificial Sequence
  ENSG00000174007_7 (sequence is synthesized)
tgcagtcctgtggctgggacacagagtcagctgatgagttctgataccaaacactcaaaacatgcattgggctagcagaatatccatgtttattaccagactggttctggaagaagctgt

SEQ ID NO: 597153 - DNA, 64 bp, Artificial Sequence
  ENSG00000174007_8 (sequence is synthesized)
tgtaggtgcatgaggagtatgggaaaaacagaataaaggaatctgcctttaaggagcttacaat

SEQ ID NO: 597154 - DNA, 81 bp, Artificial Sequence
  ENSG00000174007_9 (sequence is synthesized)
cctgggcgatttacaatctgactggaagatgtcaaaacctgtgaaaagctaattagcagtattaagcaacacaaacattag

SEQ ID NO: 597155 - DNA, 120 bp, Artificial Sequence
  ENSG00000174007_10 (sequence is synthesized)
tgaaaagctaattagcagtattaagcaacacaaacattagtgccaaatgcatgataaaggctaaagaaggccagagcatatattactgtagagtagaatagtaagggaagactttgtcct

SEQ ID NO: 597156 - DNA, 120 bp, Artificial Sequence
  ENSG00000174007_11 (sequence is synthesized)
ttagtaaagagataggaggtggcctggcccttgaaatagtagtgtttaggtagatgcttgtgtaggattcctgataagagcaactgaaaagaaggagaggggaagtagtaaagggacaag

SEQ ID NO: 597157 - DNA, 120 bp, Artificial Sequence
  ENSG00000174007_12 (sequence is synthesized)
aaacaattttttttttgaggaaccataagcaaattatagtttgacaagacaagattgggggacatatatggttaccagggaattacctcttatgtgttatatctttatattatttatctc

SEQ ID NO: 597158 - DNA, 120 bp, Artificial Sequence
  ENSG00000174007_13 (sequence is synthesized)
tggaaaagagtaccctgcaaaattccctacagctgcaagcagatgtcacttgatggacagagggggaattctgcccctccggtatcgggaaatacatactaaagacattgcgaaacgctg

SEQ ID NO: 597159 - DNA, 120 bp, Artificial Sequence
  ENSG00000174007_14 (sequence is synthesized)
aacctcttcccataaataaaaggtttgtttgtaaaatgggaaatccacccataataaatgaacaataggcactgccagtttaggcctgttcatgaatggatctgcaagacagcatcttcg

SEQ ID NO: 597160 - DNA, 120 bp, Artificial Sequence
  ENSG00000174007_15 (sequence is synthesized)
ttcgtttaacaacattatctgtgatttgatacatttatccttattacaatattgtttagttggtagaaattctatgttttctacaaggaaattgatgtttattaaataaaactgaaaata

SEQ ID NO: 597161 - DNA, 120 bp, Artificial Sequence
  ENSG00000174010_0 (sequence is synthesized)
gtttcaactcttgcttgaatcaagaacagaagcctctctttagacaggacttatccagagggggctgcaggcgagcactctcgtgccccgccggagcgacccggctcgtgccgggagcgg

SEQ ID NO: 597162 - DNA, 120 bp, Artificial Sequence
  ENSG00000174010_1 (sequence is synthesized)
ctgctcgtagacgtccgaggagcctgccgagtgccgtcccggcgcccgaccgcccacccatcggcccgctggcccggttcttcctgatgcagactgccgtccactagaggctggacagga

SEQ ID NO: 597163 - DNA, 120 bp, Artificial Sequence
  ENSG00000174010_2 (sequence is synthesized)
ccccccgaggtgattcatggcaggggacgtggaaggattctgttcctccatccacgacaccagtgtctctgctgggttcagagcactgtatgaggagggattgcttcttgatgtcactct

SEQ ID NO: 597164 - DNA, 120 bp, Artificial Sequence
  ENSG00000174010_3 (sequence is synthesized)
ggttattgaagatcatcagttccaggcccataaagcactcttggccacccagagtgattacttcagaattatgtttactgcagacatgagggaacgagatcaggacaaaattcatttaaa

SEQ ID NO: 597165 - DNA, 120 bp, Artificial Sequence
  ENSG00000174010_4 (sequence is synthesized)
aggtctaacagctaccggtttcagccatgtcctgcaatttatgtactatggaactatagagctgagtatgaataccgttcatgagattcttcaggctgccatgtatgttcaacttataga

SEQ ID NO: 597166 - DNA, 120 bp, Artificial Sequence
  ENSG00000174010_5 (sequence is synthesized)
agtggtgaagttctgctgctcttttctcttagcgaagatctgcctagaaaattgtgcagaaattatgagactcttagatgatttcggcgtaaacatcgagggagtcagggagaagttaga

SEQ ID NO: 597167 - DNA, 120 bp, Artificial Sequence
  ENSG00000174010_6 (sequence is synthesized)
cacctttctgctagacaactttgtgccactcatgtctaggcctgactttctgtcctatctgagctttgagaagctcatgtcttacttggataatgatcatctgagcaggttcccagagat

SEQ ID NO: 597168 - DNA, 120 bp, Artificial Sequence
  ENSG00000174010_7 (sequence is synthesized)
agagctgtacgaggctgtgcagtcttggctgcggcatgatagaagacgctggagacataccgataccatcattcagaatatccggttttgcttgatgaccccaaccagcgtttttgagaa

SEQ ID NO: 597169 - DNA, 120 bp, Artificial Sequence
  ENSG00000174010_8 (sequence is synthesized)
ggttaagacatcagaattttatagatactcccgacagctccgttacgaagttgaccaagcattgaattactttcagaatgttcaccagcagcctttgttggatatgaagtcaagccgcat

SEQ ID NO: 597170 - DNA, 120 bp, Artificial Sequence
  ENSG00000174010_9 (sequence is synthesized)
ccgttctgcaaaaccgcaaactacagtatttcgaggaatgattggacatagcatggttaacagtaaaatacttctcttaaagaaaccaagagtctggtgggagctagaaggcccacaagt

SEQ ID NO: 597171 - DNA, 120 bp, Artificial Sequence
  ENSG00000174010_10 (sequence is synthesized)
acctctgcgacctgactgccttgctatcgtcaataattttgtgttcctgttaggcggggaagagctgggcccggatggtgaattccatgcttcttccaaagtattcaggtatgacccgag

SEQ ID NO: 597172 - DNA, 120 bp, Artificial Sequence
  ENSG00000174010_11 (sequence is synthesized)
acagaactcctggctgcagatggcagatatgtctgtaccacgctctgaatttgctgtaggtgttattgggaagtttatttacgccgtagcaggcagaaccagagatgagactttctattc

SEQ ID NO: 597173 - DNA, 120 bp, Artificial Sequence
  ENSG00000174010_12 (sequence is synthesized)
aactgagagatatgacatcaccaacgataaatgggaatttgtggatccttatccagttaacaaatatggacatgaggggacagtgctcaataacaaattgtttatcaccggtggaatcac

SEQ ID NO: 597174 - DNA, 120 bp, Artificial Sequence
  ENSG00000174010_13 (sequence is synthesized)
ctcatcttccacctccaagcaagtgtgcgtgtttgaccccagcaaagaagggaccatagaacaacggaccaggagaactcaagtggttaccaactgttgggagaataagagcaagatgaa

SEQ ID NO: 597175 - DNA, 120 bp, Artificial Sequence
  ENSG00000174010_14 (sequence is synthesized)
ttacgcgagatgctttcacaagatgatttcttacaatggcaagctttatgtcttcggtggtgtctgtgtgatcttgagggcctctttcgaatctcagggatgcccttctacagaagtata

SEQ ID NO: 597176 - DNA, 120 bp, Artificial Sequence
  ENSG00000174010_15 (sequence is synthesized)
caacccagagactgatcagtggaccatcttggcatccatgccgattggtagaagtggccatggtgtgactgtgctggacaaacaaataatggttcttggaggcctttgttataatggtca

SEQ ID NO: 597177 - DNA, 120 bp, Artificial Sequence
  ENSG00000174010_16 (sequence is synthesized)
ttacagcgattccatcctcacttttgatccggatgaaaacaagtggaaggaagatgagtaccctcggatgccctgcaagctggatggtttacaagtatgcaacctgcattttccggacta

SEQ ID NO: 597178 - DNA, 120 bp, Artificial Sequence
  ENSG00000174010_17 (sequence is synthesized)
tgtactggatgaggtcaggcgttgcaactaatgacatcctcctccctaaaaaaagaggcaaacaaagtatttgtttgcacagagtaattaattaaaacatataaagaaaaacctcaccag

SEQ ID NO: 597179 - DNA, 120 bp, Artificial Sequence
  ENSG00000174010_18 (sequence is synthesized)
ttttactatcaaagccattggtctaacattgtaagaatttttcattctgtgctagcatcctttttttcttttcagtggcctcaaactcatgcaataagttaattctaagtgctagctctt

SEQ ID NO: 597180 - DNA, 120 bp, Artificial Sequence
  ENSG00000174010_19 (sequence is synthesized)
gaaactacttccagaagcagttgaatagaatgctccacttatctgggatattgattttctgctttaaacatttctttcagatgttagcgtaggagtcatgtgtcttctaagagaagaccc

SEQ ID NO: 597181 - DNA, 120 bp, Artificial Sequence
  ENSG00000174010_20 (sequence is synthesized)
gataagtgtcactggatgtgatttcagtctctgtctctatctgaaacctttttgaagatttatttcagtgtatttcagtctgttatactttttagttttattatttaaaagtttaaaact

SEQ ID NO: 597182 - DNA, 120 bp, Artificial Sequence
  ENSG00000174010_21 (sequence is synthesized)
cttgacctttttgcatggctttttgctgaaaatgcaaaaatataaattttctacaaaattaactttttatattcaaaacactatttctaagctgccttctcttatccgcattgtgttagt

SEQ ID NO: 597183 - DNA, 120 bp, Artificial Sequence
  ENSG00000174010_22 (sequence is synthesized)
gaaagcatattcatactcgcatacaacctataaatacacaaggcacatcccttttatgcgtggttaggattctatatttttaagctagtgcacttacttgcacacacagttcgccatact

SEQ ID NO: 597184 - DNA, 120 bp, Artificial Sequence
  ENSG00000174010_23 (sequence is synthesized)
tgttgaattttagatgtaacgtcttttcacatattaacatttttagaaagttgaaataactggagtcctcatttgctatcaaagtagcctatcttcagtccatactgattcagtaatatt

SEQ ID NO: 597185 - DNA, 120 bp, Artificial Sequence
  ENSG00000174010_24 (sequence is synthesized)
tgaactccttatatttctgaaacatgtatggttatgaaaactaacactttatattttattttcaaaagtaaatgttagtgttctttgtcgatgtatgtcttttctttttgaaaatgtttt

SEQ ID NO: 597186 - DNA, 120 bp, Artificial Sequence
  ENSG00000174010_25 (sequence is synthesized)
tctttgcagtctgtttaacgttaccctgtttttagtgagaatcggagtggtatatgacaagttctggccctgcagcatgcaagcacttttaaagagcatttaggtaataccagactccta

SEQ ID NO: 597187 - DNA, 120 bp, Artificial Sequence
  ENSG00000174010_26 (sequence is synthesized)
cattttttacattcagtaaggctgctgcatttgttattgaatggaaggtagaaactcttagaaaatttgacctcagttttgacttagaggtaagaaatagaattataatgttactggttt

SEQ ID NO: 597188 - DNA, 120 bp, Artificial Sequence
  ENSG00000174010_27 (sequence is synthesized)
tatctacttgtttattttgtacaaaatacccagcgacactagggatgtaagccctcagtttttgttttatttactgaaagctattagcatgaaggatagtaaccacaaagttcagaatgg

SEQ ID NO: 597189 - DNA, 120 bp, Artificial Sequence
  ENSG00000174010_28 (sequence is synthesized)
atcaagaatagctgtttaaaagcatttataataagtgttttaggattagctgcacctttcaactctttaaatgcagaggaaaaaacatagttgacaaagttaagcaagaataacctggga

SEQ ID NO: 597190 - DNA, 120 bp, Artificial Sequence
  ENSG00000174010_29 (sequence is synthesized)
gtggatcattgaaattgatgccatttgcgcatgagtagtctatatctgatacagactagatctatactggcaaaacttgccagatcttagaatattggtgcaatattgcaatgccttcta

SEQ ID NO: 597191 - DNA, 86 bp, Artificial Sequence
  ENSG00000174010_30 (sequence is synthesized)
cagatcttagaatattggtgcaatattgcaatgccttctatatggctgctgatgtataaattttctagtttcactttgtttggtgg

SEQ ID NO: 597192 - DNA, 120 bp, Artificial Sequence
  ENSG00000174010_31 (sequence is synthesized)
tggaaatgtgaagactttggtttttgggggttttttgggcagttattagacatactatgagattaaacctgatcttcaaactccagaattggaggcatttgggtttaagaaaccaggtac

SEQ ID NO: 597193 - DNA, 120 bp, Artificial Sequence
  ENSG00000174010_32 (sequence is synthesized)
ataagtagcttttgaaaaaaccattggcattgatttcaaaaatcaataataatcttattttatatatgagacttatattttcattaactagtcctgtcatttacttacagtttccaaaca

SEQ ID NO: 597194 - DNA, 120 bp, Artificial Sequence
  ENSG00000174010_33 (sequence is synthesized)
tgaaatttggtatcttgtttcccatggtaatatgggtaaaagtctttttctacatttaaaaaatacattattttatttttgaaagttaggaataagttagccatttaatttttttctaca

SEQ ID NO: 597195 - DNA, 120 bp, Artificial Sequence
  ENSG00000174010_34 (sequence is synthesized)
ttagtttagtggctttgtatgtgtgctattttgctttaaagaaaataacgtcttcattattttcctcattgatgtcttttgctagaaaagaccaagaaagagccatcaggccaggtatcc

SEQ ID NO: 597196 - DNA, 120 bp, Artificial Sequence
  ENSG00000174010_35 (sequence is synthesized)
acatcaaagcctttacactatagtggtggttctctttaattgcttagatatgacttcatgaccctagtcagggtgacatctgggcaaacatttgagtattcttggtcttccattttaaag

SEQ ID NO: 597197 - DNA, 120 bp, Artificial Sequence
  ENSG00000174010_36 (sequence is synthesized)
acagaggccaagatcaaagttcatgttttgtaaaattcgtaaaatcttaacttgaactaactctgggttcagctttacgtaagtcacgtcggacctgatgttagctgtaatcagttttga

SEQ ID NO: 597198 - DNA, 120 bp, Artificial Sequence
  ENSG00000174010_37 (sequence is synthesized)
gctttaaggatagttgctgttgcttgggttctgaatgtatgagaaaactccctgtttatatgtagttctaatttaggttattttaaatccatgattaacttacattcccttttaaaatta

SEQ ID NO: 597199 - DNA, 120 bp, Artificial Sequence
  ENSG00000174010_38 (sequence is synthesized)
tggttttattgctgcaagagatttatttttgttatactaaactatggaaaagtttttcatagcatttttttcaagtttattttttgtgtgcttcatttggagtttttgtttatatacatt

SEQ ID NO: 597200 - DNA, 120 bp, Artificial Sequence
  ENSG00000174010_39 (sequence is synthesized)
gcgctcaaaaaagtagttttttgaaaaattcagtaagatttgaatctatacagtttaactgttatgacctttatgcgtgttgttttcactttatatctcaaatgccagagttcacaaaaa

SEQ ID NO: 597201 - DNA, 120 bp, Artificial Sequence
  ENSG00000174010_40 (sequence is synthesized)
tagctgatcttcattaattacatcttaattagaaccatttgttctcttccgtgtctttgaccttctaagttttgattttaaagaaattccttgcactacagccttttcttaaaatgcaag

SEQ ID NO: 597202 - DNA, 120 bp, Artificial Sequence
  ENSG00000174010_41 (sequence is synthesized)
attctcactttgaaggttttgtgttggaagaaatgctactggtttttaaaaagcaaagcttaactaatagaattattagcttttcttgagacagctttctgtgtcctcattactctgctc

SEQ ID NO: 597203 - DNA, 120 bp, Artificial Sequence
  ENSG00000174010_42 (sequence is synthesized)
tgtgtgagtgttactagaatttgtgaaatactgactgagcccttcacttatcttttctaaagcagcacctttggacacctcattctgggaagcctgctcgagtcatagtaaaggacacac

SEQ ID NO: 597204 - DNA, 120 bp, Artificial Sequence
  ENSG00000174010_43 (sequence is synthesized)
gctttatgtggggagaagtggtaaaaatggagttttgtcttaattacatgaaactaagctttaaaatattttataacagattatttgagctgcataatctaaacatgtcaaacgttcagt

SEQ ID NO: 597205 - DNA, 120 bp, Artificial Sequence
  ENSG00000174010_44 (sequence is synthesized)
gggactatttttatatatgtatatgtgggtgtaggtcataacatttcagtttataatataaattgttatttcagtttataagctatctctcagaggagactagctcttttgagaattcat

SEQ ID NO: 597206 - DNA, 120 bp, Artificial Sequence
  ENSG00000174010_45 (sequence is synthesized)
aatttaaagttttagactgaagtaaaatgcaacatagataatagtgtaaatcagatataattgagggctatatggcagtaaaactgctagtgccagttttcttgtttgcctgttatacat

SEQ ID NO: 597207 - DNA, 120 bp, Artificial Sequence
  ENSG00000174010_46 (sequence is synthesized)
ttttgatttttgtttttgtattctgaacattttgagagatcatatgtttgttcaattacatttagagttggtttgggaataaatatcttctaaaaagagatttatcttaaaaatggaagt

SEQ ID NO: 597208 - DNA, 120 bp, Artificial Sequence
  ENSG00000174010_47 (sequence is synthesized)
cctaaaaattagtttatccagagtttataaagtcaaatattcagtaggcatagactggaatagataaattcatggaaatcatatcctttcagtacaccgtataacttcaatattacacaa

SEQ ID NO: 597209 - DNA, 120 bp, Artificial Sequence
  ENSG00000174010_48 (sequence is synthesized)
gtaacattgaggagaatgccatcagctttgttctcccttaaattctttggttttctttttacattttgggaacaactgcatttaaaatgttattagtcagtatatagtaaggattaggtg

SEQ ID NO: 597210 - DNA, 120 bp, Artificial Sequence
  ENSG00000174010_49 (sequence is synthesized)
tttgctttctgaaggaatggtccagtgaggtgattgggagaggttattttctacctaacttgtatatgccctatacctcttgggcatactttgtctatagaaaaatattttgacctttag

SEQ ID NO: 597211 - DNA, 120 bp, Artificial Sequence
  ENSG00000174010_50 (sequence is synthesized)
gtacattttgggccagtagtcaaataatcctagggccgatataaaaatcttagaataatttaaggtttgccttttatacctgttttgaaagcctttacatttttgtcaggtaatttttcc

SEQ ID NO: 597212 - DNA, 120 bp, Artificial Sequence
  ENSG00000174010_51 (sequence is synthesized)
caagccgtggatataatctattcaaacatgtttatgctatccattctgtttttaaattgaaaaaaatgttaaaagtgtttatgaagaaaagtttaaataaaatatttttaatctttaaaa

SEQ ID NO: 597213 - DNA, 80 bp, Artificial Sequence
  ENSG00000174013_0 (sequence is synthesized)
gcccttgcttcgtgccctcaacccgcatggcggagccgctggcgcgccgcggagaggccgggcgagtcgggcggtttcgg

SEQ ID NO: 597214 - DNA, 120 bp, Artificial Sequence
  ENSG00000174013_1 (sequence is synthesized)
cgcggcggacgcccccgggcaggggcgggagtggtggaggcgccggcggttggcactgacaggggcggtgagcgagccgctccggtctccgggcgaggcttggccttccgagcagagacg

SEQ ID NO: 597215 - DNA, 120 bp, Artificial Sequence
  ENSG00000174013_2 (sequence is synthesized)
tgacaggggcggtgagcgagccgctccggtctccgggcgaggcttggccttccgagcagagacggcgggaagcggcggcggcagcggcggccctagggccggctggtgaggcgatggcgg

SEQ ID NO: 597216 - DNA, 120 bp, Artificial Sequence
  ENSG00000174013_3 (sequence is synthesized)
gcgcgggcgcgggctcgggctctggggccgcgggggccgggggccggctgcccagccgggtgctggagttggtgttctcttacctggagctgtccgagctgcggagctgcgccctggtgt

SEQ ID NO: 597217 - DNA, 120 bp, Artificial Sequence
  ENSG00000174013_4 (sequence is synthesized)
gctgtccgagctgcggagctgcgccctggtgtgcaagcactggtaccgctgcctgcacggcgatgagaacagcgaggtgtggcggagcctgtgcgcccgcagcctggcagaagaggctct

SEQ ID NO: 597218 - DNA, 120 bp, Artificial Sequence
  ENSG00000174013_5 (sequence is synthesized)
gcgcacggacatcctgtgcaacctgcccagctacaaggccaagatacgtgcttttcaacatgccttcagcactaatgactgctccaggaatgtctacattaagaagaatggctttacttt

SEQ ID NO: 597219 - DNA, 120 bp, Artificial Sequence
  ENSG00000174013_6 (sequence is synthesized)
acatcgaaaccccattgctcagagcactgatggtgcaaggaccaagattggtttcagtgagggccgccatgcatgggaagtgtggtgggagggccctctgggcactgtggcagtgattgg

SEQ ID NO: 597220 - DNA, 120 bp, Artificial Sequence
  ENSG00000174013_7 (sequence is synthesized)
aattgccacaaaacgggcccccatgcagtgccaaggttatgtggcattgctgggcagtgatgaccagagctggggctggaatctggtggacaataatctactacataatggagaagtcaa

SEQ ID NO: 597221 - DNA, 120 bp, Artificial Sequence
  ENSG00000174013_8 (sequence is synthesized)
tggcagttttccacagtgcaacaacgcaccaaaatatcagataggagaaagaattcgagtcatcttggacatggaagataagactttagcttttgaacgtggatatgagttcctgggggt

SEQ ID NO: 597222 - DNA, 120 bp, Artificial Sequence
  ENSG00000174013_9 (sequence is synthesized)
tgcttttagaggacttccaaaggtctgcttatacccagcagtttctgctgtatatggcaacacagaagtgactttggtttaccttggaaaacctttggacggatgacagtggctttcttg

SEQ ID NO: 597223 - DNA, 120 bp, Artificial Sequence
  ENSG00000174013_10 (sequence is synthesized)
tgatgacagacagaatggaggagagatctgcttatgggaagtagaaccatgaagtgactgtcacacatgcatgtccaagaaacatcctgaaaacacatgaagtcgtaaactggagaagca

SEQ ID NO: 597224 - DNA, 120 bp, Artificial Sequence
  ENSG00000174013_11 (sequence is synthesized)
gctctacagcagagattatcttcgtgtttcctctttctactgggccagaaaaatcctcagggttgcagttggttgagtgggcagttgacatatgcatgttgcacccgatgttgtctctaa

SEQ ID NO: 597225 - DNA, 120 bp, Artificial Sequence
  ENSG00000174013_12 (sequence is synthesized)
gttagcaatgtgttatttccagctttaaaggtgagattgtagagatgctgtcaaagggataaggaaatagcaagatttttaagtagtgtgtttgtgaagactgatcccattttacaactg

SEQ ID NO: 597226 - DNA, 120 bp, Artificial Sequence
  ENSG00000174013_13 (sequence is synthesized)
cctgttctttctccagtccttttttttccagccagcttgactattagaaaagtatgaaactggttgggttttatttaatatttttaatatattgagaagcatggtctgcctggactgcac

SEQ ID NO: 597227 - DNA, 120 bp, Artificial Sequence
  ENSG00000174013_14 (sequence is synthesized)
ttctctaaaagtgagatataaaattgtgcagctattttaaaagttgtatataatatgtgtgtaaaaaaaaaaaactgtaaaaaagaaaggacaaacaggttgttttgttctagttctaat

SEQ ID NO: 597228 - DNA, 120 bp, Artificial Sequence
  ENSG00000174013_15 (sequence is synthesized)
ttcttaaaaaccactacatggttacaaaattggaataacatttggggacaactgggttaactacaaagaagaggattttaagaggagatgtgttgtattgactcattttgtattattttt

SEQ ID NO: 597229 - DNA, 120 bp, Artificial Sequence
  ENSG00000174013_16 (sequence is synthesized)
ggcttacagttcccatagctgttagagtctggtttgtttttgtttttactctcaaaatcatagtaaagatctctcagtctcctggctaaagattgaaggaaggcaaatctatttctaatt

SEQ ID NO: 597230 - DNA, 120 bp, Artificial Sequence
  ENSG00000174013_17 (sequence is synthesized)
atacatatatcagtaaggatgatctcaacataatagtaatgtgtatcttttggtatccagttttatttttggccttctaagaaagtgtctcataacacagaacattgccatttgctcttg

SEQ ID NO: 597231 - DNA, 120 bp, Artificial Sequence
  ENSG00000174013_18 (sequence is synthesized)
taggcctcaaatatgaaagctattagtcatagagcctaggaaaaaaagaattgattaatggtccttttattttgtaaccttataaatgctgtagatattatcaaaaaaattttaatttca

SEQ ID NO: 597232 - DNA, 120 bp, Artificial Sequence
  ENSG00000174013_19 (sequence is synthesized)
tattgtttacatcatgcaactaatctaagcctcaaactcgttattggggctataaagaaaacgtttacttacccagctgaaacaggttaagaatattcttaatctcattatagataattg

SEQ ID NO: 597233 - DNA, 120 bp, Artificial Sequence
  ENSG00000174013_20 (sequence is synthesized)
cccccatgggacttgaaatacaacaccttgtgctgaaaacttcaggttggcaatatttgaaggtttcgttgtagaagagtttaacattaactcctattttgacttacaaatcttgtttct

SEQ ID NO: 597234 - DNA, 120 bp, Artificial Sequence
  ENSG00000174013_21 (sequence is synthesized)
catcactaaaatgcttttgaattaataatccaacccacatgagctgagagtttttcttttgttagaaaagaaacagacatctttctgtatgaaagtataaattgtatggttttagataca

SEQ ID NO: 597235 - DNA, 120 bp, Artificial Sequence
  ENSG00000174013_22 (sequence is synthesized)
taagaattgacaaaagcgagcgaaatctttgtacttctgagttcttgctgtatgtatgttttgttttaaatctgattagggacacccagcagctggccgggattcttggattgctccttg

SEQ ID NO: 597236 - DNA, 120 bp, Artificial Sequence
  ENSG00000174013_23 (sequence is synthesized)
ggagttaagattgtcaatactcctgtgaagcaagggatttcagccatagaacaaagatttattgttgccacctgaaaagtttacaagtatttattgtgtatttgatacattgcttgaaaa

SEQ ID NO: 597237 - DNA, 120 bp, Artificial Sequence
  ENSG00000174013_24 (sequence is synthesized)
cctccttgtattgagtgaaattatatgttaaatgtattagagaatgtaggtggtatagaaattgatttttcttggtgtagaacaactcagttcggcaaagtttaaaatttgattaaacaa

SEQ ID NO: 597238 - DNA, 120 bp, Artificial Sequence
  ENSG00000174013_25 (sequence is synthesized)
gagaagtggttcaggttgaagatggacttgttaggaagtgatcaagtcctttaagtacttgtttctttttcaggttgtgatgtggccattccgaattttgttgagagtttggtttataat

SEQ ID NO: 597239 - DNA, 120 bp, Artificial Sequence
  ENSG00000174013_26 (sequence is synthesized)
tgtctcttttgtcttgttagtaaacattcatttgcaacagttttgaaggtgctgagtggaaaaccgaaacacatggttattgcgtattggacctagaatgaaataattgcctcaatattt

SEQ ID NO: 597240 - DNA, 120 bp, Artificial Sequence
  ENSG00000174013_27 (sequence is synthesized)
aacaacaagccattcttatctcaaagatttaaattcccgaatgtcccattcgcaaatcatatgcaattgaagtgagcagcatgagcatctgggtcatgagggccttcatttacgtaaatt

SEQ ID NO: 597241 - DNA, 120 bp, Artificial Sequence
  ENSG00000174013_28 (sequence is synthesized)
tgtcactaaaacccagtagtagctctacaaaatcttaaactgctgcagtgctcaaggagatggaatatctttgtcattggtgctgaggagagcatttcggtagaagacagttgcgcctga

SEQ ID NO: 597242 - DNA, 120 bp, Artificial Sequence
  ENSG00000174013_29 (sequence is synthesized)
agattgagtgtaaatcattcaaaccagtggttctcagtgttggctgtatacactttgtagtcactttggaatgttggaagacacatcgatgcttgggttccgtatgccaagattctgatg

SEQ ID NO: 597243 - DNA, 120 bp, Artificial Sequence
  ENSG00000174013_30 (sequence is synthesized)
ttggtctggaatatgagctggtcataaggatttttaaaaactttctggtcatttcaatatgctgccaaggttgagaaccactgttgtaaaattcaccttgagttttctcatctgcaaaat

SEQ ID NO: 597244 - DNA, 120 bp, Artificial Sequence
  ENSG00000174013_31 (sequence is synthesized)
agaaaaaaaaaaatccttgctccctcccttcactacctcacaaggatattgagggtaaaggagaaaataatgggaaagtgcttgtgccgtggatgaaaagtgctattaaaagtcaaagga

SEQ ID NO: 597245 - DNA, 120 bp, Artificial Sequence
  ENSG00000174013_32 (sequence is synthesized)
gtgttctgtttcaattcatagtatgatcagggaaagtgtaactgagtatactttgttgacttgggaaacctggagcactttctttggttggttaacgaagcatgcagatgtggaagcaga

SEQ ID NO: 597246 - DNA, 120 bp, Artificial Sequence
  ENSG00000174013_33 (sequence is synthesized)
cgttactattatccctactatggtcttctgtcatactgagacaggctgttttaattacctggttttacataggaaagaagaaatattaaggcttaaagtttgtaatgatcaatggctcat

SEQ ID NO: 597247 - DNA, 120 bp, Artificial Sequence
  ENSG00000174013_34 (sequence is synthesized)
aattcattaaatcttttcatacaaggaatttgtggttaatgtcatttcatagttgccattattttctcattatttgacttaaatgttaagccatttatttcatctccctcattcacataa

SEQ ID NO: 597248 - DNA, 120 bp, Artificial Sequence
  ENSG00000174013_35 (sequence is synthesized)
agtgtagatatggattcaataagacaccaaaagaaagtaagatttacccagttaatatttaaaatcattgttcagtgattaggcattttctgccttttagaattatttgactggagaaag

SEQ ID NO: 597249 - DNA, 120 bp, Artificial Sequence
  ENSG00000174013_36 (sequence is synthesized)
agtttcaaaaatagcagagccctaaaccataaagaaactactactgtataatgaacttttgtttgtttttggagacagggtttcactctactgcctaggcaggtcttgaactcctgggct

SEQ ID NO: 597250 - DNA, 120 bp, Artificial Sequence
  ENSG00000174013_37 (sequence is synthesized)
agtagctgggattacaggtgtatgccactatacccagctttaacttttaaatccccaaactatgtagattgtcatattaatattaatttttttttgttattttgaagaagtgagtaattt

SEQ ID NO: 597251 - DNA, 120 bp, Artificial Sequence
  ENSG00000174013_38 (sequence is synthesized)
tttgttattttgaagaagtgagtaatttgaagagatagaaacttagggagtggtgtgtgtgtttcttttttggagacagagtcacgcaggctggagtgcacgatcttgactcactgcaac

SEQ ID NO: 597252 - DNA, 84 bp, Artificial Sequence
  ENSG00000174013_39 (sequence is synthesized)
taaacaccacccacctcgcctcccaaagtgctggggttacaggcgcgagccaccgtgccaggccagaaatttaaggagttttaa

SEQ ID NO: 597253 - DNA, 120 bp, Artificial Sequence
  ENSG00000174013_40 (sequence is synthesized)
gcgagccaccgtgccaggccagaaatttaaggagttttaaaggttagcattgaaaagattactttccagaaattgagaccaccacagttccacaattgggactgtggtagataatcagga

SEQ ID NO: 597254 - DNA, 120 bp, Artificial Sequence
  ENSG00000174013_41 (sequence is synthesized)
ccacttggaagcctttattaggaacagcccacacccagcccaaatgctgtcctcaaaaacattcctcagtttctctagctgaatgtaatctctccttgaaatttccctagttttatatat

SEQ ID NO: 597255 - DNA, 120 bp, Artificial Sequence
  ENSG00000174013_42 (sequence is synthesized)
ctatagttgactcatgctgtatttatttataccttgtttaaaattatttattgattatttattggtgtcatatcgcccctaaactgggacaggatctctaacggactcatctttgtgcca

SEQ ID NO: 597256 - DNA, 120 bp, Artificial Sequence
  ENSG00000174013_43 (sequence is synthesized)
caacatgtaagcccaataggcaggtgctcacatatttgctgaaggaacagagaaagaactgcggagaaagacaaaagctcctctgaagttttagactatagaagcaaaaattatagtagc

SEQ ID NO: 597257 - DNA, 120 bp, Artificial Sequence
  ENSG00000174013_44 (sequence is synthesized)
aaaagatgaatgagaaattctgttctagtcccagtgaagcaggaaggaaagggttgcaaacttgaggctggtaaggaagaaataattactgtgaatgcatttagccactcccctctactc

SEQ ID NO: 597258 - DNA, 120 bp, Artificial Sequence
  ENSG00000174013_45 (sequence is synthesized)
actcaaaaatactggtaaactctgatttttatatttgtttagaatttaaattagaattctgtatctttattttttggaattctgttgttttgccttagtttcttaataaaaagttaaaca

SEQ ID NO: 597259 - DNA, 120 bp, Artificial Sequence
  ENSG00000174015_0 (sequence is synthesized)
agatgcctcattcccacctgtgatgctcagagagaaaccatgagccctgaaaaacaccatattgttttgtgatgtcacctctggaatgttctgagtgttttggtgaccaacttctgcata

SEQ ID NO: 597260 - DNA, 120 bp, Artificial Sequence
  ENSG00000174015_1 (sequence is synthesized)
ggacctatacctggcaactcacattgcactcaaggccaaattatacaagaaaaagagataccagatctgaaagcctagaaattccaatcagtgtggttctacctcagaggggcacagccg

SEQ ID NO: 597261 - DNA, 120 bp, Artificial Sequence
  ENSG00000174015_2 (sequence is synthesized)
aacccttcccgaggctccacaacttgtacagcacccctcgctgcgcgcagcaggccgccctgccccggctgagccgcaggatggcgagccagcactcctatccactgaaccgcttctcct

SEQ ID NO: 597262 - DNA, 120 bp, Artificial Sequence
  ENSG00000174015_3 (sequence is synthesized)
ccgtgcctttagaccccatggagcgccccatgtcccaggccgacctggagctggactacaacccgccgcgggtgcagctcagcgacgagatgttcgtgttccaggacgggcgctgggtaa

SEQ ID NO: 597263 - DNA, 120 bp, Artificial Sequence
  ENSG00000174015_4 (sequence is synthesized)
atgagaactgccgcctgcagtctccctacttctccccatccgcctccttccaccacaagctgcaccacaagaggctggccaaggagtgcatgctgcaggaggagaacaagtctctgcggg

SEQ ID NO: 597264 - DNA, 120 bp, Artificial Sequence
  ENSG00000174015_5 (sequence is synthesized)
aggagaacaaggccctgcgcgaggagaaccggatgctcagcaaggagaacaagatcctacaggtcttctgggaggagcacaaggcctcgctgggccgagaggagagccgggccccctcgc

SEQ ID NO: 597265 - DNA, 120 bp, Artificial Sequence
  ENSG00000174015_6 (sequence is synthesized)
accacgtcgccctgcaggtgccccgtggcaaggaggacagcaccctgcagctcctccgggaggagaatcgcgcgctgcagcagctgctggagcagaaacaggcctactgggcgcaggcag

SEQ ID NO: 597266 - DNA, 120 bp, Artificial Sequence
  ENSG00000174015_7 (sequence is synthesized)
aggacacggccgcccctgccgaggaaagcaagcccgccccctcaccccacgaggagccctgcagccccgggctgctgcaggaccagggctccggcctctcctcccgcttcgaggagccca

SEQ ID NO: 597267 - DNA, 120 bp, Artificial Sequence
  ENSG00000174015_8 (sequence is synthesized)
aagggcctccggcccggcaggaggactccaaggagctgcgcgccctgcggaagatggtcagcaacatgtccgggccctccggggaggaggaggccaaggtgggcccgggcctgcccgacg

SEQ ID NO: 597268 - DNA, 120 bp, Artificial Sequence
  ENSG00000174015_9 (sequence is synthesized)
gctgccagcccctgcagctgctgagagagatgaggcaggcgctgcaggccctgctcaaggagaaccggctcctgcaggaggagaacaggaccctgcaggtgctacgggcagagcacaggg

SEQ ID NO: 597269 - DNA, 120 bp, Artificial Sequence
  ENSG00000174015_10 (sequence is synthesized)
gcttccaggaggagaacaaggccctgtgggagaacaacaagctgaagctgcagcagaagctggtcattgacaccgtgaccgaggtcaccgcgcgcatggaaatgctcatcgaggagctct

SEQ ID NO: 597270 - DNA, 120 bp, Artificial Sequence
  ENSG00000174015_11 (sequence is synthesized)
acgccttcatgccggccaggagccaggaccccaagaagcctagcagggtctgaggcctcggccttgcaccgggacgccgagtttgggacaccgaacactgggcaaaagagaatcccctgc

SEQ ID NO: 597271 - DNA, 120 bp, Artificial Sequence
  ENSG00000174015_12 (sequence is synthesized)
cttcctttgtcgtcctcgccttccccagccagttcgtacctattgaaaagcagcgttagcagccttcctaaactcagagttttaataaaggtgtgaggaggctggggccagttgacacca

SEQ ID NO: 597272 - DNA, 120 bp, Artificial Sequence
  ENSG00000174015_13 (sequence is synthesized)
gaagtaacccagccttctcaaaacgagatcttttggtgcttagtgttgtgcaatcactctggatttctgggggagaattagaactgggacttgaaatcaaatgcataagaatgaatccat

SEQ ID NO: 597273 - DNA, 120 bp, Artificial Sequence
  ENSG00000174015_14 (sequence is synthesized)
gagaagaaaacctcatccgtggacaaaggggtacagagttatttggagctgtcaagagaattaagccctgctatgcatcaaagacagatgtaggggccatgggcatagatgctttttcag

SEQ ID NO: 597274 - DNA, 120 bp, Artificial Sequence
  ENSG00000174015_15 (sequence is synthesized)
tcaatgaattggtgaagtcctcacaggctatagagtctcaggtctcctcctgcctgcaatcagctgtttccttagtggagtcctcttgattgaattgtttctactgctgctatgtcacaa

SEQ ID NO: 597275 - DNA, 120 bp, Artificial Sequence
  ENSG00000174015_16 (sequence is synthesized)
tggctttttacttgagatagaaataatcatcttagacagggaagcagagtcacctaagtcctcattggaagaccagggccatgcaaccagaggggttgaaatgtaggatggaggaatcca

SEQ ID NO: 597276 - DNA, 120 bp, Artificial Sequence
  ENSG00000174016_0 (sequence is synthesized)
gaatgtgtggagatcaggtgatgcagaactctggtaaaggatgttagtcttcagagtaagactgttaaattcagcaaagtctactatcagaagacacgtttttctggttggtgtattact

SEQ ID NO: 597277 - DNA, 120 bp, Artificial Sequence
  ENSG00000174016_1 (sequence is synthesized)
ttattcagtgataatatgaaaattactatcttcactgaaggatctactgaataatcattttaactcaactatattgcattcttgaaagcaatcctttcaattgatctactgacttcacaa

SEQ ID NO: 597278 - DNA, 120 bp, Artificial Sequence
  ENSG00000174016_2 (sequence is synthesized)
tgtctgaaatcagattcaccaatctcacttgggatcaagttataacactggatcaagtgttagatgaagtaattccaattcatggaaaggggaatttccccacaatggaggtaaaaccaa

SEQ ID NO: 597279 - DNA, 120 bp, Artificial Sequence
  ENSG00000174016_3 (sequence is synthesized)
aagacatcattcatgttgtgaaagatcaactcatagggcaaggaattattgttaaagatgccagattgaatggttccgtagcaagttacatacttgcaagccacaatggaatcagctata

SEQ ID NO: 597280 - DNA, 120 bp, Artificial Sequence
  ENSG00000174016_4 (sequence is synthesized)
aggatctggacgttatttttggtgttgagcttccaggtaacgaagaatttcaggttgttaaagatgcagttctagactgtctacttgactttttaccaaaagatgtaaagaaggaaaagc

SEQ ID NO: 597281 - DNA, 120 bp, Artificial Sequence
  ENSG00000174016_5 (sequence is synthesized)
tctccccagatatcatgaaagacgcttacgtacagaaattggtcaaggtttgcaatgggcatgattgttggagtcttatctccctttcaaataacactgggaagaatttagaactaaaat

SEQ ID NO: 597282 - DNA, 120 bp, Artificial Sequence
  ENSG00000174016_6 (sequence is synthesized)
ttgtgagttcactcagacggcagtttgaatttagtgtagattcctttcaaattgttttggatcccatgttagacttctacagtgacaaaaatgccaagctaaccaaagaatcctatcctg

SEQ ID NO: 597283 - DNA, 120 bp, Artificial Sequence
  ENSG00000174016_7 (sequence is synthesized)
ttgtggtagctgaaagcatgtatggagacttccaggaagcaatgacacatttgcaacacaagctcatatgtaccaggaaacctgaagagattagaggtggtggccttctgaagtactgca

SEQ ID NO: 597284 - DNA, 120 bp, Artificial Sequence
  ENSG00000174016_8 (sequence is synthesized)
gcttgctggttcatggcttcaagccagcctgtatgtcagaaatcaaaaacctagaacgttatatgtgctctagattctttattgattttcctcatatagaagaacagcaaaagaaaattg

SEQ ID NO: 597285 - DNA, 120 bp, Artificial Sequence
  ENSG00000174016_9 (sequence is synthesized)
aatcatacctccacaaccatttcataggtgaaggaatgaccaagtatgactaccttatgaccttgcatggagttgtgaatgaaagcactgtttgcctcatgagttatgaaagaagacaga

SEQ ID NO: 597286 - DNA, 120 bp, Artificial Sequence
  ENSG00000174016_10 (sequence is synthesized)
ttctccacctgatcaccatgatggctttgaaagtacttggagaactaaatattctacccaatacacaaaaggtaacttgcttttatcagcctgctccgtactttgcagctgaggcaaggt

SEQ ID NO: 597287 - DNA, 120 bp, Artificial Sequence
  ENSG00000174016_11 (sequence is synthesized)
accctatttatgtaatacctgagccaccccccgttagcttccagccataccacccactgcactttcgtggatcaaatggtatgagttaaaaaatacacatgcaaccatagaaactttgat

SEQ ID NO: 597288 - DNA, 120 bp, Artificial Sequence
  ENSG00000174016_12 (sequence is synthesized)
ccatttaaaagcaagtttccaaatgtaaaattcaagatctgtttttatttttgtacagttaccaattattttcaattacagttgatggaatagtagttaccaactatttttgatcaatta

SEQ ID NO: 597289 - DNA, 120 bp, Artificial Sequence
  ENSG00000174016_13 (sequence is synthesized)
agccatcatagtaaatacaatatctataaaccaaccactttaaatgtttttcaaacgttattgactagctataataactttcaaatgttgtgttccccttgaagtgattttcaaatcttt

SEQ ID NO: 597290 - DNA, 120 bp, Artificial Sequence
  ENSG00000174016_14 (sequence is synthesized)
tgactacttgtgactttcaaatttactgtgacaaatatattagagatgcctgcatctttgactataacataaaaggacagattcatgttttaaaattaagatgtacagtgaagtatcaaa

SEQ ID NO: 597291 - DNA, 120 bp, Artificial Sequence
  ENSG00000174016_15 (sequence is synthesized)
ttttttatattcagtcagttcctttgttacatttagttctttttttctattgaacaataccatcaataaatgttcagtacttaacagaaatgcctaatttcaaaagcaacagattcagaa

SEQ ID NO: 597292 - DNA, 120 bp, Artificial Sequence
  ENSG00000174016_16 (sequence is synthesized)
gacattaaaaccctggacttttcaagcatttttttttgacaattaaattgggttggatacaaaaatcctactatagtttaaaggaatactggaaaaaaatggttctggaaagccctggac

SEQ ID NO: 597293 - DNA, 120 bp, Artificial Sequence
  ENSG00000174016_17 (sequence is synthesized)
attagtaatttgtcatctatataataaaacatttagttaatttgtggatttgaataacaataccatacagctgtgcaactactactgagatcagatacagggttttttgcccctcaaaat

SEQ ID NO: 597294 - DNA, 120 bp, Artificial Sequence
  ENSG00000174016_18 (sequence is synthesized)
aagttaaaacgaatgaaaatgaccagctctgaatgtgaaagctttctatcatcatctactacaaagagactctaaatggcaaacaggaaaaaaacaggcagaggtttatagccatagcat

SEQ ID NO: 597295 - DNA, 120 bp, Artificial Sequence
  ENSG00000174016_19 (sequence is synthesized)
ttaccattttatggcttatttgaaaaacatctttatgttgagaaacattccatttcagtaagttaaaatattttcattgtaactaaatgaagcaggtttttcattttgcctttaccaaag

SEQ ID NO: 597296 - DNA, 120 bp, Artificial Sequence
  ENSG00000174016_20 (sequence is synthesized)
atcattttctaacatgccactcaagtgcctcttcgtgtgaatttttgcgtaacactataatttattcaacaactgtatacctttacagtatatctaaatatatacttactacatcgagta

SEQ ID NO: 597297 - DNA, 120 bp, Artificial Sequence
  ENSG00000174016_21 (sequence is synthesized)
tactgctagaaaaatctaccagtgggattaaaaatgtattttcttcccataatgaaaataattcatgaccaatattacctgaagtgtcagaagaggagctgtcttaaattaatatggatc

SEQ ID NO: 597298 - DNA, 120 bp, Artificial Sequence
  ENSG00000174016_22 (sequence is synthesized)
aggccattggaaaacttcagtatttccacttggttatgattttttgtgagtttccatttcagtttttattgaccatcacgttttctatcacaacatgacctgacagttgtatcccgataa

SEQ ID NO: 597299 - DNA, 120 bp, Artificial Sequence
  ENSG00000174016_23 (sequence is synthesized)
tttgccagttatagactgtgcttatcttcactgtattacaatattggacagaagtacaccaaatacggcattttcaaataaccaatatttctgagatgttttataccacagcacaagtgg

SEQ ID NO: 597300 - DNA, 120 bp, Artificial Sequence
  ENSG00000174016_24 (sequence is synthesized)
ccatcagtatatttttaaagaattatatatcacagaaccctgaggctttaaaacactatggacttaccactttcttgacaaagaatttgtaattacaataaaatatttagaaatgaaagg

SEQ ID NO: 597301 - DNA, 120 bp, Artificial Sequence
  ENSG00000174016_25 (sequence is synthesized)
acgcgccccagctcccaccttgggtccttcgcctgcacccagtctaacctggcacctaaagatttcactctgtccttggcccctcaccattgtctcagagtttaagccttaacggatgaa

SEQ ID NO: 597302 - DNA, 120 bp, Artificial Sequence
  ENSG00000174021_0 (sequence is synthesized)
cttcccacaaactgggaggaaaactgagacctcctggtcacccgccgccgggccttttagaaactcccacaagctctgccttccctccctggtcctcttcagaccccctcttagttcttc

SEQ ID NO: 597303 - DNA, 120 bp, Artificial Sequence
  ENSG00000174021_1 (sequence is synthesized)
gcggctaacggtaagctctctccttacctctccctaatcggcccctctggagaggaaaagaaaacttaagagtcgggtcgcgctagcctccagcagccgccgcgcccaccgactgctccg

SEQ ID NO: 597304 - DNA, 120 bp, Artificial Sequence
  ENSG00000174021_2 (sequence is synthesized)
ccccttctcctccccctcctccaggctcgcgctcggggccgggtgtggagctggaacagagggctggcaaggcgcgcatgcgcaccgagggtggagccgctgagcacagaaccggaaact

SEQ ID NO: 597305 - DNA, 120 bp, Artificial Sequence
  ENSG00000174021_3 (sequence is synthesized)
cgacccacgaatcggcccggccgtcgcgtgcaccatgtctggctcctccagcgtcgccgctatgaagaaagtggttcaacagctccggctggaggccggactcaaccgcgtaaaagtttc

SEQ ID NO: 597306 - DNA, 120 bp, Artificial Sequence
  ENSG00000174021_4 (sequence is synthesized)
ccaggcagctgcagacttgaaacagttctgtctgcagaatgctcaacatgaccctctgctgactggagtatcttcaagtacaaatcccttcagaccccagaaagtctgttcctttttgta

SEQ ID NO: 597307 - DNA, 120 bp, Artificial Sequence
  ENSG00000174021_5 (sequence is synthesized)
gtaaaatgaatctttcaaaggtttcccaaaccactccttatgatccagtgaatattcaagagagctacatttgaagcctgtacaaaagcttatccctgtaacacatgtgccataatatac

SEQ ID NO: 597308 - DNA, 120 bp, Artificial Sequence
  ENSG00000174021_6 (sequence is synthesized)
aaacttctactttcgtcagtccttaacatctacctctctgaattttcatgaatttctatttcacaagggtaattgttttatatacactggcagcagcatacaataaaacttagtatgaaa

SEQ ID NO: 597309 - DNA, 120 bp, Artificial Sequence
  ENSG00000174021_7 (sequence is synthesized)
ttattcattttactacagagcaccttgtctgtcattttctctgaactgttagctccataacaacagggctctggctgttcttatgtattcttagtgcctgtaagtatatgcggcacatag

SEQ ID NO: 597310 - DNA, 120 bp, Artificial Sequence
  ENSG00000174032_0 (sequence is synthesized)
cttttctccagcggcctcaggttcttgttacaactgagtccgggttggaggaggtgtggggccgctgccgccaggaaaaacagcactggaggcaatgtttctataaatcaaagaagagac

SEQ ID NO: 597311 - DNA, 120 bp, Artificial Sequence
  ENSG00000174032_1 (sequence is synthesized)
agtgtgagaatgtcagccctcaactggaagccgtttgtgtacggggggctggcctccatcactgctgagtgcggtacatttccaattgatttaaccaagacacggctccagattcaaggc

SEQ ID NO: 597312 - DNA, 120 bp, Artificial Sequence
  ENSG00000174032_2 (sequence is synthesized)
cagacgaatgatgcaaaatttaaggaaattagataccgaggaatgttgcacgcattagtgaggataggcagagaagaagggctgaaagcactctactcggggattgcccccgcgatgtta

SEQ ID NO: 597313 - DNA, 120 bp, Artificial Sequence
  ENSG00000174032_3 (sequence is synthesized)
cgccaggcatcctatggcaccatcaagataggcacttaccagagcttgaagcgactattcattgaacgcccagaagatgaaactctaccgataaatgtgatatgtggaattctgtctgga

SEQ ID NO: 597314 - DNA, 120 bp, Artificial Sequence
  ENSG00000174032_4 (sequence is synthesized)
gtcatatcttcaaccattgctaatccaactgatgttttgaaaattcggatgcaagcgcaaagcaacaccattcaaggaggaatgataggcaacttcatgaacatttaccagcaagagggg

SEQ ID NO: 597315 - DNA, 120 bp, Artificial Sequence
  ENSG00000174032_5 (sequence is synthesized)
acaagaggactgtggaagggtgtgtcccttactgcgcagagggctgctattgttgttggtgtggagctgccggtctatgacatcaccaagaagcatcttattctctcaggcctgatggga

SEQ ID NO: 597316 - DNA, 120 bp, Artificial Sequence
  ENSG00000174032_6 (sequence is synthesized)
gacactgtgtatacccacttcctctcaagcttcacctgtggtctggcaggggccctggcctcaaaccctgttgatgttgtgaggacacgtatgatgaatcagagagtgcttcgagatggc

SEQ ID NO: 597317 - DNA, 120 bp, Artificial Sequence
  ENSG00000174032_7 (sequence is synthesized)
agatgttctggctacacaggaaccctggattgcttgttacagacatggaagaatgaagggttttttgctctctataaaggcttttggccaaattggttgagacttggtccttggaatatc

SEQ ID NO: 597318 - DNA, 120 bp, Artificial Sequence
  ENSG00000174032_8 (sequence is synthesized)
attttctttgtgacatacgagcagttgaagaaattggatttgtgacaagccaaggctgcatgagacatctttctgaaaatggtaacttctgaaacagcaaagcttcctgtgtttcactct

SEQ ID NO: 597319 - DNA, 120 bp, Artificial Sequence
  ENSG00000174032_9 (sequence is synthesized)
gcttctcactgcttggctcatcacagattctgggatgtgagcaacagatgaagactgggttagttgagattgctgtgtgttggcattggatgctcttcatcaaacgtttaatggcataaa

SEQ ID NO: 597320 - DNA, 120 bp, Artificial Sequence
  ENSG00000174032_10 (sequence is synthesized)
ctaacatccaaacactagtctttaccactgaagtgcccttcaacatcaaagataatatgtgaaatgcatgtttcttgctaaagaaaacttgcaagaaaatcaggagcgatgtattgtttt

SEQ ID NO: 597321 - DNA, 120 bp, Artificial Sequence
  ENSG00000174032_11 (sequence is synthesized)
attcagggagagtagctcctgatgcatctcagctcatgactgagaatcagactgctctagaaaagctcactggaaccatggaatggagcctccgagaaggtgttatggtttctgaatttc

SEQ ID NO: 597322 - DNA, 120 bp, Artificial Sequence
  ENSG00000174032_12 (sequence is synthesized)
tgggagattttgctccttgtcaactgaagaaatttcatgtatggagacctggactgttcaaccccaggtataaacggtgcaggaaatggatcctaggaatatcacactgctttatcattt

SEQ ID NO: 597323 - DNA, 120 bp, Artificial Sequence
  ENSG00000174032_13 (sequence is synthesized)
cctattttggcaggatcttccacttataataagtgattttaagctttgaagacttgacatttgtgagaaattgttacaaagtaataatctctaaattcgtggtggtgttatgtgttggct

SEQ ID NO: 597324 - DNA, 120 bp, Artificial Sequence
  ENSG00000174032_14 (sequence is synthesized)
ttgaaggttgcaaggtctgtattggtggggggtgttttcaagcagcttaggttctgtcttaggtcatgttagtaattagctttatgatttttagcaaagcatatgtatttctcaatgagt

SEQ ID NO: 597325 - DNA, 120 bp, Artificial Sequence
  ENSG00000174032_15 (sequence is synthesized)
ctacttgactggaaaggtaaatgtgtttacatcatgctgtggaacagctctaaacagtctatgtagaagaggggcatgttctcatgggcttctcatggtaattgtgaatgaagccctttg

SEQ ID NO: 597326 - DNA, 120 bp, Artificial Sequence
  ENSG00000174032_16 (sequence is synthesized)
ttaaggtcttgttgaagaaagaacactgtataagttcaggctttagtacattttccttagcaaaatgttggtagtgaatcaaagagttgatttttccaggtttccagtttttactttagt

SEQ ID NO: 597327 - DNA, 120 bp, Artificial Sequence
  ENSG00000174032_17 (sequence is synthesized)
ttatgttgtgcctgtcttggactttctgtttagtttggatggaaaatacctgcttgaaattttaaaaatgatttctttagtgcatctatttagctagtttctgataggtggtatgtaata

SEQ ID NO: 597328 - DNA, 120 bp, Artificial Sequence
  ENSG00000174032_18 (sequence is synthesized)
ttttccctttttctttccttctgtagacacaataagtcattctccctcttctttttttctttttctattttcttattctttactctaacctgcttcagagaaagagccctcttccttctt

SEQ ID NO: 597329 - DNA, 120 bp, Artificial Sequence
  ENSG00000174032_19 (sequence is synthesized)
gtcttcatcttagtcttttcaaaataaaagatgactgtgagaaccccaagaacttccacttctgggaggcagccacaggacagggaacatatttatttgggtctcttcagttcccccttt

SEQ ID NO: 597330 - DNA, 120 bp, Artificial Sequence
  ENSG00000174032_20 (sequence is synthesized)
gagaacaacattaaatacatgttagctggggctccagggcattctccttccacagtagtgcggccaaattcccagtctggccagtctctttgttgagactgaatagaaggactgcaggtt

SEQ ID NO: 597331 - DNA, 120 bp, Artificial Sequence
  ENSG00000174032_21 (sequence is synthesized)
tttttggaggatgagataatttttcctcgcaggcatttttcccttgccttccttatgcatgaatggtccctttgaatattatttccaaaagtgagagctaagacaaagtcatcaaaaaga

SEQ ID NO: 597332 - DNA, 120 bp, Artificial Sequence
  ENSG00000174032_22 (sequence is synthesized)
gaggataacagaaggtgggggcgggggcggggtgcagtggggtagggttacctgttaattgctgagactcagatgaaagtccagctctccctgggcaaccctagagggcagcagaggacc

SEQ ID NO: 597333 - DNA, 120 bp, Artificial Sequence
  ENSG00000174032_23 (sequence is synthesized)
ccagagctcattcaggccttgctgcttgttctaaactacaccttaggattttttcttctttccaaaacattccattgattttataaagactttctatagagaggctttcacttttgagtt

SEQ ID NO: 597334 - DNA, 120 bp, Artificial Sequence
  ENSG00000174032_24 (sequence is synthesized)
ctttgagtttaaagattgcttttcttgaaatgctctttttttaatgtagaaaaattttactttttcaaatatgcatacaatttttaaaacagtagaagcaaattcattttaatgaccatg

SEQ ID NO: 597335 - DNA, 120 bp, Artificial Sequence
  ENSG00000174032_25 (sequence is synthesized)
taaagagcgaatgtcagacagtattattaccagtttattcaaattacatacatgttcctaccaaggtggaaagaaattcaaacctcatggtaaaacttaagcacgatttaagataaaagc

SEQ ID NO: 597336 - DNA, 120 bp, Artificial Sequence
  ENSG00000174032_26 (sequence is synthesized)
atagtatttcttcagtgtagacttattaagtgccttattgaacaggatcttaacctgctttttctgtttttttgaaagagttaatgcaattgttgaagcttctaaccaagaaacaactta

SEQ ID NO: 597337 - DNA, 120 bp, Artificial Sequence
  ENSG00000174032_27 (sequence is synthesized)
aggaattgggagacttggtcccctcgttgtcagggttctggctataagtacctccccacctttgggttttcttaaatatgccaaaaggaattctagtttttataaccaatgggttttttt

SEQ ID NO: 597338 - DNA, 120 bp, Artificial Sequence
  ENSG00000174032_28 (sequence is synthesized)
gtttgtgtgcttatggatttgtgtaatcattgatgcttaatgttgtggattcataatataaaaagtggctcctgtcctttatatttattcatgtgctagaaatagtatgcattatataaa

SEQ ID NO: 597339 - DNA, 120 bp, Artificial Sequence
  ENSG00000174032_29 (sequence is synthesized)
gagtatgaagttttcataagcctttatatttcaagctctttatttaaacattgttggaatatgtggcataagccttgtttcatttatttaataaactggagtaatatataataataaaaa

SEQ ID NO: 597340 - DNA, 120 bp, Artificial Sequence
  ENSG00000174032_30 (sequence is synthesized)
gcgtgtttgcgcggacggggcggggcggcgcggggctgcgtgcaggctcgtgggtctgccccgcccgcgacggcattttttccttttctccagcggcctcaggttcttgttacaactgag

SEQ ID NO: 597341 - DNA, 90 bp, Artificial Sequence
  ENSG00000174032_31 (sequence is synthesized)
ttttccttttctccagcggcctcaggttcttgttacaactgagtccgggttggaggaggtgtggggccgctgccgccagggtgttactgt

SEQ ID NO: 597342 - DNA, 120 bp, Artificial Sequence
  ENSG00000174032_32 (sequence is synthesized)
tgctgggattacaggcgtgagccatcatggctgctgcaaatacttattgcatgaagaatagatttaagataaaatagacttcccagagaacagcttccgctgcactacactgaatacata

SEQ ID NO: 597343 - DNA, 120 bp, Artificial Sequence
  ENSG00000174032_33 (sequence is synthesized)
ctaaattatgaaagctactaaaactaagatgaatgatgctttaaagcccagagatgtacatgtgtgagaccatttttgccacactgtgcttagcttttataaatacaatgttgttttctt

SEQ ID NO: 597344 - DNA, 120 bp, Artificial Sequence
  ENSG00000174032_34 (sequence is synthesized)
tatacctccatctgctgtgaaaggtgaggaaatatttcctgtgattataaaagaactgggtctccttccaaaatgtactttcttcctgttgggtcaaactagtatgaatatccctcattc

SEQ ID NO: 597345 - DNA, 120 bp, Artificial Sequence
  ENSG00000174032_35 (sequence is synthesized)
agacatctctgttaaaggaacacatcaatcttactttaattctcagtttaaataattgggcctcctgttttatgagtgggtgaaaggtttcacctgtctctgccactagattgccagtag

SEQ ID NO: 597346 - DNA, 120 bp, Artificial Sequence
  ENSG00000174032_36 (sequence is synthesized)
taggattaggagtcactttttttttttttttaaggtgatatttatttatttattttcaagttttaatgtattttagattcagggggtacatgtgcaggtgtgttacataggcacatgcgt

SEQ ID NO: 597347 - DNA, 120 bp, Artificial Sequence
  ENSG00000174032_37 (sequence is synthesized)
agtggtggagattgggcttctaatgtacccattacccaaatagtgagcattacaccagacagataatttttcaactctagcctctcccctttaggagtccccagtgtctgttacttctat

SEQ ID NO: 597348 - DNA, 120 bp, Artificial Sequence
  ENSG00000174032_38 (sequence is synthesized)
ctatctttatgtccgtgtgtacccattgtttagctcccacttaaaaatgagaacatgtggtttttgatcttctgtttctgcgttagtttgctcaggataatggcctccagctccatccat

SEQ ID NO: 597349 - DNA, 120 bp, Artificial Sequence
  ENSG00000174032_39 (sequence is synthesized)
ctgcaaagaacgtgatttcttttttatggctacaggggccacttttgtggttcctgttttccaacatgacactagcacattttattcttcaggtgttgccttaatgaagcaaagacactt

SEQ ID NO: 597350 - DNA, 120 bp, Artificial Sequence
  ENSG00000174032_40 (sequence is synthesized)
atcgtattcatccacctgacatcttgggaaatagtggtactctgaatgatatctctaccactattgcttctttatttgtgacctgttcaggagcccacatggcacggaagcaacagaccg

SEQ ID NO: 597351 - DNA, 120 bp, Artificial Sequence
  ENSG00000174032_41 (sequence is synthesized)
taattggaattaaatctaattttttcctcactcaacagtgtttatctcctttgtgtggagttcattcaatccttcgtgtggggttgttgggcatggagccttagtcttccacccacacaa

SEQ ID NO: 597352 - DNA, 120 bp, Artificial Sequence
  ENSG00000174032_42 (sequence is synthesized)
ccacccacacaagcctctaaagagcaaagatttcttaggcagtccttccaaacaggattttatttttaagaaaaataaatcagtctggccactaattattattattattttttgagatgg

SEQ ID NO: 597353 - DNA, 120 bp, Artificial Sequence
  ENSG00000174032_43 (sequence is synthesized)
aaaggcgtgagccaccgcgcctggcctggccactaattattaatgcatttggcataattagaaagttggaagttaacttttttttcttcttttaacagacatggaagaatgaagggtttt

SEQ ID NO: 597354 - DNA, 120 bp, Artificial Sequence
  ENSG00000174032_44 (sequence is synthesized)
ttgctctctataaaggcttttggccaaattggttgagacttggtccttggaatatcattgtatccttttctgttgcaatagatctgaaaaaagatacagctaaagaatactatttgtata

SEQ ID NO: 597355 - DNA, 120 bp, Artificial Sequence
  ENSG00000174032_45 (sequence is synthesized)
aactctcatgttattaattataatttagaagtaggttctgattattttgagttcctctgatgctaagaagtcactacttagtttcttttttaggaagtgtaaagtctccgtgctagacac

SEQ ID NO: 597356 - DNA, 120 bp, Artificial Sequence
  ENSG00000174032_46 (sequence is synthesized)
tgaatcttgctttgatggtggtattattcaaaagtagtgatactactaaaaaggtttagttagactctgttctagaagctgagggtatttacgatttcagagagagagagaggaggattg

SEQ ID NO: 597357 - DNA, 120 bp, Artificial Sequence
  ENSG00000174032_47 (sequence is synthesized)
gctttatagccctagccaccttgggaaggatgtggttggcaacagtgtcttagaatgcttatcttagaaagtgcctgaagataaacaggaattagctccggaattgtttggcaggccagc

SEQ ID NO: 597358 - DNA, 120 bp, Artificial Sequence
  ENSG00000174032_48 (sequence is synthesized)
tgtttggcaggccagcacgcttcctatgtgccacagtgggaggcaggaaaggaaaggcagttaactttttttttgtttttgagactgagtctttactctgtcgcccaggctggagtacag

SEQ ID NO: 597359 - DNA, 89 bp, Artificial Sequence
  ENSG00000174032_49 (sequence is synthesized)
gctggagtacagtggcgtgatctcgggtcactgccacctccgcctcctgggttctagcaattctcttgccttgaaaaccacgcctggct

SEQ ID NO: 597360 - DNA, 67 bp, Artificial Sequence
  ENSG00000174032_50 (sequence is synthesized)
caagtgacctgaggcagttaattagacactgaagggcagagtgatgaagcaggaatgctggcttttg

SEQ ID NO: 597361 - DNA, 120 bp, Artificial Sequence
  ENSG00000174032_51 (sequence is synthesized)
actgaagggcagagtgatgaagcaggaatgctggcttttgctgtcctcttgttgctcttcatcagctcctgcctcccaaggaaggatgcatagtggaagcctttgaggagagcttcccag

SEQ ID NO: 597362 - DNA, 120 bp, Artificial Sequence
  ENSG00000174032_52 (sequence is synthesized)
acagtgctggaaagtttttccaccacagcaaagccacaaaagcttatcagcgtagatgccatctcagaagaggctgataccaggggatttacatatctcagctgtgatctttctgctcca

SEQ ID NO: 597363 - DNA, 120 bp, Artificial Sequence
  ENSG00000174032_53 (sequence is synthesized)
agctgaccttggaagatagtttgatgtggttaagggtggaaccccttttatttaatcgtgtccatagcgtgggtctgcctgtacctatttgttattaagtgtgccatttgtaagtctgtt

SEQ ID NO: 597364 - DNA, 120 bp, Artificial Sequence
  ENSG00000174038_0 (sequence is synthesized)
agaaggctaagggaaatggaatggctgctggaggacctgcttggggctaagggggatatggggcttctctggggccaactgacccatgccctagcctgcagacactgcggcagcagctgc

SEQ ID NO: 597365 - DNA, 120 bp, Artificial Sequence
  ENSG00000174038_1 (sequence is synthesized)
ttccagagtccaggaaatctggtgacactattcttattcgtggtttggcagattcagagatggtggcagcttgggaggttgcgacagcttcatccctggtgctctgggaatatggtgcaa

SEQ ID NO: 597366 - DNA, 120 bp, Artificial Sequence
  ENSG00000174038_2 (sequence is synthesized)
ggcaaggaactaccacttctgcaccgtgtggccttccttgatcacctgtgtaagcagaaatcagaagtggaggaagaaggggaagaagaggaagagggggaagacgaggcatctctggat

SEQ ID NO: 597367 - DNA, 120 bp, Artificial Sequence
  ENSG00000174038_3 (sequence is synthesized)
ccactgaagccatgttctcctaccaaagaagctcccactggagagcaagccactccagccccaccccagccatcctgtggttctgagggcctcctcaaggctatagggataccagagcaa

SEQ ID NO: 597368 - DNA, 120 bp, Artificial Sequence
  ENSG00000174038_4 (sequence is synthesized)
acagtcatgcagcccgtgagcccttccagatccttccccatcttccagattctgaccagctttcctgtgaggcacaagatagcatcagggaaccgccagcagcagagaaaaagccagctc

SEQ ID NO: 597369 - DNA, 120 bp, Artificial Sequence
  ENSG00000174038_5 (sequence is synthesized)
ttctggggtctcccctctctgcacagcgagtccttggaggccatcttcctgagctcaggtggcccctctcctctgaagtggtctgtttgttcttctgtcttcttcaacaagcttgccttc

SEQ ID NO: 597370 - DNA, 120 bp, Artificial Sequence
  ENSG00000174038_6 (sequence is synthesized)
ctacctaggtccaacctgttgcttccccagtatcactcctcagcccagttttctacccatggggcccatactatggaagatctagaagggatggcccccgatcctcagctgcttccacct

SEQ ID NO: 597371 - DNA, 120 bp, Artificial Sequence
  ENSG00000174038_7 (sequence is synthesized)
ccatcttctccttctgtctcatcactactcctccatctgaggcccttccctgtggaccacaagggagttttatctggcgctgaggcacccacacagtcccctggaactagccccctggaa

SEQ ID NO: 597372 - DNA, 120 bp, Artificial Sequence
  ENSG00000174038_8 (sequence is synthesized)
gttctccctggatatgagactcatttggaaaccacaggacacaaaaagatgccccaagcttttgagcctccgatgccacccccctgccaatccccagcttctctgtcagaacccagaaaa

SEQ ID NO: 597373 - DNA, 120 bp, Artificial Sequence
  ENSG00000174038_9 (sequence is synthesized)
gttagccctgaaggaggacttgctatatctaaggacttctggggaaccgtgggatacagagagaaacctcaggcctctgagtcttcaatgccagtcccttgccctcccctagactccctg

SEQ ID NO: 597374 - DNA, 120 bp, Artificial Sequence
  ENSG00000174038_10 (sequence is synthesized)
ccagaactccagagagagagttccctggaagatccatccagatataagccccagtgggaatgcagagaaaactcaggaaacctctgggcttttgagtctccagtcttggacctcaaccca

SEQ ID NO: 597375 - DNA, 120 bp, Artificial Sequence
  ENSG00000174038_11 (sequence is synthesized)
gagctctctggaaccagccctgaatgtgtcccaccagcatctgagacaccatggaagggcatgcaaagtagagaaaatatttgggtccctgcagacccagtttcacctcccagccttccc

SEQ ID NO: 597376 - DNA, 120 bp, Artificial Sequence
  ENSG00000174038_12 (sequence is synthesized)
tcagtccctctcctggagtctctagtaatgggcccccagggagtcctgtctgaatccaaagctttgtgggagaccatggggcagaaagagaacctctgggcatctgattccccagaccct

SEQ ID NO: 597377 - DNA, 120 bp, Artificial Sequence
  ENSG00000174038_13 (sequence is synthesized)
gttcatagcacacctccaaccacccttatggaaccacacagaatcaatcctggggaatgcctcgctacatcagaagctacatggaaggatactgagcattccaggaattcctcggcttct

SEQ ID NO: 597378 - DNA, 120 bp, Artificial Sequence
  ENSG00000174038_14 (sequence is synthesized)
ctggccctcagcccacccccagctcttgcaccggagctgctcagagttagatccatgggggtcctgtctgattctgaagctagatgtggggacatacaaaagacaaaaaactcctgggcc

SEQ ID NO: 597379 - DNA, 120 bp, Artificial Sequence
  ENSG00000174038_15 (sequence is synthesized)
tctaagcacccagcttgtaacttaccccaagacctgcatggagccagccctctgggagtcttgtctgattctcagtctattgtaggggaaatggagcaaaaagaaaactgtgttcctgtg

SEQ ID NO: 597380 - DNA, 120 bp, Artificial Sequence
  ENSG00000174038_16 (sequence is synthesized)
ttcccaggtaggggctccagcccatcctcaaactctgtttcaaagtcccacgtaagtgagcctatcgcagaccaaagcaactataagcctgacggggaggcagtggagcaaagaaagaac

SEQ ID NO: 597381 - DNA, 120 bp, Artificial Sequence
  ENSG00000174038_17 (sequence is synthesized)
cactgggccactgagctcccagcccccagctcactctctactcctctaccagagccacacattgaccttgaacttgtgtggagaaatgtgcaacaaagagaagttccccaaggccccagc

SEQ ID NO: 597382 - DNA, 120 bp, Artificial Sequence
  ENSG00000174038_18 (sequence is synthesized)
cctctggcagtggatcccctacacccagtaccccagcctcccaccctagctgaagctgtgaagattgaacgcactcatcctggtctacccaagggagtaacgtgcccaggggttaaggca

SEQ ID NO: 597383 - DNA, 120 bp, Artificial Sequence
  ENSG00000174038_19 (sequence is synthesized)
gaggccccactctcccagagatggactgtcccagagttgctcacccatcctgggatccatgcctggcagtggagtagagagctgaaactcaggctgaagaaactgcggcagagccctgcc

SEQ ID NO: 597384 - DNA, 120 bp, Artificial Sequence
  ENSG00000174038_20 (sequence is synthesized)
tccagagcccctggcccaagtcaatcattttgcagctcccctattctgagctccacaattccagacttctggggactcccttcctgcccaccacagcagatttatccccccaatccatgc

SEQ ID NO: 597385 - DNA, 120 bp, Artificial Sequence
  ENSG00000174038_21 (sequence is synthesized)
ccccactcttcaagttgtcatcctcaagaagttcagcgcacagtacctcagcctgtccagtcctcccactgtcatcacttccaatcctcttcccagcttcagccacaggagtctggcagg

SEQ ID NO: 597386 - DNA, 120 bp, Artificial Sequence
  ENSG00000174038_22 (sequence is synthesized)
gcggaacaagggtctcagagaggggagaaaatgaaggggaagatggtgagccaggtcccatcccaagggccatgtgtacacatggaggctggtgtggactatctatctccaggcccagga

SEQ ID NO: 597387 - DNA, 120 bp, Artificial Sequence
  ENSG00000174038_23 (sequence is synthesized)
gaaccctcaaactctaaggttctggtctcaggcaagagaaaggacaaggcttcagcctcatcctcagccaaaaagagagagcaccctaggaaacccaaagcaggagaccatagaagaggg

SEQ ID NO: 597388 - DNA, 120 bp, Artificial Sequence
  ENSG00000174038_24 (sequence is synthesized)
actgcaaggttggggttatccacagtcacagggaagaaccaccctgcccaggccagaagcctagtagaggcccctgtaagcacatttccccaaaggtctcaacacaggggccagagctct

SEQ ID NO: 597389 - DNA, 120 bp, Artificial Sequence
  ENSG00000174038_25 (sequence is synthesized)
caacacactgctcttccccagctgcttctccccaaagcttcgggtccccaggatcagccagaggcagggcgaagagcaagtgacatcctgacccctcgccactgtaagcactgtccttgg

SEQ ID NO: 597390 - DNA, 120 bp, Artificial Sequence
  ENSG00000174038_26 (sequence is synthesized)
gcccacatggagaagtatctctccttccctaccctcaaggcttcccttaccaggggtttgcaaaaggtgttagccaaatgcctggataaccatcgacccctacccaccaaatctagtcag

SEQ ID NO: 597391 - DNA, 120 bp, Artificial Sequence
  ENSG00000174038_27 (sequence is synthesized)
tagagaaaaggctggtaatactagcacttggtatgccaagacctgaagccaaaccagggggaaggtggggatgtggagacaagaaatggaaattctaataaactagctgaattagataaa

SEQ ID NO: 597392 - DNA, 80 bp, Artificial Sequence
  ENSG00000174038_28 (sequence is synthesized)
gctatgacctaatgcttgcttggaccaaagctaagaacataaagtaaattgatttattacggctagcagatatttaagaa

SEQ ID NO: 597393 - DNA, 89 bp, Artificial Sequence
  ENSG00000174038_29 (sequence is synthesized)
attacggctagcagatatttaagaatgttaacagtgttactatttattcctaataagatggagaggaaagtctttgaagaggaacctct

SEQ ID NO: 597394 - DNA, 120 bp, Artificial Sequence
  ENSG00000174038_30 (sequence is synthesized)
aaaacaaccctgtgtaattcagagatggtggcagcttgggaggttgcgacagcttcatccctggtgctctgggaatatggtgcaaggcaaggaactaccacttctgcaccgtgtggcctt

SEQ ID NO: 597395 - DNA, 120 bp, Artificial Sequence
  ENSG00000174059_0 (sequence is synthesized)
agtgtcttccactcggtgcgtctctctaggagccgcgcgggaaggatgctggtccgcaggggcgcgcgcgcagggcccaggatgccgcggggctggaccgcgctttgcttgctgagtttg

SEQ ID NO: 597396 - DNA, 120 bp, Artificial Sequence
  ENSG00000174059_1 (sequence is synthesized)
ctgccttctgggttcatgagtcttgacaacaacggtactgctaccccagagttacctacccagggaacattttcaaatgtttctacaaatgtatcctaccaagaaactacaacacctagt

SEQ ID NO: 597397 - DNA, 120 bp, Artificial Sequence
  ENSG00000174059_2 (sequence is synthesized)
acccttggaagtaccagcctgcaccctgtgtctcaacatggcaatgaggccacaacaaacatcacagaaacgacagtcaaattcacatctacctctgtgataacctcagtttatggaaac

SEQ ID NO: 597398 - DNA, 120 bp, Artificial Sequence
  ENSG00000174059_3 (sequence is synthesized)
acaaactcttctgtccagtcacagacctctgtaatcagcacagtgttcaccaccccagccaacgtttcaactccagagacaaccttgaagcctagcctgtcacctggaaatgtttcagac

SEQ ID NO: 597399 - DNA, 120 bp, Artificial Sequence
  ENSG00000174059_4 (sequence is synthesized)
ctttcaaccactagcactagccttgcaacatctcccactaaaccctatacatcatcttctcctatcctaagtgacatcaaggcagaaatcaaatgttcaggcatcagagaagtgaaattg

SEQ ID NO: 597400 - DNA, 120 bp, Artificial Sequence
  ENSG00000174059_5 (sequence is synthesized)
actcagggcatctgcctggagcaaaataagacctccagctgtgcggagtttaagaaggacaggggagagggcctggcccgagtgctgtgtggggaggagcaggctgatgctgatgctggg

SEQ ID NO: 597401 - DNA, 120 bp, Artificial Sequence
  ENSG00000174059_6 (sequence is synthesized)
gcccaggtatgctccctgctccttgcccagtctgaggtgaggcctcagtgtctactgctggtcttggccaacagaacagaaatttccagcaaactccaacttatgaaaaagcaccaatct

SEQ ID NO: 597402 - DNA, 120 bp, Artificial Sequence
  ENSG00000174059_7 (sequence is synthesized)
gacctgaaaaagctggggatcctagatttcactgagcaagatgttgcaagccaccagagctattcccaaaagaccctgattgcactggtcacctcgggagccctgctggctgtcttgggc

SEQ ID NO: 597403 - DNA, 120 bp, Artificial Sequence
  ENSG00000174059_8 (sequence is synthesized)
atcactggctatttcctgatgaatcgccgcagctggagccccacaggagaaaggctgggcgaagacccttattacacggaaaacggtggaggccagggctatagctcaggacctgggacc

SEQ ID NO: 597404 - DNA, 120 bp, Artificial Sequence
  ENSG00000174059_9 (sequence is synthesized)
tcccctgaggctcagggaaaggccagtgtgaaccgaggggctcaggaaaacgggaccggccaggccacctccagaaacggccattcagcaagacaacacgtggtggctgataccgaattg

SEQ ID NO: 597405 - DNA, 120 bp, Artificial Sequence
  ENSG00000174059_10 (sequence is synthesized)
tgactcggctaggtggggcaaggctgggcagtgtccgagagagcacccctctctgcatctgaccacgtgctacccccatgctggaggtgacatctcttacgcccaacccttccccactgc

SEQ ID NO: 597406 - DNA, 120 bp, Artificial Sequence
  ENSG00000174059_11 (sequence is synthesized)
acacacctcagaggctgttcttggggccctacaccttgaggaggggcaggtaaactcctgtcctttacacattcggctccctggagccagactctggtcttctttgggtaaacgtgtgac

SEQ ID NO: 597407 - DNA, 120 bp, Artificial Sequence
  ENSG00000174059_12 (sequence is synthesized)
gggggaaagccaaggtctggagaagctcccaggaacaatcgatggccttgcagcactcacacaggacccccttcccctaccccctcctctctgccgcaatacaggaacccccaggggaaa

SEQ ID NO: 597408 - DNA, 120 bp, Artificial Sequence
  ENSG00000174059_13 (sequence is synthesized)
gatgagcttttctaggctacaattttctcccaggaagctttgatttttaccgtttcttccctgtattttctttctctactttgaggaaaccaaagtaaccttttgcacctgctctcttgt

SEQ ID NO: 597409 - DNA, 120 bp, Artificial Sequence
  ENSG00000174059_14 (sequence is synthesized)
aatgatatagccagaaaaacgtgttgccttgaaccacttccctcatctctcctccaagacactgtggacttggtcaccagctcctcccttgttctctaagttccactgagctccatgtgc

SEQ ID NO: 597410 - DNA, 120 bp, Artificial Sequence
  ENSG00000174059_15 (sequence is synthesized)
cccctctaccatttgcagagtcctgcacagttttctggctggagcctagaacaggcctcccaagttttaggacaaacagctcagttctagtctctctggggccacacagaaactcttttt

SEQ ID NO: 597411 - DNA, 120 bp, Artificial Sequence
  ENSG00000174059_16 (sequence is synthesized)
gggctcctttttctccctctggatcaaagtaggcaggaccatgggaccaggtcttggagctgagcctctcacctgtactcttccgaaaaatcctcttcctctgaggctggatcctagcct

SEQ ID NO: 597412 - DNA, 120 bp, Artificial Sequence
  ENSG00000174059_17 (sequence is synthesized)
tatcctctgatctccatggcttcctcctccctcctgccgactcctgggttgagctgttgcctcagtcccccaacagatgcttttctgtctctgcctccctcaccctgagccccttccttg

SEQ ID NO: 597413 - DNA, 120 bp, Artificial Sequence
  ENSG00000174059_18 (sequence is synthesized)
ctctgcacccccatatggtcatagcccagatcagctcctaacccttatcaccagctgcctcttctgtgggtgacccaggtccttgtttgctgttgatttctttccagaggggttgagcag

SEQ ID NO: 597414 - DNA, 120 bp, Artificial Sequence
  ENSG00000174059_19 (sequence is synthesized)
ggatcctggtttcaatgacggttggaaatagaaatttccagagaagagagtattgggtagatattttttctgaatacaaagtgatgtgtttaaatactgcaattaaagtgatactgaaac

SEQ ID NO: 597415 - DNA, 120 bp, Artificial Sequence
  ENSG00000174059_20 (sequence is synthesized)
acatctgttatgtgactctgtcttagctgggtgtgtctgcatgcaagagtgacaccctccattagacctagctagactgtgcagtgatgtggtggggaggaccagccagggaagagggag

SEQ ID NO: 597416 - DNA, 120 bp, Artificial Sequence
  ENSG00000174059_21 (sequence is synthesized)
cacctcagcagacacaggcaccagccaggatgctaaggacctttagccaagtctgccaactattctcctccatggggagaggaaacatccatttccagtggtagaaaggcagacccgaat

SEQ ID NO: 597417 - DNA, 120 bp, Artificial Sequence
  ENSG00000174059_22 (sequence is synthesized)
gtaccagggagcttccaaatggagggtggtatgttgggttcttaggagctgtacccttcatgaacacccttctgagaagaggagcatgctgatcactgctgcaaaatatgcaaaacaaag

SEQ ID NO: 597418 - DNA, 120 bp, Artificial Sequence
  ENSG00000174059_23 (sequence is synthesized)
ggaaggggcaatgtcctgtgcaccctttattatcaggccacccccctccccagccccccaggtcagagtagacacagtgaaggactatgtggggactgttgttctagagacctggcagcc

SEQ ID NO: 597419 - DNA, 120 bp, Artificial Sequence
  ENSG00000174059_24 (sequence is synthesized)
aactcagggagggggctggtttccaccctcaagattaagacagcagcctaattaaaaaaaaaatctgtaagcatgtacctccccccagcttccaaaacaacccccaccccacccctacca

SEQ ID NO: 597420 - DNA, 120 bp, Artificial Sequence
  ENSG00000174059_25 (sequence is synthesized)
ggccataggaagttggggagggagtgctgaggagctccaggaaacactcccaagtgtgtcgacagtggcagaggcagttggggccaaacaaaggttgattcttccattcttatctccata

SEQ ID NO: 597421 - DNA, 120 bp, Artificial Sequence
  ENSG00000174059_26 (sequence is synthesized)
aagccagacctttcccttcagcactcctccacccccatctccttcttgcttttctccaactcctctaatcataggttcttccctaggacagaggggaggcgaaatgatgaggttcagagt

SEQ ID NO: 597422 - DNA, 120 bp, Artificial Sequence
  ENSG00000174059_27 (sequence is synthesized)
cttccctcaaaggcgatggctgccttgagggttggagcaaaggatgatgagcaaaagacgatggtaatcagtagggaagtccagcccacttgcatctagttgcacatcttgccttgagag

SEQ ID NO: 597423 - DNA, 120 bp, Artificial Sequence
  ENSG00000174059_28 (sequence is synthesized)
taatccagtgagggtctgtcccagctaggacatcaagtaggaggggtgggttcagggttcagattcctaggaaatatgggaggagaggaaaaggcaacttggatgcacctccagcttcag

SEQ ID NO: 597424 - DNA, 120 bp, Artificial Sequence
  ENSG00000174059_29 (sequence is synthesized)
gcctagcaacctgcaatgcatctcaccctgagtttgctggaatgtgtatgtatgctttgggaggaagggctgtgtgtgtattgcggggtggggtggggcagctggttccctctgacagct

SEQ ID NO: 597425 - DNA, 120 bp, Artificial Sequence
  ENSG00000174059_30 (sequence is synthesized)
ggacagcttgccctgaagaatttgcctgctttctggaaaaatccaactttcccaccgtgggcctgagcgtcctggtacagcaatggcgccacctgctggccttattgaggtcctactgct

SEQ ID NO: 597426 - DNA, 120 bp, Artificial Sequence
  ENSG00000174059_31 (sequence is synthesized)
cagcctcagctcaatcgcctccatgttgggcttctctccctggctgccccaccctctagtccaatttctcttgtacacaaagctcatataactatagaacgtcactgttgaagagaactt

SEQ ID NO: 597427 - DNA, 120 bp, Artificial Sequence
  ENSG00000174059_32 (sequence is synthesized)
taaagatacatttaattaaactcccttatggtatagttaaagacaaactaaggctcagagaagggaggtggcttgcccaatcacccagaattccaaagtcctgaatctgtagttttccct

SEQ ID NO: 597428 - DNA, 120 bp, Artificial Sequence
  ENSG00000174059_33 (sequence is synthesized)
tggatgtcatgaagccagtgtggcagtgtgaagataggtttgggacttcacttctggagcatttcatcaacataagctatcctaggcctggccagccaagcaggtcctggaggagcccca

SEQ ID NO: 597429 - DNA, 120 bp, Artificial Sequence
  ENSG00000174059_34 (sequence is synthesized)
ggacaaagatcacaggaggccatgaggttcggcttcttcggcgcccacagtgagcccaggaaaattagctgtagggtattacactgttgactatggagagcatatctggaattatcttca

SEQ ID NO: 597430 - DNA, 120 bp, Artificial Sequence
  ENSG00000174059_35 (sequence is synthesized)
gccagattttcatctgaatggataaatgggaataccatctaagtccagataaatagatcacttccatctcatcccttctaggtagattaatcccacacttcctcttcacacaaaaccagt

SEQ ID NO: 597431 - DNA, 120 bp, Artificial Sequence
  ENSG00000174059_36 (sequence is synthesized)
aataggtcatcgattttgtgcaacaggatgctgcttctcttcctaaagcccccatcgaagaggcttccagccaccattcaatcattcatcaagtcttatgatgtgccagacactgcgcga

SEQ ID NO: 597432 - DNA, 120 bp, Artificial Sequence
  ENSG00000174059_37 (sequence is synthesized)
aatgtgccagaacatctgttatgtgccagacactgttcttgagactggggatacagcaaacactcatgaagcttataattctagcagaagaggacagtaaacaatgtcatctcagtaagt

SEQ ID NO: 597433 - DNA, 120 bp, Artificial Sequence
  ENSG00000174059_38 (sequence is synthesized)
atatacatgtgttttcaggattgagagctatgaaaaacataaaatatattgagaataatggttggtattttacatatggtggttacttttagaaaaataacagtggagagcacagcttca

SEQ ID NO: 597434 - DNA, 120 bp, Artificial Sequence
  ENSG00000174059_39 (sequence is synthesized)
cttgaatgaagtggagaagcaggttgtatgccaagctgggagagattatcccacacaggggaaaggacaagtgcaaagccctatgatgaaaagctgccaagtgcagaaagcctcagatgg

SEQ ID NO: 597435 - DNA, 120 bp, Artificial Sequence
  ENSG00000174059_40 (sequence is synthesized)
cagggggcaagatggccatgaggttgtgtcagtgagtgggggtggggagaggcaggaggtcagactacatggggcctttttagttgtagattgggaagccactggagggttttgagcaga

SEQ ID NO: 597436 - DNA, 120 bp, Artificial Sequence
  ENSG00000174059_41 (sequence is synthesized)
gaagtcatatcatctgctttatgttttaaaaggatcatgctggctgctgagtagagaatagaggttgagggataagaaagtagaaggagaccgtagcaagaagaacgatcatggctggga

SEQ ID NO: 597437 - DNA, 120 bp, Artificial Sequence
  ENSG00000174059_42 (sequence is synthesized)
gcaggtgatcatattggcagtgatgagatcaagcagaattcaaaaagtggtttcaaagtagaggtaacaggacttgctcagtctatttatttcttcaaataataatcatatttacaatga

SEQ ID NO: 597438 - DNA, 120 bp, Artificial Sequence
  ENSG00000174059_43 (sequence is synthesized)
tagtagctaacagtttttgagtgcttactgtatgaaaattgagatatggtgccaatatttaaatagcatattttacttaacattcacagaaaccctgtgaagtaggttctattatctcag

SEQ ID NO: 597439 - DNA, 120 bp, Artificial Sequence
  ENSG00000174059_44 (sequence is synthesized)
aaaaagaaactgaaactcagagaataacaagggactgtgttacgtgcacagtggcagaggcaaagatgaataggatgtgagtttatttgaaccccaaatgtttaaatcttggggataata

SEQ ID NO: 597440 - DNA, 120 bp, Artificial Sequence
  ENSG00000174059_45 (sequence is synthesized)
caacacacatttaaacaaagaagcaagaaaaaaaatgcacaacagaaagtgagaaataacacgaggaaagactaaatgaagtgctttgtatctagatgtgggcaggaccctttccagctg

SEQ ID NO: 597441 - DNA, 120 bp, Artificial Sequence
  ENSG00000174059_46 (sequence is synthesized)
agaagatctgagactgggtcatgaacaggtggtttctgagtgggtcctgtaaaaatgaatacgattttgatgatagtaatgagtaaggacatttgagactgatagaagagtacatacaat

SEQ ID NO: 597442 - DNA, 120 bp, Artificial Sequence
  ENSG00000174059_47 (sequence is synthesized)
atgtagtgatggggaaagataaggtactgtcaaaggacaatgtgttttctggtatgacagagaagtagaatgtgttaagggaagccgagtaccagaaagatccgggtgtcacagtttgtg

SEQ ID NO: 597443 - DNA, 120 bp, Artificial Sequence
  ENSG00000174059_48 (sequence is synthesized)
tagggtgtttaaagctaaaccacagagtttaattttatccaatagaagaggagccacagaagagtttccatttattcattaatttattcatttattcaaaaaatatttgagtgcttatta

SEQ ID NO: 597444 - DNA, 120 bp, Artificial Sequence
  ENSG00000174059_49 (sequence is synthesized)
taagccaggtactatgccaggcacctgggataagacatagtcccttctgtcaagtctttacattgggtggatgtgggagggacagatgacagaacaatatgcattgagtgtaagtgctat

SEQ ID NO: 597445 - DNA, 120 bp, Artificial Sequence
  ENSG00000174059_50 (sequence is synthesized)
ggtataggaagctctgagtgggaggggcatggaagccgtggaagaccatggaaggcttcccaggagaagtgacgtctggactgatcctttggtcaagcaggagttaaagaggagaaaagg

SEQ ID NO: 597446 - DNA, 120 bp, Artificial Sequence
  ENSG00000174059_51 (sequence is synthesized)
agagatatgggtgttcccgagagaggaagaagccttgtcccaggagcaaagtgagggtgattgttccagaaatgtgagtgattcttttaaggctcaagcaaagcatgtgattcttcttta

SEQ ID NO: 597447 - DNA, 120 bp, Artificial Sequence
  ENSG00000174059_52 (sequence is synthesized)
taccttctatttctttgctgagtgtttctgttcttttgtttcaagcatgctgcaattgctcattaaagcatgtttatgatggctgtctgttttaaaattcttgtcagatggtttcaacat

SEQ ID NO: 597448 - DNA, 120 bp, Artificial Sequence
  ENSG00000174059_53 (sequence is synthesized)
ctttatcatctcaatgttggcatctgttaatggttttttctcaatcaaattgagattttcctggttcttggtattaccagtgattttaattgcatctggaaatttgggatttatgttgaa

SEQ ID NO: 597449 - DNA, 120 bp, Artificial Sequence
  ENSG00000174059_54 (sequence is synthesized)
agactggatcttattgaaagattctgtttagcacccctcctttgataccacactggtgggtccaggttccccattcagctgttgacaccttcagggcagagaggtgggatggggtgaagg

SEQ ID NO: 597450 - DNA, 120 bp, Artificial Sequence
  ENSG00000174059_55 (sequence is synthesized)
gggtacctcattattgctggcccaggttagaagttcaggcttcccagtagatctctgctgataccaccctggtgccatgtcattccttgagtccaaaagtccctcccaattctgccttct

SEQ ID NO: 597451 - DNA, 120 bp, Artificial Sequence
  ENSG00000174059_56 (sequence is synthesized)
tctctctacatatcggagtctccctatgtttgacttatatataatgtccagggtttttagagttagttaacaggaggcataagaaaaagtgtgtccactccatcttgtctggaactggaa

SEQ ID NO: 597452 - DNA, 120 bp, Artificial Sequence
  ENSG00000174059_57 (sequence is synthesized)
gttcaagtcgaatataagagagaggagaggaaattacaagccatgagactggagagttaggcaggttctacaccagctattctcaaagccctcttacactcttaaaaatttagaacttca

SEQ ID NO: 597453 - DNA, 120 bp, Artificial Sequence
  ENSG00000174059_58 (sequence is synthesized)
ccctcttacactcttaaaaatttagaacttcaaagagcttttgattttgaaagttacatctatcaattattactgtttcaaaaattaaaattgagaaaattttatttattaatttgttta

SEQ ID NO: 597454 - DNA, 120 bp, Artificial Sequence
  ENSG00000174059_59 (sequence is synthesized)
tgtaagtaatgcttttcttaatgaaaaataattatattttccaaaacaaaaacaattaggaaaaagagtgtcattgttttagactttggtaaatctctctaatatctggctgaagagaag

SEQ ID NO: 597455 - DNA, 120 bp, Artificial Sequence
  ENSG00000174059_60 (sequence is synthesized)
ccaaagcgctgggattacaggtgtgagacaccgcgcccagcccccgaatgctgattcttttatctgcttctgtattcaatctgttgtgatatgatgggtagcctctgaaacactccactg

SEQ ID NO: 597456 - DNA, 120 bp, Artificial Sequence
  ENSG00000174059_61 (sequence is synthesized)
atatgatgggtagcctctgaaacactccactgtatacttgtgaaagaatgaatgtgaaaaaggaaaatagatttgtagtattattattcaaattgttttgacctcagagaccacttggaa

SEQ ID NO: 597457 - DNA, 120 bp, Artificial Sequence
  ENSG00000174059_62 (sequence is synthesized)
atgttttagggaacccccagaggaccttggatcatgctttgagaaccgcggctctagatatgttactatttcagtagcatctaagtacatgtggctgctgagcacttgtaatgtggctag

SEQ ID NO: 597458 - DNA, 120 bp, Artificial Sequence
  ENSG00000174059_63 (sequence is synthesized)
tgcaaatgagagacaggacttccagctatatgtaatttaataaactcaaatttaaaaactggaacctcataaaatgttttgttgttgttgttaaacatgaccttatagttttggtaggaa

SEQ ID NO: 597459 - DNA, 120 bp, Artificial Sequence
  ENSG00000174059_64 (sequence is synthesized)
acagagacccagttctgatgatggtcacacaccccagcagttttcccctaacaggaaagttgtcagggctgttcaggcatttccttctctgccatctgccatccggactgaagagaaagt

SEQ ID NO: 597460 - DNA, 120 bp, Artificial Sequence
  ENSG00000174059_65 (sequence is synthesized)
cttagtttcaattcctttcctgttcaggggaggaggacactctgattggaggctgctggaataaattctgactcactattgaagaattatcagagtttttcttctgagtccaaattcctg

SEQ ID NO: 597461 - DNA, 120 bp, Artificial Sequence
  ENSG00000174059_66 (sequence is synthesized)
ggtctgatggcccagtcagcaacctgaagaaaaatctatgaacttcattaaaactgggttccatgcttttaatggaaaacagagatggaagacgagacaaaaatgccatttcagtttgag

SEQ ID NO: 597462 - DNA, 120 bp, Artificial Sequence
  ENSG00000174059_67 (sequence is synthesized)
caatgcactttttgagactcctttgggtagaaagagggaggaggccactgaggtttccactgagtgtatattatagatttgttctctcctcctcacctcccttggcttttcttccatcat

SEQ ID NO: 597463 - DNA, 120 bp, Artificial Sequence
  ENSG00000174059_68 (sequence is synthesized)
tggggactgctgtaatcttgaaacagaatattttctcttagttattattgcattattaatattttctgtttttggccatttcttttgagtttaatttgcatatgtgtacatgggcaatgc

SEQ ID NO: 597464 - DNA, 120 bp, Artificial Sequence
  ENSG00000174059_69 (sequence is synthesized)
ttcaacgagacaatttttttaagtttgttctctaacatcttagatactagaagatatggattttggtcctgggagattatttaggtttttttcttattgtgttgttgcacatatacagtt

SEQ ID NO: 597465 - DNA, 120 bp, Artificial Sequence
  ENSG00000174059_70 (sequence is synthesized)
aagaagtgggatggggcctctccagaaagctgaacgaggcatctggagcccgaacaaacctccaccttttttggcctcgacggcggcaacccagcctccctcctaacgccctccgccttt

SEQ ID NO: 597466 - DNA, 120 bp, Artificial Sequence
  ENSG00000174059_71 (sequence is synthesized)
gggaccaaccaggggagctcaagttagtagcagccaaggagaggcgctgccttgccaagactaaaaagggaggggagaagagaggaaaaaagcaagaatcccccacccctctcccgggcg

SEQ ID NO: 597467 - DNA, 120 bp, Artificial Sequence
  ENSG00000174080_0 (sequence is synthesized)
attggtcggcgtgccgtcgccccgctggagggaggactcaggccccgctggccgcgggctcggtacccggtgggtcggtggagcgtctgttgggtccgggccgccggcttcgccctcgcc

SEQ ID NO: 597468 - DNA, 80 bp, Artificial Sequence
  ENSG00000174080_1 (sequence is synthesized)
cgccatggcgccctggctgcagctcctgtcgctgctggggctgctcccgggcgcagtggccgcccccgcccagccccgag

SEQ ID NO: 597469 - DNA, 120 bp, Artificial Sequence
  ENSG00000174080_2 (sequence is synthesized)
gcgcccacccgcttcgcgctggagatgttcaaccgcggccgggctgcggggacgcgggccgtgctgggccttgtgcgcggccgcgtccgccgggcgggtcaggggtcgctgtactccctg

SEQ ID NO: 597470 - DNA, 120 bp, Artificial Sequence
  ENSG00000174080_3 (sequence is synthesized)
gaggccaccctggaggagccaccctgcaacgaccccatggtgtgccggctccccgtgtccaagaaaaccctgctctgcagcttccaagtcctggatgagctcggaagacacgtgctgctg

SEQ ID NO: 597471 - DNA, 120 bp, Artificial Sequence
  ENSG00000174080_4 (sequence is synthesized)
cggaaggactgtggcccagtggacaccaaggttccaggtgctggggagcccaagtcagccttcactcagggctcagccatgatttcttctctgtcccaaaaccatccagacaacagaaac

SEQ ID NO: 597472 - DNA, 120 bp, Artificial Sequence
  ENSG00000174080_5 (sequence is synthesized)
gagactttcagctcagtcatttccctgttgaatgaggatcccctgtcccaggacttgcctgtgaagatggcttcaatcttcaagaactttgtcattacctataaccggacatatgagtca

SEQ ID NO: 597473 - DNA, 120 bp, Artificial Sequence
  ENSG00000174080_6 (sequence is synthesized)
aaggaagaagcccggtggcgcctgtccgtctttgtcaataacatggtgcgagcacagaagatccaggccctggaccgtggcacagctcagtatggagtcaccaagttcagtgatctcaca

SEQ ID NO: 597474 - DNA, 120 bp, Artificial Sequence
  ENSG00000174080_7 (sequence is synthesized)
gaggaggagttccgcactatctacctgaatactctcctgaggaaagagcctggcaacaagatgaagcaagccaagtctgtgggtgacctcgccccacctgaatgggactggaggagtaag

SEQ ID NO: 597475 - DNA, 120 bp, Artificial Sequence
  ENSG00000174080_8 (sequence is synthesized)
ctgtcacaaaagtcaaagaccagggcatgtgtggctcctgctgggccttctcagtcacaggcaatgtggagggccagtggtttctcaaccaggggaccctgctctccctctctgaacagg

SEQ ID NO: 597476 - DNA, 120 bp, Artificial Sequence
  ENSG00000174080_9 (sequence is synthesized)
agctcttggactgtgacaagatggacaaggcctgcatgggcggcttgccctccaatgcctactcggccataaagaatttgggagggctggagacagaggatgactacagctaccagggtc

SEQ ID NO: 597477 - DNA, 120 bp, Artificial Sequence
  ENSG00000174080_10 (sequence is synthesized)
acatgcagtcctgcaacttctcagcagagaaggccaaggtctacatcaatgactccgtggagctgagccagaacgagcagaagctggcagcctggctggccaagagaggcccaatctccg

SEQ ID NO: 597478 - DNA, 120 bp, Artificial Sequence
  ENSG00000174080_11 (sequence is synthesized)
tggccatcaatgcctttggcatgcagttttaccgccacgggatctcccgccctctccggcccctctgcagcccttggctcattgaccatgcggtgttgcttgtgggctacggcaaccgct

SEQ ID NO: 597479 - DNA, 120 bp, Artificial Sequence
  ENSG00000174080_12 (sequence is synthesized)
ctgacgttcccttttgggccatcaagaacagctggggcactgactggggtgagaagggttactactacttgcatcgtgggtccggggcctgtggcgtgaacaccatggccagctcggcgg

SEQ ID NO: 597480 - DNA, 120 bp, Artificial Sequence
  ENSG00000174080_13 (sequence is synthesized)
tggtggactgaagaggggcccccagctcgggacctggtgctgatcagagtggctgctgccccagcctgacatgtgtccaggcccctccccgggaggtacagctggcagagggaaaggcac

SEQ ID NO: 597481 - DNA, 120 bp, Artificial Sequence
  ENSG00000174080_14 (sequence is synthesized)
tgggtacctcagggtgagcagagggcactgggctggggcacagcccctgcttccctgcaccccattcccaccctgaagttctgcacctgcacctttgttgaattgtggtagcttaggagg

SEQ ID NO: 597482 - DNA, 120 bp, Artificial Sequence
  ENSG00000174080_15 (sequence is synthesized)
atgtcggggtgaagggtggtatcttggcagttgaagctggggcaagaactctgggcttgggtaatgagcaggaagaaaattttctgatcttaagcccagctctgttctgcccccgctttc

SEQ ID NO: 597483 - DNA, 120 bp, Artificial Sequence
  ENSG00000174080_16 (sequence is synthesized)
ctctgtttgatactataaattttctggttcccttggatttagggatagtgtccctctccatgtccaggaaacttgtaaccacccttttctaacagcaataaagaggtgtccttgtcccga

SEQ ID NO: 597484 - DNA, 120 bp, Artificial Sequence
  ENSG00000174080_17 (sequence is synthesized)
aaggggaggatgccccggtgcaggccgtgcctcactgtccactgtgatggggtgattgccttaggggtggctctcatctgaggagcctccagctccatcttggccagatcttgctcccca

SEQ ID NO: 597485 - DNA, 120 bp, Artificial Sequence
  ENSG00000174080_18 (sequence is synthesized)
gactccgtggagctgagccagaacgagcagagtgagtgaggggcagggtgaggtgaggtcaggtggggccggggcctgggtgcctactgatgccaccccttcccatctcagagctggcag

SEQ ID NO: 597486 - DNA, 120 bp, Artificial Sequence
  ENSG00000174080_19 (sequence is synthesized)
acagcatctcaggtcctctagaggggaaatagggggaatgcctaggaaccctgtccttacccactgcctgggccatgaccagctgggcatcatctgtcctctctatggcagggaagctga

SEQ ID NO: 597487 - DNA, 120 bp, Artificial Sequence
  ENSG00000174080_20 (sequence is synthesized)
gctgtgggagggtaaatattgatggcctaataacctgcaataggcgggtgggtgcgtgcttcctccctgccccagggcttctccctgaggctggtaggtgggcccctcgctttctgctct

SEQ ID NO: 597488 - DNA, 120 bp, Artificial Sequence
  ENSG00000174080_21 (sequence is synthesized)
tttcctagtccctgtcacacagtaggcccagtgcaagtatttgaagggtgcaaagtgattaaggctctgcctggagaattaaggaccctgatccttgcgctctgcactgcaccccaggct

SEQ ID NO: 597489 - DNA, 120 bp, Artificial Sequence
  ENSG00000174080_22 (sequence is synthesized)
tttaatctctccaagcctcgtttcctccactgtacgatggggatagcacctacttcagagattgctacgccgaataaaaggagctggcatatcatgcctaacatataacaagcacgtgat

SEQ ID NO: 597490 - DNA, 120 bp, Artificial Sequence
  ENSG00000174099_0 (sequence is synthesized)
atatttggactcggctgcccgtgcccaggaatttcccgtcatgcctcccgccgccccgtccgtcgcccggagccggggagggagggagcgaggttcggacaccggcggcggctgcctggc

SEQ ID NO: 597491 - DNA, 120 bp, Artificial Sequence
  ENSG00000174099_1 (sequence is synthesized)
ctttccatgagcccgcggcggaccctcccgcgccccctctcgctctgcctctccctctgcctctgcctctgcctggccgcggctctgggaagtgcgcagtccgggtcgtgtagggataaa

SEQ ID NO: 597492 - DNA, 120 bp, Artificial Sequence
  ENSG00000174099_2 (sequence is synthesized)
aagaactgtaaggtggtcttttcccagcaggaactgaggaagcggctaacacccctgcagtaccatgtcactcaggagaaagggaccgaaagtgcctttgaaggagaatacacacatcac

SEQ ID NO: 597493 - DNA, 120 bp, Artificial Sequence
  ENSG00000174099_3 (sequence is synthesized)
aaagatcctggaatatataaatgtgttgtttgtggaactccattgtttaagtcagaaaccaaatttgactccggttcaggttggccttcattccacgatgtgatcaattctgaggcaatc

SEQ ID NO: 597494 - DNA, 120 bp, Artificial Sequence
  ENSG00000174099_4 (sequence is synthesized)
acattcacagatgacttttcctatgggatgcacagggtggaaacaagctgctctcagtgtggtgctcaccttgggcacatttttgatgatgggcctcgtccaactgggaaaagatactgc

SEQ ID NO: 597495 - DNA, 120 bp, Artificial Sequence
  ENSG00000174099_5 (sequence is synthesized)
ataaattcggctgccttgtcttttacacctgcggatagcagtggcaccgccgagggaggcagtggggtcgccagcccggcccaggcagacaaagcggagctctagagtaatggagagtga

SEQ ID NO: 597496 - DNA, 120 bp, Artificial Sequence
  ENSG00000174099_6 (sequence is synthesized)
tggaaacaaagtgtacttaatgcacagcttattaaaaaaatcaaaattgttatcttaatagatatattttttcaaaaactataagggcagttttgtgctattgatattttttcttctttt

SEQ ID NO: 597497 - DNA, 120 bp, Artificial Sequence
  ENSG00000174099_7 (sequence is synthesized)
gcttaaacagaagccctggccatccatgtattttgcaattgactagatcaagaactgtttatagctttagcaaatggagacagctttgtgaaacttcttcacaagccacttatacccttt

SEQ ID NO: 597498 - DNA, 120 bp, Artificial Sequence
  ENSG00000174099_8 (sequence is synthesized)
ggcattcttttctttgagcacatggcttcttttgcagtttttccccctttgattcagaagcagagggttcatggtcttcaaacatgaaaatagagatctcctctgcagtgtagagaccag

SEQ ID NO: 597499 - DNA, 120 bp, Artificial Sequence
  ENSG00000174099_9 (sequence is synthesized)
agctgggcagtgcagggcatggagacctgcaagacacatggccttgaggcctttgcacagacccacctaagataaggttggagtgatgttttaatgagactgttcagctttgtggaaagt

SEQ ID NO: 597500 - DNA, 120 bp, Artificial Sequence
  ENSG00000174099_10 (sequence is synthesized)
ttgagctaaggtcatttttttttttctcactgaaagggtgtgaaggtctaaagtctttccttatgttaaattgttgccagatccaaaggggcatactgagtgttgtggcagagaagtaaa

SEQ ID NO: 597501 - DNA, 120 bp, Artificial Sequence
  ENSG00000174099_11 (sequence is synthesized)
atactgagtgttgtggcagagaagtaaacattaccacactgttaggcctttattttattttattttccatcgaaagcattggaggcccagtgcaatggctcacgcctgtgatcccagcac

SEQ ID NO: 597502 - DNA, 89 bp, Artificial Sequence
  ENSG00000174099_12 (sequence is synthesized)
tcatgacaatgtgacactccatctcaaaaaataataataataacaatataagaactagctgggcatggtggcgcatgcatgtagtccca

SEQ ID NO: 597503 - DNA, 120 bp, Artificial Sequence
  ENSG00000174099_13 (sequence is synthesized)
acactccatctcaaaaaataataataataacaatataagaactagctgggcatggtggcgcatgcatgtagtcccagctactcctgaggctcagtcaggagaatcgcttgaacttgggag

SEQ ID NO: 597504 - DNA, 120 bp, Artificial Sequence
  ENSG00000174099_14 (sequence is synthesized)
ctccagcctgaacagagtgagatcctgtcaaaaaagaaaagaaaaagaaagcagcattcaaatgtaagacaactgtaaaatattgagccccacttggtctaaaattcaaaaagaagaacg

SEQ ID NO: 597505 - DNA, 120 bp, Artificial Sequence
  ENSG00000174099_15 (sequence is synthesized)
cctgtccatcgcctttttataagtccttctctccacacctaaaagcagctgcagctggaagggcacaaattccactgtgtaaaataaaatattaggggcaacacacttcatcaaggcagc

SEQ ID NO: 597506 - DNA, 120 bp, Artificial Sequence
  ENSG00000174099_16 (sequence is synthesized)
gtaacaaacagaatccaagtggggtggcccttgtgcacagagctccaggtgacctctggagagacatgggcattcacatggaaagctaaaacggaagctcaagtttcatactcaacataa

SEQ ID NO: 597507 - DNA, 120 bp, Artificial Sequence
  ENSG00000174099_17 (sequence is synthesized)
tcttctgtgtgacaaaggacaagccatgtagcctctctgtgcctatttcttcatgcataaactgggactcataatatttgtaaaatgtattgatactctcagggcaaattcactatattg

SEQ ID NO: 597508 - DNA, 120 bp, Artificial Sequence
  ENSG00000174099_18 (sequence is synthesized)
ctatacagttgagatcagtgttgtaaaattaaactgatctggttctaattgcctcaaaggccaaagcccaggcatttgaaatggaaagaagcagagaggaggctgacttagctgattggt

SEQ ID NO: 597509 - DNA, 120 bp, Artificial Sequence
  ENSG00000174099_19 (sequence is synthesized)
atggaaacagttgggccaagagccagaatttccctttgtagcaacacggctagttttactttgagaagctctgctcagctgctttataacattaagtctggcggaatggatgtcactgtg

SEQ ID NO: 597510 - DNA, 120 bp, Artificial Sequence
  ENSG00000174099_20 (sequence is synthesized)
cacaataaagttttcacaagtataaacaatggtgatgtaagtcaacattgctgtagccaggtgtgaaggttgtatggtgtgtgacgaatgtacatcatgtttgtaggtttggatgctaat

SEQ ID NO: 597511 - DNA, 120 bp, Artificial Sequence
  ENSG00000174099_21 (sequence is synthesized)
cttgaattgtagtttaaaaaatacgtatttttgtaactctttgaaagtttatgaagactgacagctttccttgtaagcactaagagaaaaaaaagaaagagggacatttgacaattttaa

SEQ ID NO: 597512 - DNA, 120 bp, Artificial Sequence
  ENSG00000174099_22 (sequence is synthesized)
agaaacaacaagaaattagaatgaaaatctgtgacaaacagcgtcagtgtggccatgtccacattcctacatgtctctctctacaagcacctctctaagaagcctgacatcccggtggac

SEQ ID NO: 597513 - DNA, 120 bp, Artificial Sequence
  ENSG00000174099_23 (sequence is synthesized)
tctttatagtcatgtacacttgattccagatgagctctggtcttatctggatgctcagataagaggtttctatctgagcatccagatgttccctcaggttccaagacatttcaccccagg

SEQ ID NO: 597514 - DNA, 120 bp, Artificial Sequence
  ENSG00000174099_24 (sequence is synthesized)
ccctgggttcactctggaattcgtaggcttcacgtctctctagaaatgacgtgtaaaatttaagaccagacctcagccatcagcgtccagaccatcctagaagtctttcccaatctcaca

SEQ ID NO: 597515 - DNA, 120 bp, Artificial Sequence
  ENSG00000174099_25 (sequence is synthesized)
gagaaagccctagtatttcccagtgaccccaggattccacgttggggtggccaaagaaataggtctctcagggctttgccacagcctccagcccatccttcagaggcacacacagcacct

SEQ ID NO: 597516 - DNA, 120 bp, Artificial Sequence
  ENSG00000174099_26 (sequence is synthesized)
ctcggctgctccagctctgtaggatagcctcccctggggtccgtgggacgcgggccacagtgttgaggtagacaaggaggatcagtgagaggcctcttccctctccacagagactggatt

SEQ ID NO: 597517 - DNA, 120 bp, Artificial Sequence
  ENSG00000174099_27 (sequence is synthesized)
gtcattgttccttcatttatatcgtagggcttaacatttcactcaaaaaaaagcccctctttttctaatccttagtctttgtttcaaggaaagccagtttttcttctaccacattttcca

SEQ ID NO: 597518 - DNA, 120 bp, Artificial Sequence
  ENSG00000174099_28 (sequence is synthesized)
ggatcgactttaagaaaaatgcaacatctattgaaaaaaagtggggtgtatgcatgtggtttaattccagattgcttttgggtttaagtggtatcaaatttcagtatatttctgtcttat

SEQ ID NO: 597519 - DNA, 120 bp, Artificial Sequence
  ENSG00000174099_29 (sequence is synthesized)
gtgaaagaaatatattactaaaacgtcagtgagcaataatgtcagctgtcaagcactagatttatttttgcaggatatggagtgcaatgaactgagtcaatatggcaaggtgtatgtgat

SEQ ID NO: 597520 - DNA, 120 bp, Artificial Sequence
  ENSG00000174099_30 (sequence is synthesized)
ctgtgggagttatgccatttaacataggaagtgcatgggactttccctctctgcactccagctcttactgtaccattagaagatgcagaattctgttggtgtgcaaaaagtatagcctta

SEQ ID NO: 597521 - DNA, 120 bp, Artificial Sequence
  ENSG00000174099_31 (sequence is synthesized)
cattcaagcagaatggatctgaagaaagcagcaatatctgttactagagaacattcccatgtgtttaaactcttcacttcttagatgcatttaaattcttaatgcaaatgacgtagcaat

SEQ ID NO: 597522 - DNA, 120 bp, Artificial Sequence
  ENSG00000174099_32 (sequence is synthesized)
ttgaaaacttctccgtattacttgtgtttaaaatgtcttgctttaaatacaaaacaaatggtaaaggggattatcttttgtttagatggttaaatattatttttgccttagatagctttg

SEQ ID NO: 597523 - DNA, 120 bp, Artificial Sequence
  ENSG00000174099_33 (sequence is synthesized)
taataatttttctccagacagttcaacacttttgaaaaatgacatgaattttcattaaaaacccttttcctatgtttattgtatacaagaattatgcaataaaatttctttataaaaata

SEQ ID NO: 597524 - DNA, 120 bp, Artificial Sequence
  ENSG00000174099_34 (sequence is synthesized)
tgcttctcgttttgttggtgaagatatcacagtgatgtctgcattcaacctgctgcatttggtgacaaagagccagccagtagcccttcgagcctgtgggcttccctcagggtcgtgtag

SEQ ID NO: 597525 - DNA, 120 bp, Artificial Sequence
  ENSG00000174099_35 (sequence is synthesized)
tccgagtgacatcactgcctctcttcctgtgcgctggctttgacataagccagatggccaccgtggttggtaggcgcccaggctgcctggtacaggagttgatgaaacagaataggaaga

SEQ ID NO: 597526 - DNA, 120 bp, Artificial Sequence
  ENSG00000174099_36 (sequence is synthesized)
acgttagggtgtgaccccgagccgggattccattctgcgcctgctgcgccccctcggccacctgcggggacagcccctgcctcagccgagaaggggagcagaagggttgcgccccgcgcc

SEQ ID NO: 597527 - DNA, 120 bp, Artificial Sequence
  ENSG00000174099_37 (sequence is synthesized)
acccgccgaagggaggcgtctggcagcctcactgacaccttatcctgtcccgggagcgaacctgaacccgcgggagcctctcgccccgcgcgggcccaggagagagggatctggcggggc

SEQ ID NO: 597528 - DNA, 120 bp, Artificial Sequence
  ENSG00000174099_38 (sequence is synthesized)
agcccgcgggaggcaggggaggggtccatcccggagccctctgctctgtgcgtcgaccctgccggggttgccgctcagataacgggcccgaggcgtgggaaccggcccgccaggcctgcg

SEQ ID NO: 597529 - DNA, 80 bp, Artificial Sequence
  ENSG00000174099_39 (sequence is synthesized)
cttttcgccgcgcgcctcggagaggacgggggtgcggggcggcgggcaggcggcagggaggggcgcacccgggagcgcac

SEQ ID NO: 597530 - DNA, 120 bp, Artificial Sequence
  ENSG00000174099_40 (sequence is synthesized)
gcacagggtggaaacaagctgctctcagcaagaaggacctcaccagatgctgcccctcaatcttggatttcctggcctccagaactgtgagccaataaatttctattcattctgaattaa

SEQ ID NO: 597531 - DNA, 120 bp, Artificial Sequence
  ENSG00000174099_41 (sequence is synthesized)
caaaatgaactgagacaggtgtgctcactcagtgaaaatgttttgaactgcatgcttatgcttatgaattgttaacttctctgcgtgcatgttacatttcaataaaaaaagtttactcag

SEQ ID NO: 597532 - DNA, 120 bp, Artificial Sequence
  ENSG00000174099_42 (sequence is synthesized)
ttgatgaagaaagagattagacactgatctgtatttactagtttgtttctaccaccaacttgctttctggccccaggaatctttgttttgtaccttttattcctattctgcatctgtaaa

SEQ ID NO: 597533 - DNA, 120 bp, Artificial Sequence
  ENSG00000174099_43 (sequence is synthesized)
ctgagaattttgtaacattcttgtcaaatcttttataaaagatatgaccttcaggtgagggttattgtattatattatattatattacatattagctgacattttccaaaagtttgttct

SEQ ID NO: 597534 - DNA, 120 bp, Artificial Sequence
  ENSG00000174099_44 (sequence is synthesized)
ggcctccagaactagatggaatctcactatgttacccaggctggagtgcagtggctgtatacaagcacaatcataatgtactgcagccctcaactcctgggcttatgtgatcctcctgac

SEQ ID NO: 597535 - DNA, 120 bp, Artificial Sequence
  ENSG00000174099_45 (sequence is synthesized)
agctgggattacaggtgtgtgccactgcacctggcttaagaaaattgcttttaaaaagattttcaaaaagttagataaaaactcagcttttctcaaataagtatgatttaaaactttatt

SEQ ID NO: 597536 - DNA, 120 bp, Artificial Sequence
  ENSG00000174099_46 (sequence is synthesized)
tacattttgatgaaaaagtccaaattttctagatgttgaacatgattttacttatattttaatccttcatatcattactatcaattgaacacagattttacttaaaggtaaagaccatca

SEQ ID NO: 597537 - DNA, 120 bp, Artificial Sequence
  ENSG00000174099_47 (sequence is synthesized)
attttatgaaattcatacataataaattatgaattatgtatgttttcattttattatgcaccttaaaatcattggccaccaatagaatacccatacctgaccaataacaaaaaaatttac

SEQ ID NO: 597538 - DNA, 120 bp, Artificial Sequence
  ENSG00000174099_48 (sequence is synthesized)
tcttttgctattgtactgacttttcatcataaaaaaatatatttacccatattttaaaattttgttcttatgaagcaatatttgtcaaatgttatggaaataaatttgtgaaacagaaaa

SEQ ID NO: 597539 - DNA, 120 bp, Artificial Sequence
  ENSG00000174099_49 (sequence is synthesized)
ttcttttacttgggccctaatttgaagacggaaattggttataaatcaccactctactttgagtaacattcatttccacaatccttacaacccttggaacattgtccagtttccttgccc

SEQ ID NO: 597540 - DNA, 120 bp, Artificial Sequence
  ENSG00000174099_50 (sequence is synthesized)
agtgtataattgtcactaatatttcatatcttcttgttctttaatgcacactacacatctgcaaatcataacgttcataagaggctggcagtctgagtaagaaactgccccaaatcacac

SEQ ID NO: 597541 - DNA, 120 bp, Artificial Sequence
  ENSG00000174099_51 (sequence is synthesized)
acttttcctatgggatgcacagggtggaaacaagctgctctcaggtgagttcatcctttctgaaaacccaatacattgctttcaggactcctggttgtgctaaatatagcaactaaggcc

SEQ ID NO: 597542 - DNA, 120 bp, Artificial Sequence
  ENSG00000174099_52 (sequence is synthesized)
aagcgactggtcacaagaaggacagacaagcatgacgaagtttatatgaagtccgatggatgcctatgttcaggtgtttagcaagtctagtggaatgttaaggtcggcatgatagctcaa

SEQ ID NO: 597543 - DNA, 120 bp, Artificial Sequence
  ENSG00000174099_53 (sequence is synthesized)
gcctgtaatcccatactttgagagggccaagtggggaggatcacttgaggccagaagttcaagacgagtccgggcaacctagtgagacctcgtctctacagaaaatattttaaaacttag

SEQ ID NO: 597544 - DNA, 120 bp, Artificial Sequence
  ENSG00000174099_54 (sequence is synthesized)
tctctacagaaaatattttaaaacttagcagggcatggtagcatatgcctgtagttctagctactcaggggggctgaagcaggagaatcactggagcccaggaggtcgaggctgcagtga

SEQ ID NO: 597545 - DNA, 120 bp, Artificial Sequence
  ENSG00000174099_55 (sequence is synthesized)
gaacagtgtaaggattggtatacacagtagttttcagaacaaaggttcatcagtgaaagggaggcatgctgcttgttggaatagagactggagatctattaggtcagaaaccaaatttga

SEQ ID NO: 597546 - DNA, 120 bp, Artificial Sequence
  ENSG00000174106_0 (sequence is synthesized)
accctggagagaaaatggcggcggcagcagcttcggcgcctcagcagctctcggatgaggagcttttctctcagctccgccgttacggcctgtctcccggaccagtgacggagagcaccc

SEQ ID NO: 597547 - DNA, 120 bp, Artificial Sequence
  ENSG00000174106_1 (sequence is synthesized)
gcccggtctacctcaagaagctgaagaagcttcgagaggaagagcagcaacagcaccggtcagggggccgcggcaacaagacgcggaacagtaataacaataacacggcagccgccacgg

SEQ ID NO: 597548 - DNA, 120 bp, Artificial Sequence
  ENSG00000174106_2 (sequence is synthesized)
tcgcagccgcgggaccagcggcggcggcggccgcggggatgggggtccggccggtctcgggcgacctctcctacttacggactcctgggggcctgtgccgaatctcggcctctggcccag

SEQ ID NO: 597549 - DNA, 120 bp, Artificial Sequence
  ENSG00000174106_3 (sequence is synthesized)
agagcctcctgggagggcccgggggcgcctccgccgcccccgcggctggcagcaaagtgctgctgggcttcagctcggacgagtcggacgtggaggccagtccccgggaccaggccggcg

SEQ ID NO: 597550 - DNA, 120 bp, Artificial Sequence
  ENSG00000174106_4 (sequence is synthesized)
gcggcgggaggaaagaccgggcttcgctccagtaccgcgggctcaaagcgccgccggcgcccctggccgccagcgaggtgactaacagcaactctgcagagcgaaggaagccccactcgt

SEQ ID NO: 597551 - DNA, 120 bp, Artificial Sequence
  ENSG00000174106_5 (sequence is synthesized)
ggtggggggccaggaggccggcgggccccgagctgcagaccccgccggggaaagatggagcagtggaggacgaggaaggggagggagaggacggtgaggagagggacccggagaccgagg

SEQ ID NO: 597552 - DNA, 120 bp, Artificial Sequence
  ENSG00000174106_6 (sequence is synthesized)
agccgctctgggcgagccggaccgtgaatggcagccggcttgtcccctacagctgccgggaaaactattcggactcagaggaagaggacgacgacgacgtggcctccagcagacaggtat

SEQ ID NO: 597553 - DNA, 120 bp, Artificial Sequence
  ENSG00000174106_7 (sequence is synthesized)
taaaggacgactccctttcccggcatcggcccagacgaacccatagtaagcctctccccccgctgactgctaaatcggccggcggcaggctggagacttcagttcagggagggggaggac

SEQ ID NO: 597554 - DNA, 120 bp, Artificial Sequence
  ENSG00000174106_8 (sequence is synthesized)
tcgcgatgaatgacagggcggcggctgccgggagtctagacaggagccgaaacctcgaagaggcggcggccgcggagcagggaggagggtgtgatcaagtggactccagccccgttccta

SEQ ID NO: 597555 - DNA, 120 bp, Artificial Sequence
  ENSG00000174106_9 (sequence is synthesized)
gataccgtgttaacgctaagaaactgacccctctcctgcccccgccacttactgacatggactcaaccttggattcgtcaacaggctcccttctgaaaaccaataatcatattggcggtg

SEQ ID NO: 597556 - DNA, 120 bp, Artificial Sequence
  ENSG00000174106_10 (sequence is synthesized)
gggccttcagtgtggactcccccaggatttattctaacagtctccctcccagtgcggcggtggccgcctctagttcactcaggatcaatcacgccaatcatacgggctccaatcatacct

SEQ ID NO: 597557 - DNA, 120 bp, Artificial Sequence
  ENSG00000174106_11 (sequence is synthesized)
acctgaaaaacacatacaacaaaccgaagctttccgaacccgaagaggaacttctccagcaatttaaacgggaggaggtgtccccaacagggagtttcagtgcccactacttgtcgatgt

SEQ ID NO: 597558 - DNA, 120 bp, Artificial Sequence
  ENSG00000174106_12 (sequence is synthesized)
ttctcttaactgctgcctgcttatttttcctaatactgggactgacttacctaggaatgagagggacaggagtatctgaggatggagaactcagcatagaaaacccctttggtgaaacat

SEQ ID NO: 597559 - DNA, 120 bp, Artificial Sequence
  ENSG00000174106_13 (sequence is synthesized)
ttggaaaaatacaagaaagtgaaaaaactcttatgatgaacacattatataagcttcatgatcgattggcacagcttgcaggagatcatgaatgtggcagttctagtcaaagaacgcttt

SEQ ID NO: 597560 - DNA, 120 bp, Artificial Sequence
  ENSG00000174106_14 (sequence is synthesized)
ctgttcaagaggcagctgcgtatttaaaagatttaggtcctgaatatgaaggtatatttaacacttcattgcagtggatcttagaaaatggaaaagatgttggaataaggtgtgttggtt

SEQ ID NO: 597561 - DNA, 120 bp, Artificial Sequence
  ENSG00000174106_15 (sequence is synthesized)
ttggccctgaggaagaattgacaaatataactgatgtgcagtttttacagtccacaagaccactgatgtctttttggtgtcgttttcgacgtgcttttgttactgtaactcacagattat

SEQ ID NO: 597562 - DNA, 120 bp, Artificial Sequence
  ENSG00000174106_16 (sequence is synthesized)
tgttgttatgcttaggtgtagtgatggtttgtgtcgttctgcgttacatgaaatatcgatggacaaaagaagaggaggaaacaaggcagatgtatgatatggtggtaaagattatagatg

SEQ ID NO: 597563 - DNA, 120 bp, Artificial Sequence
  ENSG00000174106_17 (sequence is synthesized)
ttttacgaagtcataatgaagcctgccaggaaaacaaagatttacaaccttacatgcctattccacatgtacgcgattccttaatacagcctcatgacaggaaaaaaatgaagaaagtct

SEQ ID NO: 597564 - DNA, 120 bp, Artificial Sequence
  ENSG00000174106_18 (sequence is synthesized)
gggatagagctgttgacttccttgctgctaatgagtctagagttcgcacggaaacacgaagaataggtggtgcagattttctggtttggcggtggatccagccttctgcatcctgtgaca

SEQ ID NO: 597565 - DNA, 120 bp, Artificial Sequence
  ENSG00000174106_19 (sequence is synthesized)
gaatatgtttgatcccgttatggaaataggggatcagtggcatttggcaattcaagaagcaattttagaaaaatgcagtgataatgatggcattgttcacattgcagtagacaaaaattc

SEQ ID NO: 597566 - DNA, 120 bp, Artificial Sequence
  ENSG00000174106_20 (sequence is synthesized)
acgtgagggttgtgtatatgttaaatgtctgtctccagaatatgctggaaaggcttttaaagcattgcatggctcttggtttgatgggaaattggttacagtaaaatatttacgactaga

SEQ ID NO: 597567 - DNA, 120 bp, Artificial Sequence
  ENSG00000174106_21 (sequence is synthesized)
tagataccaccatcgctttccccaggctctcacttccaacactccattgaagccatcaaataaacatatgaactccatgtctcatcttcgtcttcggactggcctaaccaattctcaagg

SEQ ID NO: 597568 - DNA, 120 bp, Artificial Sequence
  ENSG00000174106_22 (sequence is synthesized)
aagttcctgaaaagattttcttccatttctaagactgttatttacaataggaaaattcctgtttggctttttgtcttcctttttaaatgctttttgtatgtaatatttttattgatgaat

SEQ ID NO: 597569 - DNA, 120 bp, Artificial Sequence
  ENSG00000174106_23 (sequence is synthesized)
acatctctgaacgttccagaagtcttaaggttccaaagggatttagcagtgaggcagcaatgctgagtaggtaggataattatttcattcagtttttggagctcagttaagccaatacat

SEQ ID NO: 597570 - DNA, 120 bp, Artificial Sequence
  ENSG00000174106_24 (sequence is synthesized)
ttaaagttttgcatgaggaacactgactttattaagcattttcagatgtggtggttgtatttttgccccaagaagtgtttggataaccacacaaaagcatgatgaaaaggcttcttgtag

SEQ ID NO: 597571 - DNA, 120 bp, Artificial Sequence
  ENSG00000174106_25 (sequence is synthesized)
tcccataatttcttgtgaactaatgttgtgaatttttgtatacagtcacctgcatagttcctacaggctaatgtggtaaaactgttgatttcccaatttaaccttaggtttctgttgctt

SEQ ID NO: 597572 - DNA, 120 bp, Artificial Sequence
  ENSG00000174106_26 (sequence is synthesized)
ataagcgattcatttgctacggctggaatatgggaaaattaatttgggcttagtggttacaaatatgtgtaagtggatgtatatgtacttaaactggctttgtatatatgtataaatgct

SEQ ID NO: 597573 - DNA, 120 bp, Artificial Sequence
  ENSG00000174106_27 (sequence is synthesized)
ggtggtggtgaaagtagtcttgttttatgaggatgtctgcattaaagcagtaaaataagctttccattttattcataatctaatgtgtgtgtatatatgtatgtgtgtatgtgtgtgtat

SEQ ID NO: 597574 - DNA, 120 bp, Artificial Sequence
  ENSG00000174106_28 (sequence is synthesized)
atatagatgtatatatatacacacacagagatatatacatatggctgtacttttgcatagatcaaacagccaaacacctggaagtattagatacaagtttaaaatatcttttataggttt

SEQ ID NO: 597575 - DNA, 120 bp, Artificial Sequence
  ENSG00000174106_29 (sequence is synthesized)
tatataaaaatgtctgagtatgattttgtgtgaaagttctgataccagttgtaatagagtcaaatttatgtgagcaataaagaagaaattggcagatattggaaaaatattttgtgaaaa

SEQ ID NO: 597576 - DNA, 120 bp, Artificial Sequence
  ENSG00000174106_30 (sequence is synthesized)
gctgtatttattataaatactagggccatgacatagtaccattggggttaagtcattttcccaatctatttataatttaatgatatgttagtgcctctgttatatgtcaagtttaaagca

SEQ ID NO: 597577 - DNA, 120 bp, Artificial Sequence
  ENSG00000174106_31 (sequence is synthesized)
gggcacattgttgcagcaaaatgtgtatttgacaaattatacttgcaattttgggtcatgaaagtttgcaatatagtaaatgcacgattgactgttgctttgtgcctcagtatttaattt

SEQ ID NO: 597578 - DNA, 120 bp, Artificial Sequence
  ENSG00000174106_32 (sequence is synthesized)
gtttcagtaaacttactttattactgtttatgatttcagataaaaatagttgctgagtaaattttacttgtaatctacaattggctttttaaaaataacctgttgatatataattgtcag

SEQ ID NO: 597579 - DNA, 120 bp, Artificial Sequence
  ENSG00000174106_33 (sequence is synthesized)
tccaaatgaatatgtgaaacagctggaattgtacaaattttggttgtatttaaagctcagtttcctttttgttttattgtatgcgttgggtttgcagcatgaacttgcacagataatgca

SEQ ID NO: 597580 - DNA, 120 bp, Artificial Sequence
  ENSG00000174106_34 (sequence is synthesized)
cgttttctggttaagtaaacatgatgcacactattctgtaacagaaagccctattgtgccttacctgtgtgcttttgtgggcaccttgtttatgaagaataaaaaatgatttgttatctg

SEQ ID NO: 597581 - DNA, 120 bp, Artificial Sequence
  ENSG00000174106_35 (sequence is synthesized)
aagagaataaattttaaattctcagtttatgtctcagatgctaacgtgtgaaaatataaatatatataatatataaagtaaccagtcttcctgtattttatgtgcatcatagtgatttat

SEQ ID NO: 597582 - DNA, 120 bp, Artificial Sequence
  ENSG00000174106_36 (sequence is synthesized)
ctgagcttagtgacccccatcttgtaacctgttgcaagagtgaatgtaaaaaatagttgtggcattttaaaaggtcgcctttgatgcagatgcatctttttcttgcttctaaaacatatt

SEQ ID NO: 597583 - DNA, 120 bp, Artificial Sequence
  ENSG00000174106_37 (sequence is synthesized)
tcatgtaaacattgtacatttattattgtaatatatactattatgcagcttattttacctgaaactgttaagccgaccaagatccctccctgcaagacagatgggaatgtgtataataac

SEQ ID NO: 597584 - DNA, 120 bp, Artificial Sequence
  ENSG00000174106_38 (sequence is synthesized)
taggtatttgagaagttctgaagtttgatgtaatctgttacttgtcctgttaaaaaaaggaaaaaattctaattaaaaatttattagtttttttttatgtgtcttggctttttaaaaaca

SEQ ID NO: 597585 - DNA, 120 bp, Artificial Sequence
  ENSG00000174106_39 (sequence is synthesized)
atcgtatgtggttttaaaactataccaattctagtaatatatatatgttgtaagagacagtgaagaatttttaccgagtaggaatatggttgttgatttttgttttcattaacttttagg

SEQ ID NO: 597586 - DNA, 120 bp, Artificial Sequence
  ENSG00000174106_40 (sequence is synthesized)
tgagccaccgcgcctggccagcgctctgcactcttttactggaaagtgggaggagggctgagacttctgaattgtaatttttaaatctacctcctgttagtcaacaagcatttacttaat

SEQ ID NO: 597587 - DNA, 120 bp, Artificial Sequence
  ENSG00000174106_41 (sequence is synthesized)
ttaagtactaactttattattaatgaagcttttaaagtaaaaactaaaatgcaactttttgaaaataaaagataattccatatcctgaagcagcatcttgaccctagcaacacataaagc

SEQ ID NO: 597588 - DNA, 120 bp, Artificial Sequence
  ENSG00000174106_42 (sequence is synthesized)
cagtggagcttttggggaaaaaaaatacagatgtttgtgctctagctctggaaattgaaactcagaaaatctgagatgagatataggcatctaaatcttctttgaacaaactccatgagt

SEQ ID NO: 597589 - DNA, 120 bp, Artificial Sequence
  ENSG00000174109_0 (sequence is synthesized)
gtcagtcgaggagtcaaggcagcaatgaatcgtgtcttgtgtgccccggcggccggggccgtccgggcgctgaggctcataggctgggcttcccgaagccttcatccgttgcccggttcc

SEQ ID NO: 597590 - DNA, 120 bp, Artificial Sequence
  ENSG00000174109_1 (sequence is synthesized)
cgggatcgggcccaccctgccgccgaggaagaggacgaccctgaccgccccattgagttttcctccagcaaagccaaccctcaccgctggtcggtgggccataccatgggaaagggacat

SEQ ID NO: 597591 - DNA, 120 bp, Artificial Sequence
  ENSG00000174109_2 (sequence is synthesized)
cagcggccctggtggaaggtgctgcccctcagctgcttcctcgtggcgctgatcatctggtgctacctgagggaggagagcgaggcggaccagtggttgagacaggtgtggggagaggtg

SEQ ID NO: 597592 - DNA, 120 bp, Artificial Sequence
  ENSG00000174109_3 (sequence is synthesized)
gggctggcaggaagggagccgacagccgcccttcggatttgatgtcacgtttgcccgtgactgtcctggctatgcgtgcgtcctcagcactgaaggacttggctggtggatggggcactt

SEQ ID NO: 597593 - DNA, 120 bp, Artificial Sequence
  ENSG00000174109_4 (sequence is synthesized)
ggctatgctgattcgcgtgaaggcggagcagaatctcagcagatcggaaactgctcctcgcctggctcttgatgtccaaggattccatcggcaagacttctcagatccttggggaaggtt

SEQ ID NO: 597594 - DNA, 120 bp, Artificial Sequence
  ENSG00000174109_5 (sequence is synthesized)
tcagttgcactgtatgctgttggatttgccaagtctttgtataacataatcatgtttccaaagcacttctggtgacacttgtcatccagtgttagtttgcaggtaatttgctttctgaga

SEQ ID NO: 597595 - DNA, 120 bp, Artificial Sequence
  ENSG00000174109_6 (sequence is synthesized)
tagaatatctggcagaagtgtgaaactgtattgcatgctgcggcctgtgcaaggaacacttccacatgtgagttttacacaacaacaaatgaaaataaattttaattttataatatggga

SEQ ID NO: 597596 - DNA, 120 bp, Artificial Sequence
  ENSG00000174109_7 (sequence is synthesized)
cgccaaggcgtcagtcgaggagtcaaggcagcaatgaatcgtgtcttgtgtgccccggcggccgggtgagctcctcaaggtctcggagggccgagggcagacaccggcgggcgggcggag

SEQ ID NO: 597597 - DNA, 120 bp, Artificial Sequence
  ENSG00000174123_0 (sequence is synthesized)
agccaattctgaccgtgtcaacgaatcatccacgcacctgcagctctgctgagagagtgcaagccgtgggaattcagcagctgaatatcaagacctttgaattcaacaagaagttaagac

SEQ ID NO: 597598 - DNA, 120 bp, Artificial Sequence
  ENSG00000174123_1 (sequence is synthesized)
atttatagttgtctaacaacagactgaagattgtggcttggtattcactggcaggtttcagacatttagatctttcttttaatgactaacaccatgcctatctgtggagaagctggcaac

SEQ ID NO: 597599 - DNA, 120 bp, Artificial Sequence
  ENSG00000174123_2 (sequence is synthesized)
atgtcacacctggaaattgtttttcaacattaatactattatttggcagtaatccagattgcttttgccaccaacctgaagacatatagaggcagaaggacaggaataattctatttgtt

SEQ ID NO: 597600 - DNA, 120 bp, Artificial Sequence
  ENSG00000174123_3 (sequence is synthesized)
tcctgttttgaaacttccatctgtaaggctatcaaaaggagatgtgagagagggtattgagtctggcctgacaatgcagttcttaaaccaaaggtccattatgcttctcctctctgagaa

SEQ ID NO: 597601 - DNA, 120 bp, Artificial Sequence
  ENSG00000174123_4 (sequence is synthesized)
tcctgacttacctcaacaacggagacatggcacagtagccagcttggagacttctcagccaatgctctgagatcaagtcgaagacccaatatacagggttttgagctcatcttcatcatt

SEQ ID NO: 597602 - DNA, 120 bp, Artificial Sequence
  ENSG00000174123_5 (sequence is synthesized)
catatgaggaaataagtggtaaaatccttggaaatacaatgagactcatcagaaacatttacatattttgtagtattgttatgacagcagagggtgatgctccagagctgccagaagaaa

SEQ ID NO: 597603 - DNA, 120 bp, Artificial Sequence
  ENSG00000174123_6 (sequence is synthesized)
gggaactgatgaccaactgctccaacatgtctctaagaaaggttcccgcagacttgaccccagccacaacgacactggatttatcctataacctcctttttcaactccagagttcagatt

SEQ ID NO: 597604 - DNA, 120 bp, Artificial Sequence
  ENSG00000174123_7 (sequence is synthesized)
ttcattctgtctccaaactgagagttttgattctatgccataacagaattcaacagctggatctcaaaacctttgaattcaacaaggagttaagatatttagatttgtctaataacagac

SEQ ID NO: 597605 - DNA, 120 bp, Artificial Sequence
  ENSG00000174123_8 (sequence is synthesized)
tgaagagtgtaacttggtatttactggcaggtctcaggtatttagatctttcttttaatgactttgacaccatgcctatctgtgaggaagctggcaacatgtcacacctggaaatcctag

SEQ ID NO: 597606 - DNA, 120 bp, Artificial Sequence
  ENSG00000174123_9 (sequence is synthesized)
gtttgagtggggcaaaaatacaaaaatcagatttccagaaaattgctcatctgcatctaaatactgtcttcttaggattcagaactcttcctcattatgaagaaggtagcctgcccatct

SEQ ID NO: 597607 - DNA, 120 bp, Artificial Sequence
  ENSG00000174123_10 (sequence is synthesized)
taaacacaacaaaactgcacattgttttaccaatggacacaaatttctgggttcttttgcgtgatggaatcaagacttcaaaaatattagaaatgacaaatatagatggcaaaagccaat

SEQ ID NO: 597608 - DNA, 120 bp, Artificial Sequence
  ENSG00000174123_11 (sequence is synthesized)
ttgtaagttatgaaatgcaacgaaatcttagtttagaaaatgctaagacatcggttctattgcttaataaagttgatttactctgggacgaccttttccttatcttacaatttgtttggc

SEQ ID NO: 597609 - DNA, 120 bp, Artificial Sequence
  ENSG00000174123_12 (sequence is synthesized)
atacatcagtggaacactttcagatccgaaatgtgacttttggtggtaaggcttatcttgaccacaattcatttgactactcaaatactgtaatgagaactataaaattggagcatgtac

SEQ ID NO: 597610 - DNA, 120 bp, Artificial Sequence
  ENSG00000174123_13 (sequence is synthesized)
atttcagagtgttttacattcaacaggataaaatctatttgcttttgaccaaaatggacatagaaaacctgacaatatcaaatgcacaaatgccacacatgcttttcccgaattatccta

SEQ ID NO: 597611 - DNA, 120 bp, Artificial Sequence
  ENSG00000174123_14 (sequence is synthesized)
cgaaattccaatatttaaattttgccaataatatcttaacagacgagttgtttaaaagaactatccaactgcctcacttgaaaactctcattttgaatggcaataaactggagacacttt

SEQ ID NO: 597612 - DNA, 120 bp, Artificial Sequence
  ENSG00000174123_15 (sequence is synthesized)
ctttagtaagttgctttgctaacaacacacccttggaacacttggatctgagtcaaaatctattacaacataaaaatgatgaaaattgctcatggccagaaactgtggtcaatatgaatc

SEQ ID NO: 597613 - DNA, 120 bp, Artificial Sequence
  ENSG00000174123_16 (sequence is synthesized)
caggtgcttgcccaaaagtattcaaatacttgacctaaataataaccaaatccaaactgtacctaaagagactattcatctgatggccttacgagaactaaatattgcatttaattttct

SEQ ID NO: 597614 - DNA, 120 bp, Artificial Sequence
  ENSG00000174123_17 (sequence is synthesized)
aactgatctccctggatgcagtcatttcagtagactttcagttctgaacattgaaatgaacttcattctcagcccatctctggattttgttcagagctgccaggaagttaaaactctaaa

SEQ ID NO: 597615 - DNA, 120 bp, Artificial Sequence
  ENSG00000174123_18 (sequence is synthesized)
tgcgggaagaaatccattccggtgtacctgtgaattaaaaaatttcattcagcttgaaacatattcagaggtcatgatggttggatggtcagattcatacacctgtgaataccctttaaa

SEQ ID NO: 597616 - DNA, 120 bp, Artificial Sequence
  ENSG00000174123_19 (sequence is synthesized)
cctaaggggaactaggttaaaagacgttcatctccacgaattatcttgcaacacagctctgttgattgtcaccattgtggttattatgctagttctggggttggctgtggccttctgctg

SEQ ID NO: 597617 - DNA, 120 bp, Artificial Sequence
  ENSG00000174123_20 (sequence is synthesized)
tctccactttgatctgccctggtatctcaggatgctaggtcaatgcacacaaacatggcacagggttaggaaaacaacccaagaacaactcaagagaaatgtccgattccacgcatttat

SEQ ID NO: 597618 - DNA, 120 bp, Artificial Sequence
  ENSG00000174123_21 (sequence is synthesized)
ttcatacagtgaacatgattctctgtgggtgaagaatgaattgatccccaatctagagaaggaagatggttctatcttgatttgcctttatgaaagctactttgaccctggcaaaagcat

SEQ ID NO: 597619 - DNA, 120 bp, Artificial Sequence
  ENSG00000174123_22 (sequence is synthesized)
tagtgaaaatattgtaagcttcattgagaaaagctataagtccatctttgttttgtctcccaactttgtccagaatgagtggtgccattatgaattctactttgcccaccacaatctctt

SEQ ID NO: 597620 - DNA, 120 bp, Artificial Sequence
  ENSG00000174123_23 (sequence is synthesized)
ccatgaaaattctgatcatataattcttatcttactggaacccattccattctattgcattcccaccaggtatcataaactgaaagctctcctggaaaaaaaagcatacttggaatggcc

SEQ ID NO: 597621 - DNA, 120 bp, Artificial Sequence
  ENSG00000174123_24 (sequence is synthesized)
caaggataggcgtaaatgtgggcttttctgggcaaaccttcgagctgctattaatgttaatgtattagccaccagagaaatgtatgaactgcagacattcacagagttaaatgaagagtc

SEQ ID NO: 597622 - DNA, 120 bp, Artificial Sequence
  ENSG00000174123_25 (sequence is synthesized)
tcgaggttctacaatctctctgatgagaacagattgtctataaaatcccacagtccttgggaagttggggaccacatacactgttgggatgtacattgatacaacctttatgatggcaat

SEQ ID NO: 597623 - DNA, 120 bp, Artificial Sequence
  ENSG00000174123_26 (sequence is synthesized)
ttgacaatatttattaaaataaaaaatggttattcccttcatatcagtttctagaaggatttctaagaatgtatcctatagaaacaccttcacaagtttataagggcttatggaaaaagg

SEQ ID NO: 597624 - DNA, 90 bp, Artificial Sequence
  ENSG00000174123_27 (sequence is synthesized)
gaaacaccttcacaagtttataagggcttatggaaaaaggtgttcatcccaggattgtttataatcatgaaaaatgtggccaggtatggg

SEQ ID NO: 597625 - DNA, 120 bp, Artificial Sequence
  ENSG00000174123_28 (sequence is synthesized)
tggccacaaaataaggtctaattcaataaattatagtacattaatgtaatataatattacatgccactaaaaagaataaggtagctgtatatttcctggtatggaaaaaacatattaata

SEQ ID NO: 597626 - DNA, 120 bp, Artificial Sequence
  ENSG00000174123_29 (sequence is synthesized)
tgttataaactattaggttggtgcaaaactaattgtggtttttgccattgaaatggcattgaaataaaagtgtaaagaaatctataccagatgtagtaacagtggtttgggtctgggagg

SEQ ID NO: 597627 - DNA, 120 bp, Artificial Sequence
  ENSG00000174123_30 (sequence is synthesized)
ttggattacagggagcatttgatttctatgttgtgtatttctataatgtttgaattgtttagaatgaatctgtatttcttttataagtagaaaaaaaataaagatagtttttacagccta

SEQ ID NO: 597628 - DNA, 120 bp, Artificial Sequence
  ENSG00000174123_31 (sequence is synthesized)
gcttttgccaccaacctgaagacatatagaggcagaaggacaggaataattctatttgtttcctgttttgaaacttccatctgtaaggtaagtgttgaaagtcagatattggctccaggg

SEQ ID NO: 597629 - DNA, 120 bp, Artificial Sequence
  ENSG00000174123_32 (sequence is synthesized)
actttctatatccacaaatacaaaaattgaggggtaactccttgatatcaagtcaaaggctcacaatgtctggtaataaaacaaattactttcaattttcttgaaatcttcaggctatca

SEQ ID NO: 597630 - DNA, 120 bp, Artificial Sequence
  ENSG00000174123_33 (sequence is synthesized)
agccaattctgaccgtgtcaacgaatcatccacgcacctgcagctctgctgagagagtgcaagccgtggggttttctggaatttcttcacttcaagaaaaaaaccagacttgggaaggtt

SEQ ID NO: 597631 - DNA, 120 bp, Artificial Sequence
  ENSG00000174125_0 (sequence is synthesized)
acagactgccaaatggaacagacaagcaggttgtcttgtgttaaagaaaatgagatataagtcagttactcccggaggcaatgctgctgttcagctcttctgtttttgtggccagggtct

SEQ ID NO: 597632 - DNA, 120 bp, Artificial Sequence
  ENSG00000174125_1 (sequence is synthesized)
tcatgaacactaataggggtaccaggccctcttcctcgttagaagaaatcaggataacaaaggcatattgggcacccctacaaaaggaatctgtatctgtatcaagatgatctgaagaac

SEQ ID NO: 597633 - DNA, 120 bp, Artificial Sequence
  ENSG00000174125_2 (sequence is synthesized)
agcttctacctttaggaatgtctagtgttccaaaatgactagcatcttccattttgccattatcttcatgttaatacttcagatcagaatacaattatctgaagaaagtgaatttttagt

SEQ ID NO: 597634 - DNA, 120 bp, Artificial Sequence
  ENSG00000174125_3 (sequence is synthesized)
tgataggtcaaaaaacggtctcatccacgttcctaaagacctatcccagaaaacaacaatcttaaatatatcgcaaaattatatatctgagctttggacttctgacatcttatcactgtc

SEQ ID NO: 597635 - DNA, 120 bp, Artificial Sequence
  ENSG00000174125_4 (sequence is synthesized)
aaaactgaggattttgataatttctcataatagaatccagtatcttgatatcagtgttttcaaattcaaccaggaattggaatacttggatttgtcccacaacaagttggtgaagatttc

SEQ ID NO: 597636 - DNA, 120 bp, Artificial Sequence
  ENSG00000174125_5 (sequence is synthesized)
ttgccaccctactgtgaacctcaagcacttggacctgtcatttaatgcatttgatgccctgcctatatgcaaagagtttggcaatatgtctcaactaaaatttctggggttgagcaccac

SEQ ID NO: 597637 - DNA, 120 bp, Artificial Sequence
  ENSG00000174125_6 (sequence is synthesized)
acacttagaaaaatctagtgtgctgccaattgctcatttgaatatcagcaaggtcttgctggtcttaggagagacttatggggaaaaagaagaccctgagggccttcaagactttaacac

SEQ ID NO: 597638 - DNA, 120 bp, Artificial Sequence
  ENSG00000174125_7 (sequence is synthesized)
tgagagtctgcacattgtgttccccacaaacaaagaattccattttattttggatgtgtcagtcaagactgtagcaaatctggaactatctaatatcaaatgtgtgctagaagataacaa

SEQ ID NO: 597639 - DNA, 120 bp, Artificial Sequence
  ENSG00000174125_8 (sequence is synthesized)
atgttcttacttcctaagtattctggcgaaacttcaaacaaatccaaagttatcaaatcttaccttaaacaacattgaaacaacttggaattctttcattaggatcctccagctggtttg

SEQ ID NO: 597640 - DNA, 120 bp, Artificial Sequence
  ENSG00000174125_9 (sequence is synthesized)
gcatacaactgtatggtatttctcaatttcaaacgtgaagctacagggtcagctggacttcagagattttgattattctggcacttccttgaaggccttgtctatacaccaagttgtcag

SEQ ID NO: 597641 - DNA, 120 bp, Artificial Sequence
  ENSG00000174125_10 (sequence is synthesized)
cgatgtgttcggttttccgcaaagttatatctatgaaatcttttcgaatatgaacatcaaaaatttcacagtgtctggtacacgcatggtccacatgctttgcccatccaaaattagccc

SEQ ID NO: 597642 - DNA, 120 bp, Artificial Sequence
  ENSG00000174125_11 (sequence is synthesized)
caaatgaatcaattaaaagaactttcaaaaatagctgaaatgactacacagatgaagtctctgcaacaattggatattagccagaattctgtaagctatgatgaaaagaaaggagactgt

SEQ ID NO: 597643 - DNA, 120 bp, Artificial Sequence
  ENSG00000174125_12 (sequence is synthesized)
tcttggactaaaagtttattaagtttaaatatgtcttcaaatatacttactgacactattttcagatgtttacctcccaggatcaaggtacttgatcttcacagcaataaaataaagagc

SEQ ID NO: 597644 - DNA, 120 bp, Artificial Sequence
  ENSG00000174125_13 (sequence is synthesized)
attcctaaacaagtcgtaaaactggaagctttgcaagaactcaatgttgctttcaattctttaactgaccttcctggatgtggcagctttagcagcctttctgtattgatcattgatcac

SEQ ID NO: 597645 - DNA, 120 bp, Artificial Sequence
  ENSG00000174125_14 (sequence is synthesized)
aattcagtttcccacccatcggctgatttcttccagagctgccagaagatgaggtcaataaaagcaggggacaatccattccaatgtacctgtgagctaggagaatttgtcaaaaatata

SEQ ID NO: 597646 - DNA, 120 bp, Artificial Sequence
  ENSG00000174125_15 (sequence is synthesized)
gaccaagtatcaagtgaagtgttagagggctggcctgattcttataagtgtgactacccggaaagttatagaggaaccctactaaaggactttcacatgtctgaattatcctgcaacata

SEQ ID NO: 597647 - DNA, 120 bp, Artificial Sequence
  ENSG00000174125_16 (sequence is synthesized)
actctgctgatcgtcaccatcgttgccaccatgctggtgttggctgtgactgtgacctccctctgcagctacttggatctgccctggtatctcaggatggtgtgccagtggacccagacc

SEQ ID NO: 597648 - DNA, 120 bp, Artificial Sequence
  ENSG00000174125_17 (sequence is synthesized)
cggcgcagggccaggaacatacccttagaagaactccaaagaaatctccagtttcatgcatttatttcatatagtgggcacgattctttctgggtgaagaatgaattattgccaaaccta

SEQ ID NO: 597649 - DNA, 120 bp, Artificial Sequence
  ENSG00000174125_18 (sequence is synthesized)
gagaaagaaggtatgcagatttgccttcatgagagaaactttgttcctggcaagagcattgtggaaaatatcatcacctgcattgagaagagttacaagtccatctttgttttgtctccc

SEQ ID NO: 597650 - DNA, 120 bp, Artificial Sequence
  ENSG00000174125_19 (sequence is synthesized)
aactttgtccagagtgaatggtgccattatgaactctactttgcccatcacaatctctttcatgaaggatctaatagcttaatcctgatcttgctggaacccattccgcagtactccatt

SEQ ID NO: 597651 - DNA, 120 bp, Artificial Sequence
  ENSG00000174125_20 (sequence is synthesized)
cctagcagttatcacaagctcaaaagtctcatggccaggaggacttatttggaatggcccaaggaaaagagcaaacgtggccttttttgggctaacttaagggcagccattaatattaag

SEQ ID NO: 597652 - DNA, 120 bp, Artificial Sequence
  ENSG00000174125_21 (sequence is synthesized)
ctgacagagcaagcaaagaaatagattacacatcaagtgaaaaatattcctcctgttgatattgctgcttttggaagttccaacaatgactttattttgcatcagcatagatgtaaacac

SEQ ID NO: 597653 - DNA, 120 bp, Artificial Sequence
  ENSG00000174125_22 (sequence is synthesized)
aattgtgagtgtatgatgtaggtaaaaatatataccttcgggtcgcagttcaccatttatatgtggtattaaaaattaatgaaatgatataactttgatttaaacagttctgacacataa

SEQ ID NO: 597654 - DNA, 120 bp, Artificial Sequence
  ENSG00000174125_23 (sequence is synthesized)
attactggaaaaggcaagagtagagctatcagaatgtcttccttgaacatgctgtcaacaaaccccaggatttttataaaccctatgtgaaaaacacgctaagaatctcttttcttctta

SEQ ID NO: 597655 - DNA, 120 bp, Artificial Sequence
  ENSG00000174125_24 (sequence is synthesized)
gcatatttttcacttagggtttacaaaaatatgttttgaagaaagcttgaaaagatcagtggaaaaaaattcagcaccaaattttctctgaaaatcaacttgtcaaaaaagacgtgatta

SEQ ID NO: 597656 - DNA, 120 bp, Artificial Sequence
  ENSG00000174125_25 (sequence is synthesized)
agtggatggatgaaaaggcaagaggaaaaacaaagcagccgaaacacacccagacgcacacttctgccaagcatagccaccacgtgttaaagaaaatgagatataagtcagttactcccg

SEQ ID NO: 597657 - DNA, 120 bp, Artificial Sequence
  ENSG00000174125_26 (sequence is synthesized)
ttggtgctttgctgatactaatgccctgcttgtctaatggttctaggggattttgaataagttccttgtgagaactgggtagctgtgtaatcacggctgaaagggtctctggaggtgagg

SEQ ID NO: 597658 - DNA, 120 bp, Artificial Sequence
  ENSG00000174125_27 (sequence is synthesized)
actgcacactctagagttcatcccaacacagctccctctgttctcatacgccactggaatgctgaccacaaaatggtgtcttagctagagcagtttgaatactggtacaataggcataac

SEQ ID NO: 597659 - DNA, 120 bp, Artificial Sequence
  ENSG00000174125_28 (sequence is synthesized)
aactatgtaatgtaattccagtggaattcggtaggtggcataaaacagcctttttgttttgttttgttttcaacaccaaatgtggttaacagtgaaataaattcaaggaagtgcttgaat

SEQ ID NO: 597660 - DNA, 120 bp, Artificial Sequence
  ENSG00000174125_29 (sequence is synthesized)
gttttcaacaccaaatgtggttaacagtgaaataaattcaaggaagtgcttgaatttcttacagactgccaaatggaacagacaagcaggttgtcttgaatctgtatctgtatcaagatg

SEQ ID NO: 597661 - DNA, 120 bp, Artificial Sequence
  ENSG00000174125_30 (sequence is synthesized)
aattgtatttccgttcatttacaagttattttctcttcttctgaaaaagagatcttgtggatggatgaaaaggcaagaggaaaaacaaagcagccgaaacacacccagacgcacacttct

SEQ ID NO: 597662 - DNA, 120 bp, Artificial Sequence
  ENSG00000174125_31 (sequence is synthesized)
cagagaagagctggacttcctggctgactctcacattctcttcttctgaactgcttcttctggtagctccctgtcactttggacaagctcgcactgccctccttggctgttctggaactg

SEQ ID NO: 597663 - DNA, 120 bp, Artificial Sequence
  ENSG00000174125_32 (sequence is synthesized)
tgtgatggacttcatcctactaggacacagttgcttcttgaattccccagataaacacccacccgtgtgaatgacaagccataataaaaattaattgtcaaaattaatcaacaaggtccc

SEQ ID NO: 597664 - DNA, 120 bp, Artificial Sequence
  ENSG00000174125_33 (sequence is synthesized)
aaacaagattgagagccaggggacagaagtgccaccggtaattatatagtcacaggcagacctatgaggatgttcatctttcctctaagacaacttgaagttacagacgtttcttagaac

SEQ ID NO: 597665 - DNA, 120 bp, Artificial Sequence
  ENSG00000174125_34 (sequence is synthesized)
attaggtcttgaaggaagactttaactttggatttttcaatgtgtaatgatgaagaatggaaaggccattctaaacagaaagataaagagagcaaaggaaaacagttcctcctgaggatt

SEQ ID NO: 597666 - DNA, 120 bp, Artificial Sequence
  ENSG00000174125_35 (sequence is synthesized)
tgttaaagaaatttctatgaaattagaacaaaatgacttattttgcaagagaaaaaataagtaaaagcctaactctgagaagtccacatccatctaataggtgttccagaatcagaaaaa

SEQ ID NO: 597667 - DNA, 120 bp, Artificial Sequence
  ENSG00000174130_0 (sequence is synthesized)
agaatttggactcatatcaagatgctctgaagaagaacaaccctttaggatagccactgcaacatcatgaccaaagacaaagaacctattgttaaaagcttccattttgtttgccttatg

SEQ ID NO: 597668 - DNA, 120 bp, Artificial Sequence
  ENSG00000174130_1 (sequence is synthesized)
atcataatagttggaaccagaatccagttctccgacggaaatgaatttgcagtagacaagtcaaaaagaggtcttattcatgttccaaaagacctaccgctgaaaaccaaagtcttagat

SEQ ID NO: 597669 - DNA, 120 bp, Artificial Sequence
  ENSG00000174130_2 (sequence is synthesized)
atgtctcagaactacatcgctgagcttcaggtctctgacatgagctttctatcagagttgacagttttgagactttcccataacagaatccagctacttgatttaagtgttttcaagttc

SEQ ID NO: 597670 - DNA, 120 bp, Artificial Sequence
  ENSG00000174130_3 (sequence is synthesized)
aaccaggatttagaatatttggatttatctcataatcagttgcaaaagatatcctgccatcctattgtgagtttcaggcatttagatctctcattcaatgatttcaaggccctgcccatc

SEQ ID NO: 597671 - DNA, 120 bp, Artificial Sequence
  ENSG00000174130_4 (sequence is synthesized)
tgtaaggaatttggcaacttatcacaactgaatttcttgggattgagtgctatgaagctgcaaaaattagatttgctgccaattgctcacttgcatctaagttatatccttctggattta

SEQ ID NO: 597672 - DNA, 120 bp, Artificial Sequence
  ENSG00000174130_5 (sequence is synthesized)
agaaattattatataaaagaaaatgagacagaaagtctacaaattctgaatgcaaaaacccttcaccttgtttttcacccaactagtttattcgctatccaagtgaacatatcagttaat

SEQ ID NO: 597673 - DNA, 120 bp, Artificial Sequence
  ENSG00000174130_6 (sequence is synthesized)
actttagggtgcttacaactgactaatattaaattgaatgatgacaactgtcaagttttcattaaatttttatcagaactcaccagaggttcaaccttactgaattttaccctcaaccac

SEQ ID NO: 597674 - DNA, 120 bp, Artificial Sequence
  ENSG00000174130_7 (sequence is synthesized)
atagaaacgacttggaaatgcctggtcagagtctttcaatttctttggcccaaacctgtggaatatctcaatatttacaatttaacaataattgaaagcattcgtgaagaagattttact

SEQ ID NO: 597675 - DNA, 120 bp, Artificial Sequence
  ENSG00000174130_8 (sequence is synthesized)
tattctaaaacgacattgaaagcattgacaatagaacatatcacgaaccaagtttttctgttttcacagacagctttgtacaccgtgttttctgagatgaacattatgatgttaaccatt

SEQ ID NO: 597676 - DNA, 120 bp, Artificial Sequence
  ENSG00000174130_9 (sequence is synthesized)
tcagatacaccttttatacacatgctgtgtcctcatgcaccaagcacattcaagtttttgaactttacccagaacgttttcacagatagtatttttgaaaaatgttccacgttagttaaa

SEQ ID NO: 597677 - DNA, 120 bp, Artificial Sequence
  ENSG00000174130_10 (sequence is synthesized)
ttggagacacttatcttacaaaagaatggattaaaagaccttttcaaagtaggtctcatgacgaaggatatgccttctttggaaatactggatgttagctggaattctttggaatctggt

SEQ ID NO: 597678 - DNA, 120 bp, Artificial Sequence
  ENSG00000174130_11 (sequence is synthesized)
agacataaagaaaactgcacttgggttgagagtatagtggtgttaaatttgtcttcaaatatgcttactgactctgttttcagatgtttacctcccaggatcaaggtacttgatcttcac

SEQ ID NO: 597679 - DNA, 120 bp, Artificial Sequence
  ENSG00000174130_12 (sequence is synthesized)
tcaatgttgctttcaattctttaactgaccttcctggatgtggcagctttagcagcctttctgtattgatcattgatcacaattcagtttcccacccatcggctgatttcttccagagct

SEQ ID NO: 597680 - DNA, 120 bp, Artificial Sequence
  ENSG00000174130_13 (sequence is synthesized)
gccagaagatgaggtcaataaaagcaggggacaatccattccaatgtacctgtgagctaagagaatttgtcaaaaatatagaccaagtatcaagtgaagtgttagagggctggcctgatt

SEQ ID NO: 597681 - DNA, 120 bp, Artificial Sequence
  ENSG00000174130_14 (sequence is synthesized)
cttataagtgtgactacccagaaagttatagaggaagcccactaaaggactttcacatgtctgaattatcctgcaacataactctgctgatcgtcaccatcggtgccaccatgctggtgt

SEQ ID NO: 597682 - DNA, 120 bp, Artificial Sequence
  ENSG00000174130_15 (sequence is synthesized)
tggctgtgactgtgacctccctctgcatctacttggatctgccctggtatctcaggatggtgtgccagtggacccagactcggcgcagggccaggaacatacccttagaagaactccaaa

SEQ ID NO: 597683 - DNA, 120 bp, Artificial Sequence
  ENSG00000174130_16 (sequence is synthesized)
gaaacctccagtttcatgcttttatttcatatagtgaacatgattctgcctgggtgaaaagtgaattggtaccttacctagaaaaagaagatatacagatttgtcttcatgagagaaact

SEQ ID NO: 597684 - DNA, 120 bp, Artificial Sequence
  ENSG00000174130_17 (sequence is synthesized)
ttgtccctggcaagagcattgtggaaaatatcatcaactgcattgagaagagttacaagtccatctttgttttgtctcccaactttgtccagagtgagtggtgccattacgaactctatt

SEQ ID NO: 597685 - DNA, 120 bp, Artificial Sequence
  ENSG00000174130_18 (sequence is synthesized)
ttgcccatcacaatctctttcatgaaggatctaataacttaatcctcatcttactggaacccattccacagaacagcattcccaacaagtaccacaagctgaaggctctcatgacgcagc

SEQ ID NO: 597686 - DNA, 120 bp, Artificial Sequence
  ENSG00000174130_19 (sequence is synthesized)
ggacttatttgcagtggcccaaggagaaaagcaaacgtgggctcttttgggctaacattagagccgcttttaatatgaaattaacactagtcactgaaaacaatgatgtgaaatcttaaa

SEQ ID NO: 597687 - DNA, 120 bp, Artificial Sequence
  ENSG00000174130_20 (sequence is synthesized)
aaaatttaggaaattcaacttaagaaaccattatttacttggatgatggtgaatagtacagtcgtaagtaactgtctggaggtgcctccattatcctcatgccttcaggaaagacttaac

SEQ ID NO: 597688 - DNA, 120 bp, Artificial Sequence
  ENSG00000174130_21 (sequence is synthesized)
aaaaacaatgtttcatctggggaactgagctaggcggtgaggttagcctgccagttagagacagcccagtctcttctggtttaatcattatgtttcaaattgaaacagtctcttttgagt

SEQ ID NO: 597689 - DNA, 120 bp, Artificial Sequence
  ENSG00000174130_22 (sequence is synthesized)
aaatgctcagtttttcagctcctctccactctgctttcccaaatggattctgttgtgagcaagagtttatatggcttcatggcagcaagggaacagtcaacttcagcatcatatgcacca

SEQ ID NO: 597690 - DNA, 120 bp, Artificial Sequence
  ENSG00000174130_23 (sequence is synthesized)
gtcctcggagtgccctgtgaatcatattggtctttgggtcagtgtcatcattctcttcaagtctggggcttggggaaaaaattagatcagctacggcatataaaaaagtcttttgtttca

SEQ ID NO: 597691 - DNA, 120 bp, Artificial Sequence
  ENSG00000174130_24 (sequence is synthesized)
gtaatagcttatttaattttttatcctgctacacaaatatgtaattaaccaatgaggactcatgacttgatagtgtatgtatgtaaagggatatatggacttaatcataagctgttgagg

SEQ ID NO: 597692 - DNA, 120 bp, Artificial Sequence
  ENSG00000174130_25 (sequence is synthesized)
tgaaagacgtggatccacctgctttccaagaaaactcggccaaatttatttgcagctggatattgaatgggacttttctggttgtcttagaattctggctaaaggctcaaagctgacgaa

SEQ ID NO: 597693 - DNA, 120 bp, Artificial Sequence
  ENSG00000174130_26 (sequence is synthesized)
agacagtaactgcaccaacatgatactagacacagccagtctggacttatcaaaagagcagaaagagaccaatgactcccagtccgtattatccatctctagaagactagagtcaaaagc

SEQ ID NO: 597694 - DNA, 120 bp, Artificial Sequence
  ENSG00000174130_27 (sequence is synthesized)
gtgattaaagagtcattaagcggaggttctaggccatagggagattgctttgaatttcttgcagacaagtgtgagggactcagcatggtagaaggtagcctggcatcccactccaagact

SEQ ID NO: 597695 - DNA, 120 bp, Artificial Sequence
  ENSG00000174130_28 (sequence is synthesized)
gaaagcttgcagagtaacaggagcacacaggttcagtgcagcagatgtggtgtggcttgagaattcttggaagagcttgatgagtgtttgctggagtccgagggtgggcactgggaacac

SEQ ID NO: 597696 - DNA, 120 bp, Artificial Sequence
  ENSG00000174130_29 (sequence is synthesized)
agagactggtaaatagtgtttggcaaatacaagtgcttgatgaatatttgttgaatgaatagatgagttcttcccccctggggaattcaggaggtgaaaggttggcttgagcacccaaaa

SEQ ID NO: 597697 - DNA, 120 bp, Artificial Sequence
  ENSG00000174130_30 (sequence is synthesized)
tggcaggatgagagaagagaagcactgatagcaacctgccctcccattattgacatggtaaaaggatgtgaatttcttcacatggctttgactatggaagagtagctgggcttgcattgt

SEQ ID NO: 597698 - DNA, 120 bp, Artificial Sequence
  ENSG00000174130_31 (sequence is synthesized)
catgacgggatatcagccaacagggtagcctgttgtgcaaagaaactatagcagtaagaggacacggggttaggcagaagaggggtttggggtggaggttgctgcaagaggtcagccaga

SEQ ID NO: 597699 - DNA, 120 bp, Artificial Sequence
  ENSG00000174130_32 (sequence is synthesized)
taatgtggccctgcatcatggaactgtgcaatgtggggtacactcaaggccctccaataactcacagatgtgccctatgaaaaagccagcatttggactctgccatagcagctggcagga

SEQ ID NO: 597700 - DNA, 120 bp, Artificial Sequence
  ENSG00000174130_33 (sequence is synthesized)
tcatgctggcctgtctgccttattcaatagttaactacaggaagatctgctcctctttgtgtaataccctcttcccttgcaatggcatagggacatctagaatatagagaagacagagac

SEQ ID NO: 597701 - DNA, 120 bp, Artificial Sequence
  ENSG00000174130_34 (sequence is synthesized)
aatggaggaagagtaaagaaactgactatatgccttcgtcatttcactgcaaggaaggccaagcagatttttgaatgaggtgtgagattgctgttaaattggactggcctggacatttta

SEQ ID NO: 597702 - DNA, 120 bp, Artificial Sequence
  ENSG00000174130_35 (sequence is synthesized)
atcccttaaatagaggtgcaatgactaaagtgagatttgtcactaaaatttatggtatctgcccaagattcaggagtgatgatgggaggagatccaacagaactttgttgtaaggcaatg

SEQ ID NO: 597703 - DNA, 120 bp, Artificial Sequence
  ENSG00000174130_36 (sequence is synthesized)
gttagagaaaaatgaagccctcgctttctggacttagttcattcaataaaccagtttcggccaggcacgttggctcacatctataatcccagtactgtgggaggctgaggcaggtggatc

SEQ ID NO: 597704 - DNA, 85 bp, Artificial Sequence
  ENSG00000174130_37 (sequence is synthesized)
gcaggaaaatcacttgaacctgggagacagaggctgtagtgagctgagacagcgctactgtactccccttaaaagaaaaaaaatc

SEQ ID NO: 597705 - DNA, 120 bp, Artificial Sequence
  ENSG00000174130_38 (sequence is synthesized)
aatctggtttcataatagctgtaacgaaataagccttaatgatattttattagcatcatcttctgtctgcattagcccttccttgctcttcaggagaacaacatttgttttcctccctag

SEQ ID NO: 597706 - DNA, 120 bp, Artificial Sequence
  ENSG00000174130_39 (sequence is synthesized)
gctctatcccaaacggcacattcttccacaacccctgttgaacagattttttaaactgttgcctaatctaaaaacaataaaaacaacaaacaaccacagtaacaacaacgacaaaaaaaa

SEQ ID NO: 597707 - DNA, 120 bp, Artificial Sequence
  ENSG00000174130_40 (sequence is synthesized)
ctgccacagattctaaataatcagatctttttaaatggtatcaatgtttcccacaaaatattgttgacattgaaaatatagaattttagcattaattttgttaaacctacatcccctcgg

SEQ ID NO: 597708 - DNA, 120 bp, Artificial Sequence
  ENSG00000174130_41 (sequence is synthesized)
cagaggggcctccctgcatcccagtggaaagtaggttcctcacagtcctctccgtcacattcttcccatttcttttcttcacagaacacatcactgtctaaaattatcttgtttgcttag

SEQ ID NO: 597709 - DNA, 120 bp, Artificial Sequence
  ENSG00000174130_42 (sequence is synthesized)
ttgcttactcatcttcttcttctctcctctgaagtctaagctccaggaaaaagggagacttctccacctgttccctgcctctccccagtgccgaggggacactgtgcaccccattgtaga

SEQ ID NO: 597710 - DNA, 120 bp, Artificial Sequence
  ENSG00000174130_43 (sequence is synthesized)
tgcgcagtaaaaactcgtgggatgagcaaatgactctgaaacggtcccatgcgggaaatgtccatgaagtcctggattttatctaaaaagcccaggcaggggggggcgggggcggcgggg

SEQ ID NO: 597711 - DNA, 120 bp, Artificial Sequence
  ENSG00000174130_44 (sequence is synthesized)
ctacagttccacgctgagctgcctcctggccgctcgtccccgccgcagtgcctgggcggcccgggcgcccgaccttggccgtggacaccttcgcggtgggtgctgctcctccccatctgc

SEQ ID NO: 597712 - DNA, 120 bp, Artificial Sequence
  ENSG00000174130_45 (sequence is synthesized)
cactggaagatgctggggcgacccggctccaggtttagcaggacactgagaaaagggaatggctgcctttcggaggctgggtgagcccttctctgtgcctcacctgcccgccccacagcg

SEQ ID NO: 597713 - DNA, 120 bp, Artificial Sequence
  ENSG00000174130_46 (sequence is synthesized)
gccctgcacctcgtcccacggggcccattgccccggtaggatgcgcgcttttgttttgagggtcaggcatcttccctgccgtcgtttctgggaggttgaaaaattgatccagaaagacct

SEQ ID NO: 597714 - DNA, 120 bp, Artificial Sequence
  ENSG00000174130_47 (sequence is synthesized)
aattgtatttccgttcatttacaagttattttctcttcttctgaaaaagagatcttgtggccaagtggatttttcaaatgtatgtgtgtctctgtgggtgttctgatgggcagttgggag

SEQ ID NO: 597715 - DNA, 120 bp, Artificial Sequence
  ENSG00000174132_0 (sequence is synthesized)
agctgccactgctgtagcttctgccacctgccacgaccgggcctctccctggcgtttggtcacctctgcttcattctccaccgcgcctatggtccctcttggagccagcgtggcgggcct

SEQ ID NO: 597716 - DNA, 120 bp, Artificial Sequence
  ENSG00000174132_1 (sequence is synthesized)
ggcggctcccgggtggtgagagagcggtccgggaacgatgaaggcctcgcagtgctgctgctgtctcagccacctcttggcttccgtcctcctcctgctgttgctgcctgaactaagcgg

SEQ ID NO: 597717 - DNA, 120 bp, Artificial Sequence
  ENSG00000174132_2 (sequence is synthesized)
gcccctggcagtcctgctgcaggcagccgaggccgcgccaggtcttgggcctcctgaccctagaccacggacattaccgccgctgccaccgggccctacccctgcccagcagccgggccg

SEQ ID NO: 597718 - DNA, 120 bp, Artificial Sequence
  ENSG00000174132_3 (sequence is synthesized)
tggtctggctgaagctgcggggccgcggggctccgagggaggcaatggcagcaaccctgtggccgggcttgagacggacgatcacggagggaaggccggggaaggctcggtgggtggcgg

SEQ ID NO: 597719 - DNA, 120 bp, Artificial Sequence
  ENSG00000174132_4 (sequence is synthesized)
ccttgctgtgagccccaaccctggcgacaagcccatgacccagcgggccctgaccgtgttgatggtggtgagcggcgcggtgctggtgtacttcgtggtcaggacggtcaggatgagaag

SEQ ID NO: 597720 - DNA, 120 bp, Artificial Sequence
  ENSG00000174132_5 (sequence is synthesized)
tgatgacaacacgttgtttgatgccaatcatcctcgaagataagaatgtgccttttgatgaaagaactttatctttctacaatgaagagtggaatttctatgtttaaggaataagaagcc

SEQ ID NO: 597721 - DNA, 120 bp, Artificial Sequence
  ENSG00000174132_6 (sequence is synthesized)
actatatcaatgttgggggggtatttaagttacatatattttaacaacctttaatttgctgttgcaataaataccgtatccttttattatatctttatatgtatagaagtactctgttaa

SEQ ID NO: 597722 - DNA, 120 bp, Artificial Sequence
  ENSG00000174132_7 (sequence is synthesized)
tgggctcagagatgttggggataaagtatactgtaataatttatctgtttgaaaattactataaaacggtgttttctgatcggtttttgtttcctgcttaccatatgattgtaaattgtt

SEQ ID NO: 597723 - DNA, 120 bp, Artificial Sequence
  ENSG00000174132_8 (sequence is synthesized)
ttatgtattaatcagttaatgctaattatttttgctgatgtcatatgttaaagagctataaattccaacaaccaactggtgtgtaaaaataatttaaaatttcctttactgaaaggtatt

SEQ ID NO: 597724 - DNA, 120 bp, Artificial Sequence
  ENSG00000174132_9 (sequence is synthesized)
tcccatttttgtggggaaaagaagccaaatttattactttgtgttggggtttttaaaatattaagaaatgtctaagttattgtttgcaaaacaataaatatgattttaaattctcttaaa

SEQ ID NO: 597725 - DNA, 120 bp, Artificial Sequence
  ENSG00000174136_0 (sequence is synthesized)
atttgaggctgactggggagaaagctgcctggaggaagctgctggggtgcggggggctgagggatttggctccccgccctctcccctagatggcggagaaatcgggctagctggaagggc

SEQ ID NO: 597726 - DNA, 120 bp, Artificial Sequence
  ENSG00000174136_1 (sequence is synthesized)
gcagctcctctcccagagctcattctggagtcggagaactgggagagcggcccccgaggcggagcctccctcccgccccgagtcgcgctgccccccacctgggggagaggggcgggcgcc

SEQ ID NO: 597727 - DNA, 120 bp, Artificial Sequence
  ENSG00000174136_2 (sequence is synthesized)
gcgctgccttccctccgcgcctcggccgcgtggcttgcggcttattttcccagctggcaagcgtcgcgctgcagacaagggaatgcctgtggtcctgcgtgttccgaagttcaggggccc

SEQ ID NO: 597728 - DNA, 120 bp, Artificial Sequence
  ENSG00000174136_3 (sequence is synthesized)
cctgatcccgctgagccccctccaggagcgaaagggttaagaatgataaggaagaagaggaagcgaagcgcgccccccggcccatgccgcagccacgggcccagacccgccacggcgccc

SEQ ID NO: 597729 - DNA, 120 bp, Artificial Sequence
  ENSG00000174136_4 (sequence is synthesized)
gcgccgccgccctcgccggagcccacgagacctgcatggacgggcatgggcttgagagcagcaccttccagcgccgccgctgccgccgccgaggttgagcagcgccgcagccccgggctc

SEQ ID NO: 597730 - DNA, 120 bp, Artificial Sequence
  ENSG00000174136_5 (sequence is synthesized)
tgccccccgccgctggagctgctgctgctgctgctgttcagcctcgggctgctccacgcaggtgactgccaacagccagcccaatgtcgaatccagaaatgcaccacggacttcgtgtcc

SEQ ID NO: 597731 - DNA, 120 bp, Artificial Sequence
  ENSG00000174136_6 (sequence is synthesized)
ctgacttctcacctgaactctgccgttgacggctttgactctgagttttgcaaggccttgcgtgcctatgctggctgcacccagcgaacttcaaaagcctgccgtggcaacctggtatac

SEQ ID NO: 597732 - DNA, 120 bp, Artificial Sequence
  ENSG00000174136_7 (sequence is synthesized)
cattctgccgtgttgggtatcagtgacctcatgagccagaggaattgttccaaggatggacccacatcctctaccaaccccgaagtgacccatgatccttgcaactatcacagccacgct

SEQ ID NO: 597733 - DNA, 120 bp, Artificial Sequence
  ENSG00000174136_8 (sequence is synthesized)
ggagccagggaacacaggagaggggaccagaaccctcccagttaccttttttgtggcttgtttggagatcctcacctcagaactttcaaggataacttccaaacatgcaaagtagaaggg

SEQ ID NO: 597734 - DNA, 120 bp, Artificial Sequence
  ENSG00000174136_9 (sequence is synthesized)
gcctggccactcatagataataattatctttcagttcaagtgacaaacgtacctgtggtccctggatccagtgctactgctacaaataagatcactattatcttcaaagcccaccatgag

SEQ ID NO: 597735 - DNA, 120 bp, Artificial Sequence
  ENSG00000174136_10 (sequence is synthesized)
tgtacagatcagaaagtctaccaagctgtgacagatgacctgccggccgcctttgtggatggcaccaccagtggtggggacagcgatgccaagagcctgcgtatcgtggaaagggagagt

SEQ ID NO: 597736 - DNA, 120 bp, Artificial Sequence
  ENSG00000174136_11 (sequence is synthesized)
ggccactatgtggagatgcacgcccgctatatagggaccacagtgtttgtgcggcaggtgggtcgctacctgacccttgccatccgtatgcctgaagacctggccatgtcctacgaggag

SEQ ID NO: 597737 - DNA, 120 bp, Artificial Sequence
  ENSG00000174136_12 (sequence is synthesized)
agccaggacctgcagctgtgcgtgaacggctgccccctgagtgaacgcatcgatgacgggcagggccaggtgtctgccatcctgggacacagcctgcctcgcacctccttggtgcaggcc

SEQ ID NO: 597738 - DNA, 120 bp, Artificial Sequence
  ENSG00000174136_13 (sequence is synthesized)
tggcctggctacacactggagactgccaacactcaatgccatgagaagatgccagtgaaggacatctatttccagtcctgtgtcttcgacctgctcaccactggtgatgccaactttact

SEQ ID NO: 597739 - DNA, 120 bp, Artificial Sequence
  ENSG00000174136_14 (sequence is synthesized)
gccgcagcccacagtgccttggaggatgtggaggccctgcacccaaggaaggaacgctggcacattttccccagcagtggcaatgggactccccgtggaggcagtgatttgtctgtcagt

SEQ ID NO: 597740 - DNA, 120 bp, Artificial Sequence
  ENSG00000174136_15 (sequence is synthesized)
ctaggactcacctgcttgatccttatcgtgtttttgtaggggttgtcttttgttttggttttttattttttgtctataacaaaattttaaaatatatattgtcataatatattgagtaaa

SEQ ID NO: 597741 - DNA, 120 bp, Artificial Sequence
  ENSG00000174136_16 (sequence is synthesized)
agagtatatatgtatataccatgtatatgacaggatgtttgtcctgggacacccaccagattgtacatactgtgtttggctgttttcacatatgttggatgtagtgttctttgattgtat

SEQ ID NO: 597742 - DNA, 120 bp, Artificial Sequence
  ENSG00000174136_17 (sequence is synthesized)
caattttgttttgcagttctgtgaaatgttttataatgtccctgcccagggacctgttagaaagcactttattttttatatattaaatatttatgtgtgtgcttggttgatatgtatagt

SEQ ID NO: 597743 - DNA, 120 bp, Artificial Sequence
  ENSG00000174136_18 (sequence is synthesized)
acatatacacagacatccatatgcagcgtttcctttgaaggtgaccagttgtttgtagctattcttggctgtaccttcctgccctttcccattgctactgatttgccacggtgtgcagct

SEQ ID NO: 597744 - DNA, 120 bp, Artificial Sequence
  ENSG00000174136_19 (sequence is synthesized)
ggagctgcctcgttcctttgaactatgccctcacccttctgccctcacttgatttgaaagggtcgttaactctcccttacaggtgctttgactcttaaacgctgatcttaagaagctctc

SEQ ID NO: 597745 - DNA, 120 bp, Artificial Sequence
  ENSG00000174136_20 (sequence is synthesized)
ttcatctaagagctgttactttttcagaagggggggtattattggtattctgattactctcaattctaattgttatatatttgagcccatacagtgtattaggttgaaccatagaaactg

SEQ ID NO: 597746 - DNA, 120 bp, Artificial Sequence
  ENSG00000174136_21 (sequence is synthesized)
ctattctcgtaggtcaaaagggtctagtgatggaagttttgtagataagtaccaggcatctcagtaactcctagactttttctcatcccatgccccgttttaaattgtcagttttccctc

SEQ ID NO: 597747 - DNA, 120 bp, Artificial Sequence
  ENSG00000174136_22 (sequence is synthesized)
tgactcttctgtgttaaaacatgaaactataaatttagtaattatcatgccttgctctttttaatctatatgactgatgcaagcccctcttcttaaccgtttcttggctttgagcccaga

SEQ ID NO: 597748 - DNA, 120 bp, Artificial Sequence
  ENSG00000174136_23 (sequence is synthesized)
aacacagctctccctgtctccaactccagtaagccctcctcagcctcaccttacgaatccaaagaactggggtttgttaggttctttctctaatgtagaggcccagatcccatcacaaag

SEQ ID NO: 597749 - DNA, 120 bp, Artificial Sequence
  ENSG00000174136_24 (sequence is synthesized)
tttttcattcttccttgtccaccatgatcttcatcacagtctttgatatgtctgcatgcaaagtggaacagagttgggcggcaatgacagaagagcttccttggcctgactcggtgtgcg

SEQ ID NO: 597750 - DNA, 120 bp, Artificial Sequence
  ENSG00000174136_25 (sequence is synthesized)
gccacttcggcactgcttaatccagatattcttgttaactaagcattgtgcttcccaggtggtctgaagtcaggtactctctctctcaacacctgtagttgaatatgatttggtcagttg

SEQ ID NO: 597751 - DNA, 120 bp, Artificial Sequence
  ENSG00000174136_26 (sequence is synthesized)
ctcgttgtaacttggagaaattcctataaagtaagatctccttgcctcttccatccattgttggcacccccttgcaaaaggaaaagaacagcaaaagtcaggagcagtaatctgagaaag

SEQ ID NO: 597752 - DNA, 120 bp, Artificial Sequence
  ENSG00000174136_27 (sequence is synthesized)
ttaactccaggataggtaggtttctattgttatagctagatgtaaatctttagttccaagaagtgatagagtttctgctttaataatttgttgataagtttacataaacagaaataaaag

SEQ ID NO: 597753 - DNA, 120 bp, Artificial Sequence
  ENSG00000174136_28 (sequence is synthesized)
atactatctttaccgtagtagttcaggccaagattatgcttagttttagttctccaggtagttacttttgccatgtcctattgatcagtgacactgccagaggcccataccggcaagagg

SEQ ID NO: 597754 - DNA, 120 bp, Artificial Sequence
  ENSG00000174136_29 (sequence is synthesized)
aagaggacgtcattttgtaaagtttaacttcttagcgaactgatgtgccacccagtcacagagtggagttgtgaattcatgtagaggtggcaaacctctaccttgtgttgatgagagaat

SEQ ID NO: 597755 - DNA, 120 bp, Artificial Sequence
  ENSG00000174136_30 (sequence is synthesized)
aatcttgggcagtctgggaaaataaggaaggcatctccttcttactcatggagattcaactatagagagttgaaacctaaacccgccttccttttatagaagctggactagagacggact

SEQ ID NO: 597756 - DNA, 120 bp, Artificial Sequence
  ENSG00000174136_31 (sequence is synthesized)
gaccatcagctctgaactgtggctttttttgttcacctatgatgccatgtaccaaattcagaagctatcgttaataatttgttttataattgagtagtacaagcgaggaaaaaatacgga

SEQ ID NO: 597757 - DNA, 120 bp, Artificial Sequence
  ENSG00000174136_32 (sequence is synthesized)
ggataaccactatttttgtgcaaataatatgaaagtgaagtaaaagcaatagaagaaatttctataggatctgggtttagagtgtgtatcattaataaatatacctttgctcttttcagg

SEQ ID NO: 597758 - DNA, 120 bp, Artificial Sequence
  ENSG00000174136_33 (sequence is synthesized)
gaaaataacaaccacccttactgatagttgggaaaagaagattgggttattttgccatatcatttagctggaagtgacatttaaaagcaccctgcatcactagtaatagtgtattttgct

SEQ ID NO: 597759 - DNA, 120 bp, Artificial Sequence
  ENSG00000174136_34 (sequence is synthesized)
attctgcccttgtaatcggtgtccctgtaaaacaatccccacagattactttcagaaatagatgtatttctctacgtaagggccaggtttattttctccttttttgagatttctagaaaa

SEQ ID NO: 597760 - DNA, 120 bp, Artificial Sequence
  ENSG00000174136_35 (sequence is synthesized)
aatgctgcttgcacatgttggttcttgaaaccttagctagaagaatttcaggtcataccaacatgtggataggctatagctgttcagaggtctcctgggggagcttaaaacgggggaaac

SEQ ID NO: 597761 - DNA, 120 bp, Artificial Sequence
  ENSG00000174136_36 (sequence is synthesized)
actggttttcacagatgctccacatggctgtctttaaaagactcaaaacttttttttgtcctctttgttatgcttggaagctcccccccccccaacagtgtgtcgagtctttgcaaagaa

SEQ ID NO: 597762 - DNA, 120 bp, Artificial Sequence
  ENSG00000174136_37 (sequence is synthesized)
acctttagatgtggttcatagatatatgaatacgtatctgtgtaaaacagtgagtgtgcagtgtgtaaatactttaaattattatgctagaaaaataaagttacataccttgctgtggaa

SEQ ID NO: 597763 - DNA, 120 bp, Artificial Sequence
  ENSG00000174136_38 (sequence is synthesized)
gcagagatatccgggccgccggtgggtggtcgctagggctgggccagcctcttggaggtccacgcccgccgagcccacgctggctggggccggggtgccggcgcgctcgggactcgtctc

SEQ ID NO: 597764 - DNA, 120 bp, Artificial Sequence
  ENSG00000174136_39 (sequence is synthesized)
agcagtcgctcacggtctttgtgtcttctcttccgcccctttccctgcctgccgcctccggccgccacgatgcccctgcgccccgctgctgccgccgcggactggctgcgccggctgcgc

SEQ ID NO: 597765 - DNA, 120 bp, Artificial Sequence
  ENSG00000174136_40 (sequence is synthesized)
cctgtgggaaggctgcactggtttcctgagataaatggacaggaagcgcattacctccgcgcgctggcaagcggctcccaaatgctttttgcacctgccgttttgagcggtgagagcagc

SEQ ID NO: 597766 - DNA, 120 bp, Artificial Sequence
  ENSG00000174136_41 (sequence is synthesized)
actaacaaacattctacaaagccagaatggatgccctcaccctccttggaatgatgttaaaccaattgagtaaactggtcctgccaactgcaatgtaataaagtaggcctatcaaacttc

SEQ ID NO: 597767 - DNA, 120 bp, Artificial Sequence
  ENSG00000174136_42 (sequence is synthesized)
gccttaggtgtctctttaaaccctctctcccctctttatttccaaatctttatctttggctttcttaagctgtaaaggcacactggcaccttaggtggtcaggtaagatcgctggattcc

SEQ ID NO: 597768 - DNA, 120 bp, Artificial Sequence
  ENSG00000174136_43 (sequence is synthesized)
ttatttcggcgaaagtccagcggaccattcccgccactgtacccattttagaaacacttggaagacccttaaggatcatttacggagagaaaggtcctgcgtgttccgaagttcaggggc

SEQ ID NO: 597769 - DNA, 120 bp, Artificial Sequence
  ENSG00000174136_44 (sequence is synthesized)
ctacgagcgggtgatgagccccccgcaagccccgggctctctccctccgcgagtgcattgctcacgccaagctttgggactcttctctcacacccaggtcctgcgtgttccgaagttcag

SEQ ID NO: 597770 - DNA, 120 bp, Artificial Sequence
  ENSG00000174136_45 (sequence is synthesized)
tttccctctccctactcaactttcaaaagatgtttgattcttcagataacttttgaaatgtgctataaagggcctagtttaaaaggaacttcttttgaaaagcaattaacagttgataaa

SEQ ID NO: 597771 - DNA, 120 bp, Artificial Sequence
  ENSG00000174136_46 (sequence is synthesized)
gggttaaataaaaattatctagtaaggaatttcttattggaatgtaaacgtggttctaattttaaatagacagtgatataaagaataaaaagtaaacagtgaaattgagttctccaggga

SEQ ID NO: 597772 - DNA, 120 bp, Artificial Sequence
  ENSG00000174136_47 (sequence is synthesized)
aaaggcagacctgtttagtaaaaaaaggatgcttttttcagtgatgtctttttttgagtgcatatgtgtgtgactcttgaagaaatccatgttcagatttatcagatgattgaagtgggt

SEQ ID NO: 597773 - DNA, 120 bp, Artificial Sequence
  ENSG00000174136_48 (sequence is synthesized)
gttctgaataaagaaagctgtgaggcctgaggcagtgacgtatcaggaaacatattttattggagatttggaagctatagtaaaacataatggcaataagccaacttcccagtggtaaac

SEQ ID NO: 597774 - DNA, 120 bp, Artificial Sequence
  ENSG00000174136_49 (sequence is synthesized)
ccacagtggtggtttagttactaacctcttgatgaccgaggaggttaataattggatattgcagagcagcaatatgtaacctgtgtgtaatctcagggcctcaggttaacagtttcagtc

SEQ ID NO: 597775 - DNA, 120 bp, Artificial Sequence
  ENSG00000174136_50 (sequence is synthesized)
agaagctaagagaaacactgacaaaatttagcttaccatgactagctgccagtttatgtggtctgtgttcgtttgttttaaagaaactaatactgtacagagatctttgacaccaacttc

SEQ ID NO: 597776 - DNA, 120 bp, Artificial Sequence
  ENSG00000174136_51 (sequence is synthesized)
aaggcaccagtgtttagtgcaagcaggtagagaggacctatgaactaggtttctaattggcagtcagtgctaattcagccattagtaagtaaagtcacttttccactaaaatagtgtccc

SEQ ID NO: 597777 - DNA, 120 bp, Artificial Sequence
  ENSG00000174136_52 (sequence is synthesized)
gactaaccacctccttccgtgtcttttccaaccacaaaaccacacacatagaccatctcatcttactttatttcttgcatttattgtatccaaaaaaattggtttagttttttaatgtaa

SEQ ID NO: 597778 - DNA, 120 bp, Artificial Sequence
  ENSG00000174136_53 (sequence is synthesized)
ttgacaagactcaagcttttgaaatacttacgactgttctcttgattccaggacaccctcccctgtgtctaaacatgtgtggtatactttttaaataaattaaagcttattttacttggc

SEQ ID NO: 597779 - DNA, 120 bp, Artificial Sequence
  ENSG00000174137_0 (sequence is synthesized)
tcgctccgcacccccgcggccgcgctcaggcacaaatcctgaagagcccgtgggcgtggactgctcatctgtaaagaaagtggagacatgaccttgagatttggctgacccagcaatgct

SEQ ID NO: 597780 - DNA, 120 bp, Artificial Sequence
  ENSG00000174137_1 (sequence is synthesized)
ggggccttcgcaagtctgatgttccaggactccagtgcctgttggtgtggacggaggacacggggccccgaccatggtcacactcatcactgagaagctgcagagccagagcctggacga

SEQ ID NO: 597781 - DNA, 120 bp, Artificial Sequence
  ENSG00000174137_2 (sequence is synthesized)
cctcacctgcaaggcggaggctggcccgttgcagtattctgcggaaaccctgaacaagagcggtcgtctgttccctttggagctcaacgaccagagtccctggaaggtcttcagtggagg

SEQ ID NO: 597782 - DNA, 120 bp, Artificial Sequence
  ENSG00000174137_3 (sequence is synthesized)
accgcccgtcagaagccaggcagccacgggccctgatttctccttcctgccgggcctgtctgctgccgctcacaccatgggtcttcagtggcagccacagtccccgcgcccaggcgcagg

SEQ ID NO: 597783 - DNA, 120 bp, Artificial Sequence
  ENSG00000174137_4 (sequence is synthesized)
cctgggtgcagccagcaccgtggaccccagtgaaagcacaggctcgtccacggccccaccgaccaagcggcattgccggtccttgtcagaacccgaggagcttgtgcgctgccggtcccc

SEQ ID NO: 597784 - DNA, 120 bp, Artificial Sequence
  ENSG00000174137_5 (sequence is synthesized)
ctggcgccccggcagctccaaggtctggactccagtctccaagaggcggtgcgacagcggcgggagtgccacgcggcagggaagccccggcgccgtcctgccgaggagtgctgtgtggtc

SEQ ID NO: 597785 - DNA, 120 bp, Artificial Sequence
  ENSG00000174137_6 (sequence is synthesized)
gaccggtcccacctcgcccgccacgccccggccgtcctccgccagcggcggcttcgtggacagcagcgagggcagtgcgggctcaggcccgctctggtgttccgcggagtcctgcttgcc

SEQ ID NO: 597786 - DNA, 120 bp, Artificial Sequence
  ENSG00000174137_7 (sequence is synthesized)
gtcctgcttgccctccacgaggcgccgcccgtccctctcacaggagcgactcgcgggtgcgggcactcccctgccctgggccagcagcagccccacgtccacgcctgcgctgggcgggcg

SEQ ID NO: 597787 - DNA, 120 bp, Artificial Sequence
  ENSG00000174137_8 (sequence is synthesized)
ccggtgccgctcacagccttgcgtgctcagtgggaagaggagccggcgcaaacggaggcgtgaggaggacgccaggtggacacgcccatccttggacttcctgaaaatgacccagacttt

SEQ ID NO: 597788 - DNA, 120 bp, Artificial Sequence
  ENSG00000174137_9 (sequence is synthesized)
aaaaaattcaaaaagcctttgctccctcaattacgaagatgacgatgaggatgacaccccagtgaagacggttctgtcctccccatgtgactcccggggcctccctggcatcaccatgcc

SEQ ID NO: 597789 - DNA, 120 bp, Artificial Sequence
  ENSG00000174137_10 (sequence is synthesized)
tggctgcagccagaggggcctcaggaccagccctgtccaccccaacctgtgggcctctagggagtcggtgaccagtgatggctcccgcaggagcagcggggacccccgtgatggggacag

SEQ ID NO: 597790 - DNA, 120 bp, Artificial Sequence
  ENSG00000174137_11 (sequence is synthesized)
ggacctggagcagatcgagaacaactgaggctggtgggggctggtcggggccatggctgccgcctgcacctgccctggggcacagagtaggtttcctgtgagctggtcggggccacggcc

SEQ ID NO: 597791 - DNA, 120 bp, Artificial Sequence
  ENSG00000174137_12 (sequence is synthesized)
cggcacctgccctggggcacagagtaggtttcctgtgagctggtcggggccacggctgccgccggcacctgccctggggcacagagtaggtttcctgtgagctggtcggggccacggctg

SEQ ID NO: 597792 - DNA, 120 bp, Artificial Sequence
  ENSG00000174137_13 (sequence is synthesized)
ccgccggcacctgccctggggcacagagtaggtttcctgtgagctggtcggggccacggctgccaccggcacctgccctggggcacagagtaggtttcctgtgagctggtcggggccacg

SEQ ID NO: 597793 - DNA, 120 bp, Artificial Sequence
  ENSG00000174137_14 (sequence is synthesized)
gctgccgcctgcactgccctggggcacagactaggtttcctgtgagctggtcggggccatggctgctgcctgcacctgccccagggcacagagtaggtttcctgtgagctggtcggggcc

SEQ ID NO: 597794 - DNA, 120 bp, Artificial Sequence
  ENSG00000174137_15 (sequence is synthesized)
atggctgccgcctgcacctgccccggggcacagagtaggtttcctgtgagctggtcggggccatggctgccaccggcacctgccctggggcacagagtaggtttcctgtgagttggtcgg

SEQ ID NO: 597795 - DNA, 120 bp, Artificial Sequence
  ENSG00000174137_16 (sequence is synthesized)
ggccacggctgccgcctgcactgccctggggcacagactaggtttcatgtgagctggtcggggccatggctgctgccggcacctgccctggggcacagagtaggtttcgtgttgcttgga

SEQ ID NO: 597796 - DNA, 120 bp, Artificial Sequence
  ENSG00000174137_17 (sequence is synthesized)
acattaaggcgtaattttgattcagtttttcctaaagaagcattttgcatttttatggcttttgcagttcgggagaaagcttctctattttggatgcatttcagaagggcgttctattaa

SEQ ID NO: 597797 - DNA, 120 bp, Artificial Sequence
  ENSG00000174137_18 (sequence is synthesized)
acatgaatctgcaaacagattaacatgcgtctgtgttccccacgaaaggcctgctgtgcagggcgccttgtgtgctttagttgctaggaaaccccgggcgttggtggtcagagtcccact

SEQ ID NO: 597798 - DNA, 120 bp, Artificial Sequence
  ENSG00000174137_19 (sequence is synthesized)
ggccccgtgtgtccccccctcccgacgggtcacggtgcttggggcttgcgcatgggcatctgtgcccatgaaccttgtcacccacgtgccagtgaaccgccagcttgtggccgcctggtt

SEQ ID NO: 597799 - DNA, 120 bp, Artificial Sequence
  ENSG00000174137_20 (sequence is synthesized)
ttccaccggtggcagtgatggcctttggggcagaccaaggtgccatgagtccctgcttcccgtggcctgggagggcccttgcaccttcaggtggggtgtagtgccagacctctgggaagg

SEQ ID NO: 597800 - DNA, 120 bp, Artificial Sequence
  ENSG00000174137_21 (sequence is synthesized)
ctgtcctgccggcagcacccgtcagcacccactctgtgaatttaatacaaggcctttgctttgtgcatacgacttctgattaattttcgtttccaccatctgaagtgggcctggctgcgc

SEQ ID NO: 597801 - DNA, 120 bp, Artificial Sequence
  ENSG00000174137_22 (sequence is synthesized)
ctcaggcctctggtctctggctcagaaccagacaaggcaagggatttcctgtttttcattcttgcacttttaataaaatcgtaggggtttcgagtttgcgatagcaaaagaaaacattaa

SEQ ID NO: 597802 - DNA, 120 bp, Artificial Sequence
  ENSG00000174137_23 (sequence is synthesized)
cggtcgtgggcgcggggccctgcgctccgagctgggcgcgtggactacgtccccctgcctccgccgtctgcgccgcccgtcgaggcgacttttccgcacgaggcgaggcccgccctggtg

SEQ ID NO: 597803 - DNA, 120 bp, Artificial Sequence
  ENSG00000174137_24 (sequence is synthesized)
ggtggccccgcgccgtggttcggtggcgcgagaggcggggagtcgccgtggtaaacggggccttggggcgtcccgaaggggacccagacgcgggaggccagacttccccggcgacccgag

SEQ ID NO: 597804 - DNA, 120 bp, Artificial Sequence
  ENSG00000174137_25 (sequence is synthesized)
gaggggacttgcggcggattccgaagccgctttttctgcgtagcctgggggtgtaaatcgccgagattctcctgtgtggagaaggcgccggtgcccgcccgctgctgccggactctagag

SEQ ID NO: 597805 - DNA, 120 bp, Artificial Sequence
  ENSG00000174137_26 (sequence is synthesized)
tgacagccgtctcctcactggtcggctctatgccaagcattcgtgacacacgtcagttctgttgtggtggcaccatcgcagcgacttctctcttggtgaaggagttgctgctgctcacca

SEQ ID NO: 597806 - DNA, 120 bp, Artificial Sequence
  ENSG00000174137_27 (sequence is synthesized)
aaagccagaggctttggcaaggggcaggtacagatgtggctgagacagggccctggacgtttgctgagtgacgtcaggtcagctcgtaggaggcttccctgaccttccagggtctcaccg

SEQ ID NO: 597807 - DNA, 120 bp, Artificial Sequence
  ENSG00000174137_28 (sequence is synthesized)
gcttccggtagctgagttaacccacctcaggtgctggaggccctccagctgtcagctggggtccgtgcaccccccagactgcctggagggcttcgcacacagtttgaaaggcctctgcgc

SEQ ID NO: 597808 - DNA, 120 bp, Artificial Sequence
  ENSG00000174137_29 (sequence is synthesized)
tttggagcccaatttggaacttgaaggcttgacctttgtgttttggacaactgttttgtgtttaacctcagatggaagtgaccatccaaccagagtgatggtagcaggagctgggacgga

SEQ ID NO: 597809 - DNA, 120 bp, Artificial Sequence
  ENSG00000174137_30 (sequence is synthesized)
cgtctctacagcgtgggtggccccttcagttccgtgtggccttcgctagcgctgttgggcgctgagctgtacagctgccgtgtctgtgggcagaagttttttctcctgcaccgactgtgt

SEQ ID NO: 597810 - DNA, 120 bp, Artificial Sequence
  ENSG00000174137_31 (sequence is synthesized)
cgtccagaggcgttcagagcctgctgttttcacgctctagccgcacagctgtgcccgcgagtgcgagtcccgcgtccgaggcctcggcgtgagcttacagcatctgtcgggtccgagcag

SEQ ID NO: 597811 - DNA, 120 bp, Artificial Sequence
  ENSG00000174145_0 (sequence is synthesized)
aaacgggcgctgcgcgcgtagccgccgccacgctgacctcccgctccagctggctgctgctcggagccctagcagcgggcgaaggcggaggcccagaagggcaggagaccgccgcgacag

SEQ ID NO: 597812 - DNA, 120 bp, Artificial Sequence
  ENSG00000174145_1 (sequence is synthesized)
gagcccgagggtccgtatggcttctcctcgccggcgggtgctgtgcgccacggagctcgccaaaggcgcttcgggctcggagcggctctgagccgcgccgcctgctgagatcgaccgcct

SEQ ID NO: 597813 - DNA, 120 bp, Artificial Sequence
  ENSG00000174145_2 (sequence is synthesized)
gctgagccgttccgtggagctgcgggcaggaacccgaggagcaggaggtggcggcggcggcagtggctgttcctcccagagggcgatgtggccggccggcgcgggcaccaagctgccctg

SEQ ID NO: 597814 - DNA, 120 bp, Artificial Sequence
  ENSG00000174145_3 (sequence is synthesized)
tccccgagactctgcgctccggcgggcggctttctctgggaacctcacggccctgccctctcacctcgtgcccgccggccgcagcgtccgggtcttcatcagcgccaaccctgaagatac

SEQ ID NO: 597815 - DNA, 120 bp, Artificial Sequence
  ENSG00000174145_4 (sequence is synthesized)
gggagcagaaagacaggcgctaagagaaaatgtatatcctaaactgagagaattctgcagagaaaactatggattggaatttcaggtcatagatctgtactggggagtggaagaagatga

SEQ ID NO: 597816 - DNA, 120 bp, Artificial Sequence
  ENSG00000174145_5 (sequence is synthesized)
gtgggacagcccagagctccagaagacccgcatgaagctgctggagaattgcttgaaaacttctgcaggtccatgttttgttggactattaggtgaaaaatatgggaatatccgaatccc

SEQ ID NO: 597817 - DNA, 120 bp, Artificial Sequence
  ENSG00000174145_6 (sequence is synthesized)
tggagaagttgaagcctcagagtttgaaatgattttggatgccgccatagaggcaaagctggagaccaagttgctggaggagtggtactgtcgagatgagaactcggtgccagcagccta

SEQ ID NO: 597818 - DNA, 120 bp, Artificial Sequence
  ENSG00000174145_7 (sequence is synthesized)
ttacctcagacccaagtcagaaatgctgagaagcaatagaaatgcaatgcagccttctaccaatgctgaaaacgagaagacatggcaagagatatcagatgagatcaagaagatatttaa

SEQ ID NO: 597819 - DNA, 120 bp, Artificial Sequence
  ENSG00000174145_8 (sequence is synthesized)
ggctgctgtaaagctgttacacgaaaagggtaaaatgaaacacagccaggctaagaggtacctgttctcagctatagaggatgagtttgactttgctctgggaaaacaaactccagcatt

SEQ ID NO: 597820 - DNA, 120 bp, Artificial Sequence
  ENSG00000174145_9 (sequence is synthesized)
tctaaagaagtgtgtttgctacattaggaaaattgctaacattgagcgctttgtgaaaatcccagagatgggaaaatacatggatataactggaacagaaccgaggattattcgggaccc

SEQ ID NO: 597821 - DNA, 120 bp, Artificial Sequence
  ENSG00000174145_10 (sequence is synthesized)
agaagcccaagagaagctgataaaactcagggatgaatttattcctactattgttgcatcatctaatctgagagtgtacacatctgttactcattgtgacatgaaactaggctactccca

SEQ ID NO: 597822 - DNA, 120 bp, Artificial Sequence
  ENSG00000174145_11 (sequence is synthesized)
agaaatagaaaatcattacatcgaaggacttggtaaacaattttatgaggacatgattgatataattcaggcaacgatacaacagaattttgacactgaaactgatacactctatgatga

SEQ ID NO: 597823 - DNA, 120 bp, Artificial Sequence
  ENSG00000174145_12 (sequence is synthesized)
aatccttcaacattcatcattatgtaaaacatacgcctccttctatgagtacaaatgtgaatctctaaacatagtgcataactacattcttccaagcaaagctggacacatcaaccctct

SEQ ID NO: 597824 - DNA, 120 bp, Artificial Sequence
  ENSG00000174145_13 (sequence is synthesized)
tattatatatggtgggccatgcactgggaagacccttctgctagctgaagtagcaaagaaggcttatggctggctacatgaggacacaggaccagaatctgacccagtagtcatcgtgag

SEQ ID NO: 597825 - DNA, 120 bp, Artificial Sequence
  ENSG00000174145_14 (sequence is synthesized)
atttctaggaacgacagacatgagctctgaccttaggactctccttctaagtgtttgtgaacaattggcagttaactaccggtgtctggttcaaagctaccctaagaagatccatgacct

SEQ ID NO: 597826 - DNA, 120 bp, Artificial Sequence
  ENSG00000174145_15 (sequence is synthesized)
ctgtgacttatttataaatcttttgaatgagtcttcactgcagagacctctagtcataatattcgatgcactagagcagctctcagagaatgatgatgccaggaagctttggtggctccc

SEQ ID NO: 597827 - DNA, 120 bp, Artificial Sequence
  ENSG00000174145_16 (sequence is synthesized)
agctcacctgccccgctttgtccggatagtcctttccacgctgcccaacaaacatgggatcttgcagaaactaaggtgccttatccatgaagaagacaactacatcgagctgattccccg

SEQ ID NO: 597828 - DNA, 120 bp, Artificial Sequence
  ENSG00000174145_17 (sequence is synthesized)
agacaggaagatgtgcagccaggtcctcaaacaccagctgctgcgcgtcaaaaggaaggtcacatcaggccagcagatttatgtgaacaatgcattatccaagtgcacactgccaatgtt

SEQ ID NO: 597829 - DNA, 120 bp, Artificial Sequence
  ENSG00000174145_18 (sequence is synthesized)
tgtgaacctgaccttcagggaggtgaggcactggagatctcacaaagacgtcgatgaatcctccctctctgtcaccgttcatgaaagtatagagcagttattctggtccttggagaagaa

SEQ ID NO: 597830 - DNA, 120 bp, Artificial Sequence
  ENSG00000174145_19 (sequence is synthesized)
gtgtggtcagaaactggtctctagggctcttggttacatcaccatggccaaaatgggtctgagtgaaatggaactggaggatgtgttagccctagacaacagtgtaatgagtgagctcaa

SEQ ID NO: 597831 - DNA, 120 bp, Artificial Sequence
  ENSG00000174145_20 (sequence is synthesized)
agaaaacaccagacccagcaatcccctgagagtaccttacttgtacattgcaaggctcaaggagggtctcagtggatacctaatagaaagacatgtgaaaaatgtcacactcctagtctg

SEQ ID NO: 597832 - DNA, 120 bp, Artificial Sequence
  ENSG00000174145_21 (sequence is synthesized)
ggccaacagacacctgcagctcatagcccagaagctatatctgcaggatgacaatgacctgcgtgaaatgcacaccatcttagcagattattttctgggggtttggtcagggggcaggag

SEQ ID NO: 597833 - DNA, 120 bp, Artificial Sequence
  ENSG00000174145_22 (sequence is synthesized)
gaaagccttctgccttgaggacccctacttgaatggctgccttgacttggagaacagaagtttgctggaggaagaaaagcacttcatggaacaggcttcctttgacaggcaggctccaga

SEQ ID NO: 597834 - DNA, 120 bp, Artificial Sequence
  ENSG00000174145_23 (sequence is synthesized)
ccagccctgggttttccagtgtaatcccctggaacctgacatctttttcgttaatcatcggaaaatgtctgagctgttgtaccacttgacgaggtgtggaaaaaccgatgacctgcttta

SEQ ID NO: 597835 - DNA, 120 bp, Artificial Sequence
  ENSG00000174145_24 (sequence is synthesized)
cggcatcatcatgaacttcagctggctttataccatgatcaaaattggccagtttgacaaagtgctttcagacattgagctggcttacaactactcgcaagagaaggagctgaagttcct

SEQ ID NO: 597836 - DNA, 120 bp, Artificial Sequence
  ENSG00000174145_25 (sequence is synthesized)
ggccaacaccctccgcagcatcaaaaacaaggtcactgcatttcccggctccctttcagcagagcttcagcaaagactgctgcctgttgtaagctccctgcccaaacttagacatcttct

SEQ ID NO: 597837 - DNA, 120 bp, Artificial Sequence
  ENSG00000174145_26 (sequence is synthesized)
tttagagtgtgataaagatgggcccaaatattgctccattgtaccactgcattcatccatggatgtgacatacagcccagagcgtcttcccttatcatccagtcacctgcatgtcacaga

SEQ ID NO: 597838 - DNA, 120 bp, Artificial Sequence
  ENSG00000174145_27 (sequence is synthesized)
gatcctgcctacctgtaaccccagcactgtcctcacagctttagaaaatggttccatcagcacctgggatgtagagactcgacagctactcaggcaaatcaccacagcccagtctgtcat

SEQ ID NO: 597839 - DNA, 120 bp, Artificial Sequence
  ENSG00000174145_28 (sequence is synthesized)
cctgggcatgaaactcaccagtgatgaaaagtaccttgtggtggctacaacaaataacaccttgttgatttatgacaatgtcaattcttgcctcctgtctgaagtagaaatcaaggggac

SEQ ID NO: 597840 - DNA, 120 bp, Artificial Sequence
  ENSG00000174145_29 (sequence is synthesized)
caagcatggaagcagcgccacctacatcaatggatttacactgtccgccaaccacgcccttgcatggctcgaagccagcaaagatgtcactgtcatcgatctgctgtacggatggccgct

SEQ ID NO: 597841 - DNA, 120 bp, Artificial Sequence
  ENSG00000174145_30 (sequence is synthesized)
ttaccagttccactgctggtatgaagtgacgtgcgtccagtgctccctggatggtctgtatgctttctgtggccaatacctgaacacaaccaccatatttcatttagggagtggagaaaa

SEQ ID NO: 597842 - DNA, 120 bp, Artificial Sequence
  ENSG00000174145_31 (sequence is synthesized)
gttatgtacagtgacatcagaattttcaggtggatttgtgaagtttcttcttatcttggacacagctcaggaaatggtcatggtagacagtgaaggaagtctttctgtttggaatactga

SEQ ID NO: 597843 - DNA, 120 bp, Artificial Sequence
  ENSG00000174145_32 (sequence is synthesized)
ggacatttccagcccccagctgactgatgactttgattgccgaagagaagacagtgaggtggtcagcattgagctttcagaagaccaaagtgcagttctgatctgtaaagccctcagcat

SEQ ID NO: 597844 - DNA, 120 bp, Artificial Sequence
  ENSG00000174145_33 (sequence is synthesized)
tgagctcttagatactggtctgtggaaggtggctgaaaagttcagagccaagcacaacgaacgctttatatctgccgtgctgtctaaaaatggagattgtatcatcgccaccatggaaaa

SEQ ID NO: 597845 - DNA, 120 bp, Artificial Sequence
  ENSG00000174145_34 (sequence is synthesized)
tacctcagctgtgtttttttggaggcgggacacaggacagtgtatggcaagcttgcaggaaatctcaggttccattgttaagttagtgaaatccagtcaccacaatatgctactgtcttt

SEQ ID NO: 597846 - DNA, 120 bp, Artificial Sequence
  ENSG00000174145_35 (sequence is synthesized)
atcaaccagtggtgttctttccatttgggacatagatataatcacagctatgtccaacatagataagactggaaaacccatccaaagtctgttgttgcctgctagaggggaaatcattta

SEQ ID NO: 597847 - DNA, 120 bp, Artificial Sequence
  ENSG00000174145_36 (sequence is synthesized)
ctccctggatggatccgattgtgttcataagtggaacttcagcagtggcttcatcgaagcagtattcaagcatgaaggaatagttgaacactgtgtgttaacatccaccggagatataat

SEQ ID NO: 597848 - DNA, 120 bp, Artificial Sequence
  ENSG00000174145_37 (sequence is synthesized)
ggtgacatcagatgacaaaagcagccagtatgtctggcacaccagcagtggtgaaaacctttttcgaattaacgggcagagaatatctcagctgctgattacacacaatgaccagtttgt

SEQ ID NO: 597849 - DNA, 120 bp, Artificial Sequence
  ENSG00000174145_38 (sequence is synthesized)
ggtctcgctctgtgaggaaaatgcctccagggtttggaggctcgccacaggccacagggtctgcaacattctgaccactttgcagaatgcctttattacctccgcaaataccttcgtggt

SEQ ID NO: 597850 - DNA, 120 bp, Artificial Sequence
  ENSG00000174145_39 (sequence is synthesized)
gggaatgactaaaagcaaagtgttggcagtcagtctttggacaggaagtatcaccaagaaattttgctgtgaagatgggaccaccatcgtgaattttaaattaatccctgactgtcctga

SEQ ID NO: 597851 - DNA, 120 bp, Artificial Sequence
  ENSG00000174145_40 (sequence is synthesized)
tatcatcgtgtttatcacatcggccgagactgtgaacatctggagtctgacagatgaagtgatctgtcggcgcgtgcaacttccaaacaacttcttgaaaaatctggaggactttgaaat

SEQ ID NO: 597852 - DNA, 120 bp, Artificial Sequence
  ENSG00000174145_41 (sequence is synthesized)
ttctcccaatggaaagctaggcattatagccaggggagatgaaaacatcaatgtgctagatttatacagtggtaaattgcgggtggttcacgcctctgggatcatctggcggcagaggtt

SEQ ID NO: 597853 - DNA, 120 bp, Artificial Sequence
  ENSG00000174145_42 (sequence is synthesized)
gtctcgggatggtcgctacctggtatacatttgtttccgaaatggggaggaggaggatgaaaatggtgcaatattcagtttaattgtaatgagactggcagatggcaaaaatatcggtgc

SEQ ID NO: 597854 - DNA, 120 bp, Artificial Sequence
  ENSG00000174145_43 (sequence is synthesized)
ttgttccctttacaaaacaccaactttccttgcactctcccagaggcacctgaacatcattgtgggctttgatgatgggagtatagggatctacacggtagtagaccgtgtagatgctgc

SEQ ID NO: 597855 - DNA, 120 bp, Artificial Sequence
  ENSG00000174145_44 (sequence is synthesized)
actgaaaatcaaaattgccacttcaaatagcagacaaattttcaacaatgcaacacacacctccaggccaaagtgtaacagttattgttttaaaatatctgtggattgcttatggagaga

SEQ ID NO: 597856 - DNA, 120 bp, Artificial Sequence
  ENSG00000174145_45 (sequence is synthesized)
gtccactgaggtctttgcaagagacagccccatcacagttagtgactctactgagtccaatgaagcaacaccctccaagaaacacaactcttgttatgagcgggtatgctcggccctaga

SEQ ID NO: 597857 - DNA, 120 bp, Artificial Sequence
  ENSG00000174145_46 (sequence is synthesized)
agccaggggccacagctatgcccctgataactgacaaaatgttttccagctaagcagaaatatgtgatccacgtacagaagggaaaaaaatgtgccccaaatgataaactattcatttat

SEQ ID NO: 597858 - DNA, 120 bp, Artificial Sequence
  ENSG00000174145_47 (sequence is synthesized)
taaaaggcaggagcgatgctggaattccagtgttttattaagatgttcatgaaatggacaaataggttagtcttgggtgtggtctttttgtcaaagtgtatccagaatgtcagaatttct

SEQ ID NO: 597859 - DNA, 120 bp, Artificial Sequence
  ENSG00000174145_48 (sequence is synthesized)
agtagtaatatttaaatggttacttcatctgaaaggcagaggctaaaagtttttaaattagctgtgtggtgaggcagcataatacatcccactggttaagatgagagaggctagagttat

SEQ ID NO: 597860 - DNA, 120 bp, Artificial Sequence
  ENSG00000174145_49 (sequence is synthesized)
atacagatcatttggatgggaattagttctacaaaaatcagctgaaatcatgaagacaaagagctgcttgacttcaaatgattgtgtgataagtaaacacagccttaatctctctttaca

SEQ ID NO: 597861 - DNA, 120 bp, Artificial Sequence
  ENSG00000174145_50 (sequence is synthesized)
ttttacagtcctgacaactgtgtacacctagtctgcagtgaacggtctaaaggtgcaaaatatgtaacaaaaatacccaagtgtattcccagtttcccgagagatatgacctgaaacatg

SEQ ID NO: 597862 - DNA, 120 bp, Artificial Sequence
  ENSG00000174145_51 (sequence is synthesized)
agactgtggactggactgggacaagaactaactaccactatcatagggctactgaacatggagagtcagtctttattaaaagacagttgcaacaattgcatgcgagggtttctgtataac

SEQ ID NO: 597863 - DNA, 120 bp, Artificial Sequence
  ENSG00000174145_52 (sequence is synthesized)
agaatatatgatttttaaactatttcctgggttgcaaaagaacacatttagtaagaaacaacaatcttttcgcatctttttgaaatgcatatttgtgctgggtgtaaagaagattacagg

SEQ ID NO: 597864 - DNA, 120 bp, Artificial Sequence
  ENSG00000174145_53 (sequence is synthesized)
aagggcattacaaatctggtcaaaacacctgtccatttccatcattgtactaacagaagtctgtactatttggtcagtttgtatggaagcataaatattccctaaattcctgcagttagt

SEQ ID NO: 597865 - DNA, 120 bp, Artificial Sequence
  ENSG00000174145_54 (sequence is synthesized)
cttcatagaaagcaagctttctcaacatgccatctctgagatactgatgacgtttgccttactcacattccttctctttcctgtgtaaaatgcagatagatgaccaaatactctgggata

SEQ ID NO: 597866 - DNA, 120 bp, Artificial Sequence
  ENSG00000174145_55 (sequence is synthesized)
aactgaatatgcctgtctttgtgctaaaatattccataaatcttaagggtgtccaaaagttctttattgtccttgtttgtaatcactttcttacttctacacaccatctgtatgcttctt

SEQ ID NO: 597867 - DNA, 120 bp, Artificial Sequence
  ENSG00000174145_56 (sequence is synthesized)
tatctgttactcttcctgattgaggactcttctgagccttttatagtcctatccatttcaaagcagaagctgtggaatggtattaaatattttttaaaattaattcacctgtttaaaaga

SEQ ID NO: 597868 - DNA, 120 bp, Artificial Sequence
  ENSG00000174145_57 (sequence is synthesized)
aaacattgcatctcaaaaggtgaagatgattgttctttcttccatatcctccttacggcatgtccttggataacttttcaaaaggtatccacacttttggttgagtttagttttcttaga

SEQ ID NO: 597869 - DNA, 120 bp, Artificial Sequence
  ENSG00000174145_58 (sequence is synthesized)
aagtagagaagtaacactttactagaataatgaacaaggaattgatttgctctaggcccagctctgccataaactcattgtgtattcctagacaggtctttaacttcatcagtgtgttgt

SEQ ID NO: 597870 - DNA, 120 bp, Artificial Sequence
  ENSG00000174145_59 (sequence is synthesized)
ttttgtgaagtgcaaaataaagatagtgatagtttctgctgtagccctcatagggacattgggaagcagtataagaaaaacttcagcaacatcatgattattgatgctaataggaaaaat

SEQ ID NO: 597871 - DNA, 120 bp, Artificial Sequence
  ENSG00000174145_60 (sequence is synthesized)
aaattcatgtaacccatagagaatccaggtcaattgtatttcctcttggaaagcagtttaacatgtaagcgttcaaagatgtgattcagataaaaatacccaggtccatagtgaaagatg

SEQ ID NO: 597872 - DNA, 120 bp, Artificial Sequence
  ENSG00000174145_61 (sequence is synthesized)
tttttcagtatgttacttatggtttagctactagccagggaggtggtagcccagagaaggcaaaccacatacagatcacctggagttgattatatgagtctatgcttttgagctctttag

SEQ ID NO: 597873 - DNA, 120 bp, Artificial Sequence
  ENSG00000174145_62 (sequence is synthesized)
gcaacacattctcattcctgtcattatcagttgaacctccatgccacacatttctaagaattaaatgcctagatggattaaatgtagtatgtgaatgttctatgtaaaagccaatagagt

SEQ ID NO: 597874 - DNA, 120 bp, Artificial Sequence
  ENSG00000174145_63 (sequence is synthesized)
atacaagtgacttgaatgatttttcctaacttgtttgcaactgatagctcatattgaatgtttttatgtaaactttgtatcgttgggaagaattacccaatcagagatttatattttcat

SEQ ID NO: 597875 - DNA, 120 bp, Artificial Sequence
  ENSG00000174145_64 (sequence is synthesized)
aaatgttacatttagttaaattttgttacagagttgttacactagaaaattatttcagtcttcaaacaatatacagtcttgtgtatgtattatttgtatgaataaaagataaactactta

SEQ ID NO: 597876 - DNA, 120 bp, Artificial Sequence
  ENSG00000174151_0 (sequence is synthesized)
gttcgggcagctggagtgtacgggcccgcgggccacggccatgcagcccctggaggtaggtctggttcccgctccagctggggagccgagactgacccgctggctgcggagaggcagtgg

SEQ ID NO: 597877 - DNA, 120 bp, Artificial Sequence
  ENSG00000174151_1 (sequence is synthesized)
gatcttggcgcacctggtagctttgggcttcaccatctttctgacagcgctgtcccggccaggaaccagtcttttctcctggcaccctgtattcatggccttggcgttctgcctctgcat

SEQ ID NO: 597878 - DNA, 120 bp, Artificial Sequence
  ENSG00000174151_2 (sequence is synthesized)
ggctgaagccatcctactcttctcacctgaacactccctgttcttcttctgctcccgaaaagcacggatccggctccactgggcagggcagaccctagccatcctctgtgcagctctggg

SEQ ID NO: 597879 - DNA, 120 bp, Artificial Sequence
  ENSG00000174151_3 (sequence is synthesized)
cctgggcttcatcatctccagcaggacccgcagtgagctgcctcatctggtgtcctggcacagctgggtgggagccctgacactgctggccactgctgtccaggcactgtgtgggctctg

SEQ ID NO: 597880 - DNA, 120 bp, Artificial Sequence
  ENSG00000174151_4 (sequence is synthesized)
cctcctttgtccccgggcagccagggtctcaagggtggctcgcctcaagctctaccatctgacatgtggactggtggtctacctgatggctacagtaacggtgcttctgggcatgtactc

SEQ ID NO: 597881 - DNA, 120 bp, Artificial Sequence
  ENSG00000174151_5 (sequence is synthesized)
agtatggttccaggcccagatcaaaggtgcggcctggtacctgtgcctggcactgcccgtctatccagccctggtgatcatgcaccagatttccagatcctacttgccgaggaagaaaat

SEQ ID NO: 597882 - DNA, 120 bp, Artificial Sequence
  ENSG00000174151_6 (sequence is synthesized)
ggaaatgtgagttcctgcgaacgctgaatctaggtgggacgcttgccttgaacatcatggttcctttggtgatctataagggatctatttaagaagtggtcaggttttcgcacttcttgg

SEQ ID NO: 597883 - DNA, 120 bp, Artificial Sequence
  ENSG00000174151_7 (sequence is synthesized)
ctggtccagggactgcagaaaccaaagctgctattgttgaggaataattcagtgggtcaaaatggggagatgtactgggtatgagtggaaggtgatggagagcctgatcctgaagcctct

SEQ ID NO: 597884 - DNA, 120 bp, Artificial Sequence
  ENSG00000174151_8 (sequence is synthesized)
acttgatgagagacagagttttgggtggtgatagtgatgtgctggtggtcatttcttgcttgtgtgcctgatgaaaaactgggttcctgtaagttatgaatggcatccagggatatttgg

SEQ ID NO: 597885 - DNA, 120 bp, Artificial Sequence
  ENSG00000174151_9 (sequence is synthesized)
gttacttttaagaaagcagtgtgatgtagtggagagagcccatgggtcttatttatgggatatggtcctcttaggctctgttgtacaaccttaggtacattccatatcttaagaccactg

SEQ ID NO: 597886 - DNA, 120 bp, Artificial Sequence
  ENSG00000174151_10 (sequence is synthesized)
tttcttcatctgtgaaatgtttctaaacaatctctaagtcccttccttctctaatatacagcgtctgtcaggtcgatgtctcagaacactctcccagctgtggaccacgtggaccactta

SEQ ID NO: 597887 - DNA, 120 bp, Artificial Sequence
  ENSG00000174151_11 (sequence is synthesized)
gcagactcagggggtagttctttactctccctttactaccctggagggacagctctgcccttgaggcccttcagaaatttgtgctgatttggtccctgtgccagggcacagggggtcagg

SEQ ID NO: 597888 - DNA, 120 bp, Artificial Sequence
  ENSG00000174151_12 (sequence is synthesized)
cactgtggaaagaagggactcaggtgagggtcttctggactctaagacggtaaaggcactaaagtcactttaaagcttttggagaagcaggagggcattggcttaaccaagccgaaggct

SEQ ID NO: 597889 - DNA, 120 bp, Artificial Sequence
  ENSG00000174151_13 (sequence is synthesized)
ccctcccccgaaatcacttctcagggcaaaggagccccaggcatctcatgctttgcccttcttagggctcaggttcttgccttagcacatagcttctgggagcttttttgaagcatttca

SEQ ID NO: 597890 - DNA, 120 bp, Artificial Sequence
  ENSG00000174151_14 (sequence is synthesized)
taagggccaaggaagtggggcagggcttttctgatccaaagaaaacaaagtttctctggttacccctcttcccttgttatctaagctttcctcagttgtcatctcttcccagctctttgg

SEQ ID NO: 597891 - DNA, 120 bp, Artificial Sequence
  ENSG00000174151_15 (sequence is synthesized)
tccaagagggggctgagtttggtgccagctggcaaatgagggctggactctcttccctccagagaccaccccgctccttgctgcagctgaaagtagttccccaggctgccctcggtggtg

SEQ ID NO: 597892 - DNA, 120 bp, Artificial Sequence
  ENSG00000174151_16 (sequence is synthesized)
aggactggatgctagactgctgagctgtggtctgggctcagttgagaagataggatctccctagatcatggcaaggcctgacaacagctgagccaggaaagtgctgctgaggcaagtcga

SEQ ID NO: 597893 - DNA, 120 bp, Artificial Sequence
  ENSG00000174151_17 (sequence is synthesized)
catagctcacagggaactctgggaagcctgggatgtaggcgctggagctccagttcccaggagcaggggcaggtgttcctagatgttagtgttgtggatgtccttggtcttctgaagatt

SEQ ID NO: 597894 - DNA, 120 bp, Artificial Sequence
  ENSG00000174151_18 (sequence is synthesized)
caggtcctcctctccgggtagcttagaagtaaggaggttggtttgattcaatagtatggggacagaatggggacagcaagggcagaagtgtcctctccacgtaactcattatgcccctcc

SEQ ID NO: 597895 - DNA, 120 bp, Artificial Sequence
  ENSG00000174151_19 (sequence is synthesized)
tgggggagattgcatctccaggacaagcatctaaaggaggcccctgctgtgcagaggggtattgttcctgtctctttcattgtcctccctcctctcaaactctccagtgtggtgtgaact

SEQ ID NO: 597896 - DNA, 120 bp, Artificial Sequence
  ENSG00000174151_20 (sequence is synthesized)
cagaagaaacggttactggggctgcatggagaatttcacctgcggtgattttgatccagggactgcatctcctctttcctcatcacagccagtgctgagaggctccttctacctgccgca

SEQ ID NO: 597897 - DNA, 120 bp, Artificial Sequence
  ENSG00000174151_21 (sequence is synthesized)
gggtaggagggccaggcaaagttcaccagcttgctctaagagcaagcaggcaatgccgtaaagcctgagcctgcctgaggtgctgcctcctcccaggtggtgcgggggctggtgggcggg

SEQ ID NO: 597898 - DNA, 120 bp, Artificial Sequence
  ENSG00000174151_22 (sequence is synthesized)
cgggcaggcgtgctgacagccggcagtttgcgtgggctgtgccatctgatgtctattcccagccctgggaggaagggggagtcatttatattctgcaggaggaaggggccccagctgtcg

SEQ ID NO: 597899 - DNA, 120 bp, Artificial Sequence
  ENSG00000174151_23 (sequence is synthesized)
cctttctgaccagcaggcctggagggcaggggcacagagcagagaggagggcactggtggtctcctgcttagcctggtctgactgcagtgtagggaataggtcaccaggaggagcccttc

SEQ ID NO: 597900 - DNA, 120 bp, Artificial Sequence
  ENSG00000174151_24 (sequence is synthesized)
atcctggcaggccggattgtggagggacttccctccccctcttttccatttctccctccatcaccacctgccctcacatcctggggcagcagctggacagccattagacctcagtgccag

SEQ ID NO: 597901 - DNA, 120 bp, Artificial Sequence
  ENSG00000174151_25 (sequence is synthesized)
ggcactcttcctccagctgggatctcagtggctcccagctgcatgggctcctgcttgtgtgttccctcctccgccatcctctgttccccgcacctcccttattctgctcatgtctggggt

SEQ ID NO: 597902 - DNA, 120 bp, Artificial Sequence
  ENSG00000174151_26 (sequence is synthesized)
attcacttggctcctcagcaaggaagcaaacgccttggaggagaagcacatggttgcccttttgtccttgctccctggctagggaaagctgctagtggtcagcctgttttgccttttttt

SEQ ID NO: 597903 - DNA, 120 bp, Artificial Sequence
  ENSG00000174151_27 (sequence is synthesized)
ctaaggaacttcttgtggtttgggggaggtggtgaggatgtgggtggtgggtgggtggggggtgttgaagagatgcagccatggacttccttgggcttggcacaggccaaaacagaagag

SEQ ID NO: 597904 - DNA, 120 bp, Artificial Sequence
  ENSG00000174151_28 (sequence is synthesized)
agaactccaaactccaagtagtcctcatcagacttgctctccttatcagcttcatcctgtcagccaaattgtcagccatagaaaaactgctttgcagatgaaaaactatataaatgcaga

SEQ ID NO: 597905 - DNA, 120 bp, Artificial Sequence
  ENSG00000174151_29 (sequence is synthesized)
gtatgggagtgctctgacatcaacagctgtcatttcactgactgccaaggttgacttgtctgatgtggctggttgtgcagtagctccacccctcgtcaccttggttgttcctcctgaagt

SEQ ID NO: 597906 - DNA, 120 bp, Artificial Sequence
  ENSG00000174151_30 (sequence is synthesized)
gaaaaacaactttccaaatagaggagggctgcccttcggtcaagactttaggtaagtattcaaattcgcattcttttaatttttttcctggtatcatttcctctccctctttggaatctg

SEQ ID NO: 597907 - DNA, 120 bp, Artificial Sequence
  ENSG00000174151_31 (sequence is synthesized)
gggaggccgacgcgggtggatcacttgaggtcttttctcctggcaccctgtattcatggccttggcggatgtatgagagcacctcctttttctcaggcctccaagccagacatgaggctt

SEQ ID NO: 597908 - DNA, 120 bp, Artificial Sequence
  ENSG00000174151_32 (sequence is synthesized)
ggtgcttagattttaaaaatttgcgtgtcatttgcacaaattttcatatcaagctaagtcctgattccaaatttgattatattccaaatttgattatattccaaatttgattatattcag

SEQ ID NO: 597909 - DNA, 120 bp, Artificial Sequence
  ENSG00000174151_33 (sequence is synthesized)
attcaaccttgaggacattagaaatatagatggcttctgtatccaaatctgaatggaaatgagattacccttctgggttcagatacccctcccaagcccccgtcttttctgtaaccaccc

SEQ ID NO: 597910 - DNA, 120 bp, Artificial Sequence
  ENSG00000174151_34 (sequence is synthesized)
ctcctctgagccccatcatggctggggttggtatggaatgggagcagctctgtatctggggaagtcctccagcctcaccttcttggctcttaagtggtaggctgttaccacttgccagcc

SEQ ID NO: 597911 - DNA, 120 bp, Artificial Sequence
  ENSG00000174151_35 (sequence is synthesized)
tgggcctcctctctccccaccctttcacaaggcaggctgcccttccgcactcactggcccatcccttctttctcatcgtcccacccttccacccccgtgcatggctgctgtaggtctggt

SEQ ID NO: 597912 - DNA, 83 bp, Artificial Sequence
  ENSG00000174151_36 (sequence is synthesized)
ccacccttccacccccgtgcatggctgctgtaggtctggtttttttggtttttgttttttttaagacggagtctcactctgcc

SEQ ID NO: 597913 - DNA, 120 bp, Artificial Sequence
  ENSG00000174151_37 (sequence is synthesized)
gtgattacaggcgtgagccaccgtgcctagccaggtcttgttttgaaaacctcactgtgggagattcaggcatcctccctaagccagctggccgctgtgctaaagcctgttcagagttaa

SEQ ID NO: 597914 - DNA, 120 bp, Artificial Sequence
  ENSG00000174151_38 (sequence is synthesized)
taaagcctgttcagagttaataataatcattagctgaatggtgctggggcctttcagcttcagatctctaagcacttgcaggctgagtcagtcagccctcaccttccccctccttcctgg

SEQ ID NO: 597915 - DNA, 120 bp, Artificial Sequence
  ENSG00000174151_39 (sequence is synthesized)
gctgcagagtgtaacagaatgggaaggcactgtgggaaggaagtcaggaatcttgctgctagccacgccttgcagtgacttctcgtctgggagtgggcactgagtcctctcagtaaacta

SEQ ID NO: 597916 - DNA, 120 bp, Artificial Sequence
  ENSG00000174151_40 (sequence is synthesized)
ataagacttgcacctgacaaaggtcaagatatgtagggaacacagtgtatgctaggctgagacctatggtggtggcaggggtggctgttgagcctgaacttccagtactcctgcccttcc

SEQ ID NO: 597917 - DNA, 120 bp, Artificial Sequence
  ENSG00000174151_41 (sequence is synthesized)
ttctgtttacctggcttggcctacagggggcacccctggtcttgatgcctcaagcccagcatttctgggtcccctctgcaagctcagagagcagggaggcttctggtagtgctcttgatg

SEQ ID NO: 597918 - DNA, 120 bp, Artificial Sequence
  ENSG00000174151_42 (sequence is synthesized)
ctcctgtgtctggttggcacaaagatcctgtgtaacatgaaatgaaaggtgcatcagcttgggggctgggaaacctgcagtatgggtttactccgtccctatcactggtgtggctgtggg

SEQ ID NO: 597919 - DNA, 120 bp, Artificial Sequence
  ENSG00000174151_43 (sequence is synthesized)
caaaccacttattgcctgacctacctcacagggatgttgtgagggtttgatgagagaatgaatgttaataggaattggaaaattcaaagcattaaacacatgtaaacaggtggtattatt

SEQ ID NO: 597920 - DNA, 120 bp, Artificial Sequence
  ENSG00000174151_44 (sequence is synthesized)
atcgcaaacccggaagacgtgttcgggcagctggagtgtacgggcccgcgggccacggccatgcagcccctggaggtcttttctcctggcaccctgtattcatggccttggcgttctgcc

SEQ ID NO: 597921 - DNA, 120 bp, Artificial Sequence
  ENSG00000174156_0 (sequence is synthesized)
atacacatcaggaggtggccttgagaagctgagcggagaccggctagactttactcaaagaaaccaagagactgttaccatggcagggaagcccaagcttcactacttcaatggacgggg

SEQ ID NO: 597922 - DNA, 120 bp, Artificial Sequence
  ENSG00000174156_1 (sequence is synthesized)
cagaatggagcccatccggtggctcttggctgcagctggagtggagtttgaagagaaatttataggatctgcagaagatttgggaaagttaagaaatgatgggagtttgatgttccagca

SEQ ID NO: 597923 - DNA, 120 bp, Artificial Sequence
  ENSG00000174156_2 (sequence is synthesized)
agtaccaatggttgagattgatgggatgaagttggtacagaccagagccattctcaactacattgccagcaaatacaacctctacgggaaagacataaaggagagagccctaattgatat

SEQ ID NO: 597924 - DNA, 120 bp, Artificial Sequence
  ENSG00000174156_3 (sequence is synthesized)
aagatgccaagattgccttgatcaaagagaaaacaaaaagtcgctatttccctgccttcgaaaaagtgttacagagccatggacaagactaccttgttggcaacaagctgagccgggctg

SEQ ID NO: 597925 - DNA, 120 bp, Artificial Sequence
  ENSG00000174156_4 (sequence is synthesized)
acattagcctggtggaacttctctactatgtggaagagcttgactccagccttatctccaacttccctctgctgaaggccctgaaaaccagaatcagcaacctgcccacggtgaagaagt

SEQ ID NO: 597926 - DNA, 120 bp, Artificial Sequence
  ENSG00000174156_5 (sequence is synthesized)
ttctacagcctggcagcccaaggaagcctcccgcagatgcaaaagctttagaagaagccagaaagattttcaggttttaataaagcagccatggaggctaagaacatgcaagaccaatat

SEQ ID NO: 597927 - DNA, 120 bp, Artificial Sequence
  ENSG00000174156_6 (sequence is synthesized)
tctaaagttttgcaacaatgaagtgctttacttaagtgttgattgtgcctgttgtaaagctaatgaaccctttccaattatatgctaattaaataataaaaactcctatttgctaactta

SEQ ID NO: 597928 - DNA, 120 bp, Artificial Sequence
  ENSG00000174156_7 (sequence is synthesized)
ccaagattgccttgatcaaagagaaaacaaaaagtcgctatttccctgccttccgggctgacattagcctggtggaacttctctactatgtggaagagcttgactccagccttatctcca

SEQ ID NO: 597929 - DNA, 120 bp, Artificial Sequence
  ENSG00000174165_0 (sequence is synthesized)
ggaagcggcctagtcctccggctccgacagctgggtgtccaggccatggggcagccctgggcggctgggagcacggacggggcgcccgcgcagctgcctctcgtgctcaccgcgctgtgg

SEQ ID NO: 597930 - DNA, 120 bp, Artificial Sequence
  ENSG00000174165_1 (sequence is synthesized)
gccgcggccgtgggcctggagctggcttacgtgctggtgctcggtcccgggccgccgccgctgggacccctggcccgggccttgcagctggcgctggccgccttccagctgctcaacctg

SEQ ID NO: 597931 - DNA, 120 bp, Artificial Sequence
  ENSG00000174165_2 (sequence is synthesized)
ctgggcaacgtggggctcttcctgcgctcggatcccagcatccgtggcgtgatgctggccggccgcggtctgggccagggctgggcttactgctaccaatgccaaagccaggtgccgcca

SEQ ID NO: 597932 - DNA, 120 bp, Artificial Sequence
  ENSG00000174165_3 (sequence is synthesized)
cgcagcggacactgctctgcctgccgcgtctgcatcctgcgtcgggaccaccactgccgcctgctgggccgctgcgtgggcttcggcaactaccggcccttcctgtgcctgctgcttcat

SEQ ID NO: 597933 - DNA, 120 bp, Artificial Sequence
  ENSG00000174165_4 (sequence is synthesized)
gccgccggcgtcctgctccacgtctctgtgctgctgggccctgcactgtcggccctgctgcgagcccacacgcccctccacatggctgccctcctcctgcttccctggctcatgttgctc

SEQ ID NO: 597934 - DNA, 120 bp, Artificial Sequence
  ENSG00000174165_5 (sequence is synthesized)
acaggcagagtgtctctggcacagtttgccttggccttcgtgacggacacgtgcgtggcgggtgcgctgctgtgcggggctgggctgctcttccatgggatgctgctgctgcggggccag

SEQ ID NO: 597935 - DNA, 120 bp, Artificial Sequence
  ENSG00000174165_6 (sequence is synthesized)
accacatgggagtgggctcggggccagcactcctatgacctgggtccctgccacaacctgcaggcagccctggggccccgctgggccctcgtctggctctggcccttcctggcctcccca

SEQ ID NO: 597936 - DNA, 120 bp, Artificial Sequence
  ENSG00000174165_7 (sequence is synthesized)
ttgcctggggatgggatcaccttccagaccacagcagatgtgggacacacagcctcctgactccaggaagagccagagctgtgcagggaggaaggggtgagaggggggcccccacaccta

SEQ ID NO: 597937 - DNA, 120 bp, Artificial Sequence
  ENSG00000174165_8 (sequence is synthesized)
gactcagtaaggaagtcgggttggaccttaacatctgcattggacaactccaccccttccttggccttgcccctgcccgcctacactcctacgtgtccagggcttgggccgtgacttagg

SEQ ID NO: 597938 - DNA, 120 bp, Artificial Sequence
  ENSG00000174165_9 (sequence is synthesized)
cagaggagtgcagaggagggtctggcaggggctgctcaggccgcctagctgcccctttgccaggttaataaagcactgacttgtttctcagcctccctccatctttgcatagtttctggc

SEQ ID NO: 597939 - DNA, 120 bp, Artificial Sequence
  ENSG00000174165_10 (sequence is synthesized)
ccctcactttgttgctggggctgtttctgggaccctctgtagggcctggaaactgcaggatgcctgagggtctcaggggctggggctctacctcccctggcctgggtgagttgggggtgg

SEQ ID NO: 597940 - DNA, 120 bp, Artificial Sequence
  ENSG00000174165_11 (sequence is synthesized)
ggcaccagcacgccaaggcagtgtcctactgatccaggctatgagaatccaaacattctttcccaggtttggcattttatagttagaagcatttctgcaacagcagtttcatggaacctc

SEQ ID NO: 597941 - DNA, 120 bp, Artificial Sequence
  ENSG00000174165_12 (sequence is synthesized)
tcttagctaacctggtccatggggcagcagttacgctctaagaatccatgtggtaagatcatggtgcggcaaatggaggcagggtccaacccaggtctttgtgcttttgcctttaccctt

SEQ ID NO: 597942 - DNA, 120 bp, Artificial Sequence
  ENSG00000174165_13 (sequence is synthesized)
gcacagctggaggaaatgagtaggaaagaaatcaaggtaaagaaatgcgctggggctgtttgggcatctgtggagggtggtgctgacagggctaggcctgcacctctctggcctcctcaa

SEQ ID NO: 597943 - DNA, 120 bp, Artificial Sequence
  ENSG00000174165_14 (sequence is synthesized)
gagctgcttgttaaatgtttccgtgtaaatagaatgaatagagaccgccatttccacatggcaggcctaaacacatgtgttcgtctcagttttctcttaggatctctctaagatgatagt

SEQ ID NO: 597944 - DNA, 120 bp, Artificial Sequence
  ENSG00000174165_15 (sequence is synthesized)
aaagaaaatcaaaaataatacaaagggaaagaaaacaggagggaagacagtagaacacagagcctgaccacattttcttttttctctctgttgccggggctggagtgcagtggcacgatc

SEQ ID NO: 597945 - DNA, 84 bp, Artificial Sequence
  ENSG00000174165_16 (sequence is synthesized)
tggcctcccgagttgctgggattacagacacccgccactatgcccggctgatttttttttttttcttttttgagacggagtttt

SEQ ID NO: 597946 - DNA, 63 bp, Artificial Sequence
  ENSG00000174165_17 (sequence is synthesized)
cccacttgaattcctggcacctgcctccacctccgtctcccaaagtgctaggattacaggcgt

SEQ ID NO: 597947 - DNA, 74 bp, Artificial Sequence
  ENSG00000174165_18 (sequence is synthesized)
ttggccaggctgaacttgaattcctggcacctgcctccacctcctgacaattttttattattttattttatttt

SEQ ID NO: 597948 - DNA, 120 bp, Artificial Sequence
  ENSG00000174165_19 (sequence is synthesized)
gacattttcaaagatggaaagtggatggagaattaagagctgaaattatgtgttcccaaaaggtggggccaaaaggcaagtggaattacctgccagagccccggaggggctcaggaactc

SEQ ID NO: 597949 - DNA, 120 bp, Artificial Sequence
  ENSG00000174165_20 (sequence is synthesized)
caccaggaccatggagggtgaggtgaggcttcggccaacaatggggaccgatggaaagtctatgtaaggatcagtggggtgccgctcccccacatcccacccacaccccacccacatcat

SEQ ID NO: 597950 - DNA, 120 bp, Artificial Sequence
  ENSG00000174165_21 (sequence is synthesized)
gcagccagcagctacacctctgggtggggtggtgtgacgtgaggattatttgaaggataaatggaaccagagaagcttcgggtcttaggcgtactggggaggggtgggtgagaggctaga

SEQ ID NO: 597951 - DNA, 120 bp, Artificial Sequence
  ENSG00000174165_22 (sequence is synthesized)
ccaaaaaatggggttaagtgaaagtccatagatactgctggggggcctcccatgaaagaacatgcttgacccccaagaaccttcagagaaacccaccctctgacaggctctgcccatgcc

SEQ ID NO: 597952 - DNA, 120 bp, Artificial Sequence
  ENSG00000174165_23 (sequence is synthesized)
cacaaagatctgagctgcttggctggttgtttttgtaacaggcatgctctgttgctattttttaatgacaggaggaacttggtgtacctggcactttgggctgcacagacgcattagcag

SEQ ID NO: 597953 - DNA, 120 bp, Artificial Sequence
  ENSG00000174165_24 (sequence is synthesized)
tggcactttgggctgcacagacgcattagcagactcaccttgtcctgtttcatccctcgccctccacaatttcttattttctttctttctctttttattttttgagacagagtttcactc

SEQ ID NO: 597954 - DNA, 82 bp, Artificial Sequence
  ENSG00000174165_25 (sequence is synthesized)
actcttgttacccaggctggagtgcaatgatgcgatcttggttcaccgcagcctctcggtagctgggattacaggcatgtgc

SEQ ID NO: 597955 - DNA, 120 bp, Artificial Sequence
  ENSG00000174165_26 (sequence is synthesized)
gggattacaggtatgagccactgcgcccagcccacaatatcttattttcatgtttttttgtgtgttttgttttatttttcgagatggagtctctctgttgcccaagctggagtgcaatgg

SEQ ID NO: 597956 - DNA, 78 bp, Artificial Sequence
  ENSG00000174165_27 (sequence is synthesized)
actgggattgcaggcacccaccatcatgccctgctaaattttgtacttttgtagagatggagtttcaccatgttggtc

SEQ ID NO: 597957 - DNA, 89 bp, Artificial Sequence
  ENSG00000174165_28 (sequence is synthesized)
tcgttgttgttgttgtttttaattagtgaggagctacaagaacacatttataaaaattaagaggaaacagccccactgcatttgagaag

SEQ ID NO: 597958 - DNA, 120 bp, Artificial Sequence
  ENSG00000174165_29 (sequence is synthesized)
ataaaaattaagaggaaacagccccactgcatttgagaaggttaccatttccttcgaagttcctgctgttgccccttcctggtgggggagacactgtcctgtttcagtcattccgttgct

SEQ ID NO: 597959 - DNA, 120 bp, Artificial Sequence
  ENSG00000174165_30 (sequence is synthesized)
ttgctttatagttttattaatgtgtttgtgttggctttgcatgttttcaaatatatgaatgaaatcatgcagagtttattcttttacagtttgccttttcacttgattatgttcctgaga

SEQ ID NO: 597960 - DNA, 120 bp, Artificial Sequence
  ENSG00000174165_31 (sequence is synthesized)
tgtatccggattattgtgtgtagctgtatggcattccttttccctgctgcctagtgatccattgaaaatacaataattgatttttctatgtggttccactggtcatttttctgcccctgt

SEQ ID NO: 597961 - DNA, 120 bp, Artificial Sequence
  ENSG00000174165_32 (sequence is synthesized)
gccctttgggaatcatctcctaaactctagtctcggcccttgctcttccatgtaaccttgagaatcagcttgtcaaattccccccaaaaaccccttgagatgtagaatggaacccagctg

SEQ ID NO: 597962 - DNA, 120 bp, Artificial Sequence
  ENSG00000174165_33 (sequence is synthesized)
aatctatagatcagtctggataaaatcagcacctgtgtaaaattgaattttcccattcatgagcagggtttatttctgcactcaatgttttcaataaagttgtgtaccttttcccataaa

SEQ ID NO: 597963 - DNA, 120 bp, Artificial Sequence
  ENSG00000174165_34 (sequence is synthesized)
gggccctgtggaaatcaagggtgtctggaagtttgcatgaacagccccctcaatgcctggatggcttagctcttggcctcctccttcatttttccttcctttccctcctcccatgtccac

SEQ ID NO: 597964 - DNA, 120 bp, Artificial Sequence
  ENSG00000174165_35 (sequence is synthesized)
accccagtcctggtcagaatccaaaaatgagtcaccctcacaaaccacccatcttcctctttctgctgcccacctcctcttctctccgtcttttactcctccacgccctggcacctgctc

SEQ ID NO: 597965 - DNA, 120 bp, Artificial Sequence
  ENSG00000174165_36 (sequence is synthesized)
ttccctggctcatgttgctcacagcaccttccagcctgaggaacagtgatttgcaggcaacgtgtacctcctaggctgtccctggatttgcagagatggagtctcgctctgttgtccagg

SEQ ID NO: 597966 - DNA, 120 bp, Artificial Sequence
  ENSG00000174165_37 (sequence is synthesized)
gggattacagccttaaagcccactctcatcttgcaagcctctgaagccaccagttttctgagatgttcctcccggccccggagaccacggatgtggctaccttctcagaatatagatgtt

SEQ ID NO: 597967 - DNA, 120 bp, Artificial Sequence
  ENSG00000174165_38 (sequence is synthesized)
tccattgcggcaggccgcggcaagccggaactcaacatcaaactggccagaaacctctaggaagacggggacgctgggaaggctcatctgcaaacaagaagcgcaaacactccaatttct

SEQ ID NO: 597968 - DNA, 120 bp, Artificial Sequence
  ENSG00000174165_39 (sequence is synthesized)
ctggagcccccgtccctccctgccctgtcagtaactcctctgagtgagtgcctggtctaaagtcccaatctcctcacttacacccagtttaaactcatacagtttttcaggagggaaact

SEQ ID NO: 597969 - DNA, 120 bp, Artificial Sequence
  ENSG00000174165_40 (sequence is synthesized)
tggggcaacatttagcaaaagccttttagtctgtgccttttgactaaacgatgccacttctaggactgcatcctaaggatgtacttaaacaaccgtgcagctgggtgtggtggcccacac

SEQ ID NO: 597970 - DNA, 80 bp, Artificial Sequence
  ENSG00000174165_41 (sequence is synthesized)
caaaactttgtctctaccaaaagtacaaaacttagctgggcgtggtggtcccacagatgagaagatgaggtgagaggact

SEQ ID NO: 597971 - DNA, 120 bp, Artificial Sequence
  ENSG00000174165_42 (sequence is synthesized)
cgtggtggtcccacagatgagaagatgaggtgagaggactgtttgagcccaggtggcataggttgcagtaagctgagattgtaccactgcacttcagcctgggcaagagaacaagattgt

SEQ ID NO: 597972 - DNA, 120 bp, Artificial Sequence
  ENSG00000174165_43 (sequence is synthesized)
ctcaaaaacaaacaaacaagcatgcaaggatatttgggtaaaaaggtctatagcattggtattaatagcaaaaaatgaaaaacagtttaaatgtacaataggtgacagggtaaataaatt

SEQ ID NO: 597973 - DNA, 120 bp, Artificial Sequence
  ENSG00000174165_44 (sequence is synthesized)
cactccgcggcgttatccgggctccagcgccgcgggattccgagcgcctccactgctggtccgttggccagatcaactcgccgcgtgggccggccgttccctgagagtctgagcgctcgc

SEQ ID NO: 597974 - DNA, 120 bp, Artificial Sequence
  ENSG00000174165_45 (sequence is synthesized)
caaagaggagtccttggtgtccacgctcgatattgtgcatgtgtctccagcagcttagtgagcaccctcgcctgcctcctgctcatctccacagggaggtcccatcaacacctcaggctc

SEQ ID NO: 597975 - DNA, 120 bp, Artificial Sequence
  ENSG00000174173_0 (sequence is synthesized)
ggtcggctgtgtagactgttgggtaggctgcgtgctagcttcggcgcggatccctgggcgtccgtacgtcggagtccttcgtcctccagggtccctgttctttgcgccagcgggaaccac

SEQ ID NO: 597976 - DNA, 120 bp, Artificial Sequence
  ENSG00000174173_1 (sequence is synthesized)
tatctctgcactcctggggttttgttacatggctgctttcctcaaaatgagtgttagtgtcaatttcttcagacctttcaccaggtttttggtgccatttacccttcataggaagagaaa

SEQ ID NO: 597977 - DNA, 120 bp, Artificial Sequence
  ENSG00000174173_2 (sequence is synthesized)
taacttaacaattttgcagagatacatgtcttccaaaataccagctgttacttatcctaaaaatgagagtacacccccttctgaagagctagagttggataagtggaaaactaccatgaa

SEQ ID NO: 597978 - DNA, 120 bp, Artificial Sequence
  ENSG00000174173_3 (sequence is synthesized)
atctagtgtgcaagaagaatgtgtttcaacaatctcaagcagtaaggatgaagatcctctagctgccaccagagagttcattgagatgtggagattgcttggcagagaagtaccagaaca

SEQ ID NO: 597979 - DNA, 120 bp, Artificial Sequence
  ENSG00000174173_4 (sequence is synthesized)
catcactgaagaagagctcaaaacccttatggaatgtgtttctaacacagcaaaaaaaaaatatttaaaatatttatatacgaaggaaaaagtgaaaaaagctaggcaaataaaaaagga

SEQ ID NO: 597980 - DNA, 120 bp, Artificial Sequence
  ENSG00000174173_5 (sequence is synthesized)
aatgaaagcagcagcaagggaagaagcaaaaaatatcaagctgctagaaaccactgaggaagataaacagaaaaactttctatttttacgactttgggataggaatatggacatagcaat

SEQ ID NO: 597981 - DNA, 120 bp, Artificial Sequence
  ENSG00000174173_6 (sequence is synthesized)
gggctggaagggtgcccaggccatgcagtttggacaacctttggtttttgacatggcttacgaaaattatatgaaacgaaaagaattgcagaatactgtttcccagcttttagaaagtga

SEQ ID NO: 597982 - DNA, 120 bp, Artificial Sequence
  ENSG00000174173_7 (sequence is synthesized)
agaaatgttgatcctttccatatttatttctgcaatctaaaaatagatggtgctttgcacagagagttagttaaacggtatcaagaaaaatgggacaaattgcttttaacatcaacagaa

SEQ ID NO: 597983 - DNA, 120 bp, Artificial Sequence
  ENSG00000174173_8 (sequence is synthesized)
aagtctcatgtagatttatttccaaaggacagtattatctatttaactgcagattctcccaatgttatgactactttcaggcatgacaaagtttatgtaattgggtcttttgttgataag

SEQ ID NO: 597984 - DNA, 120 bp, Artificial Sequence
  ENSG00000174173_9 (sequence is synthesized)
agtatgcagccaggcacatccctagccaaggcaaaacggctgaacctggcaactgaatgccttccattagataaatatttacaatgggaaattggtaacaaaaatctcaccttagatcaa

SEQ ID NO: 597985 - DNA, 120 bp, Artificial Sequence
  ENSG00000174173_10 (sequence is synthesized)
atgatacgtattttgttatgtctgaaaaacaatggtaattggcaagaggctctgcaattcgttcccaagagaaaacatactggttttctggagatttctcagcattctcaagagtttatc

SEQ ID NO: 597986 - DNA, 120 bp, Artificial Sequence
  ENSG00000174173_11 (sequence is synthesized)
aacagactaaagaaggcaaagacttaattcattttcaaaaggttctctgaatgtgcacagaacacgtggctcaaatgagaacatttgatggcttaaaaagtaaatgcgttagaaatacag

SEQ ID NO: 597987 - DNA, 120 bp, Artificial Sequence
  ENSG00000174173_12 (sequence is synthesized)
ttctgttaatgtatttcttcccaaacaattcatttttctcttctaaaggtagtctttcccaactgactgtagggttgtgtcttttcccaattaaatatctgcagaactttgggattatac

SEQ ID NO: 597988 - DNA, 120 bp, Artificial Sequence
  ENSG00000174173_13 (sequence is synthesized)
tttgtttactgtagaaagataataaaaagagttgtccaagattgttgaacagaataatctttatcccagttaaatagttgtaccattggtagacttttttatggaggttcctagagggtg

SEQ ID NO: 597989 - DNA, 120 bp, Artificial Sequence
  ENSG00000174173_14 (sequence is synthesized)
gtgccctggggtgggcttggaagctctgcaccccttcccccatagctttccccgtgcatctctttgtctgtatgttttgtaatatcttttacagtaaactggtaaatgtgtttccttcaa

SEQ ID NO: 597990 - DNA, 120 bp, Artificial Sequence
  ENSG00000174175_0 (sequence is synthesized)
agcagtctgggttgggcagaaggcagaaaaccagcagagtcacagaggagatggccaactgccaaatagccatcttgtaccagagattccagagagtggtctttggaatttcccaactcc

SEQ ID NO: 597991 - DNA, 120 bp, Artificial Sequence
  ENSG00000174175_1 (sequence is synthesized)
tttgcttcagtgccctgatctctgaactaacaaaccagaaagaagtggcagcatggacttatcattacagcacaaaagcatactcatggaatatttcccgtaaatactgccagaatcgct

SEQ ID NO: 597992 - DNA, 120 bp, Artificial Sequence
  ENSG00000174175_2 (sequence is synthesized)
acacagacttagtggccatccagaataaaaatgaaattgattacctcaataaggtcctaccctactacagctcctactactggattgggatccgaaagaacaataagacatggacatggg

SEQ ID NO: 597993 - DNA, 120 bp, Artificial Sequence
  ENSG00000174175_3 (sequence is synthesized)
tgggaaccaaaaaggctctcaccaacgaggctgagaactgggctgataatgaacctaacaacaaaaggaacaacgaggactgcgtggagatatacatcaagagtccgtcagcccctggca

SEQ ID NO: 597994 - DNA, 120 bp, Artificial Sequence
  ENSG00000174175_4 (sequence is synthesized)
agtggaatgatgagcactgcttgaagaaaaagcacgcattgtgttacacagcctcctgccaggacatgtcctgcagcaaacaaggagagtgcctcgagaccatcgggaactacacctgct

SEQ ID NO: 597995 - DNA, 120 bp, Artificial Sequence
  ENSG00000174175_5 (sequence is synthesized)
cctgttaccctggattctatgggccagaatgtgaatacgtgagagagtgtggagaacttgagctccctcaacacgtgctcatgaactgcagccaccctctgggaaacttctcttttaact

SEQ ID NO: 597996 - DNA, 120 bp, Artificial Sequence
  ENSG00000174175_6 (sequence is synthesized)
cgcagtgcagcttccactgcactgacgggtaccaagtaaatgggcccagcaagctggaatgcttggcttctggaatctggacaaataagcctccacagtgtttagctgcccagtgcccac

SEQ ID NO: 597997 - DNA, 120 bp, Artificial Sequence
  ENSG00000174175_7 (sequence is synthesized)
ccctgaagattcctgaacgaggaaacatgacctgccttcattctgcaaaagcattccagcatcagtctagctgcagcttcagttgtgaagagggatttgcattagttggaccggaagtgg

SEQ ID NO: 597998 - DNA, 120 bp, Artificial Sequence
  ENSG00000174175_8 (sequence is synthesized)
tgcaatgcacagcctcgggggtatggacagccccagccccagtgtgtaaagctgtgcagtgtcagcacctggaagcccccagtgaaggaaccatggactgtgttcatccgctcactgctt

SEQ ID NO: 597999 - DNA, 120 bp, Artificial Sequence
  ENSG00000174175_9 (sequence is synthesized)
ttgcctatggctccagctgtaaatttgagtgccagcccggctacagagtgaggggcttggacatgctccgctgcattgactctggacactggtctgcacccttgccaacctgtgaggcta

SEQ ID NO: 598000 - DNA, 120 bp, Artificial Sequence
  ENSG00000174175_10 (sequence is synthesized)
tttcgtgtgagccgctggagagtcctgtccacggaagcatggattgctctccatccttgagagcgtttcagtatgacaccaactgtagcttccgctgtgctgaaggtttcatgctgagag

SEQ ID NO: 598001 - DNA, 120 bp, Artificial Sequence
  ENSG00000174175_11 (sequence is synthesized)
gagccgatatagttcggtgtgataacttgggacagtggacagcaccagccccagtctgtcaagctttgcagtgccaggatctcccagttccaaatgaggcccgggtgaactgctcccacc

SEQ ID NO: 598002 - DNA, 120 bp, Artificial Sequence
  ENSG00000174175_12 (sequence is synthesized)
ccttcggtgcctttaggtaccagtcagtctgcagcttcacctgcaatgaaggcttgctcctggtgggagcaagtgtgctacagtgcttggctactggaaactggaattctgttcctccag

SEQ ID NO: 598003 - DNA, 120 bp, Artificial Sequence
  ENSG00000174175_13 (sequence is synthesized)
tcagaatggaacaatgacctgtgttcaacctcttggaagttccagttataaatccacatgtcaattcatctgtgacgagggatattctttgtctggaccagaaagattggattgtactcg

SEQ ID NO: 598004 - DNA, 120 bp, Artificial Sequence
  ENSG00000174175_14 (sequence is synthesized)
atcgggacgctggacagactccccaccaatgtgtgaagccatcaagtgcccagaactctttgccccagagcagggcagcctggattgttctgacactcgtggagaattcaatgttggctc

SEQ ID NO: 598005 - DNA, 120 bp, Artificial Sequence
  ENSG00000174175_15 (sequence is synthesized)
cacctgccatttctcttgtgacaacggctttaagctggaggggcccaataatgtggaatgcacaacttctggaagatggtcagctactccaccaacctgcaaaggcatagcatcacttcc

SEQ ID NO: 598006 - DNA, 120 bp, Artificial Sequence
  ENSG00000174175_16 (sequence is synthesized)
tactccaggggtgcaatgtccagccctcaccactcctgggcagggaaccatgtactgtaggcatcatccgggaacctttggttttaataccacttgttactttggctgcaacgctggatt

SEQ ID NO: 598007 - DNA, 120 bp, Artificial Sequence
  ENSG00000174175_17 (sequence is synthesized)
cacactcataggagacagcactctcagctgcagaccttcaggacaatggacagcagtaactccagcatgcagagctgtgaaatgctcagaactacatgttaataagccaatagcgatgaa

SEQ ID NO: 598008 - DNA, 120 bp, Artificial Sequence
  ENSG00000174175_18 (sequence is synthesized)
ctgctccaacctctggggaaacttcagttatggatcaatctgctctttccattgtctagagggccagttacttaatggctctgcacaaacagcatgccaagagaatggccactggtcaac

SEQ ID NO: 598009 - DNA, 120 bp, Artificial Sequence
  ENSG00000174175_19 (sequence is synthesized)
taccgtgccaacctgccaagcaggaccattgactatccaggaagccctgacttactttggtggagcggtggcttctacgataggtctgataatgggtgggacgctcctggctttgctaag

SEQ ID NO: 598010 - DNA, 120 bp, Artificial Sequence
  ENSG00000174175_20 (sequence is synthesized)
aaagcgtttcagacaaaaagatgatgggaaatgccccttgaatcctcacagccacctaggaacatatggagtttttacaaacgctgcatttgacccgagtccttaaggtttccataaaca

SEQ ID NO: 598011 - DNA, 120 bp, Artificial Sequence
  ENSG00000174175_21 (sequence is synthesized)
cccatgaatcaaagacatggaattaccttagattagctctggaccagcctgttggacccgctctggaccaaccctgtttcctgagtttgggattgtggtacaatctcaaattctcaacct

SEQ ID NO: 598012 - DNA, 120 bp, Artificial Sequence
  ENSG00000174175_22 (sequence is synthesized)
accaccccttcctgtcccacctcttctcttcctgtaacacaagccacagaagccaggagcaaatgtttctgcagtagtctctgtgctttgactcacctgttacttgaaataccagtgaac

SEQ ID NO: 598013 - DNA, 120 bp, Artificial Sequence
  ENSG00000174175_23 (sequence is synthesized)
caaagagactggagcatctgactcacaagaagaccagactgtggagaaataaaaatacctctttattttttgattgaaggaaggttttctccactttgttggaaagcaggtggcatctct

SEQ ID NO: 598014 - DNA, 120 bp, Artificial Sequence
  ENSG00000174175_24 (sequence is synthesized)
aattggaagaaattcctgtagcatcttctggagtctccagtggttgctgttgatgaggcctcttggacctctgctctgaggcttccagagagtcctctggatggcaccagaggctgcaga

SEQ ID NO: 598015 - DNA, 120 bp, Artificial Sequence
  ENSG00000174175_25 (sequence is synthesized)
aggccaagaatcaagctagaaggccacatgtcaccgtggaccttcctgccaccagtcactgtccctcaaatgacccaaagaccaatattcaaatgcgtaattaaaagaattttccccaaa

SEQ ID NO: 598016 - DNA, 120 bp, Artificial Sequence
  ENSG00000174175_26 (sequence is synthesized)
aagagacctgtccttttcctggtctcctcattcagcctccatatgatcctgttgtgaacatcaagtttcctgctacactggacttaactataatgcatttgctgcaggtttccataaaca

SEQ ID NO: 598017 - DNA, 120 bp, Artificial Sequence
  ENSG00000174175_27 (sequence is synthesized)
cctcctgaaaatcagtctactggttttccccagtaatttctatccttaatgaccctctctttcatcttgttttttttttttaatcattcattcttgtcttcttgctgattttagatgatg

SEQ ID NO: 598018 - DNA, 120 bp, Artificial Sequence
  ENSG00000174177_0 (sequence is synthesized)
tcgcgctgtcgccgccacagtctgcgacgggacccggcgtgcccatgtgtcaggtgggcgaggactacggggagccggcgcctgaggagccgcccccggcgccgcggcccagccgtgagc

SEQ ID NO: 598019 - DNA, 120 bp, Artificial Sequence
  ENSG00000174177_1 (sequence is synthesized)
gagcagaagtgtgtgaagtgcaaggaagcgcagcccgttgtggtgatacgagccggagatgccttctgcagggactgtttcaaggccttctacgtccacaagttcagagccatgctgggc

SEQ ID NO: 598020 - DNA, 120 bp, Artificial Sequence
  ENSG00000174177_2 (sequence is synthesized)
aagaaccggctcatctttccaggcgagaaggtgctcttggcgtggtctggggggccttcgtccagctccatggtctggcaggttcttgagggcctgagccaagattctgccaaaagactg

SEQ ID NO: 598021 - DNA, 120 bp, Artificial Sequence
  ENSG00000174177_3 (sequence is synthesized)
cgctttgtggcaggagtcatctttgttgacgagggagcagcctgtggccagagcctagaggagagatcaaagaccctggccgaagtgaagcccattctgcaagcaactgggttcccatgg

SEQ ID NO: 598022 - DNA, 120 bp, Artificial Sequence
  ENSG00000174177_4 (sequence is synthesized)
catgtggtggccttagaggaggtgttcagcctgccaccgtcggtgctttggtgctctgcccaggagctggtgggatccgagggggcctacaaggcggccgtggacagcttcctccagcag

SEQ ID NO: 598023 - DNA, 120 bp, Artificial Sequence
  ENSG00000174177_5 (sequence is synthesized)
cagcatgtgctgggggccgggggtggtcctggcccgactcaaggggaggaacagccaccccagcccccgctggacccccagaacctggcaagaccgcctgcccctgcccagactgaggct

SEQ ID NO: 598024 - DNA, 120 bp, Artificial Sequence
  ENSG00000174177_6 (sequence is synthesized)
tcatgactggggacagctgcacacgcttggctatcaagctcatgaccaacctggcgctgggtcgaggggccttcctggcctgggatacgggcttctcggatgagcggcacggggacgtgg

SEQ ID NO: 598025 - DNA, 120 bp, Artificial Sequence
  ENSG00000174177_7 (sequence is synthesized)
tggtggtgcggcccatgcgggaccacaccctgaaggaggtcgctttctacaaccgcctgttctccgttccttctgtcttcacaccagccgtcgacaccaaggcccctgaaaaggccagca

SEQ ID NO: 598026 - DNA, 120 bp, Artificial Sequence
  ENSG00000174177_8 (sequence is synthesized)
tccaccggctgatggaggccttcatcctcaggctgcagacccagttcccctccactgtcagcactgtgtacaggacaagtgagaagctggtgaagggcccccgggatggccctgctgctg

SEQ ID NO: 598027 - DNA, 120 bp, Artificial Sequence
  ENSG00000174177_9 (sequence is synthesized)
gcgactccggcccccgctgcctcctctgcatgtgtgccctggacgtcgacgccgctgacagtgccacggcttttggggctcagacctcctcgcgtctctcccagatgcagtcacccatcc

SEQ ID NO: 598028 - DNA, 120 bp, Artificial Sequence
  ENSG00000174177_10 (sequence is synthesized)
ccctgactgagacccggacacccccggggccctgctgttctccaggggtgggctgggcccagcgctgtggccagggggcctgcaggagggaggacccccaagcctgcattgaggagcagc

SEQ ID NO: 598029 - DNA, 120 bp, Artificial Sequence
  ENSG00000174177_11 (sequence is synthesized)
tgtgctacagctgccgcgtgaacatgaaggacttgggcctggggcttgcaggagatccgggactgtctgattgaggacagtgacgacgaggcgggccagagctgagcgtgaggacgtgct

SEQ ID NO: 598030 - DNA, 120 bp, Artificial Sequence
  ENSG00000174177_12 (sequence is synthesized)
tgccgggacagcaggcagtggccacctggtacaccacactggagccggaaggcaaggacgggggactggcctctgattgtccatttgtataaataaaacattttttaattaaaaaaaaaa

SEQ ID NO: 598031 - DNA, 120 bp, Artificial Sequence
  ENSG00000174177_13 (sequence is synthesized)
cctggggtgttgactgtagcgctgaggtcagccgcaagagagaaacccctgcccaaaggaaaatggccgacaccccacagctccgccaggaagcaccgccctgcggagcgaggcctcgaa

SEQ ID NO: 598032 - DNA, 120 bp, Artificial Sequence
  ENSG00000174177_14 (sequence is synthesized)
cgtgggtggcttgagggggtgctggcaggtttcttggcccctcgacaccggcctctgttgcagccctcactggaccccctgccgccgtacatcctggctgaggcccagctccgcacacag

SEQ ID NO: 598033 - DNA, 120 bp, Artificial Sequence
  ENSG00000174177_15 (sequence is synthesized)
tggacgtcgacgccgctggtctgtgtttcatgctcttggggtgatgcggggagggagccagggagtgggtgtgggggctcagcagccccaggctccgtcaccccctctctgcttgcagac

SEQ ID NO: 598034 - DNA, 120 bp, Artificial Sequence
  ENSG00000174177_16 (sequence is synthesized)
cagctccatggtctggcaggttcttgaggtgcgtgttcaccaccccgtgggcccgggctgctgggctgagcttcaggctgggggcctcccttctcagcctgctgaggggctcttggttgg

SEQ ID NO: 598035 - DNA, 120 bp, Artificial Sequence
  ENSG00000174177_17 (sequence is synthesized)
ttcacaacaggtgcaccaatcaggagctgagtccacagtgtgtgtgtgcggcccactctcagatgtgtttacagcaggtgcacaaatcagaagctgggtccacagcgcgtgtgtgcggcc

SEQ ID NO: 598036 - DNA, 120 bp, Artificial Sequence
  ENSG00000174177_18 (sequence is synthesized)
cactctcagatgtgtttacagcaggtgcacaaatcagaagctgggtccacagtgcgtgtgtgcggcccactctcagatgtgtttacagcaggtgcaccaatcagaagctgggtccagagt

SEQ ID NO: 598037 - DNA, 120 bp, Artificial Sequence
  ENSG00000174177_19 (sequence is synthesized)
gcgtgtgtgcggcccacttgacttctgtccatttgctcaacctgcgtagaaacacagtcagtggaaagctgcatcttggctcagccatgtgtgacccgagggaagattgggaaaggggcg

SEQ ID NO: 598038 - DNA, 120 bp, Artificial Sequence
  ENSG00000174177_20 (sequence is synthesized)
ggggtttgccaggagaagcaaagggagcagcgtttgaggtggaggcggcggcccgcgcagggaggtggaggcgggcttaggctgcacacagggctcggctgggggtggtggggctgtgcc

SEQ ID NO: 598039 - DNA, 120 bp, Artificial Sequence
  ENSG00000174177_21 (sequence is synthesized)
tcctcaccttcaccccttcggccacctttactggagagtagcctctcgcgtatcagtcctgcggcctcggatggtggtggggtctgtgacctcccctacctggcaggggaggaggggcaa

SEQ ID NO: 598040 - DNA, 120 bp, Artificial Sequence
  ENSG00000174177_22 (sequence is synthesized)
aggtaagagctggcggccggacccgccaggccgcccctcgccttcccgccgcactcctgccccgaagggtcccggccgggcttgctccgggaagccccgcgtggagagcgggacctcgct

SEQ ID NO: 598041 - DNA, 120 bp, Artificial Sequence
  ENSG00000174177_23 (sequence is synthesized)
acctcgctccctagcactcggggaatgcctgtcaagcggtgacggccacctagaaggggacttactccactggctcgcgcctctcatcctagcagccactggggacggctctgccgctga

SEQ ID NO: 598042 - DNA, 120 bp, Artificial Sequence
  ENSG00000174177_24 (sequence is synthesized)
cagtgctgtccttattcggagagaactggtgccgtgaagctgtctcgcctccccgtgtcagccttgggagactgaaaagcggcctttatgtgccccctgagccggcttttctaggctaaa

SEQ ID NO: 598043 - DNA, 120 bp, Artificial Sequence
  ENSG00000174197_0 (sequence is synthesized)
gcgcgcgcgcaggctcttcagctggagcggacacacggtgtgcgaaccgaacagaataacccgcccccagcgggatgtgaaggactccgggtgaggccggccacgccccgcacggatggg

SEQ ID NO: 598044 - DNA, 120 bp, Artificial Sequence
  ENSG00000174197_1 (sequence is synthesized)
aaggccattgtgactatgtggtgattacagttgtcttactactgagtttcctactgaaatcatggaggagaaacagcagattatattggctaatcaagatggtggaacagtggcaggagc

SEQ ID NO: 598045 - DNA, 120 bp, Artificial Sequence
  ENSG00000174197_2 (sequence is synthesized)
agcacctaccttctttgtcatcttaaagcagccaggaaatggcaaaactgatcaaggaattttggttactaatcaggatgcctgtgctttggctagtagtgtgtcatcaccagtaaaatc

SEQ ID NO: 598046 - DNA, 120 bp, Artificial Sequence
  ENSG00000174197_3 (sequence is synthesized)
taaagggaagatttgccttccagctgattgtactgtgggtggaatcactgttaccctcgataacaatagtatgtggaatgagttctatcatcgaagcacagagatgattctgaccaagca

SEQ ID NO: 598047 - DNA, 120 bp, Artificial Sequence
  ENSG00000174197_4 (sequence is synthesized)
aggaagacgcatgtttccttactgtcgttattggataacaggtttagattcaaatttgaagtatattcttgtcatggatatatctcctgtggataaccatcgttataagtggaatggtcg

SEQ ID NO: 598048 - DNA, 120 bp, Artificial Sequence
  ENSG00000174197_5 (sequence is synthesized)
ttggtgggaacctagtgggaaggctgaacctcatgttttggggagggttttcattcatccagaatctccttccacaggtcattattggatgcatcaaccagtatctttctataaactcaa

SEQ ID NO: 598049 - DNA, 120 bp, Artificial Sequence
  ENSG00000174197_6 (sequence is synthesized)
acttaccaacaatacactggaccaagaagggcatatcatcttgcactctatgcatcgttacctgccgaggcttcatttggtgcctgcagaaaaggctgtggaggtgatacaattaaatgg

SEQ ID NO: 598050 - DNA, 120 bp, Artificial Sequence
  ENSG00000174197_7 (sequence is synthesized)
ccctggtgtccacacttttaccttcccacagactgaattctttgcagtaacagcttatcagaacattcagattactcagctgaaaatagattacaatccatttgccaaaggctttcggga

SEQ ID NO: 598051 - DNA, 120 bp, Artificial Sequence
  ENSG00000174197_8 (sequence is synthesized)
tgatgggctgaataataagccccagagagatggaaaacaaaagaacagctctgaccaagaagggaataatatttccagttcttctggtcatcgggtccgtcttacagaaggtcaggggtc

SEQ ID NO: 598052 - DNA, 120 bp, Artificial Sequence
  ENSG00000174197_9 (sequence is synthesized)
agagatacaaccaggtgatttggatcctttgtcaaggggtcatgaaacatcaggcaagggtttggagaagacttcccttaatataaaacgagactttcttggtttcatggatactgattc

SEQ ID NO: 598053 - DNA, 120 bp, Artificial Sequence
  ENSG00000174197_10 (sequence is synthesized)
agcacttagtgaagttcctcaattgaagcaagagatttctgaatgtcttattgccagcagttttgaagatgactcccgtgtagcctcaccgttagaccagaacggaagcttcaatgttgt

SEQ ID NO: 598054 - DNA, 120 bp, Artificial Sequence
  ENSG00000174197_11 (sequence is synthesized)
tattaaagaggaacctctagatgattatgactacgaacttggtgagtgcccagaaggggtcactgtgaaacaggaagagacagatgaagagacggatgtatactcaaacagtgatgatga

SEQ ID NO: 598055 - DNA, 120 bp, Artificial Sequence
  ENSG00000174197_12 (sequence is synthesized)
tcctatactagagaaacagctaaagaggcacaataaagttgacaacccagaagctgaccatctatcttctaaatggcttccaagcagcccatcaggtgttgctaaagctaaaatgttcaa

SEQ ID NO: 598056 - DNA, 120 bp, Artificial Sequence
  ENSG00000174197_13 (sequence is synthesized)
attagacactggaaagatgccagtagtctatctggagccctgtgctgtcaccagaagcacagttaagatttctgaactccccgataacatgctttccacatctcgaaaggataaatcttc

SEQ ID NO: 598057 - DNA, 120 bp, Artificial Sequence
  ENSG00000174197_14 (sequence is synthesized)
tatgttggcagaattggaatatttgcctacatacattgaaaattccaatgagactgccttctgcttaggcaaggaatcagaaaatggtcttagaaaacattcaccagatctcagagtggt

SEQ ID NO: 598058 - DNA, 120 bp, Artificial Sequence
  ENSG00000174197_15 (sequence is synthesized)
acaaaaatatcccttactgaaagagcctcagtggaaatatcctgatatatctgacagcattagcacagaaagaatactcgacgattcaaaggattcagttggagactcactttcaggaaa

SEQ ID NO: 598059 - DNA, 120 bp, Artificial Sequence
  ENSG00000174197_16 (sequence is synthesized)
agaggacttgggcagaaagagaacaactatgcttaagattgcaacagccgcaaaggtagtgaatgctaatcagaatgcctctccaaatgtccctggaaaaagaggaaggccacgaaaatt

SEQ ID NO: 598060 - DNA, 120 bp, Artificial Sequence
  ENSG00000174197_17 (sequence is synthesized)
gaaactctgtaaggcaggacgaccacctaagaacacaggaaagtctttaatttctacaaagaatacacctgtaagccctgggagtacctttccagatgtgaagcctgatctggaagatgt

SEQ ID NO: 598061 - DNA, 120 bp, Artificial Sequence
  ENSG00000174197_18 (sequence is synthesized)
ggatggtgttctctttgtttcctttgaatcaaaggaagctctagacattcatgcagttgatgggacaacagaagaatcttctagtctccaggcatcaaccacaaatgactcaggttacag

SEQ ID NO: 598062 - DNA, 120 bp, Artificial Sequence
  ENSG00000174197_19 (sequence is synthesized)
agcaagaatttcccagttggaaaaggaattgatagaagatttgaagactttgcggcacaagcaggtgatacatcctggtcttcaagaagtgggcttaaaattgaattcagtggatccaac

SEQ ID NO: 598063 - DNA, 120 bp, Artificial Sequence
  ENSG00000174197_20 (sequence is synthesized)
aatgagcattgatcttaaatacttgggagtacagttacctttggctccagctactagctttcctttttggaaccttacaggaaccaaccctgcctctcctgatgcgggatttccctttgt

SEQ ID NO: 598064 - DNA, 120 bp, Artificial Sequence
  ENSG00000174197_21 (sequence is synthesized)
ttctaggacagggaaaaccaatgatttcactaagatcaagggatggaggggaaaatttcatagtgcttctgcatctaggaatgaaggtggaaattcagaaagttcactgaaaaatcgttc

SEQ ID NO: 598065 - DNA, 120 bp, Artificial Sequence
  ENSG00000174197_22 (sequence is synthesized)
tgctttctgtagtgataagctagatgaatacttggaaaatgaaggcaagctgatggaaacaagcatgggtttttcttctaatgctcccacatctcctgtggtgtaccagcttcccactaa

SEQ ID NO: 598066 - DNA, 120 bp, Artificial Sequence
  ENSG00000174197_23 (sequence is synthesized)
gagtaccagttatgtacgaacacttgatagtgtactaaagaagcaatctactatttccccttctacctcttattctttgaaacctcattctgtaccccctgtctctcgaaaggcaaagtc

SEQ ID NO: 598067 - DNA, 120 bp, Artificial Sequence
  ENSG00000174197_24 (sequence is synthesized)
tcaaaacagacaggcaactttcagtggccgaactaaatcatcttataaatccattttaccataccctgtttcaccaaagcagaaatactctcatgtgattctaggagataaggttaccaa

SEQ ID NO: 598068 - DNA, 120 bp, Artificial Sequence
  ENSG00000174197_25 (sequence is synthesized)
gaattcttcaggcatcatctcagaaaatcaggcgaataactttgttgtgccaactttggatgaaaatatatttccaaagcagattagtttgcggcaggcacagcagcagcagcaacagca

SEQ ID NO: 598069 - DNA, 120 bp, Artificial Sequence
  ENSG00000174197_26 (sequence is synthesized)
acagggaagtcgccctccaggcttgtctaaatctcaggtgaagctaatggacctggaagactgtgcactttgggaaggaaaaccaaggacatacatcacagaagagcgagcagatgtatc

SEQ ID NO: 598070 - DNA, 120 bp, Artificial Sequence
  ENSG00000174197_27 (sequence is synthesized)
cttaacaactctacttacagctcaagcatccctcaaaactaaacctatccacacaatcataaggaaacgagcccctccctgcaacaatgacttctgtcgactgggttgtgtatgttccag

SEQ ID NO: 598071 - DNA, 120 bp, Artificial Sequence
  ENSG00000174197_28 (sequence is synthesized)
tctagctttggagaagcgccaacctgctcactgccgccgaccagactgcatgtttggttgtacttgtttgaaaagaaaagttgtacttgttaaaggaggatccaaaactaagcattttca

SEQ ID NO: 598072 - DNA, 120 bp, Artificial Sequence
  ENSG00000174197_29 (sequence is synthesized)
gaggaaggctgctcatcgagatccagtattttatgatactctgggagaggaggcaagggaggaggaagaaggaatcagggaggaggaggaacaattgaaagagaaaaagaagagaaagaa

SEQ ID NO: 598073 - DNA, 120 bp, Artificial Sequence
  ENSG00000174197_30 (sequence is synthesized)
gctagaatacactatatgtgagacagagcctgaacagcctgttcgacattacccattatgggtaaaagtagaaggtgaagtagatccagaaccagtttatatccccacgccttctgtcat

SEQ ID NO: 598074 - DNA, 120 bp, Artificial Sequence
  ENSG00000174197_31 (sequence is synthesized)
tgagcctatgaaaccattgttattgcctcagccagaagttttatctcctactgtgaagggcaaactgctcactggaattaaatctccacggtcatatactcccaaacccaatcctgtgat

SEQ ID NO: 598075 - DNA, 120 bp, Artificial Sequence
  ENSG00000174197_32 (sequence is synthesized)
tcgggaagaggacaaagatccagtctacttgtactttgaaagtatgatgacttgtgctcgagttcgagtatatgagcgaaaaaaagaggaccagagacaaccatcttcctcctcctcccc

SEQ ID NO: 598076 - DNA, 120 bp, Artificial Sequence
  ENSG00000174197_33 (sequence is synthesized)
atctccatcatttcagcagcaaacttcatgtcattctagccctgagaaccataataatgcaaaggaacctgattctgaacagcagcccttaaaacaactcacctgtgacttggaggatga

SEQ ID NO: 598077 - DNA, 120 bp, Artificial Sequence
  ENSG00000174197_34 (sequence is synthesized)
ttctgataaattacaagaaaagagctggaagtcttcctgcaatgaaggagaatcctcttctacttcttatatgcatcagaggtcacctggtggtcccaccaaactgattgagatcatctc

SEQ ID NO: 598078 - DNA, 120 bp, Artificial Sequence
  ENSG00000174197_35 (sequence is synthesized)
agactgcaactgggaggaagatcggaacaagattttgagcatcttatcccagcacatcaatagcaacatgccacaatcacttaaggtgggcagcttcatcattgagttggcttctcagcg

SEQ ID NO: 598079 - DNA, 120 bp, Artificial Sequence
  ENSG00000174197_36 (sequence is synthesized)
aaagagccggggtgagaagaaccctcctgtttattcttctcgtgtgaaaatctctatgccatcatgtcaagaccaagatgatatggctgagaaatctggatcagagactcctgatggtcc

SEQ ID NO: 598080 - DNA, 120 bp, Artificial Sequence
  ENSG00000174197_37 (sequence is synthesized)
attgtcccctgggaaaatggaggatatctctcctgtgcagacagatgccctggattcagtgagggagagattacatggaggcaaaggtctgcctttttatgcagggctttctcctgcagg

SEQ ID NO: 598081 - DNA, 120 bp, Artificial Sequence
  ENSG00000174197_38 (sequence is synthesized)
gaagcttgtggcctataaacgtaaacccagttcaagtacatctgggcttatccaggtagcatccaatgccaaggtggctgcatccaggaaaccacgtaccctgttgccttcaacatccaa

SEQ ID NO: 598082 - DNA, 120 bp, Artificial Sequence
  ENSG00000174197_39 (sequence is synthesized)
ttccaaaatggcatcctcctctggcactgcaacaaatcgccctgggaagaatctgaaggcgtttgtcccagcaaaacggccaattgcggctcgaccctctcctggtggtgtgttcacaca

SEQ ID NO: 598083 - DNA, 120 bp, Artificial Sequence
  ENSG00000174197_40 (sequence is synthesized)
gtttgtgatgagtaaagttggagccttgcagcagaagatacctggagttagcacaccccaaaccctggcagggacacagaagttcagtatcagaccttctccagtaatggtcgtcacacc

SEQ ID NO: 598084 - DNA, 120 bp, Artificial Sequence
  ENSG00000174197_41 (sequence is synthesized)
tgtggtttcttctgagccagttcaggtgtgcagccctgtgactgctgctgtcactactaccacccctcaagtgtttttagaaaatactactgctgtgacacctatgactgctatttctga

SEQ ID NO: 598085 - DNA, 120 bp, Artificial Sequence
  ENSG00000174197_42 (sequence is synthesized)
cgtggaaactaaagaaactacttattcttctggtgccaccactacaggggttgttgaggtctctgaaactaataccagcacctctgtaacatctacccagtctacagccactgtgaacct

SEQ ID NO: 598086 - DNA, 120 bp, Artificial Sequence
  ENSG00000174197_43 (sequence is synthesized)
taccaaaaccactgggataactacccctgtggcttcagttgcttttcctaagtctttggtagcatctccttcaaccataactcttcctgttgcttccactgcttccacctccttagtcgt

SEQ ID NO: 598087 - DNA, 120 bp, Artificial Sequence
  ENSG00000174197_44 (sequence is synthesized)
ggtgactgcagctgcatcttcctccatggtgaccacaccaacttcatctctgggctctgttcctattatactctcaggaattaatgggagtccaccagtgagccagagaccagaaaatgc

SEQ ID NO: 598088 - DNA, 120 bp, Artificial Sequence
  ENSG00000174197_45 (sequence is synthesized)
tgctcaaattccagtggctactccacaggtctctcctaacacagtgaaacgtgctggacctcgattgttgttgattccagtgcagcagggttctcctactcttagacctgtctcaaacac

SEQ ID NO: 598089 - DNA, 120 bp, Artificial Sequence
  ENSG00000174197_46 (sequence is synthesized)
acaacttcagggacatcggatggtcttgcagcctgttaggagtccaagtggaatgaacttattcaggcaccctaatgggcagattgtccagcttctacctttgcatcagcttcgaggctc

SEQ ID NO: 598090 - DNA, 120 bp, Artificial Sequence
  ENSG00000174197_47 (sequence is synthesized)
taatacccagcccaacttacagcctgtcatgtttcggaacccagggtctgtgatgggaatccggttacctgctccttccaaaccctctgagactccgccatcttccacttcgtcctctgc

SEQ ID NO: 598091 - DNA, 120 bp, Artificial Sequence
  ENSG00000174197_48 (sequence is synthesized)
tttctctgtcatgaatcctgtaattcaagctgttgggtcttcttcagcagtgaatgttatcactcaggcaccatcattgctttcctctggagctagttttgtgtctcaggctggtacatt

SEQ ID NO: 598092 - DNA, 120 bp, Artificial Sequence
  ENSG00000174197_49 (sequence is synthesized)
gaccctgaggatttctcctcctgaaccacaaagctttgcaagtaaaacaggctctgaaaccaaaataacttatagctcaggaggacagcctgttggtacagccagtcttattcctctcca

SEQ ID NO: 598093 - DNA, 120 bp, Artificial Sequence
  ENSG00000174197_50 (sequence is synthesized)
tgttcctagctccattcttcagcatgttgcttcccttcagatgaagagagaatctcagaatccagaccagaaagatgaaacaaactcaataaaaagagagcaagaaacgaagaaggttct

SEQ ID NO: 598094 - DNA, 120 bp, Artificial Sequence
  ENSG00000174197_51 (sequence is synthesized)
acagtcagaaggagaggctgtagaccctgaggctaatgtaataaaacaaaactcaggagctgctacctcagaagaaactctgaatgattccttggaagataggggtgatcatttggatga

SEQ ID NO: 598095 - DNA, 120 bp, Artificial Sequence
  ENSG00000174197_52 (sequence is synthesized)
agaatgccttccagaagaaggttgtgcaactgtcaaaccatctgagcattcctgtatcactgggtcacatacagatcaagattataaagatgttaatgaagaatatggggctaggaatcg

SEQ ID NO: 598096 - DNA, 120 bp, Artificial Sequence
  ENSG00000174197_53 (sequence is synthesized)
taagagttccaaagaaaaagtggctgttctggaagttaggaccatttctgaaaaagccagtaataagacagtccaaaatttaagtaaagtacagcatcaaaaacttggtgatgtgaaggt

SEQ ID NO: 598097 - DNA, 120 bp, Artificial Sequence
  ENSG00000174197_54 (sequence is synthesized)
ggaacagcagaaaggatttgacaatccagaagaaaactcaagtgaatttccagtcacctttaaggaagaaagtaaatttgaattgtcaggaagcaaagttatggagcagcaatctaatct

SEQ ID NO: 598098 - DNA, 120 bp, Artificial Sequence
  ENSG00000174197_55 (sequence is synthesized)
acagccagaggccaaagagaaggaatgtggagactctctggagaaagacagggaaagatggagaaaacatctgaagggccccttaaccaggaaatgtgttggagcttcacaggaatgtaa

SEQ ID NO: 598099 - DNA, 120 bp, Artificial Sequence
  ENSG00000174197_56 (sequence is synthesized)
gaaagaggcagacgagcagttaattaaagaaacaaagacatgtcaggaaaattcagatgtgtttcagcaagaacaaggcatctctgacttacttggaaaaagtggaattactgaagatgc

SEQ ID NO: 598100 - DNA, 120 bp, Artificial Sequence
  ENSG00000174197_57 (sequence is synthesized)
cagagttttgaaaactgaatgtgattcttggagtaggatttctaatccttcagccttctccattgttcctaggagagctgcaaaaagcagcagagggaatggacattttcagggtcactt

SEQ ID NO: 598101 - DNA, 120 bp, Artificial Sequence
  ENSG00000174197_58 (sequence is synthesized)
actgctacctggagaacagatacaaccaaagcaagagaagaagggtgggagaagcagtgctgacttcactgttttggatttggaagaagatgatgaagatgataatgagaaaactgatga

SEQ ID NO: 598102 - DNA, 120 bp, Artificial Sequence
  ENSG00000174197_59 (sequence is synthesized)
ttctattgatgaaattgtggatgttgtttctgactaccagagtgaggaggttgatgatgtagaaaagaataactgtgtagaatacattgaggatgatgaggagcacgtggacattgagac

SEQ ID NO: 598103 - DNA, 120 bp, Artificial Sequence
  ENSG00000174197_60 (sequence is synthesized)
tgtagaagagctctcagaggaaattaatgttgctcacctgaagaccacagcggcccacacacagtcattcaaacagccgtcctgtactcacatctctgcagatgaaaaagcagctgaaag

SEQ ID NO: 598104 - DNA, 120 bp, Artificial Sequence
  ENSG00000174197_61 (sequence is synthesized)
gagtcgaaaggctccaccaattcctctaaaactgaagcctgattactggagtgacaaactacagaaagaagcagaagcgtttgcttattatcgccggacacacactgccaatgagcggcg

SEQ ID NO: 598105 - DNA, 120 bp, Artificial Sequence
  ENSG00000174197_62 (sequence is synthesized)
gcggcgtggtgaaatgagggatctctttgagaaattaaagatcacattgggattacttcattcttccaaggtttccaaaagtctcattcttactcgagccttcagtgaaattcagggact

SEQ ID NO: 598106 - DNA, 120 bp, Artificial Sequence
  ENSG00000174197_63 (sequence is synthesized)
aacagatcaggcagacaaattgataggacagaaaaatctcctgactcgaaaacggaatattctgatacggaaagtatcgtctctttcaggtaagacagaagaagtggtcctgaagaagct

SEQ ID NO: 598107 - DNA, 120 bp, Artificial Sequence
  ENSG00000174197_64 (sequence is synthesized)
agagtatatttatgcaaaacagcaagcactagaggcacaaaaaagaaaaaagaagatgggatcagatgagtttgacatatctcccagaattagcaaacagcaggaaggatcttctgcatc

SEQ ID NO: 598108 - DNA, 120 bp, Artificial Sequence
  ENSG00000174197_65 (sequence is synthesized)
atctgtagatcttggacagatgtttataaataacaggagggggaaacctttgattctttccagaaaaaaagaccaggccacagaaaatacctcacccttgaacactccacacacctctgc

SEQ ID NO: 598109 - DNA, 120 bp, Artificial Sequence
  ENSG00000174197_66 (sequence is synthesized)
caaccttgtgatgactccgcaagggcaattgctcaccctaaaaggtcccctattctcaggaccagtggtagctgtttctcctgatctcttagaatctgatcttaagcctcaagttgccgg

SEQ ID NO: 598110 - DNA, 120 bp, Artificial Sequence
  ENSG00000174197_67 (sequence is synthesized)
tagtgctgtggctctaccagaaaatgacgacttatttatgatgccacgaattgttaatgtgacatcattggccacagagggaggtttggtagatatgggtggcagcaaatatcctcatga

SEQ ID NO: 598111 - DNA, 120 bp, Artificial Sequence
  ENSG00000174197_68 (sequence is synthesized)
agttcctgatagcaagccatctgaccatctgaaagacaccgtcaggaatgaagataattccttagaggataagggtagaatctcttccagaggaaacagagatggcagagtgacgttggg

SEQ ID NO: 598112 - DNA, 120 bp, Artificial Sequence
  ENSG00000174197_69 (sequence is synthesized)
tccaacgcaggtttttctggcaaacaaagattctggttatccacaaatagttgacgtttccaatatgcagaaagcacaagagttcttacctaaaaagatttctggtgatatgagagggat

SEQ ID NO: 598113 - DNA, 120 bp, Artificial Sequence
  ENSG00000174197_70 (sequence is synthesized)
tcagtataaatggaaagagagtgaatcaagaggggagagagtgaagtcaaaggattcttcatttcataaattaaagatgaaagatctcaaggactcaagcatagagatggaactgaggaa

SEQ ID NO: 598114 - DNA, 120 bp, Artificial Sequence
  ENSG00000174197_71 (sequence is synthesized)
agtaacatcagctatagaggaagcagctcttgattccagtgaactgctgactaacatggaagatgaggatgatactgatgagacactgacttcactgctcaatgaaattgcctttcttaa

SEQ ID NO: 598115 - DNA, 120 bp, Artificial Sequence
  ENSG00000174197_72 (sequence is synthesized)
tcaacaactaaatgatgactctgttggcctggctgaactacccagctctatggatacagagttcccaggggatgctcggcgggcttttattagtaaggttcctcctggaagcagagcaac

SEQ ID NO: 598116 - DNA, 120 bp, Artificial Sequence
  ENSG00000174197_73 (sequence is synthesized)
tttccaggttgagcacttgggaactggtttgaaagagttgcctgatgttcaaggggagagtgactctatcagtcccctcctcttgcacttggaagacgatgacttttctgagaatgaaaa

SEQ ID NO: 598117 - DNA, 120 bp, Artificial Sequence
  ENSG00000174197_74 (sequence is synthesized)
acaacttgcagaaccagcctctgagccagatgtccttaagattgttattgactctgaaataaaggattccctcctttccaacaagaaagctattgatggagggaagaatacttctggcct

SEQ ID NO: 598118 - DNA, 120 bp, Artificial Sequence
  ENSG00000174197_75 (sequence is synthesized)
ccctgcagagcccgaaagtgtgtcctcaccccccaccctacacatgaagactggcttggagaacagcaacagcacagacactttgtggaggcctatgccaaagttggcccctctaggttt

SEQ ID NO: 598119 - DNA, 120 bp, Artificial Sequence
  ENSG00000174197_76 (sequence is synthesized)
aaaagtagctaatccttccagtgatgcagatggtcagagtctcaaggtgatgccttgtttggcacctatagctgccaaagttgggtcagttggacacaaaatgaacttaacagggaatga

SEQ ID NO: 598120 - DNA, 120 bp, Artificial Sequence
  ENSG00000174197_77 (sequence is synthesized)
ccaggaaggccgggaaagcaaggtgatgcctacattggcacctgttgtggctaaattgggcaactcgggggcctcaccaagttctgcagggaaatgaacttacttgtccttaagcagaag

SEQ ID NO: 598121 - DNA, 120 bp, Artificial Sequence
  ENSG00000174197_78 (sequence is synthesized)
ccaggctgtgaggggaaatagatctcacctcctttctctgcaggcatctgtttgtttgtgtcttagaacttggatccttgacttcaatgatgcagtggataatgatgggagaaagggggt

SEQ ID NO: 598122 - DNA, 120 bp, Artificial Sequence
  ENSG00000174197_79 (sequence is synthesized)
agggtgctgaccctggtataagaagtactctgaaattctgatcatgttaaaatgtgttacctcacttgtggtgctgggtcccctcatcctctctaagaagatgtgatccattactgaaca

SEQ ID NO: 598123 - DNA, 120 bp, Artificial Sequence
  ENSG00000174197_80 (sequence is synthesized)
tgaggtgcccctcttacccaaggaatttataacatgactctggctccacagtggtttctagttcttcccccacaagcgaaagagctgtttgcaactttggagttgctgtagactgaactg

SEQ ID NO: 598124 - DNA, 120 bp, Artificial Sequence
  ENSG00000174197_81 (sequence is synthesized)
tagcttgtagctgttgaattaagtccaaaatctaaggaatgcgatggacttgtgcaaagggatccagaagagacactttttagttgatgtttcaagaatagggagagagaggatgggtac

SEQ ID NO: 598125 - DNA, 120 bp, Artificial Sequence
  ENSG00000174197_82 (sequence is synthesized)
catggaataccaaagtgaaggactttgtgtcattcagtaaaattttcttttttcatatcctaagtagctcccattccctcaccttttcaatcagaattaacaaattcaagccttcagtaa

SEQ ID NO: 598126 - DNA, 120 bp, Artificial Sequence
  ENSG00000174197_83 (sequence is synthesized)
agtagggatgcttttaacttttattattaattattttgagatcttaaaaaaatagtagttctcccttattatttttgtgggcattgaaaagctcatttcacagtaccagagatttttact

SEQ ID NO: 598127 - DNA, 120 bp, Artificial Sequence
  ENSG00000174197_84 (sequence is synthesized)
gggagtatatattttggaggtaggcatagagggagccctaccccttccacaaattacgttactcaagagacagctaaaataaaatgcattatctccccagaccagagacagtggccaaaa

SEQ ID NO: 598128 - DNA, 120 bp, Artificial Sequence
  ENSG00000174197_85 (sequence is synthesized)
taaaaaatcatggggctggaaatttcccaaatcaaaccagcctcctggtgcttgaaggtttcattcactattacctgcacaggatgtaaagaaaagtcacagtaggcactctttaccagg

SEQ ID NO: 598129 - DNA, 120 bp, Artificial Sequence
  ENSG00000174197_86 (sequence is synthesized)
gaaataaggcagtatttgaatcacaagatatattttttatctgcaaccatggatccaatgatctgtagagctttttcactcattaactgtcaggatatgaaggactgacagtctgtaaag

SEQ ID NO: 598130 - DNA, 120 bp, Artificial Sequence
  ENSG00000174197_87 (sequence is synthesized)
atatttatatttttgtatagttgttttcatagatttctcaaaggctgaagttttcaacctagaagatgagatttgtattgagtatagaaatgatgtttcctatctagtttgtaaataatc

SEQ ID NO: 598131 - DNA, 120 bp, Artificial Sequence
  ENSG00000174197_88 (sequence is synthesized)
atggtgcacttgaggggtctcttggaaactcctagggggtcaagaatcactattctgaaactgtatagactgggatttagctgctgcattttgcctttcttaaataattatattttggaa

SEQ ID NO: 598132 - DNA, 120 bp, Artificial Sequence
  ENSG00000174197_89 (sequence is synthesized)
tgtaacccctgttctgtcttcattgacaggatttgcttgtgttgttaaaacactaacacaagagcttccagtgcctgggccgtgcctaggtgatgctatttcttctatatctcctgtctt

SEQ ID NO: 598133 - DNA, 120 bp, Artificial Sequence
  ENSG00000174197_90 (sequence is synthesized)
ctttatcccaaatcccactcagcatatcttcagacctaggttgtaagaccaactttggattggatctagccagtgaattattatttccatggttggttccctttctgttaactctggtaa

SEQ ID NO: 598134 - DNA, 120 bp, Artificial Sequence
  ENSG00000174197_91 (sequence is synthesized)
tcaacagattgaaaacggtggaagaacttctgaaaattgcagtgggagcaaattcttgttggttttgtgctgcttgcctttctagatctgctcatcagcacttaaccttccctcctctaa

SEQ ID NO: 598135 - DNA, 120 bp, Artificial Sequence
  ENSG00000174197_92 (sequence is synthesized)
aggttactaaagaagcctgaagtaggtaaagagtgctcctcagcttcttatccttccactctttacccagcagatttcattcaatgccttagccaaggagtccagcacctgtctcccctg

SEQ ID NO: 598136 - DNA, 120 bp, Artificial Sequence
  ENSG00000174197_93 (sequence is synthesized)
ctaataattgtccttagagatgctagtactttaatccaggtatagcagtttcccgttattttcttgcttgtcgttcccctacatttcctcctgatttcccaagactctctttgtggcttt

SEQ ID NO: 598137 - DNA, 120 bp, Artificial Sequence
  ENSG00000174197_94 (sequence is synthesized)
tgagggtcagccaaggagcaggcaagtgagtgaacaatcctcaggaaaagaaggaccattttagcttaacacttccttttttttttttttttttttaagaagaatataggtaaacaggta

SEQ ID NO: 598138 - DNA, 120 bp, Artificial Sequence
  ENSG00000174197_95 (sequence is synthesized)
atgattcttgattggagataccatttgactcttgatgagagttgtacgaagatggaaatgagggatgattccaggcgttttagggggaaggctgcagataccattctaacccccaagata

SEQ ID NO: 598139 - DNA, 120 bp, Artificial Sequence
  ENSG00000174197_96 (sequence is synthesized)
ctgtgttctcaagacctcttagaactaggtgttgtcagggataatttgaggagggcttagtcttcagaacaatcctgcagtcttgacagaaatctaaaatctccaaaaactcctaccctt

SEQ ID NO: 598140 - DNA, 120 bp, Artificial Sequence
  ENSG00000174197_97 (sequence is synthesized)
taaccttaccctagggggaactgatctatgaatattacatgtgtgattatgaaaggtgaagttgagtgagaggagttgaggaacgtggaagacagtgagctctcaccctaacactataag

SEQ ID NO: 598141 - DNA, 120 bp, Artificial Sequence
  ENSG00000174197_98 (sequence is synthesized)
taacactataagaagcatgatctcaatagaccaataattcacctttttatacatctgtaaataaatggaatgtttttaagaatataattatgtcagatttagcattttcttttatatatt

SEQ ID NO: 598142 - DNA, 120 bp, Artificial Sequence
  ENSG00000174197_99 (sequence is synthesized)
ctttccttttctgctttcgaaaagtgactatttttttagaaatctaagaacagaagtttggtgattgaaaggtagaatatataaacctgaaataaagcagttaaaacaattaaagcagaa

SEQ ID NO: 598143 - DNA, 120 bp, Artificial Sequence
  ENSG00000174197_100 (sequence is synthesized)
gagttacccgcaggctaagttgctattgggacagatgggggcattgcatccagccaataggctagctgcttatatcacaggcaggttgcgaccctcagtcctggacctctcaaccctcag

SEQ ID NO: 598144 - DNA, 120 bp, Artificial Sequence
  ENSG00000174197_101 (sequence is synthesized)
gtttctgatatgccatttgggggaggttttcgatgttctaatccttgtagcatgttttacatggaggcttcaaaattgtgtgcaacctgatggcaagtatttgttttagaagtcattcta

SEQ ID NO: 598145 - DNA, 120 bp, Artificial Sequence
  ENSG00000174197_102 (sequence is synthesized)
aaatcattctggtgtcagtatgagcaaggcagttcacctgttaaccttggggagtaaaggtacacaaacacagtcttttagtggtaaaggacagtaggtgttcttaagggaagatatgtt

SEQ ID NO: 598146 - DNA, 120 bp, Artificial Sequence
  ENSG00000174197_103 (sequence is synthesized)
aaagagtttgacagttaacaaaaacgtttaaaggaatcctttagacatccaactactcctatctattaaggtcactaacagatcaagtccagttatataagcttcatacaaattgttcac

SEQ ID NO: 598147 - DNA, 120 bp, Artificial Sequence
  ENSG00000174197_104 (sequence is synthesized)
tttgtgtgattttatagtacatacaatagttttttcgtggaattacagatgaaatacctgatgctaggctcttctataacaagtttgaaaatgttttgaacacacaagaaaggcagacaa

SEQ ID NO: 598148 - DNA, 120 bp, Artificial Sequence
  ENSG00000174197_105 (sequence is synthesized)
tccatatgttatttttggtttagtggtttagataattttttttctaactatactggttgagatatttgaaatcaaatagggtgatgcactttaaaaacgggtctagaaaatagtgacagc

SEQ ID NO: 598149 - DNA, 120 bp, Artificial Sequence
  ENSG00000174197_106 (sequence is synthesized)
ggtacttttatagagaatgactgataaccaagaatcagaatacatttcttgcacaaaactgttggttttgaagaaggtgctgtaaaggcatcagtacttcatgtcactgtattatcacta

SEQ ID NO: 598150 - DNA, 88 bp, Artificial Sequence
  ENSG00000174197_107 (sequence is synthesized)
tgaggcaagagaatggcttgaaagccactgcagtccagtctggggacagagcaagactctgtttaaaaaaaaaaaaaaaaaaaaaaaa

SEQ ID NO: 598151 - DNA, 120 bp, Artificial Sequence
  ENSG00000174197_108 (sequence is synthesized)
aaaaaaaaaaaaaaaaaaaaaaagcgtggctttggcctaagactggaagtacccagattccagacttaagaaatcctcattaaaatgctttcagttgtttttcatgaaagaaatgaccag

SEQ ID NO: 598152 - DNA, 120 bp, Artificial Sequence
  ENSG00000174197_109 (sequence is synthesized)
tgatactttgtaaaccatttatctggccatgagtgatcaggtgagaaaaccgttagcggacaccagaatgatctggagaggattagggacggctcttgtgggcacatttttactctagtt

SEQ ID NO: 598153 - DNA, 120 bp, Artificial Sequence
  ENSG00000174197_110 (sequence is synthesized)
tcatgggtggagatggcatctgccgtggtctgcagcatgcaagtaaagacaccaggtggcaccatttattagctttcaatcccatggagaggtcccatcatgtaactaccaagaggttga

SEQ ID NO: 598154 - DNA, 77 bp, Artificial Sequence
  ENSG00000174197_111 (sequence is synthesized)
actgcaagctctgcctcccgggtttacgccattgcactgtgcccggctaatttttttgtatttttttgtagagacag

SEQ ID NO: 598155 - DNA, 120 bp, Artificial Sequence
  ENSG00000174197_112 (sequence is synthesized)
atggacacaaatatctaggtgcagggaaaattaaagctgagatattcagactcactgccagttggaggaaaaaaatcagttataacgcattttttggaatagagggaaataatttgataa

SEQ ID NO: 598156 - DNA, 120 bp, Artificial Sequence
  ENSG00000174197_113 (sequence is synthesized)
gtacaactttttgtttgaggtgtagctaatgttagacatgactgagctgttctacacataagtgttgaatagtgatggtggtgcattaagaggatgggaagactatgggatgagttggaa

SEQ ID NO: 598157 - DNA, 120 bp, Artificial Sequence
  ENSG00000174197_114 (sequence is synthesized)
attttgagacaaatctaaactctactaatttctattgttgtaaactctgctggtagaaaagatattaagtaggaaagcagtcttggaagcatggttttgagatccattgtgtttccaact

SEQ ID NO: 598158 - DNA, 120 bp, Artificial Sequence
  ENSG00000174197_115 (sequence is synthesized)
gcaatcattgatctcagctgttgcacagtgcctttgcatgtaaaggtgctcaataaatatttgaattgatgagcaaatgtttagactgtttcccaggaacttataccttatttgcatgtt

SEQ ID NO: 598159 - DNA, 120 bp, Artificial Sequence
  ENSG00000174197_116 (sequence is synthesized)
atgcctagggtgaattttaaaatttgatctaatgagtatagtgctaaacagacaactatataacgtctattccccagacatctagaatttcagaagctggcaaacactatgtatagatgt

SEQ ID NO: 598160 - DNA, 120 bp, Artificial Sequence
  ENSG00000174197_117 (sequence is synthesized)
ttaggacatataaaagtagaataaagtgttaaatagtgtatggatgatgaaatacttatgaagagttaactgcattttggaggattgggatggcaagtagagtcatgcgtcacttaatga

SEQ ID NO: 598161 - DNA, 120 bp, Artificial Sequence
  ENSG00000174197_118 (sequence is synthesized)
tggggatacgttctgagaaatgcaccttgggtggttttgttctgcaaacatcatagagtgtactgtacttaaacaaacctagatggtgttgcttaaccacacacctaggctgtgttgctc

SEQ ID NO: 598162 - DNA, 120 bp, Artificial Sequence
  ENSG00000174197_119 (sequence is synthesized)
ctaggctacaactctgtacagcatgttaactgcactgaatatcataggcagttgtaacacgtggtgtttgtgtgtctacacataggaaaggtatggtaaaaatatgatattataatttaa

SEQ ID NO: 598163 - DNA, 120 bp, Artificial Sequence
  ENSG00000174197_120 (sequence is synthesized)
tgggatcatgtggtcattgaaatgtatacagtgcatgactgtaaatctgagtggagaaaagtgaataatgcttctgttcacattagacctgggactgttattttctgaggaattaatgaa

SEQ ID NO: 598164 - DNA, 120 bp, Artificial Sequence
  ENSG00000174197_121 (sequence is synthesized)
gaatgggaatagcctatatagcttattcctatattggtatctcaaaggcagtgtagtacctagacaataaaagttggactgaattgtgaagaattaaaaatgtgtgggccgggcatggtg

SEQ ID NO: 598165 - DNA, 120 bp, Artificial Sequence
  ENSG00000174197_122 (sequence is synthesized)
actgtttgtgaaattttttccccaaggcaagatttcattcatcatgtataaagtttttgttggaaaatagaagaaatcctttctgagagtgtttataacttaccaagttcaatttctcag

SEQ ID NO: 598166 - DNA, 120 bp, Artificial Sequence
  ENSG00000174197_123 (sequence is synthesized)
gaagatgtgaaagcagttattgcagtagcagcccagatctagcctcagaggtttcccagctactgcgaacaaatgcatgttgtgtgctaaatgaaaagaagataaaaaatttttttctac

SEQ ID NO: 598167 - DNA, 120 bp, Artificial Sequence
  ENSG00000174197_124 (sequence is synthesized)
aaattacactgttggcattgtaagagttagatttgaaggaaggatagactggtagtaagatgaccaattgagaggctgttacaacagtccagacaaaaggtaatgagtgcctgaaatagg

SEQ ID NO: 598168 - DNA, 120 bp, Artificial Sequence
  ENSG00000174197_125 (sequence is synthesized)
actgaaacctaaaggatttaaatgatttattaaagacagaagctttttcagaagagcactaaggcataatacatttaattggatgcctaggtttaagattatgacttaaatggcttagta

SEQ ID NO: 598169 - DNA, 120 bp, Artificial Sequence
  ENSG00000174197_126 (sequence is synthesized)
gttctttaggctgtgtcaatcaagcatcatttattgagcttttattctttgagacttgtctggttttatgggaaggctggcttaaatatttgggggataggtgcttgagagtccctaccg

SEQ ID NO: 598170 - DNA, 120 bp, Artificial Sequence
  ENSG00000174197_127 (sequence is synthesized)
agttagatttttaaaatcccgaaaccactactcccatttgacctcagtcaatttctatgacgttttctatgtgaggtggttgtagcttctctggtagatgttaatcagaaactgggaatg

SEQ ID NO: 598171 - DNA, 120 bp, Artificial Sequence
  ENSG00000174197_128 (sequence is synthesized)
ggtgaccttagaactagaggagaacttattcacttgcatatagagagatgtttttgtttttggagaaaaactggaaaataccatcatattctagtaccattttgccttgagttgctttta

SEQ ID NO: 598172 - DNA, 120 bp, Artificial Sequence
  ENSG00000174197_129 (sequence is synthesized)
tatccaaaaattaaatatttagtctctggaatttatattctagactttggtcttcgtcctttgtaatatgacctttatggcctatttttattattttcctgaagttttttttataggatt

SEQ ID NO: 598173 - DNA, 120 bp, Artificial Sequence
  ENSG00000174197_130 (sequence is synthesized)
cctatttagggttgttgtatttacttaaataagtaactgtcaggtattgatacagtgcaggagttgtacaaacgttttctgtaaaaggccagatagtaaatagttttagactttgcagag

SEQ ID NO: 598174 - DNA, 120 bp, Artificial Sequence
  ENSG00000174197_131 (sequence is synthesized)
agagagctagatggctctctgttgcgactaattgactgctgttgtagtataaaagcagctgtattccattaaaactttagtaaaaaagtccaggtgcggtggctcacacccataatccca

SEQ ID NO: 598175 - DNA, 120 bp, Artificial Sequence
  ENSG00000174197_132 (sequence is synthesized)
tgtctcgggttaaaaaaaaaaaagaagttgttagtgggctgtggtttgctgacccctgacataaggtctgatgtaaaacatggggagatcataaccagctgcctgtggagtgccctaaaa

SEQ ID NO: 598176 - DNA, 120 bp, Artificial Sequence
  ENSG00000174197_133 (sequence is synthesized)
tctaaactgtgtccttcttttcaggagcagatgacagccgtctgcactgattgtcatacaactgcttgttttacaatctcacttccttgagattcattctgcctctgtgttatctggtcc

SEQ ID NO: 598177 - DNA, 120 bp, Artificial Sequence
  ENSG00000174197_134 (sequence is synthesized)
ttttctgttattgcttaactgctttatgcacataaaataagacaaaaagattactgttttaaaaatctaaaatgttgaaatattttattttagcgatggagtcttactctgtcgcccagg

SEQ ID NO: 598178 - DNA, 66 bp, Artificial Sequence
  ENSG00000174197_135 (sequence is synthesized)
acctctgctgccaccgccccagctaatttttgtatttacgtagagatggggtttcaccatcttggc

SEQ ID NO: 598179 - DNA, 79 bp, Artificial Sequence
  ENSG00000174197_136 (sequence is synthesized)
tttttgtatttactgttcttatattggttatttgagtacctccattgtctcatttataaaggaggatcttgctctaaaa
